United States Patent Application Publication US 2014/0004565 A1 - sequence listing, part 9

SEQ ID NO: 89397 - RNA, 19 nt, Artificial Sequence
  Description of Artificial Sequence: Synthetic oligonucleotide
uauaacucauguuugcuaa

SEQ ID NO: 89398 - RNA, 19 nt, Artificial Sequence
  Description of Artificial Sequence: Synthetic oligonucleotide
aauccuaguuucucuauga

SEQ ID NO: 89399 - RNA, 19 nt, Artificial Sequence
  Description of Artificial Sequence: Synthetic oligonucleotide
agauuggucacuuucugug

SEQ ID NO: 89400 - RNA, 19 nt, Artificial Sequence
  Description of Artificial Sequence: Synthetic oligonucleotide
uugaauggcaaacacucac

SEQ ID NO: 89401 - RNA, 19 nt, Artificial Sequence
  Description of Artificial Sequence: Synthetic oligonucleotide
caccagugaaccaauaagg

SEQ ID NO: 89402 - RNA, 19 nt, Artificial Sequence
  Description of Artificial Sequence: Synthetic oligonucleotide
aacgcaaaugcugauuuag

SEQ ID NO: 89403 - RNA, 19 nt, Artificial Sequence
  Description of Artificial Sequence: Synthetic oligonucleotide
uacuacuauaccuccauca

SEQ ID NO: 89404 - RNA, 19 nt, Artificial Sequence
  Description of Artificial Sequence: Synthetic oligonucleotide
acuuuaaggagauuauacu

SEQ ID NO: 89405 - RNA, 19 nt, Artificial Sequence
  Description of Artificial Sequence: Synthetic oligonucleotide
ugaguuaccuguugcauca

SEQ ID NO: 89406 - RNA, 19 nt, Artificial Sequence
  Description of Artificial Sequence: Synthetic oligonucleotide
aguacaacaauugguuugg

SEQ ID NO: 89407 - RNA, 19 nt, Artificial Sequence
  Description of Artificial Sequence: Synthetic oligonucleotide
uuguagaauggcaauggug

SEQ ID NO: 89408 - RNA, 19 nt, Artificial Sequence
  Description of Artificial Sequence: Synthetic oligonucleotide
uuauagugagucacaaugu

SEQ ID NO: 89409 - RNA, 19 nt, Artificial Sequence
  Description of Artificial Sequence: Synthetic oligonucleotide
cuauuaucugacuuacacc

SEQ ID NO: 89410 - RNA, 19 nt, Artificial Sequence
  Description of Artificial Sequence: Synthetic oligonucleotide
uuuugugaacauaguaucu

SEQ ID NO: 89411 - RNA, 19 nt, Artificial Sequence
  Description of Artificial Sequence: Synthetic oligonucleotide
cuuucguucaccauggaca

SEQ ID NO: 89412 - RNA, 19 nt, Artificial Sequence
  Description of Artificial Sequence: Synthetic oligonucleotide
uguagauuggucacuuucu

SEQ ID NO: 89413 - RNA, 19 nt, Artificial Sequence
  Description of Artificial Sequence: Synthetic oligonucleotide
uaugaauuguugacuauaa

SEQ ID NO: 89414 - RNA, 19 nt, Artificial Sequence
  Description of Artificial Sequence: Synthetic oligonucleotide
cugaaugccguucaccugg

SEQ ID NO: 89415 - RNA, 19 nt, Artificial Sequence
  Description of Artificial Sequence: Synthetic oligonucleotide
ugacuuacaccuauucagc

SEQ ID NO: 89416 - RNA, 19 nt, Artificial Sequence
  Description of Artificial Sequence: Synthetic oligonucleotide
aucccuaggguuuaaagcu

SEQ ID NO: 89417 - RNA, 19 nt, Artificial Sequence
  Description of Artificial Sequence: Synthetic oligonucleotide
ucugacuuacaccuauuca

SEQ ID NO: 89418 - RNA, 19 nt, Artificial Sequence
  Description of Artificial Sequence: Synthetic oligonucleotide
uggaacauuggcugaauug

SEQ ID NO: 89419 - RNA, 19 nt, Artificial Sequence
  Description of Artificial Sequence: Synthetic oligonucleotide
aaacaauacuaaaucccgg

SEQ ID NO: 89420 - RNA, 19 nt, Artificial Sequence
  Description of Artificial Sequence: Synthetic oligonucleotide
ucuauuaguugcuuuaguu

SEQ ID NO: 89421 - RNA, 19 nt, Artificial Sequence
  Description of Artificial Sequence: Synthetic oligonucleotide
uggauuuauaaauagccuu

SEQ ID NO: 89422 - RNA, 19 nt, Artificial Sequence
  Description of Artificial Sequence: Synthetic oligonucleotide
uguaucgccaccacaugcc

SEQ ID NO: 89423 - RNA, 19 nt, Artificial Sequence
  Description of Artificial Sequence: Synthetic oligonucleotide
gacuuuaaggagauuauac

SEQ ID NO: 89424 - RNA, 19 nt, Artificial Sequence
  Description of Artificial Sequence: Synthetic oligonucleotide
aacucaugaucaaauauca

SEQ ID NO: 89425 - RNA, 19 nt, Artificial Sequence
  Description of Artificial Sequence: Synthetic oligonucleotide
ucauguaguuuucuaguga

SEQ ID NO: 89426 - RNA, 19 nt, Artificial Sequence
  Description of Artificial Sequence: Synthetic oligonucleotide
augccguucaccugggccc

SEQ ID NO: 89427 - RNA, 19 nt, Artificial Sequence
  Description of Artificial Sequence: Synthetic oligonucleotide
uucaacuggaugaccgagg

SEQ ID NO: 89428 - RNA, 19 nt, Artificial Sequence
  Description of Artificial Sequence: Synthetic oligonucleotide
uaguacucggacaagcugu

SEQ ID NO: 89429 - RNA, 19 nt, Artificial Sequence
  Description of Artificial Sequence: Synthetic oligonucleotide
caucccuaggguuuaaagc

SEQ ID NO: 89430 - RNA, 19 nt, Artificial Sequence
  Description of Artificial Sequence: Synthetic oligonucleotide
ugguucuaaaucuuuauuu

SEQ ID NO: 89431 - RNA, 19 nt, Artificial Sequence
  Description of Artificial Sequence: Synthetic oligonucleotide
uuguaagagccccugguga

SEQ ID NO: 89432 - RNA, 19 nt, Artificial Sequence
  Description of Artificial Sequence: Synthetic oligonucleotide
uaucauguauucuggacuc

SEQ ID NO: 89433 - RNA, 19 nt, Artificial Sequence
  Description of Artificial Sequence: Synthetic oligonucleotide
agaaggcagaauguggccc

SEQ ID NO: 89434 - RNA, 19 nt, Artificial Sequence
  Description of Artificial Sequence: Synthetic oligonucleotide
gaguuuacucuucagugac

SEQ ID NO: 89435 - RNA, 19 nt, Artificial Sequence
  Description of Artificial Sequence: Synthetic oligonucleotide
accagugaaccaauaaggc

SEQ ID NO: 89436 - RNA, 19 nt, Artificial Sequence
  Description of Artificial Sequence: Synthetic oligonucleotide
ugccuuucguucaccaugg

SEQ ID NO: 89437 - RNA, 19 nt, Artificial Sequence
  Description of Artificial Sequence: Synthetic oligonucleotide
uacuguaucgccaccacau

SEQ ID NO: 89438 - RNA, 19 nt, Artificial Sequence
  Description of Artificial Sequence: Synthetic oligonucleotide
gaguauaacucauguuugc

SEQ ID NO: 89439 - RNA, 19 nt, Artificial Sequence
  Description of Artificial Sequence: Synthetic oligonucleotide
gaaaugcccaaaagaaggg

SEQ ID NO: 89440 - RNA, 19 nt, Artificial Sequence
  Description of Artificial Sequence: Synthetic oligonucleotide
agguucuugaguuuacucu

SEQ ID NO: 89441 - RNA, 19 nt, Artificial Sequence
  Description of Artificial Sequence: Synthetic oligonucleotide
uuaucugacuuacaccuau

SEQ ID NO: 89442 - RNA, 19 nt, Artificial Sequence
  Description of Artificial Sequence: Synthetic oligonucleotide
aucugacuuacaccuauuc

SEQ ID NO: 89443 - RNA, 19 nt, Artificial Sequence
  Description of Artificial Sequence: Synthetic oligonucleotide
auguguuaguacugaaguc

SEQ ID NO: 89444 - RNA, 19 nt, Artificial Sequence
  Description of Artificial Sequence: Synthetic oligonucleotide
gacacuaguacucggacaa

SEQ ID NO: 89445 - RNA, 19 nt, Artificial Sequence
  Description of Artificial Sequence: Synthetic oligonucleotide
ucggccaacaguaccaaga

SEQ ID NO: 89446 - RNA, 19 nt, Artificial Sequence
  Description of Artificial Sequence: Synthetic oligonucleotide
ucuggacucgggaaguuug

SEQ ID NO: 89447 - RNA, 19 nt, Artificial Sequence
  Description of Artificial Sequence: Synthetic oligonucleotide
ucaacuggaugaccgaggu

SEQ ID NO: 89448 - RNA, 19 nt, Artificial Sequence
  Description of Artificial Sequence: Synthetic oligonucleotide
caaaguugcugcaguaacc

SEQ ID NO: 89449 - RNA, 19 nt, Artificial Sequence
  Description of Artificial Sequence: Synthetic oligonucleotide
ucuagcugaaugccguuca

SEQ ID NO: 89450 - RNA, 19 nt, Artificial Sequence
  Description of Artificial Sequence: Synthetic oligonucleotide
gacucgggaaguuuggcug

SEQ ID NO: 89451 - RNA, 19 nt, Artificial Sequence
  Description of Artificial Sequence: Synthetic oligonucleotide
guagccaucaggaugguac

SEQ ID NO: 89452 - RNA, 19 nt, Artificial Sequence
  Description of Artificial Sequence: Synthetic oligonucleotide
uugaauauaugagccuucc

SEQ ID NO: 89453 - RNA, 19 nt, Artificial Sequence
  Description of Artificial Sequence: Synthetic oligonucleotide
uauagugagucacaauguu

SEQ ID NO: 89454 - RNA, 19 nt, Artificial Sequence
  Description of Artificial Sequence: Synthetic oligonucleotide
gguuuaaagcuagauaucc

SEQ ID NO: 89455 - RNA, 19 nt, Artificial Sequence
  Description of Artificial Sequence: Synthetic oligonucleotide
caauacuaaaucccggcug

SEQ ID NO: 89456 - RNA, 19 nt, Artificial Sequence
  Description of Artificial Sequence: Synthetic oligonucleotide
ucuagugaauuaucauuga

SEQ ID NO: 89457 - RNA, 19 nt, Artificial Sequence
  Description of Artificial Sequence: Synthetic oligonucleotide
ugcuaaugaauccuaguuu

SEQ ID NO: 89458 - RNA, 19 nt, Artificial Sequence
  Description of Artificial Sequence: Synthetic oligonucleotide
uuaauucaacaacuugcuc

SEQ ID NO: 89459 - RNA, 19 nt, Artificial Sequence
  Description of Artificial Sequence: Synthetic oligonucleotide
aaugcccaaaagaagggca

SEQ ID NO: 89460 - RNA, 19 nt, Artificial Sequence
  Description of Artificial Sequence: Synthetic oligonucleotide
acaauacuaaaucccggcu

SEQ ID NO: 89461 - RNA, 19 nt, Artificial Sequence
  Description of Artificial Sequence: Synthetic oligonucleotide
uucuggauugcuccauugc

SEQ ID NO: 89462 - RNA, 19 nt, Artificial Sequence
  Description of Artificial Sequence: Synthetic oligonucleotide
acgguagaaguguugccac

SEQ ID NO: 89463 - RNA, 19 nt, Artificial Sequence
  Description of Artificial Sequence: Synthetic oligonucleotide
acucuacacugucccaucc

SEQ ID NO: 89464 - RNA, 19 nt, Artificial Sequence
  Description of Artificial Sequence: Synthetic oligonucleotide
acaauuuucuggauugcuc

SEQ ID NO: 89465 - RNA, 19 nt, Artificial Sequence
  Description of Artificial Sequence: Synthetic oligonucleotide
gaauccuaguuucucuaug

SEQ ID NO: 89466 - RNA, 19 nt, Artificial Sequence
  Description of Artificial Sequence: Synthetic oligonucleotide
uugauuggaauuguuguuc

SEQ ID NO: 89467 - RNA, 19 nt, Artificial Sequence
  Description of Artificial Sequence: Synthetic oligonucleotide
agcugaaugccguucaccu

SEQ ID NO: 89468 - RNA, 19 nt, Artificial Sequence
  Description of Artificial Sequence: Synthetic oligonucleotide
ugauuggaauuguuguucu

SEQ ID NO: 89469 - RNA, 19 nt, Artificial Sequence
  Description of Artificial Sequence: Synthetic oligonucleotide
gcuaaugaauccuaguuuc

SEQ ID NO: 89470 - RNA, 19 nt, Artificial Sequence
  Description of Artificial Sequence: Synthetic oligonucleotide
agaaguacaacaauugguu

SEQ ID NO: 89471 - RNA, 19 nt, Artificial Sequence
  Description of Artificial Sequence: Synthetic oligonucleotide
acagcguaacacaaauggc

SEQ ID NO: 89472 - RNA, 19 nt, Artificial Sequence
  Description of Artificial Sequence: Synthetic oligonucleotide
guuaccaaugcucguggcc

SEQ ID NO: 89473 - RNA, 19 nt, Artificial Sequence
  Description of Artificial Sequence: Synthetic oligonucleotide
acaaucuucuacuacuaua

SEQ ID NO: 89474 - RNA, 19 nt, Artificial Sequence
  Description of Artificial Sequence: Synthetic oligonucleotide
agaacgcaaaugcugauuu

SEQ ID NO: 89475 - RNA, 19 nt, Artificial Sequence
  Description of Artificial Sequence: Synthetic oligonucleotide
auaugagccuuccuuaaaa

SEQ ID NO: 89476 - RNA, 19 nt, Artificial Sequence
  Description of Artificial Sequence: Synthetic oligonucleotide
agccuuaguaauaacaccu

SEQ ID NO: 89477 - RNA, 19 nt, Artificial Sequence
  Description of Artificial Sequence: Synthetic oligonucleotide
uguguggaggcaaaccaaa

SEQ ID NO: 89478 - RNA, 19 nt, Artificial Sequence
  Description of Artificial Sequence: Synthetic oligonucleotide
acaccuguugugugacugc

SEQ ID NO: 89479 - RNA, 19 nt, Artificial Sequence
  Description of Artificial Sequence: Synthetic oligonucleotide
ucucggucaggauaucagc

SEQ ID NO: 89480 - RNA, 19 nt, Artificial Sequence
  Description of Artificial Sequence: Synthetic oligonucleotide
ugaauauaugagccuuccu

SEQ ID NO: 89481 - RNA, 19 nt, Artificial Sequence
  Description of Artificial Sequence: Synthetic oligonucleotide
aggauaucagcaggaauuc

SEQ ID NO: 89482 - RNA, 19 nt, Artificial Sequence
  Description of Artificial Sequence: Synthetic oligonucleotide
guagauuggucacuuucug

SEQ ID NO: 89483 - RNA, 19 nt, Artificial Sequence
  Description of Artificial Sequence: Synthetic oligonucleotide
aucuguagaaaggaggccu

SEQ ID NO: 89484 - RNA, 19 nt, Artificial Sequence
  Description of Artificial Sequence: Synthetic oligonucleotide
cauguauucuggacucggg

SEQ ID NO: 89485 - RNA, 19 nt, Artificial Sequence
  Description of Artificial Sequence: Synthetic oligonucleotide
caguuuuguaaacucauga

SEQ ID NO: 89486 - RNA, 19 nt, Artificial Sequence
  Description of Artificial Sequence: Synthetic oligonucleotide
uuucguucaccauggacau

SEQ ID NO: 89487 - RNA, 19 nt, Artificial Sequence
  Description of Artificial Sequence: Synthetic oligonucleotide
uguuaacacauugcugcag

SEQ ID NO: 89488 - RNA, 19 nt, Artificial Sequence
  Description of Artificial Sequence: Synthetic oligonucleotide
uggacgguagaaguguugc

SEQ ID NO: 89489 - RNA, 19 nt, Artificial Sequence
  Description of Artificial Sequence: Synthetic oligonucleotide
uuaguacugaagucacaga

SEQ ID NO: 89490 - RNA, 19 nt, Artificial Sequence
  Description of Artificial Sequence: Synthetic oligonucleotide
uauaugagccuuccuuaaa

SEQ ID NO: 89491 - RNA, 19 nt, Artificial Sequence
  Description of Artificial Sequence: Synthetic oligonucleotide
ugcaguaacccgcacugaa

SEQ ID NO: 89492 - RNA, 19 nt, Artificial Sequence
  Description of Artificial Sequence: Synthetic oligonucleotide
ucaauaguggacgguagaa

SEQ ID NO: 89493 - RNA, 19 nt, Artificial Sequence
  Description of Artificial Sequence: Synthetic oligonucleotide
aguauaacucauguuugcu

SEQ ID NO: 89494 - RNA, 19 nt, Artificial Sequence
  Description of Artificial Sequence: Synthetic oligonucleotide
cuggguagcauucccuugc

SEQ ID NO: 89495 - RNA, 19 nt, Artificial Sequence
  Description of Artificial Sequence: Synthetic oligonucleotide
agcacagcguaacacaaau

SEQ ID NO: 89496 - RNA, 19 nt, Artificial Sequence
  Description of Artificial Sequence: Synthetic oligonucleotide
aaauguagauuggucacuu

SEQ ID NO: 89497 - RNA, 19 nt, Artificial Sequence
  Description of Artificial Sequence: Synthetic oligonucleotide
aagaguccuuuucggcuag

SEQ ID NO: 89498 - RNA, 19 nt, Artificial Sequence
  Description of Artificial Sequence: Synthetic oligonucleotide
cuaguacucggacaagcug

SEQ ID NO: 89499 - RNA, 19 nt, Artificial Sequence
  Description of Artificial Sequence: Synthetic oligonucleotide
ugggagacacuaguacucg

SEQ ID NO: 89500 - RNA, 19 nt, Artificial Sequence
  Description of Artificial Sequence: Synthetic oligonucleotide
caucaauaguggacgguag

SEQ ID NO: 89501 - RNA, 19 nt, Artificial Sequence
  Description of Artificial Sequence: Synthetic oligonucleotide
aucaauaguggacgguaga

SEQ ID NO: 89502 - RNA, 19 nt, Artificial Sequence
  Description of Artificial Sequence: Synthetic oligonucleotide
ugaccgagguucuugaguu

SEQ ID NO: 89503 - RNA, 19 nt, Artificial Sequence
  Description of Artificial Sequence: Synthetic oligonucleotide
acucgggaaguuuggcugg

SEQ ID NO: 89504 - RNA, 19 nt, Artificial Sequence
  Description of Artificial Sequence: Synthetic oligonucleotide
caguaacccgcacugaaac

SEQ ID NO: 89505 - RNA, 19 nt, Artificial Sequence
  Description of Artificial Sequence: Synthetic oligonucleotide
agcuagauauccugguccu

SEQ ID NO: 89506 - RNA, 19 nt, Artificial Sequence
  Description of Artificial Sequence: Synthetic oligonucleotide
ucuucaacuggaugaccga

SEQ ID NO: 89507 - RNA, 19 nt, Artificial Sequence
  Description of Artificial Sequence: Synthetic oligonucleotide
ggggugaugacacacauaa

SEQ ID NO: 89508 - RNA, 19 nt, Artificial Sequence
  Description of Artificial Sequence: Synthetic oligonucleotide
cuucuuuagcuuaaacaga

SEQ ID NO: 89509 - RNA, 19 nt, Artificial Sequence
  Description of Artificial Sequence: Synthetic oligonucleotide
cugaaacauggccuucugg

SEQ ID NO: 89510 - RNA, 19 nt, Artificial Sequence
  Description of Artificial Sequence: Synthetic oligonucleotide
uaacuugucuuucuccguu

SEQ ID NO: 89511 - RNA, 19 nt, Artificial Sequence
  Description of Artificial Sequence: Synthetic oligonucleotide
aacccgcacugaaacaugg

SEQ ID NO: 89512 - RNA, 19 nt, Artificial Sequence
  Description of Artificial Sequence: Synthetic oligonucleotide
acucauguuugcuaaugaa

SEQ ID NO: 89513 - RNA, 19 nt, Artificial Sequence
  Description of Artificial Sequence: Synthetic oligonucleotide
uguaugaauuguugacuau

SEQ ID NO: 89514 - RNA, 19 nt, Artificial Sequence
  Description of Artificial Sequence: Synthetic oligonucleotide
augaccgagguucuugagu

SEQ ID NO: 89515 - RNA, 19 nt, Artificial Sequence
  Description of Artificial Sequence: Synthetic oligonucleotide
acaugagaaguacaacaau

SEQ ID NO: 89516 - RNA, 19 nt, Artificial Sequence
  Description of Artificial Sequence: Synthetic oligonucleotide
auccugaucggccaacagu

SEQ ID NO: 89517 - RNA, 19 nt, Artificial Sequence
  Description of Artificial Sequence: Synthetic oligonucleotide
cugaucggccaacaguacc

SEQ ID NO: 89518 - RNA, 19 nt, Artificial Sequence
  Description of Artificial Sequence: Synthetic oligonucleotide
uagauguauccaauuguuu

SEQ ID NO: 89519 - RNA, 19 nt, Artificial Sequence
  Description of Artificial Sequence: Synthetic oligonucleotide
auacugauccuugugcugu

SEQ ID NO: 89520 - RNA, 19 nt, Artificial Sequence
  Description of Artificial Sequence: Synthetic oligonucleotide
cuaaaucccggcuguauga

SEQ ID NO: 89521 - RNA, 19 nt, Artificial Sequence
  Description of Artificial Sequence: Synthetic oligonucleotide
cuuacaccuauucagcaaa

SEQ ID NO: 89522 - RNA, 19 nt, Artificial Sequence
  Description of Artificial Sequence: Synthetic oligonucleotide
caaugggacagcugcuuag

SEQ ID NO: 89523 - RNA, 19 nt, Artificial Sequence
  Description of Artificial Sequence: Synthetic oligonucleotide
acaguaccaagagaucauc

SEQ ID NO: 89524 - RNA, 19 nt, Artificial Sequence
  Description of Artificial Sequence: Synthetic oligonucleotide
gacuuuaaugcugucagcu

SEQ ID NO: 89525 - RNA, 19 nt, Artificial Sequence
  Description of Artificial Sequence: Synthetic oligonucleotide
acuuacaccuauucagcaa

SEQ ID NO: 89526 - RNA, 19 nt, Artificial Sequence
  Description of Artificial Sequence: Synthetic oligonucleotide
gacaccuguugugugacug

SEQ ID NO: 89527 - RNA, 19 nt, Artificial Sequence
  Description of Artificial Sequence: Synthetic oligonucleotide
uuggacuaacugcucuucu

SEQ ID NO: 89528 - RNA, 19 nt, Artificial Sequence
  Description of Artificial Sequence: Synthetic oligonucleotide
ugggacuuuaaugcuguca

SEQ ID NO: 89529 - RNA, 19 nt, Artificial Sequence
  Description of Artificial Sequence: Synthetic oligonucleotide
caauaguggacgguagaag

SEQ ID NO: 89530 - RNA, 19 nt, Artificial Sequence
  Description of Artificial Sequence: Synthetic oligonucleotide
agacacuaguacucggaca

SEQ ID NO: 89531 - RNA, 19 nt, Artificial Sequence
  Description of Artificial Sequence: Synthetic oligonucleotide
gacgguagaaguguugcca

SEQ ID NO: 89532 - RNA, 19 nt, Artificial Sequence
  Description of Artificial Sequence: Synthetic oligonucleotide
guugugugacugcuguuug

SEQ ID NO: 89533 - RNA, 19 nt, Artificial Sequence
  Description of Artificial Sequence: Synthetic oligonucleotide
acguugaauauaugagccu

SEQ ID NO: 89534 - RNA, 19 nt, Artificial Sequence
  Description of Artificial Sequence: Synthetic oligonucleotide
ugaauccuaguuucucuau

SEQ ID NO: 89535 - RNA, 19 nt, Artificial Sequence
  Description of Artificial Sequence: Synthetic oligonucleotide
ucggacaagcuguagcauc

SEQ ID NO: 89536 - RNA, 19 nt, Artificial Sequence
  Description of Artificial Sequence: Synthetic oligonucleotide
agcguaacacaaauggcug

SEQ ID NO: 89537 - RNA, 19 nt, Artificial Sequence
  Description of Artificial Sequence: Synthetic oligonucleotide
uucauacguugaauauaug

SEQ ID NO: 89538 - RNA, 19 nt, Artificial Sequence
  Description of Artificial Sequence: Synthetic oligonucleotide
cuacacugucccauccugc

SEQ ID NO: 89539 - RNA, 19 nt, Artificial Sequence
  Description of Artificial Sequence: Synthetic oligonucleotide
cacuaguacucggacaagc

SEQ ID NO: 89540 - RNA, 19 nt, Artificial Sequence
  Description of Artificial Sequence: Synthetic oligonucleotide
aacaguaccaagagaucau

SEQ ID NO: 89541 - RNA, 19 nt, Artificial Sequence
  Description of Artificial Sequence: Synthetic oligonucleotide
auguggcccuauugaaugg

SEQ ID NO: 89542 - RNA, 19 nt, Artificial Sequence
  Description of Artificial Sequence: Synthetic oligonucleotide
gaugaccgagguucuugag

SEQ ID NO: 89543 - RNA, 19 nt, Artificial Sequence
  Description of Artificial Sequence: Synthetic oligonucleotide
ggaguauaacucauguuug

SEQ ID NO: 89544 - RNA, 19 nt, Artificial Sequence
  Description of Artificial Sequence: Synthetic oligonucleotide
uaacccgcacugaaacaug

SEQ ID NO: 89545 - RNA, 19 nt, Artificial Sequence
  Description of Artificial Sequence: Synthetic oligonucleotide
caacaguaccaagagauca

SEQ ID NO: 89546 - RNA, 19 nt, Artificial Sequence
  Description of Artificial Sequence: Synthetic oligonucleotide
augcccaaaagaagggcac

SEQ ID NO: 89547 - RNA, 19 nt, Artificial Sequence
  Description of Artificial Sequence: Synthetic oligonucleotide
gcuguugaaucugagacac

SEQ ID NO: 89548 - RNA, 19 nt, Artificial Sequence
  Description of Artificial Sequence: Synthetic oligonucleotide
guauaacucauguuugcua

SEQ ID NO: 89549 - RNA, 19 nt, Artificial Sequence
  Description of Artificial Sequence: Synthetic oligonucleotide
aguaacccgcacugaaaca

SEQ ID NO: 89550 - RNA, 19 nt, Artificial Sequence
  Description of Artificial Sequence: Synthetic oligonucleotide
uuuucggcuagcuggcuuu

SEQ ID NO: 89551 - RNA, 19 nt, Artificial Sequence
  Description of Artificial Sequence: Synthetic oligonucleotide
uggaugaccgagguucuug

SEQ ID NO: 89552 - RNA, 19 nt, Artificial Sequence
  Description of Artificial Sequence: Synthetic oligonucleotide
gcugcaguaacccgcacug

SEQ ID NO: 89553 - RNA, 19 nt, Artificial Sequence
  Description of Artificial Sequence: Synthetic oligonucleotide
cuucaacuggaugaccgag

SEQ ID NO: 89554 - RNA, 19 nt, Artificial Sequence
  Description of Artificial Sequence: Synthetic oligonucleotide
cagugaaccaauaaggcau

SEQ ID NO: 89555 - RNA, 19 nt, Artificial Sequence
  Description of Artificial Sequence: Synthetic oligonucleotide
cauacuguaucgccaccac

SEQ ID NO: 89556 - RNA, 19 nt, Artificial Sequence
  Description of Artificial Sequence: Synthetic oligonucleotide
uuacaccuauucagcaaaa

SEQ ID NO: 89557 - RNA, 19 nt, Artificial Sequence
  Description of Artificial Sequence: Synthetic oligonucleotide
ccuauugaauggcaaacac

SEQ ID NO: 89558 - RNA, 19 nt, Artificial Sequence
  Description of Artificial Sequence: Synthetic oligonucleotide
cuguaugaauuguugacua

SEQ ID NO: 89559 - RNA, 19 nt, Artificial Sequence
  Description of Artificial Sequence: Synthetic oligonucleotide
acuguaucgccaccacaug

SEQ ID NO: 89560 - RNA, 19 nt, Artificial Sequence
  Description of Artificial Sequence: Synthetic oligonucleotide
cuugugaagauuucaaauu

SEQ ID NO: 89561 - RNA, 19 nt, Artificial Sequence
  Description of Artificial Sequence: Synthetic oligonucleotide
ugugcugaccaaccagaau

SEQ ID NO: 89562 - RNA, 19 nt, Artificial Sequence
  Description of Artificial Sequence: Synthetic oligonucleotide
aaucccggcuguaugaauu

SEQ ID NO: 89563 - RNA, 19 nt, Artificial Sequence
  Description of Artificial Sequence: Synthetic oligonucleotide
uguggcccuauugaauggc

SEQ ID NO: 89564 - RNA, 19 nt, Artificial Sequence
  Description of Artificial Sequence: Synthetic oligonucleotide
accaccagugaaccaauaa

SEQ ID NO: 89565 - RNA, 19 nt, Artificial Sequence
  Description of Artificial Sequence: Synthetic oligonucleotide
auaguggacgguagaagug

SEQ ID NO: 89566 - RNA, 19 nt, Artificial Sequence
  Description of Artificial Sequence: Synthetic oligonucleotide
gugaacauaguaucuauuu

SEQ ID NO: 89567 - RNA, 19 nt, Artificial Sequence
  Description of Artificial Sequence: Synthetic oligonucleotide
aaaucccggcuguaugaau

SEQ ID NO: 89568 - RNA, 19 nt, Artificial Sequence
  Description of Artificial Sequence: Synthetic oligonucleotide
guuaacacauugcugcagu

SEQ ID NO: 89569 - RNA, 19 nt, Artificial Sequence
  Description of Artificial Sequence: Synthetic oligonucleotide
uugccaauucucuucucua

SEQ ID NO: 89570 - RNA, 19 nt, Artificial Sequence
  Description of Artificial Sequence: Synthetic oligonucleotide
cuagugaauuaucauugaa

SEQ ID NO: 89571 - RNA, 19 nt, Artificial Sequence
  Description of Artificial Sequence: Synthetic oligonucleotide
guugacuauaaccuguuuu

SEQ ID NO: 89572 - RNA, 19 nt, Artificial Sequence
  Description of Artificial Sequence: Synthetic oligonucleotide
uccgagauuuucugcaauu

SEQ ID NO: 89573 - RNA, 19 nt, Artificial Sequence
  Description of Artificial Sequence: Synthetic oligonucleotide
caugagaaguacaacaauu

SEQ ID NO: 89574 - RNA, 19 nt, Artificial Sequence
  Description of Artificial Sequence: Synthetic oligonucleotide
cugauuuagaaacaaugau

SEQ ID NO: 89575 - RNA, 19 nt, Artificial Sequence
  Description of Artificial Sequence: Synthetic oligonucleotide
auguguuacugcaauggga

SEQ ID NO: 89576 - RNA, 19 nt, Artificial Sequence
  Description of Artificial Sequence: Synthetic oligonucleotide
augaaauuaccagcugaga

SEQ ID NO: 89577 - RNA, 19 nt, Artificial Sequence
  Description of Artificial Sequence: Synthetic oligonucleotide
cucggucaggauaucagca

SEQ ID NO: 89578 - RNA, 19 nt, Artificial Sequence
  Description of Artificial Sequence: Synthetic oligonucleotide
cuauugaauggcaaacacu

SEQ ID NO: 89579 - RNA, 19 nt, Artificial Sequence
  Description of Artificial Sequence: Synthetic oligonucleotide
auaacucauguuugcuaau

SEQ ID NO: 89580 - RNA, 19 nt, Artificial Sequence
  Description of Artificial Sequence: Synthetic oligonucleotide
agcucaugauuuucugccu

SEQ ID NO: 89581 - RNA, 19 nt, Artificial Sequence
  Description of Artificial Sequence: Synthetic oligonucleotide
gacgcuugugaagauuuca

SEQ ID NO: 89582 - RNA, 19 nt, Artificial Sequence
  Description of Artificial Sequence: Synthetic oligonucleotide
guaugaauuguugacuaua

SEQ ID NO: 89583 - RNA, 19 nt, Artificial Sequence
  Description of Artificial Sequence: Synthetic oligonucleotide
uggacuaacugcucuucuu

SEQ ID NO: 89584 - RNA, 19 nt, Artificial Sequence
  Description of Artificial Sequence: Synthetic oligonucleotide
guguuaguacugaagucac

SEQ ID NO: 89585 - RNA, 19 nt, Artificial Sequence
  Description of Artificial Sequence: Synthetic oligonucleotide
acuaguacucggacaagcu

SEQ ID NO: 89586 - RNA, 19 nt, Artificial Sequence
  Description of Artificial Sequence: Synthetic oligonucleotide
gucucggucaggauaucag

SEQ ID NO: 89587 - RNA, 19 nt, Artificial Sequence
  Description of Artificial Sequence: Synthetic oligonucleotide
caaacacucacucuacacu

SEQ ID NO: 89588 - RNA, 19 nt, Artificial Sequence
  Description of Artificial Sequence: Synthetic oligonucleotide
gcaacauuaacaacccaac

SEQ ID NO: 89589 - RNA, 19 nt, Artificial Sequence
  Description of Artificial Sequence: Synthetic oligonucleotide
acugaguuaccuguugcau

SEQ ID NO: 89590 - RNA, 19 nt, Artificial Sequence
  Description of Artificial Sequence: Synthetic oligonucleotide
acuauaccuccaucacugu

SEQ ID NO: 89591 - RNA, 19 nt, Artificial Sequence
  Description of Artificial Sequence: Synthetic oligonucleotide
ugagaacgcaaaugcugau

SEQ ID NO: 89592 - RNA, 19 nt, Artificial Sequence
  Description of Artificial Sequence: Synthetic oligonucleotide
ggacuaacugcucuucuuc

SEQ ID NO: 89593 - RNA, 19 nt, Artificial Sequence
  Description of Artificial Sequence: Synthetic oligonucleotide
cuccauugcuccuuguuaa

SEQ ID NO: 89594 - RNA, 19 nt, Artificial Sequence
  Description of Artificial Sequence: Synthetic oligonucleotide
agccacaauuuucuggauu

SEQ ID NO: 89595 - RNA, 19 nt, Artificial Sequence
  Description of Artificial Sequence: Synthetic oligonucleotide
auugaauggcaaacacuca

SEQ ID NO: 89596 - RNA, 19 nt, Artificial Sequence
  Description of Artificial Sequence: Synthetic oligonucleotide
uacuaaaucccggcuguau

SEQ ID NO: 89597 - RNA, 19 nt, Artificial Sequence
  Description of Artificial Sequence: Synthetic oligonucleotide
cauggacaugagaaguaca

SEQ ID NO: 89598 - RNA, 19 nt, Artificial Sequence
  Description of Artificial Sequence: Synthetic oligonucleotide
ggauuuauaaauagccuua

SEQ ID NO: 89599 - RNA, 19 nt, Artificial Sequence
  Description of Artificial Sequence: Synthetic oligonucleotide
ccauguuaacacauugcug

SEQ ID NO: 89600 - RNA, 19 nt, Artificial Sequence
  Description of Artificial Sequence: Synthetic oligonucleotide
uuguacagggacugacuuu

SEQ ID NO: 89601 - RNA, 19 nt, Artificial Sequence
  Description of Artificial Sequence: Synthetic oligonucleotide
cuuggacuaacugcucuuc

SEQ ID NO: 89602 - RNA, 19 nt, Artificial Sequence
  Description of Artificial Sequence: Synthetic oligonucleotide
cacuuagggacagucuuuc

SEQ ID NO: 89603 - RNA, 19 nt, Artificial Sequence
  Description of Artificial Sequence: Synthetic oligonucleotide
gugggagacacuaguacuc

SEQ ID NO: 89604 - RNA, 19 nt, Artificial Sequence
  Description of Artificial Sequence: Synthetic oligonucleotide
gacuaacugcucuucuucu

SEQ ID NO: 89605 - RNA, 19 nt, Artificial Sequence
  Description of Artificial Sequence: Synthetic oligonucleotide
cuacuacuauaccuccauc

SEQ ID NO: 89606 - RNA, 19 nt, Artificial Sequence
  Description of Artificial Sequence: Synthetic oligonucleotide
uaucugacuuacaccuauu

SEQ ID NO: 89607 - RNA, 19 nt, Artificial Sequence
  Description of Artificial Sequence: Synthetic oligonucleotide
cucacgaaucauauucuua

SEQ ID NO: 89608 - RNA, 19 nt, Artificial Sequence
  Description of Artificial Sequence: Synthetic oligonucleotide
ugcccaaaagaagggcaca

SEQ ID NO: 89609 - RNA, 19 nt, Artificial Sequence
  Description of Artificial Sequence: Synthetic oligonucleotide
gugacaggauuuucugauc

SEQ ID NO: 89610 - RNA, 19 nt, Artificial Sequence
  Description of Artificial Sequence: Synthetic oligonucleotide
cuguuacugaagccuguuc

SEQ ID NO: 89611 - RNA, 19 nt, Artificial Sequence
  Description of Artificial Sequence: Synthetic oligonucleotide
cuguugaaucugagacacc

SEQ ID NO: 89612 - RNA, 19 nt, Artificial Sequence
  Description of Artificial Sequence: Synthetic oligonucleotide
uggacucgggaaguuuggc

SEQ ID NO: 89613 - RNA, 19 nt, Artificial Sequence
  Description of Artificial Sequence: Synthetic oligonucleotide
cuaaugaauccuaguuucu

SEQ ID NO: 89614 - RNA, 19 nt, Artificial Sequence
  Description of Artificial Sequence: Synthetic oligonucleotide
uccucagauaacgcuuuaa

SEQ ID NO: 89615 - RNA, 19 nt, Artificial Sequence
  Description of Artificial Sequence: Synthetic oligonucleotide
ucagccgacugaccucuuc

SEQ ID NO: 89616 - RNA, 19 nt, Artificial Sequence
  Description of Artificial Sequence: Synthetic oligonucleotide
gccauguuaacacauugcu

SEQ ID NO: 89617 - RNA, 19 nt, Artificial Sequence
  Description of Artificial Sequence: Synthetic oligonucleotide
ccuuaguaauaacaccuuc

SEQ ID NO: 89618 - RNA, 19 nt, Artificial Sequence
  Description of Artificial Sequence: Synthetic oligonucleotide
uugggagaguucagaugaa

SEQ ID NO: 89619 - RNA, 19 nt, Artificial Sequence
  Description of Artificial Sequence: Synthetic oligonucleotide
ugcaaugggacagcugcuu

SEQ ID NO: 89620 - RNA, 19 nt, Artificial Sequence
  Description of Artificial Sequence: Synthetic oligonucleotide
ccaucccuaggguuuaaag

SEQ ID NO: 89621 - RNA, 19 nt, Artificial Sequence
  Description of Artificial Sequence: Synthetic oligonucleotide
gggcacauaggccuuggac

SEQ ID NO: 89622 - RNA, 19 nt, Artificial Sequence
  Description of Artificial Sequence: Synthetic oligonucleotide
cacucuacacugucccauc

SEQ ID NO: 89623 - RNA, 19 nt, Artificial Sequence
  Description of Artificial Sequence: Synthetic oligonucleotide
gcguaacacaaauggcugc

SEQ ID NO: 89624 - RNA, 19 nt, Artificial Sequence
  Description of Artificial Sequence: Synthetic oligonucleotide
guuuaaagcuagauauccu

SEQ ID NO: 89625 - RNA, 19 nt, Artificial Sequence
  Description of Artificial Sequence: Synthetic oligonucleotide
agacuuagacacauugcuu

SEQ ID NO: 89626 - RNA, 19 nt, Artificial Sequence
  Description of Artificial Sequence: Synthetic oligonucleotide
ccagugaaccaauaaggca

SEQ ID NO: 89627 - RNA, 19 nt, Artificial Sequence
  Description of Artificial Sequence: Synthetic oligonucleotide
gcucguggccagcugaacc

SEQ ID NO: 89628 - RNA, 19 nt, Artificial Sequence
  Description of Artificial Sequence: Synthetic oligonucleotide
ccgacugaccucuucuagc

SEQ ID NO: 89629 - RNA, 19 nt, Artificial Sequence
  Description of Artificial Sequence: Synthetic oligonucleotide
gacaggauuuucugauccu

SEQ ID NO: 89630 - RNA, 19 nt, Artificial Sequence
  Description of Artificial Sequence: Synthetic oligonucleotide
aacccaacucuugucugua

SEQ ID NO: 89631 - RNA, 19 nt, Artificial Sequence
  Description of Artificial Sequence: Synthetic oligonucleotide
ggcaaaccaaagcacuguc

SEQ ID NO: 89632 - RNA, 19 nt, Artificial Sequence
  Description of Artificial Sequence: Synthetic oligonucleotide
ggagaguucagaugaacau

SEQ ID NO: 89633 - RNA, 19 nt, Artificial Sequence
  Description of Artificial Sequence: Synthetic oligonucleotide
guagaauggcaauggugcu

SEQ ID NO: 89634 - RNA, 19 nt, Artificial Sequence
  Description of Artificial Sequence: Synthetic oligonucleotide
guagcaucaaauguagauu

SEQ ID NO: 89635 - RNA, 19 nt, Artificial Sequence
  Description of Artificial Sequence: Synthetic oligonucleotide
aggugcauucacagaagca

SEQ ID NO: 89636 - RNA, 19 nt, Artificial Sequence
  Description of Artificial Sequence: Synthetic oligonucleotide
agaguccuuuucggcuagc

SEQ ID NO: 89637 - RNA, 19 nt, Artificial Sequence
  Description of Artificial Sequence: Synthetic oligonucleotide
uggggugaugacacacaua

SEQ ID NO: 89638 - RNA, 19 nt, Artificial Sequence
  Description of Artificial Sequence: Synthetic oligonucleotide
cagccucgaauaacuucag

SEQ ID NO: 89639 - RNA, 19 nt, Artificial Sequence
  Description of Artificial Sequence: Synthetic oligonucleotide
gaaguuuggcugggguuuc

SEQ ID NO: 89640 - RNA, 19 nt, Artificial Sequence
  Description of Artificial Sequence: Synthetic oligonucleotide
ccuuucguucaccauggac

SEQ ID NO: 89641 - RNA, 19 nt, Artificial Sequence
  Description of Artificial Sequence: Synthetic oligonucleotide
gaacgcaaaugcugauuua

SEQ ID NO: 89642 - RNA, 19 nt, Artificial Sequence
  Description of Artificial Sequence: Synthetic oligonucleotide
cuacuauaccuccaucacu

SEQ ID NO: 89643 - RNA, 19 nt, Artificial Sequence
  Description of Artificial Sequence: Synthetic oligonucleotide
agacgcuugugaagauuuc

SEQ ID NO: 89644 - RNA, 19 nt, Artificial Sequence
  Description of Artificial Sequence: Synthetic oligonucleotide
guugacuuggcagccucga

SEQ ID NO: 89645 - RNA, 19 nt, Artificial Sequence
  Description of Artificial Sequence: Synthetic oligonucleotide
gcccuccacacuuagggac

SEQ ID NO: 89646 - RNA, 19 nt, Artificial Sequence
  Description of Artificial Sequence: Synthetic oligonucleotide
gggagaguucagaugaaca

SEQ ID NO: 89647 - RNA, 19 nt, Artificial Sequence
  Description of Artificial Sequence: Synthetic oligonucleotide
aguucaacugggacuuuaa

SEQ ID NO: 89648 - RNA, 19 nt, Artificial Sequence
  Description of Artificial Sequence: Synthetic oligonucleotide
guaacccgcacugaaacau

SEQ ID NO: 89649 - RNA, 19 nt, Artificial Sequence
  Description of Artificial Sequence: Synthetic oligonucleotide
uuucggcuagcuggcuuug

SEQ ID NO: 89650 - RNA, 19 nt, Artificial Sequence
  Description of Artificial Sequence: Synthetic oligonucleotide
acacuaguacucggacaag

SEQ ID NO: 89651 - RNA, 19 nt, Artificial Sequence
  Description of Artificial Sequence: Synthetic oligonucleotide
uuccucagauaacgcuuua

SEQ ID NO: 89652 - RNA, 19 nt, Artificial Sequence
  Description of Artificial Sequence: Synthetic oligonucleotide
ccauugcuccuuguuaagg

SEQ ID NO: 89653 - RNA, 19 nt, Artificial Sequence
  Description of Artificial Sequence: Synthetic oligonucleotide
cuguucauucagggcagac

SEQ ID NO: 89654 - RNA, 19 nt, Artificial Sequence
  Description of Artificial Sequence: Synthetic oligonucleotide
agugaaccaauaaggcaua

SEQ ID NO: 89655 - RNA, 19 nt, Artificial Sequence
  Description of Artificial Sequence: Synthetic oligonucleotide
agccccuggugacuuuuca

SEQ ID NO: 89656 - RNA, 19 nt, Artificial Sequence
  Description of Artificial Sequence: Synthetic oligonucleotide
gaauguggcccuauugaau

SEQ ID NO: 89657 - RNA, 19 nt, Artificial Sequence
  Description of Artificial Sequence: Synthetic oligonucleotide
acgcuugugaagauuucaa

SEQ ID NO: 89658 - RNA, 19 nt, Artificial Sequence
  Description of Artificial Sequence: Synthetic oligonucleotide
accgagguucuugaguuua

SEQ ID NO: 89659 - RNA, 19 nt, Artificial Sequence
  Description of Artificial Sequence: Synthetic oligonucleotide
gccucgaauaacuucagau

SEQ ID NO: 89660 - RNA, 19 nt, Artificial Sequence
  Description of Artificial Sequence: Synthetic oligonucleotide
cucgggaaguuuggcuggg

SEQ ID NO: 89661 - RNA, 19 nt, Artificial Sequence
  Description of Artificial Sequence: Synthetic oligonucleotide
gcugaaugccguucaccug

SEQ ID NO: 89662 - RNA, 19 nt, Artificial Sequence
  Description of Artificial Sequence: Synthetic oligonucleotide
cuuguacagggacugacuu

SEQ ID NO: 89663 - RNA, 19 nt, Artificial Sequence
  Description of Artificial Sequence: Synthetic oligonucleotide
cuaacuugucuuucuccgu

SEQ ID NO: 89664 - RNA, 19 nt, Artificial Sequence
  Description of Artificial Sequence: Synthetic oligonucleotide
ggaugaccgagguucuuga

SEQ ID NO: 89665 - RNA, 19 nt, Artificial Sequence
  Description of Artificial Sequence: Synthetic oligonucleotide
cucacucuacacuguccca

SEQ ID NO: 89666 - RNA, 19 nt, Artificial Sequence
  Description of Artificial Sequence: Synthetic oligonucleotide
guggacgguagaaguguug

SEQ ID NO: 89667 - RNA, 19 nt, Artificial Sequence
  Description of Artificial Sequence: Synthetic oligonucleotide
gcuagcuggcuuuguaaga

SEQ ID NO: 89668 - RNA, 19 nt, Artificial Sequence
  Description of Artificial Sequence: Synthetic oligonucleotide
ggguuuaaagcuagauauc

SEQ ID NO: 89669 - RNA, 19 nt, Artificial Sequence
  Description of Artificial Sequence: Synthetic oligonucleotide
ugccguucaccugggcccc

SEQ ID NO: 89670 - RNA, 19 nt, Artificial Sequence
  Description of Artificial Sequence: Synthetic oligonucleotide
agacaccuguugugugacu

SEQ ID NO: 89671 - RNA, 19 nt, Artificial Sequence
  Description of Artificial Sequence: Synthetic oligonucleotide
gcccuauugaauggcaaac

SEQ ID NO: 89672 - RNA, 19 nt, Artificial Sequence
  Description of Artificial Sequence: Synthetic oligonucleotide
gguugacuuggcagccucg

SEQ ID NO: 89673 - RNA, 19 nt, Artificial Sequence
  Description of Artificial Sequence: Synthetic oligonucleotide
ggucgcaccaggaggguug

SEQ ID NO: 89674 - RNA, 19 nt, Artificial Sequence
  Description of Artificial Sequence: Synthetic oligonucleotide
gucgcaccaggaggguugg

SEQ ID NO: 89675 - RNA, 19 nt, Artificial Sequence
  Description of Artificial Sequence: Synthetic oligonucleotide
caaugcucguggccagcug

SEQ ID NO: 89676 - RNA, 19 nt, Artificial Sequence
  Description of Artificial Sequence: Synthetic oligonucleotide
aggaugguacaaaguugcu

SEQ ID NO: 89677 - RNA, 19 nt, Artificial Sequence
  Description of Artificial Sequence: Synthetic oligonucleotide
ccauggacaugagaaguac

SEQ ID NO: 89678 - RNA, 19 nt, Artificial Sequence
  Description of Artificial Sequence: Synthetic oligonucleotide
gcuguaugaauuguugacu

SEQ ID NO: 89679 - RNA, 19 nt, Artificial Sequence
  Description of Artificial Sequence: Synthetic oligonucleotide
ggaacagcccuccacacuu

SEQ ID NO: 89680 - RNA, 19 nt, Artificial Sequence
  Description of Artificial Sequence: Synthetic oligonucleotide
gcaucaauaguggacggua

SEQ ID NO: 89681 - RNA, 19 nt, Artificial Sequence
  Description of Artificial Sequence: Synthetic oligonucleotide
gauuggaauuguuguucuu

SEQ ID NO: 89682 - RNA, 19 nt, Artificial Sequence
  Description of Artificial Sequence: Synthetic oligonucleotide
cugugcugaccaaccagaa

SEQ ID NO: 89683 - RNA, 19 nt, Artificial Sequence
  Description of Artificial Sequence: Synthetic oligonucleotide
gcuccauugcuccuuguua

SEQ ID NO: 89684 - RNA, 19 nt, Artificial Sequence
  Description of Artificial Sequence: Synthetic oligonucleotide
guaucgccaccacaugccu

SEQ ID NO: 89685 - RNA, 19 nt, Artificial Sequence
  Description of Artificial Sequence: Synthetic oligonucleotide
uugcugcaguaacccgcac

SEQ ID NO: 89686 - RNA, 19 nt, Artificial Sequence
  Description of Artificial Sequence: Synthetic oligonucleotide
guacagggacugacuuugc

SEQ ID NO: 89687 - RNA, 19 nt, Artificial Sequence
  Description of Artificial Sequence: Synthetic oligonucleotide
caacccaacucuugucugu

SEQ ID NO: 89688 - RNA, 19 nt, Artificial Sequence
  Description of Artificial Sequence: Synthetic oligonucleotide
caguauuuauggucucggu

SEQ ID NO: 89689 - RNA, 19 nt, Artificial Sequence
  Description of Artificial Sequence: Synthetic oligonucleotide
cuguuagauguauccaauu

SEQ ID NO: 89690 - RNA, 19 nt, Artificial Sequence
  Description of Artificial Sequence: Synthetic oligonucleotide
gguuggugggagacacuag

SEQ ID NO: 89691 - RNA, 19 nt, Artificial Sequence
  Description of Artificial Sequence: Synthetic oligonucleotide
ggacuuuaaggagauuaua

SEQ ID NO: 89692 - RNA, 19 nt, Artificial Sequence
  Description of Artificial Sequence: Synthetic oligonucleotide
gagaacgcaaaugcugauu

SEQ ID NO: 89693 - RNA, 19 nt, Artificial Sequence
  Description of Artificial Sequence: Synthetic oligonucleotide
auacuaaaucccggcugua

SEQ ID NO: 89694 - RNA, 19 nt, Artificial Sequence
  Description of Artificial Sequence: Synthetic oligonucleotide
gcagugcaugggcaagggc

SEQ ID NO: 89695 - RNA, 19 nt, Artificial Sequence
  Description of Artificial Sequence: Synthetic oligonucleotide
gauugcuccauugcuccuu

SEQ ID NO: 89696 - RNA, 19 nt, Artificial Sequence
  Description of Artificial Sequence: Synthetic oligonucleotide
cagcacagcguaacacaaa

SEQ ID NO: 89697 - RNA, 19 nt, Artificial Sequence
  Description of Artificial Sequence: Synthetic oligonucleotide
cuauaccuccaucacuguu

SEQ ID NO: 89698 - RNA, 19 nt, Artificial Sequence
  Description of Artificial Sequence: Synthetic oligonucleotide
ggacucgggaaguuuggcu

SEQ ID NO: 89699 - RNA, 19 nt, Artificial Sequence
  Description of Artificial Sequence: Synthetic oligonucleotide
gcacagcguaacacaaaug

SEQ ID NO: 89700 - RNA, 19 nt, Artificial Sequence
  Description of Artificial Sequence: Synthetic oligonucleotide
ccuguugugugacugcugu

SEQ ID NO: 89701 - RNA, 19 nt, Artificial Sequence
  Description of Artificial Sequence: Synthetic oligonucleotide
ggucucggucaggauauca

SEQ ID NO: 89702 - RNA, 19 nt, Artificial Sequence
  Description of Artificial Sequence: Synthetic oligonucleotide
accaucccuaggguuuaaa

SEQ ID NO: 89703 - RNA, 19 nt, Artificial Sequence
  Description of Artificial Sequence: Synthetic oligonucleotide
cccuauugaauggcaaaca

SEQ ID NO: 89704 - RNA, 19 nt, Artificial Sequence
  Description of Artificial Sequence: Synthetic oligonucleotide
cucuaccaucccuaggguu

SEQ ID NO: 89705 - RNA, 19 nt, Artificial Sequence
  Description of Artificial Sequence: Synthetic oligonucleotide
ccaaaucuaacuugucuuu

SEQ ID NO: 89706 - RNA, 19 nt, Artificial Sequence
  Description of Artificial Sequence: Synthetic oligonucleotide
cuuuucggcuagcuggcuu

SEQ ID NO: 89707 - RNA, 19 nt, Artificial Sequence
  Description of Artificial Sequence: Synthetic oligonucleotide
uggucgcaccaggaggguu

SEQ ID NO: 89708 - RNA, 19 nt, Artificial Sequence
  Description of Artificial Sequence: Synthetic oligonucleotide
cuaccaucccuaggguuua

SEQ ID NO: 89709 - RNA, 19 nt, Artificial Sequence
  Description of Artificial Sequence: Synthetic oligonucleotide
cuuucuccguuuguagaau

SEQ ID NO: 89710 - RNA, 19 nt, Artificial Sequence
  Description of Artificial Sequence: Synthetic oligonucleotide
cugccuugagucuggugau

SEQ ID NO: 89711 - RNA, 19 nt, Artificial Sequence
  Description of Artificial Sequence: Synthetic oligonucleotide
gaacagcccuccacacuua

SEQ ID NO: 89712 - RNA, 19 nt, Artificial Sequence
  Description of Artificial Sequence: Synthetic oligonucleotide
ccuguaagaaauggaacau

SEQ ID NO: 89713 - RNA, 19 nt, Artificial Sequence
  Description of Artificial Sequence: Synthetic oligonucleotide
gagccccuggugacuuuuc

SEQ ID NO: 89714 - RNA, 19 nt, Artificial Sequence
  Description of Artificial Sequence: Synthetic oligonucleotide
gccaauucucuucucuauu

SEQ ID NO: 89715 - RNA, 19 nt, Artificial Sequence
  Description of Artificial Sequence: Synthetic oligonucleotide
cugcaguaacccgcacuga

SEQ ID NO: 89716 - RNA, 19 nt, Artificial Sequence
  Description of Artificial Sequence: Synthetic oligonucleotide
caccuguugugugacugcu

SEQ ID NO: 89717 - RNA, 19 nt, Artificial Sequence
  Description of Artificial Sequence: Synthetic oligonucleotide
ggauugcuccauugcuccu

SEQ ID NO: 89718 - RNA, 19 nt, Artificial Sequence
  Description of Artificial Sequence: Synthetic oligonucleotide
cugugggagccuugauggu

SEQ ID NO: 89719 - RNA, 19 nt, Artificial Sequence
  Description of Artificial Sequence: Synthetic oligonucleotide
cucggacaagcuguagcau

SEQ ID NO: 89720 - RNA, 19 nt, Artificial Sequence
  Description of Artificial Sequence: Synthetic oligonucleotide
cguugaauauaugagccuu

SEQ ID NO: 89721 - RNA, 19 nt, Artificial Sequence
  Description of Artificial Sequence: Synthetic oligonucleotide
gcugccuuucguucaccau

SEQ ID NO: 89722 - RNA, 19 nt, Artificial Sequence
  Description of Artificial Sequence: Synthetic oligonucleotide
gccuuaguaauaacaccuu

SEQ ID NO: 89723 - RNA, 19 nt, Artificial Sequence
  Description of Artificial Sequence: Synthetic oligonucleotide
ccacaugaaguuagaguuu

SEQ ID NO: 89724 - RNA, 19 nt, Artificial Sequence
  Description of Artificial Sequence: Synthetic oligonucleotide
ucgcaccaggaggguuggu

SEQ ID NO: 89725 - RNA, 19 nt, Artificial Sequence
  Description of Artificial Sequence: Synthetic oligonucleotide
caacuggaugaccgagguu

SEQ ID NO: 89726 - RNA, 19 nt, Artificial Sequence
  Description of Artificial Sequence: Synthetic oligonucleotide
gccuuucguucaccaugga

SEQ ID NO: 89727 - RNA, 19 nt, Artificial Sequence
  Description of Artificial Sequence: Synthetic oligonucleotide
ccuuggacuaacugcucuu

SEQ ID NO: 89728 - RNA, 19 nt, Artificial Sequence
  Description of Artificial Sequence: Synthetic oligonucleotide
cccaaaagaagggcacaua

SEQ ID NO: 89729 - RNA, 19 nt, Artificial Sequence
  Description of Artificial Sequence: Synthetic oligonucleotide
ggcagacgcuugugaagau

SEQ ID NO: 89730 - RNA, 19 nt, Artificial Sequence
  Description of Artificial Sequence: Synthetic oligonucleotide
ccucagccgacugaccucu

SEQ ID NO: 89731 - RNA, 19 nt, Artificial Sequence
  Description of Artificial Sequence: Synthetic oligonucleotide
gcagacgcuugugaagauu

SEQ ID NO: 89732 - RNA, 19 nt, Artificial Sequence
  Description of Artificial Sequence: Synthetic oligonucleotide
gggccccuucacuguggga

SEQ ID NO: 89733 - RNA, 19 nt, Artificial Sequence
  Description of Artificial Sequence: Synthetic oligonucleotide
gcuagauauccugguccuu

SEQ ID NO: 89734 - RNA, 19 nt, Artificial Sequence
  Description of Artificial Sequence: Synthetic oligonucleotide
cuggaugaccgagguucuu

SEQ ID NO: 89735 - RNA, 19 nt, Artificial Sequence
  Description of Artificial Sequence: Synthetic oligonucleotide
cucagccgacugaccucuu

SEQ ID NO: 89736 - RNA, 19 nt, Artificial Sequence
  Description of Artificial Sequence: Synthetic oligonucleotide
ccuuuucggcuagcuggcu

SEQ ID NO: 89737 - RNA, 19 nt, Artificial Sequence
  Description of Artificial Sequence: Synthetic oligonucleotide
gccguucaccugggccccu

SEQ ID NO: 89738 - RNA, 19 nt, Artificial Sequence
  Description of Artificial Sequence: Synthetic oligonucleotide
aaguagacggcacugaucg

SEQ ID NO: 89739 - RNA, 19 nt, Artificial Sequence
  Description of Artificial Sequence: Synthetic oligonucleotide
aauaauaauaauaauaaaa

SEQ ID NO: 89740 - RNA, 19 nt, Artificial Sequence
  Description of Artificial Sequence: Synthetic oligonucleotide
uuaaaugagacauugccag

SEQ ID NO: 89741 - RNA, 19 nt, Artificial Sequence
  Description of Artificial Sequence: Synthetic oligonucleotide
aaaggauccugcuacagac

SEQ ID NO: 89742 - RNA, 19 nt, Artificial Sequence
  Description of Artificial Sequence: Synthetic oligonucleotide
aauaauaauaauaauaaua

SEQ ID NO: 89743 - RNA, 19 nt, Artificial Sequence
  Description of Artificial Sequence: Synthetic oligonucleotide
uuacauauugcuauuuggg

SEQ ID NO: 89744 - RNA, 19 nt, Artificial Sequence
  Description of Artificial Sequence: Synthetic oligonucleotide
agugcucugauguaaaggc

SEQ ID NO: 89745 - RNA, 19 nt, Artificial Sequence
  Description of Artificial Sequence: Synthetic oligonucleotide
ugugcgaaaaucuagcugc

SEQ ID NO: 89746 - RNA, 19 nt, Artificial Sequence
  Description of Artificial Sequence: Synthetic oligonucleotide
acugaucgcauacaaaagc

SEQ ID NO: 89747 - RNA, 19 nt, Artificial Sequence
  Description of Artificial Sequence: Synthetic oligonucleotide
aacauuguaaauuacgguu

SEQ ID NO: 89748 - RNA, 19 nt, Artificial Sequence
  Description of Artificial Sequence: Synthetic oligonucleotide
aacgaacacucuuucaucg

SEQ ID NO: 89749 - RNA, 19 nt, Artificial Sequence
  Description of Artificial Sequence: Synthetic oligonucleotide
auaauaauaauaauaauaa

SEQ ID NO: 89750 - RNA, 19 nt, Artificial Sequence
  Description of Artificial Sequence: Synthetic oligonucleotide
uguaacaaagccaucccag

SEQ ID NO: 89751 - RNA, 19 nt, Artificial Sequence
  Description of Artificial Sequence: Synthetic oligonucleotide
aaauuagaggguucuuugg

SEQ ID NO: 89752 - RNA, 19 nt, Artificial Sequence
  Description of Artificial Sequence: Synthetic oligonucleotide
aaacagucuucuuagaggu

SEQ ID NO: 89753 - RNA, 19 nt, Artificial Sequence
  Description of Artificial Sequence: Synthetic oligonucleotide
uuucaucaaaugcuuacgg

SEQ ID NO: 89754 - RNA, 19 nt, Artificial Sequence
  Description of Artificial Sequence: Synthetic oligonucleotide
uagauauagauguaaggcc

SEQ ID NO: 89755 - RNA, 19 nt, Artificial Sequence
  Description of Artificial Sequence: Synthetic oligonucleotide
uuauauauucugacaagcc

SEQ ID NO: 89756 - RNA, 19 nt, Artificial Sequence
  Description of Artificial Sequence: Synthetic oligonucleotide
aguaagugaacugaagcgc

SEQ ID NO: 89757 - RNA, 19 nt, Artificial Sequence
  Description of Artificial Sequence: Synthetic oligonucleotide
uuugucuuagccaaaagua

SEQ ID NO: 89758 - RNA, 19 nt, Artificial Sequence
  Description of Artificial Sequence: Synthetic oligonucleotide
gaugaaacacucuucacac

SEQ ID NO: 89759 - RNA, 19 nt, Artificial Sequence
  Description of Artificial Sequence: Synthetic oligonucleotide
ugaugaacaaaacugguau

SEQ ID NO: 89760 - RNA, 19 nt, Artificial Sequence
  Description of Artificial Sequence: Synthetic oligonucleotide
acuaaagaguguuucauca

SEQ ID NO: 89761 - RNA, 19 nt, Artificial Sequence
  Description of Artificial Sequence: Synthetic oligonucleotide
uuaacagaguaggagaucc

SEQ ID NO: 89762 - RNA, 19 nt, Artificial Sequence
  Description of Artificial Sequence: Synthetic oligonucleotide
auaaccaacacauaaucaa

SEQ ID NO: 89763 - RNA, 19 nt, Artificial Sequence
  Description of Artificial Sequence: Synthetic oligonucleotide
gagauauguacccagguac

SEQ ID NO: 89764 - RNA, 19 nt, Artificial Sequence
  Description of Artificial Sequence: Synthetic oligonucleotide
aauauguaccaauaauaau

SEQ ID NO: 89765 - RNA, 19 nt, Artificial Sequence
  Description of Artificial Sequence: Synthetic oligonucleotide
aauuagaggguucuuuggu

SEQ ID NO: 89766 - RNA, 19 nt, Artificial Sequence
  Description of Artificial Sequence: Synthetic oligonucleotide
agauauagauguaaggccg

SEQ ID NO: 89767 - RNA, 19 nt, Artificial Sequence
  Description of Artificial Sequence: Synthetic oligonucleotide
uugaaggguaauauguacc

SEQ ID NO: 89768 - RNA, 19 nt, Artificial Sequence
  Description of Artificial Sequence: Synthetic oligonucleotide
uacggguucggucaaaacc

SEQ ID NO: 89769 - RNA, 19 nt, Artificial Sequence
  Description of Artificial Sequence: Synthetic oligonucleotide
ucucacuuuacuaaacaac

SEQ ID NO: 89770 - RNA, 19 nt, Artificial Sequence
  Description of Artificial Sequence: Synthetic oligonucleotide
uaguccgauagcaacacag

SEQ ID NO: 89771 - RNA, 19 nt, Artificial Sequence
  Description of Artificial Sequence: Synthetic oligonucleotide
gauguaaggccgcuaaaag

SEQ ID NO: 89772 - RNA, 19 nt, Artificial Sequence
  Description of Artificial Sequence: Synthetic oligonucleotide
uguaaggccgcuaaaaguu

SEQ ID NO: 89773 - RNA, 19 nt, Artificial Sequence
  Description of Artificial Sequence: Synthetic oligonucleotide
accagaguaguccuguugg

SEQ ID NO: 89774 - RNA, 19 nt, Artificial Sequence
  Description of Artificial Sequence: Synthetic oligonucleotide
agacuuuacccauaaguag

SEQ ID NO: 89775 - RNA, 19 nt, Artificial Sequence
  Description of Artificial Sequence: Synthetic oligonucleotide
ucucuaguuagcaggaaug

SEQ ID NO: 89776 - RNA, 19 nt, Artificial Sequence
  Description of Artificial Sequence: Synthetic oligonucleotide
ugaaggguaauauguacca

SEQ ID NO: 89777 - RNA, 19 nt, Artificial Sequence
  Description of Artificial Sequence: Synthetic oligonucleotide
uaaguaguaagugaacuga

SEQ ID NO: 89778 - RNA, 19 nt, Artificial Sequence
  Description of Artificial Sequence: Synthetic oligonucleotide
ucugaguguaaacacggug

SEQ ID NO: 89779 - RNA, 19 nt, Artificial Sequence
  Description of Artificial Sequence: Synthetic oligonucleotide
aaugcuuacgguauuaaaa

SEQ ID NO: 89780 - RNA, 19 nt, Artificial Sequence
  Description of Artificial Sequence: Synthetic oligonucleotide
uaauaauaauaauaauaaa

SEQ ID NO: 89781 - RNA, 19 nt, Artificial Sequence
  Description of Artificial Sequence: Synthetic oligonucleotide
auauguaccaauaauaaua

SEQ ID NO: 89782 - RNA, 19 nt, Artificial Sequence
  Description of Artificial Sequence: Synthetic oligonucleotide
aaacauggagcagugaaca

SEQ ID NO: 89783 - RNA, 19 nt, Artificial Sequence
  Description of Artificial Sequence: Synthetic oligonucleotide
uacuauucuuccuagugga

SEQ ID NO: 89784 - RNA, 19 nt, Artificial Sequence
  Description of Artificial Sequence: Synthetic oligonucleotide
aacugguauaaaaugagga

SEQ ID NO: 89785 - RNA, 19 nt, Artificial Sequence
  Description of Artificial Sequence: Synthetic oligonucleotide
ugaguguaaacacggugcc

SEQ ID NO: 89786 - RNA, 19 nt, Artificial Sequence
  Description of Artificial Sequence: Synthetic oligonucleotide
uacauauugcuauuugggu

SEQ ID NO: 89787 - RNA, 19 nt, Artificial Sequence
  Description of Artificial Sequence: Synthetic oligonucleotide
aaaguaugcuucucuaaaa

SEQ ID NO: 89788 - RNA, 19 nt, Artificial Sequence
  Description of Artificial Sequence: Synthetic oligonucleotide
auaaaguugccuauaagcu

SEQ ID NO: 89789 - RNA, 19 nt, Artificial Sequence
  Description of Artificial Sequence: Synthetic oligonucleotide
uaaaagucccgcuccuugg

SEQ ID NO: 89790 - RNA, 19 nt, Artificial Sequence
  Description of Artificial Sequence: Synthetic oligonucleotide
ugugccagggaccaaauua

SEQ ID NO: 89791 - RNA, 19 nt, Artificial Sequence
  Description of Artificial Sequence: Synthetic oligonucleotide
agugcuauaugacuguuau

SEQ ID NO: 89792 - RNA, 19 nt, Artificial Sequence
  Description of Artificial Sequence: Synthetic oligonucleotide
aauaaccaacacauaauca

SEQ ID NO: 89793 - RNA, 19 nt, Artificial Sequence
  Description of Artificial Sequence: Synthetic oligonucleotide
accagaauagccaauaacu

SEQ ID NO: 89794 - RNA, 19 nt, Artificial Sequence
  Description of Artificial Sequence: Synthetic oligonucleotide
uguaaauuacgguuucuuc

SEQ ID NO: 89795 - RNA, 19 nt, Artificial Sequence
  Description of Artificial Sequence: Synthetic oligonucleotide
cuuauagcggcagugagug

SEQ ID NO: 89796 - RNA, 19 nt, Artificial Sequence
  Description of Artificial Sequence: Synthetic oligonucleotide
uuaaguaccuggugaaaac

SEQ ID NO: 89797 - RNA, 19 nt, Artificial Sequence
  Description of Artificial Sequence: Synthetic oligonucleotide
uaucuaguccgauagcaac

SEQ ID NO: 89798 - RNA, 19 nt, Artificial Sequence
  Description of Artificial Sequence: Synthetic oligonucleotide
uccaaucucggcguuacgg

SEQ ID NO: 89799 - RNA, 19 nt, Artificial Sequence
  Description of Artificial Sequence: Synthetic oligonucleotide
uuauuuccaaucucggcgu

SEQ ID NO: 89800 - RNA, 19 nt, Artificial Sequence
  Description of Artificial Sequence: Synthetic oligonucleotide
uaaggccgcuaaaaguugg

SEQ ID NO: 89801 - RNA, 19 nt, Artificial Sequence
  Description of Artificial Sequence: Synthetic oligonucleotide
uaugcaugugccagggacc

SEQ ID NO: 89802 - RNA, 19 nt, Artificial Sequence
  Description of Artificial Sequence: Synthetic oligonucleotide
uuacgguuucuucauaaaa

SEQ ID NO: 89803 - RNA, 19 nt, Artificial Sequence
  Description of Artificial Sequence: Synthetic oligonucleotide
ccaauaauaauaauaauaa

SEQ ID NO: 89804 - RNA, 19 nt, Artificial Sequence
  Description of Artificial Sequence: Synthetic oligonucleotide
ucuccaaaucuguaguaug

SEQ ID NO: 89805 - RNA, 19 nt, Artificial Sequence
  Description of Artificial Sequence: Synthetic oligonucleotide
augaaacacucuucacacc

SEQ ID NO: 89806 - RNA, 19 nt, Artificial Sequence
  Description of Artificial Sequence: Synthetic oligonucleotide
cauuggagaaggcaauugc

SEQ ID NO: 89807 - RNA, 19 nt, Artificial Sequence
  Description of Artificial Sequence: Synthetic oligonucleotide
gguucuguacccuuggugc

SEQ ID NO: 89808 - RNA, 19 nt, Artificial Sequence
  Description of Artificial Sequence: Synthetic oligonucleotide
uacagaccgagauauguac

SEQ ID NO: 89809 - RNA, 19 nt, Artificial Sequence
  Description of Artificial Sequence: Synthetic oligonucleotide
uugugucuuacauauugcu

SEQ ID NO: 89810 - RNA, 19 nt, Artificial Sequence
  Description of Artificial Sequence: Synthetic oligonucleotide
aaaugcuuacgguauuaaa

SEQ ID NO: 89811 - RNA, 19 nt, Artificial Sequence
  Description of Artificial Sequence: Synthetic oligonucleotide
agauguuggugacucgagg

SEQ ID NO: 89812 - RNA, 19 nt, Artificial Sequence
  Description of Artificial Sequence: Synthetic oligonucleotide
guaugcaugugccagggac

SEQ ID NO: 89813 - RNA, 19 nt, Artificial Sequence
  Description of Artificial Sequence: Synthetic oligonucleotide
aagucccgcuccuugguuc

SEQ ID NO: 89814 - RNA, 19 nt, Artificial Sequence
  Description of Artificial Sequence: Synthetic oligonucleotide
uauagcacuaaagaguguu

SEQ ID NO: 89815 - RNA, 19 nt, Artificial Sequence
  Description of Artificial Sequence: Synthetic oligonucleotide
aacaguguguuuaaacagu

SEQ ID NO: 89816 - RNA, 19 nt, Artificial Sequence
  Description of Artificial Sequence: Synthetic oligonucleotide
uucacaccggagaaaccgg

SEQ ID NO: 89817 - RNA, 19 nt, Artificial Sequence
  Description of Artificial Sequence: Synthetic oligonucleotide
uuugacaaauacuucuguu

SEQ ID NO: 89818 - RNA, 19 nt, Artificial Sequence
  Description of Artificial Sequence: Synthetic oligonucleotide
gacgacuggggucagaguc

SEQ ID NO: 89819 - RNA, 19 nt, Artificial Sequence
  Description of Artificial Sequence: Synthetic oligonucleotide
uauagcggcagugagugac

SEQ ID NO: 89820 - RNA, 19 nt, Artificial Sequence
  Description of Artificial Sequence: Synthetic oligonucleotide
acauauugcuauuugggua

SEQ ID NO: 89821 - RNA, 19 nt, Artificial Sequence
  Description of Artificial Sequence: Synthetic oligonucleotide
ucuuagagguuuucuugcc

SEQ ID NO: 89822 - RNA, 19 nt, Artificial Sequence
  Description of Artificial Sequence: Synthetic oligonucleotide
cagcacaucguccaaacac

SEQ ID NO: 89823 - RNA, 19 nt, Artificial Sequence
  Description of Artificial Sequence: Synthetic oligonucleotide
ugugucuuacauauugcua

SEQ ID NO: 89824 - RNA, 19 nt, Artificial Sequence
  Description of Artificial Sequence: Synthetic oligonucleotide
aucaugauuguaggaggcc

SEQ ID NO: 89825 - RNA, 19 nt, Artificial Sequence
  Description of Artificial Sequence: Synthetic oligonucleotide
acuguuauguucaauguau

SEQ ID NO: 89826 - RNA, 19 nt, Artificial Sequence
  Description of Artificial Sequence: Synthetic oligonucleotide
cagaccgagauauguaccc

SEQ ID NO: 89827 - RNA, 19 nt, Artificial Sequence
  Description of Artificial Sequence: Synthetic oligonucleotide
auguaaggccgcuaaaagu

SEQ ID NO: 89828 - RNA, 19 nt, Artificial Sequence
  Description of Artificial Sequence: Synthetic oligonucleotide
agaguaguccuguuggcca

SEQ ID NO: 89829 - RNA, 19 nt, Artificial Sequence
  Description of Artificial Sequence: Synthetic oligonucleotide
uauuuggguaauucaaaua

SEQ ID NO: 89830 - RNA, 19 nt, Artificial Sequence
  Description of Artificial Sequence: Synthetic oligonucleotide
caccuaucuaguccgauag

SEQ ID NO: 89831 - RNA, 19 nt, Artificial Sequence
  Description of Artificial Sequence: Synthetic oligonucleotide
uuuggugcaauuaguccaa

SEQ ID NO: 89832 - RNA, 19 nt, Artificial Sequence
  Description of Artificial Sequence: Synthetic oligonucleotide
gaugcaaggugauguguug

SEQ ID NO: 89833 - RNA, 19 nt, Artificial Sequence
  Description of Artificial Sequence: Synthetic oligonucleotide
ugggcuaguuuguuuacug

SEQ ID NO: 89834 - RNA, 19 nt, Artificial Sequence
  Description of Artificial Sequence: Synthetic oligonucleotide
cauauugcuauuuggguaa

SEQ ID NO: 89835 - RNA, 19 nt, Artificial Sequence
  Description of Artificial Sequence: Synthetic oligonucleotide
agaaagacacccaagucgu

SEQ ID NO: 89836 - RNA, 19 nt, Artificial Sequence
  Description of Artificial Sequence: Synthetic oligonucleotide
aaaacaccugcuaaccgca

SEQ ID NO: 89837 - RNA, 19 nt, Artificial Sequence
  Description of Artificial Sequence: Synthetic oligonucleotide
ucaugauuguaggaggcca

SEQ ID NO: 89838 - RNA, 19 nt, Artificial Sequence
  Description of Artificial Sequence: Synthetic oligonucleotide
gauuguaggaggccaggac

SEQ ID NO: 89839 - RNA, 19 nt, Artificial Sequence
  Description of Artificial Sequence: Synthetic oligonucleotide
ucccagauagugcucaaaa

SEQ ID NO: 89840 - RNA, 19 nt, Artificial Sequence
  Description of Artificial Sequence: Synthetic oligonucleotide
gugcaaggaauacacacac

SEQ ID NO: 89841 - RNA, 19 nt, Artificial Sequence
  Description of Artificial Sequence: Synthetic oligonucleotide
acuaaacaacuggauaaag

SEQ ID NO: 89842 - RNA, 19 nt, Artificial Sequence
  Description of Artificial Sequence: Synthetic oligonucleotide
ucucuuaugugaacuguua

SEQ ID NO: 89843 - RNA, 19 nt, Artificial Sequence
  Description of Artificial Sequence: Synthetic oligonucleotide
accuaucuaguccgauagc

SEQ ID NO: 89844 - RNA, 19 nt, Artificial Sequence
  Description of Artificial Sequence: Synthetic oligonucleotide
guucggucaaaaccugggg

SEQ ID NO: 89845 - RNA, 19 nt, Artificial Sequence
  Description of Artificial Sequence: Synthetic oligonucleotide
aguggcguguuguauaaaa

SEQ ID NO: 89846 - RNA, 19 nt, Artificial Sequence
  Description of Artificial Sequence: Synthetic oligonucleotide
acagaccgagauauguacc

SEQ ID NO: 89847 - RNA, 19 nt, Artificial Sequence
  Description of Artificial Sequence: Synthetic oligonucleotide
gaccgagauauguacccag

SEQ ID NO: 89848 - RNA, 19 nt, Artificial Sequence
  Description of Artificial Sequence: Synthetic oligonucleotide
guuaucaucaacccugggu

SEQ ID NO: 89849 - RNA, 19 nt, Artificial Sequence
  Description of Artificial Sequence: Synthetic oligonucleotide
cugaucgcauacaaaagca

SEQ ID NO: 89850 - RNA, 19 nt, Artificial Sequence
  Description of Artificial Sequence: Synthetic oligonucleotide
aguguaaacacggugccaa

SEQ ID NO: 89851 - RNA, 19 nt, Artificial Sequence
  Description of Artificial Sequence: Synthetic oligonucleotide
cucacaaggacgacugcug

SEQ ID NO: 89852 - RNA, 19 nt, Artificial Sequence
  Description of Artificial Sequence: Synthetic oligonucleotide
guagucucccucccgaaug

SEQ ID NO: 89853 - RNA, 19 nt, Artificial Sequence
  Description of Artificial Sequence: Synthetic oligonucleotide
aaggacgacugcugcaagu

SEQ ID NO: 89854 - RNA, 19 nt, Artificial Sequence
  Description of Artificial Sequence: Synthetic oligonucleotide
acauacuauucuguacuuc

SEQ ID NO: 89855 - RNA, 19 nt, Artificial Sequence
  Description of Artificial Sequence: Synthetic oligonucleotide
gaagauguuggugacucga

SEQ ID NO: 89856 - RNA, 19 nt, Artificial Sequence
  Description of Artificial Sequence: Synthetic oligonucleotide
uguuguuauccaccagagu

SEQ ID NO: 89857 - RNA, 19 nt, Artificial Sequence
  Description of Artificial Sequence: Synthetic oligonucleotide
gguacauacuauucuguac

SEQ ID NO: 89858 - RNA, 19 nt, Artificial Sequence
  Description of Artificial Sequence: Synthetic oligonucleotide
cugcugggaagguacauac

SEQ ID NO: 89859 - RNA, 19 nt, Artificial Sequence
  Description of Artificial Sequence: Synthetic oligonucleotide
gugugcgaaaaucuagcug

SEQ ID NO: 89860 - RNA, 19 nt, Artificial Sequence
  Description of Artificial Sequence: Synthetic oligonucleotide
agcgaucugauagccauag

SEQ ID NO: 89861 - RNA, 19 nt, Artificial Sequence
  Description of Artificial Sequence: Synthetic oligonucleotide
acaugacccgggcauguuc

SEQ ID NO: 89862 - RNA, 19 nt, Artificial Sequence
  Description of Artificial Sequence: Synthetic oligonucleotide
cucaguacuaauguaacaa

SEQ ID NO: 89863 - RNA, 19 nt, Artificial Sequence
  Description of Artificial Sequence: Synthetic oligonucleotide
aaagaccgguucucacaag

SEQ ID NO: 89864 - RNA, 19 nt, Artificial Sequence
  Description of Artificial Sequence: Synthetic oligonucleotide
auaaggccagcuguuauca

SEQ ID NO: 89865 - RNA, 19 nt, Artificial Sequence
  Description of Artificial Sequence: Synthetic oligonucleotide
ucuaguccgauagcaacac

SEQ ID NO: 89866 - RNA, 19 nt, Artificial Sequence
  Description of Artificial Sequence: Synthetic oligonucleotide
gaacauaaacaccuaucua

SEQ ID NO: 89867 - RNA, 19 nt, Artificial Sequence
  Description of Artificial Sequence: Synthetic oligonucleotide
gacgacugcugcaagucag

SEQ ID NO: 89868 - RNA, 19 nt, Artificial Sequence
  Description of Artificial Sequence: Synthetic oligonucleotide
gaugcaugccugaacauaa

SEQ ID NO: 89869 - RNA, 19 nt, Artificial Sequence
  Description of Artificial Sequence: Synthetic oligonucleotide
agaauauucuacaccuuga

SEQ ID NO: 89870 - RNA, 19 nt, Artificial Sequence
  Description of Artificial Sequence: Synthetic oligonucleotide
acggugccaaccucaguac

SEQ ID NO: 89871 - RNA, 19 nt, Artificial Sequence
  Description of Artificial Sequence: Synthetic oligonucleotide
gaacacucuuucaucguug

SEQ ID NO: 89872 - RNA, 19 nt, Artificial Sequence
  Description of Artificial Sequence: Synthetic oligonucleotide
auuacgguuucuucauaaa

SEQ ID NO: 89873 - RNA, 19 nt, Artificial Sequence
  Description of Artificial Sequence: Synthetic oligonucleotide
gacggcacugaucgcauac

SEQ ID NO: 89874 - RNA, 19 nt, Artificial Sequence
  Description of Artificial Sequence: Synthetic oligonucleotide
guugccuauaagcuggaaa

SEQ ID NO: 89875 - RNA, 19 nt, Artificial Sequence
  Description of Artificial Sequence: Synthetic oligonucleotide
aggacgacugcugcaaguc

SEQ ID NO: 89876 - RNA, 19 nt, Artificial Sequence
  Description of Artificial Sequence: Synthetic oligonucleotide
gcuauaugacuguuauucc

SEQ ID NO: 89877 - RNA, 19 nt, Artificial Sequence
  Description of Artificial Sequence: Synthetic oligonucleotide
agauguaaggccgcuaaaa

SEQ ID NO: 89878 - RNA, 19 nt, Artificial Sequence
  Description of Artificial Sequence: Synthetic oligonucleotide
uccuaguggauaccaugcu

SEQ ID NO: 89879 - RNA, 19 nt, Artificial Sequence
  Description of Artificial Sequence: Synthetic oligonucleotide
uucuuccuaguggauacca

SEQ ID NO: 89880 - RNA, 19 nt, Artificial Sequence
  Description of Artificial Sequence: Synthetic oligonucleotide
guaagugaacugaagcgca

SEQ ID NO: 89881 - RNA, 19 nt, Artificial Sequence
  Description of Artificial Sequence: Synthetic oligonucleotide
uguucucaauaaaccaauu

SEQ ID NO: 89882 - RNA, 19 nt, Artificial Sequence
  Description of Artificial Sequence: Synthetic oligonucleotide
agcaacacagaggcccacc

SEQ ID NO: 89883 - RNA, 19 nt, Artificial Sequence
  Description of Artificial Sequence: Synthetic oligonucleotide
acggguucggucaaaaccu

SEQ ID NO: 89884 - RNA, 19 nt, Artificial Sequence
  Description of Artificial Sequence: Synthetic oligonucleotide
guuaaguaccuggugaaaa

SEQ ID NO: 89885 - RNA, 19 nt, Artificial Sequence
  Description of Artificial Sequence: Synthetic oligonucleotide
auucuuccuaguggauacc

SEQ ID NO: 89886 - RNA, 19 nt, Artificial Sequence
  Description of Artificial Sequence: Synthetic oligonucleotide
ucacaccggagaaaccgga

SEQ ID NO: 89887 - RNA, 19 nt, Artificial Sequence
  Description of Artificial Sequence: Synthetic oligonucleotide
uuauaggcagcuguuucau

SEQ ID NO: 89888 - RNA, 19 nt, Artificial Sequence
  Description of Artificial Sequence: Synthetic oligonucleotide
cagaguaguccuguuggcc

SEQ ID NO: 89889 - RNA, 19 nt, Artificial Sequence
  Description of Artificial Sequence: Synthetic oligonucleotide
agcaacgaacacucuuuca

SEQ ID NO: 89890 - RNA, 19 nt, Artificial Sequence
  Description of Artificial Sequence: Synthetic oligonucleotide
ccuauaagcuggaaaauga

SEQ ID NO: 89891 - RNA, 19 nt, Artificial Sequence
  Description of Artificial Sequence: Synthetic oligonucleotide
aucucggcguuacggguuc

SEQ ID NO: 89892 - RNA, 19 nt, Artificial Sequence
  Description of Artificial Sequence: Synthetic oligonucleotide
uccccuuaaucuucugagu

SEQ ID NO: 89893 - RNA, 19 nt, Artificial Sequence
  Description of Artificial Sequence: Synthetic oligonucleotide
ucuaguuagcaggaaugua

SEQ ID NO: 89894 - RNA, 19 nt, Artificial Sequence
  Description of Artificial Sequence: Synthetic oligonucleotide
aguuagcaggaauguagau

SEQ ID NO: 89895 - RNA, 19 nt, Artificial Sequence
  Description of Artificial Sequence: Synthetic oligonucleotide
caccuacuauucuuccuag

SEQ ID NO: 89896 - RNA, 19 nt, Artificial Sequence
  Description of Artificial Sequence: Synthetic oligonucleotide
uguuaaguaccuggugaaa

SEQ ID NO: 89897 - RNA, 19 nt, Artificial Sequence
  Description of Artificial Sequence: Synthetic oligonucleotide
uuaagggcuuuccccuuaa

SEQ ID NO: 89898 - RNA, 19 nt, Artificial Sequence
  Description of Artificial Sequence: Synthetic oligonucleotide
cuuuugacaauugucacau

SEQ ID NO: 89899 - RNA, 19 nt, Artificial Sequence
  Description of Artificial Sequence: Synthetic oligonucleotide
caauaauaauaauaauaau

SEQ ID NO: 89900 - RNA, 19 nt, Artificial Sequence
  Description of Artificial Sequence: Synthetic oligonucleotide
guguguuuaaacagucuuc

SEQ ID NO: 89901 - RNA, 19 nt, Artificial Sequence
  Description of Artificial Sequence: Synthetic oligonucleotide
ccaaucucggcguuacggg

SEQ ID NO: 89902 - RNA, 19 nt, Artificial Sequence
  Description of Artificial Sequence: Synthetic oligonucleotide
ccauguagaaauacgacaa

SEQ ID NO: 89903 - RNA, 19 nt, Artificial Sequence
  Description of Artificial Sequence: Synthetic oligonucleotide
uuccaaucucggcguuacg

SEQ ID NO: 89904 - RNA, 19 nt, Artificial Sequence
  Description of Artificial Sequence: Synthetic oligonucleotide
aucuaguccgauagcaaca

SEQ ID NO: 89905 - RNA, 19 nt, Artificial Sequence
  Description of Artificial Sequence: Synthetic oligonucleotide
accgagauauguacccagg

SEQ ID NO: 89906 - RNA, 19 nt, Artificial Sequence
  Description of Artificial Sequence: Synthetic oligonucleotide
acgaacacucuuucaucgu

SEQ ID NO: 89907 - RNA, 19 nt, Artificial Sequence
  Description of Artificial Sequence: Synthetic oligonucleotide
ucguccaaacacagaccca

SEQ ID NO: 89908 - RNA, 19 nt, Artificial Sequence
  Description of Artificial Sequence: Synthetic oligonucleotide
caggaccacgcuuggacug

SEQ ID NO: 89909 - RNA, 19 nt, Artificial Sequence
  Description of Artificial Sequence: Synthetic oligonucleotide
ggcguuacggguucgguca

SEQ ID NO: 89910 - RNA, 19 nt, Artificial Sequence
  Description of Artificial Sequence: Synthetic oligonucleotide
agcaguggcguguuguaua

SEQ ID NO: 89911 - RNA, 19 nt, Artificial Sequence
  Description of Artificial Sequence: Synthetic oligonucleotide
caaagaccgguucucacaa

SEQ ID NO: 89912 - RNA, 19 nt, Artificial Sequence
  Description of Artificial Sequence: Synthetic oligonucleotide
uuacggguucggucaaaac

SEQ ID NO: 89913 - RNA, 19 nt, Artificial Sequence
  Description of Artificial Sequence: Synthetic oligonucleotide
accacgcuuggacuggagu

SEQ ID NO: 89914 - RNA, 19 nt, Artificial Sequence
  Description of Artificial Sequence: Synthetic oligonucleotide
cuaucuaguccgauagcaa

SEQ ID NO: 89915 - RNA, 19 nt, Artificial Sequence
  Description of Artificial Sequence: Synthetic oligonucleotide
cgaucugauagccauaguc

SEQ ID NO: 89916 - RNA, 19 nt, Artificial Sequence
  Description of Artificial Sequence: Synthetic oligonucleotide
agugcggaugcaugccuga

SEQ ID NO: 89917 - RNA, 19 nt, Artificial Sequence
  Description of Artificial Sequence: Synthetic oligonucleotide
acaccuaucuaguccgaua

SEQ ID NO: 89918 - RNA, 19 nt, Artificial Sequence
  Description of Artificial Sequence: Synthetic oligonucleotide
cucuaaaaucaucuaagau

SEQ ID NO: 89919 - RNA, 19 nt, Artificial Sequence
  Description of Artificial Sequence: Synthetic oligonucleotide
uauagauguaaggccgcua

SEQ ID NO: 89920 - RNA, 19 nt, Artificial Sequence
  Description of Artificial Sequence: Synthetic oligonucleotide
cacggugccaaccucagua

SEQ ID NO: 89921 - RNA, 19 nt, Artificial Sequence
  Description of Artificial Sequence: Synthetic oligonucleotide
accuacuauucuuccuagu

SEQ ID NO: 89922 - RNA, 19 nt, Artificial Sequence
  Description of Artificial Sequence: Synthetic oligonucleotide
gccuauaagcuggaaaaug

SEQ ID NO: 89923 - RNA, 19 nt, Artificial Sequence
  Description of Artificial Sequence: Synthetic oligonucleotide
uccccaccaaaagcagugg

SEQ ID NO: 89924 - RNA, 19 nt, Artificial Sequence
  Description of Artificial Sequence: Synthetic oligonucleotide
agccaaaaguaugcuucuc

SEQ ID NO: 89925 - RNA, 19 nt, Artificial Sequence
  Description of Artificial Sequence: Synthetic oligonucleotide
guagccacgcuuccuuuuc

SEQ ID NO: 89926 - RNA, 19 nt, Artificial Sequence
  Description of Artificial Sequence: Synthetic oligonucleotide
gaauaaggccagcuguuau

SEQ ID NO: 89927 - RNA, 19 nt, Artificial Sequence
  Description of Artificial Sequence: Synthetic oligonucleotide
gacccgggcauguucaucu

SEQ ID NO: 89928 - RNA, 19 nt, Artificial Sequence
  Description of Artificial Sequence: Synthetic oligonucleotide
gaauagccaauaacuccuc

SEQ ID NO: 89929 - RNA, 19 nt, Artificial Sequence
  Description of Artificial Sequence: Synthetic oligonucleotide
aguccgauagcaacacaga

SEQ ID NO: 89930 - RNA, 19 nt, Artificial Sequence
  Description of Artificial Sequence: Synthetic oligonucleotide
ccugcuaaccgcagugcgg

SEQ ID NO: 89931 - RNA, 19 nt, Artificial Sequence
  Description of Artificial Sequence: Synthetic oligonucleotide
augcaaggugauguguuga

SEQ ID NO: 89932 - RNA, 19 nt, Artificial Sequence
  Description of Artificial Sequence: Synthetic oligonucleotide
caagucguaggcugaugca

SEQ ID NO: 89933 - RNA, 19 nt, Artificial Sequence
  Description of Artificial Sequence: Synthetic oligonucleotide
aaaugccuauauagcacua

SEQ ID NO: 89934 - RNA, 19 nt, Artificial Sequence
  Description of Artificial Sequence: Synthetic oligonucleotide
ucuguacccuuggugcugu

SEQ ID NO: 89935 - RNA, 19 nt, Artificial Sequence
  Description of Artificial Sequence: Synthetic oligonucleotide
auacgacaagcagcagcac

SEQ ID NO: 89936 - RNA, 19 nt, Artificial Sequence
  Description of Artificial Sequence: Synthetic oligonucleotide
ccucauaauuuuauaggca

SEQ ID NO: 89937 - RNA, 19 nt, Artificial Sequence
  Description of Artificial Sequence: Synthetic oligonucleotide
aaucucggcguuacggguu

SEQ ID NO: 89938 - RNA, 19 nt, Artificial Sequence
  Description of Artificial Sequence: Synthetic oligonucleotide
gaugcacacugaugcaaua

SEQ ID NO: 89939 - RNA, 19 nt, Artificial Sequence
  Description of Artificial Sequence: Synthetic oligonucleotide
uuauagcggcagugaguga

SEQ ID NO: 89940 - RNA, 19 nt, Artificial Sequence
  Description of Artificial Sequence: Synthetic oligonucleotide
gaaggguaauauguaccaa

SEQ ID NO: 89941 - RNA, 19 nt, Artificial Sequence
  Description of Artificial Sequence: Synthetic oligonucleotide
aaggccgcuaaaaguuggu

SEQ ID NO: 89942 - RNA, 19 nt, Artificial Sequence
  Description of Artificial Sequence: Synthetic oligonucleotide
cuguucucaauaaaccaau

SEQ ID NO: 89943 - RNA, 19 nt, Artificial Sequence
  Description of Artificial Sequence: Synthetic oligonucleotide
auguuggggccuaagcccu

SEQ ID NO: 89944 - RNA, 19 nt, Artificial Sequence
  Description of Artificial Sequence: Synthetic oligonucleotide
guaccuggugaaaacaccu

SEQ ID NO: 89945 - RNA, 19 nt, Artificial Sequence
  Description of Artificial Sequence: Synthetic oligonucleotide
cagugcggaugcaugccug

SEQ ID NO: 89946 - RNA, 19 nt, Artificial Sequence
  Description of Artificial Sequence: Synthetic oligonucleotide
gcuguucucaauaaaccaa

SEQ ID NO: 89947 - RNA, 19 nt, Artificial Sequence
  Description of Artificial Sequence: Synthetic oligonucleotide
agaccgagauauguaccca

SEQ ID NO: 89948 - RNA, 19 nt, Artificial Sequence
  Description of Artificial Sequence: Synthetic oligonucleotide
ggucuguaaaagaaccauc

SEQ ID NO: 89949 - RNA, 19 nt, Artificial Sequence
  Description of Artificial Sequence: Synthetic oligonucleotide
ccuaucuaguccgauagca

SEQ ID NO: 89950 - RNA, 19 nt, Artificial Sequence
  Description of Artificial Sequence: Synthetic oligonucleotide
gugacccacgugcagugga

SEQ ID NO: 89951 - RNA, 19 nt, Artificial Sequence
  Description of Artificial Sequence: Synthetic oligonucleotide
cugcuaaccgcagugcgga

SEQ ID NO: 89952 - RNA, 19 nt, Artificial Sequence
  Description of Artificial Sequence: Synthetic oligonucleotide
ugcgaaaaucuagcugcau

SEQ ID NO: 89953 - RNA, 19 nt, Artificial Sequence
  Description of Artificial Sequence: Synthetic oligonucleotide
cacaucguccaaacacaga

SEQ ID NO: 89954 - RNA, 19 nt, Artificial Sequence
  Description of Artificial Sequence: Synthetic oligonucleotide
caccggagaaaccggaaaa

SEQ ID NO: 89955 - RNA, 19 nt, Artificial Sequence
  Description of Artificial Sequence: Synthetic oligonucleotide
cguccaaacacagacccag

SEQ ID NO: 89956 - RNA, 19 nt, Artificial Sequence
  Description of Artificial Sequence: Synthetic oligonucleotide
aggccgcuaaaaguuggug

SEQ ID NO: 89957 - RNA, 19 nt, Artificial Sequence
  Description of Artificial Sequence: Synthetic oligonucleotide
aaccgcagugcggaugcau

SEQ ID NO: 89958 - RNA, 19 nt, Artificial Sequence
  Description of Artificial Sequence: Synthetic oligonucleotide
acacucuuucaucguugau

SEQ ID NO: 89959 - RNA, 19 nt, Artificial Sequence
  Description of Artificial Sequence: Synthetic oligonucleotide
accgcagugcggaugcaug

SEQ ID NO: 89960 - RNA, 19 nt, Artificial Sequence
  Description of Artificial Sequence: Synthetic oligonucleotide
acgacuggggucagaguca

SEQ ID NO: 89961 - RNA, 19 nt, Artificial Sequence
  Description of Artificial Sequence: Synthetic oligonucleotide
aggacaugacccgggcaug

SEQ ID NO: 89962 - RNA, 19 nt, Artificial Sequence
  Description of Artificial Sequence: Synthetic oligonucleotide
ccagaguaguccuguuggc

SEQ ID NO: 89963 - RNA, 19 nt, Artificial Sequence
  Description of Artificial Sequence: Synthetic oligonucleotide
uauugcuauuuggguaauu

SEQ ID NO: 89964 - RNA, 19 nt, Artificial Sequence
  Description of Artificial Sequence: Synthetic oligonucleotide
gcacaucguccaaacacag

SEQ ID NO: 89965 - RNA, 19 nt, Artificial Sequence
  Description of Artificial Sequence: Synthetic oligonucleotide
uguuggggccuaagcccuc

SEQ ID NO: 89966 - RNA, 19 nt, Artificial Sequence
  Description of Artificial Sequence: Synthetic oligonucleotide
guuacggguucggucaaaa

SEQ ID NO: 89967 - RNA, 19 nt, Artificial Sequence
  Description of Artificial Sequence: Synthetic oligonucleotide
auuuccaaucucggcguua

SEQ ID NO: 89968 - RNA, 19 nt, Artificial Sequence
  Description of Artificial Sequence: Synthetic oligonucleotide
gcuacagaccgagauaugu

SEQ ID NO: 89969 - RNA, 19 nt, Artificial Sequence
  Description of Artificial Sequence: Synthetic oligonucleotide
auauugcuauuuggguaau

SEQ ID NO: 89970 - RNA, 19 nt, Artificial Sequence
  Description of Artificial Sequence: Synthetic oligonucleotide
ucgaggcuugugaccuagu

SEQ ID NO: 89971 - RNA, 19 nt, Artificial Sequence
  Description of Artificial Sequence: Synthetic oligonucleotide
cucggcguuacggguucgg

SEQ ID NO: 89972 - RNA, 19 nt, Artificial Sequence
  Description of Artificial Sequence: Synthetic oligonucleotide
cucuaguuagcaggaaugu

SEQ ID NO: 89973 - RNA, 19 nt, Artificial Sequence
  Description of Artificial Sequence: Synthetic oligonucleotide
auagcggcagugagugaca

SEQ ID NO: 89974 - RNA, 19 nt, Artificial Sequence
  Description of Artificial Sequence: Synthetic oligonucleotide
cagcaguaacauucucaca

SEQ ID NO: 89975 - RNA, 19 nt, Artificial Sequence
  Description of Artificial Sequence: Synthetic oligonucleotide
ccgguucucacaaggacga

SEQ ID NO: 89976 - RNA, 19 nt, Artificial Sequence
  Description of Artificial Sequence: Synthetic oligonucleotide
agggaccaaauuagagggu

SEQ ID NO: 89977 - RNA, 19 nt, Artificial Sequence
  Description of Artificial Sequence: Synthetic oligonucleotide
aggcaauugcagacaacau

SEQ ID NO: 89978 - RNA, 19 nt, Artificial Sequence
  Description of Artificial Sequence: Synthetic oligonucleotide
ggugugcgaaaaucuagcu

SEQ ID NO: 89979 - RNA, 19 nt, Artificial Sequence
  Description of Artificial Sequence: Synthetic oligonucleotide
ugccaaccucaguacuaau

SEQ ID NO: 89980 - RNA, 19 nt, Artificial Sequence
  Description of Artificial Sequence: Synthetic oligonucleotide
caaucucggcguuacgggu

SEQ ID NO: 89981 - RNA, 19 nt, Artificial Sequence
  Description of Artificial Sequence: Synthetic oligonucleotide
cuaguccgauagcaacaca

SEQ ID NO: 89982 - RNA, 19 nt, Artificial Sequence
  Description of Artificial Sequence: Synthetic oligonucleotide
ucucggcguuacggguucg

SEQ ID NO: 89983 - RNA, 19 nt, Artificial Sequence
  Description of Artificial Sequence: Synthetic oligonucleotide
gcuaaccgcagugcggaug

SEQ ID NO: 89984 - RNA, 19 nt, Artificial Sequence
  Description of Artificial Sequence: Synthetic oligonucleotide
augugccagggaccaaauu

SEQ ID NO: 89985 - RNA, 19 nt, Artificial Sequence
  Description of Artificial Sequence: Synthetic oligonucleotide
gugccaaccucaguacuaa

SEQ ID NO: 89986 - RNA, 19 nt, Artificial Sequence
  Description of Artificial Sequence: Synthetic oligonucleotide
gugcgaaaaucuagcugca

SEQ ID NO: 89987 - RNA, 19 nt, Artificial Sequence
  Description of Artificial Sequence: Synthetic oligonucleotide
ccucaguacuaauguaaca

SEQ ID NO: 89988 - RNA, 19 nt, Artificial Sequence
  Description of Artificial Sequence: Synthetic oligonucleotide
cacaccggagaaaccggaa

SEQ ID NO: 89989 - RNA, 19 nt, Artificial Sequence
  Description of Artificial Sequence: Synthetic oligonucleotide
ugacccgggcauguucauc

SEQ ID NO: 89990 - RNA, 19 nt, Artificial Sequence
  Description of Artificial Sequence: Synthetic oligonucleotide
gcaguggcguguuguauaa

SEQ ID NO: 89991 - RNA, 19 nt, Artificial Sequence
  Description of Artificial Sequence: Synthetic oligonucleotide
ccgcagugcggaugcaugc

SEQ ID NO: 89992 - RNA, 19 nt, Artificial Sequence
  Description of Artificial Sequence: Synthetic oligonucleotide
ggugacccacgugcagugg

SEQ ID NO: 89993 - RNA, 19 nt, Artificial Sequence
  Description of Artificial Sequence: Synthetic oligonucleotide
agcggcagugagugacaaa

SEQ ID NO: 89994 - RNA, 19 nt, Artificial Sequence
  Description of Artificial Sequence: Synthetic oligonucleotide
ccaccuacuauucuuccua

SEQ ID NO: 89995 - RNA, 19 nt, Artificial Sequence
  Description of Artificial Sequence: Synthetic oligonucleotide
cccagcgaugguucuguac

SEQ ID NO: 89996 - RNA, 19 nt, Artificial Sequence
  Description of Artificial Sequence: Synthetic oligonucleotide
ugcuaaccgcagugcggau

SEQ ID NO: 89997 - RNA, 19 nt, Artificial Sequence
  Description of Artificial Sequence: Synthetic oligonucleotide
gguucucacaaggacgacu

SEQ ID NO: 89998 - RNA, 19 nt, Artificial Sequence
  Description of Artificial Sequence: Synthetic oligonucleotide
cccugccuugucauacaag

SEQ ID NO: 89999 - RNA, 19 nt, Artificial Sequence
  Description of Artificial Sequence: Synthetic oligonucleotide
cauugcuggugacccacgu

SEQ ID NO: 90000 - RNA, 19 nt, Artificial Sequence
  Description of Artificial Sequence: Synthetic oligonucleotide
ggaaaucagcaguaacauu

SEQ ID NO: 90001 - RNA, 19 nt, Artificial Sequence
  Description of Artificial Sequence: Synthetic oligonucleotide
gcuuauagcggcagugagu

SEQ ID NO: 90002 - RNA, 19 nt, Artificial Sequence
  Description of Artificial Sequence: Synthetic oligonucleotide
ccacgcuuggacuggagua

SEQ ID NO: 90003 - RNA, 19 nt, Artificial Sequence
  Description of Artificial Sequence: Synthetic oligonucleotide
cgcaccaucacuccagcaa

SEQ ID NO: 90004 - RNA, 19 nt, Artificial Sequence
  Description of Artificial Sequence: Synthetic oligonucleotide
ccugcuacagaccgagaua

SEQ ID NO: 90005 - RNA, 19 nt, Artificial Sequence
  Description of Artificial Sequence: Synthetic oligonucleotide
cgagauauguacccaggua

SEQ ID NO: 90006 - RNA, 19 nt, Artificial Sequence
  Description of Artificial Sequence: Synthetic oligonucleotide
gugcuauaugacuguuauu

SEQ ID NO: 90007 - RNA, 19 nt, Artificial Sequence
  Description of Artificial Sequence: Synthetic oligonucleotide
gggcauguucaucuguauu

SEQ ID NO: 90008 - RNA, 19 nt, Artificial Sequence
  Description of Artificial Sequence: Synthetic oligonucleotide
cugggcuaguuuguuuacu

SEQ ID NO: 90009 - RNA, 19 nt, Artificial Sequence
  Description of Artificial Sequence: Synthetic oligonucleotide
cggguucggucaaaaccug

SEQ ID NO: 90010 - RNA, 19 nt, Artificial Sequence
  Description of Artificial Sequence: Synthetic oligonucleotide
gugcggaugcaugccugaa

SEQ ID NO: 90011 - RNA, 19 nt, Artificial Sequence
  Description of Artificial Sequence: Synthetic oligonucleotide
cgcagugcggaugcaugcc

SEQ ID NO: 90012 - RNA, 19 nt, Artificial Sequence
  Description of Artificial Sequence: Synthetic oligonucleotide
ccgggcauguucaucugua

SEQ ID NO: 90013 - RNA, 19 nt, Artificial Sequence
  Description of Artificial Sequence: Synthetic oligonucleotide
ccgagauauguacccaggu

SEQ ID NO: 90014 - RNA, 19 nt, Artificial Sequence
  Description of Artificial Sequence: Synthetic oligonucleotide
cggcguuacggguucgguc

SEQ ID NO: 90015 - RNA, 19 nt, Artificial Sequence
  Description of Artificial Sequence: Synthetic oligonucleotide
ggacaugacccgggcaugu

SEQ ID NO: 90016 - RNA, 19 nt, Artificial Sequence
  Description of Artificial Sequence: Synthetic oligonucleotide
cacgugcaguggacagcaa

SEQ ID NO: 90017 - RNA, 19 nt, Artificial Sequence
  Description of Artificial Sequence: Synthetic oligonucleotide
gcgaugguucuguacccuu

SEQ ID NO: 90018 - RNA, 19 nt, Artificial Sequence
  Description of Artificial Sequence: Synthetic oligonucleotide
gcguuacggguucggucaa

SEQ ID NO: 90019 - RNA, 19 nt, Artificial Sequence
  Description of Artificial Sequence: Synthetic oligonucleotide
caguggcguguuguauaaa

SEQ ID NO: 90020 - RNA, 19 nt, Artificial Sequence
  Description of Artificial Sequence: Synthetic oligonucleotide
cgaacacucuuucaucguu

SEQ ID NO: 90021 - RNA, 19 nt, Artificial Sequence
  Description of Artificial Sequence: Synthetic oligonucleotide
gcgaucugauagccauagu

SEQ ID NO: 90022 - RNA, 19 nt, Artificial Sequence
  Description of Artificial Sequence: Synthetic oligonucleotide
ccgcuaaaaguuggugcaa

SEQ ID NO: 90023 - RNA, 19 nt, Artificial Sequence
  Description of Artificial Sequence: Synthetic oligonucleotide
cgguucucacaaggacgac

SEQ ID NO: 90024 - RNA, 19 nt, Artificial Sequence
  Description of Artificial Sequence: Synthetic oligonucleotide
cguuacggguucggucaaa

SEQ ID NO: 90025 - RNA, 19 nt, Artificial Sequence
  Description of Artificial Sequence: Synthetic oligonucleotide
auuccaauaauagagugcc

SEQ ID NO: 90026 - RNA, 19 nt, Artificial Sequence
  Description of Artificial Sequence: Synthetic oligonucleotide
gaacgcauaauguugaucc

SEQ ID NO: 90027 - RNA, 19 nt, Artificial Sequence
  Description of Artificial Sequence: Synthetic oligonucleotide
aauaaugagacaaauguga

SEQ ID NO: 90028 - RNA, 19 nt, Artificial Sequence
  Description of Artificial Sequence: Synthetic oligonucleotide
uguuaaguuggaauuaucc

SEQ ID NO: 90029 - RNA, 19 nt, Artificial Sequence
  Description of Artificial Sequence: Synthetic oligonucleotide
agugauaaacuccugacag

SEQ ID NO: 90030 - RNA, 19 nt, Artificial Sequence
  Description of Artificial Sequence: Synthetic oligonucleotide
aauagucucguucucgggg

SEQ ID NO: 90031 - RNA, 19 nt, Artificial Sequence
  Description of Artificial Sequence: Synthetic oligonucleotide
aguagagaaaggucaaugc

SEQ ID NO: 90032 - RNA, 19 nt, Artificial Sequence
  Description of Artificial Sequence: Synthetic oligonucleotide
aaacuaaaggaguaccagg

SEQ ID NO: 90033 - RNA, 19 nt, Artificial Sequence
  Description of Artificial Sequence: Synthetic oligonucleotide
aauagccggauuccaaugc

SEQ ID NO: 90034 - RNA, 19 nt, Artificial Sequence
  Description of Artificial Sequence: Synthetic oligonucleotide
ucucuaacaagcaaaagcu

SEQ ID NO: 90035 - RNA, 19 nt, Artificial Sequence
  Description of Artificial Sequence: Synthetic oligonucleotide
ugugaugagcuauagaaug

SEQ ID NO: 90036 - RNA, 19 nt, Artificial Sequence
  Description of Artificial Sequence: Synthetic oligonucleotide
uacuuuauaaguacauuag

SEQ ID NO: 90037 - RNA, 19 nt, Artificial Sequence
  Description of Artificial Sequence: Synthetic oligonucleotide
uaaucggaaaacuaaagga

SEQ ID NO: 90038 - RNA, 19 nt, Artificial Sequence
  Description of Artificial Sequence: Synthetic oligonucleotide
cuuagagacagguauauac

SEQ ID NO: 90039 - RNA, 19 nt, Artificial Sequence
  Description of Artificial Sequence: Synthetic oligonucleotide
aacuccaaacaguucgugc

SEQ ID NO: 90040 - RNA, 19 nt, Artificial Sequence
  Description of Artificial Sequence: Synthetic oligonucleotide
ucuaaaucgucucuggucu

SEQ ID NO: 90041 - RNA, 19 nt, Artificial Sequence
  Description of Artificial Sequence: Synthetic oligonucleotide
cagauuguuguuaaguugg

SEQ ID NO: 90042 - RNA, 19 nt, Artificial Sequence
  Description of Artificial Sequence: Synthetic oligonucleotide
uuggaauuaucccaucgcg

SEQ ID NO: 90043 - RNA, 19 nt, Artificial Sequence
  Description of Artificial Sequence: Synthetic oligonucleotide
acaguaguuaggaauaugc

SEQ ID NO: 90044 - RNA, 19 nt, Artificial Sequence
  Description of Artificial Sequence: Synthetic oligonucleotide
cuaaucggaaaacuaaagg

SEQ ID NO: 90045 - RNA, 19 nt, Artificial Sequence
  Description of Artificial Sequence: Synthetic oligonucleotide
uucgcuacuauguuuauca

SEQ ID NO: 90046 - RNA, 19 nt, Artificial Sequence
  Description of Artificial Sequence: Synthetic oligonucleotide
uaauaaugagacaaaugug

SEQ ID NO: 90047 - RNA, 19 nt, Artificial Sequence
  Description of Artificial Sequence: Synthetic oligonucleotide
aagauaccauucuaacuac

SEQ ID NO: 90048 - RNA, 19 nt, Artificial Sequence
  Description of Artificial Sequence: Synthetic oligonucleotide
uguaaagggaucaacacuu

SEQ ID NO: 90049 - RNA, 19 nt, Artificial Sequence
  Description of Artificial Sequence: Synthetic oligonucleotide
uaaauccugugcaagacug

SEQ ID NO: 90050 - RNA, 19 nt, Artificial Sequence
  Description of Artificial Sequence: Synthetic oligonucleotide
uaugguagggauaagguua

SEQ ID NO: 90051 - RNA, 19 nt, Artificial Sequence
  Description of Artificial Sequence: Synthetic oligonucleotide
aauuuaagauuguucacau

SEQ ID NO: 90052 - RNA, 19 nt, Artificial Sequence
  Description of Artificial Sequence: Synthetic oligonucleotide
uauuccaauaauagagugc

SEQ ID NO: 90053 - RNA, 19 nt, Artificial Sequence
  Description of Artificial Sequence: Synthetic oligonucleotide
uccuucuacuacauaagcg

SEQ ID NO: 90054 - RNA, 19 nt, Artificial Sequence
  Description of Artificial Sequence: Synthetic oligonucleotide
uuaaauagucucguucucg

SEQ ID NO: 90055 - RNA, 19 nt, Artificial Sequence
  Description of Artificial Sequence: Synthetic oligonucleotide
guuaaguuggaauuauccc

SEQ ID NO: 90056 - RNA, 19 nt, Artificial Sequence
  Description of Artificial Sequence: Synthetic oligonucleotide
cucuacaccaagaacacag

SEQ ID NO: 90057 - RNA, 19 nt, Artificial Sequence
  Description of Artificial Sequence: Synthetic oligonucleotide
aaacucaugauguauucau

SEQ ID NO: 90058 - RNA, 19 nt, Artificial Sequence
  Description of Artificial Sequence: Synthetic oligonucleotide
acuacauaagcgugugacc

SEQ ID NO: 90059 - RNA, 19 nt, Artificial Sequence
  Description of Artificial Sequence: Synthetic oligonucleotide
uuagagacagguauauaca

SEQ ID NO: 90060 - RNA, 19 nt, Artificial Sequence
  Description of Artificial Sequence: Synthetic oligonucleotide
uuuuauuccaaggacacuc

SEQ ID NO: 90061 - RNA, 19 nt, Artificial Sequence
  Description of Artificial Sequence: Synthetic oligonucleotide
uucauaaacaaaccuuaga

SEQ ID NO: 90062 - RNA, 19 nt, Artificial Sequence
  Description of Artificial Sequence: Synthetic oligonucleotide
aacucaacauaucaacaca

SEQ ID NO: 90063 - RNA, 19 nt, Artificial Sequence
  Description of Artificial Sequence: Synthetic oligonucleotide
uuauacggcauuucuacug

SEQ ID NO: 90064 - RNA, 19 nt, Artificial Sequence
  Description of Artificial Sequence: Synthetic oligonucleotide
ugucaaauuacagucaagu

SEQ ID NO: 90065 - RNA, 19 nt, Artificial Sequence
  Description of Artificial Sequence: Synthetic oligonucleotide
aauaacugguucuguaagu

SEQ ID NO: 90066 - RNA, 19 nt, Artificial Sequence
  Description of Artificial Sequence: Synthetic oligonucleotide
aucccugaaaccaauaugg

SEQ ID NO: 90067 - RNA, 19 nt, Artificial Sequence
  Description of Artificial Sequence: Synthetic oligonucleotide
ugaugucgcggucagauug

SEQ ID NO: 90068 - RNA, 19 nt, Artificial Sequence
  Description of Artificial Sequence: Synthetic oligonucleotide
auauuuauacggcauuucu

SEQ ID NO: 90069 - RNA, 19 nt, Artificial Sequence
  Description of Artificial Sequence: Synthetic oligonucleotide
aaccccacaacacacauuu

SEQ ID NO: 90070 - RNA, 19 nt, Artificial Sequence
  Description of Artificial Sequence: Synthetic oligonucleotide
gauacgaagcccaacauuc

SEQ ID NO: 90071 - RNA, 19 nt, Artificial Sequence
  Description of Artificial Sequence: Synthetic oligonucleotide
acuguacuauacaauacgc

SEQ ID NO: 90072 - RNA, 19 nt, Artificial Sequence
  Description of Artificial Sequence: Synthetic oligonucleotide
aauaugguagggauaaggu

SEQ ID NO: 90073 - RNA, 19 nt, Artificial Sequence
  Description of Artificial Sequence: Synthetic oligonucleotide
aagcucauauuuauacggc

SEQ ID NO: 90074 - RNA, 19 nt, Artificial Sequence
  Description of Artificial Sequence: Synthetic oligonucleotide
aaauagucucguucucggg

SEQ ID NO: 90075 - RNA, 19 nt, Artificial Sequence
  Description of Artificial Sequence: Synthetic oligonucleotide
augguuauaccgcuuagug

SEQ ID NO: 90076 - RNA, 19 nt, Artificial Sequence
  Description of Artificial Sequence: Synthetic oligonucleotide
agauuguucacauuugaaa

SEQ ID NO: 90077 - RNA, 19 nt, Artificial Sequence
  Description of Artificial Sequence: Synthetic oligonucleotide
agugcaacaaucagguuac

SEQ ID NO: 90078 - RNA, 19 nt, Artificial Sequence
  Description of Artificial Sequence: Synthetic oligonucleotide
uaguuaggaauaugcaucc

SEQ ID NO: 90079 - RNA, 19 nt, Artificial Sequence
  Description of Artificial Sequence: Synthetic oligonucleotide
ggacauucgacucaugagg

SEQ ID NO: 90080 - RNA, 19 nt, Artificial Sequence
  Description of Artificial Sequence: Synthetic oligonucleotide
auaccauucuaacuacuuc

SEQ ID NO: 90081 - RNA, 19 nt, Artificial Sequence
  Description of Artificial Sequence: Synthetic oligonucleotide
uaagcgugugaccccaugg

SEQ ID NO: 90082 - RNA, 19 nt, Artificial Sequence
  Description of Artificial Sequence: Synthetic oligonucleotide
cauagggucggaaaggaug

SEQ ID NO: 90083 - RNA, 19 nt, Artificial Sequence
  Description of Artificial Sequence: Synthetic oligonucleotide
uauugcaagauaccauucu

SEQ ID NO: 90084 - RNA, 19 nt, Artificial Sequence
  Description of Artificial Sequence: Synthetic oligonucleotide
uucggauaaaugcucuaag

SEQ ID NO: 90085 - RNA, 19 nt, Artificial Sequence
  Description of Artificial Sequence: Synthetic oligonucleotide
uacuauguuuaucaccucu

SEQ ID NO: 90086 - RNA, 19 nt, Artificial Sequence
  Description of Artificial Sequence: Synthetic oligonucleotide
aauacaguaguuaggaaua

SEQ ID NO: 90087 - RNA, 19 nt, Artificial Sequence
  Description of Artificial Sequence: Synthetic oligonucleotide
cuacauaagcgugugaccc

SEQ ID NO: 90088 - RNA, 19 nt, Artificial Sequence
  Description of Artificial Sequence: Synthetic oligonucleotide
ucggauaaaugcucuaagc

SEQ ID NO: 90089 - RNA, 19 nt, Artificial Sequence
  Description of Artificial Sequence: Synthetic oligonucleotide
ucgcuaacuacaauauuug

SEQ ID NO: 90090 - RNA, 19 nt, Artificial Sequence
  Description of Artificial Sequence: Synthetic oligonucleotide
uggaauuaucccaucgcgc

SEQ ID NO: 90091 - RNA, 19 nt, Artificial Sequence
  Description of Artificial Sequence: Synthetic oligonucleotide
gggaucaacacuuugacca

SEQ ID NO: 90092 - RNA, 19 nt, Artificial Sequence
  Description of Artificial Sequence: Synthetic oligonucleotide
uggcaauuuguuuaaacaa

SEQ ID NO: 90093 - RNA, 19 nt, Artificial Sequence
  Description of Artificial Sequence: Synthetic oligonucleotide
uaauucacugcuccacucc

SEQ ID NO: 90094 - RNA, 19 nt, Artificial Sequence
  Description of Artificial Sequence: Synthetic oligonucleotide
aacuaaaggaguaccagga

SEQ ID NO: 90095 - RNA, 19 nt, Artificial Sequence
  Description of Artificial Sequence: Synthetic oligonucleotide
uuaagugguagagcgaagc

SEQ ID NO: 90096 - RNA, 19 nt, Artificial Sequence
  Description of Artificial Sequence: Synthetic oligonucleotide
acaaucagguuaccugggc

SEQ ID NO: 90097 - RNA, 19 nt, Artificial Sequence
  Description of Artificial Sequence: Synthetic oligonucleotide
caauaugguagggauaagg

SEQ ID NO: 90098 - RNA, 19 nt, Artificial Sequence
  Description of Artificial Sequence: Synthetic oligonucleotide
uauacggcauuucuacuga

SEQ ID NO: 90099 - RNA, 19 nt, Artificial Sequence
  Description of Artificial Sequence: Synthetic oligonucleotide
caccauaucugauacgaag

SEQ ID NO: 90100 - RNA, 19 nt, Artificial Sequence
  Description of Artificial Sequence: Synthetic oligonucleotide
caagauaccauucuaacua

SEQ ID NO: 90101 - RNA, 19 nt, Artificial Sequence
  Description of Artificial Sequence: Synthetic oligonucleotide
uucuaaaucgucucugguc

SEQ ID NO: 90102 - RNA, 19 nt, Artificial Sequence
  Description of Artificial Sequence: Synthetic oligonucleotide
agggaucaacacuuugacc

SEQ ID NO: 90103 - RNA, 19 nt, Artificial Sequence
  Description of Artificial Sequence: Synthetic oligonucleotide
auacauacugcacaccagu

SEQ ID NO: 90104 - RNA, 19 nt, Artificial Sequence
  Description of Artificial Sequence: Synthetic oligonucleotide
ugaaaucuacuguaaaguu

SEQ ID NO: 90105 - RNA, 19 nt, Artificial Sequence
  Description of Artificial Sequence: Synthetic oligonucleotide
guuggaauuaucccaucgc

SEQ ID NO: 90106 - RNA, 19 nt, Artificial Sequence
  Description of Artificial Sequence: Synthetic oligonucleotide
guaguuaggaauaugcauc

SEQ ID NO: 90107 - RNA, 19 nt, Artificial Sequence
  Description of Artificial Sequence: Synthetic oligonucleotide
uuuaaauagucucguucuc

SEQ ID NO: 90108 - RNA, 19 nt, Artificial Sequence
  Description of Artificial Sequence: Synthetic oligonucleotide
uuggauugaaguccuuaug

SEQ ID NO: 90109 - RNA, 19 nt, Artificial Sequence
  Description of Artificial Sequence: Synthetic oligonucleotide
ggaauuaucccaucgcgcc

SEQ ID NO: 90110 - RNA, 19 nt, Artificial Sequence
  Description of Artificial Sequence: Synthetic oligonucleotide
augaucacaacucaacaua

SEQ ID NO: 90111 - RNA, 19 nt, Artificial Sequence
  Description of Artificial Sequence: Synthetic oligonucleotide
uuagaguguucaccacucg

SEQ ID NO: 90112 - RNA, 19 nt, Artificial Sequence
  Description of Artificial Sequence: Synthetic oligonucleotide
uuagugaugucgcggucag

SEQ ID NO: 90113 - RNA, 19 nt, Artificial Sequence
  Description of Artificial Sequence: Synthetic oligonucleotide
uuucucacgcugacgaucu

SEQ ID NO: 90114 - RNA, 19 nt, Artificial Sequence
  Description of Artificial Sequence: Synthetic oligonucleotide
uaucccaucgcgccuaaga

SEQ ID NO: 90115 - RNA, 19 nt, Artificial Sequence
  Description of Artificial Sequence: Synthetic oligonucleotide
uaaacuccugacaguaugu

SEQ ID NO: 90116 - RNA, 19 nt, Artificial Sequence
  Description of Artificial Sequence: Synthetic oligonucleotide
uucuacuacauaagcgugu

SEQ ID NO: 90117 - RNA, 19 nt, Artificial Sequence
  Description of Artificial Sequence: Synthetic oligonucleotide
ugacaguauguaaagggau

SEQ ID NO: 90118 - RNA, 19 nt, Artificial Sequence
  Description of Artificial Sequence: Synthetic oligonucleotide
uuuggauugaaguccuuau

SEQ ID NO: 90119 - RNA, 19 nt, Artificial Sequence
  Description of Artificial Sequence: Synthetic oligonucleotide
ucuacuacauaagcgugug

SEQ ID NO: 90120 - RNA, 19 nt, Artificial Sequence
  Description of Artificial Sequence: Synthetic oligonucleotide
aggguuagaacaaugauua

SEQ ID NO: 90121 - RNA, 19 nt, Artificial Sequence
  Description of Artificial Sequence: Synthetic oligonucleotide
uauaagcuguaaguggggc

SEQ ID NO: 90122 - RNA, 19 nt, Artificial Sequence
  Description of Artificial Sequence: Synthetic oligonucleotide
uggacaugaugguucgggg

SEQ ID NO: 90123 - RNA, 19 nt, Artificial Sequence
  Description of Artificial Sequence: Synthetic oligonucleotide
auaaauccugugcaagacu

SEQ ID NO: 90124 - RNA, 19 nt, Artificial Sequence
  Description of Artificial Sequence: Synthetic oligonucleotide
auaucugauacgaagccca

SEQ ID NO: 90125 - RNA, 19 nt, Artificial Sequence
  Description of Artificial Sequence: Synthetic oligonucleotide
auaaaggccuucaacacgu

SEQ ID NO: 90126 - RNA, 19 nt, Artificial Sequence
  Description of Artificial Sequence: Synthetic oligonucleotide
ugucagaacgcauaauguu

SEQ ID NO: 90127 - RNA, 19 nt, Artificial Sequence
  Description of Artificial Sequence: Synthetic oligonucleotide
cuucuacuacauaagcgug

SEQ ID NO: 90128 - RNA, 19 nt, Artificial Sequence
  Description of Artificial Sequence: Synthetic oligonucleotide
augauuauguuugcaaagu

SEQ ID NO: 90129 - RNA, 19 nt, Artificial Sequence
  Description of Artificial Sequence: Synthetic oligonucleotide
ucaugguuauaccgcuuag

SEQ ID NO: 90130 - RNA, 19 nt, Artificial Sequence
  Description of Artificial Sequence: Synthetic oligonucleotide
accaauaugguagggauaa

SEQ ID NO: 90131 - RNA, 19 nt, Artificial Sequence
  Description of Artificial Sequence: Synthetic oligonucleotide
cuauagaaugaggaucugc

SEQ ID NO: 90132 - RNA, 19 nt, Artificial Sequence
  Description of Artificial Sequence: Synthetic oligonucleotide
auuggaugcgcaguccugg

SEQ ID NO: 90133 - RNA, 19 nt, Artificial Sequence
  Description of Artificial Sequence: Synthetic oligonucleotide
uucacaagggaccucugua

SEQ ID NO: 90134 - RNA, 19 nt, Artificial Sequence
  Description of Artificial Sequence: Synthetic oligonucleotide
aacuccuaaucggaaaacu

SEQ ID NO: 90135 - RNA, 19 nt, Artificial Sequence
  Description of Artificial Sequence: Synthetic oligonucleotide
gguuagaacaaugauuaug

SEQ ID NO: 90136 - RNA, 19 nt, Artificial Sequence
  Description of Artificial Sequence: Synthetic oligonucleotide
ugguuauaccgcuuagugu

SEQ ID NO: 90137 - RNA, 19 nt, Artificial Sequence
  Description of Artificial Sequence: Synthetic oligonucleotide
ugauuauguuugcaaaguu

SEQ ID NO: 90138 - RNA, 19 nt, Artificial Sequence
  Description of Artificial Sequence: Synthetic oligonucleotide
cauugauuuggacucacca

SEQ ID NO: 90139 - RNA, 19 nt, Artificial Sequence
  Description of Artificial Sequence: Synthetic oligonucleotide
guaaguggggccacgacgc

SEQ ID NO: 90140 - RNA, 19 nt, Artificial Sequence
  Description of Artificial Sequence: Synthetic oligonucleotide
auaauagagugcccuuucu

SEQ ID NO: 90141 - RNA, 19 nt, Artificial Sequence
  Description of Artificial Sequence: Synthetic oligonucleotide
uaacugguucuguaaguga

SEQ ID NO: 90142 - RNA, 19 nt, Artificial Sequence
  Description of Artificial Sequence: Synthetic oligonucleotide
auugcaagauaccauucua

SEQ ID NO: 90143 - RNA, 19 nt, Artificial Sequence
  Description of Artificial Sequence: Synthetic oligonucleotide
uacauaagcgugugacccc

SEQ ID NO: 90144 - RNA, 19 nt, Artificial Sequence
  Description of Artificial Sequence: Synthetic oligonucleotide
gacguuagaguuuucuucu

SEQ ID NO: 90145 - RNA, 19 nt, Artificial Sequence
  Description of Artificial Sequence: Synthetic oligonucleotide
auaugguagggauaagguu

SEQ ID NO: 90146 - RNA, 19 nt, Artificial Sequence
  Description of Artificial Sequence: Synthetic oligonucleotide
acaauagccggauuccaau

SEQ ID NO: 90147 - RNA, 19 nt, Artificial Sequence
  Description of Artificial Sequence: Synthetic oligonucleotide
cauuucuaaaucgucucug

SEQ ID NO: 90148 - RNA, 19 nt, Artificial Sequence
  Description of Artificial Sequence: Synthetic oligonucleotide
auauugcaagauaccauuc

SEQ ID NO: 90149 - RNA, 19 nt, Artificial Sequence
  Description of Artificial Sequence: Synthetic oligonucleotide
uacggcauuucuacugaga

SEQ ID NO: 90150 - RNA, 19 nt, Artificial Sequence
  Description of Artificial Sequence: Synthetic oligonucleotide
uuucggauaaaugcucuaa

SEQ ID NO: 90151 - RNA, 19 nt, Artificial Sequence
  Description of Artificial Sequence: Synthetic oligonucleotide
uuuucucacgcugacgauc

SEQ ID NO: 90152 - RNA, 19 nt, Artificial Sequence
  Description of Artificial Sequence: Synthetic oligonucleotide
gacgaucugacuuguaugu

SEQ ID NO: 90153 - RNA, 19 nt, Artificial Sequence
  Description of Artificial Sequence: Synthetic oligonucleotide
uggaaacaaaccccacaac

SEQ ID NO: 90154 - RNA, 19 nt, Artificial Sequence
  Description of Artificial Sequence: Synthetic oligonucleotide
auauaagcuguaagugggg

SEQ ID NO: 90155 - RNA, 19 nt, Artificial Sequence
  Description of Artificial Sequence: Synthetic oligonucleotide
guuugcucaacuggguucc

SEQ ID NO: 90156 - RNA, 19 nt, Artificial Sequence
  Description of Artificial Sequence: Synthetic oligonucleotide
cauucgacucaugaggaug

SEQ ID NO: 90157 - RNA, 19 nt, Artificial Sequence
  Description of Artificial Sequence: Synthetic oligonucleotide
agugaugucgcggucagau

SEQ ID NO: 90158 - RNA, 19 nt, Artificial Sequence
  Description of Artificial Sequence: Synthetic oligonucleotide
ugggucgaauucauugcug

SEQ ID NO: 90159 - RNA, 19 nt, Artificial Sequence
  Description of Artificial Sequence: Synthetic oligonucleotide
auucccuucgcuacuaugu

SEQ ID NO: 90160 - RNA, 19 nt, Artificial Sequence
  Description of Artificial Sequence: Synthetic oligonucleotide
uuguuaaguuggaauuauc

SEQ ID NO: 90161 - RNA, 19 nt, Artificial Sequence
  Description of Artificial Sequence: Synthetic oligonucleotide
agguuagaguguucaccac

SEQ ID NO: 90162 - RNA, 19 nt, Artificial Sequence
  Description of Artificial Sequence: Synthetic oligonucleotide
ucccaucgcgccuaagacc

SEQ ID NO: 90163 - RNA, 19 nt, Artificial Sequence
  Description of Artificial Sequence: Synthetic oligonucleotide
auacaauacgccagcuggg

SEQ ID NO: 90164 - RNA, 19 nt, Artificial Sequence
  Description of Artificial Sequence: Synthetic oligonucleotide
auaaugagacaaaugugaa

SEQ ID NO: 90165 - RNA, 19 nt, Artificial Sequence
  Description of Artificial Sequence: Synthetic oligonucleotide
guagagaaaggucaaugcu

SEQ ID NO: 90166 - RNA, 19 nt, Artificial Sequence
  Description of Artificial Sequence: Synthetic oligonucleotide
ugcaacaaucagguuaccu

SEQ ID NO: 90167 - RNA, 19 nt, Artificial Sequence
  Description of Artificial Sequence: Synthetic oligonucleotide
auauacagugcuguuguaa

SEQ ID NO: 90168 - RNA, 19 nt, Artificial Sequence
  Description of Artificial Sequence: Synthetic oligonucleotide
augaugggaaggaugacgu

SEQ ID NO: 90169 - RNA, 19 nt, Artificial Sequence
  Description of Artificial Sequence: Synthetic oligonucleotide
auagccggauuccaaugcu

SEQ ID NO: 90170 - RNA, 19 nt, Artificial Sequence
  Description of Artificial Sequence: Synthetic oligonucleotide
cauuucuacugagagcaac

SEQ ID NO: 90171 - RNA, 19 nt, Artificial Sequence
  Description of Artificial Sequence: Synthetic oligonucleotide
auguugauccugaauccuc

SEQ ID NO: 90172 - RNA, 19 nt, Artificial Sequence
  Description of Artificial Sequence: Synthetic oligonucleotide
acuaaaggaguaccaggaa

SEQ ID NO: 90173 - RNA, 19 nt, Artificial Sequence
  Description of Artificial Sequence: Synthetic oligonucleotide
ugguccuaucccugaaacc

SEQ ID NO: 90174 - RNA, 19 nt, Artificial Sequence
  Description of Artificial Sequence: Synthetic oligonucleotide
gacauucgacucaugagga

SEQ ID NO: 90175 - RNA, 19 nt, Artificial Sequence
  Description of Artificial Sequence: Synthetic oligonucleotide
ccuaaucggaaaacuaaag

SEQ ID NO: 90176 - RNA, 19 nt, Artificial Sequence
  Description of Artificial Sequence: Synthetic oligonucleotide
cuuaagugguagagcgaag

SEQ ID NO: 90177 - RNA, 19 nt, Artificial Sequence
  Description of Artificial Sequence: Synthetic oligonucleotide
cuccuaaucggaaaacuaa

SEQ ID NO: 90178 - RNA, 19 nt, Artificial Sequence
  Description of Artificial Sequence: Synthetic oligonucleotide
acauugauuuggacucacc

SEQ ID NO: 90179 - RNA, 19 nt, Artificial Sequence
  Description of Artificial Sequence: Synthetic oligonucleotide
acaguuaacucaagaugag

SEQ ID NO: 90180 - RNA, 19 nt, Artificial Sequence
  Description of Artificial Sequence: Synthetic oligonucleotide
ucccugaaaccaauauggu

SEQ ID NO: 90181 - RNA, 19 nt, Artificial Sequence
  Description of Artificial Sequence: Synthetic oligonucleotide
cggauaaaugcucuaagcc

SEQ ID NO: 90182 - RNA, 19 nt, Artificial Sequence
  Description of Artificial Sequence: Synthetic oligonucleotide
agauguucacccaguggac

SEQ ID NO: 90183 - RNA, 19 nt, Artificial Sequence
  Description of Artificial Sequence: Synthetic oligonucleotide
guuagaguguucaccacuc

SEQ ID NO: 90184 - RNA, 19 nt, Artificial Sequence
  Description of Artificial Sequence: Synthetic oligonucleotide
auagggucggaaaggaugu

SEQ ID NO: 90185 - RNA, 19 nt, Artificial Sequence
  Description of Artificial Sequence: Synthetic oligonucleotide
gguuauaccgcuuaguguu

SEQ ID NO: 90186 - RNA, 19 nt, Artificial Sequence
  Description of Artificial Sequence: Synthetic oligonucleotide
gguagggauaagguuagag

SEQ ID NO: 90187 - RNA, 19 nt, Artificial Sequence
  Description of Artificial Sequence: Synthetic oligonucleotide
accgcuuaguguucugucu

SEQ ID NO: 90188 - RNA, 19 nt, Artificial Sequence
  Description of Artificial Sequence: Synthetic oligonucleotide
aauccugugcaagacuguu

SEQ ID NO: 90189 - RNA, 19 nt, Artificial Sequence
  Description of Artificial Sequence: Synthetic oligonucleotide
cucugcuagugauaaauaa

SEQ ID NO: 90190 - RNA, 19 nt, Artificial Sequence
  Description of Artificial Sequence: Synthetic oligonucleotide
uccuuaaguaugucacaaa

SEQ ID NO: 90191 - RNA, 19 nt, Artificial Sequence
  Description of Artificial Sequence: Synthetic oligonucleotide
cauacugcacaccaguaua

SEQ ID NO: 90192 - RNA, 19 nt, Artificial Sequence
  Description of Artificial Sequence: Synthetic oligonucleotide
auaagcgugugaccccaug

SEQ ID NO: 90193 - RNA, 19 nt, Artificial Sequence
  Description of Artificial Sequence: Synthetic oligonucleotide
ggaugcgcaguccuggugc

SEQ ID NO: 90194 - RNA, 19 nt, Artificial Sequence
  Description of Artificial Sequence: Synthetic oligonucleotide
cuacuguaaaguugcacaa

SEQ ID NO: 90195 - RNA, 19 nt, Artificial Sequence
  Description of Artificial Sequence: Synthetic oligonucleotide
cucgcuaacuacaauauuu

SEQ ID NO: 90196 - RNA, 19 nt, Artificial Sequence
  Description of Artificial Sequence: Synthetic oligonucleotide
uaucugauacgaagcccaa

SEQ ID NO: 90197 - RNA, 19 nt, Artificial Sequence
  Description of Artificial Sequence: Synthetic oligonucleotide
uuaagaggguuagaacaau

SEQ ID NO: 90198 - RNA, 19 nt, Artificial Sequence
  Description of Artificial Sequence: Synthetic oligonucleotide
gcuaugaucacaacucaac

SEQ ID NO: 90199 - RNA, 19 nt, Artificial Sequence
  Description of Artificial Sequence: Synthetic oligonucleotide
auacggcauuucuacugag

SEQ ID NO: 90200 - RNA, 19 nt, Artificial Sequence
  Description of Artificial Sequence: Synthetic oligonucleotide
acgcugacgaucugacuug

SEQ ID NO: 90201 - RNA, 19 nt, Artificial Sequence
  Description of Artificial Sequence: Synthetic oligonucleotide
gcuacuauguuuaucaccu

SEQ ID NO: 90202 - RNA, 19 nt, Artificial Sequence
  Description of Artificial Sequence: Synthetic oligonucleotide
aucagguuaccugggcuag

SEQ ID NO: 90203 - RNA, 19 nt, Artificial Sequence
  Description of Artificial Sequence: Synthetic oligonucleotide
uauaccgcuuaguguucug

SEQ ID NO: 90204 - RNA, 19 nt, Artificial Sequence
  Description of Artificial Sequence: Synthetic oligonucleotide
uggacucaccauaucugau

SEQ ID NO: 90205 - RNA, 19 nt, Artificial Sequence
  Description of Artificial Sequence: Synthetic oligonucleotide
uuauaccgcuuaguguucu

SEQ ID NO: 90206 - RNA, 19 nt, Artificial Sequence
  Description of Artificial Sequence: Synthetic oligonucleotide
cauucccuucgcuacuaug

SEQ ID NO: 90207 - RNA, 19 nt, Artificial Sequence
  Description of Artificial Sequence: Synthetic oligonucleotide
ucgucaccacacacaaugu

SEQ ID NO: 90208 - RNA, 19 nt, Artificial Sequence
  Description of Artificial Sequence: Synthetic oligonucleotide
cuccaaacaguucgugcug

SEQ ID NO: 90209 - RNA, 19 nt, Artificial Sequence
  Description of Artificial Sequence: Synthetic oligonucleotide
cuguggcgcacacaucccg

SEQ ID NO: 90210 - RNA, 19 nt, Artificial Sequence
  Description of Artificial Sequence: Synthetic oligonucleotide
ggccacgacgccucgaggg

SEQ ID NO: 90211 - RNA, 19 nt, Artificial Sequence
  Description of Artificial Sequence: Synthetic oligonucleotide
gucgcggucagauuguugu

SEQ ID NO: 90212 - RNA, 19 nt, Artificial Sequence
  Description of Artificial Sequence: Synthetic oligonucleotide
uggaugcgcaguccuggug

SEQ ID NO: 90213 - RNA, 19 nt, Artificial Sequence
  Description of Artificial Sequence: Synthetic oligonucleotide
ggaugcacaaggaugucug

SEQ ID NO: 90214 - RNA, 19 nt, Artificial Sequence
  Description of Artificial Sequence: Synthetic oligonucleotide
acauaagcgugugacccca

SEQ ID NO: 90215 - RNA, 19 nt, Artificial Sequence
  Description of Artificial Sequence: Synthetic oligonucleotide
uaccgcuuaguguucuguc

SEQ ID NO: 90216 - RNA, 19 nt, Artificial Sequence
  Description of Artificial Sequence: Synthetic oligonucleotide
ugucgcggucagauuguug

SEQ ID NO: 90217 - RNA, 19 nt, Artificial Sequence
  Description of Artificial Sequence: Synthetic oligonucleotide
gugaugagcuauagaauga

SEQ ID NO: 90218 - RNA, 19 nt, Artificial Sequence
  Description of Artificial Sequence: Synthetic oligonucleotide
ucccaauuggaugcgcagu

SEQ ID NO: 90219 - RNA, 19 nt, Artificial Sequence
  Description of Artificial Sequence: Synthetic oligonucleotide
acauaucaacacagaacug

SEQ ID NO: 90220 - RNA, 19 nt, Artificial Sequence
  Description of Artificial Sequence: Synthetic oligonucleotide
ucgcuacuauguuuaucac

SEQ ID NO: 90221 - RNA, 19 nt, Artificial Sequence
  Description of Artificial Sequence: Synthetic oligonucleotide
uucccuucgcuacuauguu

SEQ ID NO: 90222 - RNA, 19 nt, Artificial Sequence
  Description of Artificial Sequence: Synthetic oligonucleotide
gaggguuagaacaaugauu

SEQ ID NO: 90223 - RNA, 19 nt, Artificial Sequence
  Description of Artificial Sequence: Synthetic oligonucleotide
acuccugauaauggaauuu

SEQ ID NO: 90224 - RNA, 19 nt, Artificial Sequence
  Description of Artificial Sequence: Synthetic oligonucleotide
gaauuaucccaucgcgccu

SEQ ID NO: 90225 - RNA, 19 nt, Artificial Sequence
  Description of Artificial Sequence: Synthetic oligonucleotide
cagcaaguauguccuuaag

SEQ ID NO: 90226 - RNA, 19 nt, Artificial Sequence
  Description of Artificial Sequence: Synthetic oligonucleotide
gauaccauucuaacuacuu

SEQ ID NO: 90227 - RNA, 19 nt, Artificial Sequence
  Description of Artificial Sequence: Synthetic oligonucleotide
acuccuaaucggaaaacua

SEQ ID NO: 90228 - RNA, 19 nt, Artificial Sequence
  Description of Artificial Sequence: Synthetic oligonucleotide
gaguguucaccacucgcua

SEQ ID NO: 90229 - RNA, 19 nt, Artificial Sequence
  Description of Artificial Sequence: Synthetic oligonucleotide
ugggcauggaagagugaua

SEQ ID NO: 90230 - RNA, 19 nt, Artificial Sequence
  Description of Artificial Sequence: Synthetic oligonucleotide
gcuaacuacaauauuugcu

SEQ ID NO: 90231 - RNA, 19 nt, Artificial Sequence
  Description of Artificial Sequence: Synthetic oligonucleotide
caguucgugcuguuugcuc

SEQ ID NO: 90232 - RNA, 19 nt, Artificial Sequence
  Description of Artificial Sequence: Synthetic oligonucleotide
agauaccauucuaacuacu

SEQ ID NO: 90233 - RNA, 19 nt, Artificial Sequence
  Description of Artificial Sequence: Synthetic oligonucleotide
cagaggaggguguuauaca

SEQ ID NO: 90234 - RNA, 19 nt, Artificial Sequence
  Description of Artificial Sequence: Synthetic oligonucleotide
acucgcuaacuacaauauu

SEQ ID NO: 90235 - RNA, 19 nt, Artificial Sequence
  Description of Artificial Sequence: Synthetic oligonucleotide
cuacuauguuuaucaccuc

SEQ ID NO: 90236 - RNA, 19 nt, Artificial Sequence
  Description of Artificial Sequence: Synthetic oligonucleotide
cacaauagccggauuccaa

SEQ ID NO: 90237 - RNA, 19 nt, Artificial Sequence
  Description of Artificial Sequence: Synthetic oligonucleotide
auaccgcuuaguguucugu

SEQ ID NO: 90238 - RNA, 19 nt, Artificial Sequence
  Description of Artificial Sequence: Synthetic oligonucleotide
acgaucugacuuguaugug

SEQ ID NO: 90239 - RNA, 19 nt, Artificial Sequence
  Description of Artificial Sequence: Synthetic oligonucleotide
cuguaaguggggccacgac

SEQ ID NO: 90240 - RNA, 19 nt, Artificial Sequence
  Description of Artificial Sequence: Synthetic oligonucleotide
cgcuacuauguuuaucacc

SEQ ID NO: 90241 - RNA, 19 nt, Artificial Sequence
  Description of Artificial Sequence: Synthetic oligonucleotide
aaguggggccacgacgccu

SEQ ID NO: 90242 - RNA, 19 nt, Artificial Sequence
  Description of Artificial Sequence: Synthetic oligonucleotide
gggucggaaaggauguucc

SEQ ID NO: 90243 - RNA, 19 nt, Artificial Sequence
  Description of Artificial Sequence: Synthetic oligonucleotide
ucgaggguagguucaucuu

SEQ ID NO: 90244 - RNA, 19 nt, Artificial Sequence
  Description of Artificial Sequence: Synthetic oligonucleotide
gccacaauagccggauucc

SEQ ID NO: 90245 - RNA, 19 nt, Artificial Sequence
  Description of Artificial Sequence: Synthetic oligonucleotide
auauucuacuuuacauuua

SEQ ID NO: 90246 - RNA, 19 nt, Artificial Sequence
  Description of Artificial Sequence: Synthetic oligonucleotide
cuucuagcuccccaaggaa

SEQ ID NO: 90247 - RNA, 19 nt, Artificial Sequence
  Description of Artificial Sequence: Synthetic oligonucleotide
cuuuggauugaaguccuua

SEQ ID NO: 90248 - RNA, 19 nt, Artificial Sequence
  Description of Artificial Sequence: Synthetic oligonucleotide
cuucgcuacuauguuuauc

SEQ ID NO: 90249 - RNA, 19 nt, Artificial Sequence
  Description of Artificial Sequence: Synthetic oligonucleotide
guuauaccgcuuaguguuc

SEQ ID NO: 90250 - RNA, 19 nt, Artificial Sequence
  Description of Artificial Sequence: Synthetic oligonucleotide
guuuucggauaaaugcucu

SEQ ID NO: 90251 - RNA, 19 nt, Artificial Sequence
  Description of Artificial Sequence: Synthetic oligonucleotide
acaguucgugcuguuugcu

SEQ ID NO: 90252 - RNA, 19 nt, Artificial Sequence
  Description of Artificial Sequence: Synthetic oligonucleotide
uucgacucaugaggaugug

SEQ ID NO: 90253 - RNA, 19 nt, Artificial Sequence
  Description of Artificial Sequence: Synthetic oligonucleotide
cgcuaacuacaauauuugc

SEQ ID NO: 90254 - RNA, 19 nt, Artificial Sequence
  Description of Artificial Sequence: Synthetic oligonucleotide
cugacuuguauguggcugu

SEQ ID NO: 90255 - RNA, 19 nt, Artificial Sequence
  Description of Artificial Sequence: Synthetic oligonucleotide
acguuagaguuuucuucua

SEQ ID NO: 90256 - RNA, 19 nt, Artificial Sequence
  Description of Artificial Sequence: Synthetic oligonucleotide
ucgcgccuaagaccucucu

SEQ ID NO: 90257 - RNA, 19 nt, Artificial Sequence
  Description of Artificial Sequence: Synthetic oligonucleotide
auacaagcucauauuuaua

SEQ ID NO: 90258 - RNA, 19 nt, Artificial Sequence
  Description of Artificial Sequence: Synthetic oligonucleotide
ccuaauaacugguucugua

SEQ ID NO: 90259 - RNA, 19 nt, Artificial Sequence
  Description of Artificial Sequence: Synthetic oligonucleotide
cacucgcuaacuacaauau

SEQ ID NO: 90260 - RNA, 19 nt, Artificial Sequence
  Description of Artificial Sequence: Synthetic oligonucleotide
aaaccccacaacacacauu

SEQ ID NO: 90261 - RNA, 19 nt, Artificial Sequence
  Description of Artificial Sequence: Synthetic oligonucleotide
cuugguccuaucccugaaa

SEQ ID NO: 90262 - RNA, 19 nt, Artificial Sequence
  Description of Artificial Sequence: Synthetic oligonucleotide
uggcgcugugaugagcuau

SEQ ID NO: 90263 - RNA, 19 nt, Artificial Sequence
  Description of Artificial Sequence: Synthetic oligonucleotide
acuuagagacagguauaua

SEQ ID NO: 90264 - RNA, 19 nt, Artificial Sequence
  Description of Artificial Sequence: Synthetic oligonucleotide
acaucccgcugccuguuuu

SEQ ID NO: 90265 - RNA, 19 nt, Artificial Sequence
  Description of Artificial Sequence: Synthetic oligonucleotide
guagagcgaagccauugau

SEQ ID NO: 90266 - RNA, 19 nt, Artificial Sequence
  Description of Artificial Sequence: Synthetic oligonucleotide
uuaucccaucgcgccuaag

SEQ ID NO: 90267 - RNA, 19 nt, Artificial Sequence
  Description of Artificial Sequence: Synthetic oligonucleotide
acauucccuucgcuacuau

SEQ ID NO: 90268 - RNA, 19 nt, Artificial Sequence
  Description of Artificial Sequence: Synthetic oligonucleotide
guucgugcuguuugcucaa

SEQ ID NO: 90269 - RNA, 19 nt, Artificial Sequence
  Description of Artificial Sequence: Synthetic oligonucleotide
gcagcaaguauguccuuaa

SEQ ID NO: 90270 - RNA, 19 nt, Artificial Sequence
  Description of Artificial Sequence: Synthetic oligonucleotide
caacagaucauguguucau

SEQ ID NO: 90271 - RNA, 19 nt, Artificial Sequence
  Description of Artificial Sequence: Synthetic oligonucleotide
cuacuacauaagcguguga

SEQ ID NO: 90272 - RNA, 19 nt, Artificial Sequence
  Description of Artificial Sequence: Synthetic oligonucleotide
ggggccacgacgccucgag

SEQ ID NO: 90273 - RNA, 19 nt, Artificial Sequence
  Description of Artificial Sequence: Synthetic oligonucleotide
ugugaccccauggguuagu

SEQ ID NO: 90274 - RNA, 19 nt, Artificial Sequence
  Description of Artificial Sequence: Synthetic oligonucleotide
acguggacauucgacucau

SEQ ID NO: 90275 - RNA, 19 nt, Artificial Sequence
  Description of Artificial Sequence: Synthetic oligonucleotide
guuaccugggcuagcuucu

SEQ ID NO: 90276 - RNA, 19 nt, Artificial Sequence
  Description of Artificial Sequence: Synthetic oligonucleotide
gggucgaauucauugcugu

SEQ ID NO: 90277 - RNA, 19 nt, Artificial Sequence
  Description of Artificial Sequence: Synthetic oligonucleotide
ccacucgcuaacuacaaua

SEQ ID NO: 90278 - RNA, 19 nt, Artificial Sequence
  Description of Artificial Sequence: Synthetic oligonucleotide
cugggucgaauucauugcu

SEQ ID NO: 90279 - RNA, 19 nt, Artificial Sequence
  Description of Artificial Sequence: Synthetic oligonucleotide
cucuaacaagcaaaagcuu

SEQ ID NO: 90280 - RNA, 19 nt, Artificial Sequence
  Description of Artificial Sequence: Synthetic oligonucleotide
ccuuaagugguagagcgaa

SEQ ID NO: 90281 - RNA, 19 nt, Artificial Sequence
  Description of Artificial Sequence: Synthetic oligonucleotide
gaugcgcaguccuggugcu

SEQ ID NO: 90282 - RNA, 19 nt, Artificial Sequence
  Description of Artificial Sequence: Synthetic oligonucleotide
gaugucgcggucagauugu

SEQ ID NO: 90283 - RNA, 19 nt, Artificial Sequence
  Description of Artificial Sequence: Synthetic oligonucleotide
ccaauuggaugcgcagucc

SEQ ID NO: 90284 - RNA, 19 nt, Artificial Sequence
  Description of Artificial Sequence: Synthetic oligonucleotide
ggauugaaguccuuauguu

SEQ ID NO: 90285 - RNA, 19 nt, Artificial Sequence
  Description of Artificial Sequence: Synthetic oligonucleotide
caugguuauaccgcuuagu

SEQ ID NO: 90286 - RNA, 19 nt, Artificial Sequence
  Description of Artificial Sequence: Synthetic oligonucleotide
cgaggguagguucaucuuc

SEQ ID NO: 90287 - RNA, 19 nt, Artificial Sequence
  Description of Artificial Sequence: Synthetic oligonucleotide
uucgugcuguuugcucaac

SEQ ID NO: 90288 - RNA, 19 nt, Artificial Sequence
  Description of Artificial Sequence: Synthetic oligonucleotide
ucgcggucagauuguuguu

SEQ ID NO: 90289 - RNA, 19 nt, Artificial Sequence
  Description of Artificial Sequence: Synthetic oligonucleotide
uucgggguugccggcucac

SEQ ID NO: 90290 - RNA, 19 nt, Artificial Sequence
  Description of Artificial Sequence: Synthetic oligonucleotide
caguauguaaagggaucaa

SEQ ID NO: 90291 - RNA, 19 nt, Artificial Sequence
  Description of Artificial Sequence: Synthetic oligonucleotide
cuaacuacuucaggguaau

SEQ ID NO: 90292 - RNA, 19 nt, Artificial Sequence
  Description of Artificial Sequence: Synthetic oligonucleotide
gcuauagaaugaggaucug

SEQ ID NO: 90293 - RNA, 19 nt, Artificial Sequence
  Description of Artificial Sequence: Synthetic oligonucleotide
ccccuaauaacugguucug

SEQ ID NO: 90294 - RNA, 19 nt, Artificial Sequence
  Description of Artificial Sequence: Synthetic oligonucleotide
gcggucagauuguuguuaa

SEQ ID NO: 90295 - RNA, 19 nt, Artificial Sequence
  Description of Artificial Sequence: Synthetic oligonucleotide
cccaucgcgccuaagaccu

SEQ ID NO: 90296 - RNA, 19 nt, Artificial Sequence
  Description of Artificial Sequence: Synthetic oligonucleotide
cgccacaauagccggauuc

SEQ ID NO: 90297 - RNA, 19 nt, Artificial Sequence
  Description of Artificial Sequence: Synthetic oligonucleotide
ccuguggcgcacacauccc

SEQ ID NO: 90298 - RNA, 19 nt, Artificial Sequence
  Description of Artificial Sequence: Synthetic oligonucleotide
ccgcugccuguuuucaaag

SEQ ID NO: 90299 - RNA, 19 nt, Artificial Sequence
  Description of Artificial Sequence: Synthetic oligonucleotide
cccuucgcuacuauguuua

SEQ ID NO: 90300 - RNA, 19 nt, Artificial Sequence
  Description of Artificial Sequence: Synthetic oligonucleotide
aucgcgccuaagaccucuc

SEQ ID NO: 90301 - RNA, 19 nt, Artificial Sequence
  Description of Artificial Sequence: Synthetic oligonucleotide
guucgggguugccggcuca

SEQ ID NO: 90302 - RNA, 19 nt, Artificial Sequence
  Description of Artificial Sequence: Synthetic oligonucleotide
ucgggguugccggcucacu

SEQ ID NO: 90303 - RNA, 19 nt, Artificial Sequence
  Description of Artificial Sequence: Synthetic oligonucleotide
gcuguaaguggggccacga

SEQ ID NO: 90304 - RNA, 19 nt, Artificial Sequence
  Description of Artificial Sequence: Synthetic oligonucleotide
ggcauggaagagugauaaa

SEQ ID NO: 90305 - RNA, 19 nt, Artificial Sequence
  Description of Artificial Sequence: Synthetic oligonucleotide
acgacgccucgaggguagg

SEQ ID NO: 90306 - RNA, 19 nt, Artificial Sequence
  Description of Artificial Sequence: Synthetic oligonucleotide
ggcuagcuucucgucacca

SEQ ID NO: 90307 - RNA, 19 nt, Artificial Sequence
  Description of Artificial Sequence: Synthetic oligonucleotide
ggucggaaaggauguuccu

SEQ ID NO: 90308 - RNA, 19 nt, Artificial Sequence
  Description of Artificial Sequence: Synthetic oligonucleotide
gguucgggguugccggcuc

SEQ ID NO: 90309 - RNA, 19 nt, Artificial Sequence
  Description of Artificial Sequence: Synthetic oligonucleotide
gacgccucgaggguagguu

SEQ ID NO: 90310 - RNA, 19 nt, Artificial Sequence
  Description of Artificial Sequence: Synthetic oligonucleotide
gcgcugugaugagcuauag

SEQ ID NO: 90311 - RNA, 19 nt, Artificial Sequence
  Description of Artificial Sequence: Synthetic oligonucleotide
gccuuaagugguagagcga

SEQ ID NO: 90312 - RNA, 19 nt, Artificial Sequence
  Description of Artificial Sequence: Synthetic oligonucleotide
gggaccucuguaauucacu

SEQ ID NO: 90313 - RNA, 19 nt, Artificial Sequence
  Description of Artificial Sequence: Synthetic oligonucleotide
ccacuccacguggacauuc

SEQ ID NO: 90314 - RNA, 19 nt, Artificial Sequence
  Description of Artificial Sequence: Synthetic oligonucleotide
augucgcggucagauuguu

SEQ ID NO: 90315 - RNA, 19 nt, Artificial Sequence
  Description of Artificial Sequence: Synthetic oligonucleotide
caucgcgccuaagaccucu

SEQ ID NO: 90316 - RNA, 19 nt, Artificial Sequence
  Description of Artificial Sequence: Synthetic oligonucleotide
cccgcugccuguuuucaaa

SEQ ID NO: 90317 - RNA, 19 nt, Artificial Sequence
  Description of Artificial Sequence: Synthetic oligonucleotide
ccacaauagccggauucca

SEQ ID NO: 90318 - RNA, 19 nt, Artificial Sequence
  Description of Artificial Sequence: Synthetic oligonucleotide
gugaugucgcggucagauu

SEQ ID NO: 90319 - RNA, 19 nt, Artificial Sequence
  Description of Artificial Sequence: Synthetic oligonucleotide
ggcgcugugaugagcuaua

SEQ ID NO: 90320 - RNA, 19 nt, Artificial Sequence
  Description of Artificial Sequence: Synthetic oligonucleotide
cauaagcgugugaccccau

SEQ ID NO: 90321 - RNA, 19 nt, Artificial Sequence
  Description of Artificial Sequence: Synthetic oligonucleotide
gccacgacgccucgagggu

SEQ ID NO: 90322 - RNA, 19 nt, Artificial Sequence
  Description of Artificial Sequence: Synthetic oligonucleotide
gcauuucuacugagagcaa

SEQ ID NO: 90323 - RNA, 19 nt, Artificial Sequence
  Description of Artificial Sequence: Synthetic oligonucleotide
gcucaacuggguucccaau

SEQ ID NO: 90324 - RNA, 19 nt, Artificial Sequence
  Description of Artificial Sequence: Synthetic oligonucleotide
ccccauggguuagugaugu

SEQ ID NO: 90325 - RNA, 19 nt, Artificial Sequence
  Description of Artificial Sequence: Synthetic oligonucleotide
gcgugugaccccauggguu

SEQ ID NO: 90326 - RNA, 19 nt, Artificial Sequence
  Description of Artificial Sequence: Synthetic oligonucleotide
cgccuaagaccucucuuua

SEQ ID NO: 90327 - RNA, 19 nt, Artificial Sequence
  Description of Artificial Sequence: Synthetic oligonucleotide
ccucgaggguagguucauc

SEQ ID NO: 90328 - RNA, 19 nt, Artificial Sequence
  Description of Artificial Sequence: Synthetic oligonucleotide
cccuaauaacugguucugu

SEQ ID NO: 90329 - RNA, 19 nt, Artificial Sequence
  Description of Artificial Sequence: Synthetic oligonucleotide
ccuucgcuacuauguuuau

SEQ ID NO: 90330 - RNA, 19 nt, Artificial Sequence
  Description of Artificial Sequence: Synthetic oligonucleotide
cgcgccuaagaccucucuu

SEQ ID NO: 90331 - RNA, 19 nt, Artificial Sequence
  Description of Artificial Sequence: Synthetic oligonucleotide
auugugauaauccacagcc

SEQ ID NO: 90332 - RNA, 19 nt, Artificial Sequence
  Description of Artificial Sequence: Synthetic oligonucleotide
aauacguucgaucuugucc

SEQ ID NO: 90333 - RNA, 19 nt, Artificial Sequence
  Description of Artificial Sequence: Synthetic oligonucleotide
acugacauugacuaguacc

SEQ ID NO: 90334 - RNA, 19 nt, Artificial Sequence
  Description of Artificial Sequence: Synthetic oligonucleotide
aacacgucgaugcugaagg

SEQ ID NO: 90335 - RNA, 19 nt, Artificial Sequence
  Description of Artificial Sequence: Synthetic oligonucleotide
agagauaauacugugcucg

SEQ ID NO: 90336 - RNA, 19 nt, Artificial Sequence
  Description of Artificial Sequence: Synthetic oligonucleotide
uccucaaacacugacacgg

SEQ ID NO: 90337 - RNA, 19 nt, Artificial Sequence
  Description of Artificial Sequence: Synthetic oligonucleotide
uaagugacgccauagaugu

SEQ ID NO: 90338 - RNA, 19 nt, Artificial Sequence
  Description of Artificial Sequence: Synthetic oligonucleotide
uugaauccgcgcuugaugg

SEQ ID NO: 90339 - RNA, 19 nt, Artificial Sequence
  Description of Artificial Sequence: Synthetic oligonucleotide
uuuccauugggacagguac

SEQ ID NO: 90340 - RNA, 19 nt, Artificial Sequence
  Description of Artificial Sequence: Synthetic oligonucleotide
uuauugauguaagugacgc

SEQ ID NO: 90341 - RNA, 19 nt, Artificial Sequence
  Description of Artificial Sequence: Synthetic oligonucleotide
auaacugaaagcuuggcau

SEQ ID NO: 90342 - RNA, 19 nt, Artificial Sequence
  Description of Artificial Sequence: Synthetic oligonucleotide
auuaaaacguucacguccc

SEQ ID NO: 90343 - RNA, 19 nt, Artificial Sequence
  Description of Artificial Sequence: Synthetic oligonucleotide
aggguaaugaccccauucg

SEQ ID NO: 90344 - RNA, 19 nt, Artificial Sequence
  Description of Artificial Sequence: Synthetic oligonucleotide
uguguaacggggcuggcag

SEQ ID NO: 90345 - RNA, 19 nt, Artificial Sequence
  Description of Artificial Sequence: Synthetic oligonucleotide
aagacacgauuauugaugu

SEQ ID NO: 90346 - RNA, 19 nt, Artificial Sequence
  Description of Artificial Sequence: Synthetic oligonucleotide
uguauacagcccuaggagc

SEQ ID NO: 90347 - RNA, 19 nt, Artificial Sequence
  Description of Artificial Sequence: Synthetic oligonucleotide
ucauuccuaccucacaaag

SEQ ID NO: 90348 - RNA, 19 nt, Artificial Sequence
  Description of Artificial Sequence: Synthetic oligonucleotide
ugguugacgguacaggugc

SEQ ID NO: 90349 - RNA, 19 nt, Artificial Sequence
  Description of Artificial Sequence: Synthetic oligonucleotide
aguauagccguucauugug

SEQ ID NO: 90350 - RNA, 19 nt, Artificial Sequence
  Description of Artificial Sequence: Synthetic oligonucleotide
auugacuaguaccacucuc

SEQ ID NO: 90351 - RNA, 19 nt, Artificial Sequence
  Description of Artificial Sequence: Synthetic oligonucleotide
accaguagagcuucccacc

SEQ ID NO: 90352 - RNA, 19 nt, Artificial Sequence
  Description of Artificial Sequence: Synthetic oligonucleotide
auacguucgaucuugucca

SEQ ID NO: 90353 - RNA, 19 nt, Artificial Sequence
  Description of Artificial Sequence: Synthetic oligonucleotide
uuugccgucagcagccacg

SEQ ID NO: 90354 - RNA, 19 nt, Artificial Sequence
  Description of Artificial Sequence: Synthetic oligonucleotide
ugauaauccacagccaggc

SEQ ID NO: 90355 - RNA, 19 nt, Artificial Sequence
  Description of Artificial Sequence: Synthetic oligonucleotide
acgauuauugauguaagug

SEQ ID NO: 90356 - RNA, 19 nt, Artificial Sequence
  Description of Artificial Sequence: Synthetic oligonucleotide
aaccucgaugacaugaaac

SEQ ID NO: 90357 - RNA, 19 nt, Artificial Sequence
  Description of Artificial Sequence: Synthetic oligonucleotide
uugacuaguaccacucucu

SEQ ID NO: 90358 - RNA, 19 nt, Artificial Sequence
  Description of Artificial Sequence: Synthetic oligonucleotide
aaaacguucacguccccaa

SEQ ID NO: 90359 - RNA, 19 nt, Artificial Sequence
  Description of Artificial Sequence: Synthetic oligonucleotide
uaccaucuaggcgagaccg

SEQ ID NO: 90360 - RNA, 19 nt, Artificial Sequence
  Description of Artificial Sequence: Synthetic oligonucleotide
gacgggaucagugccaucg

SEQ ID NO: 90361 - RNA, 19 nt, Artificial Sequence
  Description of Artificial Sequence: Synthetic oligonucleotide
uugacugacgacguggucc

SEQ ID NO: 90362 - RNA, 19 nt, Artificial Sequence
  Description of Artificial Sequence: Synthetic oligonucleotide
uccggguggacagugaugg

SEQ ID NO: 90363 - RNA, 19 nt, Artificial Sequence
  Description of Artificial Sequence: Synthetic oligonucleotide
cuguuguugacugacgacg

SEQ ID NO: 90364 - RNA, 19 nt, Artificial Sequence
  Description of Artificial Sequence: Synthetic oligonucleotide
uuuucuuuucuuuucuuuu

SEQ ID NO: 90365 - RNA, 19 nt, Artificial Sequence
  Description of Artificial Sequence: Synthetic oligonucleotide
auaacugaggagguggaag

SEQ ID NO: 90366 - RNA, 19 nt, Artificial Sequence
  Description of Artificial Sequence: Synthetic oligonucleotide
uuucuuuucuuuucuuuuc

SEQ ID NO: 90367 - RNA, 19 nt, Artificial Sequence
  Description of Artificial Sequence: Synthetic oligonucleotide
ggucccucgaaguagacag

SEQ ID NO: 90368 - RNA, 19 nt, Artificial Sequence
  Description of Artificial Sequence: Synthetic oligonucleotide
gacacgauuauugauguaa

SEQ ID NO: 90369 - RNA, 19 nt, Artificial Sequence
  Description of Artificial Sequence: Synthetic oligonucleotide
acauugacuaguaccacuc

SEQ ID NO: 90370 - RNA, 19 nt, Artificial Sequence
  Description of Artificial Sequence: Synthetic oligonucleotide
cugaccaguacaugguacc

SEQ ID NO: 90371 - RNA, 19 nt, Artificial Sequence
  Description of Artificial Sequence: Synthetic oligonucleotide
uguuguugacugacgacgu

SEQ ID NO: 90372 - RNA, 19 nt, Artificial Sequence
  Description of Artificial Sequence: Synthetic oligonucleotide
aacagcuaccaccauugaa

SEQ ID NO: 90373 - RNA, 19 nt, Artificial Sequence
  Description of Artificial Sequence: Synthetic oligonucleotide
uauugauguaagugacgcc

SEQ ID NO: 90374 - RNA, 19 nt, Artificial Sequence
  Description of Artificial Sequence: Synthetic oligonucleotide
cuccguaccaucuaggcga

SEQ ID NO: 90375 - RNA, 19 nt, Artificial Sequence
  Description of Artificial Sequence: Synthetic oligonucleotide
guaaugaccccauucgguc

SEQ ID NO: 90376 - RNA, 19 nt, Artificial Sequence
  Description of Artificial Sequence: Synthetic oligonucleotide
ugucauauggggcgggcac

SEQ ID NO: 90377 - RNA, 19 nt, Artificial Sequence
  Description of Artificial Sequence: Synthetic oligonucleotide
gagauaauacugugcucgc

SEQ ID NO: 90378 - RNA, 19 nt, Artificial Sequence
  Description of Artificial Sequence: Synthetic oligonucleotide
gucaauacguucgaucuug

SEQ ID NO: 90379 - RNA, 19 nt, Artificial Sequence
  Description of Artificial Sequence: Synthetic oligonucleotide
uaaugaccccauucggucc

SEQ ID NO: 90380 - RNA, 19 nt, Artificial Sequence
  Description of Artificial Sequence: Synthetic oligonucleotide
ucucgcacaggcagaaggc

SEQ ID NO: 90381 - RNA, 19 nt, Artificial Sequence
  Description of Artificial Sequence: Synthetic oligonucleotide
aaacacgucgaugcugaag

SEQ ID NO: 90382 - RNA, 19 nt, Artificial Sequence
  Description of Artificial Sequence: Synthetic oligonucleotide
ugucgccuguguaacgggg

SEQ ID NO: 90383 - RNA, 19 nt, Artificial Sequence
  Description of Artificial Sequence: Synthetic oligonucleotide
uucauuugugccaccucga

SEQ ID NO: 90384 - RNA, 19 nt, Artificial Sequence
  Description of Artificial Sequence: Synthetic oligonucleotide
caacgaucacccaggaagc

SEQ ID NO: 90385 - RNA, 19 nt, Artificial Sequence
  Description of Artificial Sequence: Synthetic oligonucleotide
cauaggaccuacugucgcc

SEQ ID NO: 90386 - RNA, 19 nt, Artificial Sequence
  Description of Artificial Sequence: Synthetic oligonucleotide
cucguuugccgucagcagc

SEQ ID NO: 90387 - RNA, 19 nt, Artificial Sequence
  Description of Artificial Sequence: Synthetic oligonucleotide
ucgaucacgucucggccag

SEQ ID NO: 90388 - RNA, 19 nt, Artificial Sequence
  Description of Artificial Sequence: Synthetic oligonucleotide
acuacguccucucgccacg

SEQ ID NO: 90389 - RNA, 19 nt, Artificial Sequence
  Description of Artificial Sequence: Synthetic oligonucleotide
gucacuacguccucucgcc

SEQ ID NO: 90390 - RNA, 19 nt, Artificial Sequence
  Description of Artificial Sequence: Synthetic oligonucleotide
gacuaguaccacucucucc

SEQ ID NO: 90391 - RNA, 19 nt, Artificial Sequence
  Description of Artificial Sequence: Synthetic oligonucleotide
aguacaugguaccccucag

SEQ ID NO: 90392 - RNA, 19 nt, Artificial Sequence
  Description of Artificial Sequence: Synthetic oligonucleotide
ucaauacgaggguaaugac

SEQ ID NO: 90393 - RNA, 19 nt, Artificial Sequence
  Description of Artificial Sequence: Synthetic oligonucleotide
auaggaccuacugucgccg

SEQ ID NO: 90394 - RNA, 19 nt, Artificial Sequence
  Description of Artificial Sequence: Synthetic oligonucleotide
ggcucguucacauauaaaa

SEQ ID NO: 90395 - RNA, 19 nt, Artificial Sequence
  Description of Artificial Sequence: Synthetic oligonucleotide
uuccauugggacagguaca

SEQ ID NO: 90396 - RNA, 19 nt, Artificial Sequence
  Description of Artificial Sequence: Synthetic oligonucleotide
aacguucacguccccaaaa

SEQ ID NO: 90397 - RNA, 19 nt, Artificial Sequence
  Description of Artificial Sequence: Synthetic oligonucleotide
ucuccggucugcuuauuga

SEQ ID NO: 90398 - RNA, 19 nt, Artificial Sequence
  Description of Artificial Sequence: Synthetic oligonucleotide
ugaagcauugcagggugca

SEQ ID NO: 90399 - RNA, 19 nt, Artificial Sequence
  Description of Artificial Sequence: Synthetic oligonucleotide
uaaaacguucacgucccca

SEQ ID NO: 90400 - RNA, 19 nt, Artificial Sequence
  Description of Artificial Sequence: Synthetic oligonucleotide
gaucagugccaucgagccg

SEQ ID NO: 90401 - RNA, 19 nt, Artificial Sequence
  Description of Artificial Sequence: Synthetic oligonucleotide
caggucaauacguucgauc

SEQ ID NO: 90402 - RNA, 19 nt, Artificial Sequence
  Description of Artificial Sequence: Synthetic oligonucleotide
agugacgccauagauguaa

SEQ ID NO: 90403 - RNA, 19 nt, Artificial Sequence
  Description of Artificial Sequence: Synthetic oligonucleotide
ugacuaguaccacucucuc

SEQ ID NO: 90404 - RNA, 19 nt, Artificial Sequence
  Description of Artificial Sequence: Synthetic oligonucleotide
acgccauagauguaauccu

SEQ ID NO: 90405 - RNA, 19 nt, Artificial Sequence
  Description of Artificial Sequence: Synthetic oligonucleotide
agccauugagucggcaacc

SEQ ID NO: 90406 - RNA, 19 nt, Artificial Sequence
  Description of Artificial Sequence: Synthetic oligonucleotide
ugacugacgacgugguccu

SEQ ID NO: 90407 - RNA, 19 nt, Artificial Sequence
  Description of Artificial Sequence: Synthetic oligonucleotide
ggugacuucccucaaggac

SEQ ID NO: 90408 - RNA, 19 nt, Artificial Sequence
  Description of Artificial Sequence: Synthetic oligonucleotide
acagggguuggucaccuca

SEQ ID NO: 90409 - RNA, 19 nt, Artificial Sequence
  Description of Artificial Sequence: Synthetic oligonucleotide
gagccauugagucggcaac

SEQ ID NO: 90410 - RNA, 19 nt, Artificial Sequence
  Description of Artificial Sequence: Synthetic oligonucleotide
uuaaaacguucacgucccc

SEQ ID NO: 90411 - RNA, 19 nt, Artificial Sequence
  Description of Artificial Sequence: Synthetic oligonucleotide
uccaggucaauacguucga

SEQ ID NO: 90412 - RNA, 19 nt, Artificial Sequence
  Description of Artificial Sequence: Synthetic oligonucleotide
agagucucucgaagggucc

SEQ ID NO: 90413 - RNA, 19 nt, Artificial Sequence
  Description of Artificial Sequence: Synthetic oligonucleotide
aucuaggcgagaccgcuca

SEQ ID NO: 90414 - RNA, 19 nt, Artificial Sequence
  Description of Artificial Sequence: Synthetic oligonucleotide
uucauuccuaccucacaaa

SEQ ID NO: 90415 - RNA, 19 nt, Artificial Sequence
  Description of Artificial Sequence: Synthetic oligonucleotide
ucauuugugccaccucgau

SEQ ID NO: 90416 - RNA, 19 nt, Artificial Sequence
  Description of Artificial Sequence: Synthetic oligonucleotide
agagccauugagucggcaa

SEQ ID NO: 90417 - RNA, 19 nt, Artificial Sequence
  Description of Artificial Sequence: Synthetic oligonucleotide
ugaccaguacaugguaccc

SEQ ID NO: 90418 - RNA, 19 nt, Artificial Sequence
  Description of Artificial Sequence: Synthetic oligonucleotide
ucaauacguucgaucuugu

SEQ ID NO: 90419 - RNA, 19 nt, Artificial Sequence
  Description of Artificial Sequence: Synthetic oligonucleotide
uugucgccuguguaacggg

SEQ ID NO: 90420 - RNA, 19 nt, Artificial Sequence
  Description of Artificial Sequence: Synthetic oligonucleotide
acacgauuauugauguaag

SEQ ID NO: 90421 - RNA, 19 nt, Artificial Sequence
  Description of Artificial Sequence: Synthetic oligonucleotide
aggcccauaggaccuacug

SEQ ID NO: 90422 - RNA, 19 nt, Artificial Sequence
  Description of Artificial Sequence: Synthetic oligonucleotide
aguacacguuuccggccac

SEQ ID NO: 90423 - RNA, 19 nt, Artificial Sequence
  Description of Artificial Sequence: Synthetic oligonucleotide
ucuuugaauccgcgcuuga

SEQ ID NO: 90424 - RNA, 19 nt, Artificial Sequence
  Description of Artificial Sequence: Synthetic oligonucleotide
caaguaccccuucuccggg

SEQ ID NO: 90425 - RNA, 19 nt, Artificial Sequence
  Description of Artificial Sequence: Synthetic oligonucleotide
ggguaaugaccccauucgg

SEQ ID NO: 90426 - RNA, 19 nt, Artificial Sequence
  Description of Artificial Sequence: Synthetic oligonucleotide
gagaugagugucuugcggu

SEQ ID NO: 90427 - RNA, 19 nt, Artificial Sequence
  Description of Artificial Sequence: Synthetic oligonucleotide
uguguccaaacuuguggau

SEQ ID NO: 90428 - RNA, 19 nt, Artificial Sequence
  Description of Artificial Sequence: Synthetic oligonucleotide
acgacgugguccucacaac

SEQ ID NO: 90429 - RNA, 19 nt, Artificial Sequence
  Description of Artificial Sequence: Synthetic oligonucleotide
gacauugacuaguaccacu

SEQ ID NO: 90430 - RNA, 19 nt, Artificial Sequence
  Description of Artificial Sequence: Synthetic oligonucleotide
uacgaggguaaugacccca

SEQ ID NO: 90431 - RNA, 19 nt, Artificial Sequence
  Description of Artificial Sequence: Synthetic oligonucleotide
gauagucuacugagauucc

SEQ ID NO: 90432 - RNA, 19 nt, Artificial Sequence
  Description of Artificial Sequence: Synthetic oligonucleotide
cuguguccaaacuugugga

SEQ ID NO: 90433 - RNA, 19 nt, Artificial Sequence
  Description of Artificial Sequence: Synthetic oligonucleotide
aaacguucacguccccaaa

SEQ ID NO: 90434 - RNA, 19 nt, Artificial Sequence
  Description of Artificial Sequence: Synthetic oligonucleotide
cauucgguccaaaacaagu

SEQ ID NO: 90435 - RNA, 19 nt, Artificial Sequence
  Description of Artificial Sequence: Synthetic oligonucleotide
auagucuacugagauucca

SEQ ID NO: 90436 - RNA, 19 nt, Artificial Sequence
  Description of Artificial Sequence: Synthetic oligonucleotide
acggccaaugccauugguc

SEQ ID NO: 90437 - RNA, 19 nt, Artificial Sequence
  Description of Artificial Sequence: Synthetic oligonucleotide
uauagccguucauugugau

SEQ ID NO: 90438 - RNA, 19 nt, Artificial Sequence
  Description of Artificial Sequence: Synthetic oligonucleotide
aagggauccccuaucucgu

SEQ ID NO: 90439 - RNA, 19 nt, Artificial Sequence
  Description of Artificial Sequence: Synthetic oligonucleotide
gccacucacacuucuugcg

SEQ ID NO: 90440 - RNA, 19 nt, Artificial Sequence
  Description of Artificial Sequence: Synthetic oligonucleotide
acggaaagagccauugagu

SEQ ID NO: 90441 - RNA, 19 nt, Artificial Sequence
  Description of Artificial Sequence: Synthetic oligonucleotide
aacgggguccugucauaug

SEQ ID NO: 90442 - RNA, 19 nt, Artificial Sequence
  Description of Artificial Sequence: Synthetic oligonucleotide
aggugggguucccaauuuc

SEQ ID NO: 90443 - RNA, 19 nt, Artificial Sequence
  Description of Artificial Sequence: Synthetic oligonucleotide
gaggcuugacggaaagagc

SEQ ID NO: 90444 - RNA, 19 nt, Artificial Sequence
  Description of Artificial Sequence: Synthetic oligonucleotide
gaucacgucucggccagag

SEQ ID NO: 90445 - RNA, 19 nt, Artificial Sequence
  Description of Artificial Sequence: Synthetic oligonucleotide
cuccggucugcuuauugac

SEQ ID NO: 90446 - RNA, 19 nt, Artificial Sequence
  Description of Artificial Sequence: Synthetic oligonucleotide
aucuccggucugcuuauug

SEQ ID NO: 90447 - RNA, 19 nt, Artificial Sequence
  Description of Artificial Sequence: Synthetic oligonucleotide
uccguaccaucuaggcgag

SEQ ID NO: 90448 - RNA, 19 nt, Artificial Sequence
  Description of Artificial Sequence: Synthetic oligonucleotide
gagagucucucgaaggguc

SEQ ID NO: 90449 - RNA, 19 nt, Artificial Sequence
  Description of Artificial Sequence: Synthetic oligonucleotide
gccgauaacugaaagcuug

SEQ ID NO: 90450 - RNA, 19 nt, Artificial Sequence
  Description of Artificial Sequence: Synthetic oligonucleotide
uaggcgagaccgcucaaua

SEQ ID NO: 90451 - RNA, 19 nt, Artificial Sequence
  Description of Artificial Sequence: Synthetic oligonucleotide
ggcguugucuuugaauccg

SEQ ID NO: 90452 - RNA, 19 nt, Artificial Sequence
  Description of Artificial Sequence: Synthetic oligonucleotide
gacaucgucgggcucucca

SEQ ID NO: 90453 - RNA, 19 nt, Artificial Sequence
  Description of Artificial Sequence: Synthetic oligonucleotide
uaggaccuacugucgccgg

SEQ ID NO: 90454 - RNA, 19 nt, Artificial Sequence
  Description of Artificial Sequence: Synthetic oligonucleotide
gccauuggucacuacgucc

SEQ ID NO: 90455 - RNA, 19 nt, Artificial Sequence
  Description of Artificial Sequence: Synthetic oligonucleotide
caccucacaccuugguccc

SEQ ID NO: 90456 - RNA, 19 nt, Artificial Sequence
  Description of Artificial Sequence: Synthetic oligonucleotide
uacacguuuccggccaccc

SEQ ID NO: 90457 - RNA, 19 nt, Artificial Sequence
  Description of Artificial Sequence: Synthetic oligonucleotide
cgauuauugauguaaguga

SEQ ID NO: 90458 - RNA, 19 nt, Artificial Sequence
  Description of Artificial Sequence: Synthetic oligonucleotide
guaccaucuaggcgagacc

SEQ ID NO: 90459 - RNA, 19 nt, Artificial Sequence
  Description of Artificial Sequence: Synthetic oligonucleotide
cuauccggccaucagugca

SEQ ID NO: 90460 - RNA, 19 nt, Artificial Sequence
  Description of Artificial Sequence: Synthetic oligonucleotide
ucacaacgggguccuguca

SEQ ID NO: 90461 - RNA, 19 nt, Artificial Sequence
  Description of Artificial Sequence: Synthetic oligonucleotide
aaguaccccuucuccgggu

SEQ ID NO: 90462 - RNA, 19 nt, Artificial Sequence
  Description of Artificial Sequence: Synthetic oligonucleotide
cucacaacgggguccuguc

SEQ ID NO: 90463 - RNA, 19 nt, Artificial Sequence
  Description of Artificial Sequence: Synthetic oligonucleotide
cauauacuggguuggugaa

SEQ ID NO: 90464 - RNA, 19 nt, Artificial Sequence
  Description of Artificial Sequence: Synthetic oligonucleotide
cacuacguccucucgccac

SEQ ID NO: 90465 - RNA, 19 nt, Artificial Sequence
  Description of Artificial Sequence: Synthetic oligonucleotide
cauccgggcaucacaccag

SEQ ID NO: 90466 - RNA, 19 nt, Artificial Sequence
  Description of Artificial Sequence: Synthetic oligonucleotide
guagaggaccacgucugag

SEQ ID NO: 90467 - RNA, 19 nt, Artificial Sequence
  Description of Artificial Sequence: Synthetic oligonucleotide
cugccgauaacugaaagcu

SEQ ID NO: 90468 - RNA, 19 nt, Artificial Sequence
  Description of Artificial Sequence: Synthetic oligonucleotide
agaugagugucuugcgguu

SEQ ID NO: 90469 - RNA, 19 nt, Artificial Sequence
  Description of Artificial Sequence: Synthetic oligonucleotide
acguucacguccccaaaau

SEQ ID NO: 90470 - RNA, 19 nt, Artificial Sequence
  Description of Artificial Sequence: Synthetic oligonucleotide
caauacguucgaucuuguc

SEQ ID NO: 90471 - RNA, 19 nt, Artificial Sequence
  Description of Artificial Sequence: Synthetic oligonucleotide
cuuggucccucgaaguaga

SEQ ID NO: 90472 - RNA, 19 nt, Artificial Sequence
  Description of Artificial Sequence: Synthetic oligonucleotide
ucacuacguccucucgcca

SEQ ID NO: 90473 - RNA, 19 nt, Artificial Sequence
  Description of Artificial Sequence: Synthetic oligonucleotide
caucgagccggaugcugcc

SEQ ID NO: 90474 - RNA, 19 nt, Artificial Sequence
  Description of Artificial Sequence: Synthetic oligonucleotide
gaucaacgcaggucagaca

SEQ ID NO: 90475 - RNA, 19 nt, Artificial Sequence
  Description of Artificial Sequence: Synthetic oligonucleotide
accaucuaggcgagaccgc

SEQ ID NO: 90476 - RNA, 19 nt, Artificial Sequence
  Description of Artificial Sequence: Synthetic oligonucleotide
caucgucgggcucuccacc

SEQ ID NO: 90477 - RNA, 19 nt, Artificial Sequence
  Description of Artificial Sequence: Synthetic oligonucleotide
acaccgaugccaguucuca

SEQ ID NO: 90478 - RNA, 19 nt, Artificial Sequence
  Description of Artificial Sequence: Synthetic oligonucleotide
agagucgguccaguacacg

SEQ ID NO: 90479 - RNA, 19 nt, Artificial Sequence
  Description of Artificial Sequence: Synthetic oligonucleotide
cauugucgggagccauugg

SEQ ID NO: 90480 - RNA, 19 nt, Artificial Sequence
  Description of Artificial Sequence: Synthetic oligonucleotide
aucgucgggcucuccaccu

SEQ ID NO: 90481 - RNA, 19 nt, Artificial Sequence
  Description of Artificial Sequence: Synthetic oligonucleotide
caguacaugguaccccuca

SEQ ID NO: 90482 - RNA, 19 nt, Artificial Sequence
  Description of Artificial Sequence: Synthetic oligonucleotide
agguccccggcccaggagu

SEQ ID NO: 90483 - RNA, 19 nt, Artificial Sequence
  Description of Artificial Sequence: Synthetic oligonucleotide
auugagucggcaaccucga

SEQ ID NO: 90484 - RNA, 19 nt, Artificial Sequence
  Description of Artificial Sequence: Synthetic oligonucleotide
gaccuacugucgccggugc

SEQ ID NO: 90485 - RNA, 19 nt, Artificial Sequence
  Description of Artificial Sequence: Synthetic oligonucleotide
cccauuucgacaguacccc

SEQ ID NO: 90486 - RNA, 19 nt, Artificial Sequence
  Description of Artificial Sequence: Synthetic oligonucleotide
ugccaagggauccccuauc

SEQ ID NO: 90487 - RNA, 19 nt, Artificial Sequence
  Description of Artificial Sequence: Synthetic oligonucleotide
cacgugggcaugccagagg

SEQ ID NO: 90488 - RNA, 19 nt, Artificial Sequence
  Description of Artificial Sequence: Synthetic oligonucleotide
ugccgauaacugaaagcuu

SEQ ID NO: 90489 - RNA, 19 nt, Artificial Sequence
  Description of Artificial Sequence: Synthetic oligonucleotide
auagccguucauugugaua

SEQ ID NO: 90490 - RNA, 19 nt, Artificial Sequence
  Description of Artificial Sequence: Synthetic oligonucleotide
gagucucucgaaggguccc

SEQ ID NO: 90491 - RNA, 19 nt, Artificial Sequence
  Description of Artificial Sequence: Synthetic oligonucleotide
cacuugucgccuguguaac

SEQ ID NO: 90492 - RNA, 19 nt, Artificial Sequence
  Description of Artificial Sequence: Synthetic oligonucleotide
cuuuucuuuucuuuucuuu

SEQ ID NO: 90493 - RNA, 19 nt, Artificial Sequence
  Description of Artificial Sequence: Synthetic oligonucleotide
cucaucaaucaugcccgag

SEQ ID NO: 90494 - RNA, 19 nt, Artificial Sequence
  Description of Artificial Sequence: Synthetic oligonucleotide
gguagacaucggcacuggg

SEQ ID NO: 90495 - RNA, 19 nt, Artificial Sequence
  Description of Artificial Sequence: Synthetic oligonucleotide
agugaucaacgcaggucag

SEQ ID NO: 90496 - RNA, 19 nt, Artificial Sequence
  Description of Artificial Sequence: Synthetic oligonucleotide
aaggguaauggaagagaua

SEQ ID NO: 90497 - RNA, 19 nt, Artificial Sequence
  Description of Artificial Sequence: Synthetic oligonucleotide
uaguaccacucucuccgua

SEQ ID NO: 90498 - RNA, 19 nt, Artificial Sequence
  Description of Artificial Sequence: Synthetic oligonucleotide
ucucguccgugcuggccag

SEQ ID NO: 90499 - RNA, 19 nt, Artificial Sequence
  Description of Artificial Sequence: Synthetic oligonucleotide
cccauaggaccuacugucg

SEQ ID NO: 90500 - RNA, 19 nt, Artificial Sequence
  Description of Artificial Sequence: Synthetic oligonucleotide
uccugucauauggggcggg

SEQ ID NO: 90501 - RNA, 19 nt, Artificial Sequence
  Description of Artificial Sequence: Synthetic oligonucleotide
cucacaccuuggucccucg

SEQ ID NO: 90502 - RNA, 19 nt, Artificial Sequence
  Description of Artificial Sequence: Synthetic oligonucleotide
gacucggcgcuuguaccag

SEQ ID NO: 90503 - RNA, 19 nt, Artificial Sequence
  Description of Artificial Sequence: Synthetic oligonucleotide
ccauaggaccuacugucgc

SEQ ID NO: 90504 - RNA, 19 nt, Artificial Sequence
  Description of Artificial Sequence: Synthetic oligonucleotide
agggcccuaugccaaggga

SEQ ID NO: 90505 - RNA, 19 nt, Artificial Sequence
  Description of Artificial Sequence: Synthetic oligonucleotide
guugacgguacaggugcug

SEQ ID NO: 90506 - RNA, 19 nt, Artificial Sequence
  Description of Artificial Sequence: Synthetic oligonucleotide
cgaggcuugacggaaagag

SEQ ID NO: 90507 - RNA, 19 nt, Artificial Sequence
  Description of Artificial Sequence: Synthetic oligonucleotide
gcacgagagucucucgaag

SEQ ID NO: 90508 - RNA, 19 nt, Artificial Sequence
  Description of Artificial Sequence: Synthetic oligonucleotide
uucuccggguggacaguga

SEQ ID NO: 90509 - RNA, 19 nt, Artificial Sequence
  Description of Artificial Sequence: Synthetic oligonucleotide
acgucucggccagagucgg

SEQ ID NO: 90510 - RNA, 19 nt, Artificial Sequence
  Description of Artificial Sequence: Synthetic oligonucleotide
guauagccguucauuguga

SEQ ID NO: 90511 - RNA, 19 nt, Artificial Sequence
  Description of Artificial Sequence: Synthetic oligonucleotide
agugauggcccgaggcuug

SEQ ID NO: 90512 - RNA, 19 nt, Artificial Sequence
  Description of Artificial Sequence: Synthetic oligonucleotide
accuuggucccucgaagua

SEQ ID NO: 90513 - RNA, 19 nt, Artificial Sequence
  Description of Artificial Sequence: Synthetic oligonucleotide
auccgggcaucacaccagu

SEQ ID NO: 90514 - RNA, 19 nt, Artificial Sequence
  Description of Artificial Sequence: Synthetic oligonucleotide
guguaacggggcuggcagc

SEQ ID NO: 90515 - RNA, 19 nt, Artificial Sequence
  Description of Artificial Sequence: Synthetic oligonucleotide
ccagaagaccacuccugcc

SEQ ID NO: 90516 - RNA, 19 nt, Artificial Sequence
  Description of Artificial Sequence: Synthetic oligonucleotide
guacauccggcagggccgg

SEQ ID NO: 90517 - RNA, 19 nt, Artificial Sequence
  Description of Artificial Sequence: Synthetic oligonucleotide
caucuaggcgagaccgcuc

SEQ ID NO: 90518 - RNA, 19 nt, Artificial Sequence
  Description of Artificial Sequence: Synthetic oligonucleotide
cucgccacgucuggucacg

SEQ ID NO: 90519 - RNA, 19 nt, Artificial Sequence
  Description of Artificial Sequence: Synthetic oligonucleotide
aggaccuacugucgccggu

SEQ ID NO: 90520 - RNA, 19 nt, Artificial Sequence
  Description of Artificial Sequence: Synthetic oligonucleotide
guccugucauauggggcgg

SEQ ID NO: 90521 - RNA, 19 nt, Artificial Sequence
  Description of Artificial Sequence: Synthetic oligonucleotide
acacguuuccggccaccca

SEQ ID NO: 90522 - RNA, 19 nt, Artificial Sequence
  Description of Artificial Sequence: Synthetic oligonucleotide
uccggguguguaguaggga

SEQ ID NO: 90523 - RNA, 19 nt, Artificial Sequence
  Description of Artificial Sequence: Synthetic oligonucleotide
acgucuggucacgcuuggc

SEQ ID NO: 90524 - RNA, 19 nt, Artificial Sequence
  Description of Artificial Sequence: Synthetic oligonucleotide
gggcaucacaccaguagag

SEQ ID NO: 90525 - RNA, 19 nt, Artificial Sequence
  Description of Artificial Sequence: Synthetic oligonucleotide
aucgagccggaugcugccg

SEQ ID NO: 90526 - RNA, 19 nt, Artificial Sequence
  Description of Artificial Sequence: Synthetic oligonucleotide
ucuaggcgagaccgcucaa

SEQ ID NO: 90527 - RNA, 19 nt, Artificial Sequence
  Description of Artificial Sequence: Synthetic oligonucleotide
cacgauuauugauguaagu

SEQ ID NO: 90528 - RNA, 19 nt, Artificial Sequence
  Description of Artificial Sequence: Synthetic oligonucleotide
gucacuccaguagaugaaa

SEQ ID NO: 90529 - RNA, 19 nt, Artificial Sequence
  Description of Artificial Sequence: Synthetic oligonucleotide
gaguccugucacuccagua

SEQ ID NO: 90530 - RNA, 19 nt, Artificial Sequence
  Description of Artificial Sequence: Synthetic oligonucleotide
cacgacgggaucagugcca

SEQ ID NO: 90531 - RNA, 19 nt, Artificial Sequence
  Description of Artificial Sequence: Synthetic oligonucleotide
cauuggucacuacguccuc

SEQ ID NO: 90532 - RNA, 19 nt, Artificial Sequence
  Description of Artificial Sequence: Synthetic oligonucleotide
acgggaucagugccaucga

SEQ ID NO: 90533 - RNA, 19 nt, Artificial Sequence
  Description of Artificial Sequence: Synthetic oligonucleotide
cauauggggcgggcacugg

SEQ ID NO: 90534 - RNA, 19 nt, Artificial Sequence
  Description of Artificial Sequence: Synthetic oligonucleotide
cucagcggguccaccacga

SEQ ID NO: 90535 - RNA, 19 nt, Artificial Sequence
  Description of Artificial Sequence: Synthetic oligonucleotide
aggggugacugaggccucg

SEQ ID NO: 90536 - RNA, 19 nt, Artificial Sequence
  Description of Artificial Sequence: Synthetic oligonucleotide
gguaaugaccccauucggu

SEQ ID NO: 90537 - RNA, 19 nt, Artificial Sequence
  Description of Artificial Sequence: Synthetic oligonucleotide
uacguucgaucuuguccau

SEQ ID NO: 90538 - RNA, 19 nt, Artificial Sequence
  Description of Artificial Sequence: Synthetic oligonucleotide
ugccgguacuggcaacgau

SEQ ID NO: 90539 - RNA, 19 nt, Artificial Sequence
  Description of Artificial Sequence: Synthetic oligonucleotide
cccgcucaaggcagcaugg

SEQ ID NO: 90540 - RNA, 19 nt, Artificial Sequence
  Description of Artificial Sequence: Synthetic oligonucleotide
gucugaccaguacauggua

SEQ ID NO: 90541 - RNA, 19 nt, Artificial Sequence
  Description of Artificial Sequence: Synthetic oligonucleotide
agacacgauuauugaugua

SEQ ID NO: 90542 - RNA, 19 nt, Artificial Sequence
  Description of Artificial Sequence: Synthetic oligonucleotide
caguauagccguucauugu

SEQ ID NO: 90543 - RNA, 19 nt, Artificial Sequence
  Description of Artificial Sequence: Synthetic oligonucleotide
ucauggccccauuggucau

SEQ ID NO: 90544 - RNA, 19 nt, Artificial Sequence
  Description of Artificial Sequence: Synthetic oligonucleotide
ggggcuauccggccaucag

SEQ ID NO: 90545 - RNA, 19 nt, Artificial Sequence
  Description of Artificial Sequence: Synthetic oligonucleotide
ggguguguaguagggaaca

SEQ ID NO: 90546 - RNA, 19 nt, Artificial Sequence
  Description of Artificial Sequence: Synthetic oligonucleotide
ugguugccccagucugacc

SEQ ID NO: 90547 - RNA, 19 nt, Artificial Sequence
  Description of Artificial Sequence: Synthetic oligonucleotide
gaguccguggcguugucuu

SEQ ID NO: 90548 - RNA, 19 nt, Artificial Sequence
  Description of Artificial Sequence: Synthetic oligonucleotide
acaacgggguccugucaua

SEQ ID NO: 90549 - RNA, 19 nt, Artificial Sequence
  Description of Artificial Sequence: Synthetic oligonucleotide
gauccccuaucucguccuc

SEQ ID NO: 90550 - RNA, 19 nt, Artificial Sequence
  Description of Artificial Sequence: Synthetic oligonucleotide
uugagucggcaaccucgau

SEQ ID NO: 90551 - RNA, 19 nt, Artificial Sequence
  Description of Artificial Sequence: Synthetic oligonucleotide
cuggucacgcuuggcccgg

SEQ ID NO: 90552 - RNA, 19 nt, Artificial Sequence
  Description of Artificial Sequence: Synthetic oligonucleotide
ggacucggcgcuuguacca

SEQ ID NO: 90553 - RNA, 19 nt, Artificial Sequence
  Description of Artificial Sequence: Synthetic oligonucleotide
gcucaauacgaggguaaug

SEQ ID NO: 90554 - RNA, 19 nt, Artificial Sequence
  Description of Artificial Sequence: Synthetic oligonucleotide
ccugacgagugucucgcac

SEQ ID NO: 90555 - RNA, 19 nt, Artificial Sequence
  Description of Artificial Sequence: Synthetic oligonucleotide
accgcucaauacgagggua

SEQ ID NO: 90556 - RNA, 19 nt, Artificial Sequence
  Description of Artificial Sequence: Synthetic oligonucleotide
guugcccugguugacggua

SEQ ID NO: 90557 - RNA, 19 nt, Artificial Sequence
  Description of Artificial Sequence: Synthetic oligonucleotide
guacacguuuccggccacc

SEQ ID NO: 90558 - RNA, 19 nt, Artificial Sequence
  Description of Artificial Sequence: Synthetic oligonucleotide
ccucguuugccgucagcag

SEQ ID NO: 90559 - RNA, 19 nt, Artificial Sequence
  Description of Artificial Sequence: Synthetic oligonucleotide
ggaccuacugucgccggug

SEQ ID NO: 90560 - RNA, 19 nt, Artificial Sequence
  Description of Artificial Sequence: Synthetic oligonucleotide
uacguccucucgccacguc

SEQ ID NO: 90561 - RNA, 19 nt, Artificial Sequence
  Description of Artificial Sequence: Synthetic oligonucleotide
ccugauagucuacugagau

SEQ ID NO: 90562 - RNA, 19 nt, Artificial Sequence
  Description of Artificial Sequence: Synthetic oligonucleotide
acucggcgcuuguaccaga

SEQ ID NO: 90563 - RNA, 19 nt, Artificial Sequence
  Description of Artificial Sequence: Synthetic oligonucleotide
acgacgggaucagugccau

SEQ ID NO: 90564 - RNA, 19 nt, Artificial Sequence
  Description of Artificial Sequence: Synthetic oligonucleotide
gcgugaguccugucacucc

SEQ ID NO: 90565 - RNA, 19 nt, Artificial Sequence
  Description of Artificial Sequence: Synthetic oligonucleotide
gcccugacgagugucucgc

SEQ ID NO: 90566 - RNA, 19 nt, Artificial Sequence
  Description of Artificial Sequence: Synthetic oligonucleotide
acgaggguaaugaccccau

SEQ ID NO: 90567 - RNA, 19 nt, Artificial Sequence
  Description of Artificial Sequence: Synthetic oligonucleotide
gguaccccucagcgggucc

SEQ ID NO: 90568 - RNA, 19 nt, Artificial Sequence
  Description of Artificial Sequence: Synthetic oligonucleotide
cguucacguccccaaaaug

SEQ ID NO: 90569 - RNA, 19 nt, Artificial Sequence
  Description of Artificial Sequence: Synthetic oligonucleotide
ugcccgagaugagugucuu

SEQ ID NO: 90570 - RNA, 19 nt, Artificial Sequence
  Description of Artificial Sequence: Synthetic oligonucleotide
acacugacacggagaacau

SEQ ID NO: 90571 - RNA, 19 nt, Artificial Sequence
  Description of Artificial Sequence: Synthetic oligonucleotide
cagcgacauugucgggagc

SEQ ID NO: 90572 - RNA, 19 nt, Artificial Sequence
  Description of Artificial Sequence: Synthetic oligonucleotide
ggcccuaugccaagggauc

SEQ ID NO: 90573 - RNA, 19 nt, Artificial Sequence
  Description of Artificial Sequence: Synthetic oligonucleotide
ggcgugaguccugucacuc

SEQ ID NO: 90574 - RNA, 19 nt, Artificial Sequence
  Description of Artificial Sequence: Synthetic oligonucleotide
cucggcgcuuguaccagaa

SEQ ID NO: 90575 - RNA, 19 nt, Artificial Sequence
  Description of Artificial Sequence: Synthetic oligonucleotide
cugucauauggggcgggca

SEQ ID NO: 90576 - RNA, 19 nt, Artificial Sequence
  Description of Artificial Sequence: Synthetic oligonucleotide
caccuuggucccucgaagu

SEQ ID NO: 90577 - RNA, 19 nt, Artificial Sequence
  Description of Artificial Sequence: Synthetic oligonucleotide
cgaugacaugaaacccugg

SEQ ID NO: 90578 - RNA, 19 nt, Artificial Sequence
  Description of Artificial Sequence: Synthetic oligonucleotide
gcccuaugccaagggaucc

SEQ ID NO: 90579 - RNA, 19 nt, Artificial Sequence
  Description of Artificial Sequence: Synthetic oligonucleotide
uccgcgcuugauggagcca

SEQ ID NO: 90580 - RNA, 19 nt, Artificial Sequence
  Description of Artificial Sequence: Synthetic oligonucleotide
ccggguguguaguagggaa

SEQ ID NO: 90581 - RNA, 19 nt, Artificial Sequence
  Description of Artificial Sequence: Synthetic oligonucleotide
gccguucauugugauaauc

SEQ ID NO: 90582 - RNA, 19 nt, Artificial Sequence
  Description of Artificial Sequence: Synthetic oligonucleotide
ucgccacgucuggucacgc

SEQ ID NO: 90583 - RNA, 19 nt, Artificial Sequence
  Description of Artificial Sequence: Synthetic oligonucleotide
cccgaggcuugacggaaag

SEQ ID NO: 90584 - RNA, 19 nt, Artificial Sequence
  Description of Artificial Sequence: Synthetic oligonucleotide
cuuugaauccgcgcuugau

SEQ ID NO: 90585 - RNA, 19 nt, Artificial Sequence
  Description of Artificial Sequence: Synthetic oligonucleotide
cggacucggcgcuuguacc

SEQ ID NO: 90586 - RNA, 19 nt, Artificial Sequence
  Description of Artificial Sequence: Synthetic oligonucleotide
ggugguugccccagucuga

SEQ ID NO: 90587 - RNA, 19 nt, Artificial Sequence
  Description of Artificial Sequence: Synthetic oligonucleotide
gucauauggggcgggcacu

SEQ ID NO: 90588 - RNA, 19 nt, Artificial Sequence
  Description of Artificial Sequence: Synthetic oligonucleotide
cuaguaccacucucuccgu

SEQ ID NO: 90589 - RNA, 19 nt, Artificial Sequence
  Description of Artificial Sequence: Synthetic oligonucleotide
cacgauggcguggggcuca

SEQ ID NO: 90590 - RNA, 19 nt, Artificial Sequence
  Description of Artificial Sequence: Synthetic oligonucleotide
ggauccccuaucucguccu

SEQ ID NO: 90591 - RNA, 19 nt, Artificial Sequence
  Description of Artificial Sequence: Synthetic oligonucleotide
ccugucauauggggcgggc

SEQ ID NO: 90592 - RNA, 19 nt, Artificial Sequence
  Description of Artificial Sequence: Synthetic oligonucleotide
ggcgggcacuggcacucgg

SEQ ID NO: 90593 - RNA, 19 nt, Artificial Sequence
  Description of Artificial Sequence: Synthetic oligonucleotide
cccuaugccaagggauccc

SEQ ID NO: 90594 - RNA, 19 nt, Artificial Sequence
  Description of Artificial Sequence: Synthetic oligonucleotide
uaccccucagcggguccac

SEQ ID NO: 90595 - RNA, 19 nt, Artificial Sequence
  Description of Artificial Sequence: Synthetic oligonucleotide
ucgcuggcucguucacaua

SEQ ID NO: 90596 - RNA, 19 nt, Artificial Sequence
  Description of Artificial Sequence: Synthetic oligonucleotide
aagugacgccauagaugua

SEQ ID NO: 90597 - RNA, 19 nt, Artificial Sequence
  Description of Artificial Sequence: Synthetic oligonucleotide
cuugacggaaagagccauu

SEQ ID NO: 90598 - RNA, 19 nt, Artificial Sequence
  Description of Artificial Sequence: Synthetic oligonucleotide
cggcgcuuguaccagaaga

SEQ ID NO: 90599 - RNA, 19 nt, Artificial Sequence
  Description of Artificial Sequence: Synthetic oligonucleotide
gcgggcacuggcacucggg

SEQ ID NO: 90600 - RNA, 19 nt, Artificial Sequence
  Description of Artificial Sequence: Synthetic oligonucleotide
cucguccgugcuggccagg

SEQ ID NO: 90601 - RNA, 19 nt, Artificial Sequence
  Description of Artificial Sequence: Synthetic oligonucleotide
ccccuaucucguccucagg

SEQ ID NO: 90602 - RNA, 19 nt, Artificial Sequence
  Description of Artificial Sequence: Synthetic oligonucleotide
ggucaauacguucgaucuu

SEQ ID NO: 90603 - RNA, 19 nt, Artificial Sequence
  Description of Artificial Sequence: Synthetic oligonucleotide
uggucacgcuuggcccggc

SEQ ID NO: 90604 - RNA, 19 nt, Artificial Sequence
  Description of Artificial Sequence: Synthetic oligonucleotide
ccgcucaauacgaggguaa

SEQ ID NO: 90605 - RNA, 19 nt, Artificial Sequence
  Description of Artificial Sequence: Synthetic oligonucleotide
cccagauaacugaggaggu

SEQ ID NO: 90606 - RNA, 19 nt, Artificial Sequence
  Description of Artificial Sequence: Synthetic oligonucleotide
aucggcacuggggcugguu

SEQ ID NO: 90607 - RNA, 19 nt, Artificial Sequence
  Description of Artificial Sequence: Synthetic oligonucleotide
gcggucacagggguugguc

SEQ ID NO: 90608 - RNA, 19 nt, Artificial Sequence
  Description of Artificial Sequence: Synthetic oligonucleotide
cuaggcgagaccgcucaau

SEQ ID NO: 90609 - RNA, 19 nt, Artificial Sequence
  Description of Artificial Sequence: Synthetic oligonucleotide
acguuuccggccacccauu

SEQ ID NO: 90610 - RNA, 19 nt, Artificial Sequence
  Description of Artificial Sequence: Synthetic oligonucleotide
gcgacauugucgggagcca

SEQ ID NO: 90611 - RNA, 19 nt, Artificial Sequence
  Description of Artificial Sequence: Synthetic oligonucleotide
gggcccuaugccaagggau

SEQ ID NO: 90612 - RNA, 19 nt, Artificial Sequence
  Description of Artificial Sequence: Synthetic oligonucleotide
caacgggguccugucauau

SEQ ID NO: 90613 - RNA, 19 nt, Artificial Sequence
  Description of Artificial Sequence: Synthetic oligonucleotide
gacugacgacgugguccuc

SEQ ID NO: 90614 - RNA, 19 nt, Artificial Sequence
  Description of Artificial Sequence: Synthetic oligonucleotide
cguuuccggccacccauuc

SEQ ID NO: 90615 - RNA, 19 nt, Artificial Sequence
  Description of Artificial Sequence: Synthetic oligonucleotide
cugcccgcucaaggcagca

SEQ ID NO: 90616 - RNA, 19 nt, Artificial Sequence
  Description of Artificial Sequence: Synthetic oligonucleotide
gucccucgaaguagacagu

SEQ ID NO: 90617 - RNA, 19 nt, Artificial Sequence
  Description of Artificial Sequence: Synthetic oligonucleotide
ccaucuaggcgagaccgcu

SEQ ID NO: 90618 - RNA, 19 nt, Artificial Sequence
  Description of Artificial Sequence: Synthetic oligonucleotide
ggcccggcugaugguacuc

SEQ ID NO: 90619 - RNA, 19 nt, Artificial Sequence
  Description of Artificial Sequence: Synthetic oligonucleotide
gguugacgguacaggugcu

SEQ ID NO: 90620 - RNA, 19 nt, Artificial Sequence
  Description of Artificial Sequence: Synthetic oligonucleotide
cuacguccucucgccacgu

SEQ ID NO: 90621 - RNA, 19 nt, Artificial Sequence
  Description of Artificial Sequence: Synthetic oligonucleotide
cccgacaucgucgggcucu

SEQ ID NO: 90622 - RNA, 19 nt, Artificial Sequence
  Description of Artificial Sequence: Synthetic oligonucleotide
ccauugggacagguacaca

SEQ ID NO: 90623 - RNA, 19 nt, Artificial Sequence
  Description of Artificial Sequence: Synthetic oligonucleotide
ccucacaacgggguccugu

SEQ ID NO: 90624 - RNA, 19 nt, Artificial Sequence
  Description of Artificial Sequence: Synthetic oligonucleotide
ggucacgcuuggcccggcu

SEQ ID NO: 90625 - RNA, 19 nt, Artificial Sequence
  Description of Artificial Sequence: Synthetic oligonucleotide
ccgacaucgucgggcucuc

SEQ ID NO: 90626 - RNA, 19 nt, Artificial Sequence
  Description of Artificial Sequence: Synthetic oligonucleotide
ccggcacgugggcaugcca

SEQ ID NO: 90627 - RNA, 19 nt, Artificial Sequence
  Description of Artificial Sequence: Synthetic oligonucleotide
cccugacgagugucucgca

SEQ ID NO: 90628 - RNA, 19 nt, Artificial Sequence
  Description of Artificial Sequence: Synthetic oligonucleotide
cacgcuuggcccggcugau

SEQ ID NO: 90629 - RNA, 19 nt, Artificial Sequence
  Description of Artificial Sequence: Synthetic oligonucleotide
gcccgaggcuugacggaaa

SEQ ID NO: 90630 - RNA, 19 nt, Artificial Sequence
  Description of Artificial Sequence: Synthetic oligonucleotide
ccgcgcuugauggagccau

SEQ ID NO: 90631 - RNA, 19 nt, Artificial Sequence
  Description of Artificial Sequence: Synthetic oligonucleotide
cgacgggaucagugccauc

SEQ ID NO: 90632 - RNA, 19 nt, Artificial Sequence
  Description of Artificial Sequence: Synthetic oligonucleotide
ccaggucaauacguucgau

SEQ ID NO: 90633 - RNA, 19 nt, Artificial Sequence
  Description of Artificial Sequence: Synthetic oligonucleotide
cgacaucgucgggcucucc

SEQ ID NO: 90634 - RNA, 19 nt, Artificial Sequence
  Description of Artificial Sequence: Synthetic oligonucleotide
cguuugccgucagcagcca

SEQ ID NO: 90635 - RNA, 19 nt, Artificial Sequence
  Description of Artificial Sequence: Synthetic oligonucleotide
cacccgucuccaggucaau

SEQ ID NO: 90636 - RNA, 19 nt, Artificial Sequence
  Description of Artificial Sequence: Synthetic oligonucleotide
ccguaccaucuaggcgaga

SEQ ID NO: 90637 - RNA, 19 nt, Artificial Sequence
  Description of Artificial Sequence: Synthetic oligonucleotide
cagugccaucgagccggau

SEQ ID NO: 90638 - RNA, 19 nt, Artificial Sequence
  Description of Artificial Sequence: Synthetic oligonucleotide
cgccacgucuggucacgcu

SEQ ID NO: 90639 - RNA, 19 nt, Artificial Sequence
  Description of Artificial Sequence: Synthetic oligonucleotide
cgaucacgucucggccaga

SEQ ID NO: 90640 - RNA, 19 nt, Artificial Sequence
  Description of Artificial Sequence: Synthetic oligonucleotide
aauuaugggauuuuguugc

SEQ ID NO: 90641 - RNA, 19 nt, Artificial Sequence
  Description of Artificial Sequence: Synthetic oligonucleotide
ucuuauagaaaacaggcug

SEQ ID NO: 90642 - RNA, 19 nt, Artificial Sequence
  Description of Artificial Sequence: Synthetic oligonucleotide
agaacaguaaucccggccc

SEQ ID NO: 90643 - RNA, 19 nt, Artificial Sequence
  Description of Artificial Sequence: Synthetic oligonucleotide
aaagguuucaacuggggug

SEQ ID NO: 90644 - RNA, 19 nt, Artificial Sequence
  Description of Artificial Sequence: Synthetic oligonucleotide
aacuuaaaacccuagacua

SEQ ID NO: 90645 - RNA, 19 nt, Artificial Sequence
  Description of Artificial Sequence: Synthetic oligonucleotide
uauucaauuaugagagcgg

SEQ ID NO: 90646 - RNA, 19 nt, Artificial Sequence
  Description of Artificial Sequence: Synthetic oligonucleotide
ugauucuauacucaucgcc

SEQ ID NO: 90647 - RNA, 19 nt, Artificial Sequence
  Description of Artificial Sequence: Synthetic oligonucleotide
ucgucuuauagaaaacagg

SEQ ID NO: 90648 - RNA, 19 nt, Artificial Sequence
  Description of Artificial Sequence: Synthetic oligonucleotide
aauuaugagagcgguacuc

SEQ ID NO: 90649 - RNA, 19 nt, Artificial Sequence
  Description of Artificial Sequence: Synthetic oligonucleotide
gacguuaacacucauuuca

SEQ ID NO: 90650 - RNA, 19 nt, Artificial Sequence
  Description of Artificial Sequence: Synthetic oligonucleotide
gaauuaugggauuuuguug

SEQ ID NO: 90651 - RNA, 19 nt, Artificial Sequence
  Description of Artificial Sequence: Synthetic oligonucleotide
guauucaauuaugagagcg

SEQ ID NO: 90652 - RNA, 19 nt, Artificial Sequence
  Description of Artificial Sequence: Synthetic oligonucleotide
aacaucuuaaccaucccuc

SEQ ID NO: 90653 - RNA, 19 nt, Artificial Sequence
  Description of Artificial Sequence: Synthetic oligonucleotide
uugacaacugggaacaucu

SEQ ID NO: 90654 - RNA, 19 nt, Artificial Sequence
  Description of Artificial Sequence: Synthetic oligonucleotide
uuuaggccaaucaucuggg

SEQ ID NO: 90655 - RNA, 19 nt, Artificial Sequence
  Description of Artificial Sequence: Synthetic oligonucleotide
ucuagagguaccaaaugug

SEQ ID NO: 90656 - RNA, 19 nt, Artificial Sequence
  Description of Artificial Sequence: Synthetic oligonucleotide
uguucggugaagagaaccg

SEQ ID NO: 90657 - RNA, 19 nt, Artificial Sequence
  Description of Artificial Sequence: Synthetic oligonucleotide
ucaauuaugagagcgguac

SEQ ID NO: 90658 - RNA, 19 nt, Artificial Sequence
  Description of Artificial Sequence: Synthetic oligonucleotide
gagagagagagagagagag

SEQ ID NO: 90659 - RNA, 19 nt, Artificial Sequence
  Description of Artificial Sequence: Synthetic oligonucleotide
uuugcugcauaauuggaca

SEQ ID NO: 90660 - RNA, 19 nt, Artificial Sequence
  Description of Artificial Sequence: Synthetic oligonucleotide
uguaacauccaaaaugcua

SEQ ID NO: 90661 - RNA, 19 nt, Artificial Sequence
  Description of Artificial Sequence: Synthetic oligonucleotide
aaaagucagguuuccaaga

SEQ ID NO: 90662 - RNA, 19 nt, Artificial Sequence
  Description of Artificial Sequence: Synthetic oligonucleotide
uguaacuuauuccaccuuc

SEQ ID NO: 90663 - RNA, 19 nt, Artificial Sequence
  Description of Artificial Sequence: Synthetic oligonucleotide
aaaacccuagacuacucga

SEQ ID NO: 90664 - RNA, 19 nt, Artificial Sequence
  Description of Artificial Sequence: Synthetic oligonucleotide
gauacccagagagagagag

SEQ ID NO: 90665 - RNA, 19 nt, Artificial Sequence
  Description of Artificial Sequence: Synthetic oligonucleotide
ugugaaacacgggagacag

SEQ ID NO: 90666 - RNA, 19 nt, Artificial Sequence
  Description of Artificial Sequence: Synthetic oligonucleotide
uuccuaaacagcacuuagg

SEQ ID NO: 90667 - RNA, 19 nt, Artificial Sequence
  Description of Artificial Sequence: Synthetic oligonucleotide
aaacaugagauuccggaaa

SEQ ID NO: 90668 - RNA, 19 nt, Artificial Sequence
  Description of Artificial Sequence: Synthetic oligonucleotide
ucacuaucucgucuuauag

SEQ ID NO: 90669 - RNA, 19 nt, Artificial Sequence
  Description of Artificial Sequence: Synthetic oligonucleotide
gaugcuaugugauauccuc

SEQ ID NO: 90670 - RNA, 19 nt, Artificial Sequence
  Description of Artificial Sequence: Synthetic oligonucleotide
uuagcaauauuccuuuguc

SEQ ID NO: 90671 - RNA, 19 nt, Artificial Sequence
  Description of Artificial Sequence: Synthetic oligonucleotide
ugggguguaaccuauuuac

SEQ ID NO: 90672 - RNA, 19 nt, Artificial Sequence
  Description of Artificial Sequence: Synthetic oligonucleotide
aagagaacccucgucaaag

SEQ ID NO: 90673 - RNA, 19 nt, Artificial Sequence
  Description of Artificial Sequence: Synthetic oligonucleotide
  modified_base (7)..(7): a, c, u, g, unknown or other
aaagccncuuuugaguuug

SEQ ID NO: 90674 - RNA, 19 nt, Artificial Sequence
  Description of Artificial Sequence: Synthetic oligonucleotide
uaguugagaagcaaggcuc

SEQ ID NO: 90675 - RNA, 19 nt, Artificial Sequence
  Description of Artificial Sequence: Synthetic oligonucleotide
cauggcauuuaauagggug

SEQ ID NO: 90676 - RNA, 19 nt, Artificial Sequence
  Description of Artificial Sequence: Synthetic oligonucleotide
guugcuuacacucgagucc

SEQ ID NO: 90677 - RNA, 19 nt, Artificial Sequence
  Description of Artificial Sequence: Synthetic oligonucleotide
acucuuagacaccaaguag

SEQ ID NO: 90678 - RNA, 19 nt, Artificial Sequence
  Description of Artificial Sequence: Synthetic oligonucleotide
agcaaaagaaagcugcgca

SEQ ID NO: 90679 - RNA, 19 nt, Artificial Sequence
  Description of Artificial Sequence: Synthetic oligonucleotide
uguuuuggcacgaauuuau

SEQ ID NO: 90680 - RNA, 19 nt, Artificial Sequence
  Description of Artificial Sequence: Synthetic oligonucleotide
uuuggcacgaauuuauuuu

SEQ ID NO: 90681 - RNA, 19 nt, Artificial Sequence
  Description of Artificial Sequence: Synthetic oligonucleotide
gagagagagagagagagac

SEQ ID NO: 90682 - RNA, 19 nt, Artificial Sequence
  Description of Artificial Sequence: Synthetic oligonucleotide
uacccagagagagagagag

SEQ ID NO: 90683 - RNA, 19 nt, Artificial Sequence
  Description of Artificial Sequence: Synthetic oligonucleotide
agagagagagagacgaacc

SEQ ID NO: 90684 - RNA, 19 nt, Artificial Sequence
  Description of Artificial Sequence: Synthetic oligonucleotide
uccuaagaagucauggggu

SEQ ID NO: 90685 - RNA, 19 nt, Artificial Sequence
  Description of Artificial Sequence: Synthetic oligonucleotide
cacguauucaauuaugaga

SEQ ID NO: 90686 - RNA, 19 nt, Artificial Sequence
  Description of Artificial Sequence: Synthetic oligonucleotide
cuaaaugugacugaggaaa

SEQ ID NO: 90687 - RNA, 19 nt, Artificial Sequence
  Description of Artificial Sequence: Synthetic oligonucleotide
gacacucuuagacaccaag

SEQ ID NO: 90688 - RNA, 19 nt, Artificial Sequence
  Description of Artificial Sequence: Synthetic oligonucleotide
ucggauaaccaauaguauc

SEQ ID NO: 90689 - RNA, 19 nt, Artificial Sequence
  Description of Artificial Sequence: Synthetic oligonucleotide
agcacuuaggguuuuauua

SEQ ID NO: 90690 - RNA, 19 nt, Artificial Sequence
  Description of Artificial Sequence: Synthetic oligonucleotide
acuaggaggccucauggag

SEQ ID NO: 90691 - RNA, 19 nt, Artificial Sequence
  Description of Artificial Sequence: Synthetic oligonucleotide
aguaacaaagagaacccuc

SEQ ID NO: 90692 - RNA, 19 nt, Artificial Sequence
  Description of Artificial Sequence: Synthetic oligonucleotide
caugagauuccggaaaagg

SEQ ID NO: 90693 - RNA, 19 nt, Artificial Sequence
  Description of Artificial Sequence: Synthetic oligonucleotide
ugauuugcaccaaguagug

SEQ ID NO: 90694 - RNA, 19 nt, Artificial Sequence
  Description of Artificial Sequence: Synthetic oligonucleotide
cagagagagagagagagag

SEQ ID NO: 90695 - RNA, 19 nt, Artificial Sequence
  Description of Artificial Sequence: Synthetic oligonucleotide
uaccuaguugagaagcaag

SEQ ID NO: 90696 - RNA, 19 nt, Artificial Sequence
  Description of Artificial Sequence: Synthetic oligonucleotide
gggcauacgauauggaacg

SEQ ID NO: 90697 - RNA, 19 nt, Artificial Sequence
  Description of Artificial Sequence: Synthetic oligonucleotide
aaacccuagacuacucgac

SEQ ID NO: 90698 - RNA, 19 nt, Artificial Sequence
  Description of Artificial Sequence: Synthetic oligonucleotide
gaacuuaaaacccuagacu

SEQ ID NO: 90699 - RNA, 19 nt, Artificial Sequence
  Description of Artificial Sequence: Synthetic oligonucleotide
aaagucagguuuccaagaa

SEQ ID NO: 90700 - RNA, 19 nt, Artificial Sequence
  Description of Artificial Sequence: Synthetic oligonucleotide
acacguauucaauuaugag

SEQ ID NO: 90701 - RNA, 19 nt, Artificial Sequence
  Description of Artificial Sequence: Synthetic oligonucleotide
gagaguaucggauaaccaa

SEQ ID NO: 90702 - RNA, 19 nt, Artificial Sequence
  Description of Artificial Sequence: Synthetic oligonucleotide
uugcuuacacucgaguccg

SEQ ID NO: 90703 - RNA, 19 nt, Artificial Sequence
  Description of Artificial Sequence: Synthetic oligonucleotide
aguaucggauaaccaauag

SEQ ID NO: 90704 - RNA, 19 nt, Artificial Sequence
  Description of Artificial Sequence: Synthetic oligonucleotide
aacacguauucaauuauga

SEQ ID NO: 90705 - RNA, 19 nt, Artificial Sequence
  Description of Artificial Sequence: Synthetic oligonucleotide
uuaagccuuguauucgagc

SEQ ID NO: 90706 - RNA, 19 nt, Artificial Sequence
  Description of Artificial Sequence: Synthetic oligonucleotide
uguguguguguguaggaca

SEQ ID NO: 90707 - RNA, 19 nt, Artificial Sequence
  Description of Artificial Sequence: Synthetic oligonucleotide
uguugcuuacacucgaguc

SEQ ID NO: 90708 - RNA, 19 nt, Artificial Sequence
  Description of Artificial Sequence: Synthetic oligonucleotide
uagacuacucgacucuccc

SEQ ID NO: 90709 - RNA, 19 nt, Artificial Sequence
  Description of Artificial Sequence: Synthetic oligonucleotide
uaaacaugagauuccggaa

SEQ ID NO: 90710 - RNA, 19 nt, Artificial Sequence
  Description of Artificial Sequence: Synthetic oligonucleotide
aacaaguugaggugggguu

SEQ ID NO: 90711 - RNA, 19 nt, Artificial Sequence
  Description of Artificial Sequence: Synthetic oligonucleotide
uuuguugcuuacacucgag

SEQ ID NO: 90712 - RNA, 19 nt, Artificial Sequence
  Description of Artificial Sequence: Synthetic oligonucleotide
gacuacucgacucucccug

SEQ ID NO: 90713 - RNA, 19 nt, Artificial Sequence
  Description of Artificial Sequence: Synthetic oligonucleotide
gagagagagagagagacga

SEQ ID NO: 90714 - RNA, 19 nt, Artificial Sequence
  Description of Artificial Sequence: Synthetic oligonucleotide
aauagggugcccuccccug

SEQ ID NO: 90715 - RNA, 19 nt, Artificial Sequence
  Description of Artificial Sequence: Synthetic oligonucleotide
cucuacuggacacacaguc

SEQ ID NO: 90716 - RNA, 19 nt, Artificial Sequence
  Description of Artificial Sequence: Synthetic oligonucleotide
aggacaaggguguuucauc

SEQ ID NO: 90717 - RNA, 19 nt, Artificial Sequence
  Description of Artificial Sequence: Synthetic oligonucleotide
agugugaaacacgggagac

SEQ ID NO: 90718 - RNA, 19 nt, Artificial Sequence
  Description of Artificial Sequence: Synthetic oligonucleotide
agaaccgaccuuugcaaag

SEQ ID NO: 90719 - RNA, 19 nt, Artificial Sequence
  Description of Artificial Sequence: Synthetic oligonucleotide
aaacacguauucaauuaug

SEQ ID NO: 90720 - RNA, 19 nt, Artificial Sequence
  Description of Artificial Sequence: Synthetic oligonucleotide
ucgucaaagcuaucaaaca

SEQ ID NO: 90721 - RNA, 19 nt, Artificial Sequence
  Description of Artificial Sequence: Synthetic oligonucleotide
guagccaucaacagacggg

SEQ ID NO: 90722 - RNA, 19 nt, Artificial Sequence
  Description of Artificial Sequence: Synthetic oligonucleotide
uaacuuauuccaccuucca

SEQ ID NO: 90723 - RNA, 19 nt, Artificial Sequence
  Description of Artificial Sequence: Synthetic oligonucleotide
uggagaguaucggauaacc

SEQ ID NO: 90724 - RNA, 19 nt, Artificial Sequence
  Description of Artificial Sequence: Synthetic oligonucleotide
ugcauguuugcucuggguu

SEQ ID NO: 90725 - RNA, 19 nt, Artificial Sequence
  Description of Artificial Sequence: Synthetic oligonucleotide
aucccgauagucaaaauca

SEQ ID NO: 90726 - RNA, 19 nt, Artificial Sequence
  Description of Artificial Sequence: Synthetic oligonucleotide
aacccuagacuacucgacu

SEQ ID NO: 90727 - RNA, 19 nt, Artificial Sequence
  Description of Artificial Sequence: Synthetic oligonucleotide
gugaguauccaacaugcca

SEQ ID NO: 90728 - RNA, 19 nt, Artificial Sequence
  Description of Artificial Sequence: Synthetic oligonucleotide
aguguaccuguucuuagca

SEQ ID NO: 90729 - RNA, 19 nt, Artificial Sequence
  Description of Artificial Sequence: Synthetic oligonucleotide
auaauaugcaagccacagu

SEQ ID NO: 90730 - RNA, 19 nt, Artificial Sequence
  Description of Artificial Sequence: Synthetic oligonucleotide
acuacucgacucucccugc

SEQ ID NO: 90731 - RNA, 19 nt, Artificial Sequence
  Description of Artificial Sequence: Synthetic oligonucleotide
guagugguguucaagugag

SEQ ID NO: 90732 - RNA, 19 nt, Artificial Sequence
  Description of Artificial Sequence: Synthetic oligonucleotide
gaagagaaccgaccuuugc

SEQ ID NO: 90733 - RNA, 19 nt, Artificial Sequence
  Description of Artificial Sequence: Synthetic oligonucleotide
augggaucgguacagcuga

SEQ ID NO: 90734 - RNA, 19 nt, Artificial Sequence
  Description of Artificial Sequence: Synthetic oligonucleotide
guguaggacaaacccaacc

SEQ ID NO: 90735 - RNA, 19 nt, Artificial Sequence
  Description of Artificial Sequence: Synthetic oligonucleotide
agacguuaacacucauuuc

SEQ ID NO: 90736 - RNA, 19 nt, Artificial Sequence
  Description of Artificial Sequence: Synthetic oligonucleotide
uuaugagagcgguacucug

SEQ ID NO: 90737 - RNA, 19 nt, Artificial Sequence
  Description of Artificial Sequence: Synthetic oligonucleotide
aaagagaacccucgucaaa

SEQ ID NO: 90738 - RNA, 19 nt, Artificial Sequence
  Description of Artificial Sequence: Synthetic oligonucleotide
aaaaccgcuguuuccuaaa

SEQ ID NO: 90739 - RNA, 19 nt, Artificial Sequence
  Description of Artificial Sequence: Synthetic oligonucleotide
uuaauagggugcccucccc

SEQ ID NO: 90740 - RNA, 19 nt, Artificial Sequence
  Description of Artificial Sequence: Synthetic oligonucleotide
auucaauuaugagagcggu

SEQ ID NO: 90741 - RNA, 19 nt, Artificial Sequence
  Description of Artificial Sequence: Synthetic oligonucleotide
aacggucuucuuuugcuau

SEQ ID NO: 90742 - RNA, 19 nt, Artificial Sequence
  Description of Artificial Sequence: Synthetic oligonucleotide
ugcgcaucaaccaucccau

SEQ ID NO: 90743 - RNA, 19 nt, Artificial Sequence
  Description of Artificial Sequence: Synthetic oligonucleotide
acccuagacuacucgacuc

SEQ ID NO: 90744 - RNA, 19 nt, Artificial Sequence
  Description of Artificial Sequence: Synthetic oligonucleotide
aaauaauaugcaagccaca

SEQ ID NO: 90745 - RNA, 19 nt, Artificial Sequence
  Description of Artificial Sequence: Synthetic oligonucleotide
uacgauauggaacggucuu

SEQ ID NO: 90746 - RNA, 19 nt, Artificial Sequence
  Description of Artificial Sequence: Synthetic oligonucleotide
gaaccgaccuuugcaaagg

SEQ ID NO: 90747 - RNA, 19 nt, Artificial Sequence
  Description of Artificial Sequence: Synthetic oligonucleotide
uugauucuauacucaucgc

SEQ ID NO: 90748 - RNA, 19 nt, Artificial Sequence
  Description of Artificial Sequence: Synthetic oligonucleotide
uuaaaacccuagacuacuc

SEQ ID NO: 90749 - RNA, 19 nt, Artificial Sequence
  Description of Artificial Sequence: Synthetic oligonucleotide
gagagcgguacucugugac

SEQ ID NO: 90750 - RNA, 19 nt, Artificial Sequence
  Description of Artificial Sequence: Synthetic oligonucleotide
agagaaccgaccuuugcaa

SEQ ID NO: 90751 - RNA, 19 nt, Artificial Sequence
  Description of Artificial Sequence: Synthetic oligonucleotide
uacugauuugcaccaagua

SEQ ID NO: 90752 - RNA, 19 nt, Artificial Sequence
  Description of Artificial Sequence: Synthetic oligonucleotide
agaagcuaugaaggaacac

SEQ ID NO: 90753 - RNA, 19 nt, Artificial Sequence
  Description of Artificial Sequence: Synthetic oligonucleotide
cucagguauuuaaaucuac

SEQ ID NO: 90754 - RNA, 19 nt, Artificial Sequence
  Description of Artificial Sequence: Synthetic oligonucleotide
guauccagugugaaacacg

SEQ ID NO: 90755 - RNA, 19 nt, Artificial Sequence
  Description of Artificial Sequence: Synthetic oligonucleotide
aacagacggguggggagcc

SEQ ID NO: 90756 - RNA, 19 nt, Artificial Sequence
  Description of Artificial Sequence: Synthetic oligonucleotide
uguguguguguguuugugu

SEQ ID NO: 90757 - RNA, 19 nt, Artificial Sequence
  Description of Artificial Sequence: Synthetic oligonucleotide
uggcauuuaauagggugcc

SEQ ID NO: 90758 - RNA, 19 nt, Artificial Sequence
  Description of Artificial Sequence: Synthetic oligonucleotide
uuguugcuuacacucgagu

SEQ ID NO: 90759 - RNA, 19 nt, Artificial Sequence
  Description of Artificial Sequence: Synthetic oligonucleotide
ugaagagaaccgaccuuug

SEQ ID NO: 90760 - RNA, 19 nt, Artificial Sequence
  Description of Artificial Sequence: Synthetic oligonucleotide
gagagagagagagacgaac

SEQ ID NO: 90761 - RNA, 19 nt, Artificial Sequence
  Description of Artificial Sequence: Synthetic oligonucleotide
guaacuuauuccaccuucc

SEQ ID NO: 90762 - RNA, 19 nt, Artificial Sequence
  Description of Artificial Sequence: Synthetic oligonucleotide
cuuagcuuuuggcuguaac

SEQ ID NO: 90763 - RNA, 19 nt, Artificial Sequence
  Description of Artificial Sequence: Synthetic oligonucleotide
uggcacgaauuuauuuugc

SEQ ID NO: 90764 - RNA, 19 nt, Artificial Sequence
  Description of Artificial Sequence: Synthetic oligonucleotide
uguuuccuaaacagcacuu

SEQ ID NO: 90765 - RNA, 19 nt, Artificial Sequence
  Description of Artificial Sequence: Synthetic oligonucleotide
aggagucaaauggaagacg

SEQ ID NO: 90766 - RNA, 19 nt, Artificial Sequence
  Description of Artificial Sequence: Synthetic oligonucleotide
uguguagcgaaggagggua

SEQ ID NO: 90767 - RNA, 19 nt, Artificial Sequence
  Description of Artificial Sequence: Synthetic oligonucleotide
uaauagggugcccuccccu

SEQ ID NO: 90768 - RNA, 19 nt, Artificial Sequence
  Description of Artificial Sequence: Synthetic oligonucleotide
gauuugcaccaaguagugg

SEQ ID NO: 90769 - RNA, 19 nt, Artificial Sequence
  Description of Artificial Sequence: Synthetic oligonucleotide
ggcauggcauuuaauaggg

SEQ ID NO: 90770 - RNA, 19 nt, Artificial Sequence
  Description of Artificial Sequence: Synthetic oligonucleotide
uggaacggucuucuuuugc

SEQ ID NO: 90771 - RNA, 19 nt, Artificial Sequence
  Description of Artificial Sequence: Synthetic oligonucleotide
cuagacuacucgacucucc

SEQ ID NO: 90772 - RNA, 19 nt, Artificial Sequence
  Description of Artificial Sequence: Synthetic oligonucleotide
uucuuccaucuauaggcug

SEQ ID NO: 90773 - RNA, 19 nt, Artificial Sequence
  Description of Artificial Sequence: Synthetic oligonucleotide
gagagagacgaaccugggc

SEQ ID NO: 90774 - RNA, 19 nt, Artificial Sequence
  Description of Artificial Sequence: Synthetic oligonucleotide
aucauaacaucccgauagu

SEQ ID NO: 90775 - RNA, 19 nt, Artificial Sequence
  Description of Artificial Sequence: Synthetic oligonucleotide
ugugugaguuugcuugccu

SEQ ID NO: 90776 - RNA, 19 nt, Artificial Sequence
  Description of Artificial Sequence: Synthetic oligonucleotide
acgcaauuccauucaggag

SEQ ID NO: 90777 - RNA, 19 nt, Artificial Sequence
  Description of Artificial Sequence: Synthetic oligonucleotide
  modified_base (19)..(19): a, c, u, g, unknown or other
cucacaacccuccaagagn

SEQ ID NO: 90778 - RNA, 19 nt, Artificial Sequence
  Description of Artificial Sequence: Synthetic oligonucleotide
uguguguguguguguguag

SEQ ID NO: 90779 - RNA, 19 nt, Artificial Sequence
  Description of Artificial Sequence: Synthetic oligonucleotide
ggguguaaccuauuuacac

SEQ ID NO: 90780 - RNA, 19 nt, Artificial Sequence
  Description of Artificial Sequence: Synthetic oligonucleotide
ugcuaugugauauccucuu

SEQ ID NO: 90781 - RNA, 19 nt, Artificial Sequence
  Description of Artificial Sequence: Synthetic oligonucleotide
uugcuauagugcuguucgg

SEQ ID NO: 90782 - RNA, 19 nt, Artificial Sequence
  Description of Artificial Sequence: Synthetic oligonucleotide
uucaauuaugagagcggua

SEQ ID NO: 90783 - RNA, 19 nt, Artificial Sequence
  Description of Artificial Sequence: Synthetic oligonucleotide
uguguguguguguguagga

SEQ ID NO: 90784 - RNA, 19 nt, Artificial Sequence
  Description of Artificial Sequence: Synthetic oligonucleotide
caguguaccuguucuuagc

SEQ ID NO: 90785 - RNA, 19 nt, Artificial Sequence
  Description of Artificial Sequence: Synthetic oligonucleotide
aucgccaaacacaucuccg

SEQ ID NO: 90786 - RNA, 19 nt, Artificial Sequence
  Description of Artificial Sequence: Synthetic oligonucleotide
guguguguguguguguagg

SEQ ID NO: 90787 - RNA, 19 nt, Artificial Sequence
  Description of Artificial Sequence: Synthetic oligonucleotide
augaacucacuucugugua

SEQ ID NO: 90788 - RNA, 19 nt, Artificial Sequence
  Description of Artificial Sequence: Synthetic oligonucleotide
cacgaauuuauuuugcuau

SEQ ID NO: 90789 - RNA, 19 nt, Artificial Sequence
  Description of Artificial Sequence: Synthetic oligonucleotide
ugcuauagugcuguucggu

SEQ ID NO: 90790 - RNA, 19 nt, Artificial Sequence
  Description of Artificial Sequence: Synthetic oligonucleotide
cacaccuaagaucaucuga

SEQ ID NO: 90791 - RNA, 19 nt, Artificial Sequence
  Description of Artificial Sequence: Synthetic oligonucleotide
  modified_base (8)..(8): a, c, u, g, unknown or other
aaaagccncuuuugaguuu

SEQ ID NO: 90792 - RNA, 19 nt, Artificial Sequence
  Description of Artificial Sequence: Synthetic oligonucleotide
uuugacaacugggaacauc

SEQ ID NO: 90793 - RNA, 19 nt, Artificial Sequence
  Description of Artificial Sequence: Synthetic oligonucleotide
ucauaacaucccgauaguc

SEQ ID NO: 90794 - RNA, 19 nt, Artificial Sequence
  Description of Artificial Sequence: Synthetic oligonucleotide
auucgugugugugugugug

SEQ ID NO: 90795 - RNA, 19 nt, Artificial Sequence
  Description of Artificial Sequence: Synthetic oligonucleotide
auuuucguccuuuggccaa

SEQ ID NO: 90796 - RNA, 19 nt, Artificial Sequence
  Description of Artificial Sequence: Synthetic oligonucleotide
agcacucgacugcauuuuc

SEQ ID NO: 90797 - RNA, 19 nt, Artificial Sequence
  Description of Artificial Sequence: Synthetic oligonucleotide
agaguaucggauaaccaau

SEQ ID NO: 90798 - RNA, 19 nt, Artificial Sequence
  Description of Artificial Sequence: Synthetic oligonucleotide
uguguaggacaaacccaac

SEQ ID NO: 90799 - RNA, 19 nt, Artificial Sequence
  Description of Artificial Sequence: Synthetic oligonucleotide
ucgugugugugugugugug

SEQ ID NO: 90800 - RNA, 19 nt, Artificial Sequence
  Description of Artificial Sequence: Synthetic oligonucleotide
caagguagccaucaacaga

SEQ ID NO: 90801 - RNA, 19 nt, Artificial Sequence
  Description of Artificial Sequence: Synthetic oligonucleotide
caaguagugguguucaagu

SEQ ID NO: 90802 - RNA, 19 nt, Artificial Sequence
  Description of Artificial Sequence: Synthetic oligonucleotide
gcuauagugcuguucggug

SEQ ID NO: 90803 - RNA, 19 nt, Artificial Sequence
  Description of Artificial Sequence: Synthetic oligonucleotide
agagagagagagagagacg

SEQ ID NO: 90804 - RNA, 19 nt, Artificial Sequence
  Description of Artificial Sequence: Synthetic oligonucleotide
cuaguugagaagcaaggcu

SEQ ID NO: 90805 - RNA, 19 nt, Artificial Sequence
  Description of Artificial Sequence: Synthetic oligonucleotide
aaccgaccuuugcaaaggu

SEQ ID NO: 90806 - RNA, 19 nt, Artificial Sequence
  Description of Artificial Sequence: Synthetic oligonucleotide
guucacgcaauuccauuca

SEQ ID NO: 90807 - RNA, 19 nt, Artificial Sequence
  Description of Artificial Sequence: Synthetic oligonucleotide
augugugugugugugugug

SEQ ID NO: 90808 - RNA, 19 nt, Artificial Sequence
  Description of Artificial Sequence: Synthetic oligonucleotide
guggaugugugugugugug

SEQ ID NO: 90809 - RNA, 19 nt, Artificial Sequence
  Description of Artificial Sequence: Synthetic oligonucleotide
cauuuaggccaaucaucug

SEQ ID NO: 90810 - RNA, 19 nt, Artificial Sequence
  Description of Artificial Sequence: Synthetic oligonucleotide
uguggaugugugugugugu

SEQ ID NO: 90811 - RNA, 19 nt, Artificial Sequence
  Description of Artificial Sequence: Synthetic oligonucleotide
cccagagagagagagagag

SEQ ID NO: 90812 - RNA, 19 nt, Artificial Sequence
  Description of Artificial Sequence: Synthetic oligonucleotide
guguguguguguguguuug

SEQ ID NO: 90813 - RNA, 19 nt, Artificial Sequence
  Description of Artificial Sequence: Synthetic oligonucleotide
cugcgcaucaaccauccca

SEQ ID NO: 90814 - RNA, 19 nt, Artificial Sequence
  Description of Artificial Sequence: Synthetic oligonucleotide
cacuaucucgucuuauaga

SEQ ID NO: 90815 - RNA, 19 nt, Artificial Sequence
  Description of Artificial Sequence: Synthetic oligonucleotide
augggguuguccccucauc

SEQ ID NO: 90816 - RNA, 19 nt, Artificial Sequence
  Description of Artificial Sequence: Synthetic oligonucleotide
gguucacgcaauuccauuc

SEQ ID NO: 90817 - RNA, 19 nt, Artificial Sequence
  Description of Artificial Sequence: Synthetic oligonucleotide
uguguggaugugugugugu

SEQ ID NO: 90818 - RNA, 19 nt, Artificial Sequence
  Description of Artificial Sequence: Synthetic oligonucleotide
cuagaacugaagucuguaa

SEQ ID NO: 90819 - RNA, 19 nt, Artificial Sequence
  Description of Artificial Sequence: Synthetic oligonucleotide
guaucggauaaccaauagu

SEQ ID NO: 90820 - RNA, 19 nt, Artificial Sequence
  Description of Artificial Sequence: Synthetic oligonucleotide
gagagagagagacgaaccu

SEQ ID NO: 90821 - RNA, 19 nt, Artificial Sequence
  Description of Artificial Sequence: Synthetic oligonucleotide
ugugugugugugugugugu

SEQ ID NO: 90822 - RNA, 19 nt, Artificial Sequence
  Description of Artificial Sequence: Synthetic oligonucleotide
auacugauuugcaccaagu

SEQ ID NO: 90823 - RNA, 19 nt, Artificial Sequence
  Description of Artificial Sequence: Synthetic oligonucleotide
cacucuuagacaccaagua

SEQ ID NO: 90824 - RNA, 19 nt, Artificial Sequence
  Description of Artificial Sequence: Synthetic oligonucleotide
uguguguguguuuguguuu

SEQ ID NO: 90825 - RNA, 19 nt, Artificial Sequence
  Description of Artificial Sequence: Synthetic oligonucleotide
guguggaugugugugugug

SEQ ID NO: 90826 - RNA, 19 nt, Artificial Sequence
  Description of Artificial Sequence: Synthetic oligonucleotide
gugugaguuugcuugccuc

SEQ ID NO: 90827 - RNA, 19 nt, Artificial Sequence
  Description of Artificial Sequence: Synthetic oligonucleotide
gugugugugugugugugug

SEQ ID NO: 90828 - RNA, 19 nt, Artificial Sequence
  Description of Artificial Sequence: Synthetic oligonucleotide
uguguguguguguguuugu

SEQ ID NO: 90829 - RNA, 19 nt, Artificial Sequence
  Description of Artificial Sequence: Synthetic oligonucleotide
gcuguaacucuauuuaugu

SEQ ID NO: 90830 - RNA, 19 nt, Artificial Sequence
  Description of Artificial Sequence: Synthetic oligonucleotide
agacuacucgacucucccu

SEQ ID NO: 90831 - RNA, 19 nt, Artificial Sequence
  Description of Artificial Sequence: Synthetic oligonucleotide
uuaggccaaucaucugggu

SEQ ID NO: 90832 - RNA, 19 nt, Artificial Sequence
  Description of Artificial Sequence: Synthetic oligonucleotide
ggcuguaacucuauuuaug

SEQ ID NO: 90833 - RNA, 19 nt, Artificial Sequence
  Description of Artificial Sequence: Synthetic oligonucleotide
uguuuguguuuagcaauau

SEQ ID NO: 90834 - RNA, 19 nt, Artificial Sequence
  Description of Artificial Sequence: Synthetic oligonucleotide
gacgaaccugggcaaggac

SEQ ID NO: 90835 - RNA, 19 nt, Artificial Sequence
  Description of Artificial Sequence: Synthetic oligonucleotide
ggggcauacgauauggaac

SEQ ID NO: 90836 - RNA, 19 nt, Artificial Sequence
  Description of Artificial Sequence: Synthetic oligonucleotide
uacaaggggagggaacuua

SEQ ID NO: 90837 - RNA, 19 nt, Artificial Sequence
  Description of Artificial Sequence: Synthetic oligonucleotide
agggaacuuaaaacccuag

SEQ ID NO: 90838 - RNA, 19 nt, Artificial Sequence
  Description of Artificial Sequence: Synthetic oligonucleotide
uacacucgaguccguuuuc

SEQ ID NO: 90839 - RNA, 19 nt, Artificial Sequence
  Description of Artificial Sequence: Synthetic oligonucleotide
cagugugaaacacgggaga

SEQ ID NO: 90840 - RNA, 19 nt, Artificial Sequence
  Description of Artificial Sequence: Synthetic oligonucleotide
gagaaccgaccuuugcaaa

SEQ ID NO: 90841 - RNA, 19 nt, Artificial Sequence
  Description of Artificial Sequence: Synthetic oligonucleotide
gggaacuuaaaacccuaga

SEQ ID NO: 90842 - RNA, 19 nt, Artificial Sequence
  Description of Artificial Sequence: Synthetic oligonucleotide
ggaugugugugugugugug

SEQ ID NO: 90843 - RNA, 19 nt, Artificial Sequence
  Description of Artificial Sequence: Synthetic oligonucleotide
uggaugugugugugugugu

SEQ ID NO: 90844 - RNA, 19 nt, Artificial Sequence
  Description of Artificial Sequence: Synthetic oligonucleotide
agagacgaaccugggcaag

SEQ ID NO: 90845 - RNA, 19 nt, Artificial Sequence
  Description of Artificial Sequence: Synthetic oligonucleotide
cacgggagacagaacugug

SEQ ID NO: 90846 - RNA, 19 nt, Artificial Sequence
  Description of Artificial Sequence: Synthetic oligonucleotide
cacgagagaagugaaaagu

SEQ ID NO: 90847 - RNA, 19 nt, Artificial Sequence
  Description of Artificial Sequence: Synthetic oligonucleotide
  modified_base (5)..(5): a, c, u, g, unknown or other
agccncuuuugaguuuguc

SEQ ID NO: 90848 - RNA, 19 nt, Artificial Sequence
  Description of Artificial Sequence: Synthetic oligonucleotide
uucgugugugugugugugu

SEQ ID NO: 90849 - RNA, 19 nt, Artificial Sequence
  Description of Artificial Sequence: Synthetic oligonucleotide
ccuaguugagaagcaaggc

SEQ ID NO: 90850 - RNA, 19 nt, Artificial Sequence
  Description of Artificial Sequence: Synthetic oligonucleotide
guguguguguguguuugug

SEQ ID NO: 90851 - RNA, 19 nt, Artificial Sequence
  Description of Artificial Sequence: Synthetic oligonucleotide
aucccggcccuuuucaauu

SEQ ID NO: 90852 - RNA, 19 nt, Artificial Sequence
  Description of Artificial Sequence: Synthetic oligonucleotide
gaaccgaugcuaugugaua

SEQ ID NO: 90853 - RNA, 19 nt, Artificial Sequence
  Description of Artificial Sequence: Synthetic oligonucleotide
augcuaugugauauccucu

SEQ ID NO: 90854 - RNA, 19 nt, Artificial Sequence
  Description of Artificial Sequence: Synthetic oligonucleotide
acaaguugaggugggguuu

SEQ ID NO: 90855 - RNA, 19 nt, Artificial Sequence
  Description of Artificial Sequence: Synthetic oligonucleotide
agaacccucgucaaagcua

SEQ ID NO: 90856 - RNA, 19 nt, Artificial Sequence
  Description of Artificial Sequence: Synthetic oligonucleotide
guguguguguguguaggac

SEQ ID NO: 90857 - RNA, 19 nt, Artificial Sequence
  Description of Artificial Sequence: Synthetic oligonucleotide
cccauagucucauucgguc

SEQ ID NO: 90858 - RNA, 19 nt, Artificial Sequence
  Description of Artificial Sequence: Synthetic oligonucleotide
gaacaaguugagguggggu

SEQ ID NO: 90859 - RNA, 19 nt, Artificial Sequence
  Description of Artificial Sequence: Synthetic oligonucleotide
gaaacacgggagacagaac

SEQ ID NO: 90860 - RNA, 19 nt, Artificial Sequence
  Description of Artificial Sequence: Synthetic oligonucleotide
agguaccaaaugugucuga

SEQ ID NO: 90861 - RNA, 19 nt, Artificial Sequence
  Description of Artificial Sequence: Synthetic oligonucleotide
uguguguguguguguguuu

SEQ ID NO: 90862 - RNA, 19 nt, Artificial Sequence
  Description of Artificial Sequence: Synthetic oligonucleotide
gaguaucggauaaccaaua

SEQ ID NO: 90863 - RNA, 19 nt, Artificial Sequence
  Description of Artificial Sequence: Synthetic oligonucleotide
ccaguguaccuguucuuag

SEQ ID NO: 90864 - RNA, 19 nt, Artificial Sequence
  Description of Artificial Sequence: Synthetic oligonucleotide
  modified_base (4)..(4): a, c, u, g, unknown or other
gccncuuuugaguuugucu

SEQ ID NO: 90865 - RNA, 19 nt, Artificial Sequence
  Description of Artificial Sequence: Synthetic oligonucleotide
agcauucgugugugugugu

SEQ ID NO: 90866 - RNA, 19 nt, Artificial Sequence
  Description of Artificial Sequence: Synthetic oligonucleotide
agagagagagagagagaga

SEQ ID NO: 90867 - RNA, 19 nt, Artificial Sequence
  Description of Artificial Sequence: Synthetic oligonucleotide
ggagucaaauggaagacgu

SEQ ID NO: 90868 - RNA, 19 nt, Artificial Sequence
  Description of Artificial Sequence: Synthetic oligonucleotide
agucaacacuccccacggu

SEQ ID NO: 90869 - RNA, 19 nt, Artificial Sequence
  Description of Artificial Sequence: Synthetic oligonucleotide
ggacaaggguguuucaucu

SEQ ID NO: 90870 - RNA, 19 nt, Artificial Sequence
  Description of Artificial Sequence: Synthetic oligonucleotide
guguuuagcaauauuccuu

SEQ ID NO: 90871 - RNA, 19 nt, Artificial Sequence
  Description of Artificial Sequence: Synthetic oligonucleotide
cuggagaguaucggauaac

SEQ ID NO: 90872 - RNA, 19 nt, Artificial Sequence
  Description of Artificial Sequence: Synthetic oligonucleotide
guguguguguguaggacaa

SEQ ID NO: 90873 - RNA, 19 nt, Artificial Sequence
  Description of Artificial Sequence: Synthetic oligonucleotide
ccgaugcuaugugauaucc

SEQ ID NO: 90874 - RNA, 19 nt, Artificial Sequence
  Description of Artificial Sequence: Synthetic oligonucleotide
gaacccucgucaaagcuau

SEQ ID NO: 90875 - RNA, 19 nt, Artificial Sequence
  Description of Artificial Sequence: Synthetic oligonucleotide
gaugugugugugugugugu

SEQ ID NO: 90876 - RNA, 19 nt, Artificial Sequence
  Description of Artificial Sequence: Synthetic oligonucleotide
gcugagugccaaacagugg

SEQ ID NO: 90877 - RNA, 19 nt, Artificial Sequence
  Description of Artificial Sequence: Synthetic oligonucleotide
auccagugugaaacacggg

SEQ ID NO: 90878 - RNA, 19 nt, Artificial Sequence
  Description of Artificial Sequence: Synthetic oligonucleotide
gugugaaacacgggagaca

SEQ ID NO: 90879 - RNA, 19 nt, Artificial Sequence
  Description of Artificial Sequence: Synthetic oligonucleotide
agacgaaccugggcaagga

SEQ ID NO: 90880 - RNA, 19 nt, Artificial Sequence
  Description of Artificial Sequence: Synthetic oligonucleotide
agucucauucggucagcuu

SEQ ID NO: 90881 - RNA, 19 nt, Artificial Sequence
  Description of Artificial Sequence: Synthetic oligonucleotide
gagugccaaacaguggucu

SEQ ID NO: 90882 - RNA, 19 nt, Artificial Sequence
  Description of Artificial Sequence: Synthetic oligonucleotide
gcauucgugugugugugug

SEQ ID NO: 90883 - RNA, 19 nt, Artificial Sequence
  Description of Artificial Sequence: Synthetic oligonucleotide
uagcacucgacugcauuuu

SEQ ID NO: 90884 - RNA, 19 nt, Artificial Sequence
  Description of Artificial Sequence: Synthetic oligonucleotide
gcacgaauuuauuuugcua

SEQ ID NO: 90885 - RNA, 19 nt, Artificial Sequence
  Description of Artificial Sequence: Synthetic oligonucleotide
guagcacucgacugcauuu

SEQ ID NO: 90886 - RNA, 19 nt, Artificial Sequence
  Description of Artificial Sequence: Synthetic oligonucleotide
guguguguguguuuguguu

SEQ ID NO: 90887 - RNA, 19 nt, Artificial Sequence
  Description of Artificial Sequence: Synthetic oligonucleotide
agguagccaucaacagacg

SEQ ID NO: 90888 - RNA, 19 nt, Artificial Sequence
  Description of Artificial Sequence: Synthetic oligonucleotide
gucaacacuccccacgguu

SEQ ID NO: 90889 - RNA, 19 nt, Artificial Sequence
  Description of Artificial Sequence: Synthetic oligonucleotide
accaaguagugguguucaa

SEQ ID NO: 90890 - RNA, 19 nt, Artificial Sequence
  Description of Artificial Sequence: Synthetic oligonucleotide
ggcauacgauauggaacgg

SEQ ID NO: 90891 - RNA, 19 nt, Artificial Sequence
  Description of Artificial Sequence: Synthetic oligonucleotide
ggcacgaauuuauuuugcu

SEQ ID NO: 90892 - RNA, 19 nt, Artificial Sequence
  Description of Artificial Sequence: Synthetic oligonucleotide
caucaaccaucccauuucu

SEQ ID NO: 90893 - RNA, 19 nt, Artificial Sequence
  Description of Artificial Sequence: Synthetic oligonucleotide
auacccagagagagagaga

SEQ ID NO: 90894 - RNA, 19 nt, Artificial Sequence
  Description of Artificial Sequence: Synthetic oligonucleotide
cacuacuguccagcucucc

SEQ ID NO: 90895 - RNA, 19 nt, Artificial Sequence
  Description of Artificial Sequence: Synthetic oligonucleotide
ugggaucgguacagcugaa

SEQ ID NO: 90896 - RNA, 19 nt, Artificial Sequence
  Description of Artificial Sequence: Synthetic oligonucleotide
cccaacccuggacugcugg

SEQ ID NO: 90897 - RNA, 19 nt, Artificial Sequence
  Description of Artificial Sequence: Synthetic oligonucleotide
gcauuuaauagggugcccu

SEQ ID NO: 90898 - RNA, 19 nt, Artificial Sequence
  Description of Artificial Sequence: Synthetic oligonucleotide
acucuacuggacacacagu

SEQ ID NO: 90899 - RNA, 19 nt, Artificial Sequence
  Description of Artificial Sequence: Synthetic oligonucleotide
ggcauuuaauagggugccc

SEQ ID NO: 90900 - RNA, 19 nt, Artificial Sequence
  Description of Artificial Sequence: Synthetic oligonucleotide
gugugugugugugugugua

SEQ ID NO: 90901 - RNA, 19 nt, Artificial Sequence
  Description of Artificial Sequence: Synthetic oligonucleotide
cuacucgacucucccugca

SEQ ID NO: 90902 - RNA, 19 nt, Artificial Sequence
  Description of Artificial Sequence: Synthetic oligonucleotide
agagagagagagagacgaa

SEQ ID NO: 90903 - RNA, 19 nt, Artificial Sequence
  Description of Artificial Sequence: Synthetic oligonucleotide
aggguucacgcaauuccau

SEQ ID NO: 90904 - RNA, 19 nt, Artificial Sequence
  Description of Artificial Sequence: Synthetic oligonucleotide
gggaucgguacagcugaag

SEQ ID NO: 90905 - RNA, 19 nt, Artificial Sequence
  Description of Artificial Sequence: Synthetic oligonucleotide
ucgacucucccugcauuuu

SEQ ID NO: 90906 - RNA, 19 nt, Artificial Sequence
  Description of Artificial Sequence: Synthetic oligonucleotide
cuucggguagaggguggug

SEQ ID NO: 90907 - RNA, 19 nt, Artificial Sequence
  Description of Artificial Sequence: Synthetic oligonucleotide
gggguguaaccuauuuaca

SEQ ID NO: 90908 - RNA, 19 nt, Artificial Sequence
  Description of Artificial Sequence: Synthetic oligonucleotide
gcuagaacugaagucugua

SEQ ID NO: 90909 - RNA, 19 nt, Artificial Sequence
  Description of Artificial Sequence: Synthetic oligonucleotide
uggugccaugggaucggua

SEQ ID NO: 90910 - RNA, 19 nt, Artificial Sequence
  Description of Artificial Sequence: Synthetic oligonucleotide
aggugggguuuagcaguuc

SEQ ID NO: 90911 - RNA, 19 nt, Artificial Sequence
  Description of Artificial Sequence: Synthetic oligonucleotide
ucccggcccuuuucaauuu

SEQ ID NO: 90912 - RNA, 19 nt, Artificial Sequence
  Description of Artificial Sequence: Synthetic oligonucleotide
gacaaggguguuucaucuu

SEQ ID NO: 90913 - RNA, 19 nt, Artificial Sequence
  Description of Artificial Sequence: Synthetic oligonucleotide
  modified_base (6)..(6): a, c, u, g, unknown or other
aagccncuuuugaguuugu

SEQ ID NO: 90914 - RNA, 19 nt, Artificial Sequence
  Description of Artificial Sequence: Synthetic oligonucleotide
ggguuguccccucaucucu

SEQ ID NO: 90915 - RNA, 19 nt, Artificial Sequence
  Description of Artificial Sequence: Synthetic oligonucleotide
accaucccucuuguaacuu

SEQ ID NO: 90916 - RNA, 19 nt, Artificial Sequence
  Description of Artificial Sequence: Synthetic oligonucleotide
cacucgacugcauuuucuu

SEQ ID NO: 90917 - RNA, 19 nt, Artificial Sequence
  Description of Artificial Sequence: Synthetic oligonucleotide
cauucgugugugugugugu

SEQ ID NO: 90918 - RNA, 19 nt, Artificial Sequence
  Description of Artificial Sequence: Synthetic oligonucleotide
caaguugaggugggguuua

SEQ ID NO: 90919 - RNA, 19 nt, Artificial Sequence
  Description of Artificial Sequence: Synthetic oligonucleotide
ccucagguauuuaaaucua

SEQ ID NO: 90920 - RNA, 19 nt, Artificial Sequence
  Description of Artificial Sequence: Synthetic oligonucleotide
ccuagacuacucgacucuc

SEQ ID NO: 90921 - RNA, 19 nt, Artificial Sequence
  Description of Artificial Sequence: Synthetic oligonucleotide
acggguggggagccauuua

SEQ ID NO: 90922 - RNA, 19 nt, Artificial Sequence
  Description of Artificial Sequence: Synthetic oligonucleotide
accgaccuuugcaaagguu

SEQ ID NO: 90923 - RNA, 19 nt, Artificial Sequence
  Description of Artificial Sequence: Synthetic oligonucleotide
acccagagagagagagaga

SEQ ID NO: 90924 - RNA, 19 nt, Artificial Sequence
  Description of Artificial Sequence: Synthetic oligonucleotide
gcuucagccgggcugcacu

SEQ ID NO: 90925 - RNA, 19 nt, Artificial Sequence
  Description of Artificial Sequence: Synthetic oligonucleotide
cucgacucucccugcauuu

SEQ ID NO: 90926 - RNA, 19 nt, Artificial Sequence
  Description of Artificial Sequence: Synthetic oligonucleotide
ccagagagagagagagaga

SEQ ID NO: 90927 - RNA, 19 nt, Artificial Sequence
  Description of Artificial Sequence: Synthetic oligonucleotide
guguguguguguguguguu

SEQ ID NO: 90928 - RNA, 19 nt, Artificial Sequence
  Description of Artificial Sequence: Synthetic oligonucleotide
cuaaccacucacagcccuu

SEQ ID NO: 90929 - RNA, 19 nt, Artificial Sequence
  Description of Artificial Sequence: Synthetic oligonucleotide
ggaccacguagaagagaug

SEQ ID NO: 90930 - RNA, 19 nt, Artificial Sequence
  Description of Artificial Sequence: Synthetic oligonucleotide
ccuuguauucgagcuggca

SEQ ID NO: 90931 - RNA, 19 nt, Artificial Sequence
  Description of Artificial Sequence: Synthetic oligonucleotide
gguuucaacugggguguaa

SEQ ID NO: 90932 - RNA, 19 nt, Artificial Sequence
  Description of Artificial Sequence: Synthetic oligonucleotide
acagacggguggggagcca

SEQ ID NO: 90933 - RNA, 19 nt, Artificial Sequence
  Description of Artificial Sequence: Synthetic oligonucleotide
cacgguuuccagcccuccu

SEQ ID NO: 90934 - RNA, 19 nt, Artificial Sequence
  Description of Artificial Sequence: Synthetic oligonucleotide
ggguucacgcaauuccauu

SEQ ID NO: 90935 - RNA, 19 nt, Artificial Sequence
  Description of Artificial Sequence: Synthetic oligonucleotide
gacggguggggagccauuu

SEQ ID NO: 90936 - RNA, 19 nt, Artificial Sequence
  Description of Artificial Sequence: Synthetic oligonucleotide
cccuagacuacucgacucu

SEQ ID NO: 90937 - RNA, 19 nt, Artificial Sequence
  Description of Artificial Sequence: Synthetic oligonucleotide
ccacgguuuccagcccucc

SEQ ID NO: 90938 - RNA, 19 nt, Artificial Sequence
  Description of Artificial Sequence: Synthetic oligonucleotide
gcacucgacugcauuuucu

SEQ ID NO: 90939 - RNA, 19 nt, Artificial Sequence
  Description of Artificial Sequence: Synthetic oligonucleotide
ggauugccuugugacuucu

SEQ ID NO: 90940 - RNA, 19 nt, Artificial Sequence
  Description of Artificial Sequence: Synthetic oligonucleotide
cuccguucugguaguucuu

SEQ ID NO: 90941 - RNA, 19 nt, Artificial Sequence
  Description of Artificial Sequence: Synthetic oligonucleotide
agacggguggggagccauu

SEQ ID NO: 90942 - RNA, 19 nt, Artificial Sequence
  Description of Artificial Sequence: Synthetic oligonucleotide
caguaaucccggcccuuuu

SEQ ID NO: 90943 - RNA, 19 nt, Artificial Sequence
  Description of Artificial Sequence: Synthetic oligonucleotide
cccuuuuguugccuugggu

SEQ ID NO: 90944 - RNA, 19 nt, Artificial Sequence
  Description of Artificial Sequence: Synthetic oligonucleotide
cuguagcacucgacugcau

SEQ ID NO: 90945 - RNA, 19 nt, Artificial Sequence
  Description of Artificial Sequence: Synthetic oligonucleotide
gcuuacacucgaguccguu

SEQ ID NO: 90946 - RNA, 19 nt, Artificial Sequence
  Description of Artificial Sequence: Synthetic oligonucleotide
gguuguccccucaucucuu

SEQ ID NO: 90947 - RNA, 19 nt, Artificial Sequence
  Description of Artificial Sequence: Synthetic oligonucleotide
cgugugugugugugugugu

SEQ ID NO: 90948 - RNA, 19 nt, Artificial Sequence
  Description of Artificial Sequence: Synthetic oligonucleotide
gcgcaucaaccaucccauu

SEQ ID NO: 90949 - RNA, 19 nt, Artificial Sequence
  Description of Artificial Sequence: Synthetic oligonucleotide
cccggcccuuuucaauuuu

SEQ ID NO: 90950 - RNA, 19 nt, Artificial Sequence
  Description of Artificial Sequence: Synthetic oligonucleotide
aauauuaccaccacgagcc

SEQ ID NO: 90951 - RNA, 19 nt, Artificial Sequence
  Description of Artificial Sequence: Synthetic oligonucleotide
aauagauucacgaauggcc

SEQ ID NO: 90952 - RNA, 19 nt, Artificial Sequence
  Description of Artificial Sequence: Synthetic oligonucleotide
ugucaaagcgaccaaaucg

SEQ ID NO: 90953 - RNA, 19 nt, Artificial Sequence
  Description of Artificial Sequence: Synthetic oligonucleotide
ucgaaugucauuaucacug

SEQ ID NO: 90954 - RNA, 19 nt, Artificial Sequence
  Description of Artificial Sequence: Synthetic oligonucleotide
auaacuaucacaugugcuc

SEQ ID NO: 90955 - RNA, 19 nt, Artificial Sequence
  Description of Artificial Sequence: Synthetic oligonucleotide
acaauuaaccgauugggac

SEQ ID NO: 90956 - RNA, 19 nt, Artificial Sequence
  Description of Artificial Sequence: Synthetic oligonucleotide
ucaacaauuaaccgauugg

SEQ ID NO: 90957 - RNA, 19 nt, Artificial Sequence
  Description of Artificial Sequence: Synthetic oligonucleotide
uuuacuguggugaugacaa

SEQ ID NO: 90958 - RNA, 19 nt, Artificial Sequence
  Description of Artificial Sequence: Synthetic oligonucleotide
accaaaucgccguagggcc

SEQ ID NO: 90959 - RNA, 19 nt, Artificial Sequence
  Description of Artificial Sequence: Synthetic oligonucleotide
gauacgacgcucuacuucc

SEQ ID NO: 90960 - RNA, 19 nt, Artificial Sequence
  Description of Artificial Sequence: Synthetic oligonucleotide
ucaauagauucacgaaugg

SEQ ID NO: 90961 - RNA, 19 nt, Artificial Sequence
  Description of Artificial Sequence: Synthetic oligonucleotide
auggguagcacguggauac

SEQ ID NO: 90962 - RNA, 19 nt, Artificial Sequence
  Description of Artificial Sequence: Synthetic oligonucleotide
uaugauuagucuuccaaca

SEQ ID NO: 90963 - RNA, 19 nt, Artificial Sequence
  Description of Artificial Sequence: Synthetic oligonucleotide
aauuaaccgauugggacgg

SEQ ID NO: 90964 - RNA, 19 nt, Artificial Sequence
  Description of Artificial Sequence: Synthetic oligonucleotide
caauuaaccgauugggacg

SEQ ID NO: 90965 - RNA, 19 nt, Artificial Sequence
  Description of Artificial Sequence: Synthetic oligonucleotide
uucacuuagccauacaggu

SEQ ID NO: 90966 - RNA, 19 nt, Artificial Sequence
  Description of Artificial Sequence: Synthetic oligonucleotide
cauuaucacugacagaacg

SEQ ID NO: 90967 - RNA, 19 nt, Artificial Sequence
  Description of Artificial Sequence: Synthetic oligonucleotide
uuaagguauaccucaaaga

SEQ ID NO: 90968 - RNA, 19 nt, Artificial Sequence
  Description of Artificial Sequence: Synthetic oligonucleotide
agacgcuagcuccugaucc

SEQ ID NO: 90969 - RNA, 19 nt, Artificial Sequence
  Description of Artificial Sequence: Synthetic oligonucleotide
gaagguugcucucagauuc

SEQ ID NO: 90970 - RNA, 19 nt, Artificial Sequence
  Description of Artificial Sequence: Synthetic oligonucleotide
gaugacauccccuaggcga

SEQ ID NO: 90971 - RNA, 19 nt, Artificial Sequence
  Description of Artificial Sequence: Synthetic oligonucleotide
uccauaguaacugccaagg

SEQ ID NO: 90972 - RNA, 19 nt, Artificial Sequence
  Description of Artificial Sequence: Synthetic oligonucleotide
aaagcgaccaaaucgccgu

SEQ ID NO: 90973 - RNA, 19 nt, Artificial Sequence
  Description of Artificial Sequence: Synthetic oligonucleotide
ucuuaggauagcaggauca

SEQ ID NO: 90974 - RNA, 19 nt, Artificial Sequence
  Description of Artificial Sequence: Synthetic oligonucleotide
uuaugauuagucuuccaac

SEQ ID NO: 90975 - RNA, 19 nt, Artificial Sequence
  Description of Artificial Sequence: Synthetic oligonucleotide
caacaauuaaccgauuggg

SEQ ID NO: 90976 - RNA, 19 nt, Artificial Sequence
  Description of Artificial Sequence: Synthetic oligonucleotide
agggauuccaauaucuacc

SEQ ID NO: 90977 - RNA, 19 nt, Artificial Sequence
  Description of Artificial Sequence: Synthetic oligonucleotide
uugaaucggcuccagaggc

SEQ ID NO: 90978 - RNA, 19 nt, Artificial Sequence
  Description of Artificial Sequence: Synthetic oligonucleotide
acucuauucauucgaaucu

SEQ ID NO: 90979 - RNA, 19 nt, Artificial Sequence
  Description of Artificial Sequence: Synthetic oligonucleotide
aaucucaggcacuggauca

SEQ ID NO: 90980 - RNA, 19 nt, Artificial Sequence
  Description of Artificial Sequence: Synthetic oligonucleotide
gauagagaugaaguuagcc

SEQ ID NO: 90981 - RNA, 19 nt, Artificial Sequence
  Description of Artificial Sequence: Synthetic oligonucleotide
aucaacaauuaaccgauug

SEQ ID NO: 90982 - RNA, 19 nt, Artificial Sequence
  Description of Artificial Sequence: Synthetic oligonucleotide
uuuacggauaggucgauaa

SEQ ID NO: 90983 - RNA, 19 nt, Artificial Sequence
  Description of Artificial Sequence: Synthetic oligonucleotide
uagggcuuaagguauaccu

SEQ ID NO: 90984 - RNA, 19 nt, Artificial Sequence
  Description of Artificial Sequence: Synthetic oligonucleotide
acucucaauagauucacga

SEQ ID NO: 90985 - RNA, 19 nt, Artificial Sequence
  Description of Artificial Sequence: Synthetic oligonucleotide
auaagggucaacaacugag

SEQ ID NO: 90986 - RNA, 19 nt, Artificial Sequence
  Description of Artificial Sequence: Synthetic oligonucleotide
ugccauacuuuacaucagg

SEQ ID NO: 90987 - RNA, 19 nt, Artificial Sequence
  Description of Artificial Sequence: Synthetic oligonucleotide
acuacaacagaaauggugu

SEQ ID NO: 90988 - RNA, 19 nt, Artificial Sequence
  Description of Artificial Sequence: Synthetic oligonucleotide
cuuucgaaugucauuauca

SEQ ID NO: 90989 - RNA, 19 nt, Artificial Sequence
  Description of Artificial Sequence: Synthetic oligonucleotide
ugugcucucugcuucaggc

SEQ ID NO: 90990 - RNA, 19 nt, Artificial Sequence
  Description of Artificial Sequence: Synthetic oligonucleotide
aaggcuuuacgaagguugc

SEQ ID NO: 90991 - RNA, 19 nt, Artificial Sequence
  Description of Artificial Sequence: Synthetic oligonucleotide
ugauuagucuuccaacagu

SEQ ID NO: 90992 - RNA, 19 nt, Artificial Sequence
  Description of Artificial Sequence: Synthetic oligonucleotide
uccucaagaucaauaaggu

SEQ ID NO: 90993 - RNA, 19 nt, Artificial Sequence
  Description of Artificial Sequence: Synthetic oligonucleotide
gucucuacuacuuugaacu

SEQ ID NO: 90994 - RNA, 19 nt, Artificial Sequence
  Description of Artificial Sequence: Synthetic oligonucleotide
cagaacgacgagcaaagcg

SEQ ID NO: 90995 - RNA, 19 nt, Artificial Sequence
  Description of Artificial Sequence: Synthetic oligonucleotide
uggccaguuuacaagcacg

SEQ ID NO: 90996 - RNA, 19 nt, Artificial Sequence
  Description of Artificial Sequence: Synthetic oligonucleotide
aacugagacacgauacgac

SEQ ID NO: 90997 - RNA, 19 nt, Artificial Sequence
  Description of Artificial Sequence: Synthetic oligonucleotide
auagcugauggauuugucu

SEQ ID NO: 90998 - RNA, 19 nt, Artificial Sequence
  Description of Artificial Sequence: Synthetic oligonucleotide
auuuuaucgcuuuuguaau

SEQ ID NO: 90999 - RNA, 19 nt, Artificial Sequence
  Description of Artificial Sequence: Synthetic oligonucleotide
uacggauaggucgauaagc

SEQ ID NO: 91000 - RNA, 19 nt, Artificial Sequence
  Description of Artificial Sequence: Synthetic oligonucleotide
auugggacgguucuuuugu

SEQ ID NO: 91001 - RNA, 19 nt, Artificial Sequence
  Description of Artificial Sequence: Synthetic oligonucleotide
gucaaagcgaccaaaucgc

SEQ ID NO: 91002 - RNA, 19 nt, Artificial Sequence
  Description of Artificial Sequence: Synthetic oligonucleotide
caaagcgaccaaaucgccg

SEQ ID NO: 91003 - RNA, 19 nt, Artificial Sequence
  Description of Artificial Sequence: Synthetic oligonucleotide
aacaauuaaccgauuggga

SEQ ID NO: 91004 - RNA, 19 nt, Artificial Sequence
  Description of Artificial Sequence: Synthetic oligonucleotide
uaaaaucagccuacuuucu

SEQ ID NO: 91005 - RNA, 19 nt, Artificial Sequence
  Description of Artificial Sequence: Synthetic oligonucleotide
uccuuuacggauaggucga

SEQ ID NO: 91006 - RNA, 19 nt, Artificial Sequence
  Description of Artificial Sequence: Synthetic oligonucleotide
gaggguaacggcuacgaga

SEQ ID NO: 91007 - RNA, 19 nt, Artificial Sequence
  Description of Artificial Sequence: Synthetic oligonucleotide
gucaucgauggguagcacg

SEQ ID NO: 91008 - RNA, 19 nt, Artificial Sequence
  Description of Artificial Sequence: Synthetic oligonucleotide
uuacggauaggucgauaag

SEQ ID NO: 91009 - RNA, 19 nt, Artificial Sequence
  Description of Artificial Sequence: Synthetic oligonucleotide
ugcaacagaaaaccccugu

SEQ ID NO: 91010 - RNA, 19 nt, Artificial Sequence
  Description of Artificial Sequence: Synthetic oligonucleotide
ggcaauugaaucuaacuca

SEQ ID NO: 91011 - RNA, 19 nt, Artificial Sequence
  Description of Artificial Sequence: Synthetic oligonucleotide
agcaauacugugucaccuc

SEQ ID NO: 91012 - RNA, 19 nt, Artificial Sequence
  Description of Artificial Sequence: Synthetic oligonucleotide
ugagacacgauacgacgcu

SEQ ID NO: 91013 - RNA, 19 nt, Artificial Sequence
  Description of Artificial Sequence: Synthetic oligonucleotide
cuuaugauuagucuuccaa

SEQ ID NO: 91014 - RNA, 19 nt, Artificial Sequence
  Description of Artificial Sequence: Synthetic oligonucleotide
ugauggauuugucugccuc

SEQ ID NO: 91015 - RNA, 19 nt, Artificial Sequence
  Description of Artificial Sequence: Synthetic oligonucleotide
acggagguuauuccgaaca

SEQ ID NO: 91016 - RNA, 19 nt, Artificial Sequence
  Description of Artificial Sequence: Synthetic oligonucleotide
aguauugagggaaguacag

SEQ ID NO: 91017 - RNA, 19 nt, Artificial Sequence
  Description of Artificial Sequence: Synthetic oligonucleotide
ucaaagcgaccaaaucgcc

SEQ ID NO: 91018 - RNA, 19 nt, Artificial Sequence
  Description of Artificial Sequence: Synthetic oligonucleotide
guaacggcuacgagaaugg

SEQ ID NO: 91019 - RNA, 19 nt, Artificial Sequence
  Description of Artificial Sequence: Synthetic oligonucleotide
cacuuagccauacagguca

SEQ ID NO: 91020 - RNA, 19 nt, Artificial Sequence
  Description of Artificial Sequence: Synthetic oligonucleotide
cugagacacgauacgacgc

SEQ ID NO: 91021 - RNA, 19 nt, Artificial Sequence
  Description of Artificial Sequence: Synthetic oligonucleotide
acggcuacgagaauggcag

SEQ ID NO: 91022 - RNA, 19 nt, Artificial Sequence
  Description of Artificial Sequence: Synthetic oligonucleotide
uggcuguugauaaaucauc

SEQ ID NO: 91023 - RNA, 19 nt, Artificial Sequence
  Description of Artificial Sequence: Synthetic oligonucleotide
ucguucucgccuaaucuca

SEQ ID NO: 91024 - RNA, 19 nt, Artificial Sequence
  Description of Artificial Sequence: Synthetic oligonucleotide
gacgcuagcuccugauccg

SEQ ID NO: 91025 - RNA, 19 nt, Artificial Sequence
  Description of Artificial Sequence: Synthetic oligonucleotide
aagauuauagcaggagcau

SEQ ID NO: 91026 - RNA, 19 nt, Artificial Sequence
  Description of Artificial Sequence: Synthetic oligonucleotide
ucuauucauucgaaucuuc

SEQ ID NO: 91027 - RNA, 19 nt, Artificial Sequence
  Description of Artificial Sequence: Synthetic oligonucleotide
ucaccucggaacaacugca

SEQ ID NO: 91028 - RNA, 19 nt, Artificial Sequence
  Description of Artificial Sequence: Synthetic oligonucleotide
agacuugcgcagguuagcc

SEQ ID NO: 91029 - RNA, 19 nt, Artificial Sequence
  Description of Artificial Sequence: Synthetic oligonucleotide
uagauucacgaauggccag

SEQ ID NO: 91030 - RNA, 19 nt, Artificial Sequence
  Description of Artificial Sequence: Synthetic oligonucleotide
gauugggacgguucuuuug

SEQ ID NO: 91031 - RNA, 19 nt, Artificial Sequence
  Description of Artificial Sequence: Synthetic oligonucleotide
gggaacaagguccagccag

SEQ ID NO: 91032 - RNA, 19 nt, Artificial Sequence
  Description of Artificial Sequence: Synthetic oligonucleotide
gaucaagacggccaggucu

SEQ ID NO: 91033 - RNA, 19 nt, Artificial Sequence
  Description of Artificial Sequence: Synthetic oligonucleotide
uagcacguggauacguuug

SEQ ID NO: 91034 - RNA, 19 nt, Artificial Sequence
  Description of Artificial Sequence: Synthetic oligonucleotide
acgagaauggcaggcgacc

SEQ ID NO: 91035 - RNA, 19 nt, Artificial Sequence
  Description of Artificial Sequence: Synthetic oligonucleotide
acagaugcuuuacuguggu

SEQ ID NO: 91036 - RNA, 19 nt, Artificial Sequence
  Description of Artificial Sequence: Synthetic oligonucleotide
ugauagagaugaaguuagc

SEQ ID NO: 91037 - RNA, 19 nt, Artificial Sequence
  Description of Artificial Sequence: Synthetic oligonucleotide
acugacagaacgacgagca

SEQ ID NO: 91038 - RNA, 19 nt, Artificial Sequence
  Description of Artificial Sequence: Synthetic oligonucleotide
uggcauucauuagcaaugg

SEQ ID NO: 91039 - RNA, 19 nt, Artificial Sequence
  Description of Artificial Sequence: Synthetic oligonucleotide
aaccgauugggacgguucu

SEQ ID NO: 91040 - RNA, 19 nt, Artificial Sequence
  Description of Artificial Sequence: Synthetic oligonucleotide
aguaacugccaaggaauuc

SEQ ID NO: 91041 - RNA, 19 nt, Artificial Sequence
  Description of Artificial Sequence: Synthetic oligonucleotide
aaucagccuacuuucuaua

SEQ ID NO: 91042 - RNA, 19 nt, Artificial Sequence
  Description of Artificial Sequence: Synthetic oligonucleotide
cugggcgaacauuucauac

SEQ ID NO: 91043 - RNA, 19 nt, Artificial Sequence
  Description of Artificial Sequence: Synthetic oligonucleotide
uuuaucgcuuuuguaauuu

SEQ ID NO: 91044 - RNA, 19 nt, Artificial Sequence
  Description of Artificial Sequence: Synthetic oligonucleotide
cucagguccauugaucaag

SEQ ID NO: 91045 - RNA, 19 nt, Artificial Sequence
  Description of Artificial Sequence: Synthetic oligonucleotide
uugacucaaggcccaccgg

SEQ ID NO: 91046 - RNA, 19 nt, Artificial Sequence
  Description of Artificial Sequence: Synthetic oligonucleotide
gagaauggcaggcgaccgg

SEQ ID NO: 91047 - RNA, 19 nt, Artificial Sequence
  Description of Artificial Sequence: Synthetic oligonucleotide
acagcacgcaucccacccc

SEQ ID NO: 91048 - RNA, 19 nt, Artificial Sequence
  Description of Artificial Sequence: Synthetic oligonucleotide
aagcacguuggcaaaucuc

SEQ ID NO: 91049 - RNA, 19 nt, Artificial Sequence
  Description of Artificial Sequence: Synthetic oligonucleotide
ucacugacagaacgacgag

SEQ ID NO: 91050 - RNA, 19 nt, Artificial Sequence
  Description of Artificial Sequence: Synthetic oligonucleotide
caguggaucacugugucug

SEQ ID NO: 91051 - RNA, 19 nt, Artificial Sequence
  Description of Artificial Sequence: Synthetic oligonucleotide
ugaaucggcuccagaggcc

SEQ ID NO: 91052 - RNA, 19 nt, Artificial Sequence
  Description of Artificial Sequence: Synthetic oligonucleotide
gauuagucuuccaacagua

SEQ ID NO: 91053 - RNA, 19 nt, Artificial Sequence
  Description of Artificial Sequence: Synthetic oligonucleotide
gcaauacugugucaccucg

SEQ ID NO: 91054 - RNA, 19 nt, Artificial Sequence
  Description of Artificial Sequence: Synthetic oligonucleotide
uacguuugccauacuuuac

SEQ ID NO: 91055 - RNA, 19 nt, Artificial Sequence
  Description of Artificial Sequence: Synthetic oligonucleotide
aggcgguggaucaacagcg

SEQ ID NO: 91056 - RNA, 19 nt, Artificial Sequence
  Description of Artificial Sequence: Synthetic oligonucleotide
agcugaucaagacggccag

SEQ ID NO: 91057 - RNA, 19 nt, Artificial Sequence
  Description of Artificial Sequence: Synthetic oligonucleotide
uaaccgauugggacgguuc

SEQ ID NO: 91058 - RNA, 19 nt, Artificial Sequence
  Description of Artificial Sequence: Synthetic oligonucleotide
caauacugugucaccucgg

SEQ ID NO: 91059 - RNA, 19 nt, Artificial Sequence
  Description of Artificial Sequence: Synthetic oligonucleotide
uacgagaauggcaggcgac

SEQ ID NO: 91060 - RNA, 19 nt, Artificial Sequence
  Description of Artificial Sequence: Synthetic oligonucleotide
caccggaaaucauccauag

SEQ ID NO: 91061 - RNA, 19 nt, Artificial Sequence
  Description of Artificial Sequence: Synthetic oligonucleotide
ucagccuacuuucuauaua

SEQ ID NO: 91062 - RNA, 19 nt, Artificial Sequence
  Description of Artificial Sequence: Synthetic oligonucleotide
caauaucuaccucucuguc

SEQ ID NO: 91063 - RNA, 19 nt, Artificial Sequence
  Description of Artificial Sequence: Synthetic oligonucleotide
gguaacggcuacgagaaug

SEQ ID NO: 91064 - RNA, 19 nt, Artificial Sequence
  Description of Artificial Sequence: Synthetic oligonucleotide
acgacgcucuacuuccccg

SEQ ID NO: 91065 - RNA, 19 nt, Artificial Sequence
  Description of Artificial Sequence: Synthetic oligonucleotide
agggcuuaagguauaccuc

SEQ ID NO: 91066 - RNA, 19 nt, Artificial Sequence
  Description of Artificial Sequence: Synthetic oligonucleotide
ugcuuaugauuagucuucc

SEQ ID NO: 91067 - RNA, 19 nt, Artificial Sequence
  Description of Artificial Sequence: Synthetic oligonucleotide
uuuuaucgcuuuuguaauu

SEQ ID NO: 91068 - RNA, 19 nt, Artificial Sequence
  Description of Artificial Sequence: Synthetic oligonucleotide
aacggcuacgagaauggca

SEQ ID NO: 91069 - RNA, 19 nt, Artificial Sequence
  Description of Artificial Sequence: Synthetic oligonucleotide
caggcgguggaucaacagc

SEQ ID NO: 91070 - RNA, 19 nt, Artificial Sequence
  Description of Artificial Sequence: Synthetic oligonucleotide
gauggguugcuuugacuca

SEQ ID NO: 91071 - RNA, 19 nt, Artificial Sequence
  Description of Artificial Sequence: Synthetic oligonucleotide
ucgauggguagcacgugga

SEQ ID NO: 91072 - RNA, 19 nt, Artificial Sequence
  Description of Artificial Sequence: Synthetic oligonucleotide
uuauuccgaacaacucuau

SEQ ID NO: 91073 - RNA, 19 nt, Artificial Sequence
  Description of Artificial Sequence: Synthetic oligonucleotide
auccucucgcuugauuggc

SEQ ID NO: 91074 - RNA, 19 nt, Artificial Sequence
  Description of Artificial Sequence: Synthetic oligonucleotide
aggguagugccuugguuca

SEQ ID NO: 91075 - RNA, 19 nt, Artificial Sequence
  Description of Artificial Sequence: Synthetic oligonucleotide
uacgacgcucuacuucccc

SEQ ID NO: 91076 - RNA, 19 nt, Artificial Sequence
  Description of Artificial Sequence: Synthetic oligonucleotide
uauuccgaacaacucuauu

SEQ ID NO: 91077 - RNA, 19 nt, Artificial Sequence
  Description of Artificial Sequence: Synthetic oligonucleotide
acguggauacguuugccau

SEQ ID NO: 91078 - RNA, 19 nt, Artificial Sequence
  Description of Artificial Sequence: Synthetic oligonucleotide
cauggguacaccccugguc

SEQ ID NO: 91079 - RNA, 19 nt, Artificial Sequence
  Description of Artificial Sequence: Synthetic oligonucleotide
uuacaagcacguuggcaaa

SEQ ID NO: 91080 - RNA, 19 nt, Artificial Sequence
  Description of Artificial Sequence: Synthetic oligonucleotide
acauccccuaggcgaacac

SEQ ID NO: 91081 - RNA, 19 nt, Artificial Sequence
  Description of Artificial Sequence: Synthetic oligonucleotide
cuuuacgaagguugcucuc

SEQ ID NO: 91082 - RNA, 19 nt, Artificial Sequence
  Description of Artificial Sequence: Synthetic oligonucleotide
cucucaauagauucacgaa

SEQ ID NO: 91083 - RNA, 19 nt, Artificial Sequence
  Description of Artificial Sequence: Synthetic oligonucleotide
ucucgccuaaucucacucu

SEQ ID NO: 91084 - RNA, 19 nt, Artificial Sequence
  Description of Artificial Sequence: Synthetic oligonucleotide
aggguaacggcuacgagaa

SEQ ID NO: 91085 - RNA, 19 nt, Artificial Sequence
  Description of Artificial Sequence: Synthetic oligonucleotide
ucgccuaaucucacucuca

SEQ ID NO: 91086 - RNA, 19 nt, Artificial Sequence
  Description of Artificial Sequence: Synthetic oligonucleotide
aucgccguagggccggguc

SEQ ID NO: 91087 - RNA, 19 nt, Artificial Sequence
  Description of Artificial Sequence: Synthetic oligonucleotide
aucagccuacuuucuauau

SEQ ID NO: 91088 - RNA, 19 nt, Artificial Sequence
  Description of Artificial Sequence: Synthetic oligonucleotide
acggauaggucgauaagcu

SEQ ID NO: 91089 - RNA, 19 nt, Artificial Sequence
  Description of Artificial Sequence: Synthetic oligonucleotide
acggccaggucuuaggaua

SEQ ID NO: 91090 - RNA, 19 nt, Artificial Sequence
  Description of Artificial Sequence: Synthetic oligonucleotide
acagaacgacgagcaaagc

SEQ ID NO: 91091 - RNA, 19 nt, Artificial Sequence
  Description of Artificial Sequence: Synthetic oligonucleotide
ucaggacccuugauagaga

SEQ ID NO: 91092 - RNA, 19 nt, Artificial Sequence
  Description of Artificial Sequence: Synthetic oligonucleotide
uuacuguggugaugacaag

SEQ ID NO: 91093 - RNA, 19 nt, Artificial Sequence
  Description of Artificial Sequence: Synthetic oligonucleotide
acacgauacgacgcucuac

SEQ ID NO: 91094 - RNA, 19 nt, Artificial Sequence
  Description of Artificial Sequence: Synthetic oligonucleotide
ggaucugauugaugacucg

SEQ ID NO: 91095 - RNA, 19 nt, Artificial Sequence
  Description of Artificial Sequence: Synthetic oligonucleotide
agauuccccaaaccacaug

SEQ ID NO: 91096 - RNA, 19 nt, Artificial Sequence
  Description of Artificial Sequence: Synthetic oligonucleotide
caacagcggugacaaaccc

SEQ ID NO: 91097 - RNA, 19 nt, Artificial Sequence
  Description of Artificial Sequence: Synthetic oligonucleotide
ucucgcuugauuggcuccc

SEQ ID NO: 91098 - RNA, 19 nt, Artificial Sequence
  Description of Artificial Sequence: Synthetic oligonucleotide
gggcuuaagguauaccuca

SEQ ID NO: 91099 - RNA, 19 nt, Artificial Sequence
  Description of Artificial Sequence: Synthetic oligonucleotide
acaccuuuggaagggguca

SEQ ID NO: 91100 - RNA, 19 nt, Artificial Sequence
  Description of Artificial Sequence: Synthetic oligonucleotide
acuaucacaugugcucucu

SEQ ID NO: 91101 - RNA, 19 nt, Artificial Sequence
  Description of Artificial Sequence: Synthetic oligonucleotide
gguuggcuaaggguaaggg

SEQ ID NO: 91102 - RNA, 19 nt, Artificial Sequence
  Description of Artificial Sequence: Synthetic oligonucleotide
cucgccuaaucucacucuc

SEQ ID NO: 91103 - RNA, 19 nt, Artificial Sequence
  Description of Artificial Sequence: Synthetic oligonucleotide
cauaagggucaacaacuga

SEQ ID NO: 91104 - RNA, 19 nt, Artificial Sequence
  Description of Artificial Sequence: Synthetic oligonucleotide
gaaaugguguaggcccaag

SEQ ID NO: 91105 - RNA, 19 nt, Artificial Sequence
  Description of Artificial Sequence: Synthetic oligonucleotide
gugucuggagcaacaauac

SEQ ID NO: 91106 - RNA, 19 nt, Artificial Sequence
  Description of Artificial Sequence: Synthetic oligonucleotide
agauucacgaauggccagu

SEQ ID NO: 91107 - RNA, 19 nt, Artificial Sequence
  Description of Artificial Sequence: Synthetic oligonucleotide
caaaucgccguagggccgg

SEQ ID NO: 91108 - RNA, 19 nt, Artificial Sequence
  Description of Artificial Sequence: Synthetic oligonucleotide
aguaacucaaaagcaugua

SEQ ID NO: 91109 - RNA, 19 nt, Artificial Sequence
  Description of Artificial Sequence: Synthetic oligonucleotide
caagcguccuguagcauca

SEQ ID NO: 91110 - RNA, 19 nt, Artificial Sequence
  Description of Artificial Sequence: Synthetic oligonucleotide
cugaacuguucagacugag

SEQ ID NO: 91111 - RNA, 19 nt, Artificial Sequence
  Description of Artificial Sequence: Synthetic oligonucleotide
gaaguagggcuuaagguau

SEQ ID NO: 91112 - RNA, 19 nt, Artificial Sequence
  Description of Artificial Sequence: Synthetic oligonucleotide
caacacgggacuucucauc

SEQ ID NO: 91113 - RNA, 19 nt, Artificial Sequence
  Description of Artificial Sequence: Synthetic oligonucleotide
uggguugcuuugacucaag

SEQ ID NO: 91114 - RNA, 19 nt, Artificial Sequence
  Description of Artificial Sequence: Synthetic oligonucleotide
ccuaaucucacucucaaua

SEQ ID NO: 91115 - RNA, 19 nt, Artificial Sequence
  Description of Artificial Sequence: Synthetic oligonucleotide
gagacuugcgcagguuagc

SEQ ID NO: 91116 - RNA, 19 nt, Artificial Sequence
  Description of Artificial Sequence: Synthetic oligonucleotide
uuuugggcgcaauggcauc

SEQ ID NO: 91117 - RNA, 19 nt, Artificial Sequence
  Description of Artificial Sequence: Synthetic oligonucleotide
gacaaacccucaggcagcc

SEQ ID NO: 91118 - RNA, 19 nt, Artificial Sequence
  Description of Artificial Sequence: Synthetic oligonucleotide
acgacgagcaaagcgcaug

SEQ ID NO: 91119 - RNA, 19 nt, Artificial Sequence
  Description of Artificial Sequence: Synthetic oligonucleotide
ggcuugggcaguauugagg

SEQ ID NO: 91120 - RNA, 19 nt, Artificial Sequence
  Description of Artificial Sequence: Synthetic oligonucleotide
uacuuucgaaugucauuau

SEQ ID NO: 91121 - RNA, 19 nt, Artificial Sequence
  Description of Artificial Sequence: Synthetic oligonucleotide
gauggcaacacgggacuuc

SEQ ID NO: 91122 - RNA, 19 nt, Artificial Sequence
  Description of Artificial Sequence: Synthetic oligonucleotide
agguugcucucagauucac

SEQ ID NO: 91123 - RNA, 19 nt, Artificial Sequence
  Description of Artificial Sequence: Synthetic oligonucleotide
cagcacgcaucccaccccg

SEQ ID NO: 91124 - RNA, 19 nt, Artificial Sequence
  Description of Artificial Sequence: Synthetic oligonucleotide
aaccccuguccagagucug

SEQ ID NO: 91125 - RNA, 19 nt, Artificial Sequence
  Description of Artificial Sequence: Synthetic oligonucleotide
caucagggauuccaauauc

SEQ ID NO: 91126 - RNA, 19 nt, Artificial Sequence
  Description of Artificial Sequence: Synthetic oligonucleotide
augacaaggguagugccuu

SEQ ID NO: 91127 - RNA, 19 nt, Artificial Sequence
  Description of Artificial Sequence: Synthetic oligonucleotide
ggcgggagacgcuagcucc

SEQ ID NO: 91128 - RNA, 19 nt, Artificial Sequence
  Description of Artificial Sequence: Synthetic oligonucleotide
ucccgaagugcugaugggu

SEQ ID NO: 91129 - RNA, 19 nt, Artificial Sequence
  Description of Artificial Sequence: Synthetic oligonucleotide
acgcuagcuccugauccgc

SEQ ID NO: 91130 - RNA, 19 nt, Artificial Sequence
  Description of Artificial Sequence: Synthetic oligonucleotide
cuuugacucaaggcccacc

SEQ ID NO: 91131 - RNA, 19 nt, Artificial Sequence
  Description of Artificial Sequence: Synthetic oligonucleotide
caggccgguugguagcucc

SEQ ID NO: 91132 - RNA, 19 nt, Artificial Sequence
  Description of Artificial Sequence: Synthetic oligonucleotide
aggcccaccggaaaucauc

SEQ ID NO: 91133 - RNA, 19 nt, Artificial Sequence
  Description of Artificial Sequence: Synthetic oligonucleotide
ggugacaaacccucaggca

SEQ ID NO: 91134 - RNA, 19 nt, Artificial Sequence
  Description of Artificial Sequence: Synthetic oligonucleotide
cauccccuaggcgaacacg

SEQ ID NO: 91135 - RNA, 19 nt, Artificial Sequence
  Description of Artificial Sequence: Synthetic oligonucleotide
agauuauagcaggagcauu

SEQ ID NO: 91136 - RNA, 19 nt, Artificial Sequence
  Description of Artificial Sequence: Synthetic oligonucleotide
cacguggauacguuugcca

SEQ ID NO: 91137 - RNA, 19 nt, Artificial Sequence
  Description of Artificial Sequence: Synthetic oligonucleotide
gcuacgagaauggcaggcg

SEQ ID NO: 91138 - RNA, 19 nt, Artificial Sequence
  Description of Artificial Sequence: Synthetic oligonucleotide
uacgaagguugcucucaga

SEQ ID NO: 91139 - RNA, 19 nt, Artificial Sequence
  Description of Artificial Sequence: Synthetic oligonucleotide
gcggugacaaacccucagg

SEQ ID NO: 91140 - RNA, 19 nt, Artificial Sequence
  Description of Artificial Sequence: Synthetic oligonucleotide
auugggucuauugguugcu

SEQ ID NO: 91141 - RNA, 19 nt, Artificial Sequence
  Description of Artificial Sequence: Synthetic oligonucleotide
ucaaggcccaccggaaauc

SEQ ID NO: 91142 - RNA, 19 nt, Artificial Sequence
  Description of Artificial Sequence: Synthetic oligonucleotide
uccucucgcuugauuggcu

SEQ ID NO: 91143 - RNA, 19 nt, Artificial Sequence
  Description of Artificial Sequence: Synthetic oligonucleotide
uggguacaccccugguccc

SEQ ID NO: 91144 - RNA, 19 nt, Artificial Sequence
  Description of Artificial Sequence: Synthetic oligonucleotide
accggaaaucauccauagu

SEQ ID NO: 91145 - RNA, 19 nt, Artificial Sequence
  Description of Artificial Sequence: Synthetic oligonucleotide
gacgcucuacuuccccgug

SEQ ID NO: 91146 - RNA, 19 nt, Artificial Sequence
  Description of Artificial Sequence: Synthetic oligonucleotide
cccuaggcgaacacggagg

SEQ ID NO: 91147 - RNA, 19 nt, Artificial Sequence
  Description of Artificial Sequence: Synthetic oligonucleotide
cuacccagguuggcuaagg

SEQ ID NO: 91148 - RNA, 19 nt, Artificial Sequence
  Description of Artificial Sequence: Synthetic oligonucleotide
caaagcgcauggcuucuuc

SEQ ID NO: 91149 - RNA, 19 nt, Artificial Sequence
  Description of Artificial Sequence: Synthetic oligonucleotide
aaaccucgacuuugcugaa

SEQ ID NO: 91150 - RNA, 19 nt, Artificial Sequence
  Description of Artificial Sequence: Synthetic oligonucleotide
gaugacaaggguagugccu

SEQ ID NO: 91151 - RNA, 19 nt, Artificial Sequence
  Description of Artificial Sequence: Synthetic oligonucleotide
gaugucucaguggcaguuc

SEQ ID NO: 91152 - RNA, 19 nt, Artificial Sequence
  Description of Artificial Sequence: Synthetic oligonucleotide
cacgauacgacgcucuacu

SEQ ID NO: 91153 - RNA, 19 nt, Artificial Sequence
  Description of Artificial Sequence: Synthetic oligonucleotide
cugccauaacuaucacaug

SEQ ID NO: 91154 - RNA, 19 nt, Artificial Sequence
  Description of Artificial Sequence: Synthetic oligonucleotide
uuguuugagaauggcuguu

SEQ ID NO: 91155 - RNA, 19 nt, Artificial Sequence
  Description of Artificial Sequence: Synthetic oligonucleotide
gguggaucaacagcgguga

SEQ ID NO: 91156 - RNA, 19 nt, Artificial Sequence
  Description of Artificial Sequence: Synthetic oligonucleotide
acacggagguuauuccgaa

SEQ ID NO: 91157 - RNA, 19 nt, Artificial Sequence
  Description of Artificial Sequence: Synthetic oligonucleotide
guagggcuuaagguauacc

SEQ ID NO: 91158 - RNA, 19 nt, Artificial Sequence
  Description of Artificial Sequence: Synthetic oligonucleotide
cuacgagaauggcaggcga

SEQ ID NO: 91159 - RNA, 19 nt, Artificial Sequence
  Description of Artificial Sequence: Synthetic oligonucleotide
uggguagcacguggauacg

SEQ ID NO: 91160 - RNA, 19 nt, Artificial Sequence
  Description of Artificial Sequence: Synthetic oligonucleotide
ggcuguugauaaaucauca

SEQ ID NO: 91161 - RNA, 19 nt, Artificial Sequence
  Description of Artificial Sequence: Synthetic oligonucleotide
cuuuugaaucggcuccaga

SEQ ID NO: 91162 - RNA, 19 nt, Artificial Sequence
  Description of Artificial Sequence: Synthetic oligonucleotide
gacucacucaggcggugga

SEQ ID NO: 91163 - RNA, 19 nt, Artificial Sequence
  Description of Artificial Sequence: Synthetic oligonucleotide
uccccuaggcgaacacgga

SEQ ID NO: 91164 - RNA, 19 nt, Artificial Sequence
  Description of Artificial Sequence: Synthetic oligonucleotide
auacgacgcucuacuuccc

SEQ ID NO: 91165 - RNA, 19 nt, Artificial Sequence
  Description of Artificial Sequence: Synthetic oligonucleotide
uaacggcuacgagaauggc

SEQ ID NO: 91166 - RNA, 19 nt, Artificial Sequence
  Description of Artificial Sequence: Synthetic oligonucleotide
uugggucuauugguugcug

SEQ ID NO: 91167 - RNA, 19 nt, Artificial Sequence
  Description of Artificial Sequence: Synthetic oligonucleotide
agacacgauacgacgcucu

SEQ ID NO: 91168 - RNA, 19 nt, Artificial Sequence
  Description of Artificial Sequence: Synthetic oligonucleotide
uuaaccgauugggacgguu

SEQ ID NO: 91169 - RNA, 19 nt, Artificial Sequence
  Description of Artificial Sequence: Synthetic oligonucleotide
cauacuuucgaaugucauu

SEQ ID NO: 91170 - RNA, 19 nt, Artificial Sequence
  Description of Artificial Sequence: Synthetic oligonucleotide
agcgaccaaaucgccguag

SEQ ID NO: 91171 - RNA, 19 nt, Artificial Sequence
  Description of Artificial Sequence: Synthetic oligonucleotide
gcgaccaaaucgccguagg

SEQ ID NO: 91172 - RNA, 19 nt, Artificial Sequence
  Description of Artificial Sequence: Synthetic oligonucleotide
uuaccaccacgagccuugg

SEQ ID NO: 91173 - RNA, 19 nt, Artificial Sequence
  Description of Artificial Sequence: Synthetic oligonucleotide
uacaagcacguuggcaaau

SEQ ID NO: 91174 - RNA, 19 nt, Artificial Sequence
  Description of Artificial Sequence: Synthetic oligonucleotide
uugccgugccuugucaaaa

SEQ ID NO: 91175 - RNA, 19 nt, Artificial Sequence
  Description of Artificial Sequence: Synthetic oligonucleotide
caccaccccacacuacaac

SEQ ID NO: 91176 - RNA, 19 nt, Artificial Sequence
  Description of Artificial Sequence: Synthetic oligonucleotide
aucaagacggccaggucuu

SEQ ID NO: 91177 - RNA, 19 nt, Artificial Sequence
  Description of Artificial Sequence: Synthetic oligonucleotide
ggcuacgagaauggcaggc

SEQ ID NO: 91178 - RNA, 19 nt, Artificial Sequence
  Description of Artificial Sequence: Synthetic oligonucleotide
ccaaaucgccguagggccg

SEQ ID NO: 91179 - RNA, 19 nt, Artificial Sequence
  Description of Artificial Sequence: Synthetic oligonucleotide
ccaagcguccuguagcauc

SEQ ID NO: 91180 - RNA, 19 nt, Artificial Sequence
  Description of Artificial Sequence: Synthetic oligonucleotide
cacggagguuauuccgaac

SEQ ID NO: 91181 - RNA, 19 nt, Artificial Sequence
  Description of Artificial Sequence: Synthetic oligonucleotide
gacgagcaaagcgcauggc

SEQ ID NO: 91182 - RNA, 19 nt, Artificial Sequence
  Description of Artificial Sequence: Synthetic oligonucleotide
guagcaucagggauuccaa

SEQ ID NO: 91183 - RNA, 19 nt, Artificial Sequence
  Description of Artificial Sequence: Synthetic oligonucleotide
aggggucauuccaaauuug

SEQ ID NO: 91184 - RNA, 19 nt, Artificial Sequence
  Description of Artificial Sequence: Synthetic oligonucleotide
auggguugcuuugacucaa

SEQ ID NO: 91185 - RNA, 19 nt, Artificial Sequence
  Description of Artificial Sequence: Synthetic oligonucleotide
agggaaguacagaugcuuu

SEQ ID NO: 91186 - RNA, 19 nt, Artificial Sequence
  Description of Artificial Sequence: Synthetic oligonucleotide
gagacacgauacgacgcuc

SEQ ID NO: 91187 - RNA, 19 nt, Artificial Sequence
  Description of Artificial Sequence: Synthetic oligonucleotide
gacacgauacgacgcucua

SEQ ID NO: 91188 - RNA, 19 nt, Artificial Sequence
  Description of Artificial Sequence: Synthetic oligonucleotide
aagcgaccaaaucgccgua

SEQ ID NO: 91189 - RNA, 19 nt, Artificial Sequence
  Description of Artificial Sequence: Synthetic oligonucleotide
gacuggagcugaacuguuc

SEQ ID NO: 91190 - RNA, 19 nt, Artificial Sequence
  Description of Artificial Sequence: Synthetic oligonucleotide
agccuacuucauucagaga

SEQ ID NO: 91191 - RNA, 19 nt, Artificial Sequence
  Description of Artificial Sequence: Synthetic oligonucleotide
aagauuccucgaggaggcu

SEQ ID NO: 91192 - RNA, 19 nt, Artificial Sequence
  Description of Artificial Sequence: Synthetic oligonucleotide
acgcucuacuuccccguga

SEQ ID NO: 91193 - RNA, 19 nt, Artificial Sequence
  Description of Artificial Sequence: Synthetic oligonucleotide
cuugccgugccuugucaaa

SEQ ID NO: 91194 - RNA, 19 nt, Artificial Sequence
  Description of Artificial Sequence: Synthetic oligonucleotide
cacguuggcaaaucucugu

SEQ ID NO: 91195 - RNA, 19 nt, Artificial Sequence
  Description of Artificial Sequence: Synthetic oligonucleotide
accccggacaaggaaaaua

SEQ ID NO: 91196 - RNA, 19 nt, Artificial Sequence
  Description of Artificial Sequence: Synthetic oligonucleotide
ggccgggucaaugcuauug

SEQ ID NO: 91197 - RNA, 19 nt, Artificial Sequence
  Description of Artificial Sequence: Synthetic oligonucleotide
acgggacuucucaucagga

SEQ ID NO: 91198 - RNA, 19 nt, Artificial Sequence
  Description of Artificial Sequence: Synthetic oligonucleotide
acgauacgacgcucuacuu

SEQ ID NO: 91199 - RNA, 19 nt, Artificial Sequence
  Description of Artificial Sequence: Synthetic oligonucleotide
gacucaaggcccaccggaa

SEQ ID NO: 91200 - RNA, 19 nt, Artificial Sequence
  Description of Artificial Sequence: Synthetic oligonucleotide
uugggacgguucuuuuguu

SEQ ID NO: 91201 - RNA, 19 nt, Artificial Sequence
  Description of Artificial Sequence: Synthetic oligonucleotide
aacgacgagcaaagcgcau

SEQ ID NO: 91202 - RNA, 19 nt, Artificial Sequence
  Description of Artificial Sequence: Synthetic oligonucleotide
cguagggccgggucaaugc

SEQ ID NO: 91203 - RNA, 19 nt, Artificial Sequence
  Description of Artificial Sequence: Synthetic oligonucleotide
gacauccccuaggcgaaca

SEQ ID NO: 91204 - RNA, 19 nt, Artificial Sequence
  Description of Artificial Sequence: Synthetic oligonucleotide
cuuagccauacaggucauc

SEQ ID NO: 91205 - RNA, 19 nt, Artificial Sequence
  Description of Artificial Sequence: Synthetic oligonucleotide
ggcggccugaggguaacgg

SEQ ID NO: 91206 - RNA, 19 nt, Artificial Sequence
  Description of Artificial Sequence: Synthetic oligonucleotide
ucccggucggcggcugugg

SEQ ID NO: 91207 - RNA, 19 nt, Artificial Sequence
  Description of Artificial Sequence: Synthetic oligonucleotide
aaguagggcuuaagguaua

SEQ ID NO: 91208 - RNA, 19 nt, Artificial Sequence
  Description of Artificial Sequence: Synthetic oligonucleotide
ggauuccaauaucuaccuc

SEQ ID NO: 91209 - RNA, 19 nt, Artificial Sequence
  Description of Artificial Sequence: Synthetic oligonucleotide
cgacgagcaaagcgcaugg

SEQ ID NO: 91210 - RNA, 19 nt, Artificial Sequence
  Description of Artificial Sequence: Synthetic oligonucleotide
gcuuaugauuagucuucca

SEQ ID NO: 91211 - RNA, 19 nt, Artificial Sequence
  Description of Artificial Sequence: Synthetic oligonucleotide
gaagugucugggcgaacau

SEQ ID NO: 91212 - RNA, 19 nt, Artificial Sequence
  Description of Artificial Sequence: Synthetic oligonucleotide
gcaccuacauggccaugag

SEQ ID NO: 91213 - RNA, 19 nt, Artificial Sequence
  Description of Artificial Sequence: Synthetic oligonucleotide
ggacgguucuuuuguuuga

SEQ ID NO: 91214 - RNA, 19 nt, Artificial Sequence
  Description of Artificial Sequence: Synthetic oligonucleotide
gcuuuacgaagguugcucu

SEQ ID NO: 91215 - RNA, 19 nt, Artificial Sequence
  Description of Artificial Sequence: Synthetic oligonucleotide
cgauacgacgcucuacuuc

SEQ ID NO: 91216 - RNA, 19 nt, Artificial Sequence
  Description of Artificial Sequence: Synthetic oligonucleotide
aggacccuugauagagaug

SEQ ID NO: 91217 - RNA, 19 nt, Artificial Sequence
  Description of Artificial Sequence: Synthetic oligonucleotide
cucgcuugauuggcucccc

SEQ ID NO: 91218 - RNA, 19 nt, Artificial Sequence
  Description of Artificial Sequence: Synthetic oligonucleotide
cuucacaguggaucacugu

SEQ ID NO: 91219 - RNA, 19 nt, Artificial Sequence
  Description of Artificial Sequence: Synthetic oligonucleotide
ggacuucucaucaggaagu

SEQ ID NO: 91220 - RNA, 19 nt, Artificial Sequence
  Description of Artificial Sequence: Synthetic oligonucleotide
gcuuaagguauaccucaaa

SEQ ID NO: 91221 - RNA, 19 nt, Artificial Sequence
  Description of Artificial Sequence: Synthetic oligonucleotide
caaggcccaccggaaauca

SEQ ID NO: 91222 - RNA, 19 nt, Artificial Sequence
  Description of Artificial Sequence: Synthetic oligonucleotide
caccggggcggcaggcggg

SEQ ID NO: 91223 - RNA, 19 nt, Artificial Sequence
  Description of Artificial Sequence: Synthetic oligonucleotide
gcugaucaagacggccagg

SEQ ID NO: 91224 - RNA, 19 nt, Artificial Sequence
  Description of Artificial Sequence: Synthetic oligonucleotide
guagcacguggauacguuu

SEQ ID NO: 91225 - RNA, 19 nt, Artificial Sequence
  Description of Artificial Sequence: Synthetic oligonucleotide
auaggucgauaagcuucca

SEQ ID NO: 91226 - RNA, 19 nt, Artificial Sequence
  Description of Artificial Sequence: Synthetic oligonucleotide
caagcacguuggcaaaucu

SEQ ID NO: 91227 - RNA, 19 nt, Artificial Sequence
  Description of Artificial Sequence: Synthetic oligonucleotide
ccccuaggcgaacacggag

SEQ ID NO: 91228 - RNA, 19 nt, Artificial Sequence
  Description of Artificial Sequence: Synthetic oligonucleotide
ggcgguggaucaacagcgg

SEQ ID NO: 91229 - RNA, 19 nt, Artificial Sequence
  Description of Artificial Sequence: Synthetic oligonucleotide
uugggcgcaauggcaucaa

SEQ ID NO: 91230 - RNA, 19 nt, Artificial Sequence
  Description of Artificial Sequence: Synthetic oligonucleotide
caccuacccagguuggcua

SEQ ID NO: 91231 - RNA, 19 nt, Artificial Sequence
  Description of Artificial Sequence: Synthetic oligonucleotide
accacgagccuuggcaauu

SEQ ID NO: 91232 - RNA, 19 nt, Artificial Sequence
  Description of Artificial Sequence: Synthetic oligonucleotide
guagggccgggucaaugcu

SEQ ID NO: 91233 - RNA, 19 nt, Artificial Sequence
  Description of Artificial Sequence: Synthetic oligonucleotide
cggaaaucauccauaguaa

SEQ ID NO: 91234 - RNA, 19 nt, Artificial Sequence
  Description of Artificial Sequence: Synthetic oligonucleotide
caggacccuugauagagau

SEQ ID NO: 91235 - RNA, 19 nt, Artificial Sequence
  Description of Artificial Sequence: Synthetic oligonucleotide
ugucccggucggcggcugu

SEQ ID NO: 91236 - RNA, 19 nt, Artificial Sequence
  Description of Artificial Sequence: Synthetic oligonucleotide
acucacucaggcgguggau

SEQ ID NO: 91237 - RNA, 19 nt, Artificial Sequence
  Description of Artificial Sequence: Synthetic oligonucleotide
uccaagcguccuguagcau

SEQ ID NO: 91238 - RNA, 19 nt, Artificial Sequence
  Description of Artificial Sequence: Synthetic oligonucleotide
gcaccggggcggcaggcgg

SEQ ID NO: 91239 - RNA, 19 nt, Artificial Sequence
  Description of Artificial Sequence: Synthetic oligonucleotide
cgagaauggcaggcgaccg

SEQ ID NO: 91240 - RNA, 19 nt, Artificial Sequence
  Description of Artificial Sequence: Synthetic oligonucleotide
guucucgccuaaucucacu

SEQ ID NO: 91241 - RNA, 19 nt, Artificial Sequence
  Description of Artificial Sequence: Synthetic oligonucleotide
gggcgaacauuucauacuu

SEQ ID NO: 91242 - RNA, 19 nt, Artificial Sequence
  Description of Artificial Sequence: Synthetic oligonucleotide
acuuagccauacaggucau

SEQ ID NO: 91243 - RNA, 19 nt, Artificial Sequence
  Description of Artificial Sequence: Synthetic oligonucleotide
gauucacgaauggccaguu

SEQ ID NO: 91244 - RNA, 19 nt, Artificial Sequence
  Description of Artificial Sequence: Synthetic oligonucleotide
cgcucuacuuccccgugag

SEQ ID NO: 91245 - RNA, 19 nt, Artificial Sequence
  Description of Artificial Sequence: Synthetic oligonucleotide
auuaaccgauugggacggu

SEQ ID NO: 91246 - RNA, 19 nt, Artificial Sequence
  Description of Artificial Sequence: Synthetic oligonucleotide
cucuauucauucgaaucuu

SEQ ID NO: 91247 - RNA, 19 nt, Artificial Sequence
  Description of Artificial Sequence: Synthetic oligonucleotide
cuuuacggauaggucgaua

SEQ ID NO: 91248 - RNA, 19 nt, Artificial Sequence
  Description of Artificial Sequence: Synthetic oligonucleotide
cccggacaaggaaaauauc

SEQ ID NO: 91249 - RNA, 19 nt, Artificial Sequence
  Description of Artificial Sequence: Synthetic oligonucleotide
gucugggcgaacauuucau

SEQ ID NO: 91250 - RNA, 19 nt, Artificial Sequence
  Description of Artificial Sequence: Synthetic oligonucleotide
cagauuccccaaaccacau

SEQ ID NO: 91251 - RNA, 19 nt, Artificial Sequence
  Description of Artificial Sequence: Synthetic oligonucleotide
cagguccauugaucaagaa

SEQ ID NO: 91252 - RNA, 19 nt, Artificial Sequence
  Description of Artificial Sequence: Synthetic oligonucleotide
accgauugggacgguucuu

SEQ ID NO: 91253 - RNA, 19 nt, Artificial Sequence
  Description of Artificial Sequence: Synthetic oligonucleotide
cguucucgccuaaucucac

SEQ ID NO: 91254 - RNA, 19 nt, Artificial Sequence
  Description of Artificial Sequence: Synthetic oligonucleotide
gacccuugauagagaugaa

SEQ ID NO: 91255 - RNA, 19 nt, Artificial Sequence
  Description of Artificial Sequence: Synthetic oligonucleotide
ggcuuaagguauaccucaa

SEQ ID NO: 91256 - RNA, 19 nt, Artificial Sequence
  Description of Artificial Sequence: Synthetic oligonucleotide
aggcgaacacggagguuau

SEQ ID NO: 91257 - RNA, 19 nt, Artificial Sequence
  Description of Artificial Sequence: Synthetic oligonucleotide
gucccggucggcggcugug

SEQ ID NO: 91258 - RNA, 19 nt, Artificial Sequence
  Description of Artificial Sequence: Synthetic oligonucleotide
ggaugucucaguggcaguu

SEQ ID NO: 91259 - RNA, 19 nt, Artificial Sequence
  Description of Artificial Sequence: Synthetic oligonucleotide
ccacgagccuuggcaauug

SEQ ID NO: 91260 - RNA, 19 nt, Artificial Sequence
  Description of Artificial Sequence: Synthetic oligonucleotide
ccaccccggacaaggaaaa

SEQ ID NO: 91261 - RNA, 19 nt, Artificial Sequence
  Description of Artificial Sequence: Synthetic oligonucleotide
gcgguggaucaacagcggu

SEQ ID NO: 91262 - RNA, 19 nt, Artificial Sequence
  Description of Artificial Sequence: Synthetic oligonucleotide
cgccuaaucucacucucaa

SEQ ID NO: 91263 - RNA, 19 nt, Artificial Sequence
  Description of Artificial Sequence: Synthetic oligonucleotide
cggcuacgagaauggcagg

SEQ ID NO: 91264 - RNA, 19 nt, Artificial Sequence
  Description of Artificial Sequence: Synthetic oligonucleotide
gguagcacguggauacguu

SEQ ID NO: 91265 - RNA, 19 nt, Artificial Sequence
  Description of Artificial Sequence: Synthetic oligonucleotide
ggguagcacguggauacgu

SEQ ID NO: 91266 - RNA, 19 nt, Artificial Sequence
  Description of Artificial Sequence: Synthetic oligonucleotide
gcccaccggaaaucaucca

SEQ ID NO: 91267 - RNA, 19 nt, Artificial Sequence
  Description of Artificial Sequence: Synthetic oligonucleotide
gccuaaucucacucucaau

SEQ ID NO: 91268 - RNA, 19 nt, Artificial Sequence
  Description of Artificial Sequence: Synthetic oligonucleotide
cugucccggucggcggcug

SEQ ID NO: 91269 - RNA, 19 nt, Artificial Sequence
  Description of Artificial Sequence: Synthetic oligonucleotide
cggagguuauuccgaacaa

SEQ ID NO: 91270 - RNA, 19 nt, Artificial Sequence
  Description of Artificial Sequence: Synthetic oligonucleotide
ucgcugcaugcuggcuuuu

SEQ ID NO: 91271 - RNA, 19 nt, Artificial Sequence
  Description of Artificial Sequence: Synthetic oligonucleotide
cccggucggcggcuguggc

SEQ ID NO: 91272 - RNA, 19 nt, Artificial Sequence
  Description of Artificial Sequence: Synthetic oligonucleotide
ggcaggcgaccggcuaggc

SEQ ID NO: 91273 - RNA, 19 nt, Artificial Sequence
  Description of Artificial Sequence: Synthetic oligonucleotide
gcgaccggcuaggcccggg

SEQ ID NO: 91274 - RNA, 19 nt, Artificial Sequence
  Description of Artificial Sequence: Synthetic oligonucleotide
caaugcuauugggucuauu

SEQ ID NO: 91275 - RNA, 19 nt, Artificial Sequence
  Description of Artificial Sequence: Synthetic oligonucleotide
gcucuacuuccccgugagu

SEQ ID NO: 91276 - RNA, 19 nt, Artificial Sequence
  Description of Artificial Sequence: Synthetic oligonucleotide
gguauaccucaaagagauu

SEQ ID NO: 91277 - RNA, 19 nt, Artificial Sequence
  Description of Artificial Sequence: Synthetic oligonucleotide
cuaggcgaacacggagguu

SEQ ID NO: 91278 - RNA, 19 nt, Artificial Sequence
  Description of Artificial Sequence: Synthetic oligonucleotide
cgggagacgcuagcuccug

SEQ ID NO: 91279 - RNA, 19 nt, Artificial Sequence
  Description of Artificial Sequence: Synthetic oligonucleotide
ccgauugggacgguucuuu

SEQ ID NO: 91280 - RNA, 19 nt, Artificial Sequence
  Description of Artificial Sequence: Synthetic oligonucleotide
cgacgcucuacuuccccgu

SEQ ID NO: 91281 - RNA, 19 nt, Artificial Sequence
  Description of Artificial Sequence: Synthetic oligonucleotide
ggguaacggcuacgagaau

SEQ ID NO: 91282 - RNA, 19 nt, Artificial Sequence
  Description of Artificial Sequence: Synthetic oligonucleotide
cggaacaacugcagcucau

SEQ ID NO: 91283 - RNA, 19 nt, Artificial Sequence
  Description of Artificial Sequence: Synthetic oligonucleotide
caccccggacaaggaaaau

SEQ ID NO: 91284 - RNA, 19 nt, Artificial Sequence
  Description of Artificial Sequence: Synthetic oligonucleotide
cgauugggacgguucuuuu

SEQ ID NO: 91285 - RNA, 19 nt, Artificial Sequence
  Description of Artificial Sequence: Synthetic oligonucleotide
ccuuuacggauaggucgau

SEQ ID NO: 91286 - RNA, 19 nt, Artificial Sequence
  Description of Artificial Sequence: Synthetic oligonucleotide
ggcgaacacggagguuauu

SEQ ID NO: 91287 - RNA, 19 nt, Artificial Sequence
  Description of Artificial Sequence: Synthetic oligonucleotide
uaagcuuuacccuaaaucg

SEQ ID NO: 91288 - RNA, 19 nt, Artificial Sequence
  Description of Artificial Sequence: Synthetic oligonucleotide
uuaagaacuaaucaaauga

SEQ ID NO: 91289 - RNA, 19 nt, Artificial Sequence
  Description of Artificial Sequence: Synthetic oligonucleotide
aauuacuuguacuagguag

SEQ ID NO: 91290 - RNA, 19 nt, Artificial Sequence
  Description of Artificial Sequence: Synthetic oligonucleotide
uauauauuaaguuacccug

SEQ ID NO: 91291 - RNA, 19 nt, Artificial Sequence
  Description of Artificial Sequence: Synthetic oligonucleotide
aauagcauacuugauauuc

SEQ ID NO: 91292 - RNA, 19 nt, Artificial Sequence
  Description of Artificial Sequence: Synthetic oligonucleotide
uacggaacaaguuucaugg

SEQ ID NO: 91293 - RNA, 19 nt, Artificial Sequence
  Description of Artificial Sequence: Synthetic oligonucleotide
aagaauaccacuuugugaa

SEQ ID NO: 91294 - RNA, 19 nt, Artificial Sequence
  Description of Artificial Sequence: Synthetic oligonucleotide
aauacuuggaaaaugaaga

SEQ ID NO: 91295 - RNA, 19 nt, Artificial Sequence
  Description of Artificial Sequence: Synthetic oligonucleotide
ucuaacuaugcuuauaaug

SEQ ID NO: 91296 - RNA, 19 nt, Artificial Sequence
  Description of Artificial Sequence: Synthetic oligonucleotide
ucauuguuacuuauuaagg

SEQ ID NO: 91297 - RNA, 19 nt, Artificial Sequence
  Description of Artificial Sequence: Synthetic oligonucleotide
ucauuguacagacugauug

SEQ ID NO: 91298 - RNA, 19 nt, Artificial Sequence
  Description of Artificial Sequence: Synthetic oligonucleotide
aaaccuaaaaggcagagaa

SEQ ID NO: 91299 - RNA, 19 nt, Artificial Sequence
  Description of Artificial Sequence: Synthetic oligonucleotide
aguaugggcauuuaucccc

SEQ ID NO: 91300 - RNA, 19 nt, Artificial Sequence
  Description of Artificial Sequence: Synthetic oligonucleotide
uguuucgacaccauugugg

SEQ ID NO: 91301 - RNA, 19 nt, Artificial Sequence
  Description of Artificial Sequence: Synthetic oligonucleotide
uauuagaccauuuacucca

SEQ ID NO: 91302 - RNA, 19 nt, Artificial Sequence
  Description of Artificial Sequence: Synthetic oligonucleotide
agcgguacugaauugauac

SEQ ID NO: 91303 - RNA, 19 nt, Artificial Sequence
  Description of Artificial Sequence: Synthetic oligonucleotide
auauuagaccauuuacucc

SEQ ID NO: 91304 - RNA, 19 nt, Artificial Sequence
  Description of Artificial Sequence: Synthetic oligonucleotide
uuauauauuaaguuacccu

SEQ ID NO: 91305 - RNA, 19 nt, Artificial Sequence
  Description of Artificial Sequence: Synthetic oligonucleotide
cuaaagggguuauugaucg

SEQ ID NO: 91306 - RNA, 19 nt, Artificial Sequence
  Description of Artificial Sequence: Synthetic oligonucleotide
uguacuacuauauaugcaa

SEQ ID NO: 91307 - RNA, 19 nt, Artificial Sequence
  Description of Artificial Sequence: Synthetic oligonucleotide
aaagaauaccacuuuguga

SEQ ID NO: 91308 - RNA, 19 nt, Artificial Sequence
  Description of Artificial Sequence: Synthetic oligonucleotide
ugaacuaugacuugacaug

SEQ ID NO: 91309 - RNA, 19 nt, Artificial Sequence
  Description of Artificial Sequence: Synthetic oligonucleotide
ugaugauaaaaucaacucu

SEQ ID NO: 91310 - RNA, 19 nt, Artificial Sequence
  Description of Artificial Sequence: Synthetic oligonucleotide
auagcaauggguguugucc

SEQ ID NO: 91311 - RNA, 19 nt, Artificial Sequence
  Description of Artificial Sequence: Synthetic oligonucleotide
uaaagaauaccacuuugug

SEQ ID NO: 91312 - RNA, 19 nt, Artificial Sequence
  Description of Artificial Sequence: Synthetic oligonucleotide
aacgaugacacugagccuc

SEQ ID NO: 91313 - RNA, 19 nt, Artificial Sequence
  Description of Artificial Sequence: Synthetic oligonucleotide
aacgaagaaaauacuauuc

SEQ ID NO: 91314 - RNA, 19 nt, Artificial Sequence
  Description of Artificial Sequence: Synthetic oligonucleotide
aauuauaccuggccaagug

SEQ ID NO: 91315 - RNA, 19 nt, Artificial Sequence
  Description of Artificial Sequence: Synthetic oligonucleotide
aaagauuagcuccagguua

SEQ ID NO: 91316 - RNA, 19 nt, Artificial Sequence
  Description of Artificial Sequence: Synthetic oligonucleotide
auugagucagauuuguuug

SEQ ID NO: 91317 - RNA, 19 nt, Artificial Sequence
  Description of Artificial Sequence: Synthetic oligonucleotide
caugauauaccacaggcac

SEQ ID NO: 91318 - RNA, 19 nt, Artificial Sequence
  Description of Artificial Sequence: Synthetic oligonucleotide
agcuacagcauuuugagga

SEQ ID NO: 91319 - RNA, 19 nt, Artificial Sequence
  Description of Artificial Sequence: Synthetic oligonucleotide
agcagucugagguuuauac

SEQ ID NO: 91320 - RNA, 19 nt, Artificial Sequence
  Description of Artificial Sequence: Synthetic oligonucleotide
uauauugugaucuguacua

SEQ ID NO: 91321 - RNA, 19 nt, Artificial Sequence
  Description of Artificial Sequence: Synthetic oligonucleotide
acauacuuucuccugacuc

SEQ ID NO: 91322 - RNA, 19 nt, Artificial Sequence
  Description of Artificial Sequence: Synthetic oligonucleotide
auacuuggaaaaugaagac

SEQ ID NO: 91323 - RNA, 19 nt, Artificial Sequence
  Description of Artificial Sequence: Synthetic oligonucleotide
acgugagccauccagaauc

SEQ ID NO: 91324 - RNA, 19 nt, Artificial Sequence
  Description of Artificial Sequence: Synthetic oligonucleotide
agagcuacagcauuuugag

SEQ ID NO: 91325 - RNA, 19 nt, Artificial Sequence
  Description of Artificial Sequence: Synthetic oligonucleotide
aaacuaggaguucuccacg

SEQ ID NO: 91326 - RNA, 19 nt, Artificial Sequence
  Description of Artificial Sequence: Synthetic oligonucleotide
uucucacucaccuagcacc

SEQ ID NO: 91327 - RNA, 19 nt, Artificial Sequence
  Description of Artificial Sequence: Synthetic oligonucleotide
guuuuaucaauacaaucug

SEQ ID NO: 91328 - RNA, 19 nt, Artificial Sequence
  Description of Artificial Sequence: Synthetic oligonucleotide
acacuuacuagguagugag

SEQ ID NO: 91329 - RNA, 19 nt, Artificial Sequence
  Description of Artificial Sequence: Synthetic oligonucleotide
acuuacuagguagugagac

SEQ ID NO: 91330 - RNA, 19 nt, Artificial Sequence
  Description of Artificial Sequence: Synthetic oligonucleotide
uaagaacuaaucaaaugaa

SEQ ID NO: 91331 - RNA, 19 nt, Artificial Sequence
  Description of Artificial Sequence: Synthetic oligonucleotide
aaucguauauccuaucaua

SEQ ID NO: 91332 - RNA, 19 nt, Artificial Sequence
  Description of Artificial Sequence: Synthetic oligonucleotide
auauauuaaguuacccugc

SEQ ID NO: 91333 - RNA, 19 nt, Artificial Sequence
  Description of Artificial Sequence: Synthetic oligonucleotide
agcaauuacuuguacuagg

SEQ ID NO: 91334 - RNA, 19 nt, Artificial Sequence
  Description of Artificial Sequence: Synthetic oligonucleotide
uauauuaaguuacccugca

SEQ ID NO: 91335 - RNA, 19 nt, Artificial Sequence
  Description of Artificial Sequence: Synthetic oligonucleotide
aauaucagauaucuauaau

SEQ ID NO: 91336 - RNA, 19 nt, Artificial Sequence
  Description of Artificial Sequence: Synthetic oligonucleotide
ugaagauuuaagaacuaau

SEQ ID NO: 91337 - RNA, 19 nt, Artificial Sequence
  Description of Artificial Sequence: Synthetic oligonucleotide
cugagguuuauacugaaug

SEQ ID NO: 91338 - RNA, 19 nt, Artificial Sequence
  Description of Artificial Sequence: Synthetic oligonucleotide
guaagcuuuacccuaaauc

SEQ ID NO: 91339 - RNA, 19 nt, Artificial Sequence
  Description of Artificial Sequence: Synthetic oligonucleotide
auuguuacuuauuaaggau

SEQ ID NO: 91340 - RNA, 19 nt, Artificial Sequence
  Description of Artificial Sequence: Synthetic oligonucleotide
cucaccuagcaccagaugc

SEQ ID NO: 91341 - RNA, 19 nt, Artificial Sequence
  Description of Artificial Sequence: Synthetic oligonucleotide
gaacuaugacuugacaugg

SEQ ID NO: 91342 - RNA, 19 nt, Artificial Sequence
  Description of Artificial Sequence: Synthetic oligonucleotide
acguaaucuuauuucaguc

SEQ ID NO: 91343 - RNA, 19 nt, Artificial Sequence
  Description of Artificial Sequence: Synthetic oligonucleotide
auaugcaauauguacuucu

SEQ ID NO: 91344 - RNA, 19 nt, Artificial Sequence
  Description of Artificial Sequence: Synthetic oligonucleotide
uuuugucgaaccauuguac

SEQ ID NO: 91345 - RNA, 19 nt, Artificial Sequence
  Description of Artificial Sequence: Synthetic oligonucleotide
ugagguuuauacugaauga

SEQ ID NO: 91346 - RNA, 19 nt, Artificial Sequence
  Description of Artificial Sequence: Synthetic oligonucleotide
uagguagugagacacuuac

SEQ ID NO: 91347 - RNA, 19 nt, Artificial Sequence
  Description of Artificial Sequence: Synthetic oligonucleotide
ucacccucgaacuacgugc

SEQ ID NO: 91348 - RNA, 19 nt, Artificial Sequence
  Description of Artificial Sequence: Synthetic oligonucleotide
ugcuucauuggauugagaa

SEQ ID NO: 91349 - RNA, 19 nt, Artificial Sequence
  Description of Artificial Sequence: Synthetic oligonucleotide
gaccuauguacacagauga

SEQ ID NO: 91350 - RNA, 19 nt, Artificial Sequence
  Description of Artificial Sequence: Synthetic oligonucleotide
uguauauugugaucuguac

SEQ ID NO: 91351 - RNA, 19 nt, Artificial Sequence
  Description of Artificial Sequence: Synthetic oligonucleotide
uuguccgucaucaauaauu

SEQ ID NO: 91352 - RNA, 19 nt, Artificial Sequence
  Description of Artificial Sequence: Synthetic oligonucleotide
ucauauauuagaccauuua

SEQ ID NO: 91353 - RNA, 19 nt, Artificial Sequence
  Description of Artificial Sequence: Synthetic oligonucleotide
uccaaauuguccgucauca

SEQ ID NO: 91354 - RNA, 19 nt, Artificial Sequence
  Description of Artificial Sequence: Synthetic oligonucleotide
ucauauaaagagaccuaug

SEQ ID NO: 91355 - RNA, 19 nt, Artificial Sequence
  Description of Artificial Sequence: Synthetic oligonucleotide
aauuucugccgccccgcgc

SEQ ID NO: 91356 - RNA, 19 nt, Artificial Sequence
  Description of Artificial Sequence: Synthetic oligonucleotide
ugacauggaccaccgauag

SEQ ID NO: 91357 - RNA, 19 nt, Artificial Sequence
  Description of Artificial Sequence: Synthetic oligonucleotide
accgauagucuuugguucc

SEQ ID NO: 91358 - RNA, 19 nt, Artificial Sequence
  Description of Artificial Sequence: Synthetic oligonucleotide
ucaugauauaccacaggca

SEQ ID NO: 91359 - RNA, 19 nt, Artificial Sequence
  Description of Artificial Sequence: Synthetic oligonucleotide
uaggcgacaaaauauuuuc

SEQ ID NO: 91360 - RNA, 19 nt, Artificial Sequence
  Description of Artificial Sequence: Synthetic oligonucleotide
gucagguauaauuuugcag

SEQ ID NO: 91361 - RNA, 19 nt, Artificial Sequence
  Description of Artificial Sequence: Synthetic oligonucleotide
aacuaugcuuauaaugaag

SEQ ID NO: 91362 - RNA, 19 nt, Artificial Sequence
  Description of Artificial Sequence: Synthetic oligonucleotide
uauaggcuuagauauccca

SEQ ID NO: 91363 - RNA, 19 nt, Artificial Sequence
  Description of Artificial Sequence: Synthetic oligonucleotide
uguugauaaguugccaucc

SEQ ID NO: 91364 - RNA, 19 nt, Artificial Sequence
  Description of Artificial Sequence: Synthetic oligonucleotide
uuacuagguagugagacac

SEQ ID NO: 91365 - RNA, 19 nt, Artificial Sequence
  Description of Artificial Sequence: Synthetic oligonucleotide
uuugccucuucgauauagg

SEQ ID NO: 91366 - RNA, 19 nt, Artificial Sequence
  Description of Artificial Sequence: Synthetic oligonucleotide
uuacggaacaaguuucaug

SEQ ID NO: 91367 - RNA, 19 nt, Artificial Sequence
  Description of Artificial Sequence: Synthetic oligonucleotide
uccuaucauauauuagacc

SEQ ID NO: 91368 - RNA, 19 nt, Artificial Sequence
  Description of Artificial Sequence: Synthetic oligonucleotide
uacgugcucacugagaucu

SEQ ID NO: 91369 - RNA, 19 nt, Artificial Sequence
  Description of Artificial Sequence: Synthetic oligonucleotide
uuacccuaaaucgagauuu

SEQ ID NO: 91370 - RNA, 19 nt, Artificial Sequence
  Description of Artificial Sequence: Synthetic oligonucleotide
ucgaacuacgugcucacug

SEQ ID NO: 91371 - RNA, 19 nt, Artificial Sequence
  Description of Artificial Sequence: Synthetic oligonucleotide
cugauugacaauuauaccu

SEQ ID NO: 91372 - RNA, 19 nt, Artificial Sequence
  Description of Artificial Sequence: Synthetic oligonucleotide
aagcucauagcaaugggug

SEQ ID NO: 91373 - RNA, 19 nt, Artificial Sequence
  Description of Artificial Sequence: Synthetic oligonucleotide
uuuagaauuucugccgccc

SEQ ID NO: 91374 - RNA, 19 nt, Artificial Sequence
  Description of Artificial Sequence: Synthetic oligonucleotide
uugauaaguugccauccca

SEQ ID NO: 91375 - RNA, 19 nt, Artificial Sequence
  Description of Artificial Sequence: Synthetic oligonucleotide
uaaaaccaucuuaagggaa

SEQ ID NO: 91376 - RNA, 19 nt, Artificial Sequence
  Description of Artificial Sequence: Synthetic oligonucleotide
cauuguuacuuauuaagga

SEQ ID NO: 91377 - RNA, 19 nt, Artificial Sequence
  Description of Artificial Sequence: Synthetic oligonucleotide
ugauauaccacaggcacaa

SEQ ID NO: 91378 - RNA, 19 nt, Artificial Sequence
  Description of Artificial Sequence: Synthetic oligonucleotide
uaugcaauauguacuucuc

SEQ ID NO: 91379 - RNA, 19 nt, Artificial Sequence
  Description of Artificial Sequence: Synthetic oligonucleotide
ccuaucauauauuagacca

SEQ ID NO: 91380 - RNA, 19 nt, Artificial Sequence
  Description of Artificial Sequence: Synthetic oligonucleotide
auaggcuuagauaucccac

SEQ ID NO: 91381 - RNA, 19 nt, Artificial Sequence
  Description of Artificial Sequence: Synthetic oligonucleotide
aauuguccgucaucaauaa

SEQ ID NO: 91382 - RNA, 19 nt, Artificial Sequence
  Description of Artificial Sequence: Synthetic oligonucleotide
cucagaauaaugcagacgu

SEQ ID NO: 91383 - RNA, 19 nt, Artificial Sequence
  Description of Artificial Sequence: Synthetic oligonucleotide
ugauaaguugccaucccau

SEQ ID NO: 91384 - RNA, 19 nt, Artificial Sequence
  Description of Artificial Sequence: Synthetic oligonucleotide
cucggcuuccaauacuugg

SEQ ID NO: 91385 - RNA, 19 nt, Artificial Sequence
  Description of Artificial Sequence: Synthetic oligonucleotide
auuauaccuggccaagugu

SEQ ID NO: 91386 - RNA, 19 nt, Artificial Sequence
  Description of Artificial Sequence: Synthetic oligonucleotide
uguucgggcauccaaucgu

SEQ ID NO: 91387 - RNA, 19 nt, Artificial Sequence
  Description of Artificial Sequence: Synthetic oligonucleotide
cagugcucaacgaugacac

SEQ ID NO: 91388 - RNA, 19 nt, Artificial Sequence
  Description of Artificial Sequence: Synthetic oligonucleotide
uuguauauugugaucugua

SEQ ID NO: 91389 - RNA, 19 nt, Artificial Sequence
  Description of Artificial Sequence: Synthetic oligonucleotide
acuacgugcucacugagau

SEQ ID NO: 91390 - RNA, 19 nt, Artificial Sequence
  Description of Artificial Sequence: Synthetic oligonucleotide
agaugagucucccacuugu

SEQ ID NO: 91391 - RNA, 19 nt, Artificial Sequence
  Description of Artificial Sequence: Synthetic oligonucleotide
uuaggcgacaaaauauuuu

SEQ ID NO: 91392 - RNA, 19 nt, Artificial Sequence
  Description of Artificial Sequence: Synthetic oligonucleotide
aaauuguccgucaucaaua

SEQ ID NO: 91393 - RNA, 19 nt, Artificial Sequence
  Description of Artificial Sequence: Synthetic oligonucleotide
ugcaggaacuguaaugaaa

SEQ ID NO: 91394 - RNA, 19 nt, Artificial Sequence
  Description of Artificial Sequence: Synthetic oligonucleotide
ucaccuagcaccagaugca

SEQ ID NO: 91395 - RNA, 19 nt, Artificial Sequence
  Description of Artificial Sequence: Synthetic oligonucleotide
gugagaucaugauauacca

SEQ ID NO: 91396 - RNA, 19 nt, Artificial Sequence
  Description of Artificial Sequence: Synthetic oligonucleotide
ucugaaguuacaguuuuau

SEQ ID NO: 91397 - RNA, 19 nt, Artificial Sequence
  Description of Artificial Sequence: Synthetic oligonucleotide
auauugugaucuguacuac

SEQ ID NO: 91398 - RNA, 19 nt, Artificial Sequence
  Description of Artificial Sequence: Synthetic oligonucleotide
uuauaggcuuagauauccc

SEQ ID NO: 91399 - RNA, 19 nt, Artificial Sequence
  Description of Artificial Sequence: Synthetic oligonucleotide
ugagaucaugauauaccac

SEQ ID NO: 91400 - RNA, 19 nt, Artificial Sequence
  Description of Artificial Sequence: Synthetic oligonucleotide
ugcaaagcucauagcaaug

SEQ ID NO: 91401 - RNA, 19 nt, Artificial Sequence
  Description of Artificial Sequence: Synthetic oligonucleotide
uguacuagguagugagaca

SEQ ID NO: 91402 - RNA, 19 nt, Artificial Sequence
  Description of Artificial Sequence: Synthetic oligonucleotide
cauauaaagagaccuaugu

SEQ ID NO: 91403 - RNA, 19 nt, Artificial Sequence
  Description of Artificial Sequence: Synthetic oligonucleotide
ggcgacaaaauauuuucag

SEQ ID NO: 91404 - RNA, 19 nt, Artificial Sequence
  Description of Artificial Sequence: Synthetic oligonucleotide
aggugagaucaugauauac

SEQ ID NO: 91405 - RNA, 19 nt, Artificial Sequence
  Description of Artificial Sequence: Synthetic oligonucleotide
uguccgucaucaauaauua

SEQ ID NO: 91406 - RNA, 19 nt, Artificial Sequence
  Description of Artificial Sequence: Synthetic oligonucleotide
ucuucucacucaccuagca

SEQ ID NO: 91407 - RNA, 19 nt, Artificial Sequence
  Description of Artificial Sequence: Synthetic oligonucleotide
uaacuaugcuuauaaugaa

SEQ ID NO: 91408 - RNA, 19 nt, Artificial Sequence
  Description of Artificial Sequence: Synthetic oligonucleotide
uaggcuuagauaucccacu

SEQ ID NO: 91409 - RNA, 19 nt, Artificial Sequence
  Description of Artificial Sequence: Synthetic oligonucleotide
uuugcuuuugucgaaccau

SEQ ID NO: 91410 - RNA, 19 nt, Artificial Sequence
  Description of Artificial Sequence: Synthetic oligonucleotide
agguuuacggaacaaguuu

SEQ ID NO: 91411 - RNA, 19 nt, Artificial Sequence
  Description of Artificial Sequence: Synthetic oligonucleotide
gccucuucgauauaggaug

SEQ ID NO: 91412 - RNA, 19 nt, Artificial Sequence
  Description of Artificial Sequence: Synthetic oligonucleotide
gugcacuacaaacuaggag

SEQ ID NO: 91413 - RNA, 19 nt, Artificial Sequence
  Description of Artificial Sequence: Synthetic oligonucleotide
cuaaaaccaucuuaaggga

SEQ ID NO: 91414 - RNA, 19 nt, Artificial Sequence
  Description of Artificial Sequence: Synthetic oligonucleotide
auuacuuguacuagguagu

SEQ ID NO: 91415 - RNA, 19 nt, Artificial Sequence
  Description of Artificial Sequence: Synthetic oligonucleotide
ugcuuuugucgaaccauug

SEQ ID NO: 91416 - RNA, 19 nt, Artificial Sequence
  Description of Artificial Sequence: Synthetic oligonucleotide
guacuagguagugagacac

SEQ ID NO: 91417 - RNA, 19 nt, Artificial Sequence
  Description of Artificial Sequence: Synthetic oligonucleotide
ggugagaucaugauauacc

SEQ ID NO: 91418 - RNA, 19 nt, Artificial Sequence
  Description of Artificial Sequence: Synthetic oligonucleotide
uaucauauauuagaccauu

SEQ ID NO: 91419 - RNA, 19 nt, Artificial Sequence
  Description of Artificial Sequence: Synthetic oligonucleotide
ucucacucaccuagcacca

SEQ ID NO: 91420 - RNA, 19 nt, Artificial Sequence
  Description of Artificial Sequence: Synthetic oligonucleotide
cuaucacccucgaacuacg

SEQ ID NO: 91421 - RNA, 19 nt, Artificial Sequence
  Description of Artificial Sequence: Synthetic oligonucleotide
ugucuacaaacagaccuug

SEQ ID NO: 91422 - RNA, 19 nt, Artificial Sequence
  Description of Artificial Sequence: Synthetic oligonucleotide
agaagcagugcucaacgau

SEQ ID NO: 91423 - RNA, 19 nt, Artificial Sequence
  Description of Artificial Sequence: Synthetic oligonucleotide
uugacauggaccaccgaua

SEQ ID NO: 91424 - RNA, 19 nt, Artificial Sequence
  Description of Artificial Sequence: Synthetic oligonucleotide
auauacaguaagaucuucu

SEQ ID NO: 91425 - RNA, 19 nt, Artificial Sequence
  Description of Artificial Sequence: Synthetic oligonucleotide
ucauaucaacucauauaaa

SEQ ID NO: 91426 - RNA, 19 nt, Artificial Sequence
  Description of Artificial Sequence: Synthetic oligonucleotide
auagaacaacuguauccug

SEQ ID NO: 91427 - RNA, 19 nt, Artificial Sequence
  Description of Artificial Sequence: Synthetic oligonucleotide
ucuugguaauugagacagg

SEQ ID NO: 91428 - RNA, 19 nt, Artificial Sequence
  Description of Artificial Sequence: Synthetic oligonucleotide
agucagauuuguuuguaua

SEQ ID NO: 91429 - RNA, 19 nt, Artificial Sequence
  Description of Artificial Sequence: Synthetic oligonucleotide
agcuuuacccuaaaucgag

SEQ ID NO: 91430 - RNA, 19 nt, Artificial Sequence
  Description of Artificial Sequence: Synthetic oligonucleotide
gaacaaguuucaugguuca

SEQ ID NO: 91431 - RNA, 19 nt, Artificial Sequence
  Description of Artificial Sequence: Synthetic oligonucleotide
auauuucuagacuguugga

SEQ ID NO: 91432 - RNA, 19 nt, Artificial Sequence
  Description of Artificial Sequence: Synthetic oligonucleotide
aaccuaaaaggcagagaag

SEQ ID NO: 91433 - RNA, 19 nt, Artificial Sequence
  Description of Artificial Sequence: Synthetic oligonucleotide
uuacuuguacuagguagug

SEQ ID NO: 91434 - RNA, 19 nt, Artificial Sequence
  Description of Artificial Sequence: Synthetic oligonucleotide
cagacguaaucuuauuuca

SEQ ID NO: 91435 - RNA, 19 nt, Artificial Sequence
  Description of Artificial Sequence: Synthetic oligonucleotide
aauguaagcuuuacccuaa

SEQ ID NO: 91436 - RNA, 19 nt, Artificial Sequence
  Description of Artificial Sequence: Synthetic oligonucleotide
uugucgaaccauuguacaa

SEQ ID NO: 91437 - RNA, 19 nt, Artificial Sequence
  Description of Artificial Sequence: Synthetic oligonucleotide
aaguagcgguacugaauug

SEQ ID NO: 91438 - RNA, 19 nt, Artificial Sequence
  Description of Artificial Sequence: Synthetic oligonucleotide
uguucucggcuuccaauac

SEQ ID NO: 91439 - RNA, 19 nt, Artificial Sequence
  Description of Artificial Sequence: Synthetic oligonucleotide
ugccucuucgauauaggau

SEQ ID NO: 91440 - RNA, 19 nt, Artificial Sequence
  Description of Artificial Sequence: Synthetic oligonucleotide
agacccucuaauguaagcu

SEQ ID NO: 91441 - RNA, 19 nt, Artificial Sequence
  Description of Artificial Sequence: Synthetic oligonucleotide
cauuguacagacugauuga

SEQ ID NO: 91442 - RNA, 19 nt, Artificial Sequence
  Description of Artificial Sequence: Synthetic oligonucleotide
aguagcgguacugaauuga

SEQ ID NO: 91443 - RNA, 19 nt, Artificial Sequence
  Description of Artificial Sequence: Synthetic oligonucleotide
cagccgacuaagccgagcg

SEQ ID NO: 91444 - RNA, 19 nt, Artificial Sequence
  Description of Artificial Sequence: Synthetic oligonucleotide
caccgauagucuuugguuc

SEQ ID NO: 91445 - RNA, 19 nt, Artificial Sequence
  Description of Artificial Sequence: Synthetic oligonucleotide
gaaguagcgguacugaauu

SEQ ID NO: 91446 - RNA, 19 nt, Artificial Sequence
  Description of Artificial Sequence: Synthetic oligonucleotide
ucguauauccuaucauaua

SEQ ID NO: 91447 - RNA, 19 nt, Artificial Sequence
  Description of Artificial Sequence: Synthetic oligonucleotide
cauccaaucguauauccua

SEQ ID NO: 91448 - RNA, 19 nt, Artificial Sequence
  Description of Artificial Sequence: Synthetic oligonucleotide
aggcuuagauaucccacug

SEQ ID NO: 91449 - RNA, 19 nt, Artificial Sequence
  Description of Artificial Sequence: Synthetic oligonucleotide
acuaagccgagcguccgcg

SEQ ID NO: 91450 - RNA, 19 nt, Artificial Sequence
  Description of Artificial Sequence: Synthetic oligonucleotide
ucugagguuuauacugaau

SEQ ID NO: 91451 - RNA, 19 nt, Artificial Sequence
  Description of Artificial Sequence: Synthetic oligonucleotide
cacgcauugagucagauuu

SEQ ID NO: 91452 - RNA, 19 nt, Artificial Sequence
  Description of Artificial Sequence: Synthetic oligonucleotide
cuaauguaagcuuuacccu

SEQ ID NO: 91453 - RNA, 19 nt, Artificial Sequence
  Description of Artificial Sequence: Synthetic oligonucleotide
cuuuugucgaaccauugua

SEQ ID NO: 91454 - RNA, 19 nt, Artificial Sequence
  Description of Artificial Sequence: Synthetic oligonucleotide
gauaaguugccaucccaua

SEQ ID NO: 91455 - RNA, 19 nt, Artificial Sequence
  Description of Artificial Sequence: Synthetic oligonucleotide
uucuaacuaugcuuauaau

SEQ ID NO: 91456 - RNA, 19 nt, Artificial Sequence
  Description of Artificial Sequence: Synthetic oligonucleotide
aucguauauccuaucauau

SEQ ID NO: 91457 - RNA, 19 nt, Artificial Sequence
  Description of Artificial Sequence: Synthetic oligonucleotide
cuguucgggcauccaaucg

SEQ ID NO: 91458 - RNA, 19 nt, Artificial Sequence
  Description of Artificial Sequence: Synthetic oligonucleotide
auauguugauaaguugcca

SEQ ID NO: 91459 - RNA, 19 nt, Artificial Sequence
  Description of Artificial Sequence: Synthetic oligonucleotide
ggggauuuaacucugugua

SEQ ID NO: 91460 - RNA, 19 nt, Artificial Sequence
  Description of Artificial Sequence: Synthetic oligonucleotide
ggcauccaaucguauaucc

SEQ ID NO: 91461 - RNA, 19 nt, Artificial Sequence
  Description of Artificial Sequence: Synthetic oligonucleotide
uugcuuuugucgaaccauu

SEQ ID NO: 91462 - RNA, 19 nt, Artificial Sequence
  Description of Artificial Sequence: Synthetic oligonucleotide
cuucucacucaccuagcac

SEQ ID NO: 91463 - RNA, 19 nt, Artificial Sequence
  Description of Artificial Sequence: Synthetic oligonucleotide
cuuaaagaagcgauaguau

SEQ ID NO: 91464 - RNA, 19 nt, Artificial Sequence
  Description of Artificial Sequence: Synthetic oligonucleotide
gacacuuacuagguaguga

SEQ ID NO: 91465 - RNA, 19 nt, Artificial Sequence
  Description of Artificial Sequence: Synthetic oligonucleotide
ggcaaugauucuaaaacca

SEQ ID NO: 91466 - RNA, 19 nt, Artificial Sequence
  Description of Artificial Sequence: Synthetic oligonucleotide
cagacccucuaauguaagc

SEQ ID NO: 91467 - RNA, 19 nt, Artificial Sequence
  Description of Artificial Sequence: Synthetic oligonucleotide
caauauuauaggcuuagau

SEQ ID NO: 91468 - RNA, 19 nt, Artificial Sequence
  Description of Artificial Sequence: Synthetic oligonucleotide
agaccuauguacacagaug

SEQ ID NO: 91469 - RNA, 19 nt, Artificial Sequence
  Description of Artificial Sequence: Synthetic oligonucleotide
cuguacuacuauauaugca

SEQ ID NO: 91470 - RNA, 19 nt, Artificial Sequence
  Description of Artificial Sequence: Synthetic oligonucleotide
gccgcagccgacuaagccg

SEQ ID NO: 91471 - RNA, 19 nt, Artificial Sequence
  Description of Artificial Sequence: Synthetic oligonucleotide
uacuagguagugagacacu

SEQ ID NO: 91472 - RNA, 19 nt, Artificial Sequence
  Description of Artificial Sequence: Synthetic oligonucleotide
acaugcauuuauauacagu

SEQ ID NO: 91473 - RNA, 19 nt, Artificial Sequence
  Description of Artificial Sequence: Synthetic oligonucleotide
gcuuucucagaauaaugca

SEQ ID NO: 91474 - RNA, 19 nt, Artificial Sequence
  Description of Artificial Sequence: Synthetic oligonucleotide
uacuuguacuagguaguga

SEQ ID NO: 91475 - RNA, 19 nt, Artificial Sequence
  Description of Artificial Sequence: Synthetic oligonucleotide
uggaccaccgauagucuuu

SEQ ID NO: 91476 - RNA, 19 nt, Artificial Sequence
  Description of Artificial Sequence: Synthetic oligonucleotide
agguauaauuuugcaguca

SEQ ID NO: 91477 - RNA, 19 nt, Artificial Sequence
  Description of Artificial Sequence: Synthetic oligonucleotide
gguuuacggaacaaguuuc

SEQ ID NO: 91478 - RNA, 19 nt, Artificial Sequence
  Description of Artificial Sequence: Synthetic oligonucleotide
acuagguagugagacacua

SEQ ID NO: 91479 - RNA, 19 nt, Artificial Sequence
  Description of Artificial Sequence: Synthetic oligonucleotide
acuagguagugagacacuu

SEQ ID NO: 91480 - RNA, 19 nt, Artificial Sequence
  Description of Artificial Sequence: Synthetic oligonucleotide
aacuacgugcucacugaga

SEQ ID NO: 91481 - RNA, 19 nt, Artificial Sequence
  Description of Artificial Sequence: Synthetic oligonucleotide
agacacuuacuagguagug

SEQ ID NO: 91482 - RNA, 19 nt, Artificial Sequence
  Description of Artificial Sequence: Synthetic oligonucleotide
uggaauauauuuggcuguu

SEQ ID NO: 91483 - RNA, 19 nt, Artificial Sequence
  Description of Artificial Sequence: Synthetic oligonucleotide
gcuuagauaucccacugaa

SEQ ID NO: 91484 - RNA, 19 nt, Artificial Sequence
  Description of Artificial Sequence: Synthetic oligonucleotide
ugagucagauuuguuugua

SEQ ID NO: 91485 - RNA, 19 nt, Artificial Sequence
  Description of Artificial Sequence: Synthetic oligonucleotide
cagugggagauacuuuauc

SEQ ID NO: 91486 - RNA, 19 nt, Artificial Sequence
  Description of Artificial Sequence: Synthetic oligonucleotide
augauauaccacaggcaca

SEQ ID NO: 91487 - RNA, 19 nt, Artificial Sequence
  Description of Artificial Sequence: Synthetic oligonucleotide
agacugauugacaauuaua

SEQ ID NO: 91488 - RNA, 19 nt, Artificial Sequence
  Description of Artificial Sequence: Synthetic oligonucleotide
ugggccgcagccgacuaag

SEQ ID NO: 91489 - RNA, 19 nt, Artificial Sequence
  Description of Artificial Sequence: Synthetic oligonucleotide
uaccuggccaaguguaaau

SEQ ID NO: 91490 - RNA, 19 nt, Artificial Sequence
  Description of Artificial Sequence: Synthetic oligonucleotide
gacuaagccgagcguccgc

SEQ ID NO: 91491 - RNA, 19 nt, Artificial Sequence
  Description of Artificial Sequence: Synthetic oligonucleotide
guguuucgacaccauugug

SEQ ID NO: 91492 - RNA, 19 nt, Artificial Sequence
  Description of Artificial Sequence: Synthetic oligonucleotide
guacaaagauuagcuccag

SEQ ID NO: 91493 - RNA, 19 nt, Artificial Sequence
  Description of Artificial Sequence: Synthetic oligonucleotide
uaucacccucgaacuacgu

SEQ ID NO: 91494 - RNA, 19 nt, Artificial Sequence
  Description of Artificial Sequence: Synthetic oligonucleotide
caaauuguccgucaucaau

SEQ ID NO: 91495 - RNA, 19 nt, Artificial Sequence
  Description of Artificial Sequence: Synthetic oligonucleotide
ccucuucgauauaggaugg

SEQ ID NO: 91496 - RNA, 19 nt, Artificial Sequence
  Description of Artificial Sequence: Synthetic oligonucleotide
acggaacaaguuucauggu

SEQ ID NO: 91497 - RNA, 19 nt, Artificial Sequence
  Description of Artificial Sequence: Synthetic oligonucleotide
uacccuaaaucgagauuuu

SEQ ID NO: 91498 - RNA, 19 nt, Artificial Sequence
  Description of Artificial Sequence: Synthetic oligonucleotide
caucuacauggauaucaga

SEQ ID NO: 91499 - RNA, 19 nt, Artificial Sequence
  Description of Artificial Sequence: Synthetic oligonucleotide
uagcgguacugaauugaua

SEQ ID NO: 91500 - RNA, 19 nt, Artificial Sequence
  Description of Artificial Sequence: Synthetic oligonucleotide
guguucucggcuuccaaua

SEQ ID NO: 91501 - RNA, 19 nt, Artificial Sequence
  Description of Artificial Sequence: Synthetic oligonucleotide
auuguccgucaucaauaau

SEQ ID NO: 91502 - RNA, 19 nt, Artificial Sequence
  Description of Artificial Sequence: Synthetic oligonucleotide
gguuguagaugagucuccc

SEQ ID NO: 91503 - RNA, 19 nt, Artificial Sequence
  Description of Artificial Sequence: Synthetic oligonucleotide
cuuuacccuaaaucgagau

SEQ ID NO: 91504 - RNA, 19 nt, Artificial Sequence
  Description of Artificial Sequence: Synthetic oligonucleotide
agugcucaacgaugacacu

SEQ ID NO: 91505 - RNA, 19 nt, Artificial Sequence
  Description of Artificial Sequence: Synthetic oligonucleotide
cuaagccgagcguccgcgc

SEQ ID NO: 91506 - RNA, 19 nt, Artificial Sequence
  Description of Artificial Sequence: Synthetic oligonucleotide
cucauauaaagagaccuau

SEQ ID NO: 91507 - RNA, 19 nt, Artificial Sequence
  Description of Artificial Sequence: Synthetic oligonucleotide
gcgucgagagccugggccg

SEQ ID NO: 91508 - RNA, 19 nt, Artificial Sequence
  Description of Artificial Sequence: Synthetic oligonucleotide
aggcgacaaaauauuuuca

SEQ ID NO: 91509 - RNA, 19 nt, Artificial Sequence
  Description of Artificial Sequence: Synthetic oligonucleotide
ccaaucguauauccuauca

SEQ ID NO: 91510 - RNA, 19 nt, Artificial Sequence
  Description of Artificial Sequence: Synthetic oligonucleotide
auggaccaccgauagucuu

SEQ ID NO: 91511 - RNA, 19 nt, Artificial Sequence
  Description of Artificial Sequence: Synthetic oligonucleotide
cuaucauauauuagaccau

SEQ ID NO: 91512 - RNA, 19 nt, Artificial Sequence
  Description of Artificial Sequence: Synthetic oligonucleotide
agacugcauagaacaacug

SEQ ID NO: 91513 - RNA, 19 nt, Artificial Sequence
  Description of Artificial Sequence: Synthetic oligonucleotide
caacuguauccugguaaug

SEQ ID NO: 91514 - RNA, 19 nt, Artificial Sequence
  Description of Artificial Sequence: Synthetic oligonucleotide
cugaauugauacuccucua

SEQ ID NO: 91515 - RNA, 19 nt, Artificial Sequence
  Description of Artificial Sequence: Synthetic oligonucleotide
gacccucuaauguaagcuu

SEQ ID NO: 91516 - RNA, 19 nt, Artificial Sequence
  Description of Artificial Sequence: Synthetic oligonucleotide
caaucguauauccuaucau

SEQ ID NO: 91517 - RNA, 19 nt, Artificial Sequence
  Description of Artificial Sequence: Synthetic oligonucleotide
acgaugcccaacauccagu

SEQ ID NO: 91518 - RNA, 19 nt, Artificial Sequence
  Description of Artificial Sequence: Synthetic oligonucleotide
agcaauggguguuguccua

SEQ ID NO: 91519 - RNA, 19 nt, Artificial Sequence
  Description of Artificial Sequence: Synthetic oligonucleotide
cacuuacuagguagugaga

SEQ ID NO: 91520 - RNA, 19 nt, Artificial Sequence
  Description of Artificial Sequence: Synthetic oligonucleotide
cacuacaaacuaggaguuc

SEQ ID NO: 91521 - RNA, 19 nt, Artificial Sequence
  Description of Artificial Sequence: Synthetic oligonucleotide
cuagguagugagacacuua

SEQ ID NO: 91522 - RNA, 19 nt, Artificial Sequence
  Description of Artificial Sequence: Synthetic oligonucleotide
ggcuuagauaucccacuga

SEQ ID NO: 91523 - RNA, 19 nt, Artificial Sequence
  Description of Artificial Sequence: Synthetic oligonucleotide
cuuagauaucccacugaau

SEQ ID NO: 91524 - RNA, 19 nt, Artificial Sequence
  Description of Artificial Sequence: Synthetic oligonucleotide
acccucgaacuacgugcuc

SEQ ID NO: 91525 - RNA, 19 nt, Artificial Sequence
  Description of Artificial Sequence: Synthetic oligonucleotide
cugguaauggcuugaugau

SEQ ID NO: 91526 - RNA, 19 nt, Artificial Sequence
  Description of Artificial Sequence: Synthetic oligonucleotide
acgcauugagucagauuug

SEQ ID NO: 91527 - RNA, 19 nt, Artificial Sequence
  Description of Artificial Sequence: Synthetic oligonucleotide
ggccgcagccgacuaagcc

SEQ ID NO: 91528 - RNA, 19 nt, Artificial Sequence
  Description of Artificial Sequence: Synthetic oligonucleotide
caccauuguggauuccaaa

SEQ ID NO: 91529 - RNA, 19 nt, Artificial Sequence
  Description of Artificial Sequence: Synthetic oligonucleotide
acccucuaauguaagcuuu

SEQ ID NO: 91530 - RNA, 19 nt, Artificial Sequence
  Description of Artificial Sequence: Synthetic oligonucleotide
agccgacuaagccgagcgu

SEQ ID NO: 91531 - RNA, 19 nt, Artificial Sequence
  Description of Artificial Sequence: Synthetic oligonucleotide
cacccucugaaguagcggu

SEQ ID NO: 91532 - RNA, 19 nt, Artificial Sequence
  Description of Artificial Sequence: Synthetic oligonucleotide
gcucaacgaugacacugag

SEQ ID NO: 91533 - RNA, 19 nt, Artificial Sequence
  Description of Artificial Sequence: Synthetic oligonucleotide
uccuagaucugagguccau

SEQ ID NO: 91534 - RNA, 19 nt, Artificial Sequence
  Description of Artificial Sequence: Synthetic oligonucleotide
gcuuuugucgaaccauugu

SEQ ID NO: 91535 - RNA, 19 nt, Artificial Sequence
  Description of Artificial Sequence: Synthetic oligonucleotide
cgcgucgagagccugggcc

SEQ ID NO: 91536 - RNA, 19 nt, Artificial Sequence
  Description of Artificial Sequence: Synthetic oligonucleotide
ggaccaccgauagucuuug

SEQ ID NO: 91537 - RNA, 19 nt, Artificial Sequence
  Description of Artificial Sequence: Synthetic oligonucleotide
guacuacuauauaugcaau

SEQ ID NO: 91538 - RNA, 19 nt, Artificial Sequence
  Description of Artificial Sequence: Synthetic oligonucleotide
gacauggaccaccgauagu

SEQ ID NO: 91539 - RNA, 19 nt, Artificial Sequence
  Description of Artificial Sequence: Synthetic oligonucleotide
gccgacuaagccgagcguc

SEQ ID NO: 91540 - RNA, 19 nt, Artificial Sequence
  Description of Artificial Sequence: Synthetic oligonucleotide
agcacgcauugagucagau

SEQ ID NO: 91541 - RNA, 19 nt, Artificial Sequence
  Description of Artificial Sequence: Synthetic oligonucleotide
ggagauacuuuaucaucau

SEQ ID NO: 91542 - RNA, 19 nt, Artificial Sequence
  Description of Artificial Sequence: Synthetic oligonucleotide
cauggaccaccgauagucu

SEQ ID NO: 91543 - RNA, 19 nt, Artificial Sequence
  Description of Artificial Sequence: Synthetic oligonucleotide
acuucucacuaaacauuuu

SEQ ID NO: 91544 - RNA, 19 nt, Artificial Sequence
  Description of Artificial Sequence: Synthetic oligonucleotide
cgauaguauuuuccuguac

SEQ ID NO: 91545 - RNA, 19 nt, Artificial Sequence
  Description of Artificial Sequence: Synthetic oligonucleotide
uuccauggucagguauaau

SEQ ID NO: 91546 - RNA, 19 nt, Artificial Sequence
  Description of Artificial Sequence: Synthetic oligonucleotide
cgaacuacgugcucacuga

SEQ ID NO: 91547 - RNA, 19 nt, Artificial Sequence
  Description of Artificial Sequence: Synthetic oligonucleotide
guucgggcauccaaucgua

SEQ ID NO: 91548 - RNA, 19 nt, Artificial Sequence
  Description of Artificial Sequence: Synthetic oligonucleotide
gcgauaguauuuuccugua

SEQ ID NO: 91549 - RNA, 19 nt, Artificial Sequence
  Description of Artificial Sequence: Synthetic oligonucleotide
gcuuuacccuaaaucgaga

SEQ ID NO: 91550 - RNA, 19 nt, Artificial Sequence
  Description of Artificial Sequence: Synthetic oligonucleotide
caggugagaucaugauaua

SEQ ID NO: 91551 - RNA, 19 nt, Artificial Sequence
  Description of Artificial Sequence: Synthetic oligonucleotide
cacccucgaacuacgugcu

SEQ ID NO: 91552 - RNA, 19 nt, Artificial Sequence
  Description of Artificial Sequence: Synthetic oligonucleotide
caacucuaucacccucgaa

SEQ ID NO: 91553 - RNA, 19 nt, Artificial Sequence
  Description of Artificial Sequence: Synthetic oligonucleotide
caacgaugacacugagccu

SEQ ID NO: 91554 - RNA, 19 nt, Artificial Sequence
  Description of Artificial Sequence: Synthetic oligonucleotide
gggcauccaaucguauauc

SEQ ID NO: 91555 - RNA, 19 nt, Artificial Sequence
  Description of Artificial Sequence: Synthetic oligonucleotide
ggcuuuuagugcagucaca

SEQ ID NO: 91556 - RNA, 19 nt, Artificial Sequence
  Description of Artificial Sequence: Synthetic oligonucleotide
guccgucaucaauaauuau

SEQ ID NO: 91557 - RNA, 19 nt, Artificial Sequence
  Description of Artificial Sequence: Synthetic oligonucleotide
ccgcagccgacuaagccga

SEQ ID NO: 91558 - RNA, 19 nt, Artificial Sequence
  Description of Artificial Sequence: Synthetic oligonucleotide
gcagccgacuaagccgagc

SEQ ID NO: 91559 - RNA, 19 nt, Artificial Sequence
  Description of Artificial Sequence: Synthetic oligonucleotide
guccuagaucugaggucca

SEQ ID NO: 91560 - RNA, 19 nt, Artificial Sequence
  Description of Artificial Sequence: Synthetic oligonucleotide
cgacuaagccgagcguccg

SEQ ID NO: 91561 - RNA, 19 nt, Artificial Sequence
  Description of Artificial Sequence: Synthetic oligonucleotide
gaccaaucccuuagcuuuu

SEQ ID NO: 91562 - RNA, 19 nt, Artificial Sequence
  Description of Artificial Sequence: Synthetic oligonucleotide
gcacuacaaacuaggaguu

SEQ ID NO: 91563 - RNA, 19 nt, Artificial Sequence
  Description of Artificial Sequence: Synthetic oligonucleotide
caccagaugcaaggacuua

SEQ ID NO: 91564 - RNA, 19 nt, Artificial Sequence
  Description of Artificial Sequence: Synthetic oligonucleotide
cucgaacuacgugcucacu

SEQ ID NO: 91565 - RNA, 19 nt, Artificial Sequence
  Description of Artificial Sequence: Synthetic oligonucleotide
ggguuucuaagcaggucuu

SEQ ID NO: 91566 - RNA, 19 nt, Artificial Sequence
  Description of Artificial Sequence: Synthetic oligonucleotide
gcacgcauugagucagauu

SEQ ID NO: 91567 - RNA, 19 nt, Artificial Sequence
  Description of Artificial Sequence: Synthetic oligonucleotide
ccauacccacauucuggcu

SEQ ID NO: 91568 - RNA, 19 nt, Artificial Sequence
  Description of Artificial Sequence: Synthetic oligonucleotide
ccgcgucgagagccugggc

SEQ ID NO: 91569 - RNA, 19 nt, Artificial Sequence
  Description of Artificial Sequence: Synthetic oligonucleotide
  modified_base (8)..(8): a, c, u, g, unknown or other
aagagaanaaaagagagag

SEQ ID NO: 91570 - RNA, 19 nt, Artificial Sequence
  Description of Artificial Sequence: Synthetic oligonucleotide
aauuggaacucuucggucc

SEQ ID NO: 91571 - RNA, 19 nt, Artificial Sequence
  Description of Artificial Sequence: Synthetic oligonucleotide
agaacgauaacccaagcac

SEQ ID NO: 91572 - RNA, 19 nt, Artificial Sequence
  Description of Artificial Sequence: Synthetic oligonucleotide
acaacuacgauccacagga

SEQ ID NO: 91573 - RNA, 19 nt, Artificial Sequence
  Description of Artificial Sequence: Synthetic oligonucleotide
  modified_base (3)..(3): a, c, u, g, unknown or other
aanaaaagagagaggaggg

SEQ ID NO: 91574 - RNA, 19 nt, Artificial Sequence
  Description of Artificial Sequence: Synthetic oligonucleotide
uaugugauuacauucauau

SEQ ID NO: 91575 - RNA, 19 nt, Artificial Sequence
  Description of Artificial Sequence: Synthetic oligonucleotide
agugauuuaagucaacucu

SEQ ID NO: 91576 - RNA, 19 nt, Artificial Sequence
  Description of Artificial Sequence: Synthetic oligonucleotide
uaauggugauaaaauaccg

SEQ ID NO: 91577 - RNA, 19 nt, Artificial Sequence
  Description of Artificial Sequence: Synthetic oligonucleotide
uuucuaguaaguuggcucg

SEQ ID NO: 91578 - RNA, 19 nt, Artificial Sequence
  Description of Artificial Sequence: Synthetic oligonucleotide
uggacauugagaaaggcca

SEQ ID NO: 91579 - RNA, 19 nt, Artificial Sequence
  Description of Artificial Sequence: Synthetic oligonucleotide
gauuucgggagauagacug

SEQ ID NO: 91580 - RNA, 19 nt, Artificial Sequence
  Description of Artificial Sequence: Synthetic oligonucleotide
uucauugaguucaacuugg

SEQ ID NO: 91581 - RNA, 19 nt, Artificial Sequence
  Description of Artificial Sequence: Synthetic oligonucleotide
  modified_base (6)..(6): a, c, u, g, unknown or other
gagaanaaaagagagagga

SEQ ID NO: 91582 - RNA, 19 nt, Artificial Sequence
  Description of Artificial Sequence: Synthetic oligonucleotide
uccuccacaacuacgaucc

SEQ ID NO: 91583 - RNA, 19 nt, Artificial Sequence
  Description of Artificial Sequence: Synthetic oligonucleotide
uucugagcgagauuuauag

SEQ ID NO: 91584 - RNA, 19 nt, Artificial Sequence
  Description of Artificial Sequence: Synthetic oligonucleotide
aauuugggaugucuuaaag

SEQ ID NO: 91585 - RNA, 19 nt, Artificial Sequence
  Description of Artificial Sequence: Synthetic oligonucleotide
uugugauauauaauuuggg

SEQ ID NO: 91586 - RNA, 19 nt, Artificial Sequence
  Description of Artificial Sequence: Synthetic oligonucleotide
auacauagaaguauggccg

SEQ ID NO: 91587 - RNA, 19 nt, Artificial Sequence
  Description of Artificial Sequence: Synthetic oligonucleotide
uaauucaacaauccugggc

SEQ ID NO: 91588 - RNA, 19 nt, Artificial Sequence
  Description of Artificial Sequence: Synthetic oligonucleotide
aaaauaccgagacaguuau

SEQ ID NO: 91589 - RNA, 19 nt, Artificial Sequence
  Description of Artificial Sequence: Synthetic oligonucleotide
aauaagguaacugccacca

SEQ ID NO: 91590 - RNA, 19 nt, Artificial Sequence
  Description of Artificial Sequence: Synthetic oligonucleotide
uuaggcugauuucaguacg

SEQ ID NO: 91591 - RNA, 19 nt, Artificial Sequence
  Description of Artificial Sequence: Synthetic oligonucleotide
ucuagaacgauaacccaag

SEQ ID NO: 91592 - RNA, 19 nt, Artificial Sequence
  Description of Artificial Sequence: Synthetic oligonucleotide
ugcuaucucacuauuuuag

SEQ ID NO: 91593 - RNA, 19 nt, Artificial Sequence
  Description of Artificial Sequence: Synthetic oligonucleotide
ucauagcaaagcaugaaca

SEQ ID NO: 91594 - RNA, 19 nt, Artificial Sequence
  Description of Artificial Sequence: Synthetic oligonucleotide
auugugauauauaauuugg

SEQ ID NO: 91595 - RNA, 19 nt, Artificial Sequence
  Description of Artificial Sequence: Synthetic oligonucleotide
auucucuacccauuaauuc

SEQ ID NO: 91596 - RNA, 19 nt, Artificial Sequence
  Description of Artificial Sequence: Synthetic oligonucleotide
agugaaaguuuacagcauc

SEQ ID NO: 91597 - RNA, 19 nt, Artificial Sequence
  Description of Artificial Sequence: Synthetic oligonucleotide
uuucaguacggucugugag

SEQ ID NO: 91598 - RNA, 19 nt, Artificial Sequence
  Description of Artificial Sequence: Synthetic oligonucleotide
uucucuacccauuaauuca

SEQ ID NO: 91599 - RNA, 19 nt, Artificial Sequence
  Description of Artificial Sequence: Synthetic oligonucleotide
augauuucgggagauagac

SEQ ID NO: 91600 - RNA, 19 nt, Artificial Sequence
  Description of Artificial Sequence: Synthetic oligonucleotide
uauuacucuauaaaugcau

SEQ ID NO: 91601 - RNA, 19 nt, Artificial Sequence
  Description of Artificial Sequence: Synthetic oligonucleotide
uuguaaauuggaagcauga

SEQ ID NO: 91602 - RNA, 19 nt, Artificial Sequence
  Description of Artificial Sequence: Synthetic oligonucleotide
aucucacuauuuuagagug

SEQ ID NO: 91603 - RNA, 19 nt, Artificial Sequence
  Description of Artificial Sequence: Synthetic oligonucleotide
uccuuaauuccauauuuca

SEQ ID NO: 91604 - RNA, 19 nt, Artificial Sequence
  Description of Artificial Sequence: Synthetic oligonucleotide
aagcuuaccaccuccgugu

SEQ ID NO: 91605 - RNA, 19 nt, Artificial Sequence
  Description of Artificial Sequence: Synthetic oligonucleotide
aggaauuggaacucuucgg

SEQ ID NO: 91606 - RNA, 19 nt, Artificial Sequence
  Description of Artificial Sequence: Synthetic oligonucleotide
cuaucucacuauuuuagag

SEQ ID NO: 91607 - RNA, 19 nt, Artificial Sequence
  Description of Artificial Sequence: Synthetic oligonucleotide
ucugcuucgauguauggaa

SEQ ID NO: 91608 - RNA, 19 nt, Artificial Sequence
  Description of Artificial Sequence: Synthetic oligonucleotide
ugacaacccagccucagag

SEQ ID NO: 91609 - RNA, 19 nt, Artificial Sequence
  Description of Artificial Sequence: Synthetic oligonucleotide
ucgggagauagacugagug

SEQ ID NO: 91610 - RNA, 19 nt, Artificial Sequence
  Description of Artificial Sequence: Synthetic oligonucleotide
cuuccgaaggaauaggaug

SEQ ID NO: 91611 - RNA, 19 nt, Artificial Sequence
  Description of Artificial Sequence: Synthetic oligonucleotide
uucucccucgcguagaaag

SEQ ID NO: 91612 - RNA, 19 nt, Artificial Sequence
  Description of Artificial Sequence: Synthetic oligonucleotide
aauggggagcgauuucuag

SEQ ID NO: 91613 - RNA, 19 nt, Artificial Sequence
  Description of Artificial Sequence: Synthetic oligonucleotide
agcgauuucuaguaaguug

SEQ ID NO: 91614 - RNA, 19 nt, Artificial Sequence
  Description of Artificial Sequence: Synthetic oligonucleotide
uagaacgauaacccaagca

SEQ ID NO: 91615 - RNA, 19 nt, Artificial Sequence
  Description of Artificial Sequence: Synthetic oligonucleotide
augucguccacuucccacc

SEQ ID NO: 91616 - RNA, 19 nt, Artificial Sequence
  Description of Artificial Sequence: Synthetic oligonucleotide
acgcacuccaacaauaggc

SEQ ID NO: 91617 - RNA, 19 nt, Artificial Sequence
  Description of Artificial Sequence: Synthetic oligonucleotide
gacgaauaccacuccaugc

SEQ ID NO: 91618 - RNA, 19 nt, Artificial Sequence
  Description of Artificial Sequence: Synthetic oligonucleotide
  modified_base (9)..(9): a, c, u, g, unknown or other
aaagagaanaaaagagaga

SEQ ID NO: 91619 - RNA, 19 nt, Artificial Sequence
  Description of Artificial Sequence: Synthetic oligonucleotide
uguaccucccggcaaaugu

SEQ ID NO: 91620 - RNA, 19 nt, Artificial Sequence
  Description of Artificial Sequence: Synthetic oligonucleotide
caggaauuggaacucuucg

SEQ ID NO: 91621 - RNA, 19 nt, Artificial Sequence
  Description of Artificial Sequence: Synthetic oligonucleotide
ugacacaagacgcacucca

SEQ ID NO: 91622 - RNA, 19 nt, Artificial Sequence
  Description of Artificial Sequence: Synthetic oligonucleotide
ggagauaucgcacaccacc

SEQ ID NO: 91623 - RNA, 19 nt, Artificial Sequence
  Description of Artificial Sequence: Synthetic oligonucleotide
cuucguguaccuaucaaug

SEQ ID NO: 91624 - RNA, 19 nt, Artificial Sequence
  Description of Artificial Sequence: Synthetic oligonucleotide
uugauucccacccaguaau

SEQ ID NO: 91625 - RNA, 19 nt, Artificial Sequence
  Description of Artificial Sequence: Synthetic oligonucleotide
ucuucuuauuacucuauaa

SEQ ID NO: 91626 - RNA, 19 nt, Artificial Sequence
  Description of Artificial Sequence: Synthetic oligonucleotide
  modified_base (7)..(7): a, c, u, g, unknown or other
agagaanaaaagagagagg

SEQ ID NO: 91627 - RNA, 19 nt, Artificial Sequence
  Description of Artificial Sequence: Synthetic oligonucleotide
uuuggcucucacaucaaac

SEQ ID NO: 91628 - RNA, 19 nt, Artificial Sequence
  Description of Artificial Sequence: Synthetic oligonucleotide
augaagaaaagugcgcuuc

SEQ ID NO: 91629 - RNA, 19 nt, Artificial Sequence
  Description of Artificial Sequence: Synthetic oligonucleotide
agaugugaugucuguuggc

SEQ ID NO: 91630 - RNA, 19 nt, Artificial Sequence
  Description of Artificial Sequence: Synthetic oligonucleotide
acgaauaccacuccaugcu

SEQ ID NO: 91631 - RNA, 19 nt, Artificial Sequence
  Description of Artificial Sequence: Synthetic oligonucleotide
agugacuauguccacccag

SEQ ID NO: 91632 - RNA, 19 nt, Artificial Sequence
  Description of Artificial Sequence: Synthetic oligonucleotide
acauaugaaaucucuucgu

SEQ ID NO: 91633 - RNA, 19 nt, Artificial Sequence
  Description of Artificial Sequence: Synthetic oligonucleotide
gagauaucgcacaccaccg

SEQ ID NO: 91634 - RNA, 19 nt, Artificial Sequence
  Description of Artificial Sequence: Synthetic oligonucleotide
ucgauguauggaaauucug

SEQ ID NO: 91635 - RNA, 19 nt, Artificial Sequence
  Description of Artificial Sequence: Synthetic oligonucleotide
guaacaaggggacgaauac

SEQ ID NO: 91636 - RNA, 19 nt, Artificial Sequence
  Description of Artificial Sequence: Synthetic oligonucleotide
gauuaaccagccuuacuca

SEQ ID NO: 91637 - RNA, 19 nt, Artificial Sequence
  Description of Artificial Sequence: Synthetic oligonucleotide
aauucugacacaagacgca

SEQ ID NO: 91638 - RNA, 19 nt, Artificial Sequence
  Description of Artificial Sequence: Synthetic oligonucleotide
gcgauuucuaguaaguugg

SEQ ID NO: 91639 - RNA, 19 nt, Artificial Sequence
  Description of Artificial Sequence: Synthetic oligonucleotide
auaaauggggagcgauuuc

SEQ ID NO: 91640 - RNA, 19 nt, Artificial Sequence
  Description of Artificial Sequence: Synthetic oligonucleotide
aagcccguaguccuggaca

SEQ ID NO: 91641 - RNA, 19 nt, Artificial Sequence
  Description of Artificial Sequence: Synthetic oligonucleotide
aacuacgauccacaggaau

SEQ ID NO: 91642 - RNA, 19 nt, Artificial Sequence
  Description of Artificial Sequence: Synthetic oligonucleotide
acaauguggacgcccgcac

SEQ ID NO: 91643 - RNA, 19 nt, Artificial Sequence
  Description of Artificial Sequence: Synthetic oligonucleotide
ucaguagugccagcaauag

SEQ ID NO: 91644 - RNA, 19 nt, Artificial Sequence
  Description of Artificial Sequence: Synthetic oligonucleotide
uguaauuggcuguggcagc

SEQ ID NO: 91645 - RNA, 19 nt, Artificial Sequence
  Description of Artificial Sequence: Synthetic oligonucleotide
  modified_base (5)..(5): a, c, u, g, unknown or other
agaanaaaagagagaggag

SEQ ID NO: 91646 - RNA, 19 nt, Artificial Sequence
  Description of Artificial Sequence: Synthetic oligonucleotide
agacucacaauccuccaca

SEQ ID NO: 91647 - RNA, 19 nt, Artificial Sequence
  Description of Artificial Sequence: Synthetic oligonucleotide
acacuugccauuuuggcua

SEQ ID NO: 91648 - RNA, 19 nt, Artificial Sequence
  Description of Artificial Sequence: Synthetic oligonucleotide
gagugauuuaagucaacuc

SEQ ID NO: 91649 - RNA, 19 nt, Artificial Sequence
  Description of Artificial Sequence: Synthetic oligonucleotide
aggagcgguguuaucaucc

SEQ ID NO: 91650 - RNA, 19 nt, Artificial Sequence
  Description of Artificial Sequence: Synthetic oligonucleotide
uucaguacggucugugagu

SEQ ID NO: 91651 - RNA, 19 nt, Artificial Sequence
  Description of Artificial Sequence: Synthetic oligonucleotide
uuuaguacuucugcugcug

SEQ ID NO: 91652 - RNA, 19 nt, Artificial Sequence
  Description of Artificial Sequence: Synthetic oligonucleotide
uaccuaucaaugucugaag

SEQ ID NO: 91653 - RNA, 19 nt, Artificial Sequence
  Description of Artificial Sequence: Synthetic oligonucleotide
ugcuauugugaugaggcca

SEQ ID NO: 91654 - RNA, 19 nt, Artificial Sequence
  Description of Artificial Sequence: Synthetic oligonucleotide
ugucaugaaagcaguuccu

SEQ ID NO: 91655 - RNA, 19 nt, Artificial Sequence
  Description of Artificial Sequence: Synthetic oligonucleotide
ucguguaccuaucaauguc

SEQ ID NO: 91656 - RNA, 19 nt, Artificial Sequence
  Description of Artificial Sequence: Synthetic oligonucleotide
uaugucguccacuucccac

SEQ ID NO: 91657 - RNA, 19 nt, Artificial Sequence
  Description of Artificial Sequence: Synthetic oligonucleotide
agauaugcucaaaugaaga

SEQ ID NO: 91658 - RNA, 19 nt, Artificial Sequence
  Description of Artificial Sequence: Synthetic oligonucleotide
agcugauaaauggggagcg

SEQ ID NO: 91659 - RNA, 19 nt, Artificial Sequence
  Description of Artificial Sequence: Synthetic oligonucleotide
agccucagagcauuuaaca

SEQ ID NO: 91660 - RNA, 19 nt, Artificial Sequence
  Description of Artificial Sequence: Synthetic oligonucleotide
gacgcacuccaacaauagg

SEQ ID NO: 91661 - RNA, 19 nt, Artificial Sequence
  Description of Artificial Sequence: Synthetic oligonucleotide
uccagauuaaccagccuua

SEQ ID NO: 91662 - RNA, 19 nt, Artificial Sequence
  Description of Artificial Sequence: Synthetic oligonucleotide
guauuauuuggaaggggag

SEQ ID NO: 91663 - RNA, 19 nt, Artificial Sequence
  Description of Artificial Sequence: Synthetic oligonucleotide
uuucgggagauagacugag

SEQ ID NO: 91664 - RNA, 19 nt, Artificial Sequence
  Description of Artificial Sequence: Synthetic oligonucleotide
cucacgagcuguuucccgg

SEQ ID NO: 91665 - RNA, 19 nt, Artificial Sequence
  Description of Artificial Sequence: Synthetic oligonucleotide
aaaugcucgagggcucugg

SEQ ID NO: 91666 - RNA, 19 nt, Artificial Sequence
  Description of Artificial Sequence: Synthetic oligonucleotide
uucguguaccuaucaaugu

SEQ ID NO: 91667 - RNA, 19 nt, Artificial Sequence
  Description of Artificial Sequence: Synthetic oligonucleotide
uguccuaugcuuguuggcu

SEQ ID NO: 91668 - RNA, 19 nt, Artificial Sequence
  Description of Artificial Sequence: Synthetic oligonucleotide
acaacucagguaguuccgc

SEQ ID NO: 91669 - RNA, 19 nt, Artificial Sequence
  Description of Artificial Sequence: Synthetic oligonucleotide
accacucacgagcuguuuc

SEQ ID NO: 91670 - RNA, 19 nt, Artificial Sequence
  Description of Artificial Sequence: Synthetic oligonucleotide
ucugagcgagauuuauagc

SEQ ID NO: 91671 - RNA, 19 nt, Artificial Sequence
  Description of Artificial Sequence: Synthetic oligonucleotide
aaacuuuguggccguuuca

SEQ ID NO: 91672 - RNA, 19 nt, Artificial Sequence
  Description of Artificial Sequence: Synthetic oligonucleotide
agagcauuuaacagugcag

SEQ ID NO: 91673 - RNA, 19 nt, Artificial Sequence
  Description of Artificial Sequence: Synthetic oligonucleotide
uggcugucgauuuacuggu

SEQ ID NO: 91674 - RNA, 19 nt, Artificial Sequence
  Description of Artificial Sequence: Synthetic oligonucleotide
uuuguggccguuucaaguu

SEQ ID NO: 91675 - RNA, 19 nt, Artificial Sequence
  Description of Artificial Sequence: Synthetic oligonucleotide
uccuuaaaggaacuucauu

SEQ ID NO: 91676 - RNA, 19 nt, Artificial Sequence
  Description of Artificial Sequence: Synthetic oligonucleotide
caauccuccacaacuacga

SEQ ID NO: 91677 - RNA, 19 nt, Artificial Sequence
  Description of Artificial Sequence: Synthetic oligonucleotide
acucacaauccuccacaac

SEQ ID NO: 91678 - RNA, 19 nt, Artificial Sequence
  Description of Artificial Sequence: Synthetic oligonucleotide
caaguuguggaccuugaca

SEQ ID NO: 91679 - RNA, 19 nt, Artificial Sequence
  Description of Artificial Sequence: Synthetic oligonucleotide
augugauuacauucauaug

SEQ ID NO: 91680 - RNA, 19 nt, Artificial Sequence
  Description of Artificial Sequence: Synthetic oligonucleotide
uguaaauuggaagcaugau

SEQ ID NO: 91681 - RNA, 19 nt, Artificial Sequence
  Description of Artificial Sequence: Synthetic oligonucleotide
guaguuccgcacuucauuc

SEQ ID NO: 91682 - RNA, 19 nt, Artificial Sequence
  Description of Artificial Sequence: Synthetic oligonucleotide
aacgauaacccaagcacaa

SEQ ID NO: 91683 - RNA, 19 nt, Artificial Sequence
  Description of Artificial Sequence: Synthetic oligonucleotide
gauaugucguccacuuccc

SEQ ID NO: 91684 - RNA, 19 nt, Artificial Sequence
  Description of Artificial Sequence: Synthetic oligonucleotide
cccauuaauucaacaaucc

SEQ ID NO: 91685 - RNA, 19 nt, Artificial Sequence
  Description of Artificial Sequence: Synthetic oligonucleotide
ucugccgacuuaacuguca

SEQ ID NO: 91686 - RNA, 19 nt, Artificial Sequence
  Description of Artificial Sequence: Synthetic oligonucleotide
gauagacugagugucugca

SEQ ID NO: 91687 - RNA, 19 nt, Artificial Sequence
  Description of Artificial Sequence: Synthetic oligonucleotide
gaucaugucaauaggucaa

SEQ ID NO: 91688 - RNA, 19 nt, Artificial Sequence
  Description of Artificial Sequence: Synthetic oligonucleotide
ugauaaauggggagcgauu

SEQ ID NO: 91689 - RNA, 19 nt, Artificial Sequence
  Description of Artificial Sequence: Synthetic oligonucleotide
gccuugucaccauaggugg

SEQ ID NO: 91690 - RNA, 19 nt, Artificial Sequence
  Description of Artificial Sequence: Synthetic oligonucleotide
uuaucuuacuccugugauu

SEQ ID NO: 91691 - RNA, 19 nt, Artificial Sequence
  Description of Artificial Sequence: Synthetic oligonucleotide
ugauuucgggagauagacu

SEQ ID NO: 91692 - RNA, 19 nt, Artificial Sequence
  Description of Artificial Sequence: Synthetic oligonucleotide
uuuuggcucuuacucaguu

SEQ ID NO: 91693 - RNA, 19 nt, Artificial Sequence
  Description of Artificial Sequence: Synthetic oligonucleotide
gaacgauaacccaagcaca

SEQ ID NO: 91694 - RNA, 19 nt, Artificial Sequence
  Description of Artificial Sequence: Synthetic oligonucleotide
cuucgauguauggaaauuc

SEQ ID NO: 91695 - RNA, 19 nt, Artificial Sequence
  Description of Artificial Sequence: Synthetic oligonucleotide
ggugacagcgucuagcgca

SEQ ID NO: 91696 - RNA, 19 nt, Artificial Sequence
  Description of Artificial Sequence: Synthetic oligonucleotide
aaugcucgagggcucugga

SEQ ID NO: 91697 - RNA, 19 nt, Artificial Sequence
  Description of Artificial Sequence: Synthetic oligonucleotide
gaggacauaacugcucuuc

SEQ ID NO: 91698 - RNA, 19 nt, Artificial Sequence
  Description of Artificial Sequence: Synthetic oligonucleotide
cacagaucggccugagccc

SEQ ID NO: 91699 - RNA, 19 nt, Artificial Sequence
  Description of Artificial Sequence: Synthetic oligonucleotide
guaccuaucaaugucugaa

SEQ ID NO: 91700 - RNA, 19 nt, Artificial Sequence
  Description of Artificial Sequence: Synthetic oligonucleotide
ugcgucguuguguugucca

SEQ ID NO: 91701 - RNA, 19 nt, Artificial Sequence
  Description of Artificial Sequence: Synthetic oligonucleotide
acucacgagcuguuucccg

SEQ ID NO: 91702 - RNA, 19 nt, Artificial Sequence
  Description of Artificial Sequence: Synthetic oligonucleotide
aucgguaacaaggggacga

SEQ ID NO: 91703 - RNA, 19 nt, Artificial Sequence
  Description of Artificial Sequence: Synthetic oligonucleotide
uuauagcccauuucauaau

SEQ ID NO: 91704 - RNA, 19 nt, Artificial Sequence
  Description of Artificial Sequence: Synthetic oligonucleotide
cugucgauuuacuggucag

SEQ ID NO: 91705 - RNA, 19 nt, Artificial Sequence
  Description of Artificial Sequence: Synthetic oligonucleotide
auaucgcacaccaccgugg

SEQ ID NO: 91706 - RNA, 19 nt, Artificial Sequence
  Description of Artificial Sequence: Synthetic oligonucleotide
acaagacgcacuccaacaa

SEQ ID NO: 91707 - RNA, 19 nt, Artificial Sequence
  Description of Artificial Sequence: Synthetic oligonucleotide
cuaagcccagucccuaccc

SEQ ID NO: 91708 - RNA, 19 nt, Artificial Sequence
  Description of Artificial Sequence: Synthetic oligonucleotide
agcgauaugucguccacuu

SEQ ID NO: 91709 - RNA, 19 nt, Artificial Sequence
  Description of Artificial Sequence: Synthetic oligonucleotide
cuauaaaugcaugcagcuc

SEQ ID NO: 91710 - RNA, 19 nt, Artificial Sequence
  Description of Artificial Sequence: Synthetic oligonucleotide
ugcgacgugaaaucauguc

SEQ ID NO: 91711 - RNA, 19 nt, Artificial Sequence
  Description of Artificial Sequence: Synthetic oligonucleotide
cuagaacgauaacccaagc

SEQ ID NO: 91712 - RNA, 19 nt, Artificial Sequence
  Description of Artificial Sequence: Synthetic oligonucleotide
ucgauuuacuggucagacu

SEQ ID NO: 91713 - RNA, 19 nt, Artificial Sequence
  Description of Artificial Sequence: Synthetic oligonucleotide
cagagcauuuaacagugca

SEQ ID NO: 91714 - RNA, 19 nt, Artificial Sequence
  Description of Artificial Sequence: Synthetic oligonucleotide
uguggccguuucaaguucu

SEQ ID NO: 91715 - RNA, 19 nt, Artificial Sequence
  Description of Artificial Sequence: Synthetic oligonucleotide
uacgauccacaggaauugg

SEQ ID NO: 91716 - RNA, 19 nt, Artificial Sequence
  Description of Artificial Sequence: Synthetic oligonucleotide
ugaguuguucugagcgaga

SEQ ID NO: 91717 - RNA, 19 nt, Artificial Sequence
  Description of Artificial Sequence: Synthetic oligonucleotide
gucgauuuacuggucagac

SEQ ID NO: 91718 - RNA, 19 nt, Artificial Sequence
  Description of Artificial Sequence: Synthetic oligonucleotide
acagaucggccugagcccg

SEQ ID NO: 91719 - RNA, 19 nt, Artificial Sequence
  Description of Artificial Sequence: Synthetic oligonucleotide
uuggcucguucguggaggg

SEQ ID NO: 91720 - RNA, 19 nt, Artificial Sequence
  Description of Artificial Sequence: Synthetic oligonucleotide
guaauuggcuguggcagcc

SEQ ID NO: 91721 - RNA, 19 nt, Artificial Sequence
  Description of Artificial Sequence: Synthetic oligonucleotide
cgauaugucguccacuucc

SEQ ID NO: 91722 - RNA, 19 nt, Artificial Sequence
  Description of Artificial Sequence: Synthetic oligonucleotide
gacgugaaaucaugucaac

SEQ ID NO: 91723 - RNA, 19 nt, Artificial Sequence
  Description of Artificial Sequence: Synthetic oligonucleotide
cacaagacgcacuccaaca

SEQ ID NO: 91724 - RNA, 19 nt, Artificial Sequence
  Description of Artificial Sequence: Synthetic oligonucleotide
uauggccgcaugaaagcau

SEQ ID NO: 91725 - RNA, 19 nt, Artificial Sequence
  Description of Artificial Sequence: Synthetic oligonucleotide
ggagggaguacagauguag

SEQ ID NO: 91726 - RNA, 19 nt, Artificial Sequence
  Description of Artificial Sequence: Synthetic oligonucleotide
ugcuucgauguauggaaau

SEQ ID NO: 91727 - RNA, 19 nt, Artificial Sequence
  Description of Artificial Sequence: Synthetic oligonucleotide
acuacgauccacaggaauu

SEQ ID NO: 91728 - RNA, 19 nt, Artificial Sequence
  Description of Artificial Sequence: Synthetic oligonucleotide
uggagcgauaugucgucca

SEQ ID NO: 91729 - RNA, 19 nt, Artificial Sequence
  Description of Artificial Sequence: Synthetic oligonucleotide
ucgcacaccaccguggauc

SEQ ID NO: 91730 - RNA, 19 nt, Artificial Sequence
  Description of Artificial Sequence: Synthetic oligonucleotide
acagcgucuagcgcacagc

SEQ ID NO: 91731 - RNA, 19 nt, Artificial Sequence
  Description of Artificial Sequence: Synthetic oligonucleotide
cugagcccgagucacacuc

SEQ ID NO: 91732 - RNA, 19 nt, Artificial Sequence
  Description of Artificial Sequence: Synthetic oligonucleotide
uaguuccgcacuucauuca

SEQ ID NO: 91733 - RNA, 19 nt, Artificial Sequence
  Description of Artificial Sequence: Synthetic oligonucleotide
cauggagcgauaugucguc

SEQ ID NO: 91734 - RNA, 19 nt, Artificial Sequence
  Description of Artificial Sequence: Synthetic oligonucleotide
uuugcgcacagcgucugug

SEQ ID NO: 91735 - RNA, 19 nt, Artificial Sequence
  Description of Artificial Sequence: Synthetic oligonucleotide
cagcgucuagcgcacagcc

SEQ ID NO: 91736 - RNA, 19 nt, Artificial Sequence
  Description of Artificial Sequence: Synthetic oligonucleotide
ugucgauuuacuggucaga

SEQ ID NO: 91737 - RNA, 19 nt, Artificial Sequence
  Description of Artificial Sequence: Synthetic oligonucleotide
auaguagacaauggcuccu

SEQ ID NO: 91738 - RNA, 19 nt, Artificial Sequence
  Description of Artificial Sequence: Synthetic oligonucleotide
uccuaugcuuguuggcugu

SEQ ID NO: 91739 - RNA, 19 nt, Artificial Sequence
  Description of Artificial Sequence: Synthetic oligonucleotide
acgugaaaucaugucaacu

SEQ ID NO: 91740 - RNA, 19 nt, Artificial Sequence
  Description of Artificial Sequence: Synthetic oligonucleotide
uagagugauuuaagucaac

SEQ ID NO: 91741 - RNA, 19 nt, Artificial Sequence
  Description of Artificial Sequence: Synthetic oligonucleotide
acuuguaaauuggaagcau

SEQ ID NO: 91742 - RNA, 19 nt, Artificial Sequence
  Description of Artificial Sequence: Synthetic oligonucleotide
cacaauccuccacaacuac

SEQ ID NO: 91743 - RNA, 19 nt, Artificial Sequence
  Description of Artificial Sequence: Synthetic oligonucleotide
ccccauaccuggcagaucc

SEQ ID NO: 91744 - RNA, 19 nt, Artificial Sequence
  Description of Artificial Sequence: Synthetic oligonucleotide
aguuggcucguucguggag

SEQ ID NO: 91745 - RNA, 19 nt, Artificial Sequence
  Description of Artificial Sequence: Synthetic oligonucleotide
auggagcgauaugucgucc

SEQ ID NO: 91746 - RNA, 19 nt, Artificial Sequence
  Description of Artificial Sequence: Synthetic oligonucleotide
uuuggcucuuacucaguua

SEQ ID NO: 91747 - RNA, 19 nt, Artificial Sequence
  Description of Artificial Sequence: Synthetic oligonucleotide
uguuggcugucgauuuacu

SEQ ID NO: 91748 - RNA, 19 nt, Artificial Sequence
  Description of Artificial Sequence: Synthetic oligonucleotide
ucccucgcguagaaagcag

SEQ ID NO: 91749 - RNA, 19 nt, Artificial Sequence
  Description of Artificial Sequence: Synthetic oligonucleotide
caugauuucgggagauaga

SEQ ID NO: 91750 - RNA, 19 nt, Artificial Sequence
  Description of Artificial Sequence: Synthetic oligonucleotide
guccuaugcuuguuggcug

SEQ ID NO: 91751 - RNA, 19 nt, Artificial Sequence
  Description of Artificial Sequence: Synthetic oligonucleotide
gggagcgauuucuaguaag

SEQ ID NO: 91752 - RNA, 19 nt, Artificial Sequence
  Description of Artificial Sequence: Synthetic oligonucleotide
cuaugcuuguuggcugucg

SEQ ID NO: 91753 - RNA, 19 nt, Artificial Sequence
  Description of Artificial Sequence: Synthetic oligonucleotide
uuucccgguuucagggucu

SEQ ID NO: 91754 - RNA, 19 nt, Artificial Sequence
  Description of Artificial Sequence: Synthetic oligonucleotide
aagacgcacuccaacaaua

SEQ ID NO: 91755 - RNA, 19 nt, Artificial Sequence
  Description of Artificial Sequence: Synthetic oligonucleotide
ucucaagcccguaguccug

SEQ ID NO: 91756 - RNA, 19 nt, Artificial Sequence
  Description of Artificial Sequence: Synthetic oligonucleotide
ggauuggugaaggagcgug

SEQ ID NO: 91757 - RNA, 19 nt, Artificial Sequence
  Description of Artificial Sequence: Synthetic oligonucleotide
gggagauagacugaguguc

SEQ ID NO: 91758 - RNA, 19 nt, Artificial Sequence
  Description of Artificial Sequence: Synthetic oligonucleotide
uggaucaauuuaguacuuc

SEQ ID NO: 91759 - RNA, 19 nt, Artificial Sequence
  Description of Artificial Sequence: Synthetic oligonucleotide
ggacgaauaccacuccaug

SEQ ID NO: 91760 - RNA, 19 nt, Artificial Sequence
  Description of Artificial Sequence: Synthetic oligonucleotide
gugagugacuauguccacc

SEQ ID NO: 91761 - RNA, 19 nt, Artificial Sequence
  Description of Artificial Sequence: Synthetic oligonucleotide
gcgucuagcgcacagccgc

SEQ ID NO: 91762 - RNA, 19 nt, Artificial Sequence
  Description of Artificial Sequence: Synthetic oligonucleotide
gcgacgugaaaucauguca

SEQ ID NO: 91763 - RNA, 19 nt, Artificial Sequence
  Description of Artificial Sequence: Synthetic oligonucleotide
ucccggcaaaugucaaugc

SEQ ID NO: 91764 - RNA, 19 nt, Artificial Sequence
  Description of Artificial Sequence: Synthetic oligonucleotide
agacgcacuccaacaauag

SEQ ID NO: 91765 - RNA, 19 nt, Artificial Sequence
  Description of Artificial Sequence: Synthetic oligonucleotide
ggcucucacaucaaacucc

SEQ ID NO: 91766 - RNA, 19 nt, Artificial Sequence
  Description of Artificial Sequence: Synthetic oligonucleotide
ccaccguggaucaauuuag

SEQ ID NO: 91767 - RNA, 19 nt, Artificial Sequence
  Description of Artificial Sequence: Synthetic oligonucleotide
ggaauuggaacucuucggu

SEQ ID NO: 91768 - RNA, 19 nt, Artificial Sequence
  Description of Artificial Sequence: Synthetic oligonucleotide
agcauggggaaaugcucga

SEQ ID NO: 91769 - RNA, 19 nt, Artificial Sequence
  Description of Artificial Sequence: Synthetic oligonucleotide
cuuuguggccguuucaagu

SEQ ID NO: 91770 - RNA, 19 nt, Artificial Sequence
  Description of Artificial Sequence: Synthetic oligonucleotide
gacuuaacugucacuaggu

SEQ ID NO: 91771 - RNA, 19 nt, Artificial Sequence
  Description of Artificial Sequence: Synthetic oligonucleotide
gagucacacucuaagccca

SEQ ID NO: 91772 - RNA, 19 nt, Artificial Sequence
  Description of Artificial Sequence: Synthetic oligonucleotide
auaccgagacaguuauaaa

SEQ ID NO: 91773 - RNA, 19 nt, Artificial Sequence
  Description of Artificial Sequence: Synthetic oligonucleotide
caacaacaugauuucggga

SEQ ID NO: 91774 - RNA, 19 nt, Artificial Sequence
  Description of Artificial Sequence: Synthetic oligonucleotide
ccgugcaccacucacgagc

SEQ ID NO: 91775 - RNA, 19 nt, Artificial Sequence
  Description of Artificial Sequence: Synthetic oligonucleotide
uccguguaauuggcugugg

SEQ ID NO: 91776 - RNA, 19 nt, Artificial Sequence
  Description of Artificial Sequence: Synthetic oligonucleotide
cuagcgcacagccgcuucc

SEQ ID NO: 91777 - RNA, 19 nt, Artificial Sequence
  Description of Artificial Sequence: Synthetic oligonucleotide
accguggaucaauuuagua

SEQ ID NO: 91778 - RNA, 19 nt, Artificial Sequence
  Description of Artificial Sequence: Synthetic oligonucleotide
agauccgugcgucguugug

SEQ ID NO: 91779 - RNA, 19 nt, Artificial Sequence
  Description of Artificial Sequence: Synthetic oligonucleotide
uucgggagauagacugagu

SEQ ID NO: 91780 - RNA, 19 nt, Artificial Sequence
  Description of Artificial Sequence: Synthetic oligonucleotide
cgacuuaacugucacuagg

SEQ ID NO: 91781 - RNA, 19 nt, Artificial Sequence
  Description of Artificial Sequence: Synthetic oligonucleotide
guaacugccaccacuugua

SEQ ID NO: 91782 - RNA, 19 nt, Artificial Sequence
  Description of Artificial Sequence: Synthetic oligonucleotide
cacuuguaaauuggaagca

SEQ ID NO: 91783 - RNA, 19 nt, Artificial Sequence
  Description of Artificial Sequence: Synthetic oligonucleotide
gcuaucucacuauuuuaga

SEQ ID NO: 91784 - RNA, 19 nt, Artificial Sequence
  Description of Artificial Sequence: Synthetic oligonucleotide
ggcgaaucaguagugccag

SEQ ID NO: 91785 - RNA, 19 nt, Artificial Sequence
  Description of Artificial Sequence: Synthetic oligonucleotide
ggaucgguaacaaggggac

SEQ ID NO: 91786 - RNA, 19 nt, Artificial Sequence
  Description of Artificial Sequence: Synthetic oligonucleotide
ugauucccacccaguaaua

SEQ ID NO: 91787 - RNA, 19 nt, Artificial Sequence
  Description of Artificial Sequence: Synthetic oligonucleotide
uuuugcgcacagcgucugu

SEQ ID NO: 91788 - RNA, 19 nt, Artificial Sequence
  Description of Artificial Sequence: Synthetic oligonucleotide
ccggcaaaugucaaugcug

SEQ ID NO: 91789 - RNA, 19 nt, Artificial Sequence
  Description of Artificial Sequence: Synthetic oligonucleotide
cugccgacuuaacugucac

SEQ ID NO: 91790 - RNA, 19 nt, Artificial Sequence
  Description of Artificial Sequence: Synthetic oligonucleotide
ucacgagcuguuucccggu

SEQ ID NO: 91791 - RNA, 19 nt, Artificial Sequence
  Description of Artificial Sequence: Synthetic oligonucleotide
ugaugucuguuggcgaauc

SEQ ID NO: 91792 - RNA, 19 nt, Artificial Sequence
  Description of Artificial Sequence: Synthetic oligonucleotide
agugcagucuagaacgaua

SEQ ID NO: 91793 - RNA, 19 nt, Artificial Sequence
  Description of Artificial Sequence: Synthetic oligonucleotide
auagccuucuggagauauc

SEQ ID NO: 91794 - RNA, 19 nt, Artificial Sequence
  Description of Artificial Sequence: Synthetic oligonucleotide
aggcaauuacuuccugcaa

SEQ ID NO: 91795 - RNA, 19 nt, Artificial Sequence
  Description of Artificial Sequence: Synthetic oligonucleotide
cagucccuacccuaggaga

SEQ ID NO: 91796 - RNA, 19 nt, Artificial Sequence
  Description of Artificial Sequence: Synthetic oligonucleotide
gcccgagucacacucuaag

SEQ ID NO: 91797 - RNA, 19 nt, Artificial Sequence
  Description of Artificial Sequence: Synthetic oligonucleotide
auggccgcaugaaagcaug

SEQ ID NO: 91798 - RNA, 19 nt, Artificial Sequence
  Description of Artificial Sequence: Synthetic oligonucleotide
ggucgcaggaucaagaagu

SEQ ID NO: 91799 - RNA, 19 nt, Artificial Sequence
  Description of Artificial Sequence: Synthetic oligonucleotide
ggugcgacgugaaaucaug

SEQ ID NO: 91800 - RNA, 19 nt, Artificial Sequence
  Description of Artificial Sequence: Synthetic oligonucleotide
uucugccgacuuaacuguc

SEQ ID NO: 91801 - RNA, 19 nt, Artificial Sequence
  Description of Artificial Sequence: Synthetic oligonucleotide
cgauguauggaaauucuga

SEQ ID NO: 91802 - RNA, 19 nt, Artificial Sequence
  Description of Artificial Sequence: Synthetic oligonucleotide
uugcacucaucagcugcag

SEQ ID NO: 91803 - RNA, 19 nt, Artificial Sequence
  Description of Artificial Sequence: Synthetic oligonucleotide
uaacugcucuucaggcaau

SEQ ID NO: 91804 - RNA, 19 nt, Artificial Sequence
  Description of Artificial Sequence: Synthetic oligonucleotide
aguguggggcuccaaucuu

SEQ ID NO: 91805 - RNA, 19 nt, Artificial Sequence
  Description of Artificial Sequence: Synthetic oligonucleotide
cuucugccgacuuaacugu

SEQ ID NO: 91806 - RNA, 19 nt, Artificial Sequence
  Description of Artificial Sequence: Synthetic oligonucleotide
aagcccuuuucgucuucau

SEQ ID NO: 91807 - RNA, 19 nt, Artificial Sequence
  Description of Artificial Sequence: Synthetic oligonucleotide
gacgcccgcacugggcugg

SEQ ID NO: 91808 - RNA, 19 nt, Artificial Sequence
  Description of Artificial Sequence: Synthetic oligonucleotide
aucuauuugcaugcugaua

SEQ ID NO: 91809 - RNA, 19 nt, Artificial Sequence
  Description of Artificial Sequence: Synthetic oligonucleotide
gugcagucuagaacgauaa

SEQ ID NO: 91810 - RNA, 19 nt, Artificial Sequence
  Description of Artificial Sequence: Synthetic oligonucleotide
ggaauaggaugagauguga

SEQ ID NO: 91811 - RNA, 19 nt, Artificial Sequence
  Description of Artificial Sequence: Synthetic oligonucleotide
gcugucgauuuacugguca

SEQ ID NO: 91812 - RNA, 19 nt, Artificial Sequence
  Description of Artificial Sequence: Synthetic oligonucleotide
ugccgacuuaacugucacu

SEQ ID NO: 91813 - RNA, 19 nt, Artificial Sequence
  Description of Artificial Sequence: Synthetic oligonucleotide
agucccuacccuaggagaa

SEQ ID NO: 91814 - RNA, 19 nt, Artificial Sequence
  Description of Artificial Sequence: Synthetic oligonucleotide
uggcucuuacucaguuaaa

SEQ ID NO: 91815 - RNA, 19 nt, Artificial Sequence
  Description of Artificial Sequence: Synthetic oligonucleotide
cuguccuacucgguccugc

SEQ ID NO: 91816 - RNA, 19 nt, Artificial Sequence
  Description of Artificial Sequence: Synthetic oligonucleotide
gucaauaggucaaaugcuu

SEQ ID NO: 91817 - RNA, 19 nt, Artificial Sequence
  Description of Artificial Sequence: Synthetic oligonucleotide
cuccguguaauuggcugug

SEQ ID NO: 91818 - RNA, 19 nt, Artificial Sequence
  Description of Artificial Sequence: Synthetic oligonucleotide
agcgucuagcgcacagccg

SEQ ID NO: 91819 - RNA, 19 nt, Artificial Sequence
  Description of Artificial Sequence: Synthetic oligonucleotide
auccgugcgucguuguguu

SEQ ID NO: 91820 - RNA, 19 nt, Artificial Sequence
  Description of Artificial Sequence: Synthetic oligonucleotide
gguaacugccaccacuugu

SEQ ID NO: 91821 - RNA, 19 nt, Artificial Sequence
  Description of Artificial Sequence: Synthetic oligonucleotide
gauggcaaggcggcuucca

SEQ ID NO: 91822 - RNA, 19 nt, Artificial Sequence
  Description of Artificial Sequence: Synthetic oligonucleotide
cccgagucacacucuaagc

SEQ ID NO: 91823 - RNA, 19 nt, Artificial Sequence
  Description of Artificial Sequence: Synthetic oligonucleotide
acgauccacaggaauugga

SEQ ID NO: 91824 - RNA, 19 nt, Artificial Sequence
  Description of Artificial Sequence: Synthetic oligonucleotide
ucgguccugcuuucaaguu

SEQ ID NO: 91825 - RNA, 19 nt, Artificial Sequence
  Description of Artificial Sequence: Synthetic oligonucleotide
ggagcgauaugucguccac

SEQ ID NO: 91826 - RNA, 19 nt, Artificial Sequence
  Description of Artificial Sequence: Synthetic oligonucleotide
agcgugucuuagagcgagc

SEQ ID NO: 91827 - RNA, 19 nt, Artificial Sequence
  Description of Artificial Sequence: Synthetic oligonucleotide
ucaagcccguaguccugga

SEQ ID NO: 91828 - RNA, 19 nt, Artificial Sequence
  Description of Artificial Sequence: Synthetic oligonucleotide
cacccaguacuggacuaag

SEQ ID NO: 91829 - RNA, 19 nt, Artificial Sequence
  Description of Artificial Sequence: Synthetic oligonucleotide
uggcagauccgugcgucgu

SEQ ID NO: 91830 - RNA, 19 nt, Artificial Sequence
  Description of Artificial Sequence: Synthetic oligonucleotide
caccgugcaccacucacga

SEQ ID NO: 91831 - RNA, 19 nt, Artificial Sequence
  Description of Artificial Sequence: Synthetic oligonucleotide
accagaucauacagcuuga

SEQ ID NO: 91832 - RNA, 19 nt, Artificial Sequence
  Description of Artificial Sequence: Synthetic oligonucleotide
ccucgaaagccuugucacc

SEQ ID NO: 91833 - RNA, 19 nt, Artificial Sequence
  Description of Artificial Sequence: Synthetic oligonucleotide
caucguuaucuugaucuaa

SEQ ID NO: 91834 - RNA, 19 nt, Artificial Sequence
  Description of Artificial Sequence: Synthetic oligonucleotide
gacacaagacgcacuccaa

SEQ ID NO: 91835 - RNA, 19 nt, Artificial Sequence
  Description of Artificial Sequence: Synthetic oligonucleotide
caugguacuggcuguccua

SEQ ID NO: 91836 - RNA, 19 nt, Artificial Sequence
  Description of Artificial Sequence: Synthetic oligonucleotide
cauuuugcgcacagcgucu

SEQ ID NO: 91837 - RNA, 19 nt, Artificial Sequence
  Description of Artificial Sequence: Synthetic oligonucleotide
gccgacuuaacugucacua

SEQ ID NO: 91838 - RNA, 19 nt, Artificial Sequence
  Description of Artificial Sequence: Synthetic oligonucleotide
ggcucuuacucaguuaaaa

SEQ ID NO: 91839 - RNA, 19 nt, Artificial Sequence
  Description of Artificial Sequence: Synthetic oligonucleotide
ggggauacaagccaucguu

SEQ ID NO: 91840 - RNA, 19 nt, Artificial Sequence
  Description of Artificial Sequence: Synthetic oligonucleotide
cucgcguagaaagcaguga

SEQ ID NO: 91841 - RNA, 19 nt, Artificial Sequence
  Description of Artificial Sequence: Synthetic oligonucleotide
ccgacuuaacugucacuag

SEQ ID NO: 91842 - RNA, 19 nt, Artificial Sequence
  Description of Artificial Sequence: Synthetic oligonucleotide
aaauaccgagacaguuaua

SEQ ID NO: 91843 - RNA, 19 nt, Artificial Sequence
  Description of Artificial Sequence: Synthetic oligonucleotide
gugacagcgucuagcgcac

SEQ ID NO: 91844 - RNA, 19 nt, Artificial Sequence
  Description of Artificial Sequence: Synthetic oligonucleotide
ccguguaauuggcuguggc

SEQ ID NO: 91845 - RNA, 19 nt, Artificial Sequence
  Description of Artificial Sequence: Synthetic oligonucleotide
gauccgugcgucguugugu

SEQ ID NO: 91846 - RNA, 19 nt, Artificial Sequence
  Description of Artificial Sequence: Synthetic oligonucleotide
augcucgagggcucuggau

SEQ ID NO: 91847 - RNA, 19 nt, Artificial Sequence
  Description of Artificial Sequence: Synthetic oligonucleotide
cuguaguacccaggcauca

SEQ ID NO: 91848 - RNA, 19 nt, Artificial Sequence
  Description of Artificial Sequence: Synthetic oligonucleotide
acgauaacccaagcacaau

SEQ ID NO: 91849 - RNA, 19 nt, Artificial Sequence
  Description of Artificial Sequence: Synthetic oligonucleotide
ccucgcguagaaagcagug

SEQ ID NO: 91850 - RNA, 19 nt, Artificial Sequence
  Description of Artificial Sequence: Synthetic oligonucleotide
cacuggucgcaggaucaag

SEQ ID NO: 91851 - RNA, 19 nt, Artificial Sequence
  Description of Artificial Sequence: Synthetic oligonucleotide
cacuguaccucccggcaaa

SEQ ID NO: 91852 - RNA, 19 nt, Artificial Sequence
  Description of Artificial Sequence: Synthetic oligonucleotide
uuaccaccuccguguaauu

SEQ ID NO: 91853 - RNA, 19 nt, Artificial Sequence
  Description of Artificial Sequence: Synthetic oligonucleotide
uggccguuucaaguucuuc

SEQ ID NO: 91854 - RNA, 19 nt, Artificial Sequence
  Description of Artificial Sequence: Synthetic oligonucleotide
ccugaucaugucaauaggu

SEQ ID NO: 91855 - RNA, 19 nt, Artificial Sequence
  Description of Artificial Sequence: Synthetic oligonucleotide
agccccauaccuggcagau

SEQ ID NO: 91856 - RNA, 19 nt, Artificial Sequence
  Description of Artificial Sequence: Synthetic oligonucleotide
cucccucgcguagaaagca

SEQ ID NO: 91857 - RNA, 19 nt, Artificial Sequence
  Description of Artificial Sequence: Synthetic oligonucleotide
agcuuaccaccuccgugua

SEQ ID NO: 91858 - RNA, 19 nt, Artificial Sequence
  Description of Artificial Sequence: Synthetic oligonucleotide
guacuggcuguccuaugcu

SEQ ID NO: 91859 - RNA, 19 nt, Artificial Sequence
  Description of Artificial Sequence: Synthetic oligonucleotide
caguacggucugugaguug

SEQ ID NO: 91860 - RNA, 19 nt, Artificial Sequence
  Description of Artificial Sequence: Synthetic oligonucleotide
cugauaaauggggagcgau

SEQ ID NO: 91861 - RNA, 19 nt, Artificial Sequence
  Description of Artificial Sequence: Synthetic oligonucleotide
uccgugcgucguuguguug

SEQ ID NO: 91862 - RNA, 19 nt, Artificial Sequence
  Description of Artificial Sequence: Synthetic oligonucleotide
agcgagauuuauagcccau

SEQ ID NO: 91863 - RNA, 19 nt, Artificial Sequence
  Description of Artificial Sequence: Synthetic oligonucleotide
gagcccgagucacacucua

SEQ ID NO: 91864 - RNA, 19 nt, Artificial Sequence
  Description of Artificial Sequence: Synthetic oligonucleotide
ggagcgauuucuaguaagu

SEQ ID NO: 91865 - RNA, 19 nt, Artificial Sequence
  Description of Artificial Sequence: Synthetic oligonucleotide
aucgcacaccaccguggau

SEQ ID NO: 91866 - RNA, 19 nt, Artificial Sequence
  Description of Artificial Sequence: Synthetic oligonucleotide
cuugccauuuuggcuaccu

SEQ ID NO: 91867 - RNA, 19 nt, Artificial Sequence
  Description of Artificial Sequence: Synthetic oligonucleotide
gucccuacccuaggagaac

SEQ ID NO: 91868 - RNA, 19 nt, Artificial Sequence
  Description of Artificial Sequence: Synthetic oligonucleotide
gcauggggaaaugcucgag

SEQ ID NO: 91869 - RNA, 19 nt, Artificial Sequence
  Description of Artificial Sequence: Synthetic oligonucleotide
caagacgcacuccaacaau

SEQ ID NO: 91870 - RNA, 19 nt, Artificial Sequence
  Description of Artificial Sequence: Synthetic oligonucleotide
cccuacccuaggagaaccg

SEQ ID NO: 91871 - RNA, 19 nt, Artificial Sequence
  Description of Artificial Sequence: Synthetic oligonucleotide
cgacgugaaaucaugucaa

SEQ ID NO: 91872 - RNA, 19 nt, Artificial Sequence
  Description of Artificial Sequence: Synthetic oligonucleotide
ccaacaauaggccaccguu

SEQ ID NO: 91873 - RNA, 19 nt, Artificial Sequence
  Description of Artificial Sequence: Synthetic oligonucleotide
gagcgauuucuaguaaguu

SEQ ID NO: 91874 - RNA, 19 nt, Artificial Sequence
  Description of Artificial Sequence: Synthetic oligonucleotide
acuguaccucccggcaaau

SEQ ID NO: 91875 - RNA, 19 nt, Artificial Sequence
  Description of Artificial Sequence: Synthetic oligonucleotide
uggcucguucguggagggc

SEQ ID NO: 91876 - RNA, 19 nt, Artificial Sequence
  Description of Artificial Sequence: Synthetic oligonucleotide
gagcgauaugucguccacu

SEQ ID NO: 91877 - RNA, 19 nt, Artificial Sequence
  Description of Artificial Sequence: Synthetic oligonucleotide
cuauuugcaugcugauauu

SEQ ID NO: 91878 - RNA, 19 nt, Artificial Sequence
  Description of Artificial Sequence: Synthetic oligonucleotide
uuccugcaaccagaucaua

SEQ ID NO: 91879 - RNA, 19 nt, Artificial Sequence
  Description of Artificial Sequence: Synthetic oligonucleotide
ccauggagcgauaugucgu

SEQ ID NO: 91880 - RNA, 19 nt, Artificial Sequence
  Description of Artificial Sequence: Synthetic oligonucleotide
gugcgucguuguguugucc

SEQ ID NO: 91881 - RNA, 19 nt, Artificial Sequence
  Description of Artificial Sequence: Synthetic oligonucleotide
caacuacgauccacaggaa

SEQ ID NO: 91882 - RNA, 19 nt, Artificial Sequence
  Description of Artificial Sequence: Synthetic oligonucleotide
cguguaccuaucaaugucu

SEQ ID NO: 91883 - RNA, 19 nt, Artificial Sequence
  Description of Artificial Sequence: Synthetic oligonucleotide
caccguggaucaauuuagu

SEQ ID NO: 91884 - RNA, 19 nt, Artificial Sequence
  Description of Artificial Sequence: Synthetic oligonucleotide
gcgauaugucguccacuuc

SEQ ID NO: 91885 - RNA, 19 nt, Artificial Sequence
  Description of Artificial Sequence: Synthetic oligonucleotide
ggagauagacugagugucu

SEQ ID NO: 91886 - RNA, 19 nt, Artificial Sequence
  Description of Artificial Sequence: Synthetic oligonucleotide
gcuaccucgaaagccuugu

SEQ ID NO: 91887 - RNA, 19 nt, Artificial Sequence
  Description of Artificial Sequence: Synthetic oligonucleotide
cucguucguggagggcuuc

SEQ ID NO: 91888 - RNA, 19 nt, Artificial Sequence
  Description of Artificial Sequence: Synthetic oligonucleotide
cacaccaccguggaucaau

SEQ ID NO: 91889 - RNA, 19 nt, Artificial Sequence
  Description of Artificial Sequence: Synthetic oligonucleotide
gcgguguuaucauccauuu

SEQ ID NO: 91890 - RNA, 19 nt, Artificial Sequence
  Description of Artificial Sequence: Synthetic oligonucleotide
gcaagcuuaccaccuccgu

SEQ ID NO: 91891 - RNA, 19 nt, Artificial Sequence
  Description of Artificial Sequence: Synthetic oligonucleotide
ggggagcgauuucuaguaa

SEQ ID NO: 91892 - RNA, 19 nt, Artificial Sequence
  Description of Artificial Sequence: Synthetic oligonucleotide
uccuugcaccgugcaccac

SEQ ID NO: 91893 - RNA, 19 nt, Artificial Sequence
  Description of Artificial Sequence: Synthetic oligonucleotide
cagaucggccugagcccga

SEQ ID NO: 91894 - RNA, 19 nt, Artificial Sequence
  Description of Artificial Sequence: Synthetic oligonucleotide
guagaguguggggcuccaa

SEQ ID NO: 91895 - RNA, 19 nt, Artificial Sequence
  Description of Artificial Sequence: Synthetic oligonucleotide
agcccgagucacacucuaa

SEQ ID NO: 91896 - RNA, 19 nt, Artificial Sequence
  Description of Artificial Sequence: Synthetic oligonucleotide
gcuuaccaccuccguguaa

SEQ ID NO: 91897 - RNA, 19 nt, Artificial Sequence
  Description of Artificial Sequence: Synthetic oligonucleotide
gcgcacagcgucugugaaa

SEQ ID NO: 91898 - RNA, 19 nt, Artificial Sequence
  Description of Artificial Sequence: Synthetic oligonucleotide
ggcgggugcgacgugaaau

SEQ ID NO: 91899 - RNA, 19 nt, Artificial Sequence
  Description of Artificial Sequence: Synthetic oligonucleotide
gugaugucuguuggcgaau

SEQ ID NO: 91900 - RNA, 19 nt, Artificial Sequence
  Description of Artificial Sequence: Synthetic oligonucleotide
caccuccguguaauuggcu

SEQ ID NO: 91901 - RNA, 19 nt, Artificial Sequence
  Description of Artificial Sequence: Synthetic oligonucleotide
ggcugucgauuuacugguc

SEQ ID NO: 91902 - RNA, 19 nt, Artificial Sequence
  Description of Artificial Sequence: Synthetic oligonucleotide
cgggagauagacugagugu

SEQ ID NO: 91903 - RNA, 19 nt, Artificial Sequence
  Description of Artificial Sequence: Synthetic oligonucleotide
cgagauuuauagcccauuu

SEQ ID NO: 91904 - RNA, 19 nt, Artificial Sequence
  Description of Artificial Sequence: Synthetic oligonucleotide
cgugcgucguuguguuguc

SEQ ID NO: 91905 - RNA, 19 nt, Artificial Sequence
  Description of Artificial Sequence: Synthetic oligonucleotide
ccuugucaccauagguggu

SEQ ID NO: 91906 - RNA, 19 nt, Artificial Sequence
  Description of Artificial Sequence: Synthetic oligonucleotide
gcgagauuuauagcccauu

SEQ ID NO: 91907 - RNA, 19 nt, Artificial Sequence
  Description of Artificial Sequence: Synthetic oligonucleotide
cccucgcguagaaagcagu

SEQ ID NO: 91908 - RNA, 19 nt, Artificial Sequence
  Description of Artificial Sequence: Synthetic oligonucleotide
ccgugcgucguuguguugu

SEQ ID NO: 91909 - RNA, 19 nt, Artificial Sequence
  Description of Artificial Sequence: Synthetic oligonucleotide
gggugcgacgugaaaucau

SEQ ID NO: 91910 - RNA, 19 nt, Artificial Sequence
  Description of Artificial Sequence: Synthetic oligonucleotide
gcgucguuguguuguccau

SEQ ID NO: 91911 - RNA, 19 nt, Artificial Sequence
  Description of Artificial Sequence: Synthetic oligonucleotide
ggcagauccgugcgucguu

SEQ ID NO: 91912 - RNA, 19 nt, Artificial Sequence
  Description of Artificial Sequence: Synthetic oligonucleotide
guggccguuucaaguucuu

SEQ ID NO: 91913 - RNA, 19 nt, Artificial Sequence
  Description of Artificial Sequence: Synthetic oligonucleotide
cgggugcgacgugaaauca

SEQ ID NO: 91914 - RNA, 19 nt, Artificial Sequence
  Description of Artificial Sequence: Synthetic oligonucleotide
gcucguucguggagggcuu

SEQ ID NO: 91915 - RNA, 19 nt, Artificial Sequence
  Description of Artificial Sequence: Synthetic oligonucleotide
cgucuagcgcacagccgcu

SEQ ID NO: 91916 - RNA, 19 nt, Artificial Sequence
  Description of Artificial Sequence: Synthetic oligonucleotide
cgguguuaucauccauuuu

SEQ ID NO: 91917 - RNA, 19 nt, Artificial Sequence
  Description of Artificial Sequence: Synthetic oligonucleotide
aagacaauaguguuaaauc

SEQ ID NO: 91918 - RNA, 19 nt, Artificial Sequence
  Description of Artificial Sequence: Synthetic oligonucleotide
acguccauaaaauacaccc

SEQ ID NO: 91919 - RNA, 19 nt, Artificial Sequence
  Description of Artificial Sequence: Synthetic oligonucleotide
aauaggaaggcgaacgucc

SEQ ID NO: 91920 - RNA, 19 nt, Artificial Sequence
  Description of Artificial Sequence: Synthetic oligonucleotide
uucuguaguaccaugacac

SEQ ID NO: 91921 - RNA, 19 nt, Artificial Sequence
  Description of Artificial Sequence: Synthetic oligonucleotide
aauaauugccccugucuuc

SEQ ID NO: 91922 - RNA, 19 nt, Artificial Sequence
  Description of Artificial Sequence: Synthetic oligonucleotide
aaagagagagcgccgaguc

SEQ ID NO: 91923 - RNA, 19 nt, Artificial Sequence
  Description of Artificial Sequence: Synthetic oligonucleotide
ucgguaucgaaacucaucc

SEQ ID NO: 91924 - RNA, 19 nt, Artificial Sequence
  Description of Artificial Sequence: Synthetic oligonucleotide
agcgguauaacccugcauc

SEQ ID NO: 91925 - RNA, 19 nt, Artificial Sequence
  Description of Artificial Sequence: Synthetic oligonucleotide
aaugcgacgguucauucug

SEQ ID NO: 91926 - RNA, 19 nt, Artificial Sequence
  Description of Artificial Sequence: Synthetic oligonucleotide
aaccuucucuaacacaacg

SEQ ID NO: 91927 - RNA, 19 nt, Artificial Sequence
  Description of Artificial Sequence: Synthetic oligonucleotide
aauuuuaccacggaauccu

SEQ ID NO: 91928 - RNA, 19 nt, Artificial Sequence
  Description of Artificial Sequence: Synthetic oligonucleotide
aauuagacggguuaaccau

SEQ ID NO: 91929 - RNA, 19 nt, Artificial Sequence
  Description of Artificial Sequence: Synthetic oligonucleotide
gauuggagagacuagucgc

SEQ ID NO: 91930 - RNA, 19 nt, Artificial Sequence
  Description of Artificial Sequence: Synthetic oligonucleotide
aacccagggaccuuagacg

SEQ ID NO: 91931 - RNA, 19 nt, Artificial Sequence
  Description of Artificial Sequence: Synthetic oligonucleotide
aguaccaugacacgguaag

SEQ ID NO: 91932 - RNA, 19 nt, Artificial Sequence
  Description of Artificial Sequence: Synthetic oligonucleotide
aaggugucgagauaaggug

SEQ ID NO: 91933 - RNA, 19 nt, Artificial Sequence
  Description of Artificial Sequence: Synthetic oligonucleotide
ucaacccuauuuuacaggc

SEQ ID NO: 91934 - RNA, 19 nt, Artificial Sequence
  Description of Artificial Sequence: Synthetic oligonucleotide
uagugaaugccacagcuug

SEQ ID NO: 91935 - RNA, 19 nt, Artificial Sequence
  Description of Artificial Sequence: Synthetic oligonucleotide
aacccuauuuuacaggcca

SEQ ID NO: 91936 - RNA, 19 nt, Artificial Sequence
  Description of Artificial Sequence: Synthetic oligonucleotide
uaaggugucgagauaaggu

SEQ ID NO: 91937 - RNA, 19 nt, Artificial Sequence
  Description of Artificial Sequence: Synthetic oligonucleotide
cuuagacgcauucagguag

SEQ ID NO: 91938 - RNA, 19 nt, Artificial Sequence
  Description of Artificial Sequence: Synthetic oligonucleotide
uuuugugugaaggagcuca

SEQ ID NO: 91939 - RNA, 19 nt, Artificial Sequence
  Description of Artificial Sequence: Synthetic oligonucleotide
uaauuagacggguuaacca

SEQ ID NO: 91940 - RNA, 19 nt, Artificial Sequence
  Description of Artificial Sequence: Synthetic oligonucleotide
aaggcgaacguccauaaaa

SEQ ID NO: 91941 - RNA, 19 nt, Artificial Sequence
  Description of Artificial Sequence: Synthetic oligonucleotide
uucuccguaucuuagaguc

SEQ ID NO: 91942 - RNA, 19 nt, Artificial Sequence
  Description of Artificial Sequence: Synthetic oligonucleotide
ugguuuuaguguaacacac

SEQ ID NO: 91943 - RNA, 19 nt, Artificial Sequence
  Description of Artificial Sequence: Synthetic oligonucleotide
aaacuaauuagacggguua

SEQ ID NO: 91944 - RNA, 19 nt, Artificial Sequence
  Description of Artificial Sequence: Synthetic oligonucleotide
auuauaaacucuccacucu

SEQ ID NO: 91945 - RNA, 19 nt, Artificial Sequence
  Description of Artificial Sequence: Synthetic oligonucleotide
gagaggacugguuuuagug

SEQ ID NO: 91946 - RNA, 19 nt, Artificial Sequence
  Description of Artificial Sequence: Synthetic oligonucleotide
uacccucucacccacgagg

SEQ ID NO: 91947 - RNA, 19 nt, Artificial Sequence
  Description of Artificial Sequence: Synthetic oligonucleotide
agagagagcgccgaguccc

SEQ ID NO: 91948 - RNA, 19 nt, Artificial Sequence
  Description of Artificial Sequence: Synthetic oligonucleotide
augucuaucacccgugcag

SEQ ID NO: 91949 - RNA, 19 nt, Artificial Sequence
  Description of Artificial Sequence: Synthetic oligonucleotide
aaggcuaaggugucgagau

SEQ ID NO: 91950 - RNA, 19 nt, Artificial Sequence
  Description of Artificial Sequence: Synthetic oligonucleotide
uaaaauaucacugguccuc

SEQ ID NO: 91951 - RNA, 19 nt, Artificial Sequence
  Description of Artificial Sequence: Synthetic oligonucleotide
ucuaacacaacgccaucca

SEQ ID NO: 91952 - RNA, 19 nt, Artificial Sequence
  Description of Artificial Sequence: Synthetic oligonucleotide
uuuuacaggccauucacau

SEQ ID NO: 91953 - RNA, 19 nt, Artificial Sequence
  Description of Artificial Sequence: Synthetic oligonucleotide
aagaauuccagcacgcuca

SEQ ID NO: 91954 - RNA, 19 nt, Artificial Sequence
  Description of Artificial Sequence: Synthetic oligonucleotide
uguaguaccaugacacggu

SEQ ID NO: 91955 - RNA, 19 nt, Artificial Sequence
  Description of Artificial Sequence: Synthetic oligonucleotide
ucgauaagccgcuaggaga

SEQ ID NO: 91956 - RNA, 19 nt, Artificial Sequence
  Description of Artificial Sequence: Synthetic oligonucleotide
ugcuuaauccaucuccaug

SEQ ID NO: 91957 - RNA, 19 nt, Artificial Sequence
  Description of Artificial Sequence: Synthetic oligonucleotide
aaugggauuggagagacua

SEQ ID NO: 91958 - RNA, 19 nt, Artificial Sequence
  Description of Artificial Sequence: Synthetic oligonucleotide
aaaucagagggucgauaag

SEQ ID NO: 91959 - RNA, 19 nt, Artificial Sequence
  Description of Artificial Sequence: Synthetic oligonucleotide
agguuuggaagucaaucuc

SEQ ID NO: 91960 - RNA, 19 nt, Artificial Sequence
  Description of Artificial Sequence: Synthetic oligonucleotide
gacugcaagaagcucacug

SEQ ID NO: 91961 - RNA, 19 nt, Artificial Sequence
  Description of Artificial Sequence: Synthetic oligonucleotide
aagcgaggguaccaguugg

SEQ ID NO: 91962 - RNA, 19 nt, Artificial Sequence
  Description of Artificial Sequence: Synthetic oligonucleotide
acgaggaccaacucugaac

SEQ ID NO: 91963 - RNA, 19 nt, Artificial Sequence
  Description of Artificial Sequence: Synthetic oligonucleotide
uacccgaugaggcaggaca

SEQ ID NO: 91964 - RNA, 19 nt, Artificial Sequence
  Description of Artificial Sequence: Synthetic oligonucleotide
uaccacggaauccuggucc

SEQ ID NO: 91965 - RNA, 19 nt, Artificial Sequence
  Description of Artificial Sequence: Synthetic oligonucleotide
ucuguaguaccaugacacg

SEQ ID NO: 91966 - RNA, 19 nt, Artificial Sequence
  Description of Artificial Sequence: Synthetic oligonucleotide
uccuaauuccugcugugcc

SEQ ID NO: 91967 - RNA, 19 nt, Artificial Sequence
  Description of Artificial Sequence: Synthetic oligonucleotide
uuugaaguaccaugucacc

SEQ ID NO: 91968 - RNA, 19 nt, Artificial Sequence
  Description of Artificial Sequence: Synthetic oligonucleotide
guacauucgguaucgaaac

SEQ ID NO: 91969 - RNA, 19 nt, Artificial Sequence
  Description of Artificial Sequence: Synthetic oligonucleotide
cuaauuagacggguuaacc

SEQ ID NO: 91970 - RNA, 19 nt, Artificial Sequence
  Description of Artificial Sequence: Synthetic oligonucleotide
gaguguacugcaaaccagg

SEQ ID NO: 91971 - RNA, 19 nt, Artificial Sequence
  Description of Artificial Sequence: Synthetic oligonucleotide
agagcugucggcugaauca

SEQ ID NO: 91972 - RNA, 19 nt, Artificial Sequence
  Description of Artificial Sequence: Synthetic oligonucleotide
aacguccauaaaauacacc

SEQ ID NO: 91973 - RNA, 19 nt, Artificial Sequence
  Description of Artificial Sequence: Synthetic oligonucleotide
aggaccaacucugaacacc

SEQ ID NO: 91974 - RNA, 19 nt, Artificial Sequence
  Description of Artificial Sequence: Synthetic oligonucleotide
guuauaaagaugggccugg

SEQ ID NO: 91975 - RNA, 19 nt, Artificial Sequence
  Description of Artificial Sequence: Synthetic oligonucleotide
caaucccucacaucaaaag

SEQ ID NO: 91976 - RNA, 19 nt, Artificial Sequence
  Description of Artificial Sequence: Synthetic oligonucleotide
acuaauuagacggguuaac

SEQ ID NO: 91977 - RNA, 19 nt, Artificial Sequence
  Description of Artificial Sequence: Synthetic oligonucleotide
aagacguccuuacuuuuga

SEQ ID NO: 91978 - RNA, 19 nt, Artificial Sequence
  Description of Artificial Sequence: Synthetic oligonucleotide
uuuaccacggaauccuggu

SEQ ID NO: 91979 - RNA, 19 nt, Artificial Sequence
  Description of Artificial Sequence: Synthetic oligonucleotide
accaugcagcgguauaacc

SEQ ID NO: 91980 - RNA, 19 nt, Artificial Sequence
  Description of Artificial Sequence: Synthetic oligonucleotide
aauugcagagcugucggcu

SEQ ID NO: 91981 - RNA, 19 nt, Artificial Sequence
  Description of Artificial Sequence: Synthetic oligonucleotide
cuuucuccguaucuuagag

SEQ ID NO: 91982 - RNA, 19 nt, Artificial Sequence
  Description of Artificial Sequence: Synthetic oligonucleotide
acauucgguaucgaaacuc

SEQ ID NO: 91983 - RNA, 19 nt, Artificial Sequence
  Description of Artificial Sequence: Synthetic oligonucleotide
ucagagggucgauaagccg

SEQ ID NO: 91984 - RNA, 19 nt, Artificial Sequence
  Description of Artificial Sequence: Synthetic oligonucleotide
ugagguuuggaagucaauc

SEQ ID NO: 91985 - RNA, 19 nt, Artificial Sequence
  Description of Artificial Sequence: Synthetic oligonucleotide
gucgagauaaggugcuugg

SEQ ID NO: 91986 - RNA, 19 nt, Artificial Sequence
  Description of Artificial Sequence: Synthetic oligonucleotide
uggacaugagccugcggcg

SEQ ID NO: 91987 - RNA, 19 nt, Artificial Sequence
  Description of Artificial Sequence: Synthetic oligonucleotide
aacugcaguacccgaugag

SEQ ID NO: 91988 - RNA, 19 nt, Artificial Sequence
  Description of Artificial Sequence: Synthetic oligonucleotide
cacaugacugagagcaacg

SEQ ID NO: 91989 - RNA, 19 nt, Artificial Sequence
  Description of Artificial Sequence: Synthetic oligonucleotide
accuucucuaacacaacgc

SEQ ID NO: 91990 - RNA, 19 nt, Artificial Sequence
  Description of Artificial Sequence: Synthetic oligonucleotide
agcaagaauuccagcacgc

SEQ ID NO: 91991 - RNA, 19 nt, Artificial Sequence
  Description of Artificial Sequence: Synthetic oligonucleotide
auucuguaguaccaugaca

SEQ ID NO: 91992 - RNA, 19 nt, Artificial Sequence
  Description of Artificial Sequence: Synthetic oligonucleotide
cuguaguaccaugacacgg

SEQ ID NO: 91993 - RNA, 19 nt, Artificial Sequence
  Description of Artificial Sequence: Synthetic oligonucleotide
agaggacugguuuuagugu

SEQ ID NO: 91994 - RNA, 19 nt, Artificial Sequence
  Description of Artificial Sequence: Synthetic oligonucleotide
accaugucaccucgggucg

SEQ ID NO: 91995 - RNA, 19 nt, Artificial Sequence
  Description of Artificial Sequence: Synthetic oligonucleotide
aggugucgagauaaggugc

SEQ ID NO: 91996 - RNA, 19 nt, Artificial Sequence
  Description of Artificial Sequence: Synthetic oligonucleotide
uucgguaucgaaacucauc

SEQ ID NO: 91997 - RNA, 19 nt, Artificial Sequence
  Description of Artificial Sequence: Synthetic oligonucleotide
caauuuuaccacggaaucc

SEQ ID NO: 91998 - RNA, 19 nt, Artificial Sequence
  Description of Artificial Sequence: Synthetic oligonucleotide
gugaugagaacagaauagc

SEQ ID NO: 91999 - RNA, 19 nt, Artificial Sequence
  Description of Artificial Sequence: Synthetic oligonucleotide
uuggcgcaggucuuaauca

SEQ ID NO: 92000 - RNA, 19 nt, Artificial Sequence
  Description of Artificial Sequence: Synthetic oligonucleotide
gacgcauucagguagacuu

SEQ ID NO: 92001 - RNA, 19 nt, Artificial Sequence
  Description of Artificial Sequence: Synthetic oligonucleotide
cacgccaaucaguaguggg

SEQ ID NO: 92002 - RNA, 19 nt, Artificial Sequence
  Description of Artificial Sequence: Synthetic oligonucleotide
gacuagucgcugcuucucg

SEQ ID NO: 92003 - RNA, 19 nt, Artificial Sequence
  Description of Artificial Sequence: Synthetic oligonucleotide
gacggguuaaccauuaaaa

SEQ ID NO: 92004 - RNA, 19 nt, Artificial Sequence
  Description of Artificial Sequence: Synthetic oligonucleotide
ucaaugggauuggagagac

SEQ ID NO: 92005 - RNA, 19 nt, Artificial Sequence
  Description of Artificial Sequence: Synthetic oligonucleotide
ucaccaaugcgacgguuca

SEQ ID NO: 92006 - RNA, 19 nt, Artificial Sequence
  Description of Artificial Sequence: Synthetic oligonucleotide
agucaucucaaauguauuu

SEQ ID NO: 92007 - RNA, 19 nt, Artificial Sequence
  Description of Artificial Sequence: Synthetic oligonucleotide
gagagcaacguguggugag

SEQ ID NO: 92008 - RNA, 19 nt, Artificial Sequence
  Description of Artificial Sequence: Synthetic oligonucleotide
aacuaauuagacggguuaa

SEQ ID NO: 92009 - RNA, 19 nt, Artificial Sequence
  Description of Artificial Sequence: Synthetic oligonucleotide
agaauuccagcacgcucac

SEQ ID NO: 92010 - RNA, 19 nt, Artificial Sequence
  Description of Artificial Sequence: Synthetic oligonucleotide
ucggccgugaugagaacag

SEQ ID NO: 92011 - RNA, 19 nt, Artificial Sequence
  Description of Artificial Sequence: Synthetic oligonucleotide
uccggaaacugaauguguc

SEQ ID NO: 92012 - RNA, 19 nt, Artificial Sequence
  Description of Artificial Sequence: Synthetic oligonucleotide
cugauggcgugucugaaug

SEQ ID NO: 92013 - RNA, 19 nt, Artificial Sequence
  Description of Artificial Sequence: Synthetic oligonucleotide
cacgguaagucggacaccg

SEQ ID NO: 92014 - RNA, 19 nt, Artificial Sequence
  Description of Artificial Sequence: Synthetic oligonucleotide
uuagacgcauucagguaga

SEQ ID NO: 92015 - RNA, 19 nt, Artificial Sequence
  Description of Artificial Sequence: Synthetic oligonucleotide
guaccaguuggcgugagcc

SEQ ID NO: 92016 - RNA, 19 nt, Artificial Sequence
  Description of Artificial Sequence: Synthetic oligonucleotide
uuaaggcuaaggugucgag

SEQ ID NO: 92017 - RNA, 19 nt, Artificial Sequence
  Description of Artificial Sequence: Synthetic oligonucleotide
auaagccgcuaggagaaac

SEQ ID NO: 92018 - RNA, 19 nt, Artificial Sequence
  Description of Artificial Sequence: Synthetic oligonucleotide
guccgaugacuguagacag

SEQ ID NO: 92019 - RNA, 19 nt, Artificial Sequence
  Description of Artificial Sequence: Synthetic oligonucleotide
agucacgacucccuuccgg

SEQ ID NO: 92020 - RNA, 19 nt, Artificial Sequence
  Description of Artificial Sequence: Synthetic oligonucleotide
uuccuaauaggaaggcgaa

SEQ ID NO: 92021 - RNA, 19 nt, Artificial Sequence
  Description of Artificial Sequence: Synthetic oligonucleotide
ucuuaaggcuaaggugucg

SEQ ID NO: 92022 - RNA, 19 nt, Artificial Sequence
  Description of Artificial Sequence: Synthetic oligonucleotide
agcguggugacuuaauauu

SEQ ID NO: 92023 - RNA, 19 nt, Artificial Sequence
  Description of Artificial Sequence: Synthetic oligonucleotide
aaacaaacccggaaacgga

SEQ ID NO: 92024 - RNA, 19 nt, Artificial Sequence
  Description of Artificial Sequence: Synthetic oligonucleotide
cagacguacauccccacug

SEQ ID NO: 92025 - RNA, 19 nt, Artificial Sequence
  Description of Artificial Sequence: Synthetic oligonucleotide
gaugcguccguccaguucu

SEQ ID NO: 92026 - RNA, 19 nt, Artificial Sequence
  Description of Artificial Sequence: Synthetic oligonucleotide
cuaggcaauuucugauucc

SEQ ID NO: 92027 - RNA, 19 nt, Artificial Sequence
  Description of Artificial Sequence: Synthetic oligonucleotide
aaacggaagaggguagaga

SEQ ID NO: 92028 - RNA, 19 nt, Artificial Sequence
  Description of Artificial Sequence: Synthetic oligonucleotide
cuuggcgcaggucuuaauc

SEQ ID NO: 92029 - RNA, 19 nt, Artificial Sequence
  Description of Artificial Sequence: Synthetic oligonucleotide
gcccagaauauguugacag

SEQ ID NO: 92030 - RNA, 19 nt, Artificial Sequence
  Description of Artificial Sequence: Synthetic oligonucleotide
agugaaugccacagcuugc

SEQ ID NO: 92031 - RNA, 19 nt, Artificial Sequence
  Description of Artificial Sequence: Synthetic oligonucleotide
acacucgauuguuacauau

SEQ ID NO: 92032 - RNA, 19 nt, Artificial Sequence
  Description of Artificial Sequence: Synthetic oligonucleotide
agagcaacguguggugagc

SEQ ID NO: 92033 - RNA, 19 nt, Artificial Sequence
  Description of Artificial Sequence: Synthetic oligonucleotide
gaccuuagacgcauucagg

SEQ ID NO: 92034 - RNA, 19 nt, Artificial Sequence
  Description of Artificial Sequence: Synthetic oligonucleotide
uuagacggguuaaccauua

SEQ ID NO: 92035 - RNA, 19 nt, Artificial Sequence
  Description of Artificial Sequence: Synthetic oligonucleotide
cucuaacacaacgccaucc

SEQ ID NO: 92036 - RNA, 19 nt, Artificial Sequence
  Description of Artificial Sequence: Synthetic oligonucleotide
ugucgagauaaggugcuug

SEQ ID NO: 92037 - RNA, 19 nt, Artificial Sequence
  Description of Artificial Sequence: Synthetic oligonucleotide
gcuaccaccaauaggagac

SEQ ID NO: 92038 - RNA, 19 nt, Artificial Sequence
  Description of Artificial Sequence: Synthetic oligonucleotide
acgccauccacccucgaug

SEQ ID NO: 92039 - RNA, 19 nt, Artificial Sequence
  Description of Artificial Sequence: Synthetic oligonucleotide
uaaggcuaaggugucgaga

SEQ ID NO: 92040 - RNA, 19 nt, Artificial Sequence
  Description of Artificial Sequence: Synthetic oligonucleotide
uuucuccguaucuuagagu

SEQ ID NO: 92041 - RNA, 19 nt, Artificial Sequence
  Description of Artificial Sequence: Synthetic oligonucleotide
gcugagaguacucuuccag

SEQ ID NO: 92042 - RNA, 19 nt, Artificial Sequence
  Description of Artificial Sequence: Synthetic oligonucleotide
gaagacguccuuacuuuug

SEQ ID NO: 92043 - RNA, 19 nt, Artificial Sequence
  Description of Artificial Sequence: Synthetic oligonucleotide
uaaacauguccgcgcucag

SEQ ID NO: 92044 - RNA, 19 nt, Artificial Sequence
  Description of Artificial Sequence: Synthetic oligonucleotide
uacauucgguaucgaaacu

SEQ ID NO: 92045 - RNA, 19 nt, Artificial Sequence
  Description of Artificial Sequence: Synthetic oligonucleotide
ucuccguaucuuagagucc

SEQ ID NO: 92046 - RNA, 19 nt, Artificial Sequence
  Description of Artificial Sequence: Synthetic oligonucleotide
uggcgcaggucuuaaucag

SEQ ID NO: 92047 - RNA, 19 nt, Artificial Sequence
  Description of Artificial Sequence: Synthetic oligonucleotide
uagcguggugacuuaauau

SEQ ID NO: 92048 - RNA, 19 nt, Artificial Sequence
  Description of Artificial Sequence: Synthetic oligonucleotide
auacaccccucuucacuac

SEQ ID NO: 92049 - RNA, 19 nt, Artificial Sequence
  Description of Artificial Sequence: Synthetic oligonucleotide
uaauaggaaggcgaacguc

SEQ ID NO: 92050 - RNA, 19 nt, Artificial Sequence
  Description of Artificial Sequence: Synthetic oligonucleotide
acgcgcuucaugucuauca

SEQ ID NO: 92051 - RNA, 19 nt, Artificial Sequence
  Description of Artificial Sequence: Synthetic oligonucleotide
ccaugcagcgguauaaccc

SEQ ID NO: 92052 - RNA, 19 nt, Artificial Sequence
  Description of Artificial Sequence: Synthetic oligonucleotide
acucgcugaccacacaccu

SEQ ID NO: 92053 - RNA, 19 nt, Artificial Sequence
  Description of Artificial Sequence: Synthetic oligonucleotide
gucggcugaaucaccacgg

SEQ ID NO: 92054 - RNA, 19 nt, Artificial Sequence
  Description of Artificial Sequence: Synthetic oligonucleotide
ugguacauucgguaucgaa

SEQ ID NO: 92055 - RNA, 19 nt, Artificial Sequence
  Description of Artificial Sequence: Synthetic oligonucleotide
gaguccgaugacuguagac

SEQ ID NO: 92056 - RNA, 19 nt, Artificial Sequence
  Description of Artificial Sequence: Synthetic oligonucleotide
caggucuuaaucagcucug

SEQ ID NO: 92057 - RNA, 19 nt, Artificial Sequence
  Description of Artificial Sequence: Synthetic oligonucleotide
aucgaaggccaugucaucu

SEQ ID NO: 92058 - RNA, 19 nt, Artificial Sequence
  Description of Artificial Sequence: Synthetic oligonucleotide
auagcguggugacuuaaua

SEQ ID NO: 92059 - RNA, 19 nt, Artificial Sequence
  Description of Artificial Sequence: Synthetic oligonucleotide
ccaauuuuaccacggaauc

SEQ ID NO: 92060 - RNA, 19 nt, Artificial Sequence
  Description of Artificial Sequence: Synthetic oligonucleotide
caacccuauuuuacaggcc

SEQ ID NO: 92061 - RNA, 19 nt, Artificial Sequence
  Description of Artificial Sequence: Synthetic oligonucleotide
cacaccuguaggaacccug

SEQ ID NO: 92062 - RNA, 19 nt, Artificial Sequence
  Description of Artificial Sequence: Synthetic oligonucleotide
agacguacauccccacugu

SEQ ID NO: 92063 - RNA, 19 nt, Artificial Sequence
  Description of Artificial Sequence: Synthetic oligonucleotide
agugccgugggaagaagag

SEQ ID NO: 92064 - RNA, 19 nt, Artificial Sequence
  Description of Artificial Sequence: Synthetic oligonucleotide
ugugcuccuuagaaauuau

SEQ ID NO: 92065 - RNA, 19 nt, Artificial Sequence
  Description of Artificial Sequence: Synthetic oligonucleotide
agggucgauaagccgcuag

SEQ ID NO: 92066 - RNA, 19 nt, Artificial Sequence
  Description of Artificial Sequence: Synthetic oligonucleotide
cuuaaucagcucugggcca

SEQ ID NO: 92067 - RNA, 19 nt, Artificial Sequence
  Description of Artificial Sequence: Synthetic oligonucleotide
gguauaacccugcaucaga

SEQ ID NO: 92068 - RNA, 19 nt, Artificial Sequence
  Description of Artificial Sequence: Synthetic oligonucleotide
auuggagagacuagucgcu

SEQ ID NO: 92069 - RNA, 19 nt, Artificial Sequence
  Description of Artificial Sequence: Synthetic oligonucleotide
ugaaugccacagcuugccu

SEQ ID NO: 92070 - RNA, 19 nt, Artificial Sequence
  Description of Artificial Sequence: Synthetic oligonucleotide
gcugguaaacauguccgcg

SEQ ID NO: 92071 - RNA, 19 nt, Artificial Sequence
  Description of Artificial Sequence: Synthetic oligonucleotide
acccucgaugcguccgucc

SEQ ID NO: 92072 - RNA, 19 nt, Artificial Sequence
  Description of Artificial Sequence: Synthetic oligonucleotide
gacguacauccccacugug

SEQ ID NO: 92073 - RNA, 19 nt, Artificial Sequence
  Description of Artificial Sequence: Synthetic oligonucleotide
aauagcguggugacuuaau

SEQ ID NO: 92074 - RNA, 19 nt, Artificial Sequence
  Description of Artificial Sequence: Synthetic oligonucleotide
ucgccacaagcuaccacca

SEQ ID NO: 92075 - RNA, 19 nt, Artificial Sequence
  Description of Artificial Sequence: Synthetic oligonucleotide
gguacauucgguaucgaaa

SEQ ID NO: 92076 - RNA, 19 nt, Artificial Sequence
  Description of Artificial Sequence: Synthetic oligonucleotide
uggcaaccagcaacagugc

SEQ ID NO: 92077 - RNA, 19 nt, Artificial Sequence
  Description of Artificial Sequence: Synthetic oligonucleotide
ggagucacgguccagccga

SEQ ID NO: 92078 - RNA, 19 nt, Artificial Sequence
  Description of Artificial Sequence: Synthetic oligonucleotide
gguagugaaugccacagcu

SEQ ID NO: 92079 - RNA, 19 nt, Artificial Sequence
  Description of Artificial Sequence: Synthetic oligonucleotide
cuuaaggcuaaggugucga

SEQ ID NO: 92080 - RNA, 19 nt, Artificial Sequence
  Description of Artificial Sequence: Synthetic oligonucleotide
cacucgcugaccacacacc

SEQ ID NO: 92081 - RNA, 19 nt, Artificial Sequence
  Description of Artificial Sequence: Synthetic oligonucleotide
acgguucauucuguaguac

SEQ ID NO: 92082 - RNA, 19 nt, Artificial Sequence
  Description of Artificial Sequence: Synthetic oligonucleotide
ggucgaacaucauccacac

SEQ ID NO: 92083 - RNA, 19 nt, Artificial Sequence
  Description of Artificial Sequence: Synthetic oligonucleotide
gaacugcaguacccgauga

SEQ ID NO: 92084 - RNA, 19 nt, Artificial Sequence
  Description of Artificial Sequence: Synthetic oligonucleotide
gugacugauggcgugucug

SEQ ID NO: 92085 - RNA, 19 nt, Artificial Sequence
  Description of Artificial Sequence: Synthetic oligonucleotide
gccaauugcagagcugucg

SEQ ID NO: 92086 - RNA, 19 nt, Artificial Sequence
  Description of Artificial Sequence: Synthetic oligonucleotide
aagagccgugugcugguaa

SEQ ID NO: 92087 - RNA, 19 nt, Artificial Sequence
  Description of Artificial Sequence: Synthetic oligonucleotide
agaagacguccuuacuuuu

SEQ ID NO: 92088 - RNA, 19 nt, Artificial Sequence
  Description of Artificial Sequence: Synthetic oligonucleotide
uagucacgacucccuuccg

SEQ ID NO: 92089 - RNA, 19 nt, Artificial Sequence
  Description of Artificial Sequence: Synthetic oligonucleotide
cauauggaucaagaaguca

SEQ ID NO: 92090 - RNA, 19 nt, Artificial Sequence
  Description of Artificial Sequence: Synthetic oligonucleotide
gaccggauccuuguccaag

SEQ ID NO: 92091 - RNA, 19 nt, Artificial Sequence
  Description of Artificial Sequence: Synthetic oligonucleotide
cacacggucuguugugaug

SEQ ID NO: 92092 - RNA, 19 nt, Artificial Sequence
  Description of Artificial Sequence: Synthetic oligonucleotide
uuuugacccagcuguuguu

SEQ ID NO: 92093 - RNA, 19 nt, Artificial Sequence
  Description of Artificial Sequence: Synthetic oligonucleotide
guacugcaaaccaggacac

SEQ ID NO: 92094 - RNA, 19 nt, Artificial Sequence
  Description of Artificial Sequence: Synthetic oligonucleotide
gagaagacguccuuacuuu

SEQ ID NO: 92095 - RNA, 19 nt, Artificial Sequence
  Description of Artificial Sequence: Synthetic oligonucleotide
acaugacugagagcaacgu

SEQ ID NO: 92096 - RNA, 19 nt, Artificial Sequence
  Description of Artificial Sequence: Synthetic oligonucleotide
caaacccggaaacggaaga

SEQ ID NO: 92097 - RNA, 19 nt, Artificial Sequence
  Description of Artificial Sequence: Synthetic oligonucleotide
agcgaggguaccaguuggc

SEQ ID NO: 92098 - RNA, 19 nt, Artificial Sequence
  Description of Artificial Sequence: Synthetic oligonucleotide
uaccaccaauaggagacca

SEQ ID NO: 92099 - RNA, 19 nt, Artificial Sequence
  Description of Artificial Sequence: Synthetic oligonucleotide
gguaagucggacaccggcc

SEQ ID NO: 92100 - RNA, 19 nt, Artificial Sequence
  Description of Artificial Sequence: Synthetic oligonucleotide
acacgguaagucggacacc

SEQ ID NO: 92101 - RNA, 19 nt, Artificial Sequence
  Description of Artificial Sequence: Synthetic oligonucleotide
ucggcugaaucaccacggu

SEQ ID NO: 92102 - RNA, 19 nt, Artificial Sequence
  Description of Artificial Sequence: Synthetic oligonucleotide
cuccguaucuuagagucca

SEQ ID NO: 92103 - RNA, 19 nt, Artificial Sequence
  Description of Artificial Sequence: Synthetic oligonucleotide
agcaacguguggugagcug

SEQ ID NO: 92104 - RNA, 19 nt, Artificial Sequence
  Description of Artificial Sequence: Synthetic oligonucleotide
uccgcgcucagaacuugac

SEQ ID NO: 92105 - RNA, 19 nt, Artificial Sequence
  Description of Artificial Sequence: Synthetic oligonucleotide
aagugccgugggaagaaga

SEQ ID NO: 92106 - RNA, 19 nt, Artificial Sequence
  Description of Artificial Sequence: Synthetic oligonucleotide
caugcagcgguauaacccu

SEQ ID NO: 92107 - RNA, 19 nt, Artificial Sequence
  Description of Artificial Sequence: Synthetic oligonucleotide
ucggacgagagguggcggu

SEQ ID NO: 92108 - RNA, 19 nt, Artificial Sequence
  Description of Artificial Sequence: Synthetic oligonucleotide
agagccgugugcugguaaa

SEQ ID NO: 92109 - RNA, 19 nt, Artificial Sequence
  Description of Artificial Sequence: Synthetic oligonucleotide
uacuuuugacccagcuguu

SEQ ID NO: 92110 - RNA, 19 nt, Artificial Sequence
  Description of Artificial Sequence: Synthetic oligonucleotide
ccgaugacuguagacaggc

SEQ ID NO: 92111 - RNA, 19 nt, Artificial Sequence
  Description of Artificial Sequence: Synthetic oligonucleotide
cauguccgcgcucagaacu

SEQ ID NO: 92112 - RNA, 19 nt, Artificial Sequence
  Description of Artificial Sequence: Synthetic oligonucleotide
acgccaaucaguagugggu

SEQ ID NO: 92113 - RNA, 19 nt, Artificial Sequence
  Description of Artificial Sequence: Synthetic oligonucleotide
gagcugucggcugaaucac

SEQ ID NO: 92114 - RNA, 19 nt, Artificial Sequence
  Description of Artificial Sequence: Synthetic oligonucleotide
agucccaccugagauuaga

SEQ ID NO: 92115 - RNA, 19 nt, Artificial Sequence
  Description of Artificial Sequence: Synthetic oligonucleotide
auuuuaccacggaauccug

SEQ ID NO: 92116 - RNA, 19 nt, Artificial Sequence
  Description of Artificial Sequence: Synthetic oligonucleotide
gcugaaucaccacgguggc

SEQ ID NO: 92117 - RNA, 19 nt, Artificial Sequence
  Description of Artificial Sequence: Synthetic oligonucleotide
uccagacguacauccccac

SEQ ID NO: 92118 - RNA, 19 nt, Artificial Sequence
  Description of Artificial Sequence: Synthetic oligonucleotide
uccccacugugguagcgcu

SEQ ID NO: 92119 - RNA, 19 nt, Artificial Sequence
  Description of Artificial Sequence: Synthetic oligonucleotide
auccacccucgaugcgucc

SEQ ID NO: 92120 - RNA, 19 nt, Artificial Sequence
  Description of Artificial Sequence: Synthetic oligonucleotide
aggcgaacguccauaaaau

SEQ ID NO: 92121 - RNA, 19 nt, Artificial Sequence
  Description of Artificial Sequence: Synthetic oligonucleotide
cuaauaggaaggcgaacgu

SEQ ID NO: 92122 - RNA, 19 nt, Artificial Sequence
  Description of Artificial Sequence: Synthetic oligonucleotide
auuagacggguuaaccauu

SEQ ID NO: 92123 - RNA, 19 nt, Artificial Sequence
  Description of Artificial Sequence: Synthetic oligonucleotide
cgaacguccauaaaauaca

SEQ ID NO: 92124 - RNA, 19 nt, Artificial Sequence
  Description of Artificial Sequence: Synthetic oligonucleotide
gccaaagggauaagcgagg

SEQ ID NO: 92125 - RNA, 19 nt, Artificial Sequence
  Description of Artificial Sequence: Synthetic oligonucleotide
gaaacuaauuagacggguu

SEQ ID NO: 92126 - RNA, 19 nt, Artificial Sequence
  Description of Artificial Sequence: Synthetic oligonucleotide
aagccgcuaggagaaacua

SEQ ID NO: 92127 - RNA, 19 nt, Artificial Sequence
  Description of Artificial Sequence: Synthetic oligonucleotide
accaaugcgacgguucauu

SEQ ID NO: 92128 - RNA, 19 nt, Artificial Sequence
  Description of Artificial Sequence: Synthetic oligonucleotide
accaccaauaggagaccag

SEQ ID NO: 92129 - RNA, 19 nt, Artificial Sequence
  Description of Artificial Sequence: Synthetic oligonucleotide
caugucuaucacccgugca

SEQ ID NO: 92130 - RNA, 19 nt, Artificial Sequence
  Description of Artificial Sequence: Synthetic oligonucleotide
cuguaguccuuuggauccg

SEQ ID NO: 92131 - RNA, 19 nt, Artificial Sequence
  Description of Artificial Sequence: Synthetic oligonucleotide
guaagucggacaccggccu

SEQ ID NO: 92132 - RNA, 19 nt, Artificial Sequence
  Description of Artificial Sequence: Synthetic oligonucleotide
uccacgcgcuucaugucua

SEQ ID NO: 92133 - RNA, 19 nt, Artificial Sequence
  Description of Artificial Sequence: Synthetic oligonucleotide
cauccacccucgaugcguc

SEQ ID NO: 92134 - RNA, 19 nt, Artificial Sequence
  Description of Artificial Sequence: Synthetic oligonucleotide
cgguucauucuguaguacc

SEQ ID NO: 92135 - RNA, 19 nt, Artificial Sequence
  Description of Artificial Sequence: Synthetic oligonucleotide
gggucgaacaucauccaca

SEQ ID NO: 92136 - RNA, 19 nt, Artificial Sequence
  Description of Artificial Sequence: Synthetic oligonucleotide
ugcgacgguucauucugua

SEQ ID NO: 92137 - RNA, 19 nt, Artificial Sequence
  Description of Artificial Sequence: Synthetic oligonucleotide
caccucgggucgaacauca

SEQ ID NO: 92138 - RNA, 19 nt, Artificial Sequence
  Description of Artificial Sequence: Synthetic oligonucleotide
gcgacgguucauucuguag

SEQ ID NO: 92139 - RNA, 19 nt, Artificial Sequence
  Description of Artificial Sequence: Synthetic oligonucleotide
ccgaaccuccuucuuacag

SEQ ID NO: 92140 - RNA, 19 nt, Artificial Sequence
  Description of Artificial Sequence: Synthetic oligonucleotide
guacccucucacccacgag

SEQ ID NO: 92141 - RNA, 19 nt, Artificial Sequence
  Description of Artificial Sequence: Synthetic oligonucleotide
agacgcauucagguagacu

SEQ ID NO: 92142 - RNA, 19 nt, Artificial Sequence
  Description of Artificial Sequence: Synthetic oligonucleotide
agauuagagaggacugguu

SEQ ID NO: 92143 - RNA, 19 nt, Artificial Sequence
  Description of Artificial Sequence: Synthetic oligonucleotide
guaguaccaugacacggua

SEQ ID NO: 92144 - RNA, 19 nt, Artificial Sequence
  Description of Artificial Sequence: Synthetic oligonucleotide
cugucggcugaaucaccac

SEQ ID NO: 92145 - RNA, 19 nt, Artificial Sequence
  Description of Artificial Sequence: Synthetic oligonucleotide
ggauccggaaacugaaugu

SEQ ID NO: 92146 - RNA, 19 nt, Artificial Sequence
  Description of Artificial Sequence: Synthetic oligonucleotide
ugcuugcuccuuucuccgu

SEQ ID NO: 92147 - RNA, 19 nt, Artificial Sequence
  Description of Artificial Sequence: Synthetic oligonucleotide
cuaucacccgugcaguucu

SEQ ID NO: 92148 - RNA, 19 nt, Artificial Sequence
  Description of Artificial Sequence: Synthetic oligonucleotide
gcgguauaacccugcauca

SEQ ID NO: 92149 - RNA, 19 nt, Artificial Sequence
  Description of Artificial Sequence: Synthetic oligonucleotide
ggagaagacguccuuacuu

SEQ ID NO: 92150 - RNA, 19 nt, Artificial Sequence
  Description of Artificial Sequence: Synthetic oligonucleotide
ugcccucggacgagaggug

SEQ ID NO: 92151 - RNA, 19 nt, Artificial Sequence
  Description of Artificial Sequence: Synthetic oligonucleotide
gaauagcguggugacuuaa

SEQ ID NO: 92152 - RNA, 19 nt, Artificial Sequence
  Description of Artificial Sequence: Synthetic oligonucleotide
uguccgcgcucagaacuug

SEQ ID NO: 92153 - RNA, 19 nt, Artificial Sequence
  Description of Artificial Sequence: Synthetic oligonucleotide
gucacgacucccuuccggu

SEQ ID NO: 92154 - RNA, 19 nt, Artificial Sequence
  Description of Artificial Sequence: Synthetic oligonucleotide
gaaggcgaacguccauaaa

SEQ ID NO: 92155 - RNA, 19 nt, Artificial Sequence
  Description of Artificial Sequence: Synthetic oligonucleotide
gcacagaggcauuaaauau

SEQ ID NO: 92156 - RNA, 19 nt, Artificial Sequence
  Description of Artificial Sequence: Synthetic oligonucleotide
caccaugcagcgguauaac

SEQ ID NO: 92157 - RNA, 19 nt, Artificial Sequence
  Description of Artificial Sequence: Synthetic oligonucleotide
auauguugacaggcuugga

SEQ ID NO: 92158 - RNA, 19 nt, Artificial Sequence
  Description of Artificial Sequence: Synthetic oligonucleotide
guguccagacguacauccc

SEQ ID NO: 92159 - RNA, 19 nt, Artificial Sequence
  Description of Artificial Sequence: Synthetic oligonucleotide
caggguagugaaugccaca

SEQ ID NO: 92160 - RNA, 19 nt, Artificial Sequence
  Description of Artificial Sequence: Synthetic oligonucleotide
ugguagcgcugcucauagc

SEQ ID NO: 92161 - RNA, 19 nt, Artificial Sequence
  Description of Artificial Sequence: Synthetic oligonucleotide
gcgaggguaccaguuggcg

SEQ ID NO: 92162 - RNA, 19 nt, Artificial Sequence
  Description of Artificial Sequence: Synthetic oligonucleotide
uagacgcauucagguagac

SEQ ID NO: 92163 - RNA, 19 nt, Artificial Sequence
  Description of Artificial Sequence: Synthetic oligonucleotide
gcacaugacugagagcaac

SEQ ID NO: 92164 - RNA, 19 nt, Artificial Sequence
  Description of Artificial Sequence: Synthetic oligonucleotide
guccagacguacaucccca

SEQ ID NO: 92165 - RNA, 19 nt, Artificial Sequence
  Description of Artificial Sequence: Synthetic oligonucleotide
auucgguaucgaaacucau

SEQ ID NO: 92166 - RNA, 19 nt, Artificial Sequence
  Description of Artificial Sequence: Synthetic oligonucleotide
cgguaagucggacaccggc

SEQ ID NO: 92167 - RNA, 19 nt, Artificial Sequence
  Description of Artificial Sequence: Synthetic oligonucleotide
cagccaauugcagagcugu

SEQ ID NO: 92168 - RNA, 19 nt, Artificial Sequence
  Description of Artificial Sequence: Synthetic oligonucleotide
ugucaccaugcagcgguau

SEQ ID NO: 92169 - RNA, 19 nt, Artificial Sequence
  Description of Artificial Sequence: Synthetic oligonucleotide
caaugcgacgguucauucu

SEQ ID NO: 92170 - RNA, 19 nt, Artificial Sequence
  Description of Artificial Sequence: Synthetic oligonucleotide
gagccgugugcugguaaac

SEQ ID NO: 92171 - RNA, 19 nt, Artificial Sequence
  Description of Artificial Sequence: Synthetic oligonucleotide
caugagccugcggcgcucc

SEQ ID NO: 92172 - RNA, 19 nt, Artificial Sequence
  Description of Artificial Sequence: Synthetic oligonucleotide
agugaucaacacacacaaa

SEQ ID NO: 92173 - RNA, 19 nt, Artificial Sequence
  Description of Artificial Sequence: Synthetic oligonucleotide
ggacacaucgaaggccaug

SEQ ID NO: 92174 - RNA, 19 nt, Artificial Sequence
  Description of Artificial Sequence: Synthetic oligonucleotide
gccaaucaguaguggguac

SEQ ID NO: 92175 - RNA, 19 nt, Artificial Sequence
  Description of Artificial Sequence: Synthetic oligonucleotide
cgauaagccgcuaggagaa

SEQ ID NO: 92176 - RNA, 19 nt, Artificial Sequence
  Description of Artificial Sequence: Synthetic oligonucleotide
acgguaagucggacaccgg

SEQ ID NO: 92177 - RNA, 19 nt, Artificial Sequence
  Description of Artificial Sequence: Synthetic oligonucleotide
ucuggcccguagucacgac

SEQ ID NO: 92178 - RNA, 19 nt, Artificial Sequence
  Description of Artificial Sequence: Synthetic oligonucleotide
gcaggguagugaaugccac

SEQ ID NO: 92179 - RNA, 19 nt, Artificial Sequence
  Description of Artificial Sequence: Synthetic oligonucleotide
cacgaggaccaacucugaa

SEQ ID NO: 92180 - RNA, 19 nt, Artificial Sequence
  Description of Artificial Sequence: Synthetic oligonucleotide
gcgguaggcaucacugccc

SEQ ID NO: 92181 - RNA, 19 nt, Artificial Sequence
  Description of Artificial Sequence: Synthetic oligonucleotide
ccucgggucgaacaucauc

SEQ ID NO: 92182 - RNA, 19 nt, Artificial Sequence
  Description of Artificial Sequence: Synthetic oligonucleotide
agccgcuaggagaaacuaa

SEQ ID NO: 92183 - RNA, 19 nt, Artificial Sequence
  Description of Artificial Sequence: Synthetic oligonucleotide
gagucacgguccagccgag

SEQ ID NO: 92184 - RNA, 19 nt, Artificial Sequence
  Description of Artificial Sequence: Synthetic oligonucleotide
ggcgaacguccauaaaaua

SEQ ID NO: 92185 - RNA, 19 nt, Artificial Sequence
  Description of Artificial Sequence: Synthetic oligonucleotide
cugcccucggacgagaggu

SEQ ID NO: 92186 - RNA, 19 nt, Artificial Sequence
  Description of Artificial Sequence: Synthetic oligonucleotide
caggaguccgaugacugua

SEQ ID NO: 92187 - RNA, 19 nt, Artificial Sequence
  Description of Artificial Sequence: Synthetic oligonucleotide
acccuauuuuacaggccau

SEQ ID NO: 92188 - RNA, 19 nt, Artificial Sequence
  Description of Artificial Sequence: Synthetic oligonucleotide
ggaguccgaugacuguaga

SEQ ID NO: 92189 - RNA, 19 nt, Artificial Sequence
  Description of Artificial Sequence: Synthetic oligonucleotide
cagagagcgcccgggccac

SEQ ID NO: 92190 - RNA, 19 nt, Artificial Sequence
  Description of Artificial Sequence: Synthetic oligonucleotide
ggugucgagauaaggugcu

SEQ ID NO: 92191 - RNA, 19 nt, Artificial Sequence
  Description of Artificial Sequence: Synthetic oligonucleotide
gcccucggacgagaggugg

SEQ ID NO: 92192 - RNA, 19 nt, Artificial Sequence
  Description of Artificial Sequence: Synthetic oligonucleotide
agguacccucucacccacg

SEQ ID NO: 92193 - RNA, 19 nt, Artificial Sequence
  Description of Artificial Sequence: Synthetic oligonucleotide
ucgaugcguccguccaguu

SEQ ID NO: 92194 - RNA, 19 nt, Artificial Sequence
  Description of Artificial Sequence: Synthetic oligonucleotide
gagcaacguguggugagcu

SEQ ID NO: 92195 - RNA, 19 nt, Artificial Sequence
  Description of Artificial Sequence: Synthetic oligonucleotide
gccgagucccaccugagau

SEQ ID NO: 92196 - RNA, 19 nt, Artificial Sequence
  Description of Artificial Sequence: Synthetic oligonucleotide
cgcgcuucaugucuaucac

SEQ ID NO: 92197 - RNA, 19 nt, Artificial Sequence
  Description of Artificial Sequence: Synthetic oligonucleotide
guaccaugacacgguaagu

SEQ ID NO: 92198 - RNA, 19 nt, Artificial Sequence
  Description of Artificial Sequence: Synthetic oligonucleotide
guacccgaugaggcaggac

SEQ ID NO: 92199 - RNA, 19 nt, Artificial Sequence
  Description of Artificial Sequence: Synthetic oligonucleotide
augcgacgguucauucugu

SEQ ID NO: 92200 - RNA, 19 nt, Artificial Sequence
  Description of Artificial Sequence: Synthetic oligonucleotide
auguccgcgcucagaacuu

SEQ ID NO: 92201 - RNA, 19 nt, Artificial Sequence
  Description of Artificial Sequence: Synthetic oligonucleotide
ccgugcccucaccacaagc

SEQ ID NO: 92202 - RNA, 19 nt, Artificial Sequence
  Description of Artificial Sequence: Synthetic oligonucleotide
cacgcgcuucaugucuauc

SEQ ID NO: 92203 - RNA, 19 nt, Artificial Sequence
  Description of Artificial Sequence: Synthetic oligonucleotide
gccgcuaggagaaacuaau

SEQ ID NO: 92204 - RNA, 19 nt, Artificial Sequence
  Description of Artificial Sequence: Synthetic oligonucleotide
ggaagacaauaguguuaaa

SEQ ID NO: 92205 - RNA, 19 nt, Artificial Sequence
  Description of Artificial Sequence: Synthetic oligonucleotide
gcccguagucacgacuccc

SEQ ID NO: 92206 - RNA, 19 nt, Artificial Sequence
  Description of Artificial Sequence: Synthetic oligonucleotide
cuggcccguagucacgacu

SEQ ID NO: 92207 - RNA, 19 nt, Artificial Sequence
  Description of Artificial Sequence: Synthetic oligonucleotide
cgguauaacccugcaucag

SEQ ID NO: 92208 - RNA, 19 nt, Artificial Sequence
  Description of Artificial Sequence: Synthetic oligonucleotide
cucccggcgugucucccga

SEQ ID NO: 92209 - RNA, 19 nt, Artificial Sequence
  Description of Artificial Sequence: Synthetic oligonucleotide
gucuaucacccgugcaguu

SEQ ID NO: 92210 - RNA, 19 nt, Artificial Sequence
  Description of Artificial Sequence: Synthetic oligonucleotide
cgggucgaacaucauccac

SEQ ID NO: 92211 - RNA, 19 nt, Artificial Sequence
  Description of Artificial Sequence: Synthetic oligonucleotide
guccgcgcucagaacuuga

SEQ ID NO: 92212 - RNA, 19 nt, Artificial Sequence
  Description of Artificial Sequence: Synthetic oligonucleotide
cgacgguucauucuguagu

SEQ ID NO: 92213 - RNA, 19 nt, Artificial Sequence
  Description of Artificial Sequence: Synthetic oligonucleotide
acgagagguggcgguggau

SEQ ID NO: 92214 - RNA, 19 nt, Artificial Sequence
  Description of Artificial Sequence: Synthetic oligonucleotide
cggcugaaucaccacggug

SEQ ID NO: 92215 - RNA, 19 nt, Artificial Sequence
  Description of Artificial Sequence: Synthetic oligonucleotide
ccggaaacugaaugugucu

SEQ ID NO: 92216 - RNA, 19 nt, Artificial Sequence
  Description of Artificial Sequence: Synthetic oligonucleotide
ggcgugucucccgaaccuc

SEQ ID NO: 92217 - RNA, 19 nt, Artificial Sequence
  Description of Artificial Sequence: Synthetic oligonucleotide
cgcgcucagaacuugacau

SEQ ID NO: 92218 - RNA, 19 nt, Artificial Sequence
  Description of Artificial Sequence: Synthetic oligonucleotide
aggacacaucgaaggccau

SEQ ID NO: 92219 - RNA, 19 nt, Artificial Sequence
  Description of Artificial Sequence: Synthetic oligonucleotide
gggugacugauggcguguc

SEQ ID NO: 92220 - RNA, 19 nt, Artificial Sequence
  Description of Artificial Sequence: Synthetic oligonucleotide
cgaugcguccguccaguuc

SEQ ID NO: 92221 - RNA, 19 nt, Artificial Sequence
  Description of Artificial Sequence: Synthetic oligonucleotide
cccggcgugucucccgaac

SEQ ID NO: 92222 - RNA, 19 nt, Artificial Sequence
  Description of Artificial Sequence: Synthetic oligonucleotide
cacccucgaugcguccguc

SEQ ID NO: 92223 - RNA, 19 nt, Artificial Sequence
  Description of Artificial Sequence: Synthetic oligonucleotide
ccgcgcucagaacuugaca

SEQ ID NO: 92224 - RNA, 19 nt, Artificial Sequence
  Description of Artificial Sequence: Synthetic oligonucleotide
ggaccggauccuuguccaa

SEQ ID NO: 92225 - RNA, 19 nt, Artificial Sequence
  Description of Artificial Sequence: Synthetic oligonucleotide
cccguagucacgacucccu

SEQ ID NO: 92226 - RNA, 19 nt, Artificial Sequence
  Description of Artificial Sequence: Synthetic oligonucleotide
ccacgaggaccaacucuga

SEQ ID NO: 92227 - RNA, 19 nt, Artificial Sequence
  Description of Artificial Sequence: Synthetic oligonucleotide
ccauccacccucgaugcgu

SEQ ID NO: 92228 - RNA, 19 nt, Artificial Sequence
  Description of Artificial Sequence: Synthetic oligonucleotide
cgagucccaccugagauua

SEQ ID NO: 92229 - RNA, 19 nt, Artificial Sequence
  Description of Artificial Sequence: Synthetic oligonucleotide
cccggaaacggaagagggu

SEQ ID NO: 92230 - RNA, 19 nt, Artificial Sequence
  Description of Artificial Sequence: Synthetic oligonucleotide
ccagacguacauccccacu

SEQ ID NO: 92231 - RNA, 19 nt, Artificial Sequence
  Description of Artificial Sequence: Synthetic oligonucleotide
cccgaaccuccuucuuaca

SEQ ID NO: 92232 - RNA, 19 nt, Artificial Sequence
  Description of Artificial Sequence: Synthetic oligonucleotide
gaccaacucugaacaccuu

SEQ ID NO: 92233 - RNA, 19 nt, Artificial Sequence
  Description of Artificial Sequence: Synthetic oligonucleotide
cgaggguaccaguuggcgu

SEQ ID NO: 92234 - RNA, 19 nt, Artificial Sequence
  Description of Artificial Sequence: Synthetic oligonucleotide
gugucgagauaaggugcuu

SEQ ID NO: 92235 - RNA, 19 nt, Artificial Sequence
  Description of Artificial Sequence: Synthetic oligonucleotide
ccguaucuuagaguccagu

SEQ ID NO: 92236 - RNA, 19 nt, Artificial Sequence
  Description of Artificial Sequence: Synthetic oligonucleotide
gcucugugauccacucgcu

SEQ ID NO: 92237 - RNA, 19 nt, Artificial Sequence
  Description of Artificial Sequence: Synthetic oligonucleotide
caccaaugcgacgguucau

SEQ ID NO: 92238 - RNA, 19 nt, Artificial Sequence
  Description of Artificial Sequence: Synthetic oligonucleotide
cacggucuguugugauguu

SEQ ID NO: 92239 - RNA, 19 nt, Artificial Sequence
  Description of Artificial Sequence: Synthetic oligonucleotide
cgguaucgaaacucauccu

SEQ ID NO: 92240 - RNA, 19 nt, Artificial Sequence
  Description of Artificial Sequence: Synthetic oligonucleotide
cccuauuuuacaggccauu

SEQ ID NO: 92241 - RNA, 19 nt, Artificial Sequence
  Description of Artificial Sequence: Synthetic oligonucleotide
ccgagucccaccugagauu

SEQ ID NO: 92242 - RNA, 19 nt, Artificial Sequence
  Description of Artificial Sequence: Synthetic oligonucleotide
cgccgagucccaccugaga

SEQ ID NO: 92243 - RNA, 19 nt, Artificial Sequence
  Description of Artificial Sequence: Synthetic oligonucleotide
cggcgugucucccgaaccu

SEQ ID NO: 92244 - RNA, 19 nt, Artificial Sequence
  Description of Artificial Sequence: Synthetic oligonucleotide
ccguagucacgacucccuu

SEQ ID NO: 92245 - RNA, 19 nt, Artificial Sequence
  Description of Artificial Sequence: Synthetic oligonucleotide
ccacgcgcuucaugucuau

SEQ ID NO: 92246 - RNA, 19 nt, Artificial Sequence
  Description of Artificial Sequence: Synthetic oligonucleotide
aauuauuacggauaaacag

SEQ ID NO: 92247 - RNA, 19 nt, Artificial Sequence
  Description of Artificial Sequence: Synthetic oligonucleotide
uauauauauauuuauauac

SEQ ID NO: 92248 - RNA, 19 nt, Artificial Sequence
  Description of Artificial Sequence: Synthetic oligonucleotide
auauauauaauauauauau

SEQ ID NO: 92249 - RNA, 19 nt, Artificial Sequence
  Description of Artificial Sequence: Synthetic oligonucleotide
auuucauacacacacacac

SEQ ID NO: 92250 - RNA, 19 nt, Artificial Sequence
  Description of Artificial Sequence: Synthetic oligonucleotide
uguacuacggaauaucucg

SEQ ID NO: 92251 - RNA, 19 nt, Artificial Sequence
  Description of Artificial Sequence: Synthetic oligonucleotide
aaauaaaacucccuaaucu

SEQ ID NO: 92252 - RNA, 19 nt, Artificial Sequence
  Description of Artificial Sequence: Synthetic oligonucleotide
aauuaaauaucuucucagg

SEQ ID NO: 92253 - RNA, 19 nt, Artificial Sequence
  Description of Artificial Sequence: Synthetic oligonucleotide
uauaauauauauauaugug

SEQ ID NO: 92254 - RNA, 19 nt, Artificial Sequence
  Description of Artificial Sequence: Synthetic oligonucleotide
aacauauauauauauauau

SEQ ID NO: 92255 - RNA, 19 nt, Artificial Sequence
  Description of Artificial Sequence: Synthetic oligonucleotide
aaagaauauauauauauuu

SEQ ID NO: 92256 - RNA, 19 nt, Artificial Sequence
  Description of Artificial Sequence: Synthetic oligonucleotide
auauauaauauauauauau

SEQ ID NO: 92257 - RNA, 19 nt, Artificial Sequence
  Description of Artificial Sequence: Synthetic oligonucleotide
uaauauauauauaugugug

SEQ ID NO: 92258 - RNA, 19 nt, Artificial Sequence
  Description of Artificial Sequence: Synthetic oligonucleotide
uuauauauauaauauauau

SEQ ID NO: 92259 - RNA, 19 nt, Artificial Sequence
  Description of Artificial Sequence: Synthetic oligonucleotide
auauauuuuauauauauaa

SEQ ID NO: 92260 - RNA, 19 nt, Artificial Sequence
  Description of Artificial Sequence: Synthetic oligonucleotide
auauaauauauauauaugu

SEQ ID NO: 92261 - RNA, 19 nt, Artificial Sequence
  Description of Artificial Sequence: Synthetic oligonucleotide
auauauauauuuuauauau

SEQ ID NO: 92262 - RNA, 19 nt, Artificial Sequence
  Description of Artificial Sequence: Synthetic oligonucleotide
aucuuggacaaacaaaugc

SEQ ID NO: 92263 - RNA, 19 nt, Artificial Sequence
  Description of Artificial Sequence: Synthetic oligonucleotide
acaauuauuacggauaaac

SEQ ID NO: 92264 - RNA, 19 nt, Artificial Sequence
  Description of Artificial Sequence: Synthetic oligonucleotide
agggcuauuaaauaaguac

SEQ ID NO: 92265 - RNA, 19 nt, Artificial Sequence
  Description of Artificial Sequence: Synthetic oligonucleotide
uauauaauauauauauaug

SEQ ID NO: 92266 - RNA, 19 nt, Artificial Sequence
  Description of Artificial Sequence: Synthetic oligonucleotide
uaaacauauauauauauau

SEQ ID NO: 92267 - RNA, 19 nt, Artificial Sequence
  Description of Artificial Sequence: Synthetic oligonucleotide
uauauauauauauuuauau

SEQ ID NO: 92268 - RNA, 19 nt, Artificial Sequence
  Description of Artificial Sequence: Synthetic oligonucleotide
uauauauauauauauauuu

SEQ ID NO: 92269 - RNA, 19 nt, Artificial Sequence
  Description of Artificial Sequence: Synthetic oligonucleotide
auauauauauauuuuauau

SEQ ID NO: 92270 - RNA, 19 nt, Artificial Sequence
  Description of Artificial Sequence: Synthetic oligonucleotide
auaauauauauauaugugu

SEQ ID NO: 92271 - RNA, 19 nt, Artificial Sequence
  Description of Artificial Sequence: Synthetic oligonucleotide
auauauauuuuauauauau

SEQ ID NO: 92272 - RNA, 19 nt, Artificial Sequence
  Description of Artificial Sequence: Synthetic oligonucleotide
aauauauauauaugugugu

SEQ ID NO: 92273 - RNA, 19 nt, Artificial Sequence
  Description of Artificial Sequence: Synthetic oligonucleotide
aaagacgugauguuaauau

SEQ ID NO: 92274 - RNA, 19 nt, Artificial Sequence
  Description of Artificial Sequence: Synthetic oligonucleotide
uauauauauauauauuuau

SEQ ID NO: 92275 - RNA, 19 nt, Artificial Sequence
  Description of Artificial Sequence: Synthetic oligonucleotide
aauauauauauauuuuaua

SEQ ID NO: 92276 - RNA, 19 nt, Artificial Sequence
  Description of Artificial Sequence: Synthetic oligonucleotide
uauuaaauaaguaccguau

SEQ ID NO: 92277 - RNA, 19 nt, Artificial Sequence
  Description of Artificial Sequence: Synthetic oligonucleotide
uggacgaaaaguuucagug

SEQ ID NO: 92278 - RNA, 19 nt, Artificial Sequence
  Description of Artificial Sequence: Synthetic oligonucleotide
auuuauauauauaauauau

SEQ ID NO: 92279 - RNA, 19 nt, Artificial Sequence
  Description of Artificial Sequence: Synthetic oligonucleotide
aacgcuccaggauuuaaac

SEQ ID NO: 92280 - RNA, 19 nt, Artificial Sequence
  Description of Artificial Sequence: Synthetic oligonucleotide
aaguacguucguuuaacuc

SEQ ID NO: 92281 - RNA, 19 nt, Artificial Sequence
  Description of Artificial Sequence: Synthetic oligonucleotide
uauauauauaauauauaua

SEQ ID NO: 92282 - RNA, 19 nt, Artificial Sequence
  Description of Artificial Sequence: Synthetic oligonucleotide
aagcuagugacugucaccg

SEQ ID NO: 92283 - RNA, 19 nt, Artificial Sequence
  Description of Artificial Sequence: Synthetic oligonucleotide
uuuauauauauaauauaua

SEQ ID NO: 92284 - RNA, 19 nt, Artificial Sequence
  Description of Artificial Sequence: Synthetic oligonucleotide
acggcuugaagauauacuc

SEQ ID NO: 92285 - RNA, 19 nt, Artificial Sequence
  Description of Artificial Sequence: Synthetic oligonucleotide
aguacguucguuuaacuca

SEQ ID NO: 92286 - RNA, 19 nt, Artificial Sequence
  Description of Artificial Sequence: Synthetic oligonucleotide
ucuuggacaaacaaaugcu

SEQ ID NO: 92287 - RNA, 19 nt, Artificial Sequence
  Description of Artificial Sequence: Synthetic oligonucleotide
ugguaaacguccaugaacu

SEQ ID NO: 92288 - RNA, 19 nt, Artificial Sequence
  Description of Artificial Sequence: Synthetic oligonucleotide
uucauacacacacacacac

SEQ ID NO: 92289 - RNA, 19 nt, Artificial Sequence
  Description of Artificial Sequence: Synthetic oligonucleotide
agauuuaguauguagaauu

SEQ ID NO: 92290 - RNA, 19 nt, Artificial Sequence
  Description of Artificial Sequence: Synthetic oligonucleotide
uauauauauauuuuauaua

SEQ ID NO: 92291 - RNA, 19 nt, Artificial Sequence
  Description of Artificial Sequence: Synthetic oligonucleotide
uuacggauaaacaguagca

SEQ ID NO: 92292 - RNA, 19 nt, Artificial Sequence
  Description of Artificial Sequence: Synthetic oligonucleotide
aagacgugauguuaauauc

SEQ ID NO: 92293 - RNA, 19 nt, Artificial Sequence
  Description of Artificial Sequence: Synthetic oligonucleotide
aacucccuaaucuuccggg

SEQ ID NO: 92294 - RNA, 19 nt, Artificial Sequence
  Description of Artificial Sequence: Synthetic oligonucleotide
auauauauauaugugugug

SEQ ID NO: 92295 - RNA, 19 nt, Artificial Sequence
  Description of Artificial Sequence: Synthetic oligonucleotide
uauuuauauauauaauaua

SEQ ID NO: 92296 - RNA, 19 nt, Artificial Sequence
  Description of Artificial Sequence: Synthetic oligonucleotide
agaauauauauauauuuua

SEQ ID NO: 92297 - RNA, 19 nt, Artificial Sequence
  Description of Artificial Sequence: Synthetic oligonucleotide
uacacacacacacacacac

SEQ ID NO: 92298 - RNA, 19 nt, Artificial Sequence
  Description of Artificial Sequence: Synthetic oligonucleotide
acguccaugaacuuuacca

SEQ ID NO: 92299 - RNA, 19 nt, Artificial Sequence
  Description of Artificial Sequence: Synthetic oligonucleotide
uaaaccgggauuucuugcg

SEQ ID NO: 92300 - RNA, 19 nt, Artificial Sequence
  Description of Artificial Sequence: Synthetic oligonucleotide
aacugcacuagagacaaag

SEQ ID NO: 92301 - RNA, 19 nt, Artificial Sequence
  Description of Artificial Sequence: Synthetic oligonucleotide
cauacacacacacacacac

SEQ ID NO: 92302 - RNA, 19 nt, Artificial Sequence
  Description of Artificial Sequence: Synthetic oligonucleotide
auauauauauauuuauaua

SEQ ID NO: 92303 - RNA, 19 nt, Artificial Sequence
  Description of Artificial Sequence: Synthetic oligonucleotide
uauauauaauauauauaua

SEQ ID NO: 92304 - RNA, 19 nt, Artificial Sequence
  Description of Artificial Sequence: Synthetic oligonucleotide
aauagcugcgcugguaaac

SEQ ID NO: 92305 - RNA, 19 nt, Artificial Sequence
  Description of Artificial Sequence: Synthetic oligonucleotide
uauauauuuuauauauaua

SEQ ID NO: 92306 - RNA, 19 nt, Artificial Sequence
  Description of Artificial Sequence: Synthetic oligonucleotide
auuauuacggauaaacagu

SEQ ID NO: 92307 - RNA, 19 nt, Artificial Sequence
  Description of Artificial Sequence: Synthetic oligonucleotide
auuggacggcaauagcugc

SEQ ID NO: 92308 - RNA, 19 nt, Artificial Sequence
  Description of Artificial Sequence: Synthetic oligonucleotide
uauguacuacggaauaucu

SEQ ID NO: 92309 - RNA, 19 nt, Artificial Sequence
  Description of Artificial Sequence: Synthetic oligonucleotide
aaucccgcgagccccgacc

SEQ ID NO: 92310 - RNA, 19 nt, Artificial Sequence
  Description of Artificial Sequence: Synthetic oligonucleotide
uuauuacggauaaacagua

SEQ ID NO: 92311 - RNA, 19 nt, Artificial Sequence
  Description of Artificial Sequence: Synthetic oligonucleotide
aggacgaaagaccacagca

SEQ ID NO: 92312 - RNA, 19 nt, Artificial Sequence
  Description of Artificial Sequence: Synthetic oligonucleotide
ucggaaaacugcacuagag

SEQ ID NO: 92313 - RNA, 19 nt, Artificial Sequence
  Description of Artificial Sequence: Synthetic oligonucleotide
agaaaguucaugguuucgg

SEQ ID NO: 92314 - RNA, 19 nt, Artificial Sequence
  Description of Artificial Sequence: Synthetic oligonucleotide
auauauauauuuauauaca

SEQ ID NO: 92315 - RNA, 19 nt, Artificial Sequence
  Description of Artificial Sequence: Synthetic oligonucleotide
aagaauauauauauauuuu

SEQ ID NO: 92316 - RNA, 19 nt, Artificial Sequence
  Description of Artificial Sequence: Synthetic oligonucleotide
agagauuuaguauguagaa

SEQ ID NO: 92317 - RNA, 19 nt, Artificial Sequence
  Description of Artificial Sequence: Synthetic oligonucleotide
cauauauauauauauauau

SEQ ID NO: 92318 - RNA, 19 nt, Artificial Sequence
  Description of Artificial Sequence: Synthetic oligonucleotide
uauauauauuuuauauaua

SEQ ID NO: 92319 - RNA, 19 nt, Artificial Sequence
  Description of Artificial Sequence: Synthetic oligonucleotide
cacacacacacacaaacag

SEQ ID NO: 92320 - RNA, 19 nt, Artificial Sequence
  Description of Artificial Sequence: Synthetic oligonucleotide
gauguaagaucccgagggg

SEQ ID NO: 92321 - RNA, 19 nt, Artificial Sequence
  Description of Artificial Sequence: Synthetic oligonucleotide
auauacucuaucucaucag

SEQ ID NO: 92322 - RNA, 19 nt, Artificial Sequence
  Description of Artificial Sequence: Synthetic oligonucleotide
ugacguugcucucugaagu

SEQ ID NO: 92323 - RNA, 19 nt, Artificial Sequence
  Description of Artificial Sequence: Synthetic oligonucleotide
aaaagaauauauauauauu

SEQ ID NO: 92324 - RNA, 19 nt, Artificial Sequence
  Description of Artificial Sequence: Synthetic oligonucleotide
uuaaaccgggauuucuugc

SEQ ID NO: 92325 - RNA, 19 nt, Artificial Sequence
  Description of Artificial Sequence: Synthetic oligonucleotide
uacggaauaucucggaaaa

SEQ ID NO: 92326 - RNA, 19 nt, Artificial Sequence
  Description of Artificial Sequence: Synthetic oligonucleotide
acauuuacacgucugcgga

SEQ ID NO: 92327 - RNA, 19 nt, Artificial Sequence
  Description of Artificial Sequence: Synthetic oligonucleotide
uccgauguaagaucccgag

SEQ ID NO: 92328 - RNA, 19 nt, Artificial Sequence
  Description of Artificial Sequence: Synthetic oligonucleotide
uauuacggauaaacaguag

SEQ ID NO: 92329 - RNA, 19 nt, Artificial Sequence
  Description of Artificial Sequence: Synthetic oligonucleotide
uuucauacacacacacaca

SEQ ID NO: 92330 - RNA, 19 nt, Artificial Sequence
  Description of Artificial Sequence: Synthetic oligonucleotide
cacacacacacacacaaac

SEQ ID NO: 92331 - RNA, 19 nt, Artificial Sequence
  Description of Artificial Sequence: Synthetic oligonucleotide
cugguaaacguccaugaac

SEQ ID NO: 92332 - RNA, 19 nt, Artificial Sequence
  Description of Artificial Sequence: Synthetic oligonucleotide
gagagauuuaguauguaga

SEQ ID NO: 92333 - RNA, 19 nt, Artificial Sequence
  Description of Artificial Sequence: Synthetic oligonucleotide
aaacauauauauauauaua

SEQ ID NO: 92334 - RNA, 19 nt, Artificial Sequence
  Description of Artificial Sequence: Synthetic oligonucleotide
cacacacacacacacacac

SEQ ID NO: 92335 - RNA, 19 nt, Artificial Sequence
  Description of Artificial Sequence: Synthetic oligonucleotide
ucugaagugggcacgcacu

SEQ ID NO: 92336 - RNA, 19 nt, Artificial Sequence
  Description of Artificial Sequence: Synthetic oligonucleotide
agcauguaguggguaaucc

SEQ ID NO: 92337 - RNA, 19 nt, Artificial Sequence
  Description of Artificial Sequence: Synthetic oligonucleotide
uacucuaucucaucagggu

SEQ ID NO: 92338 - RNA, 19 nt, Artificial Sequence
  Description of Artificial Sequence: Synthetic oligonucleotide
gguuagucggucuuucugg

SEQ ID NO: 92339 - RNA, 19 nt, Artificial Sequence
  Description of Artificial Sequence: Synthetic oligonucleotide
ugguuagucggucuuucug

SEQ ID NO: 92340 - RNA, 19 nt, Artificial Sequence
  Description of Artificial Sequence: Synthetic oligonucleotide
ugguggugugguuagucgg

SEQ ID NO: 92341 - RNA, 19 nt, Artificial Sequence
  Description of Artificial Sequence: Synthetic oligonucleotide
cugcacuagagacaaagac

SEQ ID NO: 92342 - RNA, 19 nt, Artificial Sequence
  Description of Artificial Sequence: Synthetic oligonucleotide
auauauauauauauauuua

SEQ ID NO: 92343 - RNA, 19 nt, Artificial Sequence
  Description of Artificial Sequence: Synthetic oligonucleotide
uuggacggcaauagcugcg

SEQ ID NO: 92344 - RNA, 19 nt, Artificial Sequence
  Description of Artificial Sequence: Synthetic oligonucleotide
uagugacugucaccgaucc

SEQ ID NO: 92345 - RNA, 19 nt, Artificial Sequence
  Description of Artificial Sequence: Synthetic oligonucleotide
aauauguacuacggaauau

SEQ ID NO: 92346 - RNA, 19 nt, Artificial Sequence
  Description of Artificial Sequence: Synthetic oligonucleotide
ucgucguugcaacagcccc

SEQ ID NO: 92347 - RNA, 19 nt, Artificial Sequence
  Description of Artificial Sequence: Synthetic oligonucleotide
agcgcgcucucucugaccg

SEQ ID NO: 92348 - RNA, 19 nt, Artificial Sequence
  Description of Artificial Sequence: Synthetic oligonucleotide
agacaccaauaacauuagc

SEQ ID NO: 92349 - RNA, 19 nt, Artificial Sequence
  Description of Artificial Sequence: Synthetic oligonucleotide
uuucagugcaaucccgcga

SEQ ID NO: 92350 - RNA, 19 nt, Artificial Sequence
  Description of Artificial Sequence: Synthetic oligonucleotide
uccgcucugagcaaggcuc

SEQ ID NO: 92351 - RNA, 19 nt, Artificial Sequence
  Description of Artificial Sequence: Synthetic oligonucleotide
auuuacacgucugcggauc

SEQ ID NO: 92352 - RNA, 19 nt, Artificial Sequence
  Description of Artificial Sequence: Synthetic oligonucleotide
cuccggagcgagaagagcc

SEQ ID NO: 92353 - RNA, 19 nt, Artificial Sequence
  Description of Artificial Sequence: Synthetic oligonucleotide
acaggaaucccagaaauaa

SEQ ID NO: 92354 - RNA, 19 nt, Artificial Sequence
  Description of Artificial Sequence: Synthetic oligonucleotide
uccgugaggggcuuacggg

SEQ ID NO: 92355 - RNA, 19 nt, Artificial Sequence
  Description of Artificial Sequence: Synthetic oligonucleotide
guaauccacaaaauaggcc

SEQ ID NO: 92356 - RNA, 19 nt, Artificial Sequence
  Description of Artificial Sequence: Synthetic oligonucleotide
gacgaaagaccacagcaga

SEQ ID NO: 92357 - RNA, 19 nt, Artificial Sequence
  Description of Artificial Sequence: Synthetic oligonucleotide
ucguuuaacucaagcugcc

SEQ ID NO: 92358 - RNA, 19 nt, Artificial Sequence
  Description of Artificial Sequence: Synthetic oligonucleotide
uuggacaaacaaaugcuuu

SEQ ID NO: 92359 - RNA, 19 nt, Artificial Sequence
  Description of Artificial Sequence: Synthetic oligonucleotide
auauauauauauauuuaua

SEQ ID NO: 92360 - RNA, 19 nt, Artificial Sequence
  Description of Artificial Sequence: Synthetic oligonucleotide
ucauacacacacacacaca

SEQ ID NO: 92361 - RNA, 19 nt, Artificial Sequence
  Description of Artificial Sequence: Synthetic oligonucleotide
auauauauauauauauauu

SEQ ID NO: 92362 - RNA, 19 nt, Artificial Sequence
  Description of Artificial Sequence: Synthetic oligonucleotide
ggguaauccacaaaauagg

SEQ ID NO: 92363 - RNA, 19 nt, Artificial Sequence
  Description of Artificial Sequence: Synthetic oligonucleotide
gaaaguucaugguuucgga

SEQ ID NO: 92364 - RNA, 19 nt, Artificial Sequence
  Description of Artificial Sequence: Synthetic oligonucleotide
cauaaacauauauauauau

SEQ ID NO: 92365 - RNA, 19 nt, Artificial Sequence
  Description of Artificial Sequence: Synthetic oligonucleotide
auacucuaucucaucaggg

SEQ ID NO: 92366 - RNA, 19 nt, Artificial Sequence
  Description of Artificial Sequence: Synthetic oligonucleotide
ucacgccgugcucugacgg

SEQ ID NO: 92367 - RNA, 19 nt, Artificial Sequence
  Description of Artificial Sequence: Synthetic oligonucleotide
auaguugaaauuaaauauu

SEQ ID NO: 92368 - RNA, 19 nt, Artificial Sequence
  Description of Artificial Sequence: Synthetic oligonucleotide
gaauauauauauauuuuau

SEQ ID NO: 92369 - RNA, 19 nt, Artificial Sequence
  Description of Artificial Sequence: Synthetic oligonucleotide
uuggacgaaaaguuucagu

SEQ ID NO: 92370 - RNA, 19 nt, Artificial Sequence
  Description of Artificial Sequence: Synthetic oligonucleotide
guuuaacucaagcugccuc

SEQ ID NO: 92371 - RNA, 19 nt, Artificial Sequence
  Description of Artificial Sequence: Synthetic oligonucleotide
uacggauaaacaguagcac

SEQ ID NO: 92372 - RNA, 19 nt, Artificial Sequence
  Description of Artificial Sequence: Synthetic oligonucleotide
ucaccgauccgggaaagag

SEQ ID NO: 92373 - RNA, 19 nt, Artificial Sequence
  Description of Artificial Sequence: Synthetic oligonucleotide
caagcuagugacugucacc

SEQ ID NO: 92374 - RNA, 19 nt, Artificial Sequence
  Description of Artificial Sequence: Synthetic oligonucleotide
auaaacauauauauauaua

SEQ ID NO: 92375 - RNA, 19 nt, Artificial Sequence
  Description of Artificial Sequence: Synthetic oligonucleotide
ugcaacgcgagucuguguu

SEQ ID NO: 92376 - RNA, 19 nt, Artificial Sequence
  Description of Artificial Sequence: Synthetic oligonucleotide
cgauguaagaucccgaggg

SEQ ID NO: 92377 - RNA, 19 nt, Artificial Sequence
  Description of Artificial Sequence: Synthetic oligonucleotide
ucacccguccaugagcccg

SEQ ID NO: 92378 - RNA, 19 nt, Artificial Sequence
  Description of Artificial Sequence: Synthetic oligonucleotide
aggauuuaaaccgggauuu

SEQ ID NO: 92379 - RNA, 19 nt, Artificial Sequence
  Description of Artificial Sequence: Synthetic oligonucleotide
uguucugucgauggugaug

SEQ ID NO: 92380 - RNA, 19 nt, Artificial Sequence
  Description of Artificial Sequence: Synthetic oligonucleotide
acauauauauauauauaua

SEQ ID NO: 92381 - RNA, 19 nt, Artificial Sequence
  Description of Artificial Sequence: Synthetic oligonucleotide
cagaccacggcuacuccgg

SEQ ID NO: 92382 - RNA, 19 nt, Artificial Sequence
  Description of Artificial Sequence: Synthetic oligonucleotide
ucgauuggacggcaauagc

SEQ ID NO: 92383 - RNA, 19 nt, Artificial Sequence
  Description of Artificial Sequence: Synthetic oligonucleotide
aguuccacgaaggaccaug

SEQ ID NO: 92384 - RNA, 19 nt, Artificial Sequence
  Description of Artificial Sequence: Synthetic oligonucleotide
ucuugcgcgccuuggcggg

SEQ ID NO: 92385 - RNA, 19 nt, Artificial Sequence
  Description of Artificial Sequence: Synthetic oligonucleotide
gacguugcucucugaagug

SEQ ID NO: 92386 - RNA, 19 nt, Artificial Sequence
  Description of Artificial Sequence: Synthetic oligonucleotide
cucgauuggacggcaauag

SEQ ID NO: 92387 - RNA, 19 nt, Artificial Sequence
  Description of Artificial Sequence: Synthetic oligonucleotide
cacguuuccuggcaggcag

SEQ ID NO: 92388 - RNA, 19 nt, Artificial Sequence
  Description of Artificial Sequence: Synthetic oligonucleotide
uacuacggaauaucucgga

SEQ ID NO: 92389 - RNA, 19 nt, Artificial Sequence
  Description of Artificial Sequence: Synthetic oligonucleotide
agcgcgacugguccgaugu

SEQ ID NO: 92390 - RNA, 19 nt, Artificial Sequence
  Description of Artificial Sequence: Synthetic oligonucleotide
cugcuaugcuguaggaagc

SEQ ID NO: 92391 - RNA, 19 nt, Artificial Sequence
  Description of Artificial Sequence: Synthetic oligonucleotide
uugcacguuuccuggcagg

SEQ ID NO: 92392 - RNA, 19 nt, Artificial Sequence
  Description of Artificial Sequence: Synthetic oligonucleotide
ggacgaaaaguuucagugc

SEQ ID NO: 92393 - RNA, 19 nt, Artificial Sequence
  Description of Artificial Sequence: Synthetic oligonucleotide
aaccgggauuucuugcgcu

SEQ ID NO: 92394 - RNA, 19 nt, Artificial Sequence
  Description of Artificial Sequence: Synthetic oligonucleotide
cacacacacacaaacagua

SEQ ID NO: 92395 - RNA, 19 nt, Artificial Sequence
  Description of Artificial Sequence: Synthetic oligonucleotide
cugucugcgcacacggccg

SEQ ID NO: 92396 - RNA, 19 nt, Artificial Sequence
  Description of Artificial Sequence: Synthetic oligonucleotide
gguaugucuacaggaaucc

SEQ ID NO: 92397 - RNA, 19 nt, Artificial Sequence
  Description of Artificial Sequence: Synthetic oligonucleotide
auguacuacggaauaucuc

SEQ ID NO: 92398 - RNA, 19 nt, Artificial Sequence
  Description of Artificial Sequence: Synthetic oligonucleotide
ccuaucaggaucugaguag

SEQ ID NO: 92399 - RNA, 19 nt, Artificial Sequence
  Description of Artificial Sequence: Synthetic oligonucleotide
uccgggaaagagauuggaa

SEQ ID NO: 92400 - RNA, 19 nt, Artificial Sequence
  Description of Artificial Sequence: Synthetic oligonucleotide
guacuacggaauaucucgg

SEQ ID NO: 92401 - RNA, 19 nt, Artificial Sequence
  Description of Artificial Sequence: Synthetic oligonucleotide
aguaaagccaggguccagu

SEQ ID NO: 92402 - RNA, 19 nt, Artificial Sequence
  Description of Artificial Sequence: Synthetic oligonucleotide
uguccgucagcgcgacugg

SEQ ID NO: 92403 - RNA, 19 nt, Artificial Sequence
  Description of Artificial Sequence: Synthetic oligonucleotide
gguggguaugucuacagga

SEQ ID NO: 92404 - RNA, 19 nt, Artificial Sequence
  Description of Artificial Sequence: Synthetic oligonucleotide
cuuggcgugguggagguac

SEQ ID NO: 92405 - RNA, 19 nt, Artificial Sequence
  Description of Artificial Sequence: Synthetic oligonucleotide
uuagucggucuuucuggug

SEQ ID NO: 92406 - RNA, 19 nt, Artificial Sequence
  Description of Artificial Sequence: Synthetic oligonucleotide
cuccgugaggggcuuacgg

SEQ ID NO: 92407 - RNA, 19 nt, Artificial Sequence
  Description of Artificial Sequence: Synthetic oligonucleotide
cacacacacacacacacaa

SEQ ID NO: 92408 - RNA, 19 nt, Artificial Sequence
  Description of Artificial Sequence: Synthetic oligonucleotide
ucucgguucgcucgccagc

SEQ ID NO: 92409 - RNA, 19 nt, Artificial Sequence
  Description of Artificial Sequence: Synthetic oligonucleotide
uuuucguccuauggucucc

SEQ ID NO: 92410 - RNA, 19 nt, Artificial Sequence
  Description of Artificial Sequence: Synthetic oligonucleotide
ugcaaucccgcgagccccg

SEQ ID NO: 92411 - RNA, 19 nt, Artificial Sequence
  Description of Artificial Sequence: Synthetic oligonucleotide
ggaauaucucggaaaacug

SEQ ID NO: 92412 - RNA, 19 nt, Artificial Sequence
  Description of Artificial Sequence: Synthetic oligonucleotide
uacacgucugcggaucuug

SEQ ID NO: 92413 - RNA, 19 nt, Artificial Sequence
  Description of Artificial Sequence: Synthetic oligonucleotide
agugacugucaccgauccg

SEQ ID NO: 92414 - RNA, 19 nt, Artificial Sequence
  Description of Artificial Sequence: Synthetic oligonucleotide
aucccgcgagccccgaccc

SEQ ID NO: 92415 - RNA, 19 nt, Artificial Sequence
  Description of Artificial Sequence: Synthetic oligonucleotide
cucgucguugcaacagccc

SEQ ID NO: 92416 - RNA, 19 nt, Artificial Sequence
  Description of Artificial Sequence: Synthetic oligonucleotide
ugccucgccuugcaacgcg

SEQ ID NO: 92417 - RNA, 19 nt, Artificial Sequence
  Description of Artificial Sequence: Synthetic oligonucleotide
uacguggguggguaugucu

SEQ ID NO: 92418 - RNA, 19 nt, Artificial Sequence
  Description of Artificial Sequence: Synthetic oligonucleotide
uuucggaggcccguccggg

SEQ ID NO: 92419 - RNA, 19 nt, Artificial Sequence
  Description of Artificial Sequence: Synthetic oligonucleotide
uccggcucggacugcgagg

SEQ ID NO: 92420 - RNA, 19 nt, Artificial Sequence
  Description of Artificial Sequence: Synthetic oligonucleotide
acaaagacgugauguuaau

SEQ ID NO: 92421 - RNA, 19 nt, Artificial Sequence
  Description of Artificial Sequence: Synthetic oligonucleotide
guuucggaggcccguccgg

SEQ ID NO: 92422 - RNA, 19 nt, Artificial Sequence
  Description of Artificial Sequence: Synthetic oligonucleotide
acuccggagcgagaagagc

SEQ ID NO: 92423 - RNA, 19 nt, Artificial Sequence
  Description of Artificial Sequence: Synthetic oligonucleotide
ugucuguccgucagcgcga

SEQ ID NO: 92424 - RNA, 19 nt, Artificial Sequence
  Description of Artificial Sequence: Synthetic oligonucleotide
acggaauaucucggaaaac

SEQ ID NO: 92425 - RNA, 19 nt, Artificial Sequence
  Description of Artificial Sequence: Synthetic oligonucleotide
ucguccuauggucuccccu

SEQ ID NO: 92426 - RNA, 19 nt, Artificial Sequence
  Description of Artificial Sequence: Synthetic oligonucleotide
ggaaagagauuggaaacac

SEQ ID NO: 92427 - RNA, 19 nt, Artificial Sequence
  Description of Artificial Sequence: Synthetic oligonucleotide
guauguagaauucucuauu

SEQ ID NO: 92428 - RNA, 19 nt, Artificial Sequence
  Description of Artificial Sequence: Synthetic oligonucleotide
cuacggaauaucucggaaa

SEQ ID NO: 92429 - RNA, 19 nt, Artificial Sequence
  Description of Artificial Sequence: Synthetic oligonucleotide
uuuugacccuuucccuuuc

SEQ ID NO: 92430 - RNA, 19 nt, Artificial Sequence
  Description of Artificial Sequence: Synthetic oligonucleotide
cuugcaacgcgagucugug

SEQ ID NO: 92431 - RNA, 19 nt, Artificial Sequence
  Description of Artificial Sequence: Synthetic oligonucleotide
cuguccgucagcgcgacug

SEQ ID NO: 92432 - RNA, 19 nt, Artificial Sequence
  Description of Artificial Sequence: Synthetic oligonucleotide
uccuccggcgcagaccacg

SEQ ID NO: 92433 - RNA, 19 nt, Artificial Sequence
  Description of Artificial Sequence: Synthetic oligonucleotide
aagggcuauuaaauaagua

SEQ ID NO: 92434 - RNA, 19 nt, Artificial Sequence
  Description of Artificial Sequence: Synthetic oligonucleotide
ugugguuagucggucuuuc

SEQ ID NO: 92435 - RNA, 19 nt, Artificial Sequence
  Description of Artificial Sequence: Synthetic oligonucleotide
gagagagcaagagauacau

SEQ ID NO: 92436 - RNA, 19 nt, Artificial Sequence
  Description of Artificial Sequence: Synthetic oligonucleotide
uggacggcaauagcugcgc

SEQ ID NO: 92437 - RNA, 19 nt, Artificial Sequence
  Description of Artificial Sequence: Synthetic oligonucleotide
acacacacacacaaacagu

SEQ ID NO: 92438 - RNA, 19 nt, Artificial Sequence
  Description of Artificial Sequence: Synthetic oligonucleotide
cucgguucgcucgccagcg

SEQ ID NO: 92439 - RNA, 19 nt, Artificial Sequence
  Description of Artificial Sequence: Synthetic oligonucleotide
acacacacacacacaaaca

SEQ ID NO: 92440 - RNA, 19 nt, Artificial Sequence
  Description of Artificial Sequence: Synthetic oligonucleotide
gcagaccacggcuacuccg

SEQ ID NO: 92441 - RNA, 19 nt, Artificial Sequence
  Description of Artificial Sequence: Synthetic oligonucleotide
uacguucguuuaacucaag

SEQ ID NO: 92442 - RNA, 19 nt, Artificial Sequence
  Description of Artificial Sequence: Synthetic oligonucleotide
cugucccucucucgguucg

SEQ ID NO: 92443 - RNA, 19 nt, Artificial Sequence
  Description of Artificial Sequence: Synthetic oligonucleotide
ugucugcgcacacggccgc

SEQ ID NO: 92444 - RNA, 19 nt, Artificial Sequence
  Description of Artificial Sequence: Synthetic oligonucleotide
cagugcaaucccgcgagcc

SEQ ID NO: 92445 - RNA, 19 nt, Artificial Sequence
  Description of Artificial Sequence: Synthetic oligonucleotide
accgauccgggaaagagau

SEQ ID NO: 92446 - RNA, 19 nt, Artificial Sequence
  Description of Artificial Sequence: Synthetic oligonucleotide
ucagugcaaucccgcgagc

SEQ ID NO: 92447 - RNA, 19 nt, Artificial Sequence
  Description of Artificial Sequence: Synthetic oligonucleotide
agagagcaagagauacauc

SEQ ID NO: 92448 - RNA, 19 nt, Artificial Sequence
  Description of Artificial Sequence: Synthetic oligonucleotide
ucucgauuggacggcaaua

SEQ ID NO: 92449 - RNA, 19 nt, Artificial Sequence
  Description of Artificial Sequence: Synthetic oligonucleotide
gguuucggaggcccguccg

SEQ ID NO: 92450 - RNA, 19 nt, Artificial Sequence
  Description of Artificial Sequence: Synthetic oligonucleotide
agcuccgaucgcuuugccu

SEQ ID NO: 92451 - RNA, 19 nt, Artificial Sequence
  Description of Artificial Sequence: Synthetic oligonucleotide
ucucucgguucgcucgcca

SEQ ID NO: 92452 - RNA, 19 nt, Artificial Sequence
  Description of Artificial Sequence: Synthetic oligonucleotide
cuccgaucgcuuugccucc

SEQ ID NO: 92453 - RNA, 19 nt, Artificial Sequence
  Description of Artificial Sequence: Synthetic oligonucleotide
ugaacgcuccaggauuuaa

SEQ ID NO: 92454 - RNA, 19 nt, Artificial Sequence
  Description of Artificial Sequence: Synthetic oligonucleotide
cucacgccgugcucugacg

SEQ ID NO: 92455 - RNA, 19 nt, Artificial Sequence
  Description of Artificial Sequence: Synthetic oligonucleotide
uggguuugucguguuucug

SEQ ID NO: 92456 - RNA, 19 nt, Artificial Sequence
  Description of Artificial Sequence: Synthetic oligonucleotide
ugucaccgauccgggaaag

SEQ ID NO: 92457 - RNA, 19 nt, Artificial Sequence
  Description of Artificial Sequence: Synthetic oligonucleotide
cucggaaaacugcacuaga

SEQ ID NO: 92458 - RNA, 19 nt, Artificial Sequence
  Description of Artificial Sequence: Synthetic oligonucleotide
uccgucagcgcgacugguc

SEQ ID NO: 92459 - RNA, 19 nt, Artificial Sequence
  Description of Artificial Sequence: Synthetic oligonucleotide
gagauuuaguauguagaau

SEQ ID NO: 92460 - RNA, 19 nt, Artificial Sequence
  Description of Artificial Sequence: Synthetic oligonucleotide
gugcaaucccgcgagcccc

SEQ ID NO: 92461 - RNA, 19 nt, Artificial Sequence
  Description of Artificial Sequence: Synthetic oligonucleotide
ggaugggcuagccacucac

SEQ ID NO: 92462 - RNA, 19 nt, Artificial Sequence
  Description of Artificial Sequence: Synthetic oligonucleotide
uucuggaaccgaggcccgg

SEQ ID NO: 92463 - RNA, 19 nt, Artificial Sequence
  Description of Artificial Sequence: Synthetic oligonucleotide
cuacuccggagcgagaaga

SEQ ID NO: 92464 - RNA, 19 nt, Artificial Sequence
  Description of Artificial Sequence: Synthetic oligonucleotide
cccacaccgcauuaggggc

SEQ ID NO: 92465 - RNA, 19 nt, Artificial Sequence
  Description of Artificial Sequence: Synthetic oligonucleotide
guggagguacagcaguaaa

SEQ ID NO: 92466 - RNA, 19 nt, Artificial Sequence
  Description of Artificial Sequence: Synthetic oligonucleotide
gcaaguacguucguuuaac

SEQ ID NO: 92467 - RNA, 19 nt, Artificial Sequence
  Description of Artificial Sequence: Synthetic oligonucleotide
cuuggacaaacaaaugcuu

SEQ ID NO: 92468 - RNA, 19 nt, Artificial Sequence
  Description of Artificial Sequence: Synthetic oligonucleotide
gcauguaguggguaaucca

SEQ ID NO: 92469 - RNA, 19 nt, Artificial Sequence
  Description of Artificial Sequence: Synthetic oligonucleotide
auacacacacacacacaca

SEQ ID NO: 92470 - RNA, 19 nt, Artificial Sequence
  Description of Artificial Sequence: Synthetic oligonucleotide
guacguucguuuaacucaa

SEQ ID NO: 92471 - RNA, 19 nt, Artificial Sequence
  Description of Artificial Sequence: Synthetic oligonucleotide
gaaccgaggcccgggccgg

SEQ ID NO: 92472 - RNA, 19 nt, Artificial Sequence
  Description of Artificial Sequence: Synthetic oligonucleotide
gaacgcuccaggauuuaaa

SEQ ID NO: 92473 - RNA, 19 nt, Artificial Sequence
  Description of Artificial Sequence: Synthetic oligonucleotide
ggugacguugcucucugaa

SEQ ID NO: 92474 - RNA, 19 nt, Artificial Sequence
  Description of Artificial Sequence: Synthetic oligonucleotide
cccacaauuauuacggaua

SEQ ID NO: 92475 - RNA, 19 nt, Artificial Sequence
  Description of Artificial Sequence: Synthetic oligonucleotide
cccucucucgguucgcucg

SEQ ID NO: 92476 - RNA, 19 nt, Artificial Sequence
  Description of Artificial Sequence: Synthetic oligonucleotide
ccgauguaagaucccgagg

SEQ ID NO: 92477 - RNA, 19 nt, Artificial Sequence
  Description of Artificial Sequence: Synthetic oligonucleotide
uagcugcgcugguaaacgu

SEQ ID NO: 92478 - RNA, 19 nt, Artificial Sequence
  Description of Artificial Sequence: Synthetic oligonucleotide
ccgcauuaggggcacacag

SEQ ID NO: 92479 - RNA, 19 nt, Artificial Sequence
  Description of Artificial Sequence: Synthetic oligonucleotide
guaguggguaauccacaaa

SEQ ID NO: 92480 - RNA, 19 nt, Artificial Sequence
  Description of Artificial Sequence: Synthetic oligonucleotide
uuacggguccugccccacu

SEQ ID NO: 92481 - RNA, 19 nt, Artificial Sequence
  Description of Artificial Sequence: Synthetic oligonucleotide
acacgucugcggaucuugg

SEQ ID NO: 92482 - RNA, 19 nt, Artificial Sequence
  Description of Artificial Sequence: Synthetic oligonucleotide
caggauuuaaaccgggauu

SEQ ID NO: 92483 - RNA, 19 nt, Artificial Sequence
  Description of Artificial Sequence: Synthetic oligonucleotide
uugcaacgcgagucugugu

SEQ ID NO: 92484 - RNA, 19 nt, Artificial Sequence
  Description of Artificial Sequence: Synthetic oligonucleotide
guguacguggguggguaug

SEQ ID NO: 92485 - RNA, 19 nt, Artificial Sequence
  Description of Artificial Sequence: Synthetic oligonucleotide
cucgccagcgcgcucucuc

SEQ ID NO: 92486 - RNA, 19 nt, Artificial Sequence
  Description of Artificial Sequence: Synthetic oligonucleotide
cccgaaacccugagggagg

SEQ ID NO: 92487 - RNA, 19 nt, Artificial Sequence
  Description of Artificial Sequence: Synthetic oligonucleotide
cccgggaaugcuucugccg

SEQ ID NO: 92488 - RNA, 19 nt, Artificial Sequence
  Description of Artificial Sequence: Synthetic oligonucleotide
caccgccuuggcuugucac

SEQ ID NO: 92489 - RNA, 19 nt, Artificial Sequence
  Description of Artificial Sequence: Synthetic oligonucleotide
acacacacacacacacaca

SEQ ID NO: 92490 - RNA, 19 nt, Artificial Sequence
  Description of Artificial Sequence: Synthetic oligonucleotide
cuugacucggggccaggga

SEQ ID NO: 92491 - RNA, 19 nt, Artificial Sequence
  Description of Artificial Sequence: Synthetic oligonucleotide
uccgcaugaucugcauggu

SEQ ID NO: 92492 - RNA, 19 nt, Artificial Sequence
  Description of Artificial Sequence: Synthetic oligonucleotide
ggcuuacggguccugcccc

SEQ ID NO: 92493 - RNA, 19 nt, Artificial Sequence
  Description of Artificial Sequence: Synthetic oligonucleotide
gucacaucugcaaguacgu

SEQ ID NO: 92494 - RNA, 19 nt, Artificial Sequence
  Description of Artificial Sequence: Synthetic oligonucleotide
caggacggcuugaagauau

SEQ ID NO: 92495 - RNA, 19 nt, Artificial Sequence
  Description of Artificial Sequence: Synthetic oligonucleotide
ucgguucgcucgccagcgc

SEQ ID NO: 92496 - RNA, 19 nt, Artificial Sequence
  Description of Artificial Sequence: Synthetic oligonucleotide
caaagacgugauguuaaua

SEQ ID NO: 92497 - RNA, 19 nt, Artificial Sequence
  Description of Artificial Sequence: Synthetic oligonucleotide
caaguacguucguuuaacu

SEQ ID NO: 92498 - RNA, 19 nt, Artificial Sequence
  Description of Artificial Sequence: Synthetic oligonucleotide
gcggaucuuggacaaacaa

SEQ ID NO: 92499 - RNA, 19 nt, Artificial Sequence
  Description of Artificial Sequence: Synthetic oligonucleotide
caccgcauuaggggcacac

SEQ ID NO: 92500 - RNA, 19 nt, Artificial Sequence
  Description of Artificial Sequence: Synthetic oligonucleotide
ucggacugcgaggcagccc

SEQ ID NO: 92501 - RNA, 19 nt, Artificial Sequence
  Description of Artificial Sequence: Synthetic oligonucleotide
gacgugauguuaauaucuu

SEQ ID NO: 92502 - RNA, 19 nt, Artificial Sequence
  Description of Artificial Sequence: Synthetic oligonucleotide
gcuacuccggagcgagaag

SEQ ID NO: 92503 - RNA, 19 nt, Artificial Sequence
  Description of Artificial Sequence: Synthetic oligonucleotide
ucccucucucgguucgcuc

SEQ ID NO: 92504 - RNA, 19 nt, Artificial Sequence
  Description of Artificial Sequence: Synthetic oligonucleotide
cacaccgcauuaggggcac

SEQ ID NO: 92505 - RNA, 19 nt, Artificial Sequence
  Description of Artificial Sequence: Synthetic oligonucleotide
ggccucgucguugcaacag

SEQ ID NO: 92506 - RNA, 19 nt, Artificial Sequence
  Description of Artificial Sequence: Synthetic oligonucleotide
accgcauuaggggcacaca

SEQ ID NO: 92507 - RNA, 19 nt, Artificial Sequence
  Description of Artificial Sequence: Synthetic oligonucleotide
gaauagcagucuauuucau

SEQ ID NO: 92508 - RNA, 19 nt, Artificial Sequence
  Description of Artificial Sequence: Synthetic oligonucleotide
caauagcugcgcugguaaa

SEQ ID NO: 92509 - RNA, 19 nt, Artificial Sequence
  Description of Artificial Sequence: Synthetic oligonucleotide
ggauuuaaaccgggauuuc

SEQ ID NO: 92510 - RNA, 19 nt, Artificial Sequence
  Description of Artificial Sequence: Synthetic oligonucleotide
acgaaggaccaugcuuggu

SEQ ID NO: 92511 - RNA, 19 nt, Artificial Sequence
  Description of Artificial Sequence: Synthetic oligonucleotide
ggcucccgcgagccgagcg

SEQ ID NO: 92512 - RNA, 19 nt, Artificial Sequence
  Description of Artificial Sequence: Synthetic oligonucleotide
acacacacacacacacaaa

SEQ ID NO: 92513 - RNA, 19 nt, Artificial Sequence
  Description of Artificial Sequence: Synthetic oligonucleotide
cuuacggguccugccccac

SEQ ID NO: 92514 - RNA, 19 nt, Artificial Sequence
  Description of Artificial Sequence: Synthetic oligonucleotide
guccgauguaagaucccga

SEQ ID NO: 92515 - RNA, 19 nt, Artificial Sequence
  Description of Artificial Sequence: Synthetic oligonucleotide
cuaucucaucaggguacuc

SEQ ID NO: 92516 - RNA, 19 nt, Artificial Sequence
  Description of Artificial Sequence: Synthetic oligonucleotide
cucccgcgagccgagcgcc

SEQ ID NO: 92517 - RNA, 19 nt, Artificial Sequence
  Description of Artificial Sequence: Synthetic oligonucleotide
acgucuccuggggacagaa

SEQ ID NO: 92518 - RNA, 19 nt, Artificial Sequence
  Description of Artificial Sequence: Synthetic oligonucleotide
gcuagugacugucaccgau

SEQ ID NO: 92519 - RNA, 19 nt, Artificial Sequence
  Description of Artificial Sequence: Synthetic oligonucleotide
guggugugguuagucgguc

SEQ ID NO: 92520 - RNA, 19 nt, Artificial Sequence
  Description of Artificial Sequence: Synthetic oligonucleotide
uuacacgucugcggaucuu

SEQ ID NO: 92521 - RNA, 19 nt, Artificial Sequence
  Description of Artificial Sequence: Synthetic oligonucleotide
aaccgaggcccgggccggg

SEQ ID NO: 92522 - RNA, 19 nt, Artificial Sequence
  Description of Artificial Sequence: Synthetic oligonucleotide
ucuguccgucagcgcgacu

SEQ ID NO: 92523 - RNA, 19 nt, Artificial Sequence
  Description of Artificial Sequence: Synthetic oligonucleotide
gucagcgcgacugguccga

SEQ ID NO: 92524 - RNA, 19 nt, Artificial Sequence
  Description of Artificial Sequence: Synthetic oligonucleotide
cucuugacucggggccagg

SEQ ID NO: 92525 - RNA, 19 nt, Artificial Sequence
  Description of Artificial Sequence: Synthetic oligonucleotide
gucucgauuggacggcaau

SEQ ID NO: 92526 - RNA, 19 nt, Artificial Sequence
  Description of Artificial Sequence: Synthetic oligonucleotide
ucccgcgagccgagcgccc

SEQ ID NO: 92527 - RNA, 19 nt, Artificial Sequence
  Description of Artificial Sequence: Synthetic oligonucleotide
cauuuacacgucugcggau

SEQ ID NO: 92528 - RNA, 19 nt, Artificial Sequence
  Description of Artificial Sequence: Synthetic oligonucleotide
cugccucgccuugcaacgc

SEQ ID NO: 92529 - RNA, 19 nt, Artificial Sequence
  Description of Artificial Sequence: Synthetic oligonucleotide
uccgaucgcuuugccuccu

SEQ ID NO: 92530 - RNA, 19 nt, Artificial Sequence
  Description of Artificial Sequence: Synthetic oligonucleotide
acaggacggcuugaagaua

SEQ ID NO: 92531 - RNA, 19 nt, Artificial Sequence
  Description of Artificial Sequence: Synthetic oligonucleotide
cggaucuuggacaaacaaa

SEQ ID NO: 92532 - RNA, 19 nt, Artificial Sequence
  Description of Artificial Sequence: Synthetic oligonucleotide
cgauuggacggcaauagcu

SEQ ID NO: 92533 - RNA, 19 nt, Artificial Sequence
  Description of Artificial Sequence: Synthetic oligonucleotide
gccuugcacguuuccuggc

SEQ ID NO: 92534 - RNA, 19 nt, Artificial Sequence
  Description of Artificial Sequence: Synthetic oligonucleotide
cccucuccggcucggacug

SEQ ID NO: 92535 - RNA, 19 nt, Artificial Sequence
  Description of Artificial Sequence: Synthetic oligonucleotide
ggcuacuccggagcgagaa

SEQ ID NO: 92536 - RNA, 19 nt, Artificial Sequence
  Description of Artificial Sequence: Synthetic oligonucleotide
gcucccgcgagccgagcgc

SEQ ID NO: 92537 - RNA, 19 nt, Artificial Sequence
  Description of Artificial Sequence: Synthetic oligonucleotide
ccuacucuuuaauuaaauu

SEQ ID NO: 92538 - RNA, 19 nt, Artificial Sequence
  Description of Artificial Sequence: Synthetic oligonucleotide
ccuccggcgcagaccacgg

SEQ ID NO: 92539 - RNA, 19 nt, Artificial Sequence
  Description of Artificial Sequence: Synthetic oligonucleotide
caaucccgcgagccccgac

SEQ ID NO: 92540 - RNA, 19 nt, Artificial Sequence
  Description of Artificial Sequence: Synthetic oligonucleotide
cgggcuuggugauuuagca

SEQ ID NO: 92541 - RNA, 19 nt, Artificial Sequence
  Description of Artificial Sequence: Synthetic oligonucleotide
gcuaugcuguaggaagcuc

SEQ ID NO: 92542 - RNA, 19 nt, Artificial Sequence
  Description of Artificial Sequence: Synthetic oligonucleotide
cggaauaucucggaaaacu

SEQ ID NO: 92543 - RNA, 19 nt, Artificial Sequence
  Description of Artificial Sequence: Synthetic oligonucleotide
gucaccgauccgggaaaga

SEQ ID NO: 92544 - RNA, 19 nt, Artificial Sequence
  Description of Artificial Sequence: Synthetic oligonucleotide
cagcgcgacugguccgaug

SEQ ID NO: 92545 - RNA, 19 nt, Artificial Sequence
  Description of Artificial Sequence: Synthetic oligonucleotide
caccccgccuccgggcgcg

SEQ ID NO: 92546 - RNA, 19 nt, Artificial Sequence
  Description of Artificial Sequence: Synthetic oligonucleotide
gucuguccgucagcgcgac

SEQ ID NO: 92547 - RNA, 19 nt, Artificial Sequence
  Description of Artificial Sequence: Synthetic oligonucleotide
cgguucgcucgccagcgcg

SEQ ID NO: 92548 - RNA, 19 nt, Artificial Sequence
  Description of Artificial Sequence: Synthetic oligonucleotide
ccaggauuuaaaccgggau

SEQ ID NO: 92549 - RNA, 19 nt, Artificial Sequence
  Description of Artificial Sequence: Synthetic oligonucleotide
cucuccuaugugcuggcuu

SEQ ID NO: 92550 - RNA, 19 nt, Artificial Sequence
  Description of Artificial Sequence: Synthetic oligonucleotide
gcuuacggguccugcccca

SEQ ID NO: 92551 - RNA, 19 nt, Artificial Sequence
  Description of Artificial Sequence: Synthetic oligonucleotide
gucggucuuucuggugaca

SEQ ID NO: 92552 - RNA, 19 nt, Artificial Sequence
  Description of Artificial Sequence: Synthetic oligonucleotide
cccuaaucuuccgggcuug

SEQ ID NO: 92553 - RNA, 19 nt, Artificial Sequence
  Description of Artificial Sequence: Synthetic oligonucleotide
ccacaccgcauuaggggca

SEQ ID NO: 92554 - RNA, 19 nt, Artificial Sequence
  Description of Artificial Sequence: Synthetic oligonucleotide
ccggagucucacccuccgg

SEQ ID NO: 92555 - RNA, 19 nt, Artificial Sequence
  Description of Artificial Sequence: Synthetic oligonucleotide
ucagcgcgacugguccgau

SEQ ID NO: 92556 - RNA, 19 nt, Artificial Sequence
  Description of Artificial Sequence: Synthetic oligonucleotide
ggggaugggcuagccacuc

SEQ ID NO: 92557 - RNA, 19 nt, Artificial Sequence
  Description of Artificial Sequence: Synthetic oligonucleotide
ccgccggcgaggagguggg

SEQ ID NO: 92558 - RNA, 19 nt, Artificial Sequence
  Description of Artificial Sequence: Synthetic oligonucleotide
gggcucacgccgugcucug

SEQ ID NO: 92559 - RNA, 19 nt, Artificial Sequence
  Description of Artificial Sequence: Synthetic oligonucleotide
ccuccggacccaaagugcu

SEQ ID NO: 92560 - RNA, 19 nt, Artificial Sequence
  Description of Artificial Sequence: Synthetic oligonucleotide
cacccuccggacccaaagu

SEQ ID NO: 92561 - RNA, 19 nt, Artificial Sequence
  Description of Artificial Sequence: Synthetic oligonucleotide
gcgcgcucucucugaccgg

SEQ ID NO: 92562 - RNA, 19 nt, Artificial Sequence
  Description of Artificial Sequence: Synthetic oligonucleotide
agcccgccggcgaggaggu

SEQ ID NO: 92563 - RNA, 19 nt, Artificial Sequence
  Description of Artificial Sequence: Synthetic oligonucleotide
gugaacgcuccaggauuua

SEQ ID NO: 92564 - RNA, 19 nt, Artificial Sequence
  Description of Artificial Sequence: Synthetic oligonucleotide
cacgccgugcucugacggu

SEQ ID NO: 92565 - RNA, 19 nt, Artificial Sequence
  Description of Artificial Sequence: Synthetic oligonucleotide
ggcccgagcuagcacuucu

SEQ ID NO: 92566 - RNA, 19 nt, Artificial Sequence
  Description of Artificial Sequence: Synthetic oligonucleotide
gcgagccgagcgcccacug

SEQ ID NO: 92567 - RNA, 19 nt, Artificial Sequence
  Description of Artificial Sequence: Synthetic oligonucleotide
ccccacaauuauuacggau

SEQ ID NO: 92568 - RNA, 19 nt, Artificial Sequence
  Description of Artificial Sequence: Synthetic oligonucleotide
ggggacagaacuagugguu

SEQ ID NO: 92569 - RNA, 19 nt, Artificial Sequence
  Description of Artificial Sequence: Synthetic oligonucleotide
cuccuccggcgcagaccac

SEQ ID NO: 92570 - RNA, 19 nt, Artificial Sequence
  Description of Artificial Sequence: Synthetic oligonucleotide
gggucucgauuggacggca

SEQ ID NO: 92571 - RNA, 19 nt, Artificial Sequence
  Description of Artificial Sequence: Synthetic oligonucleotide
gccuccgugaggggcuuac

SEQ ID NO: 92572 - RNA, 19 nt, Artificial Sequence
  Description of Artificial Sequence: Synthetic oligonucleotide
gggccucgucguugcaaca

SEQ ID NO: 92573 - RNA, 19 nt, Artificial Sequence
  Description of Artificial Sequence: Synthetic oligonucleotide
acaccgcauuaggggcaca

SEQ ID NO: 92574 - RNA, 19 nt, Artificial Sequence
  Description of Artificial Sequence: Synthetic oligonucleotide
cuccgggcgcgggcuucgg

SEQ ID NO: 92575 - RNA, 19 nt, Artificial Sequence
  Description of Artificial Sequence: Synthetic oligonucleotide
ggucucgauuggacggcaa

SEQ ID NO: 92576 - RNA, 19 nt, Artificial Sequence
  Description of Artificial Sequence: Synthetic oligonucleotide
ggacggcaauagcugcgcu

SEQ ID NO: 92577 - RNA, 19 nt, Artificial Sequence
  Description of Artificial Sequence: Synthetic oligonucleotide
ccgugcucugacggucacc

SEQ ID NO: 92578 - RNA, 19 nt, Artificial Sequence
  Description of Artificial Sequence: Synthetic oligonucleotide
cacgucuccuggggacaga

SEQ ID NO: 92579 - RNA, 19 nt, Artificial Sequence
  Description of Artificial Sequence: Synthetic oligonucleotide
gcaacgcgagucuguguuu

SEQ ID NO: 92580 - RNA, 19 nt, Artificial Sequence
  Description of Artificial Sequence: Synthetic oligonucleotide
guccgucagcgcgacuggu

SEQ ID NO: 92581 - RNA, 19 nt, Artificial Sequence
  Description of Artificial Sequence: Synthetic oligonucleotide
cggcgcagaccacggcuac

SEQ ID NO: 92582 - RNA, 19 nt, Artificial Sequence
  Description of Artificial Sequence: Synthetic oligonucleotide
ggcucacgccgugcucuga

SEQ ID NO: 92583 - RNA, 19 nt, Artificial Sequence
  Description of Artificial Sequence: Synthetic oligonucleotide
cgcucugagcaaggcucac

SEQ ID NO: 92584 - RNA, 19 nt, Artificial Sequence
  Description of Artificial Sequence: Synthetic oligonucleotide
gcaaucccgcgagccccga

SEQ ID NO: 92585 - RNA, 19 nt, Artificial Sequence
  Description of Artificial Sequence: Synthetic oligonucleotide
cgccgugcucugacgguca

SEQ ID NO: 92586 - RNA, 19 nt, Artificial Sequence
  Description of Artificial Sequence: Synthetic oligonucleotide
ccgcgagccgagcgcccac

SEQ ID NO: 92587 - RNA, 19 nt, Artificial Sequence
  Description of Artificial Sequence: Synthetic oligonucleotide
gcgcgacugguccgaugua

SEQ ID NO: 92588 - RNA, 19 nt, Artificial Sequence
  Description of Artificial Sequence: Synthetic oligonucleotide
cgccuugcaacgcgagucu

SEQ ID NO: 92589 - RNA, 19 nt, Artificial Sequence
  Description of Artificial Sequence: Synthetic oligonucleotide
ccacucacacaggccacgu

SEQ ID NO: 92590 - RNA, 19 nt, Artificial Sequence
  Description of Artificial Sequence: Synthetic oligonucleotide
cgcgcucucucugaccggu

SEQ ID NO: 92591 - RNA, 19 nt, Artificial Sequence
  Description of Artificial Sequence: Synthetic oligonucleotide
cggcuacuccggagcgaga

SEQ ID NO: 92592 - RNA, 19 nt, Artificial Sequence
  Description of Artificial Sequence: Synthetic oligonucleotide
cggcucccgcgagccgagc

SEQ ID NO: 92593 - RNA, 19 nt, Artificial Sequence
  Description of Artificial Sequence: Synthetic oligonucleotide
cgcgagccgagcgcccacu

SEQ ID NO: 92594 - RNA, 19 nt, Artificial Sequence
  Description of Artificial Sequence: Synthetic oligonucleotide
cgcgcgcggcuggaacacu

SEQ ID NO: 92595 - RNA, 19 nt, Artificial Sequence
  Description of Artificial Sequence: Synthetic oligonucleotide
aauauuagaauacaaacuc

SEQ ID NO: 92596 - RNA, 19 nt, Artificial Sequence
  Description of Artificial Sequence: Synthetic oligonucleotide
uguaccauaauccagacag

SEQ ID NO: 92597 - RNA, 19 nt, Artificial Sequence
  Description of Artificial Sequence: Synthetic oligonucleotide
aauucaggcaacuuaaugg

SEQ ID NO: 92598 - RNA, 19 nt, Artificial Sequence
  Description of Artificial Sequence: Synthetic oligonucleotide
ucugaguccacuaagacgg

SEQ ID NO: 92599 - RNA, 19 nt, Artificial Sequence
  Description of Artificial Sequence: Synthetic oligonucleotide
uuuagcaugaacuaaauaa

SEQ ID NO: 92600 - RNA, 19 nt, Artificial Sequence
  Description of Artificial Sequence: Synthetic oligonucleotide
uaauaacuaccccagaagg

SEQ ID NO: 92601 - RNA, 19 nt, Artificial Sequence
  Description of Artificial Sequence: Synthetic oligonucleotide
gagaccacaaauuugaaug

SEQ ID NO: 92602 - RNA, 19 nt, Artificial Sequence
  Description of Artificial Sequence: Synthetic oligonucleotide
cauagaaagagaaacauuc

SEQ ID NO: 92603 - RNA, 19 nt, Artificial Sequence
  Description of Artificial Sequence: Synthetic oligonucleotide
aaccucuaaacuuucuccc

SEQ ID NO: 92604 - RNA, 19 nt, Artificial Sequence
  Description of Artificial Sequence: Synthetic oligonucleotide
aauauaauaacuaccccag

SEQ ID NO: 92605 - RNA, 19 nt, Artificial Sequence
  Description of Artificial Sequence: Synthetic oligonucleotide
aaguaaagcagucccaguc

SEQ ID NO: 92606 - RNA, 19 nt, Artificial Sequence
  Description of Artificial Sequence: Synthetic oligonucleotide
uuagaggccagucugacgc

SEQ ID NO: 92607 - RNA, 19 nt, Artificial Sequence
  Description of Artificial Sequence: Synthetic oligonucleotide
agucuugucacuuauauau

SEQ ID NO: 92608 - RNA, 19 nt, Artificial Sequence
  Description of Artificial Sequence: Synthetic oligonucleotide
aauacaaacucucaaucau

SEQ ID NO: 92609 - RNA, 19 nt, Artificial Sequence
  Description of Artificial Sequence: Synthetic oligonucleotide
uuauaguagucuaagcaug

SEQ ID NO: 92610 - RNA, 19 nt, Artificial Sequence
  Description of Artificial Sequence: Synthetic oligonucleotide
gaauauuaaacuuccucug

SEQ ID NO: 92611 - RNA, 19 nt, Artificial Sequence
  Description of Artificial Sequence: Synthetic oligonucleotide
uccaauaaaauuaccacua

SEQ ID NO: 92612 - RNA, 19 nt, Artificial Sequence
  Description of Artificial Sequence: Synthetic oligonucleotide
auuauaguagucuaagcau

SEQ ID NO: 92613 - RNA, 19 nt, Artificial Sequence
  Description of Artificial Sequence: Synthetic oligonucleotide
uauuaagucacuucaguau

SEQ ID NO: 92614 - RNA, 19 nt, Artificial Sequence
  Description of Artificial Sequence: Synthetic oligonucleotide
ucacaaaaguaguaaagca

SEQ ID NO: 92615 - RNA, 19 nt, Artificial Sequence
  Description of Artificial Sequence: Synthetic oligonucleotide
agaccacaaauuugaaugc

SEQ ID NO: 92616 - RNA, 19 nt, Artificial Sequence
  Description of Artificial Sequence: Synthetic oligonucleotide
ugauuauucgcugauggcc

SEQ ID NO: 92617 - RNA, 19 nt, Artificial Sequence
  Description of Artificial Sequence: Synthetic oligonucleotide
ugagcacuaaacuggaacc

SEQ ID NO: 92618 - RNA, 19 nt, Artificial Sequence
  Description of Artificial Sequence: Synthetic oligonucleotide
ucaauagccccaaaccucc

SEQ ID NO: 92619 - RNA, 19 nt, Artificial Sequence
  Description of Artificial Sequence: Synthetic oligonucleotide
uguauuuguaaaaugccua

SEQ ID NO: 92620 - RNA, 19 nt, Artificial Sequence
  Description of Artificial Sequence: Synthetic oligonucleotide
uaaacauaugaacaugcuc

SEQ ID NO: 92621 - RNA, 19 nt, Artificial Sequence
  Description of Artificial Sequence: Synthetic oligonucleotide
aaagcccuaagacccugcc

SEQ ID NO: 92622 - RNA, 19 nt, Artificial Sequence
  Description of Artificial Sequence: Synthetic oligonucleotide
aaaucauuagaggccaguc

SEQ ID NO: 92623 - RNA, 19 nt, Artificial Sequence
  Description of Artificial Sequence: Synthetic oligonucleotide
ucaacuaacugggaggucc

SEQ ID NO: 92624 - RNA, 19 nt, Artificial Sequence
  Description of Artificial Sequence: Synthetic oligonucleotide
ucaagugccuuucaagucu

SEQ ID NO: 92625 - RNA, 19 nt, Artificial Sequence
  Description of Artificial Sequence: Synthetic oligonucleotide
cauuauaguagucuaagca

SEQ ID NO: 92626 - RNA, 19 nt, Artificial Sequence
  Description of Artificial Sequence: Synthetic oligonucleotide
agucuaagcaugauguacc

SEQ ID NO: 92627 - RNA, 19 nt, Artificial Sequence
  Description of Artificial Sequence: Synthetic oligonucleotide
gacauuauaguagucuaag

SEQ ID NO: 92628 - RNA, 19 nt, Artificial Sequence
  Description of Artificial Sequence: Synthetic oligonucleotide
uauaguagucuaagcauga

SEQ ID NO: 92629 - RNA, 19 nt, Artificial Sequence
  Description of Artificial Sequence: Synthetic oligonucleotide
ugaguguucacaauuugaa

SEQ ID NO: 92630 - RNA, 19 nt, Artificial Sequence
  Description of Artificial Sequence: Synthetic oligonucleotide
cuaaauguugucagccugg

SEQ ID NO: 92631 - RNA, 19 nt, Artificial Sequence
  Description of Artificial Sequence: Synthetic oligonucleotide
uguauugcuuacugcaugc

SEQ ID NO: 92632 - RNA, 19 nt, Artificial Sequence
  Description of Artificial Sequence: Synthetic oligonucleotide
aguagucuaagcaugaugu

SEQ ID NO: 92633 - RNA, 19 nt, Artificial Sequence
  Description of Artificial Sequence: Synthetic oligonucleotide
auaacccaagcucacaaug

SEQ ID NO: 92634 - RNA, 19 nt, Artificial Sequence
  Description of Artificial Sequence: Synthetic oligonucleotide
cauaccucugauuauucgc

SEQ ID NO: 92635 - RNA, 19 nt, Artificial Sequence
  Description of Artificial Sequence: Synthetic oligonucleotide
agaaauaugguugaggguu

SEQ ID NO: 92636 - RNA, 19 nt, Artificial Sequence
  Description of Artificial Sequence: Synthetic oligonucleotide
uccucugauagauguaagg

SEQ ID NO: 92637 - RNA, 19 nt, Artificial Sequence
  Description of Artificial Sequence: Synthetic oligonucleotide
  modified_base (5)..(5): a, c, u, g, unknown or other
ucagnaucuggucauaauu

SEQ ID NO: 92638 - RNA, 19 nt, Artificial Sequence
  Description of Artificial Sequence: Synthetic oligonucleotide
aaucacccgaugcauaacu

SEQ ID NO: 92639 - RNA, 19 nt, Artificial Sequence
  Description of Artificial Sequence: Synthetic oligonucleotide
guugaugcaugguaagggg

SEQ ID NO: 92640 - RNA, 19 nt, Artificial Sequence
  Description of Artificial Sequence: Synthetic oligonucleotide
cucucaacuaacugggagg

SEQ ID NO: 92641 - RNA, 19 nt, Artificial Sequence
  Description of Artificial Sequence: Synthetic oligonucleotide
agaucaaguaaagcagucc

SEQ ID NO: 92642 - RNA, 19 nt, Artificial Sequence
  Description of Artificial Sequence: Synthetic oligonucleotide
aucaguaaaccuuggguug

SEQ ID NO: 92643 - RNA, 19 nt, Artificial Sequence
  Description of Artificial Sequence: Synthetic oligonucleotide
aaaggguaugcagaucaac

SEQ ID NO: 92644 - RNA, 19 nt, Artificial Sequence
  Description of Artificial Sequence: Synthetic oligonucleotide
ucuauacucaaagaaauuu

SEQ ID NO: 92645 - RNA, 19 nt, Artificial Sequence
  Description of Artificial Sequence: Synthetic oligonucleotide
acuaaauguugucagccug

SEQ ID NO: 92646 - RNA, 19 nt, Artificial Sequence
  Description of Artificial Sequence: Synthetic oligonucleotide
uaaccgaggcuucacaaug

SEQ ID NO: 92647 - RNA, 19 nt, Artificial Sequence
  Description of Artificial Sequence: Synthetic oligonucleotide
ucaucuaucaagggcauga

SEQ ID NO: 92648 - RNA, 19 nt, Artificial Sequence
  Description of Artificial Sequence: Synthetic oligonucleotide
aagcaggcgagccaauguc

SEQ ID NO: 92649 - RNA, 19 nt, Artificial Sequence
  Description of Artificial Sequence: Synthetic oligonucleotide
agagauguauccaugaggu

SEQ ID NO: 92650 - RNA, 19 nt, Artificial Sequence
  Description of Artificial Sequence: Synthetic oligonucleotide
aaaccuagcauggucucuc

SEQ ID NO: 92651 - RNA, 19 nt, Artificial Sequence
  Description of Artificial Sequence: Synthetic oligonucleotide
uggcuugaaacauuucugc

SEQ ID NO: 92652 - RNA, 19 nt, Artificial Sequence
  Description of Artificial Sequence: Synthetic oligonucleotide
uccaauauuaagucacuuc

SEQ ID NO: 92653 - RNA, 19 nt, Artificial Sequence
  Description of Artificial Sequence: Synthetic oligonucleotide
gucacaaaaguaguaaagc

SEQ ID NO: 92654 - RNA, 19 nt, Artificial Sequence
  Description of Artificial Sequence: Synthetic oligonucleotide
uauugcuuacugcaugcug

SEQ ID NO: 92655 - RNA, 19 nt, Artificial Sequence
  Description of Artificial Sequence: Synthetic oligonucleotide
uaguagucuaagcaugaug

SEQ ID NO: 92656 - RNA, 19 nt, Artificial Sequence
  Description of Artificial Sequence: Synthetic oligonucleotide
aaccuaauucaaauuauga

SEQ ID NO: 92657 - RNA, 19 nt, Artificial Sequence
  Description of Artificial Sequence: Synthetic oligonucleotide
gaaaguucgcacuuuccac

SEQ ID NO: 92658 - RNA, 19 nt, Artificial Sequence
  Description of Artificial Sequence: Synthetic oligonucleotide
gacaugaguaucacaacag

SEQ ID NO: 92659 - RNA, 19 nt, Artificial Sequence
  Description of Artificial Sequence: Synthetic oligonucleotide
cacguuaagccuaaucuug

SEQ ID NO: 92660 - RNA, 19 nt, Artificial Sequence
  Description of Artificial Sequence: Synthetic oligonucleotide
uaugguugaggguugguaa

SEQ ID NO: 92661 - RNA, 19 nt, Artificial Sequence
  Description of Artificial Sequence: Synthetic oligonucleotide
auaacuguuccuaaccgag

SEQ ID NO: 92662 - RNA, 19 nt, Artificial Sequence
  Description of Artificial Sequence: Synthetic oligonucleotide
gagauugaggggcuacacg

SEQ ID NO: 92663 - RNA, 19 nt, Artificial Sequence
  Description of Artificial Sequence: Synthetic oligonucleotide
aaauaacaagaagucugag

SEQ ID NO: 92664 - RNA, 19 nt, Artificial Sequence
  Description of Artificial Sequence: Synthetic oligonucleotide
auuaagucacuucaguaua

SEQ ID NO: 92665 - RNA, 19 nt, Artificial Sequence
  Description of Artificial Sequence: Synthetic oligonucleotide
ugaugcaugguaaggggcu

SEQ ID NO: 92666 - RNA, 19 nt, Artificial Sequence
  Description of Artificial Sequence: Synthetic oligonucleotide
auauuaagucacuucagua

SEQ ID NO: 92667 - RNA, 19 nt, Artificial Sequence
  Description of Artificial Sequence: Synthetic oligonucleotide
uugacaauuuccaacucuu

SEQ ID NO: 92668 - RNA, 19 nt, Artificial Sequence
  Description of Artificial Sequence: Synthetic oligonucleotide
aaucuaggaaaagcauggg

SEQ ID NO: 92669 - RNA, 19 nt, Artificial Sequence
  Description of Artificial Sequence: Synthetic oligonucleotide
uaacccaagcucacaauga

SEQ ID NO: 92670 - RNA, 19 nt, Artificial Sequence
  Description of Artificial Sequence: Synthetic oligonucleotide
guagacauugcuaagacua

SEQ ID NO: 92671 - RNA, 19 nt, Artificial Sequence
  Description of Artificial Sequence: Synthetic oligonucleotide
uaagcaugauguaccauaa

SEQ ID NO: 92672 - RNA, 19 nt, Artificial Sequence
  Description of Artificial Sequence: Synthetic oligonucleotide
aaggcuugguguuuuguau

SEQ ID NO: 92673 - RNA, 19 nt, Artificial Sequence
  Description of Artificial Sequence: Synthetic oligonucleotide
auagccccaaaccuccuuc

SEQ ID NO: 92674 - RNA, 19 nt, Artificial Sequence
  Description of Artificial Sequence: Synthetic oligonucleotide
aaauaugguugaggguugg

SEQ ID NO: 92675 - RNA, 19 nt, Artificial Sequence
  Description of Artificial Sequence: Synthetic oligonucleotide
ugccuuucaagucuacaac

SEQ ID NO: 92676 - RNA, 19 nt, Artificial Sequence
  Description of Artificial Sequence: Synthetic oligonucleotide
aaaucuagucuugucacuu

SEQ ID NO: 92677 - RNA, 19 nt, Artificial Sequence
  Description of Artificial Sequence: Synthetic oligonucleotide
ugacauuauaguagucuaa

SEQ ID NO: 92678 - RNA, 19 nt, Artificial Sequence
  Description of Artificial Sequence: Synthetic oligonucleotide
uccuaguucuaaagaagcu

SEQ ID NO: 92679 - RNA, 19 nt, Artificial Sequence
  Description of Artificial Sequence: Synthetic oligonucleotide
uuuuaaccucuaaacuuuc

SEQ ID NO: 92680 - RNA, 19 nt, Artificial Sequence
  Description of Artificial Sequence: Synthetic oligonucleotide
ucacaauaaggaugaguga

SEQ ID NO: 92681 - RNA, 19 nt, Artificial Sequence
  Description of Artificial Sequence: Synthetic oligonucleotide
uauauaucugaguguucac

SEQ ID NO: 92682 - RNA, 19 nt, Artificial Sequence
  Description of Artificial Sequence: Synthetic oligonucleotide
ucguugugcacuuguauuc

SEQ ID NO: 92683 - RNA, 19 nt, Artificial Sequence
  Description of Artificial Sequence: Synthetic oligonucleotide
ucugacgcagagauguauc

SEQ ID NO: 92684 - RNA, 19 nt, Artificial Sequence
  Description of Artificial Sequence: Synthetic oligonucleotide
uacgucugugaaugaagag

SEQ ID NO: 92685 - RNA, 19 nt, Artificial Sequence
  Description of Artificial Sequence: Synthetic oligonucleotide
cuaagcaugauguaccaua

SEQ ID NO: 92686 - RNA, 19 nt, Artificial Sequence
  Description of Artificial Sequence: Synthetic oligonucleotide
auugcuuacugcaugcugu

SEQ ID NO: 92687 - RNA, 19 nt, Artificial Sequence
  Description of Artificial Sequence: Synthetic oligonucleotide
ucucaacuaacugggaggu

SEQ ID NO: 92688 - RNA, 19 nt, Artificial Sequence
  Description of Artificial Sequence: Synthetic oligonucleotide
uucagauguuaccaugaau

SEQ ID NO: 92689 - RNA, 19 nt, Artificial Sequence
  Description of Artificial Sequence: Synthetic oligonucleotide
cugacgcagagauguaucc

SEQ ID NO: 92690 - RNA, 19 nt, Artificial Sequence
  Description of Artificial Sequence: Synthetic oligonucleotide
gcauaacuguuccuaaccg

SEQ ID NO: 92691 - RNA, 19 nt, Artificial Sequence
  Description of Artificial Sequence: Synthetic oligonucleotide
ugccuauacaaugaaaauu

SEQ ID NO: 92692 - RNA, 19 nt, Artificial Sequence
  Description of Artificial Sequence: Synthetic oligonucleotide
ucagaccucucaacuaacu

SEQ ID NO: 92693 - RNA, 19 nt, Artificial Sequence
  Description of Artificial Sequence: Synthetic oligonucleotide
uuaacaaagcaaggugaga

SEQ ID NO: 92694 - RNA, 19 nt, Artificial Sequence
  Description of Artificial Sequence: Synthetic oligonucleotide
auauaauaacuaccccaga

SEQ ID NO: 92695 - RNA, 19 nt, Artificial Sequence
  Description of Artificial Sequence: Synthetic oligonucleotide
cuagcauggucucucucag

SEQ ID NO: 92696 - RNA, 19 nt, Artificial Sequence
  Description of Artificial Sequence: Synthetic oligonucleotide
uuuugcaauccugaagguc

SEQ ID NO: 92697 - RNA, 19 nt, Artificial Sequence
  Description of Artificial Sequence: Synthetic oligonucleotide
ugggucuuggcuacaacau

SEQ ID NO: 92698 - RNA, 19 nt, Artificial Sequence
  Description of Artificial Sequence: Synthetic oligonucleotide
aguccacuaagacggggag

SEQ ID NO: 92699 - RNA, 19 nt, Artificial Sequence
  Description of Artificial Sequence: Synthetic oligonucleotide
cuauauucaagugccuuuc

SEQ ID NO: 92700 - RNA, 19 nt, Artificial Sequence
  Description of Artificial Sequence: Synthetic oligonucleotide
uuccuaggaaaaucacagc

SEQ ID NO: 92701 - RNA, 19 nt, Artificial Sequence
  Description of Artificial Sequence: Synthetic oligonucleotide
aguguacacuuccuuagaa

SEQ ID NO: 92702 - RNA, 19 nt, Artificial Sequence
  Description of Artificial Sequence: Synthetic oligonucleotide
ggacauacguuucucguug

SEQ ID NO: 92703 - RNA, 19 nt, Artificial Sequence
  Description of Artificial Sequence: Synthetic oligonucleotide
ucacccgaugcauaacugu

SEQ ID NO: 92704 - RNA, 19 nt, Artificial Sequence
  Description of Artificial Sequence: Synthetic oligonucleotide
cacacguuaagccuaaucu

SEQ ID NO: 92705 - RNA, 19 nt, Artificial Sequence
  Description of Artificial Sequence: Synthetic oligonucleotide
caucugaguccacuaagac

SEQ ID NO: 92706 - RNA, 19 nt, Artificial Sequence
  Description of Artificial Sequence: Synthetic oligonucleotide
acacguuaagccuaaucuu

SEQ ID NO: 92707 - RNA, 19 nt, Artificial Sequence
  Description of Artificial Sequence: Synthetic oligonucleotide
cugcagauaucaacucugc

SEQ ID NO: 92708 - RNA, 19 nt, Artificial Sequence
  Description of Artificial Sequence: Synthetic oligonucleotide
cuuuguguacaccaacaga

SEQ ID NO: 92709 - RNA, 19 nt, Artificial Sequence
  Description of Artificial Sequence: Synthetic oligonucleotide
uggagucaauaacugcuaa

SEQ ID NO: 92710 - RNA, 19 nt, Artificial Sequence
  Description of Artificial Sequence: Synthetic oligonucleotide
auuuugcaauccugaaggu

SEQ ID NO: 92711 - RNA, 19 nt, Artificial Sequence
  Description of Artificial Sequence: Synthetic oligonucleotide
cugaguguucacaauuuga

SEQ ID NO: 92712 - RNA, 19 nt, Artificial Sequence
  Description of Artificial Sequence: Synthetic oligonucleotide
  modified_base (6)..(6): a, c, u, g, unknown or other
uucagnaucuggucauaau

SEQ ID NO: 92713 - RNA, 19 nt, Artificial Sequence
  Description of Artificial Sequence: Synthetic oligonucleotide
acugggagguccugccaac

SEQ ID NO: 92714 - RNA, 19 nt, Artificial Sequence
  Description of Artificial Sequence: Synthetic oligonucleotide
cauuuucguacacaaaucu

SEQ ID NO: 92715 - RNA, 19 nt, Artificial Sequence
  Description of Artificial Sequence: Synthetic oligonucleotide
caaaaccuagcauggucuc

SEQ ID NO: 92716 - RNA, 19 nt, Artificial Sequence
  Description of Artificial Sequence: Synthetic oligonucleotide
auaccucugauuauucgcu

SEQ ID NO: 92717 - RNA, 19 nt, Artificial Sequence
  Description of Artificial Sequence: Synthetic oligonucleotide
uaagacggggaggagcuac

SEQ ID NO: 92718 - RNA, 19 nt, Artificial Sequence
  Description of Artificial Sequence: Synthetic oligonucleotide
gaagauguggaagccaucu

SEQ ID NO: 92719 - RNA, 19 nt, Artificial Sequence
  Description of Artificial Sequence: Synthetic oligonucleotide
cuacgucugugaaugaaga

SEQ ID NO: 92720 - RNA, 19 nt, Artificial Sequence
  Description of Artificial Sequence: Synthetic oligonucleotide
cacuaagacggggaggagc

SEQ ID NO: 92721 - RNA, 19 nt, Artificial Sequence
  Description of Artificial Sequence: Synthetic oligonucleotide
aauagccccaaaccuccuu

SEQ ID NO: 92722 - RNA, 19 nt, Artificial Sequence
  Description of Artificial Sequence: Synthetic oligonucleotide
uccuaaccgaggcuucaca

SEQ ID NO: 92723 - RNA, 19 nt, Artificial Sequence
  Description of Artificial Sequence: Synthetic oligonucleotide
uguauuccccugagcucag

SEQ ID NO: 92724 - RNA, 19 nt, Artificial Sequence
  Description of Artificial Sequence: Synthetic oligonucleotide
ucgcacuuuccacaggaua

SEQ ID NO: 92725 - RNA, 19 nt, Artificial Sequence
  Description of Artificial Sequence: Synthetic oligonucleotide
acgguuccuggucagauuu

SEQ ID NO: 92726 - RNA, 19 nt, Artificial Sequence
  Description of Artificial Sequence: Synthetic oligonucleotide
uauuccccugagcucagau

SEQ ID NO: 92727 - RNA, 19 nt, Artificial Sequence
  Description of Artificial Sequence: Synthetic oligonucleotide
gcauaccucugauuauucg

SEQ ID NO: 92728 - RNA, 19 nt, Artificial Sequence
  Description of Artificial Sequence: Synthetic oligonucleotide
uguuccuaaccgaggcuuc

SEQ ID NO: 92729 - RNA, 19 nt, Artificial Sequence
  Description of Artificial Sequence: Synthetic oligonucleotide
aucuuaagaggagaaggaa

SEQ ID NO: 92730 - RNA, 19 nt, Artificial Sequence
  Description of Artificial Sequence: Synthetic oligonucleotide
uggacauacguuucucguu

SEQ ID NO: 92731 - RNA, 19 nt, Artificial Sequence
  Description of Artificial Sequence: Synthetic oligonucleotide
guacauguggccugcaugu

SEQ ID NO: 92732 - RNA, 19 nt, Artificial Sequence
  Description of Artificial Sequence: Synthetic oligonucleotide
guucuauacucaaagaaau

SEQ ID NO: 92733 - RNA, 19 nt, Artificial Sequence
  Description of Artificial Sequence: Synthetic oligonucleotide
aucaagggcaugaaggcau

SEQ ID NO: 92734 - RNA, 19 nt, Artificial Sequence
  Description of Artificial Sequence: Synthetic oligonucleotide
caugucuuuggacauacgu

SEQ ID NO: 92735 - RNA, 19 nt, Artificial Sequence
  Description of Artificial Sequence: Synthetic oligonucleotide
ugcaauucacaaggccaag

SEQ ID NO: 92736 - RNA, 19 nt, Artificial Sequence
  Description of Artificial Sequence: Synthetic oligonucleotide
accacaaauuugaaugcca

SEQ ID NO: 92737 - RNA, 19 nt, Artificial Sequence
  Description of Artificial Sequence: Synthetic oligonucleotide
gucucaagcaaacuucaua

SEQ ID NO: 92738 - RNA, 19 nt, Artificial Sequence
  Description of Artificial Sequence: Synthetic oligonucleotide
augguugaggguugguaaa

SEQ ID NO: 92739 - RNA, 19 nt, Artificial Sequence
  Description of Artificial Sequence: Synthetic oligonucleotide
uggucauaauuuccucauc

SEQ ID NO: 92740 - RNA, 19 nt, Artificial Sequence
  Description of Artificial Sequence: Synthetic oligonucleotide
uaugagggcggcagacccu

SEQ ID NO: 92741 - RNA, 19 nt, Artificial Sequence
  Description of Artificial Sequence: Synthetic oligonucleotide
aaccuagcauggucucucu

SEQ ID NO: 92742 - RNA, 19 nt, Artificial Sequence
  Description of Artificial Sequence: Synthetic oligonucleotide
uugcuuacugcaugcuguc

SEQ ID NO: 92743 - RNA, 19 nt, Artificial Sequence
  Description of Artificial Sequence: Synthetic oligonucleotide
augucucaagcaaacuuca

SEQ ID NO: 92744 - RNA, 19 nt, Artificial Sequence
  Description of Artificial Sequence: Synthetic oligonucleotide
gagauguauccaugagguc

SEQ ID NO: 92745 - RNA, 19 nt, Artificial Sequence
  Description of Artificial Sequence: Synthetic oligonucleotide
ggggcauccuaccaacucc

SEQ ID NO: 92746 - RNA, 19 nt, Artificial Sequence
  Description of Artificial Sequence: Synthetic oligonucleotide
ggcuuuaugagggcggcag

SEQ ID NO: 92747 - RNA, 19 nt, Artificial Sequence
  Description of Artificial Sequence: Synthetic oligonucleotide
ccuggaacuucguagacca

SEQ ID NO: 92748 - RNA, 19 nt, Artificial Sequence
  Description of Artificial Sequence: Synthetic oligonucleotide
accuagcauggucucucuc

SEQ ID NO: 92749 - RNA, 19 nt, Artificial Sequence
  Description of Artificial Sequence: Synthetic oligonucleotide
gccuuucaagucuacaaca

SEQ ID NO: 92750 - RNA, 19 nt, Artificial Sequence
  Description of Artificial Sequence: Synthetic oligonucleotide
ccaauaaaauuaccacuac

SEQ ID NO: 92751 - RNA, 19 nt, Artificial Sequence
  Description of Artificial Sequence: Synthetic oligonucleotide
  modified_base (4)..(4): a, c, u, g, unknown or other
cagnaucuggucauaauuu

SEQ ID NO: 92752 - RNA, 19 nt, Artificial Sequence
  Description of Artificial Sequence: Synthetic oligonucleotide
acguuucucguugugcacu

SEQ ID NO: 92753 - RNA, 19 nt, Artificial Sequence
  Description of Artificial Sequence: Synthetic oligonucleotide
acccgaugcauaacuguuc

SEQ ID NO: 92754 - RNA, 19 nt, Artificial Sequence
  Description of Artificial Sequence: Synthetic oligonucleotide
gacgcagagauguauccau

SEQ ID NO: 92755 - RNA, 19 nt, Artificial Sequence
  Description of Artificial Sequence: Synthetic oligonucleotide
gccuugaauucccagcuac

SEQ ID NO: 92756 - RNA, 19 nt, Artificial Sequence
  Description of Artificial Sequence: Synthetic oligonucleotide
gaaagcccuaagacccugc

SEQ ID NO: 92757 - RNA, 19 nt, Artificial Sequence
  Description of Artificial Sequence: Synthetic oligonucleotide
cccgaugcauaacuguucc

SEQ ID NO: 92758 - RNA, 19 nt, Artificial Sequence
  Description of Artificial Sequence: Synthetic oligonucleotide
ggucaauagccccaaaccu

SEQ ID NO: 92759 - RNA, 19 nt, Artificial Sequence
  Description of Artificial Sequence: Synthetic oligonucleotide
acguuaagccuaaucuuga

SEQ ID NO: 92760 - RNA, 19 nt, Artificial Sequence
  Description of Artificial Sequence: Synthetic oligonucleotide
ucuaagcaugauguaccau

SEQ ID NO: 92761 - RNA, 19 nt, Artificial Sequence
  Description of Artificial Sequence: Synthetic oligonucleotide
cugaguccacuaagacggg

SEQ ID NO: 92762 - RNA, 19 nt, Artificial Sequence
  Description of Artificial Sequence: Synthetic oligonucleotide
aacuaacugggagguccug

SEQ ID NO: 92763 - RNA, 19 nt, Artificial Sequence
  Description of Artificial Sequence: Synthetic oligonucleotide
auaguagucuaagcaugau

SEQ ID NO: 92764 - RNA, 19 nt, Artificial Sequence
  Description of Artificial Sequence: Synthetic oligonucleotide
auguuaccaugaauuccuc

SEQ ID NO: 92765 - RNA, 19 nt, Artificial Sequence
  Description of Artificial Sequence: Synthetic oligonucleotide
guagucuaagcaugaugua

SEQ ID NO: 92766 - RNA, 19 nt, Artificial Sequence
  Description of Artificial Sequence: Synthetic oligonucleotide
ugguugaggguugguaaau

SEQ ID NO: 92767 - RNA, 19 nt, Artificial Sequence
  Description of Artificial Sequence: Synthetic oligonucleotide
aucacccgaugcauaacug

SEQ ID NO: 92768 - RNA, 19 nt, Artificial Sequence
  Description of Artificial Sequence: Synthetic oligonucleotide
agcacuaaacuggaaccuu

SEQ ID NO: 92769 - RNA, 19 nt, Artificial Sequence
  Description of Artificial Sequence: Synthetic oligonucleotide
ugcuuacugcaugcuguca

SEQ ID NO: 92770 - RNA, 19 nt, Artificial Sequence
  Description of Artificial Sequence: Synthetic oligonucleotide
agagcuuuguguacaccaa

SEQ ID NO: 92771 - RNA, 19 nt, Artificial Sequence
  Description of Artificial Sequence: Synthetic oligonucleotide
aguaaaccuuggguugaca

SEQ ID NO: 92772 - RNA, 19 nt, Artificial Sequence
  Description of Artificial Sequence: Synthetic oligonucleotide
cuucagauguuaccaugaa

SEQ ID NO: 92773 - RNA, 19 nt, Artificial Sequence
  Description of Artificial Sequence: Synthetic oligonucleotide
agcuacgucugugaaugaa

SEQ ID NO: 92774 - RNA, 19 nt, Artificial Sequence
  Description of Artificial Sequence: Synthetic oligonucleotide
ccuagcauggucucucuca

SEQ ID NO: 92775 - RNA, 19 nt, Artificial Sequence
  Description of Artificial Sequence: Synthetic oligonucleotide
aggagauugaggggcuaca

SEQ ID NO: 92776 - RNA, 19 nt, Artificial Sequence
  Description of Artificial Sequence: Synthetic oligonucleotide
gccuauacaaugaaaauuu

SEQ ID NO: 92777 - RNA, 19 nt, Artificial Sequence
  Description of Artificial Sequence: Synthetic oligonucleotide
uuccuaaccgaggcuucac

SEQ ID NO: 92778 - RNA, 19 nt, Artificial Sequence
  Description of Artificial Sequence: Synthetic oligonucleotide
gagcacuaaacuggaaccu

SEQ ID NO: 92779 - RNA, 19 nt, Artificial Sequence
  Description of Artificial Sequence: Synthetic oligonucleotide
gcuacacgguuccugguca

SEQ ID NO: 92780 - RNA, 19 nt, Artificial Sequence
  Description of Artificial Sequence: Synthetic oligonucleotide
gacggggaggagcuacguc

SEQ ID NO: 92781 - RNA, 19 nt, Artificial Sequence
  Description of Artificial Sequence: Synthetic oligonucleotide
gcacacguuaagccuaauc

SEQ ID NO: 92782 - RNA, 19 nt, Artificial Sequence
  Description of Artificial Sequence: Synthetic oligonucleotide
caaucacccgaugcauaac

SEQ ID NO: 92783 - RNA, 19 nt, Artificial Sequence
  Description of Artificial Sequence: Synthetic oligonucleotide
ggcaacuuaauggcaauua

SEQ ID NO: 92784 - RNA, 19 nt, Artificial Sequence
  Description of Artificial Sequence: Synthetic oligonucleotide
cucguugugcacuuguauu

SEQ ID NO: 92785 - RNA, 19 nt, Artificial Sequence
  Description of Artificial Sequence: Synthetic oligonucleotide
caguuauagacagccaggu

SEQ ID NO: 92786 - RNA, 19 nt, Artificial Sequence
  Description of Artificial Sequence: Synthetic oligonucleotide
agccaggucaauagcccca

SEQ ID NO: 92787 - RNA, 19 nt, Artificial Sequence
  Description of Artificial Sequence: Synthetic oligonucleotide
caaucacagacaugaguau

SEQ ID NO: 92788 - RNA, 19 nt, Artificial Sequence
  Description of Artificial Sequence: Synthetic oligonucleotide
caguaaaccuuggguugac

SEQ ID NO: 92789 - RNA, 19 nt, Artificial Sequence
  Description of Artificial Sequence: Synthetic oligonucleotide
cuaaccgaggcuucacaau

SEQ ID NO: 92790 - RNA, 19 nt, Artificial Sequence
  Description of Artificial Sequence: Synthetic oligonucleotide
gaacuucguagaccaggcu

SEQ ID NO: 92791 - RNA, 19 nt, Artificial Sequence
  Description of Artificial Sequence: Synthetic oligonucleotide
agggcggcagacccuccca

SEQ ID NO: 92792 - RNA, 19 nt, Artificial Sequence
  Description of Artificial Sequence: Synthetic oligonucleotide
ccaaucacccgaugcauaa

SEQ ID NO: 92793 - RNA, 19 nt, Artificial Sequence
  Description of Artificial Sequence: Synthetic oligonucleotide
ccucuaaacuuucucccca

SEQ ID NO: 92794 - RNA, 19 nt, Artificial Sequence
  Description of Artificial Sequence: Synthetic oligonucleotide
uggcuuuaugagggcggca

SEQ ID NO: 92795 - RNA, 19 nt, Artificial Sequence
  Description of Artificial Sequence: Synthetic oligonucleotide
ggaaagcccuaagacccug

SEQ ID NO: 92796 - RNA, 19 nt, Artificial Sequence
  Description of Artificial Sequence: Synthetic oligonucleotide
caagcaggcgagccaaugu

SEQ ID NO: 92797 - RNA, 19 nt, Artificial Sequence
  Description of Artificial Sequence: Synthetic oligonucleotide
cauaacccaagcucacaau

SEQ ID NO: 92798 - RNA, 19 nt, Artificial Sequence
  Description of Artificial Sequence: Synthetic oligonucleotide
cguuaagccuaaucuugac

SEQ ID NO: 92799 - RNA, 19 nt, Artificial Sequence
  Description of Artificial Sequence: Synthetic oligonucleotide
gacucucaugacgccuuca

SEQ ID NO: 92800 - RNA, 19 nt, Artificial Sequence
  Description of Artificial Sequence: Synthetic oligonucleotide
cguugugcacuuguauucc

SEQ ID NO: 92801 - RNA, 19 nt, Artificial Sequence
  Description of Artificial Sequence: Synthetic oligonucleotide
ccaagcucacaaugaucac

SEQ ID NO: 92802 - RNA, 19 nt, Artificial Sequence
  Description of Artificial Sequence: Synthetic oligonucleotide
gagcuacgucugugaauga

SEQ ID NO: 92803 - RNA, 19 nt, Artificial Sequence
  Description of Artificial Sequence: Synthetic oligonucleotide
ccucagaccucucaacuaa

SEQ ID NO: 92804 - RNA, 19 nt, Artificial Sequence
  Description of Artificial Sequence: Synthetic oligonucleotide
agacggggaggagcuacgu

SEQ ID NO: 92805 - RNA, 19 nt, Artificial Sequence
  Description of Artificial Sequence: Synthetic oligonucleotide
ccuguccuauaguguacac

SEQ ID NO: 92806 - RNA, 19 nt, Artificial Sequence
  Description of Artificial Sequence: Synthetic oligonucleotide
cacuauauucaagugccuu

SEQ ID NO: 92807 - RNA, 19 nt, Artificial Sequence
  Description of Artificial Sequence: Synthetic oligonucleotide
caagcauuccuaggaaaau

SEQ ID NO: 92808 - RNA, 19 nt, Artificial Sequence
  Description of Artificial Sequence: Synthetic oligonucleotide
cacccgaugcauaacuguu

SEQ ID NO: 92809 - RNA, 19 nt, Artificial Sequence
  Description of Artificial Sequence: Synthetic oligonucleotide
cuaagacuaucagauuauu

SEQ ID NO: 92810 - RNA, 19 nt, Artificial Sequence
  Description of Artificial Sequence: Synthetic oligonucleotide
cgcagagauguauccauga

SEQ ID NO: 92811 - RNA, 19 nt, Artificial Sequence
  Description of Artificial Sequence: Synthetic oligonucleotide
gcggcagacccucccacuc

SEQ ID NO: 92812 - RNA, 19 nt, Artificial Sequence
  Description of Artificial Sequence: Synthetic oligonucleotide
gucugacgcagagauguau

SEQ ID NO: 92813 - RNA, 19 nt, Artificial Sequence
  Description of Artificial Sequence: Synthetic oligonucleotide
gguugguaaauuacauguu

SEQ ID NO: 92814 - RNA, 19 nt, Artificial Sequence
  Description of Artificial Sequence: Synthetic oligonucleotide
gugcacacguuaagccuaa

SEQ ID NO: 92815 - RNA, 19 nt, Artificial Sequence
  Description of Artificial Sequence: Synthetic oligonucleotide
ugcacacguuaagccuaau

SEQ ID NO: 92816 - RNA, 19 nt, Artificial Sequence
  Description of Artificial Sequence: Synthetic oligonucleotide
gggcggcagacccucccac

SEQ ID NO: 92817 - RNA, 19 nt, Artificial Sequence
  Description of Artificial Sequence: Synthetic oligonucleotide
guauuccccugagcucaga

SEQ ID NO: 92818 - RNA, 19 nt, Artificial Sequence
  Description of Artificial Sequence: Synthetic oligonucleotide
caacucccaaguugacaau

SEQ ID NO: 92819 - RNA, 19 nt, Artificial Sequence
  Description of Artificial Sequence: Synthetic oligonucleotide
guugucagccugguaucuu

SEQ ID NO: 92820 - RNA, 19 nt, Artificial Sequence
  Description of Artificial Sequence: Synthetic oligonucleotide
ggccuugaauucccagcua

SEQ ID NO: 92821 - RNA, 19 nt, Artificial Sequence
  Description of Artificial Sequence: Synthetic oligonucleotide
gcaggcgagccaauguccu

SEQ ID NO: 92822 - RNA, 19 nt, Artificial Sequence
  Description of Artificial Sequence: Synthetic oligonucleotide
cuaagacggggaggagcua

SEQ ID NO: 92823 - RNA, 19 nt, Artificial Sequence
  Description of Artificial Sequence: Synthetic oligonucleotide
gguugaggguugguaaauu

SEQ ID NO: 92824 - RNA, 19 nt, Artificial Sequence
  Description of Artificial Sequence: Synthetic oligonucleotide
ggcggcagacccucccacu

SEQ ID NO: 92825 - RNA, 19 nt, Artificial Sequence
  Description of Artificial Sequence: Synthetic oligonucleotide
gaggggcuacacgguuccu

SEQ ID NO: 92826 - RNA, 19 nt, Artificial Sequence
  Description of Artificial Sequence: Synthetic oligonucleotide
ccgaugcauaacuguuccu

SEQ ID NO: 92827 - RNA, 19 nt, Artificial Sequence
  Description of Artificial Sequence: Synthetic oligonucleotide
gcccuaagacccugccuuu

SEQ ID NO: 92828 - RNA, 19 nt, Artificial Sequence
  Description of Artificial Sequence: Synthetic oligonucleotide
ugaaauacgaaacauaaca

SEQ ID NO: 92829 - RNA, 19 nt, Artificial Sequence
  Description of Artificial Sequence: Synthetic oligonucleotide
aauaugguaucaaagcugc

SEQ ID NO: 92830 - RNA, 19 nt, Artificial Sequence
  Description of Artificial Sequence: Synthetic oligonucleotide
acaaacaaaugguagaagg

SEQ ID NO: 92831 - RNA, 19 nt, Artificial Sequence
  Description of Artificial Sequence: Synthetic oligonucleotide
ugugcuacaaccuaggcca

SEQ ID NO: 92832 - RNA, 19 nt, Artificial Sequence
  Description of Artificial Sequence: Synthetic oligonucleotide
uguaguacaauacuuaauc

SEQ ID NO: 92833 - RNA, 19 nt, Artificial Sequence
  Description of Artificial Sequence: Synthetic oligonucleotide
uguauuaguaagaaagccc

SEQ ID NO: 92834 - RNA, 19 nt, Artificial Sequence
  Description of Artificial Sequence: Synthetic oligonucleotide
acaauacuuaaucaccugc

SEQ ID NO: 92835 - RNA, 19 nt, Artificial Sequence
  Description of Artificial Sequence: Synthetic oligonucleotide
agcuaugagacaucaaacc

SEQ ID NO: 92836 - RNA, 19 nt, Artificial Sequence
  Description of Artificial Sequence: Synthetic oligonucleotide
aacacuuaccuuuauuuug

SEQ ID NO: 92837 - RNA, 19 nt, Artificial Sequence
  Description of Artificial Sequence: Synthetic oligonucleotide
ugauuaauagccaacucca

SEQ ID NO: 92838 - RNA, 19 nt, Artificial Sequence
  Description of Artificial Sequence: Synthetic oligonucleotide
aacuccaaugucugcagcc

SEQ ID NO: 92839 - RNA, 19 nt, Artificial Sequence
  Description of Artificial Sequence: Synthetic oligonucleotide
ugagauuaaaguuaaugcu

SEQ ID NO: 92840 - RNA, 19 nt, Artificial Sequence
  Description of Artificial Sequence: Synthetic oligonucleotide
uaugcuaucuaucugaguu

SEQ ID NO: 92841 - RNA, 19 nt, Artificial Sequence
  Description of Artificial Sequence: Synthetic oligonucleotide
aauacugcaaccuuuggua

SEQ ID NO: 92842 - RNA, 19 nt, Artificial Sequence
  Description of Artificial Sequence: Synthetic oligonucleotide
auuagaacucuuuuaagug

SEQ ID NO: 92843 - RNA, 19 nt, Artificial Sequence
  Description of Artificial Sequence: Synthetic oligonucleotide
uuagcuaugagacaucaaa

SEQ ID NO: 92844 - RNA, 19 nt, Artificial Sequence
  Description of Artificial Sequence: Synthetic oligonucleotide
auugaacaagcuuaagaac

SEQ ID NO: 92845 - RNA, 19 nt, Artificial Sequence
  Description of Artificial Sequence: Synthetic oligonucleotide
cuuaauucaguacuugccc

SEQ ID NO: 92846 - RNA, 19 nt, Artificial Sequence
  Description of Artificial Sequence: Synthetic oligonucleotide
uguguauuaguaagaaagc

SEQ ID NO: 92847 - RNA, 19 nt, Artificial Sequence
  Description of Artificial Sequence: Synthetic oligonucleotide
uguuguuauauguaguaca

SEQ ID NO: 92848 - RNA, 19 nt, Artificial Sequence
  Description of Artificial Sequence: Synthetic oligonucleotide
uacucuaagugcaauacca

SEQ ID NO: 92849 - RNA, 19 nt, Artificial Sequence
  Description of Artificial Sequence: Synthetic oligonucleotide
aauacaaucccagacgacu

SEQ ID NO: 92850 - RNA, 19 nt, Artificial Sequence
  Description of Artificial Sequence: Synthetic oligonucleotide
aaaguucauuaacguagcc

SEQ ID NO: 92851 - RNA, 19 nt, Artificial Sequence
  Description of Artificial Sequence: Synthetic oligonucleotide
uguuauauguaguacaaua

SEQ ID NO: 92852 - RNA, 19 nt, Artificial Sequence
  Description of Artificial Sequence: Synthetic oligonucleotide
aauguaaaacgaagaagac

SEQ ID NO: 92853 - RNA, 19 nt, Artificial Sequence
  Description of Artificial Sequence: Synthetic oligonucleotide
aaauacugcaaccuuuggu

SEQ ID NO: 92854 - RNA, 19 nt, Artificial Sequence
  Description of Artificial Sequence: Synthetic oligonucleotide
ugcaauaugcaucauacuu

SEQ ID NO: 92855 - RNA, 19 nt, Artificial Sequence
  Description of Artificial Sequence: Synthetic oligonucleotide
uuagucaaugguaaguuaa

SEQ ID NO: 92856 - RNA, 19 nt, Artificial Sequence
  Description of Artificial Sequence: Synthetic oligonucleotide
uauacuuaggcucucgguc

SEQ ID NO: 92857 - RNA, 19 nt, Artificial Sequence
  Description of Artificial Sequence: Synthetic oligonucleotide
ugaguuauauucucaaccu

SEQ ID NO: 92858 - RNA, 19 nt, Artificial Sequence
  Description of Artificial Sequence: Synthetic oligonucleotide
acuagcauucuucuggauc

SEQ ID NO: 92859 - RNA, 19 nt, Artificial Sequence
  Description of Artificial Sequence: Synthetic oligonucleotide
uguauaaauucuagcccgg

SEQ ID NO: 92860 - RNA, 19 nt, Artificial Sequence
  Description of Artificial Sequence: Synthetic oligonucleotide
uuaacguagccaaugagau

SEQ ID NO: 92861 - RNA, 19 nt, Artificial Sequence
  Description of Artificial Sequence: Synthetic oligonucleotide
aagacucagaccucuauga

SEQ ID NO: 92862 - RNA, 19 nt, Artificial Sequence
  Description of Artificial Sequence: Synthetic oligonucleotide
ucauuugggacuaccaaca

SEQ ID NO: 92863 - RNA, 19 nt, Artificial Sequence
  Description of Artificial Sequence: Synthetic oligonucleotide
guauuaguaagaaagcccc

SEQ ID NO: 92864 - RNA, 19 nt, Artificial Sequence
  Description of Artificial Sequence: Synthetic oligonucleotide
aauaauagucuugaaacua

SEQ ID NO: 92865 - RNA, 19 nt, Artificial Sequence
  Description of Artificial Sequence: Synthetic oligonucleotide
uauaaauucuagcccggcc

SEQ ID NO: 92866 - RNA, 19 nt, Artificial Sequence
  Description of Artificial Sequence: Synthetic oligonucleotide
ugcccauauguuuauaaag

SEQ ID NO: 92867 - RNA, 19 nt, Artificial Sequence
  Description of Artificial Sequence: Synthetic oligonucleotide
ggaaaguucauuaacguag

SEQ ID NO: 92868 - RNA, 19 nt, Artificial Sequence
  Description of Artificial Sequence: Synthetic oligonucleotide
uucuuaauucaguacuugc

SEQ ID NO: 92869 - RNA, 19 nt, Artificial Sequence
  Description of Artificial Sequence: Synthetic oligonucleotide
ucauagcuacaacugaccc

SEQ ID NO: 92870 - RNA, 19 nt, Artificial Sequence
  Description of Artificial Sequence: Synthetic oligonucleotide
agaguaacaacaaagugca

SEQ ID NO: 92871 - RNA, 19 nt, Artificial Sequence
  Description of Artificial Sequence: Synthetic oligonucleotide
ugauuagacaaugauuuca

SEQ ID NO: 92872 - RNA, 19 nt, Artificial Sequence
  Description of Artificial Sequence: Synthetic oligonucleotide
auguuaacuacaguuacuc

SEQ ID NO: 92873 - RNA, 19 nt, Artificial Sequence
  Description of Artificial Sequence: Synthetic oligonucleotide
ucagacggaacaauguaca

SEQ ID NO: 92874 - RNA, 19 nt, Artificial Sequence
  Description of Artificial Sequence: Synthetic oligonucleotide
uucucaaccuauaauguaa

SEQ ID NO: 92875 - RNA, 19 nt, Artificial Sequence
  Description of Artificial Sequence: Synthetic oligonucleotide
uauacucgugcucagcuga

SEQ ID NO: 92876 - RNA, 19 nt, Artificial Sequence
  Description of Artificial Sequence: Synthetic oligonucleotide
ucaaccuauaauguaaaac

SEQ ID NO: 92877 - RNA, 19 nt, Artificial Sequence
  Description of Artificial Sequence: Synthetic oligonucleotide
auucuuugaguauaguagu

SEQ ID NO: 92878 - RNA, 19 nt, Artificial Sequence
  Description of Artificial Sequence: Synthetic oligonucleotide
agaacucucauuaucaaug

SEQ ID NO: 92879 - RNA, 19 nt, Artificial Sequence
  Description of Artificial Sequence: Synthetic oligonucleotide
ucuaagugcaauaccaaua

SEQ ID NO: 92880 - RNA, 19 nt, Artificial Sequence
  Description of Artificial Sequence: Synthetic oligonucleotide
aaacgaagaagacuggaua

SEQ ID NO: 92881 - RNA, 19 nt, Artificial Sequence
  Description of Artificial Sequence: Synthetic oligonucleotide
agcaucguugcacacacag

SEQ ID NO: 92882 - RNA, 19 nt, Artificial Sequence
  Description of Artificial Sequence: Synthetic oligonucleotide
uugugcuacaaccuaggcc

SEQ ID NO: 92883 - RNA, 19 nt, Artificial Sequence
  Description of Artificial Sequence: Synthetic oligonucleotide
ucugcauugcauugagagg

SEQ ID NO: 92884 - RNA, 19 nt, Artificial Sequence
  Description of Artificial Sequence: Synthetic oligonucleotide
ucguaguuugcaaauaaaa

SEQ ID NO: 92885 - RNA, 19 nt, Artificial Sequence
  Description of Artificial Sequence: Synthetic oligonucleotide
uaaucagacggaacaaugu

SEQ ID NO: 92886 - RNA, 19 nt, Artificial Sequence
  Description of Artificial Sequence: Synthetic oligonucleotide
uucauuugggacuaccaac

SEQ ID NO: 92887 - RNA, 19 nt, Artificial Sequence
  Description of Artificial Sequence: Synthetic oligonucleotide
gaaauacgaaacauaacac

SEQ ID NO: 92888 - RNA, 19 nt, Artificial Sequence
  Description of Artificial Sequence: Synthetic oligonucleotide
aagaucaauuauucagcug

SEQ ID NO: 92889 - RNA, 19 nt, Artificial Sequence
  Description of Artificial Sequence: Synthetic oligonucleotide
aguauacuuaggcucucgg

SEQ ID NO: 92890 - RNA, 19 nt, Artificial Sequence
  Description of Artificial Sequence: Synthetic oligonucleotide
ucauuaacguagccaauga

SEQ ID NO: 92891 - RNA, 19 nt, Artificial Sequence
  Description of Artificial Sequence: Synthetic oligonucleotide
ugacaaaguauauucguau

SEQ ID NO: 92892 - RNA, 19 nt, Artificial Sequence
  Description of Artificial Sequence: Synthetic oligonucleotide
cugaugguauuacacaaag

SEQ ID NO: 92893 - RNA, 19 nt, Artificial Sequence
  Description of Artificial Sequence: Synthetic oligonucleotide
uauguuaacuacaguuacu

SEQ ID NO: 92894 - RNA, 19 nt, Artificial Sequence
  Description of Artificial Sequence: Synthetic oligonucleotide
accucuaagaguugauuag

SEQ ID NO: 92895 - RNA, 19 nt, Artificial Sequence
  Description of Artificial Sequence: Synthetic oligonucleotide
uuacucuaagugcaauacc

SEQ ID NO: 92896 - RNA, 19 nt, Artificial Sequence
  Description of Artificial Sequence: Synthetic oligonucleotide
auacugcaaccuuugguac

SEQ ID NO: 92897 - RNA, 19 nt, Artificial Sequence
  Description of Artificial Sequence: Synthetic oligonucleotide
uuuacccuccucaauugca

SEQ ID NO: 92898 - RNA, 19 nt, Artificial Sequence
  Description of Artificial Sequence: Synthetic oligonucleotide
aaccucuaagaguugauua

SEQ ID NO: 92899 - RNA, 19 nt, Artificial Sequence
  Description of Artificial Sequence: Synthetic oligonucleotide
auuaacguagccaaugaga

SEQ ID NO: 92900 - RNA, 19 nt, Artificial Sequence
  Description of Artificial Sequence: Synthetic oligonucleotide
uuuacuucaauugcaguau

SEQ ID NO: 92901 - RNA, 19 nt, Artificial Sequence
  Description of Artificial Sequence: Synthetic oligonucleotide
gaucuauaagcaaggaaug

SEQ ID NO: 92902 - RNA, 19 nt, Artificial Sequence
  Description of Artificial Sequence: Synthetic oligonucleotide
auaccaauaauagucuuga

SEQ ID NO: 92903 - RNA, 19 nt, Artificial Sequence
  Description of Artificial Sequence: Synthetic oligonucleotide
uguacacuugacaggucag

SEQ ID NO: 92904 - RNA, 19 nt, Artificial Sequence
  Description of Artificial Sequence: Synthetic oligonucleotide
agguuugcgaaugacaucu

SEQ ID NO: 92905 - RNA, 19 nt, Artificial Sequence
  Description of Artificial Sequence: Synthetic oligonucleotide
ugacuguauguuaacuaca

SEQ ID NO: 92906 - RNA, 19 nt, Artificial Sequence
  Description of Artificial Sequence: Synthetic oligonucleotide
caucuaaucagacggaaca

SEQ ID NO: 92907 - RNA, 19 nt, Artificial Sequence
  Description of Artificial Sequence: Synthetic oligonucleotide
aaccuauaauguaaaacga

SEQ ID NO: 92908 - RNA, 19 nt, Artificial Sequence
  Description of Artificial Sequence: Synthetic oligonucleotide
agacauuaugguuuggaaa

SEQ ID NO: 92909 - RNA, 19 nt, Artificial Sequence
  Description of Artificial Sequence: Synthetic oligonucleotide
agauucagaggagcaaggc

SEQ ID NO: 92910 - RNA, 19 nt, Artificial Sequence
  Description of Artificial Sequence: Synthetic oligonucleotide
ucucuaagaaauaggcuua

SEQ ID NO: 92911 - RNA, 19 nt, Artificial Sequence
  Description of Artificial Sequence: Synthetic oligonucleotide
auagucuuguugcagucca

SEQ ID NO: 92912 - RNA, 19 nt, Artificial Sequence
  Description of Artificial Sequence: Synthetic oligonucleotide
uauuaguaagaaagcccca

SEQ ID NO: 92913 - RNA, 19 nt, Artificial Sequence
  Description of Artificial Sequence: Synthetic oligonucleotide
uuaucacauugucucgaag

SEQ ID NO: 92914 - RNA, 19 nt, Artificial Sequence
  Description of Artificial Sequence: Synthetic oligonucleotide
auagcuacaacugacccau

SEQ ID NO: 92915 - RNA, 19 nt, Artificial Sequence
  Description of Artificial Sequence: Synthetic oligonucleotide
ucagacugcaacucguagu

SEQ ID NO: 92916 - RNA, 19 nt, Artificial Sequence
  Description of Artificial Sequence: Synthetic oligonucleotide
aaaaccuucugaaguggag

SEQ ID NO: 92917 - RNA, 19 nt, Artificial Sequence
  Description of Artificial Sequence: Synthetic oligonucleotide
aucuaagacagacagugua

SEQ ID NO: 92918 - RNA, 19 nt, Artificial Sequence
  Description of Artificial Sequence: Synthetic oligonucleotide
uaucuaucugaguuuggga

SEQ ID NO: 92919 - RNA, 19 nt, Artificial Sequence
  Description of Artificial Sequence: Synthetic oligonucleotide
uuugaguauaguagucuau

SEQ ID NO: 92920 - RNA, 19 nt, Artificial Sequence
  Description of Artificial Sequence: Synthetic oligonucleotide
cuagaagauucagaggagc

SEQ ID NO: 92921 - RNA, 19 nt, Artificial Sequence
  Description of Artificial Sequence: Synthetic oligonucleotide
uccucaauugcagacauua

SEQ ID NO: 92922 - RNA, 19 nt, Artificial Sequence
  Description of Artificial Sequence: Synthetic oligonucleotide
ucgugguguuaucacauug

SEQ ID NO: 92923 - RNA, 19 nt, Artificial Sequence
  Description of Artificial Sequence: Synthetic oligonucleotide
guaguacaauacuuaauca

SEQ ID NO: 92924 - RNA, 19 nt, Artificial Sequence
  Description of Artificial Sequence: Synthetic oligonucleotide
aagauucaaaucaagucuu

SEQ ID NO: 92925 - RNA, 19 nt, Artificial Sequence
  Description of Artificial Sequence: Synthetic oligonucleotide
uucaagaaaagacgaugau

SEQ ID NO: 92926 - RNA, 19 nt, Artificial Sequence
  Description of Artificial Sequence: Synthetic oligonucleotide
aguuauauucucaaccuau

SEQ ID NO: 92927 - RNA, 19 nt, Artificial Sequence
  Description of Artificial Sequence: Synthetic oligonucleotide
agacuggauaugcacuuag

SEQ ID NO: 92928 - RNA, 19 nt, Artificial Sequence
  Description of Artificial Sequence: Synthetic oligonucleotide
ugcuaucuaucugaguuug

SEQ ID NO: 92929 - RNA, 19 nt, Artificial Sequence
  Description of Artificial Sequence: Synthetic oligonucleotide
aacaaguaacugucccaug

SEQ ID NO: 92930 - RNA, 19 nt, Artificial Sequence
  Description of Artificial Sequence: Synthetic oligonucleotide
uucaucgcaagagcaauca

SEQ ID NO: 92931 - RNA, 19 nt, Artificial Sequence
  Description of Artificial Sequence: Synthetic oligonucleotide
uguuaacuacaguuacucu

SEQ ID NO: 92932 - RNA, 19 nt, Artificial Sequence
  Description of Artificial Sequence: Synthetic oligonucleotide
ucucaaccuauaauguaaa

SEQ ID NO: 92933 - RNA, 19 nt, Artificial Sequence
  Description of Artificial Sequence: Synthetic oligonucleotide
gaaagauagugaucagaca

SEQ ID NO: 92934 - RNA, 19 nt, Artificial Sequence
  Description of Artificial Sequence: Synthetic oligonucleotide
cauuaacguagccaaugag

SEQ ID NO: 92935 - RNA, 19 nt, Artificial Sequence
  Description of Artificial Sequence: Synthetic oligonucleotide
ucucccaagugcacccugg

SEQ ID NO: 92936 - RNA, 19 nt, Artificial Sequence
  Description of Artificial Sequence: Synthetic oligonucleotide
uaacacuuaccuuuauuuu

SEQ ID NO: 92937 - RNA, 19 nt, Artificial Sequence
  Description of Artificial Sequence: Synthetic oligonucleotide
uacacuugacaggucagcc

SEQ ID NO: 92938 - RNA, 19 nt, Artificial Sequence
  Description of Artificial Sequence: Synthetic oligonucleotide
ugcucauaagcacccuuca

SEQ ID NO: 92939 - RNA, 19 nt, Artificial Sequence
  Description of Artificial Sequence: Synthetic oligonucleotide
uagucaaugguaaguuaaa

SEQ ID NO: 92940 - RNA, 19 nt, Artificial Sequence
  Description of Artificial Sequence: Synthetic oligonucleotide
acaaucccagacgacuggc

SEQ ID NO: 92941 - RNA, 19 nt, Artificial Sequence
  Description of Artificial Sequence: Synthetic oligonucleotide
uuucgaggagguuugcgaa

SEQ ID NO: 92942 - RNA, 19 nt, Artificial Sequence
  Description of Artificial Sequence: Synthetic oligonucleotide
uaacuacaguuacucuaag

SEQ ID NO: 92943 - RNA, 19 nt, Artificial Sequence
  Description of Artificial Sequence: Synthetic oligonucleotide
ugcauugaacaugucaaaa

SEQ ID NO: 92944 - RNA, 19 nt, Artificial Sequence
  Description of Artificial Sequence: Synthetic oligonucleotide
uugauuagacaaugauuuc

SEQ ID NO: 92945 - RNA, 19 nt, Artificial Sequence
  Description of Artificial Sequence: Synthetic oligonucleotide
aaccaugggagcugaaaua

SEQ ID NO: 92946 - RNA, 19 nt, Artificial Sequence
  Description of Artificial Sequence: Synthetic oligonucleotide
uugaguauaguagucuaua

SEQ ID NO: 92947 - RNA, 19 nt, Artificial Sequence
  Description of Artificial Sequence: Synthetic oligonucleotide
aaacaucuuguuacugcag

SEQ ID NO: 92948 - RNA, 19 nt, Artificial Sequence
  Description of Artificial Sequence: Synthetic oligonucleotide
caguguauuuguacauuag

SEQ ID NO: 92949 - RNA, 19 nt, Artificial Sequence
  Description of Artificial Sequence: Synthetic oligonucleotide
ugucccaugauggauccga

SEQ ID NO: 92950 - RNA, 19 nt, Artificial Sequence
  Description of Artificial Sequence: Synthetic oligonucleotide
acucguaguuugcaaauaa

SEQ ID NO: 92951 - RNA, 19 nt, Artificial Sequence
  Description of Artificial Sequence: Synthetic oligonucleotide
auaauagucuugaaacuaa

SEQ ID NO: 92952 - RNA, 19 nt, Artificial Sequence
  Description of Artificial Sequence: Synthetic oligonucleotide
ucuaaucagacggaacaau

SEQ ID NO: 92953 - RNA, 19 nt, Artificial Sequence
  Description of Artificial Sequence: Synthetic oligonucleotide
uccaguuucgaggagguuu

SEQ ID NO: 92954 - RNA, 19 nt, Artificial Sequence
  Description of Artificial Sequence: Synthetic oligonucleotide
acugcaacucguaguuugc

SEQ ID NO: 92955 - RNA, 19 nt, Artificial Sequence
  Description of Artificial Sequence: Synthetic oligonucleotide
ugcucagcugaaaucuaac

SEQ ID NO: 92956 - RNA, 19 nt, Artificial Sequence
  Description of Artificial Sequence: Synthetic oligonucleotide
gaacuagcauucuucugga

SEQ ID NO: 92957 - RNA, 19 nt, Artificial Sequence
  Description of Artificial Sequence: Synthetic oligonucleotide
aguuacucuaagugcaaua

SEQ ID NO: 92958 - RNA, 19 nt, Artificial Sequence
  Description of Artificial Sequence: Synthetic oligonucleotide
uugcccauauguuuauaaa

SEQ ID NO: 92959 - RNA, 19 nt, Artificial Sequence
  Description of Artificial Sequence: Synthetic oligonucleotide
aucuauaagcaaggaauga

SEQ ID NO: 92960 - RNA, 19 nt, Artificial Sequence
  Description of Artificial Sequence: Synthetic oligonucleotide
uuuagcuaugagacaucaa

SEQ ID NO: 92961 - RNA, 19 nt, Artificial Sequence
  Description of Artificial Sequence: Synthetic oligonucleotide
ucgcaagagcaaucaaggc

SEQ ID NO: 92962 - RNA, 19 nt, Artificial Sequence
  Description of Artificial Sequence: Synthetic oligonucleotide
agcuuuucugauauagucu

SEQ ID NO: 92963 - RNA, 19 nt, Artificial Sequence
  Description of Artificial Sequence: Synthetic oligonucleotide
acuguauguuaacuacagu

SEQ ID NO: 92964 - RNA, 19 nt, Artificial Sequence
  Description of Artificial Sequence: Synthetic oligonucleotide
uuccuaaucacagcaucgu

SEQ ID NO: 92965 - RNA, 19 nt, Artificial Sequence
  Description of Artificial Sequence: Synthetic oligonucleotide
ugucucgugguguuaucac

SEQ ID NO: 92966 - RNA, 19 nt, Artificial Sequence
  Description of Artificial Sequence: Synthetic oligonucleotide
guacauuagaacucuuuua

SEQ ID NO: 92967 - RNA, 19 nt, Artificial Sequence
  Description of Artificial Sequence: Synthetic oligonucleotide
uaagugcaauaccaauaau

SEQ ID NO: 92968 - RNA, 19 nt, Artificial Sequence
  Description of Artificial Sequence: Synthetic oligonucleotide
uccaugacuguauguuaac

SEQ ID NO: 92969 - RNA, 19 nt, Artificial Sequence
  Description of Artificial Sequence: Synthetic oligonucleotide
ugcaacucguaguuugcaa

SEQ ID NO: 92970 - RNA, 19 nt, Artificial Sequence
  Description of Artificial Sequence: Synthetic oligonucleotide
cucagacugcaacucguag

SEQ ID NO: 92971 - RNA, 19 nt, Artificial Sequence
  Description of Artificial Sequence: Synthetic oligonucleotide
uuacuucaauugcaguaua

SEQ ID NO: 92972 - RNA, 19 nt, Artificial Sequence
  Description of Artificial Sequence: Synthetic oligonucleotide
cuauacucgugcucagcug

SEQ ID NO: 92973 - RNA, 19 nt, Artificial Sequence
  Description of Artificial Sequence: Synthetic oligonucleotide
ucccaagcaugcccaauga

SEQ ID NO: 92974 - RNA, 19 nt, Artificial Sequence
  Description of Artificial Sequence: Synthetic oligonucleotide
caaccuaggccaaggcagc

SEQ ID NO: 92975 - RNA, 19 nt, Artificial Sequence
  Description of Artificial Sequence: Synthetic oligonucleotide
caugacuguauguuaacua

SEQ ID NO: 92976 - RNA, 19 nt, Artificial Sequence
  Description of Artificial Sequence: Synthetic oligonucleotide
agacggaacaauguacacu

SEQ ID NO: 92977 - RNA, 19 nt, Artificial Sequence
  Description of Artificial Sequence: Synthetic oligonucleotide
cauuugggacuaccaacag

SEQ ID NO: 92978 - RNA, 19 nt, Artificial Sequence
  Description of Artificial Sequence: Synthetic oligonucleotide
guauaaauucuagcccggc

SEQ ID NO: 92979 - RNA, 19 nt, Artificial Sequence
  Description of Artificial Sequence: Synthetic oligonucleotide
ucgaggagguuugcgaaug

SEQ ID NO: 92980 - RNA, 19 nt, Artificial Sequence
  Description of Artificial Sequence: Synthetic oligonucleotide
acauucauuucaugaguua

SEQ ID NO: 92981 - RNA, 19 nt, Artificial Sequence
  Description of Artificial Sequence: Synthetic oligonucleotide
accuauaauguaaaacgaa

SEQ ID NO: 92982 - RNA, 19 nt, Artificial Sequence
  Description of Artificial Sequence: Synthetic oligonucleotide
auaugcuaucuaucugagu

SEQ ID NO: 92983 - RNA, 19 nt, Artificial Sequence
  Description of Artificial Sequence: Synthetic oligonucleotide
auacaaucccagacgacug

SEQ ID NO: 92984 - RNA, 19 nt, Artificial Sequence
  Description of Artificial Sequence: Synthetic oligonucleotide
uguucgguguacacacuua

SEQ ID NO: 92985 - RNA, 19 nt, Artificial Sequence
  Description of Artificial Sequence: Synthetic oligonucleotide
gaguuauauucucaaccua

SEQ ID NO: 92986 - RNA, 19 nt, Artificial Sequence
  Description of Artificial Sequence: Synthetic oligonucleotide
ugcacuuaguauguauuuu

SEQ ID NO: 92987 - RNA, 19 nt, Artificial Sequence
  Description of Artificial Sequence: Synthetic oligonucleotide
gaauacaaucccagacgac

SEQ ID NO: 92988 - RNA, 19 nt, Artificial Sequence
  Description of Artificial Sequence: Synthetic oligonucleotide
agucaaugguaaguuaaaa

SEQ ID NO: 92989 - RNA, 19 nt, Artificial Sequence
  Description of Artificial Sequence: Synthetic oligonucleotide
aaugcacacugaugaggua

SEQ ID NO: 92990 - RNA, 19 nt, Artificial Sequence
  Description of Artificial Sequence: Synthetic oligonucleotide
gaguauaguagucuauauu

SEQ ID NO: 92991 - RNA, 19 nt, Artificial Sequence
  Description of Artificial Sequence: Synthetic oligonucleotide
uucugcuaacagcuggguu

SEQ ID NO: 92992 - RNA, 19 nt, Artificial Sequence
  Description of Artificial Sequence: Synthetic oligonucleotide
gcuacaaccuaggccaagg

SEQ ID NO: 92993 - RNA, 19 nt, Artificial Sequence
  Description of Artificial Sequence: Synthetic oligonucleotide
guacacuugacaggucagc

SEQ ID NO: 92994 - RNA, 19 nt, Artificial Sequence
  Description of Artificial Sequence: Synthetic oligonucleotide
caugauggauccgagaacu

SEQ ID NO: 92995 - RNA, 19 nt, Artificial Sequence
  Description of Artificial Sequence: Synthetic oligonucleotide
ggaucucccaagugcaccc

SEQ ID NO: 92996 - RNA, 19 nt, Artificial Sequence
  Description of Artificial Sequence: Synthetic oligonucleotide
guacaauacuuaaucaccu

SEQ ID NO: 92997 - RNA, 19 nt, Artificial Sequence
  Description of Artificial Sequence: Synthetic oligonucleotide
cagacauuaugguuuggaa

SEQ ID NO: 92998 - RNA, 19 nt, Artificial Sequence
  Description of Artificial Sequence: Synthetic oligonucleotide
gcuaugagacaucaaaccu

SEQ ID NO: 92999 - RNA, 19 nt, Artificial Sequence
  Description of Artificial Sequence: Synthetic oligonucleotide
acccuucauaaaacaaauc

SEQ ID NO: 93000 - RNA, 19 nt, Artificial Sequence
  Description of Artificial Sequence: Synthetic oligonucleotide
aggagguuugcgaaugaca

SEQ ID NO: 93001 - RNA, 19 nt, Artificial Sequence
  Description of Artificial Sequence: Synthetic oligonucleotide
auacgaaacauaacacuua

SEQ ID NO: 93002 - RNA, 19 nt, Artificial Sequence
  Description of Artificial Sequence: Synthetic oligonucleotide
ugcuauacucgugcucagc

SEQ ID NO: 93003 - RNA, 19 nt, Artificial Sequence
  Description of Artificial Sequence: Synthetic oligonucleotide
agcuggguuauagaaucca

SEQ ID NO: 93004 - RNA, 19 nt, Artificial Sequence
  Description of Artificial Sequence: Synthetic oligonucleotide
uucgaggagguuugcgaau

SEQ ID NO: 93005 - RNA, 19 nt, Artificial Sequence
  Description of Artificial Sequence: Synthetic oligonucleotide
aucuaaucagacggaacaa

SEQ ID NO: 93006 - RNA, 19 nt, Artificial Sequence
  Description of Artificial Sequence: Synthetic oligonucleotide
aggguugugcuacaaccua

SEQ ID NO: 93007 - RNA, 19 nt, Artificial Sequence
  Description of Artificial Sequence: Synthetic oligonucleotide
aacucguaguuugcaaaua

SEQ ID NO: 93008 - RNA, 19 nt, Artificial Sequence
  Description of Artificial Sequence: Synthetic oligonucleotide
gguagcacaagguaucagu

SEQ ID NO: 93009 - RNA, 19 nt, Artificial Sequence
  Description of Artificial Sequence: Synthetic oligonucleotide
uaccaauaauagucuugaa

SEQ ID NO: 93010 - RNA, 19 nt, Artificial Sequence
  Description of Artificial Sequence: Synthetic oligonucleotide
cucguaguuugcaaauaaa

SEQ ID NO: 93011 - RNA, 19 nt, Artificial Sequence
  Description of Artificial Sequence: Synthetic oligonucleotide
uggauccgagaacugcaua

SEQ ID NO: 93012 - RNA, 19 nt, Artificial Sequence
  Description of Artificial Sequence: Synthetic oligonucleotide
gaaucuccaguaaucauuu

SEQ ID NO: 93013 - RNA, 19 nt, Artificial Sequence
  Description of Artificial Sequence: Synthetic oligonucleotide
acugaugguauuacacaaa

SEQ ID NO: 93014 - RNA, 19 nt, Artificial Sequence
  Description of Artificial Sequence: Synthetic oligonucleotide
aagacuggauaugcacuua

SEQ ID NO: 93015 - RNA, 19 nt, Artificial Sequence
  Description of Artificial Sequence: Synthetic oligonucleotide
aaauucuagcccggccuuu

SEQ ID NO: 93016 - RNA, 19 nt, Artificial Sequence
  Description of Artificial Sequence: Synthetic oligonucleotide
cacuuaccuuuauuuuguc

SEQ ID NO: 93017 - RNA, 19 nt, Artificial Sequence
  Description of Artificial Sequence: Synthetic oligonucleotide
cucaaccuauaauguaaaa

SEQ ID NO: 93018 - RNA, 19 nt, Artificial Sequence
  Description of Artificial Sequence: Synthetic oligonucleotide
cauuuacuucaauugcagu

SEQ ID NO: 93019 - RNA, 19 nt, Artificial Sequence
  Description of Artificial Sequence: Synthetic oligonucleotide
gucagccggaaagaguaac

SEQ ID NO: 93020 - RNA, 19 nt, Artificial Sequence
  Description of Artificial Sequence: Synthetic oligonucleotide
cauucauuucaugaguuau

SEQ ID NO: 93021 - RNA, 19 nt, Artificial Sequence
  Description of Artificial Sequence: Synthetic oligonucleotide
gaagauaggcacauucauu

SEQ ID NO: 93022 - RNA, 19 nt, Artificial Sequence
  Description of Artificial Sequence: Synthetic oligonucleotide
gcucagcugaaaucuaaca

SEQ ID NO: 93023 - RNA, 19 nt, Artificial Sequence
  Description of Artificial Sequence: Synthetic oligonucleotide
aaccuaggccaaggcagcu

SEQ ID NO: 93024 - RNA, 19 nt, Artificial Sequence
  Description of Artificial Sequence: Synthetic oligonucleotide
cucuaagugcaauaccaau

SEQ ID NO: 93025 - RNA, 19 nt, Artificial Sequence
  Description of Artificial Sequence: Synthetic oligonucleotide
ucccaagugcacccugguu

SEQ ID NO: 93026 - RNA, 19 nt, Artificial Sequence
  Description of Artificial Sequence: Synthetic oligonucleotide
uugggacuaccaacagguu

SEQ ID NO: 93027 - RNA, 19 nt, Artificial Sequence
  Description of Artificial Sequence: Synthetic oligonucleotide
gcuauacucgugcucagcu

SEQ ID NO: 93028 - RNA, 19 nt, Artificial Sequence
  Description of Artificial Sequence: Synthetic oligonucleotide
cauaagcacccuucauaaa

SEQ ID NO: 93029 - RNA, 19 nt, Artificial Sequence
  Description of Artificial Sequence: Synthetic oligonucleotide
gugucucgugguguuauca

SEQ ID NO: 93030 - RNA, 19 nt, Artificial Sequence
  Description of Artificial Sequence: Synthetic oligonucleotide
cauaacacuuaccuuuauu

SEQ ID NO: 93031 - RNA, 19 nt, Artificial Sequence
  Description of Artificial Sequence: Synthetic oligonucleotide
gcuaucuaucugaguuugg

SEQ ID NO: 93032 - RNA, 19 nt, Artificial Sequence
  Description of Artificial Sequence: Synthetic oligonucleotide
gcauugagaggguuaggaa

SEQ ID NO: 93033 - RNA, 19 nt, Artificial Sequence
  Description of Artificial Sequence: Synthetic oligonucleotide
cuaaaaggguauucagcuu

SEQ ID NO: 93034 - RNA, 19 nt, Artificial Sequence
  Description of Artificial Sequence: Synthetic oligonucleotide
gcuguguucgguguacaca

SEQ ID NO: 93035 - RNA, 19 nt, Artificial Sequence
  Description of Artificial Sequence: Synthetic oligonucleotide
acccugguucauaugcuau

SEQ ID NO: 93036 - RNA, 19 nt, Artificial Sequence
  Description of Artificial Sequence: Synthetic oligonucleotide
caucuaagacagacagugu

SEQ ID NO: 93037 - RNA, 19 nt, Artificial Sequence
  Description of Artificial Sequence: Synthetic oligonucleotide
caaguaacugucccaugau

SEQ ID NO: 93038 - RNA, 19 nt, Artificial Sequence
  Description of Artificial Sequence: Synthetic oligonucleotide
cagccggaaagaguaacaa

SEQ ID NO: 93039 - RNA, 19 nt, Artificial Sequence
  Description of Artificial Sequence: Synthetic oligonucleotide
gugcucagcugaaaucuaa

SEQ ID NO: 93040 - RNA, 19 nt, Artificial Sequence
  Description of Artificial Sequence: Synthetic oligonucleotide
ccggaaagaguaacaacaa

SEQ ID NO: 93041 - RNA, 19 nt, Artificial Sequence
  Description of Artificial Sequence: Synthetic oligonucleotide
cugcuagaucaaagacuca

SEQ ID NO: 93042 - RNA, 19 nt, Artificial Sequence
  Description of Artificial Sequence: Synthetic oligonucleotide
cugcaacucguaguuugca

SEQ ID NO: 93043 - RNA, 19 nt, Artificial Sequence
  Description of Artificial Sequence: Synthetic oligonucleotide
cguugcacacacagccugc

SEQ ID NO: 93044 - RNA, 19 nt, Artificial Sequence
  Description of Artificial Sequence: Synthetic oligonucleotide
gaguaacaacaaagugcaa

SEQ ID NO: 93045 - RNA, 19 nt, Artificial Sequence
  Description of Artificial Sequence: Synthetic oligonucleotide
caaucccagacgacuggcu

SEQ ID NO: 93046 - RNA, 19 nt, Artificial Sequence
  Description of Artificial Sequence: Synthetic oligonucleotide
uagcuacaacugacccauu

SEQ ID NO: 93047 - RNA, 19 nt, Artificial Sequence
  Description of Artificial Sequence: Synthetic oligonucleotide
acguagccaaugagauuaa

SEQ ID NO: 93048 - RNA, 19 nt, Artificial Sequence
  Description of Artificial Sequence: Synthetic oligonucleotide
cgugguguuaucacauugu

SEQ ID NO: 93049 - RNA, 19 nt, Artificial Sequence
  Description of Artificial Sequence: Synthetic oligonucleotide
ccaguaaccucagcaugca

SEQ ID NO: 93050 - RNA, 19 nt, Artificial Sequence
  Description of Artificial Sequence: Synthetic oligonucleotide
cucccaagugcacccuggu

SEQ ID NO: 93051 - RNA, 19 nt, Artificial Sequence
  Description of Artificial Sequence: Synthetic oligonucleotide
cucgugguguuaucacauu

SEQ ID NO: 93052 - RNA, 19 nt, Artificial Sequence
  Description of Artificial Sequence: Synthetic oligonucleotide
ccaugacuguauguuaacu

SEQ ID NO: 93053 - RNA, 19 nt, Artificial Sequence
  Description of Artificial Sequence: Synthetic oligonucleotide
ggucagccggaaagaguaa

SEQ ID NO: 93054 - RNA, 19 nt, Artificial Sequence
  Description of Artificial Sequence: Synthetic oligonucleotide
cgugcucagcugaaaucua

SEQ ID NO: 93055 - RNA, 19 nt, Artificial Sequence
  Description of Artificial Sequence: Synthetic oligonucleotide
gguuugcgaaugacaucuu

SEQ ID NO: 93056 - RNA, 19 nt, Artificial Sequence
  Description of Artificial Sequence: Synthetic oligonucleotide
acuuaaguagaccaggagc

SEQ ID NO: 93057 - RNA, 19 nt, Artificial Sequence
  Description of Artificial Sequence: Synthetic oligonucleotide
uuuaacggagacaauauag

SEQ ID NO: 93058 - RNA, 19 nt, Artificial Sequence
  Description of Artificial Sequence: Synthetic oligonucleotide
uguuaucuacuuuugaggg

SEQ ID NO: 93059 - RNA, 19 nt, Artificial Sequence
  Description of Artificial Sequence: Synthetic oligonucleotide
acuauauacuuucuuggcc

SEQ ID NO: 93060 - RNA, 19 nt, Artificial Sequence
  Description of Artificial Sequence: Synthetic oligonucleotide
uccauuuugaccuuggaug

SEQ ID NO: 93061 - RNA, 19 nt, Artificial Sequence
  Description of Artificial Sequence: Synthetic oligonucleotide
uuaacggagacaauauagg

SEQ ID NO: 93062 - RNA, 19 nt, Artificial Sequence
  Description of Artificial Sequence: Synthetic oligonucleotide
aaucagguaguuuccaggg

SEQ ID NO: 93063 - RNA, 19 nt, Artificial Sequence
  Description of Artificial Sequence: Synthetic oligonucleotide
aguacuauauacuuucuug

SEQ ID NO: 93064 - RNA, 19 nt, Artificial Sequence
  Description of Artificial Sequence: Synthetic oligonucleotide
ucuggauagaacuucagcu

SEQ ID NO: 93065 - RNA, 19 nt, Artificial Sequence
  Description of Artificial Sequence: Synthetic oligonucleotide
auaacagugaggcagcgag

SEQ ID NO: 93066 - RNA, 19 nt, Artificial Sequence
  Description of Artificial Sequence: Synthetic oligonucleotide
uacgguaaggagaaagugg

SEQ ID NO: 93067 - RNA, 19 nt, Artificial Sequence
  Description of Artificial Sequence: Synthetic oligonucleotide
aaugguguauauucuaccu

SEQ ID NO: 93068 - RNA, 19 nt, Artificial Sequence
  Description of Artificial Sequence: Synthetic oligonucleotide
uuuuauggagcaaacauuu

SEQ ID NO: 93069 - RNA, 19 nt, Artificial Sequence
  Description of Artificial Sequence: Synthetic oligonucleotide
aaugugagcuuugaugugg

SEQ ID NO: 93070 - RNA, 19 nt, Artificial Sequence
  Description of Artificial Sequence: Synthetic oligonucleotide
gacaauauagggcacuuug

SEQ ID NO: 93071 - RNA, 19 nt, Artificial Sequence
  Description of Artificial Sequence: Synthetic oligonucleotide
ugggauuggcacaucaucg

SEQ ID NO: 93072 - RNA, 19 nt, Artificial Sequence
  Description of Artificial Sequence: Synthetic oligonucleotide
auauuugacaccaaucagg

SEQ ID NO: 93073 - RNA, 19 nt, Artificial Sequence
  Description of Artificial Sequence: Synthetic oligonucleotide
aaggcuuugaucccacuag

SEQ ID NO: 93074 - RNA, 19 nt, Artificial Sequence
  Description of Artificial Sequence: Synthetic oligonucleotide
cauaggucaaaacaguggc

SEQ ID NO: 93075 - RNA, 19 nt, Artificial Sequence
  Description of Artificial Sequence: Synthetic oligonucleotide
ucaaccuuauagcaaagga

SEQ ID NO: 93076 - RNA, 19 nt, Artificial Sequence
  Description of Artificial Sequence: Synthetic oligonucleotide
uuaucagggauauagguua

SEQ ID NO: 93077 - RNA, 19 nt, Artificial Sequence
  Description of Artificial Sequence: Synthetic oligonucleotide
agacacguggcauuccucc

SEQ ID NO: 93078 - RNA, 19 nt, Artificial Sequence
  Description of Artificial Sequence: Synthetic oligonucleotide
uguuugguaaacacuuaag

SEQ ID NO: 93079 - RNA, 19 nt, Artificial Sequence
  Description of Artificial Sequence: Synthetic oligonucleotide
ucaauggugacggauaaug

SEQ ID NO: 93080 - RNA, 19 nt, Artificial Sequence
  Description of Artificial Sequence: Synthetic oligonucleotide
uagguuacggcguaugugc

SEQ ID NO: 93081 - RNA, 19 nt, Artificial Sequence
  Description of Artificial Sequence: Synthetic oligonucleotide
uggacagaguacuauauac

SEQ ID NO: 93082 - RNA, 19 nt, Artificial Sequence
  Description of Artificial Sequence: Synthetic oligonucleotide
acggagacaauauagggca

SEQ ID NO: 93083 - RNA, 19 nt, Artificial Sequence
  Description of Artificial Sequence: Synthetic oligonucleotide
uuauggagcaaacauuuau

SEQ ID NO: 93084 - RNA, 19 nt, Artificial Sequence
  Description of Artificial Sequence: Synthetic oligonucleotide
uugaccuuaagggacuucg

SEQ ID NO: 93085 - RNA, 19 nt, Artificial Sequence
  Description of Artificial Sequence: Synthetic oligonucleotide
uguacaugacuuuguaccc

SEQ ID NO: 93086 - RNA, 19 nt, Artificial Sequence
  Description of Artificial Sequence: Synthetic oligonucleotide
uacuauauacuuucuuggc

SEQ ID NO: 93087 - RNA, 19 nt, Artificial Sequence
  Description of Artificial Sequence: Synthetic oligonucleotide
uauuuaacggagacaauau

SEQ ID NO: 93088 - RNA, 19 nt, Artificial Sequence
  Description of Artificial Sequence: Synthetic oligonucleotide
uuuuaaggcacggugacgu

SEQ ID NO: 93089 - RNA, 19 nt, Artificial Sequence
  Description of Artificial Sequence: Synthetic oligonucleotide
ucucauggggaaugaagcg

SEQ ID NO: 93090 - RNA, 19 nt, Artificial Sequence
  Description of Artificial Sequence: Synthetic oligonucleotide
uacuuucuuacgauguccc

SEQ ID NO: 93091 - RNA, 19 nt, Artificial Sequence
  Description of Artificial Sequence: Synthetic oligonucleotide
gaacagcguacuuaucugg

SEQ ID NO: 93092 - RNA, 19 nt, Artificial Sequence
  Description of Artificial Sequence: Synthetic oligonucleotide
cauauuugacaccaaucag

SEQ ID NO: 93093 - RNA, 19 nt, Artificial Sequence
  Description of Artificial Sequence: Synthetic oligonucleotide
caguaaaacuggaaggggc

SEQ ID NO: 93094 - RNA, 19 nt, Artificial Sequence
  Description of Artificial Sequence: Synthetic oligonucleotide
agcguacuuaucuggcucc

SEQ ID NO: 93095 - RNA, 19 nt, Artificial Sequence
  Description of Artificial Sequence: Synthetic oligonucleotide
ugacggauaaugucccugg

SEQ ID NO: 93096 - RNA, 19 nt, Artificial Sequence
  Description of Artificial Sequence: Synthetic oligonucleotide
ucagggauauagguuacgg

SEQ ID NO: 93097 - RNA, 19 nt, Artificial Sequence
  Description of Artificial Sequence: Synthetic oligonucleotide
accauaagugaccccaauc

SEQ ID NO: 93098 - RNA, 19 nt, Artificial Sequence
  Description of Artificial Sequence: Synthetic oligonucleotide
ucuagggcacucaaggcac

SEQ ID NO: 93099 - RNA, 19 nt, Artificial Sequence
  Description of Artificial Sequence: Synthetic oligonucleotide
uuucuuacgaugucccaca

SEQ ID NO: 93100 - RNA, 19 nt, Artificial Sequence
  Description of Artificial Sequence: Synthetic oligonucleotide
ugacauucuuguuugguaa

SEQ ID NO: 93101 - RNA, 19 nt, Artificial Sequence
  Description of Artificial Sequence: Synthetic oligonucleotide
agucuuacccuguucuuag

SEQ ID NO: 93102 - RNA, 19 nt, Artificial Sequence
  Description of Artificial Sequence: Synthetic oligonucleotide
aauggacugcgcaugaugu

SEQ ID NO: 93103 - RNA, 19 nt, Artificial Sequence
  Description of Artificial Sequence: Synthetic oligonucleotide
agaccuuucacauccggcu

SEQ ID NO: 93104 - RNA, 19 nt, Artificial Sequence
  Description of Artificial Sequence: Synthetic oligonucleotide
auauuuaacggagacaaua

SEQ ID NO: 93105 - RNA, 19 nt, Artificial Sequence
  Description of Artificial Sequence: Synthetic oligonucleotide
aaagugugguacaagcuca

SEQ ID NO: 93106 - RNA, 19 nt, Artificial Sequence
  Description of Artificial Sequence: Synthetic oligonucleotide
uggcacguaggucacugcg

SEQ ID NO: 93107 - RNA, 19 nt, Artificial Sequence
  Description of Artificial Sequence: Synthetic oligonucleotide
gaacuugacaucgauugug

SEQ ID NO: 93108 - RNA, 19 nt, Artificial Sequence
  Description of Artificial Sequence: Synthetic oligonucleotide
uugacaacguaugugacau

SEQ ID NO: 93109 - RNA, 19 nt, Artificial Sequence
  Description of Artificial Sequence: Synthetic oligonucleotide
cacuacgaagccuaccucc

SEQ ID NO: 93110 - RNA, 19 nt, Artificial Sequence
  Description of Artificial Sequence: Synthetic oligonucleotide
uaggucaaaacaguggcac

SEQ ID NO: 93111 - RNA, 19 nt, Artificial Sequence
  Description of Artificial Sequence: Synthetic oligonucleotide
gaauggacugcgcaugaug

SEQ ID NO: 93112 - RNA, 19 nt, Artificial Sequence
  Description of Artificial Sequence: Synthetic oligonucleotide
uguguguaacauucacucc

SEQ ID NO: 93113 - RNA, 19 nt, Artificial Sequence
  Description of Artificial Sequence: Synthetic oligonucleotide
agugagaguucuucccaac

SEQ ID NO: 93114 - RNA, 19 nt, Artificial Sequence
  Description of Artificial Sequence: Synthetic oligonucleotide
uauagguuacggcguaugu

SEQ ID NO: 93115 - RNA, 19 nt, Artificial Sequence
  Description of Artificial Sequence: Synthetic oligonucleotide
cauuuagcagaagccaugg

SEQ ID NO: 93116 - RNA, 19 nt, Artificial Sequence
  Description of Artificial Sequence: Synthetic oligonucleotide
cuuaaguagaccaggagcu

SEQ ID NO: 93117 - RNA, 19 nt, Artificial Sequence
  Description of Artificial Sequence: Synthetic oligonucleotide
uuuuaccaccccauugugu

SEQ ID NO: 93118 - RNA, 19 nt, Artificial Sequence
  Description of Artificial Sequence: Synthetic oligonucleotide
aagcgaacagcguacuuau

SEQ ID NO: 93119 - RNA, 19 nt, Artificial Sequence
  Description of Artificial Sequence: Synthetic oligonucleotide
uuuugaccuuggauggucc

SEQ ID NO: 93120 - RNA, 19 nt, Artificial Sequence
  Description of Artificial Sequence: Synthetic oligonucleotide
aguagcuuauuaguggucu

SEQ ID NO: 93121 - RNA, 19 nt, Artificial Sequence
  Description of Artificial Sequence: Synthetic oligonucleotide
auuuugaccuuggaugguc

SEQ ID NO: 93122 - RNA, 19 nt, Artificial Sequence
  Description of Artificial Sequence: Synthetic oligonucleotide
guaaucuccccucuccuug

SEQ ID NO: 93123 - RNA, 19 nt, Artificial Sequence
  Description of Artificial Sequence: Synthetic oligonucleotide
uguuguggccucccgaaac

SEQ ID NO: 93124 - RNA, 19 nt, Artificial Sequence
  Description of Artificial Sequence: Synthetic oligonucleotide
ucuauggcgggcuccaccu

SEQ ID NO: 93125 - RNA, 19 nt, Artificial Sequence
  Description of Artificial Sequence: Synthetic oligonucleotide
cacggugacgugaaagggg

SEQ ID NO: 93126 - RNA, 19 nt, Artificial Sequence
  Description of Artificial Sequence: Synthetic oligonucleotide
ugguacaagcucaccacca

SEQ ID NO: 93127 - RNA, 19 nt, Artificial Sequence
  Description of Artificial Sequence: Synthetic oligonucleotide
uacgaagccuaccuccuca

SEQ ID NO: 93128 - RNA, 19 nt, Artificial Sequence
  Description of Artificial Sequence: Synthetic oligonucleotide
cuuugaaagggcucccaac

SEQ ID NO: 93129 - RNA, 19 nt, Artificial Sequence
  Description of Artificial Sequence: Synthetic oligonucleotide
ucgauuguguggaugccgu

SEQ ID NO: 93130 - RNA, 19 nt, Artificial Sequence
  Description of Artificial Sequence: Synthetic oligonucleotide
ccauuuugaccuuggaugg

SEQ ID NO: 93131 - RNA, 19 nt, Artificial Sequence
  Description of Artificial Sequence: Synthetic oligonucleotide
  modified_base (6)..(6): a, c, u, g, unknown or other
gaaacncaucuuuuccuuc

SEQ ID NO: 93132 - RNA, 19 nt, Artificial Sequence
  Description of Artificial Sequence: Synthetic oligonucleotide
uuacugucguggacagugg

SEQ ID NO: 93133 - RNA, 19 nt, Artificial Sequence
  Description of Artificial Sequence: Synthetic oligonucleotide
uuugagggaaguggguugc

SEQ ID NO: 93134 - RNA, 19 nt, Artificial Sequence
  Description of Artificial Sequence: Synthetic oligonucleotide
cuuucuuacgaugucccac

SEQ ID NO: 93135 - RNA, 19 nt, Artificial Sequence
  Description of Artificial Sequence: Synthetic oligonucleotide
auacgguaaggagaaagug

SEQ ID NO: 93136 - RNA, 19 nt, Artificial Sequence
  Description of Artificial Sequence: Synthetic oligonucleotide
ugaugcuuucuuuggcucu

SEQ ID NO: 93137 - RNA, 19 nt, Artificial Sequence
  Description of Artificial Sequence: Synthetic oligonucleotide
ucaagucuagggcacucaa

SEQ ID NO: 93138 - RNA, 19 nt, Artificial Sequence
  Description of Artificial Sequence: Synthetic oligonucleotide
gcauauuuaacggagacaa

SEQ ID NO: 93139 - RNA, 19 nt, Artificial Sequence
  Description of Artificial Sequence: Synthetic oligonucleotide
ucuuacgaugucccacaug

SEQ ID NO: 93140 - RNA, 19 nt, Artificial Sequence
  Description of Artificial Sequence: Synthetic oligonucleotide
auuuagauuccaguuuggu

SEQ ID NO: 93141 - RNA, 19 nt, Artificial Sequence
  Description of Artificial Sequence: Synthetic oligonucleotide
cagggauauagguuacggc

SEQ ID NO: 93142 - RNA, 19 nt, Artificial Sequence
  Description of Artificial Sequence: Synthetic oligonucleotide
agaacguaaucuccccucu

SEQ ID NO: 93143 - RNA, 19 nt, Artificial Sequence
  Description of Artificial Sequence: Synthetic oligonucleotide
uuuauggagcaaacauuua

SEQ ID NO: 93144 - RNA, 19 nt, Artificial Sequence
  Description of Artificial Sequence: Synthetic oligonucleotide
uugugugugugugugugug

SEQ ID NO: 93145 - RNA, 19 nt, Artificial Sequence
  Description of Artificial Sequence: Synthetic oligonucleotide
auagguuacggcguaugug

SEQ ID NO: 93146 - RNA, 19 nt, Artificial Sequence
  Description of Artificial Sequence: Synthetic oligonucleotide
acguaggucacugcguagg

SEQ ID NO: 93147 - RNA, 19 nt, Artificial Sequence
  Description of Artificial Sequence: Synthetic oligonucleotide
cacuuaaguagaccaggag

SEQ ID NO: 93148 - RNA, 19 nt, Artificial Sequence
  Description of Artificial Sequence: Synthetic oligonucleotide
auuuaacggagacaauaua

SEQ ID NO: 93149 - RNA, 19 nt, Artificial Sequence
  Description of Artificial Sequence: Synthetic oligonucleotide
caucauaugugggaaggac

SEQ ID NO: 93150 - RNA, 19 nt, Artificial Sequence
  Description of Artificial Sequence: Synthetic oligonucleotide
uguguguguguguguaaca

SEQ ID NO: 93151 - RNA, 19 nt, Artificial Sequence
  Description of Artificial Sequence: Synthetic oligonucleotide
uacugucguggacaguggc

SEQ ID NO: 93152 - RNA, 19 nt, Artificial Sequence
  Description of Artificial Sequence: Synthetic oligonucleotide
ggcacggugacgugaaagg

SEQ ID NO: 93153 - RNA, 19 nt, Artificial Sequence
  Description of Artificial Sequence: Synthetic oligonucleotide
ugacuggauaccuguggug

SEQ ID NO: 93154 - RNA, 19 nt, Artificial Sequence
  Description of Artificial Sequence: Synthetic oligonucleotide
guguguguguguaacauuc

SEQ ID NO: 93155 - RNA, 19 nt, Artificial Sequence
  Description of Artificial Sequence: Synthetic oligonucleotide
gucuagggcacucaaggca

SEQ ID NO: 93156 - RNA, 19 nt, Artificial Sequence
  Description of Artificial Sequence: Synthetic oligonucleotide
uuaaggcacggugacguga

SEQ ID NO: 93157 - RNA, 19 nt, Artificial Sequence
  Description of Artificial Sequence: Synthetic oligonucleotide
uaucagggauauagguuac

SEQ ID NO: 93158 - RNA, 19 nt, Artificial Sequence
  Description of Artificial Sequence: Synthetic oligonucleotide
cauugugugugugugugug

SEQ ID NO: 93159 - RNA, 19 nt, Artificial Sequence
  Description of Artificial Sequence: Synthetic oligonucleotide
auggaaugugaucuggguu

SEQ ID NO: 93160 - RNA, 19 nt, Artificial Sequence
  Description of Artificial Sequence: Synthetic oligonucleotide
cagaacguaaucuccccuc

SEQ ID NO: 93161 - RNA, 19 nt, Artificial Sequence
  Description of Artificial Sequence: Synthetic oligonucleotide
auugcccacaugcuucaug

SEQ ID NO: 93162 - RNA, 19 nt, Artificial Sequence
  Description of Artificial Sequence: Synthetic oligonucleotide
ucgccaaggggccccacag

SEQ ID NO: 93163 - RNA, 19 nt, Artificial Sequence
  Description of Artificial Sequence: Synthetic oligonucleotide
auauagguuacggcguaug

SEQ ID NO: 93164 - RNA, 19 nt, Artificial Sequence
  Description of Artificial Sequence: Synthetic oligonucleotide
acgugaaaggggcuaccag

SEQ ID NO: 93165 - RNA, 19 nt, Artificial Sequence
  Description of Artificial Sequence: Synthetic oligonucleotide
cuauagcagguuuccguug

SEQ ID NO: 93166 - RNA, 19 nt, Artificial Sequence
  Description of Artificial Sequence: Synthetic oligonucleotide
acgaagccuaccuccucac

SEQ ID NO: 93167 - RNA, 19 nt, Artificial Sequence
  Description of Artificial Sequence: Synthetic oligonucleotide
uuuaaggcacggugacgug

SEQ ID NO: 93168 - RNA, 19 nt, Artificial Sequence
  Description of Artificial Sequence: Synthetic oligonucleotide
uagcuuauuaguggucucu

SEQ ID NO: 93169 - RNA, 19 nt, Artificial Sequence
  Description of Artificial Sequence: Synthetic oligonucleotide
agcgagcgucgucugaggg

SEQ ID NO: 93170 - RNA, 19 nt, Artificial Sequence
  Description of Artificial Sequence: Synthetic oligonucleotide
agguggaaccacauguuag

SEQ ID NO: 93171 - RNA, 19 nt, Artificial Sequence
  Description of Artificial Sequence: Synthetic oligonucleotide
ugaccuuaagggacuucga

SEQ ID NO: 93172 - RNA, 19 nt, Artificial Sequence
  Description of Artificial Sequence: Synthetic oligonucleotide
auaaugucccugggccugc

SEQ ID NO: 93173 - RNA, 19 nt, Artificial Sequence
  Description of Artificial Sequence: Synthetic oligonucleotide
uaaucuccccucuccuuga

SEQ ID NO: 93174 - RNA, 19 nt, Artificial Sequence
  Description of Artificial Sequence: Synthetic oligonucleotide
aggggccccacaguaaaac

SEQ ID NO: 93175 - RNA, 19 nt, Artificial Sequence
  Description of Artificial Sequence: Synthetic oligonucleotide
uauagcguccagucuuauc

SEQ ID NO: 93176 - RNA, 19 nt, Artificial Sequence
  Description of Artificial Sequence: Synthetic oligonucleotide
aggagcuuaggggagccag

SEQ ID NO: 93177 - RNA, 19 nt, Artificial Sequence
  Description of Artificial Sequence: Synthetic oligonucleotide
ugggaaagugugguacaag

SEQ ID NO: 93178 - RNA, 19 nt, Artificial Sequence
  Description of Artificial Sequence: Synthetic oligonucleotide
uucgagggaucucuucauc

SEQ ID NO: 93179 - RNA, 19 nt, Artificial Sequence
  Description of Artificial Sequence: Synthetic oligonucleotide
cugacaagacgcuggccug

SEQ ID NO: 93180 - RNA, 19 nt, Artificial Sequence
  Description of Artificial Sequence: Synthetic oligonucleotide
auugugugugugugugugu

SEQ ID NO: 93181 - RNA, 19 nt, Artificial Sequence
  Description of Artificial Sequence: Synthetic oligonucleotide
gauacgguaaggagaaagu

SEQ ID NO: 93182 - RNA, 19 nt, Artificial Sequence
  Description of Artificial Sequence: Synthetic oligonucleotide
aguggcacguaggucacug

SEQ ID NO: 93183 - RNA, 19 nt, Artificial Sequence
  Description of Artificial Sequence: Synthetic oligonucleotide
aguuugguucgucccgugu

SEQ ID NO: 93184 - RNA, 19 nt, Artificial Sequence
  Description of Artificial Sequence: Synthetic oligonucleotide
agguacuccauaggaacug

SEQ ID NO: 93185 - RNA, 19 nt, Artificial Sequence
  Description of Artificial Sequence: Synthetic oligonucleotide
uguguguguguguaacauu

SEQ ID NO: 93186 - RNA, 19 nt, Artificial Sequence
  Description of Artificial Sequence: Synthetic oligonucleotide
ccauaagugaccccaauca

SEQ ID NO: 93187 - RNA, 19 nt, Artificial Sequence
  Description of Artificial Sequence: Synthetic oligonucleotide
aucagggauauagguuacg

SEQ ID NO: 93188 - RNA, 19 nt, Artificial Sequence
  Description of Artificial Sequence: Synthetic oligonucleotide
ugugugugugugugugugu

SEQ ID NO: 93189 - RNA, 19 nt, Artificial Sequence
  Description of Artificial Sequence: Synthetic oligonucleotide
  modified_base (9)..(9): a, c, u, g, unknown or other
cccgaaacncaucuuuucc

SEQ ID NO: 93190 - RNA, 19 nt, Artificial Sequence
  Description of Artificial Sequence: Synthetic oligonucleotide
agguuacggcguaugugcc

SEQ ID NO: 93191 - RNA, 19 nt, Artificial Sequence
  Description of Artificial Sequence: Synthetic oligonucleotide
ugugggcaccccuucgcca

SEQ ID NO: 93192 - RNA, 19 nt, Artificial Sequence
  Description of Artificial Sequence: Synthetic oligonucleotide
ccauuugacagccugguga

SEQ ID NO: 93193 - RNA, 19 nt, Artificial Sequence
  Description of Artificial Sequence: Synthetic oligonucleotide
guaugugacauuguauugu

SEQ ID NO: 93194 - RNA, 19 nt, Artificial Sequence
  Description of Artificial Sequence: Synthetic oligonucleotide
cuuaucagggauauagguu

SEQ ID NO: 93195 - RNA, 19 nt, Artificial Sequence
  Description of Artificial Sequence: Synthetic oligonucleotide
uggguuagccguucuuauc

SEQ ID NO: 93196 - RNA, 19 nt, Artificial Sequence
  Description of Artificial Sequence: Synthetic oligonucleotide
gaacucuucuggcccacga

SEQ ID NO: 93197 - RNA, 19 nt, Artificial Sequence
  Description of Artificial Sequence: Synthetic oligonucleotide
uacccuguucuuagucugu

SEQ ID NO: 93198 - RNA, 19 nt, Artificial Sequence
  Description of Artificial Sequence: Synthetic oligonucleotide
ugagggcgcgaucucggcu

SEQ ID NO: 93199 - RNA, 19 nt, Artificial Sequence
  Description of Artificial Sequence: Synthetic oligonucleotide
gugugugugugugugugug

SEQ ID NO: 93200 - RNA, 19 nt, Artificial Sequence
  Description of Artificial Sequence: Synthetic oligonucleotide
aucuacuuuugagggaagu

SEQ ID NO: 93201 - RNA, 19 nt, Artificial Sequence
  Description of Artificial Sequence: Synthetic oligonucleotide
guagcuuauuaguggucuc

SEQ ID NO: 93202 - RNA, 19 nt, Artificial Sequence
  Description of Artificial Sequence: Synthetic oligonucleotide
aucgccuguuugcguggcc

SEQ ID NO: 93203 - RNA, 19 nt, Artificial Sequence
  Description of Artificial Sequence: Synthetic oligonucleotide
acugcgcaugaugugguug

SEQ ID NO: 93204 - RNA, 19 nt, Artificial Sequence
  Description of Artificial Sequence: Synthetic oligonucleotide
auaggucaaaacaguggca

SEQ ID NO: 93205 - RNA, 19 nt, Artificial Sequence
  Description of Artificial Sequence: Synthetic oligonucleotide
uguguguguguguguguaa

SEQ ID NO: 93206 - RNA, 19 nt, Artificial Sequence
  Description of Artificial Sequence: Synthetic oligonucleotide
gaacguaaucuccccucuc

SEQ ID NO: 93207 - RNA, 19 nt, Artificial Sequence
  Description of Artificial Sequence: Synthetic oligonucleotide
gacuucgagggaucucuuc

SEQ ID NO: 93208 - RNA, 19 nt, Artificial Sequence
  Description of Artificial Sequence: Synthetic oligonucleotide
uuucccucuugguccguga

SEQ ID NO: 93209 - RNA, 19 nt, Artificial Sequence
  Description of Artificial Sequence: Synthetic oligonucleotide
acuacgaagccuaccuccu

SEQ ID NO: 93210 - RNA, 19 nt, Artificial Sequence
  Description of Artificial Sequence: Synthetic oligonucleotide
agguuuccguugaagaccu

SEQ ID NO: 93211 - RNA, 19 nt, Artificial Sequence
  Description of Artificial Sequence: Synthetic oligonucleotide
uacggcguaugugccaucu

SEQ ID NO: 93212 - RNA, 19 nt, Artificial Sequence
  Description of Artificial Sequence: Synthetic oligonucleotide
aaccggacacagugagagu

SEQ ID NO: 93213 - RNA, 19 nt, Artificial Sequence
  Description of Artificial Sequence: Synthetic oligonucleotide
ucgucccgugucuauuaug

SEQ ID NO: 93214 - RNA, 19 nt, Artificial Sequence
  Description of Artificial Sequence: Synthetic oligonucleotide
ggcaucgccuguuugcgug

SEQ ID NO: 93215 - RNA, 19 nt, Artificial Sequence
  Description of Artificial Sequence: Synthetic oligonucleotide
agaccucagguggaaccac

SEQ ID NO: 93216 - RNA, 19 nt, Artificial Sequence
  Description of Artificial Sequence: Synthetic oligonucleotide
guguguguguguguguaac

SEQ ID NO: 93217 - RNA, 19 nt, Artificial Sequence
  Description of Artificial Sequence: Synthetic oligonucleotide
cuuacccuguucuuagucu

SEQ ID NO: 93218 - RNA, 19 nt, Artificial Sequence
  Description of Artificial Sequence: Synthetic oligonucleotide
uucuuacgaugucccacau

SEQ ID NO: 93219 - RNA, 19 nt, Artificial Sequence
  Description of Artificial Sequence: Synthetic oligonucleotide
uggcgcuauagcagguuuc

SEQ ID NO: 93220 - RNA, 19 nt, Artificial Sequence
  Description of Artificial Sequence: Synthetic oligonucleotide
gggaguguacaugacuuug

SEQ ID NO: 93221 - RNA, 19 nt, Artificial Sequence
  Description of Artificial Sequence: Synthetic oligonucleotide
accccauugugugugugug

SEQ ID NO: 93222 - RNA, 19 nt, Artificial Sequence
  Description of Artificial Sequence: Synthetic oligonucleotide
caguagcuuauuagugguc

SEQ ID NO: 93223 - RNA, 19 nt, Artificial Sequence
  Description of Artificial Sequence: Synthetic oligonucleotide
gguuuugggcccuccagca

SEQ ID NO: 93224 - RNA, 19 nt, Artificial Sequence
  Description of Artificial Sequence: Synthetic oligonucleotide
gucugagggcgcgaucucg

SEQ ID NO: 93225 - RNA, 19 nt, Artificial Sequence
  Description of Artificial Sequence: Synthetic oligonucleotide
caugaugugguugggccca

SEQ ID NO: 93226 - RNA, 19 nt, Artificial Sequence
  Description of Artificial Sequence: Synthetic oligonucleotide
agaguacuauauacuuucu

SEQ ID NO: 93227 - RNA, 19 nt, Artificial Sequence
  Description of Artificial Sequence: Synthetic oligonucleotide
gacacguggcauuccucca

SEQ ID NO: 93228 - RNA, 19 nt, Artificial Sequence
  Description of Artificial Sequence: Synthetic oligonucleotide
cauggggaaugaagcgaac

SEQ ID NO: 93229 - RNA, 19 nt, Artificial Sequence
  Description of Artificial Sequence: Synthetic oligonucleotide
cacguaggucacugcguag

SEQ ID NO: 93230 - RNA, 19 nt, Artificial Sequence
  Description of Artificial Sequence: Synthetic oligonucleotide
ugacgugaaaggggcuacc

SEQ ID NO: 93231 - RNA, 19 nt, Artificial Sequence
  Description of Artificial Sequence: Synthetic oligonucleotide
gacgugaaaggggcuacca

SEQ ID NO: 93232 - RNA, 19 nt, Artificial Sequence
  Description of Artificial Sequence: Synthetic oligonucleotide
guugauugcccacaugcuu

SEQ ID NO: 93233 - RNA, 19 nt, Artificial Sequence
  Description of Artificial Sequence: Synthetic oligonucleotide
uggagucaaccgugaaguc

SEQ ID NO: 93234 - RNA, 19 nt, Artificial Sequence
  Description of Artificial Sequence: Synthetic oligonucleotide
auauacuuucuuggcccca

SEQ ID NO: 93235 - RNA, 19 nt, Artificial Sequence
  Description of Artificial Sequence: Synthetic oligonucleotide
uucgucccgugucuauuau

SEQ ID NO: 93236 - RNA, 19 nt, Artificial Sequence
  Description of Artificial Sequence: Synthetic oligonucleotide
auggcgcuauagcagguuu

SEQ ID NO: 93237 - RNA, 19 nt, Artificial Sequence
  Description of Artificial Sequence: Synthetic oligonucleotide
ggcgcuauagcagguuucc

SEQ ID NO: 93238 - RNA, 19 nt, Artificial Sequence
  Description of Artificial Sequence: Synthetic oligonucleotide
ggguuagccguucuuaucu

SEQ ID NO: 93239 - RNA, 19 nt, Artificial Sequence
  Description of Artificial Sequence: Synthetic oligonucleotide
uucccucuugguccgugau

SEQ ID NO: 93240 - RNA, 19 nt, Artificial Sequence
  Description of Artificial Sequence: Synthetic oligonucleotide
ccuuaaggccucucauagg

SEQ ID NO: 93241 - RNA, 19 nt, Artificial Sequence
  Description of Artificial Sequence: Synthetic oligonucleotide
cauauagcguccagucuua

SEQ ID NO: 93242 - RNA, 19 nt, Artificial Sequence
  Description of Artificial Sequence: Synthetic oligonucleotide
gguuagccguucuuaucug

SEQ ID NO: 93243 - RNA, 19 nt, Artificial Sequence
  Description of Artificial Sequence: Synthetic oligonucleotide
cguaugugacauuguauug

SEQ ID NO: 93244 - RNA, 19 nt, Artificial Sequence
  Description of Artificial Sequence: Synthetic oligonucleotide
cuggauagaacuucagcuu

SEQ ID NO: 93245 - RNA, 19 nt, Artificial Sequence
  Description of Artificial Sequence: Synthetic oligonucleotide
augaagcgaacagcguacu

SEQ ID NO: 93246 - RNA, 19 nt, Artificial Sequence
  Description of Artificial Sequence: Synthetic oligonucleotide
caugggaguguacaugacu

SEQ ID NO: 93247 - RNA, 19 nt, Artificial Sequence
  Description of Artificial Sequence: Synthetic oligonucleotide
guuagugucuugguccuua

SEQ ID NO: 93248 - RNA, 19 nt, Artificial Sequence
  Description of Artificial Sequence: Synthetic oligonucleotide
gguggaaccacauguuagu

SEQ ID NO: 93249 - RNA, 19 nt, Artificial Sequence
  Description of Artificial Sequence: Synthetic oligonucleotide
caucaucguaugucaccuc

SEQ ID NO: 93250 - RNA, 19 nt, Artificial Sequence
  Description of Artificial Sequence: Synthetic oligonucleotide
agcgucgucugagggcgcg

SEQ ID NO: 93251 - RNA, 19 nt, Artificial Sequence
  Description of Artificial Sequence: Synthetic oligonucleotide
uguuugcguggcccggaua

SEQ ID NO: 93252 - RNA, 19 nt, Artificial Sequence
  Description of Artificial Sequence: Synthetic oligonucleotide
guuagccguucuuaucugu

SEQ ID NO: 93253 - RNA, 19 nt, Artificial Sequence
  Description of Artificial Sequence: Synthetic oligonucleotide
caauggugacggauaaugu

SEQ ID NO: 93254 - RNA, 19 nt, Artificial Sequence
  Description of Artificial Sequence: Synthetic oligonucleotide
gugacgugaaaggggcuac

SEQ ID NO: 93255 - RNA, 19 nt, Artificial Sequence
  Description of Artificial Sequence: Synthetic oligonucleotide
agggcgcgaucucggcugg

SEQ ID NO: 93256 - RNA, 19 nt, Artificial Sequence
  Description of Artificial Sequence: Synthetic oligonucleotide
cccggauacgguaaggaga

SEQ ID NO: 93257 - RNA, 19 nt, Artificial Sequence
  Description of Artificial Sequence: Synthetic oligonucleotide
ccuugacaacguaugugac

SEQ ID NO: 93258 - RNA, 19 nt, Artificial Sequence
  Description of Artificial Sequence: Synthetic oligonucleotide
gcaguagcuuauuaguggu

SEQ ID NO: 93259 - RNA, 19 nt, Artificial Sequence
  Description of Artificial Sequence: Synthetic oligonucleotide
ccaaucauauagcguccag

SEQ ID NO: 93260 - RNA, 19 nt, Artificial Sequence
  Description of Artificial Sequence: Synthetic oligonucleotide
uggcccggauacgguaagg

SEQ ID NO: 93261 - RNA, 19 nt, Artificial Sequence
  Description of Artificial Sequence: Synthetic oligonucleotide
gcccggauacgguaaggag

SEQ ID NO: 93262 - RNA, 19 nt, Artificial Sequence
  Description of Artificial Sequence: Synthetic oligonucleotide
cgaacagcguacuuaucug

SEQ ID NO: 93263 - RNA, 19 nt, Artificial Sequence
  Description of Artificial Sequence: Synthetic oligonucleotide
ugggcaccccuucgccaag

SEQ ID NO: 93264 - RNA, 19 nt, Artificial Sequence
  Description of Artificial Sequence: Synthetic oligonucleotide
caaucauauagcguccagu

SEQ ID NO: 93265 - RNA, 19 nt, Artificial Sequence
  Description of Artificial Sequence: Synthetic oligonucleotide
ugaggacgacuuggggaug

SEQ ID NO: 93266 - RNA, 19 nt, Artificial Sequence
  Description of Artificial Sequence: Synthetic oligonucleotide
ccaaccuggguuagggauc

SEQ ID NO: 93267 - RNA, 19 nt, Artificial Sequence
  Description of Artificial Sequence: Synthetic oligonucleotide
ugguucgucccgugucuau

SEQ ID NO: 93268 - RNA, 19 nt, Artificial Sequence
  Description of Artificial Sequence: Synthetic oligonucleotide
cccauugugugugugugug

SEQ ID NO: 93269 - RNA, 19 nt, Artificial Sequence
  Description of Artificial Sequence: Synthetic oligonucleotide
guggcacguaggucacugc

SEQ ID NO: 93270 - RNA, 19 nt, Artificial Sequence
  Description of Artificial Sequence: Synthetic oligonucleotide
gcaucgccuguuugcgugg

SEQ ID NO: 93271 - RNA, 19 nt, Artificial Sequence
  Description of Artificial Sequence: Synthetic oligonucleotide
uggcaucgccuguuugcgu

SEQ ID NO: 93272 - RNA, 19 nt, Artificial Sequence
  Description of Artificial Sequence: Synthetic oligonucleotide
gguuacggcguaugugcca

SEQ ID NO: 93273 - RNA, 19 nt, Artificial Sequence
  Description of Artificial Sequence: Synthetic oligonucleotide
acugcguaggugccaucuu

SEQ ID NO: 93274 - RNA, 19 nt, Artificial Sequence
  Description of Artificial Sequence: Synthetic oligonucleotide
ggauauagguuacggcgua

SEQ ID NO: 93275 - RNA, 19 nt, Artificial Sequence
  Description of Artificial Sequence: Synthetic oligonucleotide
cgagcgucgucugagggcg

SEQ ID NO: 93276 - RNA, 19 nt, Artificial Sequence
  Description of Artificial Sequence: Synthetic oligonucleotide
agacaauauagggcacuuu

SEQ ID NO: 93277 - RNA, 19 nt, Artificial Sequence
  Description of Artificial Sequence: Synthetic oligonucleotide
cagguggaaccacauguua

SEQ ID NO: 93278 - RNA, 19 nt, Artificial Sequence
  Description of Artificial Sequence: Synthetic oligonucleotide
uaaugucccugggccugcc

SEQ ID NO: 93279 - RNA, 19 nt, Artificial Sequence
  Description of Artificial Sequence: Synthetic oligonucleotide
gauuggauguaagcuguuu

SEQ ID NO: 93280 - RNA, 19 nt, Artificial Sequence
  Description of Artificial Sequence: Synthetic oligonucleotide
gcgagcgucgucugagggc

SEQ ID NO: 93281 - RNA, 19 nt, Artificial Sequence
  Description of Artificial Sequence: Synthetic oligonucleotide
gacaagacgcuggccuguc

SEQ ID NO: 93282 - RNA, 19 nt, Artificial Sequence
  Description of Artificial Sequence: Synthetic oligonucleotide
gugggcaccccuucgccaa

SEQ ID NO: 93283 - RNA, 19 nt, Artificial Sequence
  Description of Artificial Sequence: Synthetic oligonucleotide
ggugggcccauggaccccg

SEQ ID NO: 93284 - RNA, 19 nt, Artificial Sequence
  Description of Artificial Sequence: Synthetic oligonucleotide
gugugugugugugugugua

SEQ ID NO: 93285 - RNA, 19 nt, Artificial Sequence
  Description of Artificial Sequence: Synthetic oligonucleotide
ugaugugguugggcccacc

SEQ ID NO: 93286 - RNA, 19 nt, Artificial Sequence
  Description of Artificial Sequence: Synthetic oligonucleotide
ggagucaaccgugaagucu

SEQ ID NO: 93287 - RNA, 19 nt, Artificial Sequence
  Description of Artificial Sequence: Synthetic oligonucleotide
gcaccccuucgccaagggg

SEQ ID NO: 93288 - RNA, 19 nt, Artificial Sequence
  Description of Artificial Sequence: Synthetic oligonucleotide
ugacaacguaugugacauu

SEQ ID NO: 93289 - RNA, 19 nt, Artificial Sequence
  Description of Artificial Sequence: Synthetic oligonucleotide
gaccccaaucauauagcgu

SEQ ID NO: 93290 - RNA, 19 nt, Artificial Sequence
  Description of Artificial Sequence: Synthetic oligonucleotide
cauauuuaacggagacaau

SEQ ID NO: 93291 - RNA, 19 nt, Artificial Sequence
  Description of Artificial Sequence: Synthetic oligonucleotide
uugcaccauucaaccuuau

SEQ ID NO: 93292 - RNA, 19 nt, Artificial Sequence
  Description of Artificial Sequence: Synthetic oligonucleotide
caucgccuguuugcguggc

SEQ ID NO: 93293 - RNA, 19 nt, Artificial Sequence
  Description of Artificial Sequence: Synthetic oligonucleotide
gccuuuaaacagaccucag

SEQ ID NO: 93294 - RNA, 19 nt, Artificial Sequence
  Description of Artificial Sequence: Synthetic oligonucleotide
guguguguguguguaacau

SEQ ID NO: 93295 - RNA, 19 nt, Artificial Sequence
  Description of Artificial Sequence: Synthetic oligonucleotide
cagucuuacccuguucuua

SEQ ID NO: 93296 - RNA, 19 nt, Artificial Sequence
  Description of Artificial Sequence: Synthetic oligonucleotide
guuacggcguaugugccau

SEQ ID NO: 93297 - RNA, 19 nt, Artificial Sequence
  Description of Artificial Sequence: Synthetic oligonucleotide
uugguucgucccgugucua

SEQ ID NO: 93298 - RNA, 19 nt, Artificial Sequence
  Description of Artificial Sequence: Synthetic oligonucleotide
gauauagguuacggcguau

SEQ ID NO: 93299 - RNA, 19 nt, Artificial Sequence
  Description of Artificial Sequence: Synthetic oligonucleotide
gguugggcccaccauauuu

SEQ ID NO: 93300 - RNA, 19 nt, Artificial Sequence
  Description of Artificial Sequence: Synthetic oligonucleotide
ggcaccccuucgccaaggg

SEQ ID NO: 93301 - RNA, 19 nt, Artificial Sequence
  Description of Artificial Sequence: Synthetic oligonucleotide
gggauauagguuacggcgu

SEQ ID NO: 93302 - RNA, 19 nt, Artificial Sequence
  Description of Artificial Sequence: Synthetic oligonucleotide
ccauaggaacugaggccag

SEQ ID NO: 93303 - RNA, 19 nt, Artificial Sequence
  Description of Artificial Sequence: Synthetic oligonucleotide
ggugacgugaaaggggcua

SEQ ID NO: 93304 - RNA, 19 nt, Artificial Sequence
  Description of Artificial Sequence: Synthetic oligonucleotide
ggcugaggacauuguaaaa

SEQ ID NO: 93305 - RNA, 19 nt, Artificial Sequence
  Description of Artificial Sequence: Synthetic oligonucleotide
ugucuauggcgggcuccac

SEQ ID NO: 93306 - RNA, 19 nt, Artificial Sequence
  Description of Artificial Sequence: Synthetic oligonucleotide
  modified_base (8)..(8): a, c, u, g, unknown or other
ccgaaacncaucuuuuccu

SEQ ID NO: 93307 - RNA, 19 nt, Artificial Sequence
  Description of Artificial Sequence: Synthetic oligonucleotide
gguacaagcucaccaccau

SEQ ID NO: 93308 - RNA, 19 nt, Artificial Sequence
  Description of Artificial Sequence: Synthetic oligonucleotide
agucaaccgugaagucugu

SEQ ID NO: 93309 - RNA, 19 nt, Artificial Sequence
  Description of Artificial Sequence: Synthetic oligonucleotide
gcgcuauagcagguuuccg

SEQ ID NO: 93310 - RNA, 19 nt, Artificial Sequence
  Description of Artificial Sequence: Synthetic oligonucleotide
ccaugggaguguacaugac

SEQ ID NO: 93311 - RNA, 19 nt, Artificial Sequence
  Description of Artificial Sequence: Synthetic oligonucleotide
gggcccauggaccccgauc

SEQ ID NO: 93312 - RNA, 19 nt, Artificial Sequence
  Description of Artificial Sequence: Synthetic oligonucleotide
cagcuuuugccccgagucu

SEQ ID NO: 93313 - RNA, 19 nt, Artificial Sequence
  Description of Artificial Sequence: Synthetic oligonucleotide
caaccuggguuagggaucu

SEQ ID NO: 93314 - RNA, 19 nt, Artificial Sequence
  Description of Artificial Sequence: Synthetic oligonucleotide
cucggaccuugugggcacc

SEQ ID NO: 93315 - RNA, 19 nt, Artificial Sequence
  Description of Artificial Sequence: Synthetic oligonucleotide
acggcguaugugccaucuu

SEQ ID NO: 93316 - RNA, 19 nt, Artificial Sequence
  Description of Artificial Sequence: Synthetic oligonucleotide
gauggcgcuauagcagguu

SEQ ID NO: 93317 - RNA, 19 nt, Artificial Sequence
  Description of Artificial Sequence: Synthetic oligonucleotide
ggcccggauacgguaagga

SEQ ID NO: 93318 - RNA, 19 nt, Artificial Sequence
  Description of Artificial Sequence: Synthetic oligonucleotide
gucacugcguaggugccau

SEQ ID NO: 93319 - RNA, 19 nt, Artificial Sequence
  Description of Artificial Sequence: Synthetic oligonucleotide
ccuugaauggacugcgcau

SEQ ID NO: 93320 - RNA, 19 nt, Artificial Sequence
  Description of Artificial Sequence: Synthetic oligonucleotide
gccauuuagcagaagccau

SEQ ID NO: 93321 - RNA, 19 nt, Artificial Sequence
  Description of Artificial Sequence: Synthetic oligonucleotide
guccuucaauggugacgga

SEQ ID NO: 93322 - RNA, 19 nt, Artificial Sequence
  Description of Artificial Sequence: Synthetic oligonucleotide
  modified_base (7)..(7): a, c, u, g, unknown or other
cgaaacncaucuuuuccuu

SEQ ID NO: 93323 - RNA, 19 nt, Artificial Sequence
  Description of Artificial Sequence: Synthetic oligonucleotide
gguccgugaucuggacagc

SEQ ID NO: 93324 - RNA, 19 nt, Artificial Sequence
  Description of Artificial Sequence: Synthetic oligonucleotide
gagcgucgucugagggcgc

SEQ ID NO: 93325 - RNA, 19 nt, Artificial Sequence
  Description of Artificial Sequence: Synthetic oligonucleotide
cccaaucauauagcgucca

SEQ ID NO: 93326 - RNA, 19 nt, Artificial Sequence
  Description of Artificial Sequence: Synthetic oligonucleotide
gggcaccccuucgccaagg

SEQ ID NO: 93327 - RNA, 19 nt, Artificial Sequence
  Description of Artificial Sequence: Synthetic oligonucleotide
ggccucucauaggucaaaa

SEQ ID NO: 93328 - RNA, 19 nt, Artificial Sequence
  Description of Artificial Sequence: Synthetic oligonucleotide
ggcacguaggucacugcgu

SEQ ID NO: 93329 - RNA, 19 nt, Artificial Sequence
  Description of Artificial Sequence: Synthetic oligonucleotide
cccuucgccaaggggcccc

SEQ ID NO: 93330 - RNA, 19 nt, Artificial Sequence
  Description of Artificial Sequence: Synthetic oligonucleotide
ccagaacguaaucuccccu

SEQ ID NO: 93331 - RNA, 19 nt, Artificial Sequence
  Description of Artificial Sequence: Synthetic oligonucleotide
ggcgcgaucucggcuggga

SEQ ID NO: 93332 - RNA, 19 nt, Artificial Sequence
  Description of Artificial Sequence: Synthetic oligonucleotide
ccuucuauuccuggcccaa

SEQ ID NO: 93333 - RNA, 19 nt, Artificial Sequence
  Description of Artificial Sequence: Synthetic oligonucleotide
ggacugcgcaugauguggu

SEQ ID NO: 93334 - RNA, 19 nt, Artificial Sequence
  Description of Artificial Sequence: Synthetic oligonucleotide
gguuuccguugaagaccug

SEQ ID NO: 93335 - RNA, 19 nt, Artificial Sequence
  Description of Artificial Sequence: Synthetic oligonucleotide
ggcccacgaaggccuuuga

SEQ ID NO: 93336 - RNA, 19 nt, Artificial Sequence
  Description of Artificial Sequence: Synthetic oligonucleotide
cuguuugcguggcccggau

SEQ ID NO: 93337 - RNA, 19 nt, Artificial Sequence
  Description of Artificial Sequence: Synthetic oligonucleotide
gguucgucccgugucuauu

SEQ ID NO: 93338 - RNA, 19 nt, Artificial Sequence
  Description of Artificial Sequence: Synthetic oligonucleotide
ccuguuugcguggcccgga

SEQ ID NO: 93339 - RNA, 19 nt, Artificial Sequence
  Description of Artificial Sequence: Synthetic oligonucleotide
ccauugugugugugugugu

SEQ ID NO: 93340 - RNA, 19 nt, Artificial Sequence
  Description of Artificial Sequence: Synthetic oligonucleotide
gggcgcgaucucggcuggg

SEQ ID NO: 93341 - RNA, 19 nt, Artificial Sequence
  Description of Artificial Sequence: Synthetic oligonucleotide
cuauggcgggcuccaccuu

SEQ ID NO: 93342 - RNA, 19 nt, Artificial Sequence
  Description of Artificial Sequence: Synthetic oligonucleotide
ccccauugugugugugugu

SEQ ID NO: 93343 - RNA, 19 nt, Artificial Sequence
  Description of Artificial Sequence: Synthetic oligonucleotide
gcgcgaucucggcugggau

SEQ ID NO: 93344 - RNA, 19 nt, Artificial Sequence
  Description of Artificial Sequence: Synthetic oligonucleotide
gcgucgucugagggcgcga

SEQ ID NO: 93345 - RNA, 19 nt, Artificial Sequence
  Description of Artificial Sequence: Synthetic oligonucleotide
caguggcacguaggucacu

SEQ ID NO: 93346 - RNA, 19 nt, Artificial Sequence
  Description of Artificial Sequence: Synthetic oligonucleotide
cggugacgugaaaggggcu

SEQ ID NO: 93347 - RNA, 19 nt, Artificial Sequence
  Description of Artificial Sequence: Synthetic oligonucleotide
cgucgucugagggcgcgau

SEQ ID NO: 93348 - RNA, 19 nt, Artificial Sequence
  Description of Artificial Sequence: Synthetic oligonucleotide
auuauuccuacauugaacc

SEQ ID NO: 93349 - RNA, 19 nt, Artificial Sequence
  Description of Artificial Sequence: Synthetic oligonucleotide
aauuuggccauguuuaacc

SEQ ID NO: 93350 - RNA, 19 nt, Artificial Sequence
  Description of Artificial Sequence: Synthetic oligonucleotide
aaugauuuaagccuucauc

SEQ ID NO: 93351 - RNA, 19 nt, Artificial Sequence
  Description of Artificial Sequence: Synthetic oligonucleotide
aauuaagcuauacagagcu

SEQ ID NO: 93352 - RNA, 19 nt, Artificial Sequence
  Description of Artificial Sequence: Synthetic oligonucleotide
aaaauauccgcuauguacc

SEQ ID NO: 93353 - RNA, 19 nt, Artificial Sequence
  Description of Artificial Sequence: Synthetic oligonucleotide
uucuuaaucaaaauauccg

SEQ ID NO: 93354 - RNA, 19 nt, Artificial Sequence
  Description of Artificial Sequence: Synthetic oligonucleotide
aaugauaaugaugaauuac

SEQ ID NO: 93355 - RNA, 19 nt, Artificial Sequence
  Description of Artificial Sequence: Synthetic oligonucleotide
aaacuuaugcuacaguauc

SEQ ID NO: 93356 - RNA, 19 nt, Artificial Sequence
  Description of Artificial Sequence: Synthetic oligonucleotide
uaaauuucgacucaggaaa

SEQ ID NO: 93357 - RNA, 19 nt, Artificial Sequence
  Description of Artificial Sequence: Synthetic oligonucleotide
uaauagaauaauaaaggcu

SEQ ID NO: 93358 - RNA, 19 nt, Artificial Sequence
  Description of Artificial Sequence: Synthetic oligonucleotide
cacauuucgaaguucaugg

SEQ ID NO: 93359 - RNA, 19 nt, Artificial Sequence
  Description of Artificial Sequence: Synthetic oligonucleotide
caaaauauccgcuauguac

SEQ ID NO: 93360 - RNA, 19 nt, Artificial Sequence
  Description of Artificial Sequence: Synthetic oligonucleotide
ugaccuacagucauuacag

SEQ ID NO: 93361 - RNA, 19 nt, Artificial Sequence
  Description of Artificial Sequence: Synthetic oligonucleotide
augauuuaagccuucauca

SEQ ID NO: 93362 - RNA, 19 nt, Artificial Sequence
  Description of Artificial Sequence: Synthetic oligonucleotide
ucuacgaagacaaugucgu

SEQ ID NO: 93363 - RNA, 19 nt, Artificial Sequence
  Description of Artificial Sequence: Synthetic oligonucleotide
uguaaugacucugagaaca

SEQ ID NO: 93364 - RNA, 19 nt, Artificial Sequence
  Description of Artificial Sequence: Synthetic oligonucleotide
aacacugguaauauacugc

SEQ ID NO: 93365 - RNA, 19 nt, Artificial Sequence
  Description of Artificial Sequence: Synthetic oligonucleotide
uuaagcuuagguuaacagc

SEQ ID NO: 93366 - RNA, 19 nt, Artificial Sequence
  Description of Artificial Sequence: Synthetic oligonucleotide
agaucacguacccugaccc

SEQ ID NO: 93367 - RNA, 19 nt, Artificial Sequence
  Description of Artificial Sequence: Synthetic oligonucleotide
uccgcuauguaccacaacc

SEQ ID NO: 93368 - RNA, 19 nt, Artificial Sequence
  Description of Artificial Sequence: Synthetic oligonucleotide
agccauacguaccagauuc

SEQ ID NO: 93369 - RNA, 19 nt, Artificial Sequence
  Description of Artificial Sequence: Synthetic oligonucleotide
uuauagcucaauaccagcc

SEQ ID NO: 93370 - RNA, 19 nt, Artificial Sequence
  Description of Artificial Sequence: Synthetic oligonucleotide
ucugucaagaccacuuggg

SEQ ID NO: 93371 - RNA, 19 nt, Artificial Sequence
  Description of Artificial Sequence: Synthetic oligonucleotide
agcuuggaggacuaaaucg

SEQ ID NO: 93372 - RNA, 19 nt, Artificial Sequence
  Description of Artificial Sequence: Synthetic oligonucleotide
aaucgagcgaugaaaaggg

SEQ ID NO: 93373 - RNA, 19 nt, Artificial Sequence
  Description of Artificial Sequence: Synthetic oligonucleotide
aauuacuaauuaguuacag

SEQ ID NO: 93374 - RNA, 19 nt, Artificial Sequence
  Description of Artificial Sequence: Synthetic oligonucleotide
gguaauauacugcuuauag

SEQ ID NO: 93375 - RNA, 19 nt, Artificial Sequence
  Description of Artificial Sequence: Synthetic oligonucleotide
uacugaaaugguaugacac

SEQ ID NO: 93376 - RNA, 19 nt, Artificial Sequence
  Description of Artificial Sequence: Synthetic oligonucleotide
uucaugguuauuucgagcu

SEQ ID NO: 93377 - RNA, 19 nt, Artificial Sequence
  Description of Artificial Sequence: Synthetic oligonucleotide
acuuaaaguaggauguugc

SEQ ID NO: 93378 - RNA, 19 nt, Artificial Sequence
  Description of Artificial Sequence: Synthetic oligonucleotide
aagaucccaaacuuaaggu

SEQ ID NO: 93379 - RNA, 19 nt, Artificial Sequence
  Description of Artificial Sequence: Synthetic oligonucleotide
ugauugauuaagaucugug

SEQ ID NO: 93380 - RNA, 19 nt, Artificial Sequence
  Description of Artificial Sequence: Synthetic oligonucleotide
ugguugaaugauuuaagcc

SEQ ID NO: 93381 - RNA, 19 nt, Artificial Sequence
  Description of Artificial Sequence: Synthetic oligonucleotide
aagucuauguaacagucau

SEQ ID NO: 93382 - RNA, 19 nt, Artificial Sequence
  Description of Artificial Sequence: Synthetic oligonucleotide
uaugaguagaguuaacauc

SEQ ID NO: 93383 - RNA, 19 nt, Artificial Sequence
  Description of Artificial Sequence: Synthetic oligonucleotide
ucuacuagugcgaugguaa

SEQ ID NO: 93384 - RNA, 19 nt, Artificial Sequence
  Description of Artificial Sequence: Synthetic oligonucleotide
uuagugagcgugcugagac

SEQ ID NO: 93385 - RNA, 19 nt, Artificial Sequence
  Description of Artificial Sequence: Synthetic oligonucleotide
uaagcuuaguucuccacag

SEQ ID NO: 93386 - RNA, 19 nt, Artificial Sequence
  Description of Artificial Sequence: Synthetic oligonucleotide
aaacaguuuagugagcgug

SEQ ID NO: 93387 - RNA, 19 nt, Artificial Sequence
  Description of Artificial Sequence: Synthetic oligonucleotide
cuaauuuuagaugccaggc

SEQ ID NO: 93388 - RNA, 19 nt, Artificial Sequence
  Description of Artificial Sequence: Synthetic oligonucleotide
aguauugcggagaagacag

SEQ ID NO: 93389 - RNA, 19 nt, Artificial Sequence
  Description of Artificial Sequence: Synthetic oligonucleotide
gccuaauuaagcuauacag

SEQ ID NO: 93390 - RNA, 19 nt, Artificial Sequence
  Description of Artificial Sequence: Synthetic oligonucleotide
aacaguuuagugagcgugc

SEQ ID NO: 93391 - RNA, 19 nt, Artificial Sequence
  Description of Artificial Sequence: Synthetic oligonucleotide
acgagcaccuauuaugaac

SEQ ID NO: 93392 - RNA, 19 nt, Artificial Sequence
  Description of Artificial Sequence: Synthetic oligonucleotide
uaauuaagcuauacagagc

SEQ ID NO: 93393 - RNA, 19 nt, Artificial Sequence
  Description of Artificial Sequence: Synthetic oligonucleotide
uaacaauccaacuguacac

SEQ ID NO: 93394 - RNA, 19 nt, Artificial Sequence
  Description of Artificial Sequence: Synthetic oligonucleotide
auuagaucugucuuacuca

SEQ ID NO: 93395 - RNA, 19 nt, Artificial Sequence
  Description of Artificial Sequence: Synthetic oligonucleotide
auagucuagauaugaguag

SEQ ID NO: 93396 - RNA, 19 nt, Artificial Sequence
  Description of Artificial Sequence: Synthetic oligonucleotide
uuucgagcugauaacacac

SEQ ID NO: 93397 - RNA, 19 nt, Artificial Sequence
  Description of Artificial Sequence: Synthetic oligonucleotide
cuuucuggccuaauuaagc

SEQ ID NO: 93398 - RNA, 19 nt, Artificial Sequence
  Description of Artificial Sequence: Synthetic oligonucleotide
aacauuccuguaaguaucc

SEQ ID NO: 93399 - RNA, 19 nt, Artificial Sequence
  Description of Artificial Sequence: Synthetic oligonucleotide
aacuaauauucuuaaucaa

SEQ ID NO: 93400 - RNA, 19 nt, Artificial Sequence
  Description of Artificial Sequence: Synthetic oligonucleotide
auauacugcuuauagcuca

SEQ ID NO: 93401 - RNA, 19 nt, Artificial Sequence
  Description of Artificial Sequence: Synthetic oligonucleotide
uucuaagucuauguaacag

SEQ ID NO: 93402 - RNA, 19 nt, Artificial Sequence
  Description of Artificial Sequence: Synthetic oligonucleotide
cuauuaugaacuucacaag

SEQ ID NO: 93403 - RNA, 19 nt, Artificial Sequence
  Description of Artificial Sequence: Synthetic oligonucleotide
gauaaugaugaauuacuaa

SEQ ID NO: 93404 - RNA, 19 nt, Artificial Sequence
  Description of Artificial Sequence: Synthetic oligonucleotide
uaggauguugcaacaaaug

SEQ ID NO: 93405 - RNA, 19 nt, Artificial Sequence
  Description of Artificial Sequence: Synthetic oligonucleotide
uggagauugucuacuagug

SEQ ID NO: 93406 - RNA, 19 nt, Artificial Sequence
  Description of Artificial Sequence: Synthetic oligonucleotide
ugcucuccuagauaaagcc

SEQ ID NO: 93407 - RNA, 19 nt, Artificial Sequence
  Description of Artificial Sequence: Synthetic oligonucleotide
ucguagugacuaaauuucg

SEQ ID NO: 93408 - RNA, 19 nt, Artificial Sequence
  Description of Artificial Sequence: Synthetic oligonucleotide
guaacaauccaacuguaca

SEQ ID NO: 93409 - RNA, 19 nt, Artificial Sequence
  Description of Artificial Sequence: Synthetic oligonucleotide
ucuauaucuuaccuccucu

SEQ ID NO: 93410 - RNA, 19 nt, Artificial Sequence
  Description of Artificial Sequence: Synthetic oligonucleotide
cacguugacuuaaaguagg

SEQ ID NO: 93411 - RNA, 19 nt, Artificial Sequence
  Description of Artificial Sequence: Synthetic oligonucleotide
ugauugagauucaaaugga

SEQ ID NO: 93412 - RNA, 19 nt, Artificial Sequence
  Description of Artificial Sequence: Synthetic oligonucleotide
uuagaucugucuuacucac

SEQ ID NO: 93413 - RNA, 19 nt, Artificial Sequence
  Description of Artificial Sequence: Synthetic oligonucleotide
auauuugugggaccaccac

SEQ ID NO: 93414 - RNA, 19 nt, Artificial Sequence
  Description of Artificial Sequence: Synthetic oligonucleotide
uucucaagcuaccugacau

SEQ ID NO: 93415 - RNA, 19 nt, Artificial Sequence
  Description of Artificial Sequence: Synthetic oligonucleotide
aacuaagcuaagcuuaguu

SEQ ID NO: 93416 - RNA, 19 nt, Artificial Sequence
  Description of Artificial Sequence: Synthetic oligonucleotide
cugguugaaugauuuaagc

SEQ ID NO: 93417 - RNA, 19 nt, Artificial Sequence
  Description of Artificial Sequence: Synthetic oligonucleotide
uguugcaacaaaugcuuca

SEQ ID NO: 93418 - RNA, 19 nt, Artificial Sequence
  Description of Artificial Sequence: Synthetic oligonucleotide
auaugaguagaguuaacau

SEQ ID NO: 93419 - RNA, 19 nt, Artificial Sequence
  Description of Artificial Sequence: Synthetic oligonucleotide
ucuggccuaauuaagcuau

SEQ ID NO: 93420 - RNA, 19 nt, Artificial Sequence
  Description of Artificial Sequence: Synthetic oligonucleotide
augaccuacagucauuaca

SEQ ID NO: 93421 - RNA, 19 nt, Artificial Sequence
  Description of Artificial Sequence: Synthetic oligonucleotide
acaauauccuuggagauca

SEQ ID NO: 93422 - RNA, 19 nt, Artificial Sequence
  Description of Artificial Sequence: Synthetic oligonucleotide
uuaagcuauacagagcuau

SEQ ID NO: 93423 - RNA, 19 nt, Artificial Sequence
  Description of Artificial Sequence: Synthetic oligonucleotide
uuauuucgagcugauaaca

SEQ ID NO: 93424 - RNA, 19 nt, Artificial Sequence
  Description of Artificial Sequence: Synthetic oligonucleotide
aggcugauugaccugccgc

SEQ ID NO: 93425 - RNA, 19 nt, Artificial Sequence
  Description of Artificial Sequence: Synthetic oligonucleotide
ucgagcgaugaaaagggcc

SEQ ID NO: 93426 - RNA, 19 nt, Artificial Sequence
  Description of Artificial Sequence: Synthetic oligonucleotide
ugauaaugaugaauuacua

SEQ ID NO: 93427 - RNA, 19 nt, Artificial Sequence
  Description of Artificial Sequence: Synthetic oligonucleotide
ugucucacagguuuucuca

SEQ ID NO: 93428 - RNA, 19 nt, Artificial Sequence
  Description of Artificial Sequence: Synthetic oligonucleotide
ugaguuaccuucccauacc

SEQ ID NO: 93429 - RNA, 19 nt, Artificial Sequence
  Description of Artificial Sequence: Synthetic oligonucleotide
ugucuuacucacucgacac

SEQ ID NO: 93430 - RNA, 19 nt, Artificial Sequence
  Description of Artificial Sequence: Synthetic oligonucleotide
cucuccuagauaaagccac

SEQ ID NO: 93431 - RNA, 19 nt, Artificial Sequence
  Description of Artificial Sequence: Synthetic oligonucleotide
guagugacuaaauuucgac

SEQ ID NO: 93432 - RNA, 19 nt, Artificial Sequence
  Description of Artificial Sequence: Synthetic oligonucleotide
acaggcuuguaccauagcu

SEQ ID NO: 93433 - RNA, 19 nt, Artificial Sequence
  Description of Artificial Sequence: Synthetic oligonucleotide
gaaguuaucacaaaggcuu

SEQ ID NO: 93434 - RNA, 19 nt, Artificial Sequence
  Description of Artificial Sequence: Synthetic oligonucleotide
auauuauuccuacauugaa

SEQ ID NO: 93435 - RNA, 19 nt, Artificial Sequence
  Description of Artificial Sequence: Synthetic oligonucleotide
guuauuucgagcugauaac

SEQ ID NO: 93436 - RNA, 19 nt, Artificial Sequence
  Description of Artificial Sequence: Synthetic oligonucleotide
aaauauccgcuauguacca

SEQ ID NO: 93437 - RNA, 19 nt, Artificial Sequence
  Description of Artificial Sequence: Synthetic oligonucleotide
ugauaggucuucaaccuuc

SEQ ID NO: 93438 - RNA, 19 nt, Artificial Sequence
  Description of Artificial Sequence: Synthetic oligonucleotide
aacuuaagguuacagcauu

SEQ ID NO: 93439 - RNA, 19 nt, Artificial Sequence
  Description of Artificial Sequence: Synthetic oligonucleotide
uauuucgagcugauaacac

SEQ ID NO: 93440 - RNA, 19 nt, Artificial Sequence
  Description of Artificial Sequence: Synthetic oligonucleotide
acaacaucuacgaagacaa

SEQ ID NO: 93441 - RNA, 19 nt, Artificial Sequence
  Description of Artificial Sequence: Synthetic oligonucleotide
uacgaagacaaugucguca

SEQ ID NO: 93442 - RNA, 19 nt, Artificial Sequence
  Description of Artificial Sequence: Synthetic oligonucleotide
aguaagugcuacugaaaug

SEQ ID NO: 93443 - RNA, 19 nt, Artificial Sequence
  Description of Artificial Sequence: Synthetic oligonucleotide
guaaguauccacaacaucu

SEQ ID NO: 93444 - RNA, 19 nt, Artificial Sequence
  Description of Artificial Sequence: Synthetic oligonucleotide
auggagauugucuacuagu

SEQ ID NO: 93445 - RNA, 19 nt, Artificial Sequence
  Description of Artificial Sequence: Synthetic oligonucleotide
uuucuggccuaauuaagcu

SEQ ID NO: 93446 - RNA, 19 nt, Artificial Sequence
  Description of Artificial Sequence: Synthetic oligonucleotide
aaaacuuaugcuacaguau

SEQ ID NO: 93447 - RNA, 19 nt, Artificial Sequence
  Description of Artificial Sequence: Synthetic oligonucleotide
cacacguugacuuaaagua

SEQ ID NO: 93448 - RNA, 19 nt, Artificial Sequence
  Description of Artificial Sequence: Synthetic oligonucleotide
accagauucuaaauggagg

SEQ ID NO: 93449 - RNA, 19 nt, Artificial Sequence
  Description of Artificial Sequence: Synthetic oligonucleotide
cugauaacacaccaacuac

SEQ ID NO: 93450 - RNA, 19 nt, Artificial Sequence
  Description of Artificial Sequence: Synthetic oligonucleotide
aguucaaaagguaaaggga

SEQ ID NO: 93451 - RNA, 19 nt, Artificial Sequence
  Description of Artificial Sequence: Synthetic oligonucleotide
agaugaacuguuccacagg

SEQ ID NO: 93452 - RNA, 19 nt, Artificial Sequence
  Description of Artificial Sequence: Synthetic oligonucleotide
uagugacuaaauuucgacu

SEQ ID NO: 93453 - RNA, 19 nt, Artificial Sequence
  Description of Artificial Sequence: Synthetic oligonucleotide
gacuucucaagcuaccuga

SEQ ID NO: 93454 - RNA, 19 nt, Artificial Sequence
  Description of Artificial Sequence: Synthetic oligonucleotide
gauuguaccuucaaagcuc

SEQ ID NO: 93455 - RNA, 19 nt, Artificial Sequence
  Description of Artificial Sequence: Synthetic oligonucleotide
auacguaccagauucuaaa

SEQ ID NO: 93456 - RNA, 19 nt, Artificial Sequence
  Description of Artificial Sequence: Synthetic oligonucleotide
cuauguaccacaaccuguc

SEQ ID NO: 93457 - RNA, 19 nt, Artificial Sequence
  Description of Artificial Sequence: Synthetic oligonucleotide
aguuuagugagcgugcuga

SEQ ID NO: 93458 - RNA, 19 nt, Artificial Sequence
  Description of Artificial Sequence: Synthetic oligonucleotide
aaaggauguauguuuuguu

SEQ ID NO: 93459 - RNA, 19 nt, Artificial Sequence
  Description of Artificial Sequence: Synthetic oligonucleotide
auuucgagcugauaacaca

SEQ ID NO: 93460 - RNA, 19 nt, Artificial Sequence
  Description of Artificial Sequence: Synthetic oligonucleotide
uuacucacucgacacuuug

SEQ ID NO: 93461 - RNA, 19 nt, Artificial Sequence
  Description of Artificial Sequence: Synthetic oligonucleotide
ucaagcuaccugacauugg

SEQ ID NO: 93462 - RNA, 19 nt, Artificial Sequence
  Description of Artificial Sequence: Synthetic oligonucleotide
gauaacacaccaacuacca

SEQ ID NO: 93463 - RNA, 19 nt, Artificial Sequence
  Description of Artificial Sequence: Synthetic oligonucleotide
gcauguauaacaugcauca

SEQ ID NO: 93464 - RNA, 19 nt, Artificial Sequence
  Description of Artificial Sequence: Synthetic oligonucleotide
acuaaaucgagcgaugaaa

SEQ ID NO: 93465 - RNA, 19 nt, Artificial Sequence
  Description of Artificial Sequence: Synthetic oligonucleotide
uaucagcugauugauuaag

SEQ ID NO: 93466 - RNA, 19 nt, Artificial Sequence
  Description of Artificial Sequence: Synthetic oligonucleotide
cuaaauuucgacucaggaa

SEQ ID NO: 93467 - RNA, 19 nt, Artificial Sequence
  Description of Artificial Sequence: Synthetic oligonucleotide
uccccuauauuauuccuac

SEQ ID NO: 93468 - RNA, 19 nt, Artificial Sequence
  Description of Artificial Sequence: Synthetic oligonucleotide
uguaccacaaccugucuuu

SEQ ID NO: 93469 - RNA, 19 nt, Artificial Sequence
  Description of Artificial Sequence: Synthetic oligonucleotide
ucccaagguaaguugcuag

SEQ ID NO: 93470 - RNA, 19 nt, Artificial Sequence
  Description of Artificial Sequence: Synthetic oligonucleotide
cuagauaugaguagaguua

SEQ ID NO: 93471 - RNA, 19 nt, Artificial Sequence
  Description of Artificial Sequence: Synthetic oligonucleotide
uauugcggagaagacagca

SEQ ID NO: 93472 - RNA, 19 nt, Artificial Sequence
  Description of Artificial Sequence: Synthetic oligonucleotide
gguugaaugauuuaagccu

SEQ ID NO: 93473 - RNA, 19 nt, Artificial Sequence
  Description of Artificial Sequence: Synthetic oligonucleotide
acguaccagauucuaaaug

SEQ ID NO: 93474 - RNA, 19 nt, Artificial Sequence
  Description of Artificial Sequence: Synthetic oligonucleotide
auaugaaguagaaacaaua

SEQ ID NO: 93475 - RNA, 19 nt, Artificial Sequence
  Description of Artificial Sequence: Synthetic oligonucleotide
ugaguauugcggagaagac

SEQ ID NO: 93476 - RNA, 19 nt, Artificial Sequence
  Description of Artificial Sequence: Synthetic oligonucleotide
uccuaguguguucugaaua

SEQ ID NO: 93477 - RNA, 19 nt, Artificial Sequence
  Description of Artificial Sequence: Synthetic oligonucleotide
uauaucuuaccuccucuuu

SEQ ID NO: 93478 - RNA, 19 nt, Artificial Sequence
  Description of Artificial Sequence: Synthetic oligonucleotide
uucccuacuucccugugac

SEQ ID NO: 93479 - RNA, 19 nt, Artificial Sequence
  Description of Artificial Sequence: Synthetic oligonucleotide
ucauaugugugcacauccu

SEQ ID NO: 93480 - RNA, 19 nt, Artificial Sequence
  Description of Artificial Sequence: Synthetic oligonucleotide
caaauggaguuauuacaac

SEQ ID NO: 93481 - RNA, 19 nt, Artificial Sequence
  Description of Artificial Sequence: Synthetic oligonucleotide
ccuagauaaagccaccugc

SEQ ID NO: 93482 - RNA, 19 nt, Artificial Sequence
  Description of Artificial Sequence: Synthetic oligonucleotide
ugugggaccaccacacuau

SEQ ID NO: 93483 - RNA, 19 nt, Artificial Sequence
  Description of Artificial Sequence: Synthetic oligonucleotide
auuuugacuucucaagcua

SEQ ID NO: 93484 - RNA, 19 nt, Artificial Sequence
  Description of Artificial Sequence: Synthetic oligonucleotide
guucaugguuauuucgagc

SEQ ID NO: 93485 - RNA, 19 nt, Artificial Sequence
  Description of Artificial Sequence: Synthetic oligonucleotide
uuacugcauuccauuaugu

SEQ ID NO: 93486 - RNA, 19 nt, Artificial Sequence
  Description of Artificial Sequence: Synthetic oligonucleotide
cuuucccacacgauuguac

SEQ ID NO: 93487 - RNA, 19 nt, Artificial Sequence
  Description of Artificial Sequence: Synthetic oligonucleotide
cugaguuaccuucccauac

SEQ ID NO: 93488 - RNA, 19 nt, Artificial Sequence
  Description of Artificial Sequence: Synthetic oligonucleotide
ugucacgucuucucaaagu

SEQ ID NO: 93489 - RNA, 19 nt, Artificial Sequence
  Description of Artificial Sequence: Synthetic oligonucleotide
aaaugaccuacagucauua

SEQ ID NO: 93490 - RNA, 19 nt, Artificial Sequence
  Description of Artificial Sequence: Synthetic oligonucleotide
guaagaugaacuguuccac

SEQ ID NO: 93491 - RNA, 19 nt, Artificial Sequence
  Description of Artificial Sequence: Synthetic oligonucleotide
accuauuaugaacuucaca

SEQ ID NO: 93492 - RNA, 19 nt, Artificial Sequence
  Description of Artificial Sequence: Synthetic oligonucleotide
gacuaaauuucgacucagg

SEQ ID NO: 93493 - RNA, 19 nt, Artificial Sequence
  Description of Artificial Sequence: Synthetic oligonucleotide
guacacaccagaaacaaaa

SEQ ID NO: 93494 - RNA, 19 nt, Artificial Sequence
  Description of Artificial Sequence: Synthetic oligonucleotide
cucugucaagaccacuugg

SEQ ID NO: 93495 - RNA, 19 nt, Artificial Sequence
  Description of Artificial Sequence: Synthetic oligonucleotide
cuaaaucgagcgaugaaaa

SEQ ID NO: 93496 - RNA, 19 nt, Artificial Sequence
  Description of Artificial Sequence: Synthetic oligonucleotide
cuuaaaguaggauguugca

SEQ ID NO: 93497 - RNA, 19 nt, Artificial Sequence
  Description of Artificial Sequence: Synthetic oligonucleotide
ccaaacuuaagguuacagc

SEQ ID NO: 93498 - RNA, 19 nt, Artificial Sequence
  Description of Artificial Sequence: Synthetic oligonucleotide
gagaucacguacccugacc

SEQ ID NO: 93499 - RNA, 19 nt, Artificial Sequence
  Description of Artificial Sequence: Synthetic oligonucleotide
auaucuuaccuccucuuua

SEQ ID NO: 93500 - RNA, 19 nt, Artificial Sequence
  Description of Artificial Sequence: Synthetic oligonucleotide
ggcagagaaauugagcuag

SEQ ID NO: 93501 - RNA, 19 nt, Artificial Sequence
  Description of Artificial Sequence: Synthetic oligonucleotide
agacuuuacagucccuggu

SEQ ID NO: 93502 - RNA, 19 nt, Artificial Sequence
  Description of Artificial Sequence: Synthetic oligonucleotide
uaccacaucguagugacua

SEQ ID NO: 93503 - RNA, 19 nt, Artificial Sequence
  Description of Artificial Sequence: Synthetic oligonucleotide
cuaagcuuaguucuccaca

SEQ ID NO: 93504 - RNA, 19 nt, Artificial Sequence
  Description of Artificial Sequence: Synthetic oligonucleotide
gcuaccugacauuggaggg

SEQ ID NO: 93505 - RNA, 19 nt, Artificial Sequence
  Description of Artificial Sequence: Synthetic oligonucleotide
ugaaugauuuaagccuuca

SEQ ID NO: 93506 - RNA, 19 nt, Artificial Sequence
  Description of Artificial Sequence: Synthetic oligonucleotide
ugcuacugaaaugguauga

SEQ ID NO: 93507 - RNA, 19 nt, Artificial Sequence
  Description of Artificial Sequence: Synthetic oligonucleotide
cuaauuaguuacagucauc

SEQ ID NO: 93508 - RNA, 19 nt, Artificial Sequence
  Description of Artificial Sequence: Synthetic oligonucleotide
aaccuuccggaguugccug

SEQ ID NO: 93509 - RNA, 19 nt, Artificial Sequence
  Description of Artificial Sequence: Synthetic oligonucleotide
gauauuugugggaccacca

SEQ ID NO: 93510 - RNA, 19 nt, Artificial Sequence
  Description of Artificial Sequence: Synthetic oligonucleotide
agcaccuauuaugaacuuc

SEQ ID NO: 93511 - RNA, 19 nt, Artificial Sequence
  Description of Artificial Sequence: Synthetic oligonucleotide
uaagugcuacugaaauggu

SEQ ID NO: 93512 - RNA, 19 nt, Artificial Sequence
  Description of Artificial Sequence: Synthetic oligonucleotide
agcuuaguucuccacagua

SEQ ID NO: 93513 - RNA, 19 nt, Artificial Sequence
  Description of Artificial Sequence: Synthetic oligonucleotide
aauugacuacauugugaua

SEQ ID NO: 93514 - RNA, 19 nt, Artificial Sequence
  Description of Artificial Sequence: Synthetic oligonucleotide
gguauguguggccccagcg

SEQ ID NO: 93515 - RNA, 19 nt, Artificial Sequence
  Description of Artificial Sequence: Synthetic oligonucleotide
cugcucuccuagauaaagc

SEQ ID NO: 93516 - RNA, 19 nt, Artificial Sequence
  Description of Artificial Sequence: Synthetic oligonucleotide
aaaugcccaugcugacauc

SEQ ID NO: 93517 - RNA, 19 nt, Artificial Sequence
  Description of Artificial Sequence: Synthetic oligonucleotide
auugucuacuagugcgaug

SEQ ID NO: 93518 - RNA, 19 nt, Artificial Sequence
  Description of Artificial Sequence: Synthetic oligonucleotide
uuccccuauauuauuccua

SEQ ID NO: 93519 - RNA, 19 nt, Artificial Sequence
  Description of Artificial Sequence: Synthetic oligonucleotide
auaugugugcacauccuga

SEQ ID NO: 93520 - RNA, 19 nt, Artificial Sequence
  Description of Artificial Sequence: Synthetic oligonucleotide
uugugggaccaccacacua

SEQ ID NO: 93521 - RNA, 19 nt, Artificial Sequence
  Description of Artificial Sequence: Synthetic oligonucleotide
acauuucgaaguucauggu

SEQ ID NO: 93522 - RNA, 19 nt, Artificial Sequence
  Description of Artificial Sequence: Synthetic oligonucleotide
auuccuacauugaaccugu

SEQ ID NO: 93523 - RNA, 19 nt, Artificial Sequence
  Description of Artificial Sequence: Synthetic oligonucleotide
ugaaagucccaagguaagu

SEQ ID NO: 93524 - RNA, 19 nt, Artificial Sequence
  Description of Artificial Sequence: Synthetic oligonucleotide
agucuagauaugaguagag

SEQ ID NO: 93525 - RNA, 19 nt, Artificial Sequence
  Description of Artificial Sequence: Synthetic oligonucleotide
ccugauggugacuggaugc

SEQ ID NO: 93526 - RNA, 19 nt, Artificial Sequence
  Description of Artificial Sequence: Synthetic oligonucleotide
cagcuuacugcuuacugca

SEQ ID NO: 93527 - RNA, 19 nt, Artificial Sequence
  Description of Artificial Sequence: Synthetic oligonucleotide
ccuaauuaagcuauacaga

SEQ ID NO: 93528 - RNA, 19 nt, Artificial Sequence
  Description of Artificial Sequence: Synthetic oligonucleotide
gaguauugcggagaagaca

SEQ ID NO: 93529 - RNA, 19 nt, Artificial Sequence
  Description of Artificial Sequence: Synthetic oligonucleotide
ugagcgugcugagacauuc

SEQ ID NO: 93530 - RNA, 19 nt, Artificial Sequence
  Description of Artificial Sequence: Synthetic oligonucleotide
acucacucgacacuuuguu

SEQ ID NO: 93531 - RNA, 19 nt, Artificial Sequence
  Description of Artificial Sequence: Synthetic oligonucleotide
uacguaccagauucuaaau

SEQ ID NO: 93532 - RNA, 19 nt, Artificial Sequence
  Description of Artificial Sequence: Synthetic oligonucleotide
uuuagguccuauggcugcc

SEQ ID NO: 93533 - RNA, 19 nt, Artificial Sequence
  Description of Artificial Sequence: Synthetic oligonucleotide
uguggacugcuuaacuauu

SEQ ID NO: 93534 - RNA, 19 nt, Artificial Sequence
  Description of Artificial Sequence: Synthetic oligonucleotide
cuuagguuaacagcaggca

SEQ ID NO: 93535 - RNA, 19 nt, Artificial Sequence
  Description of Artificial Sequence: Synthetic oligonucleotide
aaauuucgacucaggaaau

SEQ ID NO: 93536 - RNA, 19 nt, Artificial Sequence
  Description of Artificial Sequence: Synthetic oligonucleotide
aaacuaagcuaagcuuagu

SEQ ID NO: 93537 - RNA, 19 nt, Artificial Sequence
  Description of Artificial Sequence: Synthetic oligonucleotide
uacuagugcgaugguaaca

SEQ ID NO: 93538 - RNA, 19 nt, Artificial Sequence
  Description of Artificial Sequence: Synthetic oligonucleotide
gcuuauagcucaauaccag

SEQ ID NO: 93539 - RNA, 19 nt, Artificial Sequence
  Description of Artificial Sequence: Synthetic oligonucleotide
uucuggccuaauuaagcua

SEQ ID NO: 93540 - RNA, 19 nt, Artificial Sequence
  Description of Artificial Sequence: Synthetic oligonucleotide
cucacucgacacuuuguuc

SEQ ID NO: 93541 - RNA, 19 nt, Artificial Sequence
  Description of Artificial Sequence: Synthetic oligonucleotide
aauuucgacucaggaaaua

SEQ ID NO: 93542 - RNA, 19 nt, Artificial Sequence
  Description of Artificial Sequence: Synthetic oligonucleotide
gacuaaaucgagcgaugaa

SEQ ID NO: 93543 - RNA, 19 nt, Artificial Sequence
  Description of Artificial Sequence: Synthetic oligonucleotide
aggaccauuugguuguaua

SEQ ID NO: 93544 - RNA, 19 nt, Artificial Sequence
  Description of Artificial Sequence: Synthetic oligonucleotide
uucccacacgauuguaccu

SEQ ID NO: 93545 - RNA, 19 nt, Artificial Sequence
  Description of Artificial Sequence: Synthetic oligonucleotide
uauccgcuauguaccacaa

SEQ ID NO: 93546 - RNA, 19 nt, Artificial Sequence
  Description of Artificial Sequence: Synthetic oligonucleotide
cauaccuggucauaugugu

SEQ ID NO: 93547 - RNA, 19 nt, Artificial Sequence
  Description of Artificial Sequence: Synthetic oligonucleotide
aucgagcgaugaaaagggc

SEQ ID NO: 93548 - RNA, 19 nt, Artificial Sequence
  Description of Artificial Sequence: Synthetic oligonucleotide
aaguaggauguugcaacaa

SEQ ID NO: 93549 - RNA, 19 nt, Artificial Sequence
  Description of Artificial Sequence: Synthetic oligonucleotide
uccacgccuuccaugaauu

SEQ ID NO: 93550 - RNA, 19 nt, Artificial Sequence
  Description of Artificial Sequence: Synthetic oligonucleotide
cugucuuacucacucgaca

SEQ ID NO: 93551 - RNA, 19 nt, Artificial Sequence
  Description of Artificial Sequence: Synthetic oligonucleotide
gaguuaguuaggaauauuu

SEQ ID NO: 93552 - RNA, 19 nt, Artificial Sequence
  Description of Artificial Sequence: Synthetic oligonucleotide
uggccuaauuaagcuauac

SEQ ID NO: 93553 - RNA, 19 nt, Artificial Sequence
  Description of Artificial Sequence: Synthetic oligonucleotide
caucguagugacuaaauuu

SEQ ID NO: 93554 - RNA, 19 nt, Artificial Sequence
  Description of Artificial Sequence: Synthetic oligonucleotide
cagcuuggaggacuaaauc

SEQ ID NO: 93555 - RNA, 19 nt, Artificial Sequence
  Description of Artificial Sequence: Synthetic oligonucleotide
auccgcuauguaccacaac

SEQ ID NO: 93556 - RNA, 19 nt, Artificial Sequence
  Description of Artificial Sequence: Synthetic oligonucleotide
ucccugugacacugaaccc

SEQ ID NO: 93557 - RNA, 19 nt, Artificial Sequence
  Description of Artificial Sequence: Synthetic oligonucleotide
aguuccuaguguguucuga

SEQ ID NO: 93558 - RNA, 19 nt, Artificial Sequence
  Description of Artificial Sequence: Synthetic oligonucleotide
uuacagucccuggucuuug

SEQ ID NO: 93559 - RNA, 19 nt, Artificial Sequence
  Description of Artificial Sequence: Synthetic oligonucleotide
agaugccaggcagagaaau

SEQ ID NO: 93560 - RNA, 19 nt, Artificial Sequence
  Description of Artificial Sequence: Synthetic oligonucleotide
cauacguaccagauucuaa

SEQ ID NO: 93561 - RNA, 19 nt, Artificial Sequence
  Description of Artificial Sequence: Synthetic oligonucleotide
cugucacgucuucucaaag

SEQ ID NO: 93562 - RNA, 19 nt, Artificial Sequence
  Description of Artificial Sequence: Synthetic oligonucleotide
ugcugucacgucuucucaa

SEQ ID NO: 93563 - RNA, 19 nt, Artificial Sequence
  Description of Artificial Sequence: Synthetic oligonucleotide
gaucacguacccugaccca

SEQ ID NO: 93564 - RNA, 19 nt, Artificial Sequence
  Description of Artificial Sequence: Synthetic oligonucleotide
gcaccuauuaugaacuuca

SEQ ID NO: 93565 - RNA, 19 nt, Artificial Sequence
  Description of Artificial Sequence: Synthetic oligonucleotide
caccuauuaugaacuucac

SEQ ID NO: 93566 - RNA, 19 nt, Artificial Sequence
  Description of Artificial Sequence: Synthetic oligonucleotide
caugguacuuauguaaaua

SEQ ID NO: 93567 - RNA, 19 nt, Artificial Sequence
  Description of Artificial Sequence: Synthetic oligonucleotide
agcgugcugagacauucau

SEQ ID NO: 93568 - RNA, 19 nt, Artificial Sequence
  Description of Artificial Sequence: Synthetic oligonucleotide
acaguuuagugagcgugcu

SEQ ID NO: 93569 - RNA, 19 nt, Artificial Sequence
  Description of Artificial Sequence: Synthetic oligonucleotide
gguaacaauccaacuguac

SEQ ID NO: 93570 - RNA, 19 nt, Artificial Sequence
  Description of Artificial Sequence: Synthetic oligonucleotide
gaggacuaaaucgagcgau

SEQ ID NO: 93571 - RNA, 19 nt, Artificial Sequence
  Description of Artificial Sequence: Synthetic oligonucleotide
agcugauaacacaccaacu

SEQ ID NO: 93572 - RNA, 19 nt, Artificial Sequence
  Description of Artificial Sequence: Synthetic oligonucleotide
ggccuaauuaagcuauaca

SEQ ID NO: 93573 - RNA, 19 nt, Artificial Sequence
  Description of Artificial Sequence: Synthetic oligonucleotide
gaaugauuuaagccuucau

SEQ ID NO: 93574 - RNA, 19 nt, Artificial Sequence
  Description of Artificial Sequence: Synthetic oligonucleotide
gaguuaccuucccauaccu

SEQ ID NO: 93575 - RNA, 19 nt, Artificial Sequence
  Description of Artificial Sequence: Synthetic oligonucleotide
ugacuacauugugauauuu

SEQ ID NO: 93576 - RNA, 19 nt, Artificial Sequence
  Description of Artificial Sequence: Synthetic oligonucleotide
cuacgaagacaaugucguc

SEQ ID NO: 93577 - RNA, 19 nt, Artificial Sequence
  Description of Artificial Sequence: Synthetic oligonucleotide
gacacgaggccauggagau

SEQ ID NO: 93578 - RNA, 19 nt, Artificial Sequence
  Description of Artificial Sequence: Synthetic oligonucleotide
aguuaucacaaaggcuuau

SEQ ID NO: 93579 - RNA, 19 nt, Artificial Sequence
  Description of Artificial Sequence: Synthetic oligonucleotide
ugucuacuagugcgauggu

SEQ ID NO: 93580 - RNA, 19 nt, Artificial Sequence
  Description of Artificial Sequence: Synthetic oligonucleotide
aggaguuaguuaggaauau

SEQ ID NO: 93581 - RNA, 19 nt, Artificial Sequence
  Description of Artificial Sequence: Synthetic oligonucleotide
gcccaauucaaccugaaau

SEQ ID NO: 93582 - RNA, 19 nt, Artificial Sequence
  Description of Artificial Sequence: Synthetic oligonucleotide
cucuuguggugaguauugc

SEQ ID NO: 93583 - RNA, 19 nt, Artificial Sequence
  Description of Artificial Sequence: Synthetic oligonucleotide
gugucagaacuucuguugu

SEQ ID NO: 93584 - RNA, 19 nt, Artificial Sequence
  Description of Artificial Sequence: Synthetic oligonucleotide
ucccacacgauuguaccuu

SEQ ID NO: 93585 - RNA, 19 nt, Artificial Sequence
  Description of Artificial Sequence: Synthetic oligonucleotide
gcuaagcuuaguucuccac

SEQ ID NO: 93586 - RNA, 19 nt, Artificial Sequence
  Description of Artificial Sequence: Synthetic oligonucleotide
caguuuagugagcgugcug

SEQ ID NO: 93587 - RNA, 19 nt, Artificial Sequence
  Description of Artificial Sequence: Synthetic oligonucleotide
ggauguugcaacaaaugcu

SEQ ID NO: 93588 - RNA, 19 nt, Artificial Sequence
  Description of Artificial Sequence: Synthetic oligonucleotide
caucaggaguuaguuagga

SEQ ID NO: 93589 - RNA, 19 nt, Artificial Sequence
  Description of Artificial Sequence: Synthetic oligonucleotide
accacaucguagugacuaa

SEQ ID NO: 93590 - RNA, 19 nt, Artificial Sequence
  Description of Artificial Sequence: Synthetic oligonucleotide
gcuuaguucuccacaguac

SEQ ID NO: 93591 - RNA, 19 nt, Artificial Sequence
  Description of Artificial Sequence: Synthetic oligonucleotide
ccauuaugugaaaauguaa

SEQ ID NO: 93592 - RNA, 19 nt, Artificial Sequence
  Description of Artificial Sequence: Synthetic oligonucleotide
caugagccauacguaccag

SEQ ID NO: 93593 - RNA, 19 nt, Artificial Sequence
  Description of Artificial Sequence: Synthetic oligonucleotide
auugcggagaagacagcau

SEQ ID NO: 93594 - RNA, 19 nt, Artificial Sequence
  Description of Artificial Sequence: Synthetic oligonucleotide
agucccaagguaaguugcu

SEQ ID NO: 93595 - RNA, 19 nt, Artificial Sequence
  Description of Artificial Sequence: Synthetic oligonucleotide
ccauaccuggucauaugug

SEQ ID NO: 93596 - RNA, 19 nt, Artificial Sequence
  Description of Artificial Sequence: Synthetic oligonucleotide
agccacgagcaccuauuau

SEQ ID NO: 93597 - RNA, 19 nt, Artificial Sequence
  Description of Artificial Sequence: Synthetic oligonucleotide
cuucccuacuucccuguga

SEQ ID NO: 93598 - RNA, 19 nt, Artificial Sequence
  Description of Artificial Sequence: Synthetic oligonucleotide
ggcacuucacagccacgag

SEQ ID NO: 93599 - RNA, 19 nt, Artificial Sequence
  Description of Artificial Sequence: Synthetic oligonucleotide
gucuagauaugaguagagu

SEQ ID NO: 93600 - RNA, 19 nt, Artificial Sequence
  Description of Artificial Sequence: Synthetic oligonucleotide
guauugcggagaagacagc

SEQ ID NO: 93601 - RNA, 19 nt, Artificial Sequence
  Description of Artificial Sequence: Synthetic oligonucleotide
guaccaugagccauacgua

SEQ ID NO: 93602 - RNA, 19 nt, Artificial Sequence
  Description of Artificial Sequence: Synthetic oligonucleotide
ucaagaccacuugggucaa

SEQ ID NO: 93603 - RNA, 19 nt, Artificial Sequence
  Description of Artificial Sequence: Synthetic oligonucleotide
ccauuucccaguuugccaa

SEQ ID NO: 93604 - RNA, 19 nt, Artificial Sequence
  Description of Artificial Sequence: Synthetic oligonucleotide
ucacucuguguagguuucu

SEQ ID NO: 93605 - RNA, 19 nt, Artificial Sequence
  Description of Artificial Sequence: Synthetic oligonucleotide
gguaaguugcuaggcaaaa

SEQ ID NO: 93606 - RNA, 19 nt, Artificial Sequence
  Description of Artificial Sequence: Synthetic oligonucleotide
gaccauuugguuguauauu

SEQ ID NO: 93607 - RNA, 19 nt, Artificial Sequence
  Description of Artificial Sequence: Synthetic oligonucleotide
aaggaccauuugguuguau

SEQ ID NO: 93608 - RNA, 19 nt, Artificial Sequence
  Description of Artificial Sequence: Synthetic oligonucleotide
cacaucguagugacuaaau

SEQ ID NO: 93609 - RNA, 19 nt, Artificial Sequence
  Description of Artificial Sequence: Synthetic oligonucleotide
ggaccauuugguuguauau

SEQ ID NO: 93610 - RNA, 19 nt, Artificial Sequence
  Description of Artificial Sequence: Synthetic oligonucleotide
cgcuauguaccacaaccug

SEQ ID NO: 93611 - RNA, 19 nt, Artificial Sequence
  Description of Artificial Sequence: Synthetic oligonucleotide
uuccuacauugaaccuguc

SEQ ID NO: 93612 - RNA, 19 nt, Artificial Sequence
  Description of Artificial Sequence: Synthetic oligonucleotide
aaaggaccauuugguugua

SEQ ID NO: 93613 - RNA, 19 nt, Artificial Sequence
  Description of Artificial Sequence: Synthetic oligonucleotide
gucuacuagugcgauggua

SEQ ID NO: 93614 - RNA, 19 nt, Artificial Sequence
  Description of Artificial Sequence: Synthetic oligonucleotide
gaccuacagucauuacagu

SEQ ID NO: 93615 - RNA, 19 nt, Artificial Sequence
  Description of Artificial Sequence: Synthetic oligonucleotide
gaccugccgcgccgggccg

SEQ ID NO: 93616 - RNA, 19 nt, Artificial Sequence
  Description of Artificial Sequence: Synthetic oligonucleotide
cccuauauuauuccuacau

SEQ ID NO: 93617 - RNA, 19 nt, Artificial Sequence
  Description of Artificial Sequence: Synthetic oligonucleotide
acguacccugacccacaug

SEQ ID NO: 93618 - RNA, 19 nt, Artificial Sequence
  Description of Artificial Sequence: Synthetic oligonucleotide
gguuaacagcaggcaaggc

SEQ ID NO: 93619 - RNA, 19 nt, Artificial Sequence
  Description of Artificial Sequence: Synthetic oligonucleotide
gcugucacgucuucucaaa

SEQ ID NO: 93620 - RNA, 19 nt, Artificial Sequence
  Description of Artificial Sequence: Synthetic oligonucleotide
gcucuccuagauaaagcca

SEQ ID NO: 93621 - RNA, 19 nt, Artificial Sequence
  Description of Artificial Sequence: Synthetic oligonucleotide
cagaguaccuucccuacuu

SEQ ID NO: 93622 - RNA, 19 nt, Artificial Sequence
  Description of Artificial Sequence: Synthetic oligonucleotide
ggauuacagcacuuuugcu

SEQ ID NO: 93623 - RNA, 19 nt, Artificial Sequence
  Description of Artificial Sequence: Synthetic oligonucleotide
cacgagcaccuauuaugaa

SEQ ID NO: 93624 - RNA, 19 nt, Artificial Sequence
  Description of Artificial Sequence: Synthetic oligonucleotide
cugccagccagucaacaau

SEQ ID NO: 93625 - RNA, 19 nt, Artificial Sequence
  Description of Artificial Sequence: Synthetic oligonucleotide
gagcgugcugagacauuca

SEQ ID NO: 93626 - RNA, 19 nt, Artificial Sequence
  Description of Artificial Sequence: Synthetic oligonucleotide
cacucgacacuuuguucua

SEQ ID NO: 93627 - RNA, 19 nt, Artificial Sequence
  Description of Artificial Sequence: Synthetic oligonucleotide
gagccauacguaccagauu

SEQ ID NO: 93628 - RNA, 19 nt, Artificial Sequence
  Description of Artificial Sequence: Synthetic oligonucleotide
cucgacacuuuguucuaau

SEQ ID NO: 93629 - RNA, 19 nt, Artificial Sequence
  Description of Artificial Sequence: Synthetic oligonucleotide
guacccugacccacaugca

SEQ ID NO: 93630 - RNA, 19 nt, Artificial Sequence
  Description of Artificial Sequence: Synthetic oligonucleotide
gagcagucggcaggaguaa

SEQ ID NO: 93631 - RNA, 19 nt, Artificial Sequence
  Description of Artificial Sequence: Synthetic oligonucleotide
caggcaaggcagaguaccu

SEQ ID NO: 93632 - RNA, 19 nt, Artificial Sequence
  Description of Artificial Sequence: Synthetic oligonucleotide
caggaacauuccuguaagu

SEQ ID NO: 93633 - RNA, 19 nt, Artificial Sequence
  Description of Artificial Sequence: Synthetic oligonucleotide
ccuauauuauuccuacauu

SEQ ID NO: 93634 - RNA, 19 nt, Artificial Sequence
  Description of Artificial Sequence: Synthetic oligonucleotide
cuggccuaauuaagcuaua

SEQ ID NO: 93635 - RNA, 19 nt, Artificial Sequence
  Description of Artificial Sequence: Synthetic oligonucleotide
cuuacucacucgacacuuu

SEQ ID NO: 93636 - RNA, 19 nt, Artificial Sequence
  Description of Artificial Sequence: Synthetic oligonucleotide
cgagcgaugaaaagggccu

SEQ ID NO: 93637 - RNA, 19 nt, Artificial Sequence
  Description of Artificial Sequence: Synthetic oligonucleotide
cccacacgauuguaccuuc

SEQ ID NO: 93638 - RNA, 19 nt, Artificial Sequence
  Description of Artificial Sequence: Synthetic oligonucleotide
guccuauggcugccaucca

SEQ ID NO: 93639 - RNA, 19 nt, Artificial Sequence
  Description of Artificial Sequence: Synthetic oligonucleotide
guggacugcuuaacuauuu

SEQ ID NO: 93640 - RNA, 19 nt, Artificial Sequence
  Description of Artificial Sequence: Synthetic oligonucleotide
gcgcggggagcgcagccag

SEQ ID NO: 93641 - RNA, 19 nt, Artificial Sequence
  Description of Artificial Sequence: Synthetic oligonucleotide
cagccacgagcaccuauua

SEQ ID NO: 93642 - RNA, 19 nt, Artificial Sequence
  Description of Artificial Sequence: Synthetic oligonucleotide
gcagaguaccuucccuacu

SEQ ID NO: 93643 - RNA, 19 nt, Artificial Sequence
  Description of Artificial Sequence: Synthetic oligonucleotide
cgagcugauaacacaccaa

SEQ ID NO: 93644 - RNA, 19 nt, Artificial Sequence
  Description of Artificial Sequence: Synthetic oligonucleotide
cuagugcgaugguaacaau

SEQ ID NO: 93645 - RNA, 19 nt, Artificial Sequence
  Description of Artificial Sequence: Synthetic oligonucleotide
cacugguaauauacugcuu

SEQ ID NO: 93646 - RNA, 19 nt, Artificial Sequence
  Description of Artificial Sequence: Synthetic oligonucleotide
ccgcuauguaccacaaccu

SEQ ID NO: 93647 - RNA, 19 nt, Artificial Sequence
  Description of Artificial Sequence: Synthetic oligonucleotide
ggaguuaguuaggaauauu

SEQ ID NO: 93648 - RNA, 19 nt, Artificial Sequence
  Description of Artificial Sequence: Synthetic oligonucleotide
ccauacguaccagauucua

SEQ ID NO: 93649 - RNA, 19 nt, Artificial Sequence
  Description of Artificial Sequence: Synthetic oligonucleotide
ggugucuuuuagguccuau

SEQ ID NO: 93650 - RNA, 19 nt, Artificial Sequence
  Description of Artificial Sequence: Synthetic oligonucleotide
ccacaucguagugacuaaa

SEQ ID NO: 93651 - RNA, 19 nt, Artificial Sequence
  Description of Artificial Sequence: Synthetic oligonucleotide
ggccccgagcacgcacggg

SEQ ID NO: 93652 - RNA, 19 nt, Artificial Sequence
  Description of Artificial Sequence: Synthetic oligonucleotide
gccauacguaccagauucu

SEQ ID NO: 93653 - RNA, 19 nt, Artificial Sequence
  Description of Artificial Sequence: Synthetic oligonucleotide
ccacacuauugcuguacuu

SEQ ID NO: 93654 - RNA, 19 nt, Artificial Sequence
  Description of Artificial Sequence: Synthetic oligonucleotide
gugagcgugcugagacauu

SEQ ID NO: 93655 - RNA, 19 nt, Artificial Sequence
  Description of Artificial Sequence: Synthetic oligonucleotide
gcacauccugauggugacu

SEQ ID NO: 93656 - RNA, 19 nt, Artificial Sequence
  Description of Artificial Sequence: Synthetic oligonucleotide
agagaagugguacaaaugc

SEQ ID NO: 93657 - RNA, 19 nt, Artificial Sequence
  Description of Artificial Sequence: Synthetic oligonucleotide
ugcauaaucuaauugaccc

SEQ ID NO: 93658 - RNA, 19 nt, Artificial Sequence
  Description of Artificial Sequence: Synthetic oligonucleotide
aagcauuagacccucacuc

SEQ ID NO: 93659 - RNA, 19 nt, Artificial Sequence
  Description of Artificial Sequence: Synthetic oligonucleotide
aaauauauacuuggggccc

SEQ ID NO: 93660 - RNA, 19 nt, Artificial Sequence
  Description of Artificial Sequence: Synthetic oligonucleotide
ucaugugugauucaggggc

SEQ ID NO: 93661 - RNA, 19 nt, Artificial Sequence
  Description of Artificial Sequence: Synthetic oligonucleotide
auuuauaugacaaacuauc

SEQ ID NO: 93662 - RNA, 19 nt, Artificial Sequence
  Description of Artificial Sequence: Synthetic oligonucleotide
ucuuaacagacacagaaug

SEQ ID NO: 93663 - RNA, 19 nt, Artificial Sequence
  Description of Artificial Sequence: Synthetic oligonucleotide
uuauaugacaaacuaucag

SEQ ID NO: 93664 - RNA, 19 nt, Artificial Sequence
  Description of Artificial Sequence: Synthetic oligonucleotide
uagaguaacagccuaguag

SEQ ID NO: 93665 - RNA, 19 nt, Artificial Sequence
  Description of Artificial Sequence: Synthetic oligonucleotide
uauaugacaaacuaucagu

SEQ ID NO: 93666 - RNA, 19 nt, Artificial Sequence
  Description of Artificial Sequence: Synthetic oligonucleotide
aaggcuauaaaguuuauua

SEQ ID NO: 93667 - RNA, 19 nt, Artificial Sequence
  Description of Artificial Sequence: Synthetic oligonucleotide
gugacuauaggcuuggagg

SEQ ID NO: 93668 - RNA, 19 nt, Artificial Sequence
  Description of Artificial Sequence: Synthetic oligonucleotide
gaugcaauguuagagagag

SEQ ID NO: 93669 - RNA, 19 nt, Artificial Sequence
  Description of Artificial Sequence: Synthetic oligonucleotide
caaggaacuauccacaggg

SEQ ID NO: 93670 - RNA, 19 nt, Artificial Sequence
  Description of Artificial Sequence: Synthetic oligonucleotide
ucuagaggauucuaggagg

SEQ ID NO: 93671 - RNA, 19 nt, Artificial Sequence
  Description of Artificial Sequence: Synthetic oligonucleotide
ugaacaacaacaaccauau

SEQ ID NO: 93672 - RNA, 19 nt, Artificial Sequence
  Description of Artificial Sequence: Synthetic oligonucleotide
uguguuuugagcuaaggaa

SEQ ID NO: 93673 - RNA, 19 nt, Artificial Sequence
  Description of Artificial Sequence: Synthetic oligonucleotide
aaagguagucuuaauuagc

SEQ ID NO: 93674 - RNA, 19 nt, Artificial Sequence
  Description of Artificial Sequence: Synthetic oligonucleotide
uuuauaugacaaacuauca

SEQ ID NO: 93675 - RNA, 19 nt, Artificial Sequence
  Description of Artificial Sequence: Synthetic oligonucleotide
aucuacguggcacaguccc

SEQ ID NO: 93676 - RNA, 19 nt, Artificial Sequence
  Description of Artificial Sequence: Synthetic oligonucleotide
auauugcagagccauaagg

SEQ ID NO: 93677 - RNA, 19 nt, Artificial Sequence
  Description of Artificial Sequence: Synthetic oligonucleotide
aacuaucagugucagaaug

SEQ ID NO: 93678 - RNA, 19 nt, Artificial Sequence
  Description of Artificial Sequence: Synthetic oligonucleotide
gacgguagcacacuguagg

SEQ ID NO: 93679 - RNA, 19 nt, Artificial Sequence
  Description of Artificial Sequence: Synthetic oligonucleotide
aguaaguaccacuagagau

SEQ ID NO: 93680 - RNA, 19 nt, Artificial Sequence
  Description of Artificial Sequence: Synthetic oligonucleotide
ggaaauacaauccuuggag

SEQ ID NO: 93681 - RNA, 19 nt, Artificial Sequence
  Description of Artificial Sequence: Synthetic oligonucleotide
aacaagaacagcuugccua

SEQ ID NO: 93682 - RNA, 19 nt, Artificial Sequence
  Description of Artificial Sequence: Synthetic oligonucleotide
uucuuaugggcacacuugg

SEQ ID NO: 93683 - RNA, 19 nt, Artificial Sequence
  Description of Artificial Sequence: Synthetic oligonucleotide
ugcaauguuagagagagcu

SEQ ID NO: 93684 - RNA, 19 nt, Artificial Sequence
  Description of Artificial Sequence: Synthetic oligonucleotide
cauccuguuucuuucaugg

SEQ ID NO: 93685 - RNA, 19 nt, Artificial Sequence
  Description of Artificial Sequence: Synthetic oligonucleotide
aguagcacaccgcaagacc

SEQ ID NO: 93686 - RNA, 19 nt, Artificial Sequence
  Description of Artificial Sequence: Synthetic oligonucleotide
ugugaaagaugucaggagu

SEQ ID NO: 93687 - RNA, 19 nt, Artificial Sequence
  Description of Artificial Sequence: Synthetic oligonucleotide
aagugaaucuacguggcac

SEQ ID NO: 93688 - RNA, 19 nt, Artificial Sequence
  Description of Artificial Sequence: Synthetic oligonucleotide
gaaugggagagucauacug

SEQ ID NO: 93689 - RNA, 19 nt, Artificial Sequence
  Description of Artificial Sequence: Synthetic oligonucleotide
aaaucacaaggaacuaucc

SEQ ID NO: 93690 - RNA, 19 nt, Artificial Sequence
  Description of Artificial Sequence: Synthetic oligonucleotide
aagagugcauuauauaaaa

SEQ ID NO: 93691 - RNA, 19 nt, Artificial Sequence
  Description of Artificial Sequence: Synthetic oligonucleotide
aauauugcagagccauaag

SEQ ID NO: 93692 - RNA, 19 nt, Artificial Sequence
  Description of Artificial Sequence: Synthetic oligonucleotide
gauaugagcaaaggcauag

SEQ ID NO: 93693 - RNA, 19 nt, Artificial Sequence
  Description of Artificial Sequence: Synthetic oligonucleotide
cuagagaucugaaaacagc

SEQ ID NO: 93694 - RNA, 19 nt, Artificial Sequence
  Description of Artificial Sequence: Synthetic oligonucleotide
gagacuaaagugcagagaa

SEQ ID NO: 93695 - RNA, 19 nt, Artificial Sequence
  Description of Artificial Sequence: Synthetic oligonucleotide
aaucacaaggaacuaucca

SEQ ID NO: 93696 - RNA, 19 nt, Artificial Sequence
  Description of Artificial Sequence: Synthetic oligonucleotide
uuucuuaugggcacacuug

SEQ ID NO: 93697 - RNA, 19 nt, Artificial Sequence
  Description of Artificial Sequence: Synthetic oligonucleotide
aagaaaaccagcuguggau

SEQ ID NO: 93698 - RNA, 19 nt, Artificial Sequence
  Description of Artificial Sequence: Synthetic oligonucleotide
gcaaagugaaucuacgugg

SEQ ID NO: 93699 - RNA, 19 nt, Artificial Sequence
  Description of Artificial Sequence: Synthetic oligonucleotide
aaauugaggaagagagccc

SEQ ID NO: 93700 - RNA, 19 nt, Artificial Sequence
  Description of Artificial Sequence: Synthetic oligonucleotide
ggugacauagacuugggag

SEQ ID NO: 93701 - RNA, 19 nt, Artificial Sequence
  Description of Artificial Sequence: Synthetic oligonucleotide
gagcuaaggaaauacaauc

SEQ ID NO: 93702 - RNA, 19 nt, Artificial Sequence
  Description of Artificial Sequence: Synthetic oligonucleotide
agcuaaggaaauacaaucc

SEQ ID NO: 93703 - RNA, 19 nt, Artificial Sequence
  Description of Artificial Sequence: Synthetic oligonucleotide
gcuuucaccaaauauauac

SEQ ID NO: 93704 - RNA, 19 nt, Artificial Sequence
  Description of Artificial Sequence: Synthetic oligonucleotide
uuguauuccauacugucau

SEQ ID NO: 93705 - RNA, 19 nt, Artificial Sequence
  Description of Artificial Sequence: Synthetic oligonucleotide
guuggguugagaaugaaug

SEQ ID NO: 93706 - RNA, 19 nt, Artificial Sequence
  Description of Artificial Sequence: Synthetic oligonucleotide
aauguuagagagagcuggc

SEQ ID NO: 93707 - RNA, 19 nt, Artificial Sequence
  Description of Artificial Sequence: Synthetic oligonucleotide
agccaucaagguuucaccc

SEQ ID NO: 93708 - RNA, 19 nt, Artificial Sequence
  Description of Artificial Sequence: Synthetic oligonucleotide
ucuuccguuggauaguggc

SEQ ID NO: 93709 - RNA, 19 nt, Artificial Sequence
  Description of Artificial Sequence: Synthetic oligonucleotide
auagcgacgaguaaucuuc

SEQ ID NO: 93710 - RNA, 19 nt, Artificial Sequence
  Description of Artificial Sequence: Synthetic oligonucleotide
uucccguguauacaaacag

SEQ ID NO: 93711 - RNA, 19 nt, Artificial Sequence
  Description of Artificial Sequence: Synthetic oligonucleotide
uuguguuuugagcuaagga

SEQ ID NO: 93712 - RNA, 19 nt, Artificial Sequence
  Description of Artificial Sequence: Synthetic oligonucleotide
acaacaaccauaucccugu

SEQ ID NO: 93713 - RNA, 19 nt, Artificial Sequence
  Description of Artificial Sequence: Synthetic oligonucleotide
acuaaagugcagagaaucc

SEQ ID NO: 93714 - RNA, 19 nt, Artificial Sequence
  Description of Artificial Sequence: Synthetic oligonucleotide
ucugucaucuuaaggguga

SEQ ID NO: 93715 - RNA, 19 nt, Artificial Sequence
  Description of Artificial Sequence: Synthetic oligonucleotide
ugacccuucauagaaaugu

SEQ ID NO: 93716 - RNA, 19 nt, Artificial Sequence
  Description of Artificial Sequence: Synthetic oligonucleotide
uuuagaaagagagcauggc

SEQ ID NO: 93717 - RNA, 19 nt, Artificial Sequence
  Description of Artificial Sequence: Synthetic oligonucleotide
aauugaggaagagagccca

SEQ ID NO: 93718 - RNA, 19 nt, Artificial Sequence
  Description of Artificial Sequence: Synthetic oligonucleotide
gugacauagacuugggagc

SEQ ID NO: 93719 - RNA, 19 nt, Artificial Sequence
  Description of Artificial Sequence: Synthetic oligonucleotide
guagucacaguucagugac

SEQ ID NO: 93720 - RNA, 19 nt, Artificial Sequence
  Description of Artificial Sequence: Synthetic oligonucleotide
caaaucacaaggaacuauc

SEQ ID NO: 93721 - RNA, 19 nt, Artificial Sequence
  Description of Artificial Sequence: Synthetic oligonucleotide
gucaucuuaagggugagag

SEQ ID NO: 93722 - RNA, 19 nt, Artificial Sequence
  Description of Artificial Sequence: Synthetic oligonucleotide
gaaucuacguggcacaguc

SEQ ID NO: 93723 - RNA, 19 nt, Artificial Sequence
  Description of Artificial Sequence: Synthetic oligonucleotide
aacagaauaauuagaguaa

SEQ ID NO: 93724 - RNA, 19 nt, Artificial Sequence
  Description of Artificial Sequence: Synthetic oligonucleotide
aguaucaaaaggucaugug

SEQ ID NO: 93725 - RNA, 19 nt, Artificial Sequence
  Description of Artificial Sequence: Synthetic oligonucleotide
aggaacuauccacaggguc

SEQ ID NO: 93726 - RNA, 19 nt, Artificial Sequence
  Description of Artificial Sequence: Synthetic oligonucleotide
aauuagaguaacagccuag

SEQ ID NO: 93727 - RNA, 19 nt, Artificial Sequence
  Description of Artificial Sequence: Synthetic oligonucleotide
ucaaaucccauccaccuua

SEQ ID NO: 93728 - RNA, 19 nt, Artificial Sequence
  Description of Artificial Sequence: Synthetic oligonucleotide
aagagcaacucugcaggcc

SEQ ID NO: 93729 - RNA, 19 nt, Artificial Sequence
  Description of Artificial Sequence: Synthetic oligonucleotide
cuagaggauucuaggaggg

SEQ ID NO: 93730 - RNA, 19 nt, Artificial Sequence
  Description of Artificial Sequence: Synthetic oligonucleotide
ucacccaucaacugccuag

SEQ ID NO: 93731 - RNA, 19 nt, Artificial Sequence
  Description of Artificial Sequence: Synthetic oligonucleotide
aaaaccugccaaugauaag

SEQ ID NO: 93732 - RNA, 19 nt, Artificial Sequence
  Description of Artificial Sequence: Synthetic oligonucleotide
agugacuauaggcuuggag

SEQ ID NO: 93733 - RNA, 19 nt, Artificial Sequence
  Description of Artificial Sequence: Synthetic oligonucleotide
ucaucuuaagggugagagg

SEQ ID NO: 93734 - RNA, 19 nt, Artificial Sequence
  Description of Artificial Sequence: Synthetic oligonucleotide
gaguaaucuucagagcugg

SEQ ID NO: 93735 - RNA, 19 nt, Artificial Sequence
  Description of Artificial Sequence: Synthetic oligonucleotide
uuucggauaguaacuccag

SEQ ID NO: 93736 - RNA, 19 nt, Artificial Sequence
  Description of Artificial Sequence: Synthetic oligonucleotide
auaguucucagccccgcgg

SEQ ID NO: 93737 - RNA, 19 nt, Artificial Sequence
  Description of Artificial Sequence: Synthetic oligonucleotide
ggucaugugugauucaggg

SEQ ID NO: 93738 - RNA, 19 nt, Artificial Sequence
  Description of Artificial Sequence: Synthetic oligonucleotide
aagguagucuuaauuagcu

SEQ ID NO: 93739 - RNA, 19 nt, Artificial Sequence
  Description of Artificial Sequence: Synthetic oligonucleotide
aauaggaaaggagucuaga

SEQ ID NO: 93740 - RNA, 19 nt, Artificial Sequence
  Description of Artificial Sequence: Synthetic oligonucleotide
guauuccauacugucaugg

SEQ ID NO: 93741 - RNA, 19 nt, Artificial Sequence
  Description of Artificial Sequence: Synthetic oligonucleotide
uggguggaauacuuugugg

SEQ ID NO: 93742 - RNA, 19 nt, Artificial Sequence
  Description of Artificial Sequence: Synthetic oligonucleotide
uuuguguuuugagcuaagg

SEQ ID NO: 93743 - RNA, 19 nt, Artificial Sequence
  Description of Artificial Sequence: Synthetic oligonucleotide
uuaugggcacacuuggucu

SEQ ID NO: 93744 - RNA, 19 nt, Artificial Sequence
  Description of Artificial Sequence: Synthetic oligonucleotide
uaagggugagaggagauug

SEQ ID NO: 93745 - RNA, 19 nt, Artificial Sequence
  Description of Artificial Sequence: Synthetic oligonucleotide
uaauuagaguaacagccua

SEQ ID NO: 93746 - RNA, 19 nt, Artificial Sequence
  Description of Artificial Sequence: Synthetic oligonucleotide
caggcuagggcacacauug

SEQ ID NO: 93747 - RNA, 19 nt, Artificial Sequence
  Description of Artificial Sequence: Synthetic oligonucleotide
uuauuaguucuuuucuguc

SEQ ID NO: 93748 - RNA, 19 nt, Artificial Sequence
  Description of Artificial Sequence: Synthetic oligonucleotide
aaagagagccuuaaaugcu

SEQ ID NO: 93749 - RNA, 19 nt, Artificial Sequence
  Description of Artificial Sequence: Synthetic oligonucleotide
aaguaucaaaaggucaugu

SEQ ID NO: 93750 - RNA, 19 nt, Artificial Sequence
  Description of Artificial Sequence: Synthetic oligonucleotide
guuggaaggagcuagugaa

SEQ ID NO: 93751 - RNA, 19 nt, Artificial Sequence
  Description of Artificial Sequence: Synthetic oligonucleotide
aagaguccugacaccaacc

SEQ ID NO: 93752 - RNA, 19 nt, Artificial Sequence
  Description of Artificial Sequence: Synthetic oligonucleotide
gauucuaggaggguaaaga

SEQ ID NO: 93753 - RNA, 19 nt, Artificial Sequence
  Description of Artificial Sequence: Synthetic oligonucleotide
aacuuaucugaccauccau

SEQ ID NO: 93754 - RNA, 19 nt, Artificial Sequence
  Description of Artificial Sequence: Synthetic oligonucleotide
gccaucgcaagcuucaucg

SEQ ID NO: 93755 - RNA, 19 nt, Artificial Sequence
  Description of Artificial Sequence: Synthetic oligonucleotide
uguuuugagcuaaggaaau

SEQ ID NO: 93756 - RNA, 19 nt, Artificial Sequence
  Description of Artificial Sequence: Synthetic oligonucleotide
cauccugcuagaaauggac

SEQ ID NO: 93757 - RNA, 19 nt, Artificial Sequence
  Description of Artificial Sequence: Synthetic oligonucleotide
ugacuuugugcucaggcau

SEQ ID NO: 93758 - RNA, 19 nt, Artificial Sequence
  Description of Artificial Sequence: Synthetic oligonucleotide
aggaaauacaauccuugga

SEQ ID NO: 93759 - RNA, 19 nt, Artificial Sequence
  Description of Artificial Sequence: Synthetic oligonucleotide
uaaguaccacuagagaucu

SEQ ID NO: 93760 - RNA, 19 nt, Artificial Sequence
  Description of Artificial Sequence: Synthetic oligonucleotide
aacugccuagaagagcaac

SEQ ID NO: 93761 - RNA, 19 nt, Artificial Sequence
  Description of Artificial Sequence: Synthetic oligonucleotide
uauuccauacugucauggc

SEQ ID NO: 93762 - RNA, 19 nt, Artificial Sequence
  Description of Artificial Sequence: Synthetic oligonucleotide
uuggguugagaaugaauga

SEQ ID NO: 93763 - RNA, 19 nt, Artificial Sequence
  Description of Artificial Sequence: Synthetic oligonucleotide
cuaagaaaaccagcugugg

SEQ ID NO: 93764 - RNA, 19 nt, Artificial Sequence
  Description of Artificial Sequence: Synthetic oligonucleotide
uugccuaucuggauccaag

SEQ ID NO: 93765 - RNA, 19 nt, Artificial Sequence
  Description of Artificial Sequence: Synthetic oligonucleotide
caucuuaagggugagagga

SEQ ID NO: 93766 - RNA, 19 nt, Artificial Sequence
  Description of Artificial Sequence: Synthetic oligonucleotide
auugacccuucauagaaau

SEQ ID NO: 93767 - RNA, 19 nt, Artificial Sequence
  Description of Artificial Sequence: Synthetic oligonucleotide
guagaagcuaacagcaaag

SEQ ID NO: 93768 - RNA, 19 nt, Artificial Sequence
  Description of Artificial Sequence: Synthetic oligonucleotide
aggccuuucaaaucccauc

SEQ ID NO: 93769 - RNA, 19 nt, Artificial Sequence
  Description of Artificial Sequence: Synthetic oligonucleotide
cuguauucagucugcauuc

SEQ ID NO: 93770 - RNA, 19 nt, Artificial Sequence
  Description of Artificial Sequence: Synthetic oligonucleotide
aaagugaaucuacguggca

SEQ ID NO: 93771 - RNA, 19 nt, Artificial Sequence
  Description of Artificial Sequence: Synthetic oligonucleotide
uaagggaugggcuccauuu

SEQ ID NO: 93772 - RNA, 19 nt, Artificial Sequence
  Description of Artificial Sequence: Synthetic oligonucleotide
aguaccacuagagaucuga

SEQ ID NO: 93773 - RNA, 19 nt, Artificial Sequence
  Description of Artificial Sequence: Synthetic oligonucleotide
cacaaaguggacagcuggg

SEQ ID NO: 93774 - RNA, 19 nt, Artificial Sequence
  Description of Artificial Sequence: Synthetic oligonucleotide
agccauaagggaugggcuc

SEQ ID NO: 93775 - RNA, 19 nt, Artificial Sequence
  Description of Artificial Sequence: Synthetic oligonucleotide
cuuccguuggauaguggcg

SEQ ID NO: 93776 - RNA, 19 nt, Artificial Sequence
  Description of Artificial Sequence: Synthetic oligonucleotide
aguagggucuggaagaaug

SEQ ID NO: 93777 - RNA, 19 nt, Artificial Sequence
  Description of Artificial Sequence: Synthetic oligonucleotide
agcaacccaaggaaagucc

SEQ ID NO: 93778 - RNA, 19 nt, Artificial Sequence
  Description of Artificial Sequence: Synthetic oligonucleotide
cacucaguccccuucacug

SEQ ID NO: 93779 - RNA, 19 nt, Artificial Sequence
  Description of Artificial Sequence: Synthetic oligonucleotide
uucggauaguaacuccagc

SEQ ID NO: 93780 - RNA, 19 nt, Artificial Sequence
  Description of Artificial Sequence: Synthetic oligonucleotide
gcucccaaguaucaaaagg

SEQ ID NO: 93781 - RNA, 19 nt, Artificial Sequence
  Description of Artificial Sequence: Synthetic oligonucleotide
cauuucggauaguaacucc

SEQ ID NO: 93782 - RNA, 19 nt, Artificial Sequence
  Description of Artificial Sequence: Synthetic oligonucleotide
cugugaaagaugucaggag

SEQ ID NO: 93783 - RNA, 19 nt, Artificial Sequence
  Description of Artificial Sequence: Synthetic oligonucleotide
ggcaaagugaaucuacgug

SEQ ID NO: 93784 - RNA, 19 nt, Artificial Sequence
  Description of Artificial Sequence: Synthetic oligonucleotide
ugcagagaauccacaaagu

SEQ ID NO: 93785 - RNA, 19 nt, Artificial Sequence
  Description of Artificial Sequence: Synthetic oligonucleotide
guuagagagagcuggccac

SEQ ID NO: 93786 - RNA, 19 nt, Artificial Sequence
  Description of Artificial Sequence: Synthetic oligonucleotide
agagcaacucugcaggccu

SEQ ID NO: 93787 - RNA, 19 nt, Artificial Sequence
  Description of Artificial Sequence: Synthetic oligonucleotide
ucauuuguaguuucugguu

SEQ ID NO: 93788 - RNA, 19 nt, Artificial Sequence
  Description of Artificial Sequence: Synthetic oligonucleotide
gggagagucauacuggggc

SEQ ID NO: 93789 - RNA, 19 nt, Artificial Sequence
  Description of Artificial Sequence: Synthetic oligonucleotide
guaaguaccacuagagauc

SEQ ID NO: 93790 - RNA, 19 nt, Artificial Sequence
  Description of Artificial Sequence: Synthetic oligonucleotide
agucuuaauuagcuccuug

SEQ ID NO: 93791 - RNA, 19 nt, Artificial Sequence
  Description of Artificial Sequence: Synthetic oligonucleotide
gacgaguaaucuucagagc

SEQ ID NO: 93792 - RNA, 19 nt, Artificial Sequence
  Description of Artificial Sequence: Synthetic oligonucleotide
caaaguggacagcugggcc

SEQ ID NO: 93793 - RNA, 19 nt, Artificial Sequence
  Description of Artificial Sequence: Synthetic oligonucleotide
aaaggcauagcgacgagua

SEQ ID NO: 93794 - RNA, 19 nt, Artificial Sequence
  Description of Artificial Sequence: Synthetic oligonucleotide
agcuguagccccaagucac

SEQ ID NO: 93795 - RNA, 19 nt, Artificial Sequence
  Description of Artificial Sequence: Synthetic oligonucleotide
acuagagaucugaaaacag

SEQ ID NO: 93796 - RNA, 19 nt, Artificial Sequence
  Description of Artificial Sequence: Synthetic oligonucleotide
ucccaaguaucaaaagguc

SEQ ID NO: 93797 - RNA, 19 nt, Artificial Sequence
  Description of Artificial Sequence: Synthetic oligonucleotide
uuaucugaccauccauggu

SEQ ID NO: 93798 - RNA, 19 nt, Artificial Sequence
  Description of Artificial Sequence: Synthetic oligonucleotide
uucccaguaaguaccacua

SEQ ID NO: 93799 - RNA, 19 nt, Artificial Sequence
  Description of Artificial Sequence: Synthetic oligonucleotide
gacaaacuaucagugucag

SEQ ID NO: 93800 - RNA, 19 nt, Artificial Sequence
  Description of Artificial Sequence: Synthetic oligonucleotide
gggauagagaaagaaaggc

SEQ ID NO: 93801 - RNA, 19 nt, Artificial Sequence
  Description of Artificial Sequence: Synthetic oligonucleotide
guuucacccaucaacugcc

SEQ ID NO: 93802 - RNA, 19 nt, Artificial Sequence
  Description of Artificial Sequence: Synthetic oligonucleotide
uucugagguuaucuggaga

SEQ ID NO: 93803 - RNA, 19 nt, Artificial Sequence
  Description of Artificial Sequence: Synthetic oligonucleotide
acuuaucugaccauccaug

SEQ ID NO: 93804 - RNA, 19 nt, Artificial Sequence
  Description of Artificial Sequence: Synthetic oligonucleotide
uccucgauaggaucagucu

SEQ ID NO: 93805 - RNA, 19 nt, Artificial Sequence
  Description of Artificial Sequence: Synthetic oligonucleotide
aauauauacuuggggccca

SEQ ID NO: 93806 - RNA, 19 nt, Artificial Sequence
  Description of Artificial Sequence: Synthetic oligonucleotide
gucuggaagaaugggagag

SEQ ID NO: 93807 - RNA, 19 nt, Artificial Sequence
  Description of Artificial Sequence: Synthetic oligonucleotide
ggagcuaugguccaaaaua

SEQ ID NO: 93808 - RNA, 19 nt, Artificial Sequence
  Description of Artificial Sequence: Synthetic oligonucleotide
gucaugugugauucagggg

SEQ ID NO: 93809 - RNA, 19 nt, Artificial Sequence
  Description of Artificial Sequence: Synthetic oligonucleotide
ucuuaagggugagaggaga

SEQ ID NO: 93810 - RNA, 19 nt, Artificial Sequence
  Description of Artificial Sequence: Synthetic oligonucleotide
acuauaggcuuggagggag

SEQ ID NO: 93811 - RNA, 19 nt, Artificial Sequence
  Description of Artificial Sequence: Synthetic oligonucleotide
guggguuccaaaucacaag

SEQ ID NO: 93812 - RNA, 19 nt, Artificial Sequence
  Description of Artificial Sequence: Synthetic oligonucleotide
ggauagagaaagaaaggcc

SEQ ID NO: 93813 - RNA, 19 nt, Artificial Sequence
  Description of Artificial Sequence: Synthetic oligonucleotide
auuagaguaacagccuagu

SEQ ID NO: 93814 - RNA, 19 nt, Artificial Sequence
  Description of Artificial Sequence: Synthetic oligonucleotide
gguuucacccaucaacugc

SEQ ID NO: 93815 - RNA, 19 nt, Artificial Sequence
  Description of Artificial Sequence: Synthetic oligonucleotide
ucaagguuuguagucagua

SEQ ID NO: 93816 - RNA, 19 nt, Artificial Sequence
  Description of Artificial Sequence: Synthetic oligonucleotide
aggaucagucucuugccug

SEQ ID NO: 93817 - RNA, 19 nt, Artificial Sequence
  Description of Artificial Sequence: Synthetic oligonucleotide
gcuaugguccaaaauauug

SEQ ID NO: 93818 - RNA, 19 nt, Artificial Sequence
  Description of Artificial Sequence: Synthetic oligonucleotide
uguggagaguggagggucc

SEQ ID NO: 93819 - RNA, 19 nt, Artificial Sequence
  Description of Artificial Sequence: Synthetic oligonucleotide
ugccaagucccuccuaacu

SEQ ID NO: 93820 - RNA, 19 nt, Artificial Sequence
  Description of Artificial Sequence: Synthetic oligonucleotide
auuucggauaguaacucca

SEQ ID NO: 93821 - RNA, 19 nt, Artificial Sequence
  Description of Artificial Sequence: Synthetic oligonucleotide
ggccuuucaaaucccaucc

SEQ ID NO: 93822 - RNA, 19 nt, Artificial Sequence
  Description of Artificial Sequence: Synthetic oligonucleotide
aggacagaaagccugcauu

SEQ ID NO: 93823 - RNA, 19 nt, Artificial Sequence
  Description of Artificial Sequence: Synthetic oligonucleotide
cugacaccaaccugauggg

SEQ ID NO: 93824 - RNA, 19 nt, Artificial Sequence
  Description of Artificial Sequence: Synthetic oligonucleotide
uuagaguaacagccuagua

SEQ ID NO: 93825 - RNA, 19 nt, Artificial Sequence
  Description of Artificial Sequence: Synthetic oligonucleotide
cuaucagugucagaaugac

SEQ ID NO: 93826 - RNA, 19 nt, Artificial Sequence
  Description of Artificial Sequence: Synthetic oligonucleotide
agcccagauagagaagugg

SEQ ID NO: 93827 - RNA, 19 nt, Artificial Sequence
  Description of Artificial Sequence: Synthetic oligonucleotide
ugccuaucuggauccaagc

SEQ ID NO: 93828 - RNA, 19 nt, Artificial Sequence
  Description of Artificial Sequence: Synthetic oligonucleotide
caccgcaagaccagcauac

SEQ ID NO: 93829 - RNA, 19 nt, Artificial Sequence
  Description of Artificial Sequence: Synthetic oligonucleotide
ugacgguagcacacuguag

SEQ ID NO: 93830 - RNA, 19 nt, Artificial Sequence
  Description of Artificial Sequence: Synthetic oligonucleotide
caaugauaagcucaggacu

SEQ ID NO: 93831 - RNA, 19 nt, Artificial Sequence
  Description of Artificial Sequence: Synthetic oligonucleotide
ugucagaaugacagggaua

SEQ ID NO: 93832 - RNA, 19 nt, Artificial Sequence
  Description of Artificial Sequence: Synthetic oligonucleotide
caggucaagguuuguaguc

SEQ ID NO: 93833 - RNA, 19 nt, Artificial Sequence
  Description of Artificial Sequence: Synthetic oligonucleotide
uugacccuucauagaaaug

SEQ ID NO: 93834 - RNA, 19 nt, Artificial Sequence
  Description of Artificial Sequence: Synthetic oligonucleotide
auacucugcugguaggggu

SEQ ID NO: 93835 - RNA, 19 nt, Artificial Sequence
  Description of Artificial Sequence: Synthetic oligonucleotide
ucccuuuugugcccuguug

SEQ ID NO: 93836 - RNA, 19 nt, Artificial Sequence
  Description of Artificial Sequence: Synthetic oligonucleotide
gaggaauuuauaugacaaa

SEQ ID NO: 93837 - RNA, 19 nt, Artificial Sequence
  Description of Artificial Sequence: Synthetic oligonucleotide
agccuaguagcacaccgca

SEQ ID NO: 93838 - RNA, 19 nt, Artificial Sequence
  Description of Artificial Sequence: Synthetic oligonucleotide
uuaugcuguugcugcuggg

SEQ ID NO: 93839 - RNA, 19 nt, Artificial Sequence
  Description of Artificial Sequence: Synthetic oligonucleotide
ugguacaaaugcugggccu

SEQ ID NO: 93840 - RNA, 19 nt, Artificial Sequence
  Description of Artificial Sequence: Synthetic oligonucleotide
uccuaacuuugccaucgca

SEQ ID NO: 93841 - RNA, 19 nt, Artificial Sequence
  Description of Artificial Sequence: Synthetic oligonucleotide
gcaugcaacaagcuguagc

SEQ ID NO: 93842 - RNA, 19 nt, Artificial Sequence
  Description of Artificial Sequence: Synthetic oligonucleotide
ggaucagucucuugccugg

SEQ ID NO: 93843 - RNA, 19 nt, Artificial Sequence
  Description of Artificial Sequence: Synthetic oligonucleotide
gcucauuuguauucucagg

SEQ ID NO: 93844 - RNA, 19 nt, Artificial Sequence
  Description of Artificial Sequence: Synthetic oligonucleotide
acuaucagugucagaauga

SEQ ID NO: 93845 - RNA, 19 nt, Artificial Sequence
  Description of Artificial Sequence: Synthetic oligonucleotide
guagggucuggaagaaugg

SEQ ID NO: 93846 - RNA, 19 nt, Artificial Sequence
  Description of Artificial Sequence: Synthetic oligonucleotide
uggcguuagggcguguagg

SEQ ID NO: 93847 - RNA, 19 nt, Artificial Sequence
  Description of Artificial Sequence: Synthetic oligonucleotide
ucuacguggcacagucccc

SEQ ID NO: 93848 - RNA, 19 nt, Artificial Sequence
  Description of Artificial Sequence: Synthetic oligonucleotide
auccaugguuggaaggagc

SEQ ID NO: 93849 - RNA, 19 nt, Artificial Sequence
  Description of Artificial Sequence: Synthetic oligonucleotide
cucaguccccuucacuggg

SEQ ID NO: 93850 - RNA, 19 nt, Artificial Sequence
  Description of Artificial Sequence: Synthetic oligonucleotide
aaugacgguagcacacugu

SEQ ID NO: 93851 - RNA, 19 nt, Artificial Sequence
  Description of Artificial Sequence: Synthetic oligonucleotide
agaaugacagggauagaga

SEQ ID NO: 93852 - RNA, 19 nt, Artificial Sequence
  Description of Artificial Sequence: Synthetic oligonucleotide
uucauggggcucaaguguu

SEQ ID NO: 93853 - RNA, 19 nt, Artificial Sequence
  Description of Artificial Sequence: Synthetic oligonucleotide
uaacagccuaguagcacac

SEQ ID NO: 93854 - RNA, 19 nt, Artificial Sequence
  Description of Artificial Sequence: Synthetic oligonucleotide
cuggguggaauacuuugug

SEQ ID NO: 93855 - RNA, 19 nt, Artificial Sequence
  Description of Artificial Sequence: Synthetic oligonucleotide
acuaccagcagcaacccaa

SEQ ID NO: 93856 - RNA, 19 nt, Artificial Sequence
  Description of Artificial Sequence: Synthetic oligonucleotide
agagaacugcccuucccgu

SEQ ID NO: 93857 - RNA, 19 nt, Artificial Sequence
  Description of Artificial Sequence: Synthetic oligonucleotide
auaguaacuccagcgcuug

SEQ ID NO: 93858 - RNA, 19 nt, Artificial Sequence
  Description of Artificial Sequence: Synthetic oligonucleotide
augacgguagcacacugua

SEQ ID NO: 93859 - RNA, 19 nt, Artificial Sequence
  Description of Artificial Sequence: Synthetic oligonucleotide
aagucccuccuaacuuugc

SEQ ID NO: 93860 - RNA, 19 nt, Artificial Sequence
  Description of Artificial Sequence: Synthetic oligonucleotide
guguuuugagcuaaggaaa

SEQ ID NO: 93861 - RNA, 19 nt, Artificial Sequence
  Description of Artificial Sequence: Synthetic oligonucleotide
gcaagaccagcauacauuc

SEQ ID NO: 93862 - RNA, 19 nt, Artificial Sequence
  Description of Artificial Sequence: Synthetic oligonucleotide
cgacgaguaaucuucagag

SEQ ID NO: 93863 - RNA, 19 nt, Artificial Sequence
  Description of Artificial Sequence: Synthetic oligonucleotide
gacagggauagagaaagaa

SEQ ID NO: 93864 - RNA, 19 nt, Artificial Sequence
  Description of Artificial Sequence: Synthetic oligonucleotide
cauacucugcugguagggg

SEQ ID NO: 93865 - RNA, 19 nt, Artificial Sequence
  Description of Artificial Sequence: Synthetic oligonucleotide
ggugagaggagauugaaau

SEQ ID NO: 93866 - RNA, 19 nt, Artificial Sequence
  Description of Artificial Sequence: Synthetic oligonucleotide
agauagagaagugguacaa

SEQ ID NO: 93867 - RNA, 19 nt, Artificial Sequence
  Description of Artificial Sequence: Synthetic oligonucleotide
uucuuccguuggauagugg

SEQ ID NO: 93868 - RNA, 19 nt, Artificial Sequence
  Description of Artificial Sequence: Synthetic oligonucleotide
uuagagagagcuggccaca

SEQ ID NO: 93869 - RNA, 19 nt, Artificial Sequence
  Description of Artificial Sequence: Synthetic oligonucleotide
gaguccugacaccaaccug

SEQ ID NO: 93870 - RNA, 19 nt, Artificial Sequence
  Description of Artificial Sequence: Synthetic oligonucleotide
ucccuccuaacuuugccau

SEQ ID NO: 93871 - RNA, 19 nt, Artificial Sequence
  Description of Artificial Sequence: Synthetic oligonucleotide
gucaguauuuugggcagag

SEQ ID NO: 93872 - RNA, 19 nt, Artificial Sequence
  Description of Artificial Sequence: Synthetic oligonucleotide
uccauacugucauggccca

SEQ ID NO: 93873 - RNA, 19 nt, Artificial Sequence
  Description of Artificial Sequence: Synthetic oligonucleotide
acugggguccucgauagga

SEQ ID NO: 93874 - RNA, 19 nt, Artificial Sequence
  Description of Artificial Sequence: Synthetic oligonucleotide
agguuucacccaucaacug

SEQ ID NO: 93875 - RNA, 19 nt, Artificial Sequence
  Description of Artificial Sequence: Synthetic oligonucleotide
ggaacuauccacaggguca

SEQ ID NO: 93876 - RNA, 19 nt, Artificial Sequence
  Description of Artificial Sequence: Synthetic oligonucleotide
cuaccagcagcaacccaag

SEQ ID NO: 93877 - RNA, 19 nt, Artificial Sequence
  Description of Artificial Sequence: Synthetic oligonucleotide
ggguggaauacuuugugga

SEQ ID NO: 93878 - RNA, 19 nt, Artificial Sequence
  Description of Artificial Sequence: Synthetic oligonucleotide
aagagagccuuaaaugcuu

SEQ ID NO: 93879 - RNA, 19 nt, Artificial Sequence
  Description of Artificial Sequence: Synthetic oligonucleotide
ccuagaagagcaacucugc

SEQ ID NO: 93880 - RNA, 19 nt, Artificial Sequence
  Description of Artificial Sequence: Synthetic oligonucleotide
ggcuauaaaguuuauuagu

SEQ ID NO: 93881 - RNA, 19 nt, Artificial Sequence
  Description of Artificial Sequence: Synthetic oligonucleotide
guagcacaccgcaagacca

SEQ ID NO: 93882 - RNA, 19 nt, Artificial Sequence
  Description of Artificial Sequence: Synthetic oligonucleotide
uauaggcuuggagggagcu

SEQ ID NO: 93883 - RNA, 19 nt, Artificial Sequence
  Description of Artificial Sequence: Synthetic oligonucleotide
ucccucagaugcaauguua

SEQ ID NO: 93884 - RNA, 19 nt, Artificial Sequence
  Description of Artificial Sequence: Synthetic oligonucleotide
uguuggcaccucucucagg

SEQ ID NO: 93885 - RNA, 19 nt, Artificial Sequence
  Description of Artificial Sequence: Synthetic oligonucleotide
uguauucagucugcauucu

SEQ ID NO: 93886 - RNA, 19 nt, Artificial Sequence
  Description of Artificial Sequence: Synthetic oligonucleotide
aguggguuccaaaucacaa

SEQ ID NO: 93887 - RNA, 19 nt, Artificial Sequence
  Description of Artificial Sequence: Synthetic oligonucleotide
uuaugccccaggucuccag

SEQ ID NO: 93888 - RNA, 19 nt, Artificial Sequence
  Description of Artificial Sequence: Synthetic oligonucleotide
ugguucuguuuccuugccu

SEQ ID NO: 93889 - RNA, 19 nt, Artificial Sequence
  Description of Artificial Sequence: Synthetic oligonucleotide
auuagacccucacuccaaa

SEQ ID NO: 93890 - RNA, 19 nt, Artificial Sequence
  Description of Artificial Sequence: Synthetic oligonucleotide
cuucccguguauacaaaca

SEQ ID NO: 93891 - RNA, 19 nt, Artificial Sequence
  Description of Artificial Sequence: Synthetic oligonucleotide
ggccauaguucucagcccc

SEQ ID NO: 93892 - RNA, 19 nt, Artificial Sequence
  Description of Artificial Sequence: Synthetic oligonucleotide
ccagauagagaagugguac

SEQ ID NO: 93893 - RNA, 19 nt, Artificial Sequence
  Description of Artificial Sequence: Synthetic oligonucleotide
agcacaccgcaagaccagc

SEQ ID NO: 93894 - RNA, 19 nt, Artificial Sequence
  Description of Artificial Sequence: Synthetic oligonucleotide
cagccuaguagcacaccgc

SEQ ID NO: 93895 - RNA, 19 nt, Artificial Sequence
  Description of Artificial Sequence: Synthetic oligonucleotide
cuauaggcuuggagggagc

SEQ ID NO: 93896 - RNA, 19 nt, Artificial Sequence
  Description of Artificial Sequence: Synthetic oligonucleotide
agaaaggccccagggagca

SEQ ID NO: 93897 - RNA, 19 nt, Artificial Sequence
  Description of Artificial Sequence: Synthetic oligonucleotide
guaacuccagcgcuugcuc

SEQ ID NO: 93898 - RNA, 19 nt, Artificial Sequence
  Description of Artificial Sequence: Synthetic oligonucleotide
aucgcaagcuucaucgcug

SEQ ID NO: 93899 - RNA, 19 nt, Artificial Sequence
  Description of Artificial Sequence: Synthetic oligonucleotide
guuagggcguguaggcagg

SEQ ID NO: 93900 - RNA, 19 nt, Artificial Sequence
  Description of Artificial Sequence: Synthetic oligonucleotide
aggucaagguuuguaguca

SEQ ID NO: 93901 - RNA, 19 nt, Artificial Sequence
  Description of Artificial Sequence: Synthetic oligonucleotide
ggucaagguuuguagucag

SEQ ID NO: 93902 - RNA, 19 nt, Artificial Sequence
  Description of Artificial Sequence: Synthetic oligonucleotide
acucacauuaaaaggugaa

SEQ ID NO: 93903 - RNA, 19 nt, Artificial Sequence
  Description of Artificial Sequence: Synthetic oligonucleotide
agcgacgaguaaucuucag

SEQ ID NO: 93904 - RNA, 19 nt, Artificial Sequence
  Description of Artificial Sequence: Synthetic oligonucleotide
acgguagcacacuguagga

SEQ ID NO: 93905 - RNA, 19 nt, Artificial Sequence
  Description of Artificial Sequence: Synthetic oligonucleotide
ucauacuggggcacacuuu

SEQ ID NO: 93906 - RNA, 19 nt, Artificial Sequence
  Description of Artificial Sequence: Synthetic oligonucleotide
ggaaacuuaucugaccauc

SEQ ID NO: 93907 - RNA, 19 nt, Artificial Sequence
  Description of Artificial Sequence: Synthetic oligonucleotide
agaggauucuaggagggua

SEQ ID NO: 93908 - RNA, 19 nt, Artificial Sequence
  Description of Artificial Sequence: Synthetic oligonucleotide
caccuuaugccccaggucu

SEQ ID NO: 93909 - RNA, 19 nt, Artificial Sequence
  Description of Artificial Sequence: Synthetic oligonucleotide
acaaacuaucagugucaga

SEQ ID NO: 93910 - RNA, 19 nt, Artificial Sequence
  Description of Artificial Sequence: Synthetic oligonucleotide
uagcgacgaguaaucuuca

SEQ ID NO: 93911 - RNA, 19 nt, Artificial Sequence
  Description of Artificial Sequence: Synthetic oligonucleotide
guguuuugugcauaaucua

SEQ ID NO: 93912 - RNA, 19 nt, Artificial Sequence
  Description of Artificial Sequence: Synthetic oligonucleotide
uacaauccuuggagacaag

SEQ ID NO: 93913 - RNA, 19 nt, Artificial Sequence
  Description of Artificial Sequence: Synthetic oligonucleotide
ccuggcaaagugaaucuac

SEQ ID NO: 93914 - RNA, 19 nt, Artificial Sequence
  Description of Artificial Sequence: Synthetic oligonucleotide
ugcuauugcuugguuuugu

SEQ ID NO: 93915 - RNA, 19 nt, Artificial Sequence
  Description of Artificial Sequence: Synthetic oligonucleotide
ucgcaagcuucaucgcuga

SEQ ID NO: 93916 - RNA, 19 nt, Artificial Sequence
  Description of Artificial Sequence: Synthetic oligonucleotide
ugugugauucaggggcaug

SEQ ID NO: 93917 - RNA, 19 nt, Artificial Sequence
  Description of Artificial Sequence: Synthetic oligonucleotide
ggcguuagggcguguaggc

SEQ ID NO: 93918 - RNA, 19 nt, Artificial Sequence
  Description of Artificial Sequence: Synthetic oligonucleotide
ugucaggagugagaggcuc

SEQ ID NO: 93919 - RNA, 19 nt, Artificial Sequence
  Description of Artificial Sequence: Synthetic oligonucleotide
ugcuuucaccaaauauaua

SEQ ID NO: 93920 - RNA, 19 nt, Artificial Sequence
  Description of Artificial Sequence: Synthetic oligonucleotide
ccuuucaaaucccauccac

SEQ ID NO: 93921 - RNA, 19 nt, Artificial Sequence
  Description of Artificial Sequence: Synthetic oligonucleotide
ggagugacuauaggcuugg

SEQ ID NO: 93922 - RNA, 19 nt, Artificial Sequence
  Description of Artificial Sequence: Synthetic oligonucleotide
gugaaucuacguggcacag

SEQ ID NO: 93923 - RNA, 19 nt, Artificial Sequence
  Description of Artificial Sequence: Synthetic oligonucleotide
ugaaucuacguggcacagu

SEQ ID NO: 93924 - RNA, 19 nt, Artificial Sequence
  Description of Artificial Sequence: Synthetic oligonucleotide
gguuggaaggagcuaguga

SEQ ID NO: 93925 - RNA, 19 nt, Artificial Sequence
  Description of Artificial Sequence: Synthetic oligonucleotide
gccuagaagagcaacucug

SEQ ID NO: 93926 - RNA, 19 nt, Artificial Sequence
  Description of Artificial Sequence: Synthetic oligonucleotide
agaaccagaggaauuuaua

SEQ ID NO: 93927 - RNA, 19 nt, Artificial Sequence
  Description of Artificial Sequence: Synthetic oligonucleotide
gaacuauccacagggucaa

SEQ ID NO: 93928 - RNA, 19 nt, Artificial Sequence
  Description of Artificial Sequence: Synthetic oligonucleotide
ggcuagggcacacauugac

SEQ ID NO: 93929 - RNA, 19 nt, Artificial Sequence
  Description of Artificial Sequence: Synthetic oligonucleotide
cugcccuucccguguauac

SEQ ID NO: 93930 - RNA, 19 nt, Artificial Sequence
  Description of Artificial Sequence: Synthetic oligonucleotide
uguuucuagcugugggcuu

SEQ ID NO: 93931 - RNA, 19 nt, Artificial Sequence
  Description of Artificial Sequence: Synthetic oligonucleotide
ucgcugaaugucuccugcu

SEQ ID NO: 93932 - RNA, 19 nt, Artificial Sequence
  Description of Artificial Sequence: Synthetic oligonucleotide
gugauucaggggcaugcca

SEQ ID NO: 93933 - RNA, 19 nt, Artificial Sequence
  Description of Artificial Sequence: Synthetic oligonucleotide
gacuuugugcucaggcauc

SEQ ID NO: 93934 - RNA, 19 nt, Artificial Sequence
  Description of Artificial Sequence: Synthetic oligonucleotide
ccacucacauuaaaaggug

SEQ ID NO: 93935 - RNA, 19 nt, Artificial Sequence
  Description of Artificial Sequence: Synthetic oligonucleotide
guuacaucucagugccaca

SEQ ID NO: 93936 - RNA, 19 nt, Artificial Sequence
  Description of Artificial Sequence: Synthetic oligonucleotide
agaugcaauguuagagaga

SEQ ID NO: 93937 - RNA, 19 nt, Artificial Sequence
  Description of Artificial Sequence: Synthetic oligonucleotide
gacccuucauagaaauguc

SEQ ID NO: 93938 - RNA, 19 nt, Artificial Sequence
  Description of Artificial Sequence: Synthetic oligonucleotide
cuaaggaaauacaauccuu

SEQ ID NO: 93939 - RNA, 19 nt, Artificial Sequence
  Description of Artificial Sequence: Synthetic oligonucleotide
acccuucauagaaaugucu

SEQ ID NO: 93940 - RNA, 19 nt, Artificial Sequence
  Description of Artificial Sequence: Synthetic oligonucleotide
gucccuccuaacuuugcca

SEQ ID NO: 93941 - RNA, 19 nt, Artificial Sequence
  Description of Artificial Sequence: Synthetic oligonucleotide
aguuggguugagaaugaau

SEQ ID NO: 93942 - RNA, 19 nt, Artificial Sequence
  Description of Artificial Sequence: Synthetic oligonucleotide
ugucaucuuaagggugaga

SEQ ID NO: 93943 - RNA, 19 nt, Artificial Sequence
  Description of Artificial Sequence: Synthetic oligonucleotide
gguuggcugcaguagccag

SEQ ID NO: 93944 - RNA, 19 nt, Artificial Sequence
  Description of Artificial Sequence: Synthetic oligonucleotide
cuggcguuagggcguguag

SEQ ID NO: 93945 - RNA, 19 nt, Artificial Sequence
  Description of Artificial Sequence: Synthetic oligonucleotide
ugccaucgcaagcuucauc

SEQ ID NO: 93946 - RNA, 19 nt, Artificial Sequence
  Description of Artificial Sequence: Synthetic oligonucleotide
cacucuuucuggccaaaga

SEQ ID NO: 93947 - RNA, 19 nt, Artificial Sequence
  Description of Artificial Sequence: Synthetic oligonucleotide
caccuacuguuucuagcug

SEQ ID NO: 93948 - RNA, 19 nt, Artificial Sequence
  Description of Artificial Sequence: Synthetic oligonucleotide
uagaggauucuaggagggu

SEQ ID NO: 93949 - RNA, 19 nt, Artificial Sequence
  Description of Artificial Sequence: Synthetic oligonucleotide
cccaucaacugccuagaag

SEQ ID NO: 93950 - RNA, 19 nt, Artificial Sequence
  Description of Artificial Sequence: Synthetic oligonucleotide
uguggauucugagguuauc

SEQ ID NO: 93951 - RNA, 19 nt, Artificial Sequence
  Description of Artificial Sequence: Synthetic oligonucleotide
cauagacuugggagccaug

SEQ ID NO: 93952 - RNA, 19 nt, Artificial Sequence
  Description of Artificial Sequence: Synthetic oligonucleotide
acauugacucugaaggcua

SEQ ID NO: 93953 - RNA, 19 nt, Artificial Sequence
  Description of Artificial Sequence: Synthetic oligonucleotide
gacuauaggcuuggaggga

SEQ ID NO: 93954 - RNA, 19 nt, Artificial Sequence
  Description of Artificial Sequence: Synthetic oligonucleotide
ugcccuucccguguauaca

SEQ ID NO: 93955 - RNA, 19 nt, Artificial Sequence
  Description of Artificial Sequence: Synthetic oligonucleotide
auguuuggugccuggucuu

SEQ ID NO: 93956 - RNA, 19 nt, Artificial Sequence
  Description of Artificial Sequence: Synthetic oligonucleotide
gagcuaugguccaaaauau

SEQ ID NO: 93957 - RNA, 19 nt, Artificial Sequence
  Description of Artificial Sequence: Synthetic oligonucleotide
gguaaagagugcauuauau

SEQ ID NO: 93958 - RNA, 19 nt, Artificial Sequence
  Description of Artificial Sequence: Synthetic oligonucleotide
augcaauguuagagagagc

SEQ ID NO: 93959 - RNA, 19 nt, Artificial Sequence
  Description of Artificial Sequence: Synthetic oligonucleotide
cggauaguaacuccagcgc

SEQ ID NO: 93960 - RNA, 19 nt, Artificial Sequence
  Description of Artificial Sequence: Synthetic oligonucleotide
ggauaguaacuccagcgcu

SEQ ID NO: 93961 - RNA, 19 nt, Artificial Sequence
  Description of Artificial Sequence: Synthetic oligonucleotide
cagagggaggaaacuuauc

SEQ ID NO: 93962 - RNA, 19 nt, Artificial Sequence
  Description of Artificial Sequence: Synthetic oligonucleotide
uguuuggugccuggucuuc

SEQ ID NO: 93963 - RNA, 19 nt, Artificial Sequence
  Description of Artificial Sequence: Synthetic oligonucleotide
cauuuguaguuucugguuu

SEQ ID NO: 93964 - RNA, 19 nt, Artificial Sequence
  Description of Artificial Sequence: Synthetic oligonucleotide
ggcucccaaguaucaaaag

SEQ ID NO: 93965 - RNA, 19 nt, Artificial Sequence
  Description of Artificial Sequence: Synthetic oligonucleotide
ggacuggaacacucagucc

SEQ ID NO: 93966 - RNA, 19 nt, Artificial Sequence
  Description of Artificial Sequence: Synthetic oligonucleotide
gguugagaaugaaugaacu

SEQ ID NO: 93967 - RNA, 19 nt, Artificial Sequence
  Description of Artificial Sequence: Synthetic oligonucleotide
acuucccaaagagagccuu

SEQ ID NO: 93968 - RNA, 19 nt, Artificial Sequence
  Description of Artificial Sequence: Synthetic oligonucleotide
guggauucugagguuaucu

SEQ ID NO: 93969 - RNA, 19 nt, Artificial Sequence
  Description of Artificial Sequence: Synthetic oligonucleotide
gauaguaacuccagcgcuu

SEQ ID NO: 93970 - RNA, 19 nt, Artificial Sequence
  Description of Artificial Sequence: Synthetic oligonucleotide
cuccuaacuuugccaucgc

SEQ ID NO: 93971 - RNA, 19 nt, Artificial Sequence
  Description of Artificial Sequence: Synthetic oligonucleotide
gccuugcucauuuguauuc

SEQ ID NO: 93972 - RNA, 19 nt, Artificial Sequence
  Description of Artificial Sequence: Synthetic oligonucleotide
ccuucccguguauacaaac

SEQ ID NO: 93973 - RNA, 19 nt, Artificial Sequence
  Description of Artificial Sequence: Synthetic oligonucleotide
gcgacgaguaaucuucaga

SEQ ID NO: 93974 - RNA, 19 nt, Artificial Sequence
  Description of Artificial Sequence: Synthetic oligonucleotide
cucagaguagggucuggaa

SEQ ID NO: 93975 - RNA, 19 nt, Artificial Sequence
  Description of Artificial Sequence: Synthetic oligonucleotide
guccucgauaggaucaguc

SEQ ID NO: 93976 - RNA, 19 nt, Artificial Sequence
  Description of Artificial Sequence: Synthetic oligonucleotide
agaggagauugaaauccau

SEQ ID NO: 93977 - RNA, 19 nt, Artificial Sequence
  Description of Artificial Sequence: Synthetic oligonucleotide
gguccugcccugcuuggcc

SEQ ID NO: 93978 - RNA, 19 nt, Artificial Sequence
  Description of Artificial Sequence: Synthetic oligonucleotide
gccauaagggaugggcucc

SEQ ID NO: 93979 - RNA, 19 nt, Artificial Sequence
  Description of Artificial Sequence: Synthetic oligonucleotide
ccugcuagaaauggacuac

SEQ ID NO: 93980 - RNA, 19 nt, Artificial Sequence
  Description of Artificial Sequence: Synthetic oligonucleotide
gcaauguuagagagagcug

SEQ ID NO: 93981 - RNA, 19 nt, Artificial Sequence
  Description of Artificial Sequence: Synthetic oligonucleotide
gagcccagcuggcguuagg

SEQ ID NO: 93982 - RNA, 19 nt, Artificial Sequence
  Description of Artificial Sequence: Synthetic oligonucleotide
ggcaugcauguuuggugcc

SEQ ID NO: 93983 - RNA, 19 nt, Artificial Sequence
  Description of Artificial Sequence: Synthetic oligonucleotide
agacuaaagugcagagaau

SEQ ID NO: 93984 - RNA, 19 nt, Artificial Sequence
  Description of Artificial Sequence: Synthetic oligonucleotide
ccaaguaucaaaaggucau

SEQ ID NO: 93985 - RNA, 19 nt, Artificial Sequence
  Description of Artificial Sequence: Synthetic oligonucleotide
gggcacucuagaaggaaug

SEQ ID NO: 93986 - RNA, 19 nt, Artificial Sequence
  Description of Artificial Sequence: Synthetic oligonucleotide
ucgauaggaucagucucuu

SEQ ID NO: 93987 - RNA, 19 nt, Artificial Sequence
  Description of Artificial Sequence: Synthetic oligonucleotide
cugcuauugcuugguuuug

SEQ ID NO: 93988 - RNA, 19 nt, Artificial Sequence
  Description of Artificial Sequence: Synthetic oligonucleotide
uggaacacucaguccccuu

SEQ ID NO: 93989 - RNA, 19 nt, Artificial Sequence
  Description of Artificial Sequence: Synthetic oligonucleotide
ccauuucggauaguaacuc

SEQ ID NO: 93990 - RNA, 19 nt, Artificial Sequence
  Description of Artificial Sequence: Synthetic oligonucleotide
caucgcaagcuucaucgcu

SEQ ID NO: 93991 - RNA, 19 nt, Artificial Sequence
  Description of Artificial Sequence: Synthetic oligonucleotide
cccaguaaguaccacuaga

SEQ ID NO: 93992 - RNA, 19 nt, Artificial Sequence
  Description of Artificial Sequence: Synthetic oligonucleotide
cagcaaugccuucucucca

SEQ ID NO: 93993 - RNA, 19 nt, Artificial Sequence
  Description of Artificial Sequence: Synthetic oligonucleotide
cuguuucuagcugugggcu

SEQ ID NO: 93994 - RNA, 19 nt, Artificial Sequence
  Description of Artificial Sequence: Synthetic oligonucleotide
agcuaugguccaaaauauu

SEQ ID NO: 93995 - RNA, 19 nt, Artificial Sequence
  Description of Artificial Sequence: Synthetic oligonucleotide
gcaugggcaccucuaagaa

SEQ ID NO: 93996 - RNA, 19 nt, Artificial Sequence
  Description of Artificial Sequence: Synthetic oligonucleotide
cauagcgacgaguaaucuu

SEQ ID NO: 93997 - RNA, 19 nt, Artificial Sequence
  Description of Artificial Sequence: Synthetic oligonucleotide
gggcaugggcaccucuaag

SEQ ID NO: 93998 - RNA, 19 nt, Artificial Sequence
  Description of Artificial Sequence: Synthetic oligonucleotide
aaguaccacuagagaucug

SEQ ID NO: 93999 - RNA, 19 nt, Artificial Sequence
  Description of Artificial Sequence: Synthetic oligonucleotide
gcaaaggcauagcgacgag

SEQ ID NO: 94000 - RNA, 19 nt, Artificial Sequence
  Description of Artificial Sequence: Synthetic oligonucleotide
accgcaagaccagcauaca

SEQ ID NO: 94001 - RNA, 19 nt, Artificial Sequence
  Description of Artificial Sequence: Synthetic oligonucleotide
cagaaccagaggaauuuau

SEQ ID NO: 94002 - RNA, 19 nt, Artificial Sequence
  Description of Artificial Sequence: Synthetic oligonucleotide
cacugggguccucgauagg

SEQ ID NO: 94003 - RNA, 19 nt, Artificial Sequence
  Description of Artificial Sequence: Synthetic oligonucleotide
gagggagcuaugguccaaa

SEQ ID NO: 94004 - RNA, 19 nt, Artificial Sequence
  Description of Artificial Sequence: Synthetic oligonucleotide
gccauaguucucagccccg

SEQ ID NO: 94005 - RNA, 19 nt, Artificial Sequence
  Description of Artificial Sequence: Synthetic oligonucleotide
cuuugugcucaggcaucac

SEQ ID NO: 94006 - RNA, 19 nt, Artificial Sequence
  Description of Artificial Sequence: Synthetic oligonucleotide
uguccacuaccagcagcaa

SEQ ID NO: 94007 - RNA, 19 nt, Artificial Sequence
  Description of Artificial Sequence: Synthetic oligonucleotide
acccaucaacugccuagaa

SEQ ID NO: 94008 - RNA, 19 nt, Artificial Sequence
  Description of Artificial Sequence: Synthetic oligonucleotide
cacccaucaacugccuaga

SEQ ID NO: 94009 - RNA, 19 nt, Artificial Sequence
  Description of Artificial Sequence: Synthetic oligonucleotide
agagcccagcuggcguuag

SEQ ID NO: 94010 - RNA, 19 nt, Artificial Sequence
  Description of Artificial Sequence: Synthetic oligonucleotide
ccaccuacuguuucuagcu

SEQ ID NO: 94011 - RNA, 19 nt, Artificial Sequence
  Description of Artificial Sequence: Synthetic oligonucleotide
gccuuucaaaucccaucca

SEQ ID NO: 94012 - RNA, 19 nt, Artificial Sequence
  Description of Artificial Sequence: Synthetic oligonucleotide
ccuuaugccccaggucucc

SEQ ID NO: 94013 - RNA, 19 nt, Artificial Sequence
  Description of Artificial Sequence: Synthetic oligonucleotide
aggggcaugccaagucccu

SEQ ID NO: 94014 - RNA, 19 nt, Artificial Sequence
  Description of Artificial Sequence: Synthetic oligonucleotide
gaguuggguugagaaugaa

SEQ ID NO: 94015 - RNA, 19 nt, Artificial Sequence
  Description of Artificial Sequence: Synthetic oligonucleotide
ggcacacuuuggcaucaca

SEQ ID NO: 94016 - RNA, 19 nt, Artificial Sequence
  Description of Artificial Sequence: Synthetic oligonucleotide
caaaggcauagcgacgagu

SEQ ID NO: 94017 - RNA, 19 nt, Artificial Sequence
  Description of Artificial Sequence: Synthetic oligonucleotide
gccuaucuggauccaagcu

SEQ ID NO: 94018 - RNA, 19 nt, Artificial Sequence
  Description of Artificial Sequence: Synthetic oligonucleotide
uacguggcacaguccccuu

SEQ ID NO: 94019 - RNA, 19 nt, Artificial Sequence
  Description of Artificial Sequence: Synthetic oligonucleotide
cuacguggcacaguccccu

SEQ ID NO: 94020 - RNA, 19 nt, Artificial Sequence
  Description of Artificial Sequence: Synthetic oligonucleotide
cuuaugccccaggucucca

SEQ ID NO: 94021 - RNA, 19 nt, Artificial Sequence
  Description of Artificial Sequence: Synthetic oligonucleotide
acaggcuagggcacacauu

SEQ ID NO: 94022 - RNA, 19 nt, Artificial Sequence
  Description of Artificial Sequence: Synthetic oligonucleotide
gagugacuauaggcuugga

SEQ ID NO: 94023 - RNA, 19 nt, Artificial Sequence
  Description of Artificial Sequence: Synthetic oligonucleotide
gccaggauugaagcuccac

SEQ ID NO: 94024 - RNA, 19 nt, Artificial Sequence
  Description of Artificial Sequence: Synthetic oligonucleotide
gaucagucucuugccuggu

SEQ ID NO: 94025 - RNA, 19 nt, Artificial Sequence
  Description of Artificial Sequence: Synthetic oligonucleotide
ccuugccuggcuccaacca

SEQ ID NO: 94026 - RNA, 19 nt, Artificial Sequence
  Description of Artificial Sequence: Synthetic oligonucleotide
guuuggugccuggucuucu

SEQ ID NO: 94027 - RNA, 19 nt, Artificial Sequence
  Description of Artificial Sequence: Synthetic oligonucleotide
ccauguggcccuguuccac

SEQ ID NO: 94028 - RNA, 19 nt, Artificial Sequence
  Description of Artificial Sequence: Synthetic oligonucleotide
gucaagguuuguagucagu

SEQ ID NO: 94029 - RNA, 19 nt, Artificial Sequence
  Description of Artificial Sequence: Synthetic oligonucleotide
ggauaguggcgcaggaggu

SEQ ID NO: 94030 - RNA, 19 nt, Artificial Sequence
  Description of Artificial Sequence: Synthetic oligonucleotide
ugugcccuguuggcaccuc

SEQ ID NO: 94031 - RNA, 19 nt, Artificial Sequence
  Description of Artificial Sequence: Synthetic oligonucleotide
augcugggccuggcaaagu

SEQ ID NO: 94032 - RNA, 19 nt, Artificial Sequence
  Description of Artificial Sequence: Synthetic oligonucleotide
gugaagggacuggaacacu

SEQ ID NO: 94033 - RNA, 19 nt, Artificial Sequence
  Description of Artificial Sequence: Synthetic oligonucleotide
cugggguccucgauaggau

SEQ ID NO: 94034 - RNA, 19 nt, Artificial Sequence
  Description of Artificial Sequence: Synthetic oligonucleotide
gguuuguagucaguauuuu

SEQ ID NO: 94035 - RNA, 19 nt, Artificial Sequence
  Description of Artificial Sequence: Synthetic oligonucleotide
caccaaccugaugggccuc

SEQ ID NO: 94036 - RNA, 19 nt, Artificial Sequence
  Description of Artificial Sequence: Synthetic oligonucleotide
cgguagcacacuguaggac

SEQ ID NO: 94037 - RNA, 19 nt, Artificial Sequence
  Description of Artificial Sequence: Synthetic oligonucleotide
cacuggcauuuguguucuc

SEQ ID NO: 94038 - RNA, 19 nt, Artificial Sequence
  Description of Artificial Sequence: Synthetic oligonucleotide
ccccacagaaacuuguauu

SEQ ID NO: 94039 - RNA, 19 nt, Artificial Sequence
  Description of Artificial Sequence: Synthetic oligonucleotide
ggggcacacuuuggcauca

SEQ ID NO: 94040 - RNA, 19 nt, Artificial Sequence
  Description of Artificial Sequence: Synthetic oligonucleotide
cuugggagccaugguacuu

SEQ ID NO: 94041 - RNA, 19 nt, Artificial Sequence
  Description of Artificial Sequence: Synthetic oligonucleotide
gcguuagggcguguaggca

SEQ ID NO: 94042 - RNA, 19 nt, Artificial Sequence
  Description of Artificial Sequence: Synthetic oligonucleotide
ccaagucccuccuaacuuu

SEQ ID NO: 94043 - RNA, 19 nt, Artificial Sequence
  Description of Artificial Sequence: Synthetic oligonucleotide
gcguguaggcagggguggc

SEQ ID NO: 94044 - RNA, 19 nt, Artificial Sequence
  Description of Artificial Sequence: Synthetic oligonucleotide
gcauagcgacgaguaaucu

SEQ ID NO: 94045 - RNA, 19 nt, Artificial Sequence
  Description of Artificial Sequence: Synthetic oligonucleotide
cauggggcucaaguguuuu

SEQ ID NO: 94046 - RNA, 19 nt, Artificial Sequence
  Description of Artificial Sequence: Synthetic oligonucleotide
ggaauacuuuguggagagu

SEQ ID NO: 94047 - RNA, 19 nt, Artificial Sequence
  Description of Artificial Sequence: Synthetic oligonucleotide
gccuaguagcacaccgcaa

SEQ ID NO: 94048 - RNA, 19 nt, Artificial Sequence
  Description of Artificial Sequence: Synthetic oligonucleotide
ccaaccugaugggccucug

SEQ ID NO: 94049 - RNA, 19 nt, Artificial Sequence
  Description of Artificial Sequence: Synthetic oligonucleotide
gcuuucuuaugggcacacu

SEQ ID NO: 94050 - RNA, 19 nt, Artificial Sequence
  Description of Artificial Sequence: Synthetic oligonucleotide
ccgcaagaccagcauacau

SEQ ID NO: 94051 - RNA, 19 nt, Artificial Sequence
  Description of Artificial Sequence: Synthetic oligonucleotide
gggagccaugguacuucuu

SEQ ID NO: 94052 - RNA, 19 nt, Artificial Sequence
  Description of Artificial Sequence: Synthetic oligonucleotide
aaaauucucaaauuaaggc

SEQ ID NO: 94053 - RNA, 19 nt, Artificial Sequence
  Description of Artificial Sequence: Synthetic oligonucleotide
aaagaaacagccugucugc

SEQ ID NO: 94054 - RNA, 19 nt, Artificial Sequence
  Description of Artificial Sequence: Synthetic oligonucleotide
uguucuaucaugacgacag

SEQ ID NO: 94055 - RNA, 19 nt, Artificial Sequence
  Description of Artificial Sequence: Synthetic oligonucleotide
aaauauaacuagcuaagcu

SEQ ID NO: 94056 - RNA, 19 nt, Artificial Sequence
  Description of Artificial Sequence: Synthetic oligonucleotide
aauucuugacucuggaagg

SEQ ID NO: 94057 - RNA, 19 nt, Artificial Sequence
  Description of Artificial Sequence: Synthetic oligonucleotide
aauauaacuagcuaagcuu

SEQ ID NO: 94058 - RNA, 19 nt, Artificial Sequence
  Description of Artificial Sequence: Synthetic oligonucleotide
aauuaaucuaaucuaccug

SEQ ID NO: 94059 - RNA, 19 nt, Artificial Sequence
  Description of Artificial Sequence: Synthetic oligonucleotide
uggguaaucaacaguaagg

SEQ ID NO: 94060 - RNA, 19 nt, Artificial Sequence
  Description of Artificial Sequence: Synthetic oligonucleotide
aaaauauaacuagcuaagc

SEQ ID NO: 94061 - RNA, 19 nt, Artificial Sequence
  Description of Artificial Sequence: Synthetic oligonucleotide
ucuaucaugacgacaggcg

SEQ ID NO: 94062 - RNA, 19 nt, Artificial Sequence
  Description of Artificial Sequence: Synthetic oligonucleotide
auuaaucuaaucuaccugu

SEQ ID NO: 94063 - RNA, 19 nt, Artificial Sequence
  Description of Artificial Sequence: Synthetic oligonucleotide
ucuugcugauguuacaucg

SEQ ID NO: 94064 - RNA, 19 nt, Artificial Sequence
  Description of Artificial Sequence: Synthetic oligonucleotide
aaaaguuuugcacgcaacu

SEQ ID NO: 94065 - RNA, 19 nt, Artificial Sequence
  Description of Artificial Sequence: Synthetic oligonucleotide
uuuaucuauguccaacacc

SEQ ID NO: 94066 - RNA, 19 nt, Artificial Sequence
  Description of Artificial Sequence: Synthetic oligonucleotide
ugcgguaucaaagaaacag

SEQ ID NO: 94067 - RNA, 19 nt, Artificial Sequence
  Description of Artificial Sequence: Synthetic oligonucleotide
uuuacuuccgacuugggau

SEQ ID NO: 94068 - RNA, 19 nt, Artificial Sequence
  Description of Artificial Sequence: Synthetic oligonucleotide
aaauugucuguuucaaaug

SEQ ID NO: 94069 - RNA, 19 nt, Artificial Sequence
  Description of Artificial Sequence: Synthetic oligonucleotide
  modified_base (6)..(6): a, c, u, g, unknown or other
aaggcnggaaauccaaauc

SEQ ID NO: 94070 - RNA, 19 nt, Artificial Sequence
  Description of Artificial Sequence: Synthetic oligonucleotide
gacaauaucuucguaaccc

SEQ ID NO: 94071 - RNA, 19 nt, Artificial Sequence
  Description of Artificial Sequence: Synthetic oligonucleotide
acaauaucuucguaacccc

SEQ ID NO: 94072 - RNA, 19 nt, Artificial Sequence
  Description of Artificial Sequence: Synthetic oligonucleotide
auaauuaaucuaaucuacc

SEQ ID NO: 94073 - RNA, 19 nt, Artificial Sequence
  Description of Artificial Sequence: Synthetic oligonucleotide
aucuucgacacucuagggc

SEQ ID NO: 94074 - RNA, 19 nt, Artificial Sequence
  Description of Artificial Sequence: Synthetic oligonucleotide
aauaucuucguaaccccgc

SEQ ID NO: 94075 - RNA, 19 nt, Artificial Sequence
  Description of Artificial Sequence: Synthetic oligonucleotide
aauccgaaagguccaaaag

SEQ ID NO: 94076 - RNA, 19 nt, Artificial Sequence
  Description of Artificial Sequence: Synthetic oligonucleotide
ucugcuagauccaacugag

SEQ ID NO: 94077 - RNA, 19 nt, Artificial Sequence
  Description of Artificial Sequence: Synthetic oligonucleotide
ucguaacuuacuuugcacg

SEQ ID NO: 94078 - RNA, 19 nt, Artificial Sequence
  Description of Artificial Sequence: Synthetic oligonucleotide
aaccauuugguuaaauuuc

SEQ ID NO: 94079 - RNA, 19 nt, Artificial Sequence
  Description of Artificial Sequence: Synthetic oligonucleotide
aaccuucaauucuugacuc

SEQ ID NO: 94080 - RNA, 19 nt, Artificial Sequence
  Description of Artificial Sequence: Synthetic oligonucleotide
  modified_base (17)..(17): a, c, u, g, unknown or other
agaaaaguuaguucaanau

SEQ ID NO: 94081 - RNA, 19 nt, Artificial Sequence
  Description of Artificial Sequence: Synthetic oligonucleotide
auuuaucuauguccaacac

SEQ ID NO: 94082 - RNA, 19 nt, Artificial Sequence
  Description of Artificial Sequence: Synthetic oligonucleotide
acugaguagaaagaguuuc

SEQ ID NO: 94083 - RNA, 19 nt, Artificial Sequence
  Description of Artificial Sequence: Synthetic oligonucleotide
aucuucguaaccccgcagc

SEQ ID NO: 94084 - RNA, 19 nt, Artificial Sequence
  Description of Artificial Sequence: Synthetic oligonucleotide
aggguaaucgaacucccac

SEQ ID NO: 94085 - RNA, 19 nt, Artificial Sequence
  Description of Artificial Sequence: Synthetic oligonucleotide
  modified_base (9)..(9): a, c, u, g, unknown or other
uccaaaucnuaaccaaagc

SEQ ID NO: 94086 - RNA, 19 nt, Artificial Sequence
  Description of Artificial Sequence: Synthetic oligonucleotide
aggaaugaauucauggccc

SEQ ID NO: 94087 - RNA, 19 nt, Artificial Sequence
  Description of Artificial Sequence: Synthetic oligonucleotide
uugcuuuguaagcugagca

SEQ ID NO: 94088 - RNA, 19 nt, Artificial Sequence
  Description of Artificial Sequence: Synthetic oligonucleotide
  modified_base (9)..(9): a, c, u, g, unknown or other
uuuaaggcnggaaauccaa

SEQ ID NO: 94089 - RNA, 19 nt, Artificial Sequence
  Description of Artificial Sequence: Synthetic oligonucleotide
aauaucacucucuuugcua

SEQ ID NO: 94090 - RNA, 19 nt, Artificial Sequence
  Description of Artificial Sequence: Synthetic oligonucleotide
ugguuaaacagccugguuu

SEQ ID NO: 94091 - RNA, 19 nt, Artificial Sequence
  Description of Artificial Sequence: Synthetic oligonucleotide
aacucaauauggcuuggca

SEQ ID NO: 94092 - RNA, 19 nt, Artificial Sequence
  Description of Artificial Sequence: Synthetic oligonucleotide
aaagccagaugguggguuc

SEQ ID NO: 94093 - RNA, 19 nt, Artificial Sequence
  Description of Artificial Sequence: Synthetic oligonucleotide
uguuacaucguaacuuacu

SEQ ID NO: 94094 - RNA, 19 nt, Artificial Sequence
  Description of Artificial Sequence: Synthetic oligonucleotide
ucuucguaaccccgcagcg

SEQ ID NO: 94095 - RNA, 19 nt, Artificial Sequence
  Description of Artificial Sequence: Synthetic oligonucleotide
cauaggguaaucgaacucc

SEQ ID NO: 94096 - RNA, 19 nt, Artificial Sequence
  Description of Artificial Sequence: Synthetic oligonucleotide
aucgaacucccacugaaag

SEQ ID NO: 94097 - RNA, 19 nt, Artificial Sequence
  Description of Artificial Sequence: Synthetic oligonucleotide
uuacagaaaugauguaccc

SEQ ID NO: 94098 - RNA, 19 nt, Artificial Sequence
  Description of Artificial Sequence: Synthetic oligonucleotide
ugcgauucauuauuucugc

SEQ ID NO: 94099 - RNA, 19 nt, Artificial Sequence
  Description of Artificial Sequence: Synthetic oligonucleotide
uucaagugacaucacuaug

SEQ ID NO: 94100 - RNA, 19 nt, Artificial Sequence
  Description of Artificial Sequence: Synthetic oligonucleotide
uaaucgaacucccacugaa

SEQ ID NO: 94101 - RNA, 19 nt, Artificial Sequence
  Description of Artificial Sequence: Synthetic oligonucleotide
ucaggguccguucaguacu

SEQ ID NO: 94102 - RNA, 19 nt, Artificial Sequence
  Description of Artificial Sequence: Synthetic oligonucleotide
ucaaguuggucuuguaacu

SEQ ID NO: 94103 - RNA, 19 nt, Artificial Sequence
  Description of Artificial Sequence: Synthetic oligonucleotide
uccucuauuugguacagaa

SEQ ID NO: 94104 - RNA, 19 nt, Artificial Sequence
  Description of Artificial Sequence: Synthetic oligonucleotide
aaaacuagcaaugcugguu

SEQ ID NO: 94105 - RNA, 19 nt, Artificial Sequence
  Description of Artificial Sequence: Synthetic oligonucleotide
  modified_base (7)..(7): a, c, u, g, unknown or other
uaaggcnggaaauccaaau

SEQ ID NO: 94106 - RNA, 19 nt, Artificial Sequence
  Description of Artificial Sequence: Synthetic oligonucleotide
uuugguacagaaagccaac

SEQ ID NO: 94107 - RNA, 19 nt, Artificial Sequence
  Description of Artificial Sequence: Synthetic oligonucleotide
ugacaauaucuucguaacc

SEQ ID NO: 94108 - RNA, 19 nt, Artificial Sequence
  Description of Artificial Sequence: Synthetic oligonucleotide
aggaaaacuagcaaugcug

SEQ ID NO: 94109 - RNA, 19 nt, Artificial Sequence
  Description of Artificial Sequence: Synthetic oligonucleotide
accaauugcgcuugcaugu

SEQ ID NO: 94110 - RNA, 19 nt, Artificial Sequence
  Description of Artificial Sequence: Synthetic oligonucleotide
  modified_base (3)..(3): a, c, u, g, unknown or other
ucnuaaccaaagcaucuaa

SEQ ID NO: 94111 - RNA, 19 nt, Artificial Sequence
  Description of Artificial Sequence: Synthetic oligonucleotide
uuugcacggggaaaucaag

SEQ ID NO: 94112 - RNA, 19 nt, Artificial Sequence
  Description of Artificial Sequence: Synthetic oligonucleotide
uucguaaccccgcagcgga

SEQ ID NO: 94113 - RNA, 19 nt, Artificial Sequence
  Description of Artificial Sequence: Synthetic oligonucleotide
  modified_base (7)..(7): a, c, u, g, unknown or other
caaaucnuaaccaaagcau

SEQ ID NO: 94114 - RNA, 19 nt, Artificial Sequence
  Description of Artificial Sequence: Synthetic oligonucleotide
ugauguuacaucguaacuu

SEQ ID NO: 94115 - RNA, 19 nt, Artificial Sequence
  Description of Artificial Sequence: Synthetic oligonucleotide
gauguuacaucguaacuua

SEQ ID NO: 94116 - RNA, 19 nt, Artificial Sequence
  Description of Artificial Sequence: Synthetic oligonucleotide
uaccaauugcgcuugcaug

SEQ ID NO: 94117 - RNA, 19 nt, Artificial Sequence
  Description of Artificial Sequence: Synthetic oligonucleotide
uagccguuuauuuuaucug

SEQ ID NO: 94118 - RNA, 19 nt, Artificial Sequence
  Description of Artificial Sequence: Synthetic oligonucleotide
gguugaauccgaaaggucc

SEQ ID NO: 94119 - RNA, 19 nt, Artificial Sequence
  Description of Artificial Sequence: Synthetic oligonucleotide
uccacugaaagugaaaguu

SEQ ID NO: 94120 - RNA, 19 nt, Artificial Sequence
  Description of Artificial Sequence: Synthetic oligonucleotide
uuaaaaucuuugcgauuca

SEQ ID NO: 94121 - RNA, 19 nt, Artificial Sequence
  Description of Artificial Sequence: Synthetic oligonucleotide
ucuaaucuaccuguaggca

SEQ ID NO: 94122 - RNA, 19 nt, Artificial Sequence
  Description of Artificial Sequence: Synthetic oligonucleotide
uucuaucaugacgacaggc

SEQ ID NO: 94123 - RNA, 19 nt, Artificial Sequence
  Description of Artificial Sequence: Synthetic oligonucleotide
uguaggcaaacccgcaaga

SEQ ID NO: 94124 - RNA, 19 nt, Artificial Sequence
  Description of Artificial Sequence: Synthetic oligonucleotide
aagccugcgguaucaaaga

SEQ ID NO: 94125 - RNA, 19 nt, Artificial Sequence
  Description of Artificial Sequence: Synthetic oligonucleotide
agacagaauaacagcaauc

SEQ ID NO: 94126 - RNA, 19 nt, Artificial Sequence
  Description of Artificial Sequence: Synthetic oligonucleotide
auaggguaaucgaacuccc

SEQ ID NO: 94127 - RNA, 19 nt, Artificial Sequence
  Description of Artificial Sequence: Synthetic oligonucleotide
acgagccggaaccuggggc

SEQ ID NO: 94128 - RNA, 19 nt, Artificial Sequence
  Description of Artificial Sequence: Synthetic oligonucleotide
  modified_base (10)..(10): a, c, u, g, unknown or other
cuuuaaggcnggaaaucca

SEQ ID NO: 94129 - RNA, 19 nt, Artificial Sequence
  Description of Artificial Sequence: Synthetic oligonucleotide
uuaaucuaaucuaccugua

SEQ ID NO: 94130 - RNA, 19 nt, Artificial Sequence
  Description of Artificial Sequence: Synthetic oligonucleotide
gcuagauccaacugaguag

SEQ ID NO: 94131 - RNA, 19 nt, Artificial Sequence
  Description of Artificial Sequence: Synthetic oligonucleotide
aguauuuuguaaagcauaa

SEQ ID NO: 94132 - RNA, 19 nt, Artificial Sequence
  Description of Artificial Sequence: Synthetic oligonucleotide
uuaaggcacucauagggua

SEQ ID NO: 94133 - RNA, 19 nt, Artificial Sequence
  Description of Artificial Sequence: Synthetic oligonucleotide
uuuccggaacgacugauuu

SEQ ID NO: 94134 - RNA, 19 nt, Artificial Sequence
  Description of Artificial Sequence: Synthetic oligonucleotide
guaacuuacuuugcacggg

SEQ ID NO: 94135 - RNA, 19 nt, Artificial Sequence
  Description of Artificial Sequence: Synthetic oligonucleotide
uuggugcaaagauuguacu

SEQ ID NO: 94136 - RNA, 19 nt, Artificial Sequence
  Description of Artificial Sequence: Synthetic oligonucleotide
uaggcaaacccgcaagaaa

SEQ ID NO: 94137 - RNA, 19 nt, Artificial Sequence
  Description of Artificial Sequence: Synthetic oligonucleotide
  modified_base (12)..(12): a, c, u, g, unknown or other
uucuuuaaggcnggaaauc

SEQ ID NO: 94138 - RNA, 19 nt, Artificial Sequence
  Description of Artificial Sequence: Synthetic oligonucleotide
uuguucgaggagaggcgcg

SEQ ID NO: 94139 - RNA, 19 nt, Artificial Sequence
  Description of Artificial Sequence: Synthetic oligonucleotide
auauaacuagcuaagcuuu

SEQ ID NO: 94140 - RNA, 19 nt, Artificial Sequence
  Description of Artificial Sequence: Synthetic oligonucleotide
aaucuaccuguaggcaaac

SEQ ID NO: 94141 - RNA, 19 nt, Artificial Sequence
  Description of Artificial Sequence: Synthetic oligonucleotide
gguaaucgaacucccacug

SEQ ID NO: 94142 - RNA, 19 nt, Artificial Sequence
  Description of Artificial Sequence: Synthetic oligonucleotide
uguacacaucuccuugggu

SEQ ID NO: 94143 - RNA, 19 nt, Artificial Sequence
  Description of Artificial Sequence: Synthetic oligonucleotide
uuacuuccgacuugggauc

SEQ ID NO: 94144 - RNA, 19 nt, Artificial Sequence
  Description of Artificial Sequence: Synthetic oligonucleotide
uuucucaaaucuugcguau

SEQ ID NO: 94145 - RNA, 19 nt, Artificial Sequence
  Description of Artificial Sequence: Synthetic oligonucleotide
uaucuucguaaccccgcag

SEQ ID NO: 94146 - RNA, 19 nt, Artificial Sequence
  Description of Artificial Sequence: Synthetic oligonucleotide
aggucacaugguuaacuag

SEQ ID NO: 94147 - RNA, 19 nt, Artificial Sequence
  Description of Artificial Sequence: Synthetic oligonucleotide
uauagucuugcaagagcaa

SEQ ID NO: 94148 - RNA, 19 nt, Artificial Sequence
  Description of Artificial Sequence: Synthetic oligonucleotide
  modified_base (8)..(8): a, c, u, g, unknown or other
uuaaggcnggaaauccaaa

SEQ ID NO: 94149 - RNA, 19 nt, Artificial Sequence
  Description of Artificial Sequence: Synthetic oligonucleotide
ugcacggggaaaucaaguc

SEQ ID NO: 94150 - RNA, 19 nt, Artificial Sequence
  Description of Artificial Sequence: Synthetic oligonucleotide
aguuguagcuuccuauuuu

SEQ ID NO: 94151 - RNA, 19 nt, Artificial Sequence
  Description of Artificial Sequence: Synthetic oligonucleotide
guaaucaacaguaaggcuu

SEQ ID NO: 94152 - RNA, 19 nt, Artificial Sequence
  Description of Artificial Sequence: Synthetic oligonucleotide
uguuucugcuagauccaac

SEQ ID NO: 94153 - RNA, 19 nt, Artificial Sequence
  Description of Artificial Sequence: Synthetic oligonucleotide
uguggguaaucaacaguaa

SEQ ID NO: 94154 - RNA, 19 nt, Artificial Sequence
  Description of Artificial Sequence: Synthetic oligonucleotide
cacgcaacugcucaauauc

SEQ ID NO: 94155 - RNA, 19 nt, Artificial Sequence
  Description of Artificial Sequence: Synthetic oligonucleotide
auaucuucguaaccccgca

SEQ ID NO: 94156 - RNA, 19 nt, Artificial Sequence
  Description of Artificial Sequence: Synthetic oligonucleotide
cuagauccaacugaguaga

SEQ ID NO: 94157 - RNA, 19 nt, Artificial Sequence
  Description of Artificial Sequence: Synthetic oligonucleotide
uucauuauuguagcaggua

SEQ ID NO: 94158 - RNA, 19 nt, Artificial Sequence
  Description of Artificial Sequence: Synthetic oligonucleotide
uaucaugacgacaggcguu

SEQ ID NO: 94159 - RNA, 19 nt, Artificial Sequence
  Description of Artificial Sequence: Synthetic oligonucleotide
auuaaggcacucauagggu

SEQ ID NO: 94160 - RNA, 19 nt, Artificial Sequence
  Description of Artificial Sequence: Synthetic oligonucleotide
gguuuagaagguagcaucc

SEQ ID NO: 94161 - RNA, 19 nt, Artificial Sequence
  Description of Artificial Sequence: Synthetic oligonucleotide
  modified_base (8)..(8): a, c, u, g, unknown or other
ccaaaucnuaaccaaagca

SEQ ID NO: 94162 - RNA, 19 nt, Artificial Sequence
  Description of Artificial Sequence: Synthetic oligonucleotide
ggugcaaagauuguacuca

SEQ ID NO: 94163 - RNA, 19 nt, Artificial Sequence
  Description of Artificial Sequence: Synthetic oligonucleotide
uugucuaggugaucccugu

SEQ ID NO: 94164 - RNA, 19 nt, Artificial Sequence
  Description of Artificial Sequence: Synthetic oligonucleotide
agauuaaauguaauucuuu

SEQ ID NO: 94165 - RNA, 19 nt, Artificial Sequence
  Description of Artificial Sequence: Synthetic oligonucleotide
caaaguugcugaaacauau

SEQ ID NO: 94166 - RNA, 19 nt, Artificial Sequence
  Description of Artificial Sequence: Synthetic oligonucleotide
uuccggaacgacugauuug

SEQ ID NO: 94167 - RNA, 19 nt, Artificial Sequence
  Description of Artificial Sequence: Synthetic oligonucleotide
cguaacuuacuuugcacgg

SEQ ID NO: 94168 - RNA, 19 nt, Artificial Sequence
  Description of Artificial Sequence: Synthetic oligonucleotide
gauguaccccacacaaaug

SEQ ID NO: 94169 - RNA, 19 nt, Artificial Sequence
  Description of Artificial Sequence: Synthetic oligonucleotide
caauugcgcuugcaugucg

SEQ ID NO: 94170 - RNA, 19 nt, Artificial Sequence
  Description of Artificial Sequence: Synthetic oligonucleotide
aagaaacagccugucugcu

SEQ ID NO: 94171 - RNA, 19 nt, Artificial Sequence
  Description of Artificial Sequence: Synthetic oligonucleotide
ggucuugacagugacggcc

SEQ ID NO: 94172 - RNA, 19 nt, Artificial Sequence
  Description of Artificial Sequence: Synthetic oligonucleotide
aguuggucuuguaacucuc

SEQ ID NO: 94173 - RNA, 19 nt, Artificial Sequence
  Description of Artificial Sequence: Synthetic oligonucleotide
uuggguuaccggucggaca

SEQ ID NO: 94174 - RNA, 19 nt, Artificial Sequence
  Description of Artificial Sequence: Synthetic oligonucleotide
uaggguaaucgaacuccca

SEQ ID NO: 94175 - RNA, 19 nt, Artificial Sequence
  Description of Artificial Sequence: Synthetic oligonucleotide
caagccggcuaacagugug

SEQ ID NO: 94176 - RNA, 19 nt, Artificial Sequence
  Description of Artificial Sequence: Synthetic oligonucleotide
ucaauauggcuuggcaaaa

SEQ ID NO: 94177 - RNA, 19 nt, Artificial Sequence
  Description of Artificial Sequence: Synthetic oligonucleotide
augacgacaggcguuuucu

SEQ ID NO: 94178 - RNA, 19 nt, Artificial Sequence
  Description of Artificial Sequence: Synthetic oligonucleotide
cucuaguaguaaaauaacu

SEQ ID NO: 94179 - RNA, 19 nt, Artificial Sequence
  Description of Artificial Sequence: Synthetic oligonucleotide
aggcaaacccgcaagaaaa

SEQ ID NO: 94180 - RNA, 19 nt, Artificial Sequence
  Description of Artificial Sequence: Synthetic oligonucleotide
ccagucgacaugaugcugc

SEQ ID NO: 94181 - RNA, 19 nt, Artificial Sequence
  Description of Artificial Sequence: Synthetic oligonucleotide
auguuacaucguaacuuac

SEQ ID NO: 94182 - RNA, 19 nt, Artificial Sequence
  Description of Artificial Sequence: Synthetic oligonucleotide
ucgauggacuggauuguuc

SEQ ID NO: 94183 - RNA, 19 nt, Artificial Sequence
  Description of Artificial Sequence: Synthetic oligonucleotide
agcuaagcuuuccccaacu

SEQ ID NO: 94184 - RNA, 19 nt, Artificial Sequence
  Description of Artificial Sequence: Synthetic oligonucleotide
cggaaagcaaguuccaccg

SEQ ID NO: 94185 - RNA, 19 nt, Artificial Sequence
  Description of Artificial Sequence: Synthetic oligonucleotide
uccccaacuguacuugcau

SEQ ID NO: 94186 - RNA, 19 nt, Artificial Sequence
  Description of Artificial Sequence: Synthetic oligonucleotide
ggcacucauaggguaaucg

SEQ ID NO: 94187 - RNA, 19 nt, Artificial Sequence
  Description of Artificial Sequence: Synthetic oligonucleotide
cgguaucaaagaaacagcc

SEQ ID NO: 94188 - RNA, 19 nt, Artificial Sequence
  Description of Artificial Sequence: Synthetic oligonucleotide
guuacaucguaacuuacuu

SEQ ID NO: 94189 - RNA, 19 nt, Artificial Sequence
  Description of Artificial Sequence: Synthetic oligonucleotide
gcuaauugugacaauaucu

SEQ ID NO: 94190 - RNA, 19 nt, Artificial Sequence
  Description of Artificial Sequence: Synthetic oligonucleotide
gcggaaagcaaguuccacc

SEQ ID NO: 94191 - RNA, 19 nt, Artificial Sequence
  Description of Artificial Sequence: Synthetic oligonucleotide
cugagcuucaagugacauc

SEQ ID NO: 94192 - RNA, 19 nt, Artificial Sequence
  Description of Artificial Sequence: Synthetic oligonucleotide
augcauagauuaaauguaa

SEQ ID NO: 94193 - RNA, 19 nt, Artificial Sequence
  Description of Artificial Sequence: Synthetic oligonucleotide
cuucguaaccccgcagcgg

SEQ ID NO: 94194 - RNA, 19 nt, Artificial Sequence
  Description of Artificial Sequence: Synthetic oligonucleotide
caaccuucaauucuugacu

SEQ ID NO: 94195 - RNA, 19 nt, Artificial Sequence
  Description of Artificial Sequence: Synthetic oligonucleotide
  modified_base (4)..(4): a, c, u, g, unknown or other
aucnuaaccaaagcaucua

SEQ ID NO: 94196 - RNA, 19 nt, Artificial Sequence
  Description of Artificial Sequence: Synthetic oligonucleotide
gguuaaacagccugguuua

SEQ ID NO: 94197 - RNA, 19 nt, Artificial Sequence
  Description of Artificial Sequence: Synthetic oligonucleotide
accacuuuccggaacgacu

SEQ ID NO: 94198 - RNA, 19 nt, Artificial Sequence
  Description of Artificial Sequence: Synthetic oligonucleotide
cagguaguuuggugcaaag

SEQ ID NO: 94199 - RNA, 19 nt, Artificial Sequence
  Description of Artificial Sequence: Synthetic oligonucleotide
acaggcguuuucuuauaaa

SEQ ID NO: 94200 - RNA, 19 nt, Artificial Sequence
  Description of Artificial Sequence: Synthetic oligonucleotide
guggguacgcagccgcccg

SEQ ID NO: 94201 - RNA, 19 nt, Artificial Sequence
  Description of Artificial Sequence: Synthetic oligonucleotide
aaucgaacucccacugaaa

SEQ ID NO: 94202 - RNA, 19 nt, Artificial Sequence
  Description of Artificial Sequence: Synthetic oligonucleotide
guaaccccgcagcggaaag

SEQ ID NO: 94203 - RNA, 19 nt, Artificial Sequence
  Description of Artificial Sequence: Synthetic oligonucleotide
gaaaacuagcaaugcuggu

SEQ ID NO: 94204 - RNA, 19 nt, Artificial Sequence
  Description of Artificial Sequence: Synthetic oligonucleotide
guaaucgaacucccacuga

SEQ ID NO: 94205 - RNA, 19 nt, Artificial Sequence
  Description of Artificial Sequence: Synthetic oligonucleotide
gacgacaggcguuuucuua

SEQ ID NO: 94206 - RNA, 19 nt, Artificial Sequence
  Description of Artificial Sequence: Synthetic oligonucleotide
aaggcaaccuuaagauuau

SEQ ID NO: 94207 - RNA, 19 nt, Artificial Sequence
  Description of Artificial Sequence: Synthetic oligonucleotide
guccguucaguacugauau

SEQ ID NO: 94208 - RNA, 19 nt, Artificial Sequence
  Description of Artificial Sequence: Synthetic oligonucleotide
acgcaacugcucaauauca

SEQ ID NO: 94209 - RNA, 19 nt, Artificial Sequence
  Description of Artificial Sequence: Synthetic oligonucleotide
ucuugcguauuagcuuucu

SEQ ID NO: 94210 - RNA, 19 nt, Artificial Sequence
  Description of Artificial Sequence: Synthetic oligonucleotide
ccacuuuccggaacgacug

SEQ ID NO: 94211 - RNA, 19 nt, Artificial Sequence
  Description of Artificial Sequence: Synthetic oligonucleotide
cuucuuuaccagaugaguu

SEQ ID NO: 94212 - RNA, 19 nt, Artificial Sequence
  Description of Artificial Sequence: Synthetic oligonucleotide
cuuccgacuugggaucccg

SEQ ID NO: 94213 - RNA, 19 nt, Artificial Sequence
  Description of Artificial Sequence: Synthetic oligonucleotide
cuaagcuuuccccaacugu

SEQ ID NO: 94214 - RNA, 19 nt, Artificial Sequence
  Description of Artificial Sequence: Synthetic oligonucleotide
uuaccacaacauacuguuu

SEQ ID NO: 94215 - RNA, 19 nt, Artificial Sequence
  Description of Artificial Sequence: Synthetic oligonucleotide
cugaaaagccugcgguauc

SEQ ID NO: 94216 - RNA, 19 nt, Artificial Sequence
  Description of Artificial Sequence: Synthetic oligonucleotide
cucauaggguaaucgaacu

SEQ ID NO: 94217 - RNA, 19 nt, Artificial Sequence
  Description of Artificial Sequence: Synthetic oligonucleotide
cuucaagugacaucacuau

SEQ ID NO: 94218 - RNA, 19 nt, Artificial Sequence
  Description of Artificial Sequence: Synthetic oligonucleotide
uacuuccgacuugggaucc

SEQ ID NO: 94219 - RNA, 19 nt, Artificial Sequence
  Description of Artificial Sequence: Synthetic oligonucleotide
aucaugacgacaggcguuu

SEQ ID NO: 94220 - RNA, 19 nt, Artificial Sequence
  Description of Artificial Sequence: Synthetic oligonucleotide
gacaggcguuuucuuauaa

SEQ ID NO: 94221 - RNA, 19 nt, Artificial Sequence
  Description of Artificial Sequence: Synthetic oligonucleotide
cuaucaugacgacaggcgu

SEQ ID NO: 94222 - RNA, 19 nt, Artificial Sequence
  Description of Artificial Sequence: Synthetic oligonucleotide
gcgguaucaaagaaacagc

SEQ ID NO: 94223 - RNA, 19 nt, Artificial Sequence
  Description of Artificial Sequence: Synthetic oligonucleotide
ugcacgcaacugcucaaua

SEQ ID NO: 94224 - RNA, 19 nt, Artificial Sequence
  Description of Artificial Sequence: Synthetic oligonucleotide
agcauaucucuugcugaug

SEQ ID NO: 94225 - RNA, 19 nt, Artificial Sequence
  Description of Artificial Sequence: Synthetic oligonucleotide
  modified_base (2)..(2): a, c, u, g, unknown or other
cnuaaccaaagcaucuaau

SEQ ID NO: 94226 - RNA, 19 nt, Artificial Sequence
  Description of Artificial Sequence: Synthetic oligonucleotide
acuuccgacuugggauccc

SEQ ID NO: 94227 - RNA, 19 nt, Artificial Sequence
  Description of Artificial Sequence: Synthetic oligonucleotide
ccguucaguacugauauuc

SEQ ID NO: 94228 - RNA, 19 nt, Artificial Sequence
  Description of Artificial Sequence: Synthetic oligonucleotide
uugaauccgaaagguccaa

SEQ ID NO: 94229 - RNA, 19 nt, Artificial Sequence
  Description of Artificial Sequence: Synthetic oligonucleotide
gcacucauaggguaaucga

SEQ ID NO: 94230 - RNA, 19 nt, Artificial Sequence
  Description of Artificial Sequence: Synthetic oligonucleotide
gcuaagcuuuccccaacug

SEQ ID NO: 94231 - RNA, 19 nt, Artificial Sequence
  Description of Artificial Sequence: Synthetic oligonucleotide
aagccggcuaacaguguga

SEQ ID NO: 94232 - RNA, 19 nt, Artificial Sequence
  Description of Artificial Sequence: Synthetic oligonucleotide
uuccucggcgguggguacg

SEQ ID NO: 94233 - RNA, 19 nt, Artificial Sequence
  Description of Artificial Sequence: Synthetic oligonucleotide
ccagaugguggguucuuag

SEQ ID NO: 94234 - RNA, 19 nt, Artificial Sequence
  Description of Artificial Sequence: Synthetic oligonucleotide
guaggcaaacccgcaagaa

SEQ ID NO: 94235 - RNA, 19 nt, Artificial Sequence
  Description of Artificial Sequence: Synthetic oligonucleotide
gaccacuuuccggaacgac

SEQ ID NO: 94236 - RNA, 19 nt, Artificial Sequence
  Description of Artificial Sequence: Synthetic oligonucleotide
aucuugcguauuagcuuuc

SEQ ID NO: 94237 - RNA, 19 nt, Artificial Sequence
  Description of Artificial Sequence: Synthetic oligonucleotide
agccugcgguaucaaagaa

SEQ ID NO: 94238 - RNA, 19 nt, Artificial Sequence
  Description of Artificial Sequence: Synthetic oligonucleotide
caggguccguucaguacug

SEQ ID NO: 94239 - RNA, 19 nt, Artificial Sequence
  Description of Artificial Sequence: Synthetic oligonucleotide
gcuucaagugacaucacua

SEQ ID NO: 94240 - RNA, 19 nt, Artificial Sequence
  Description of Artificial Sequence: Synthetic oligonucleotide
cuguucuaucaugacgaca

SEQ ID NO: 94241 - RNA, 19 nt, Artificial Sequence
  Description of Artificial Sequence: Synthetic oligonucleotide
uacuuugcacggggaaauc

SEQ ID NO: 94242 - RNA, 19 nt, Artificial Sequence
  Description of Artificial Sequence: Synthetic oligonucleotide
guucaguacugauauucuu

SEQ ID NO: 94243 - RNA, 19 nt, Artificial Sequence
  Description of Artificial Sequence: Synthetic oligonucleotide
aggcacucauaggguaauc

SEQ ID NO: 94244 - RNA, 19 nt, Artificial Sequence
  Description of Artificial Sequence: Synthetic oligonucleotide
ccggcuaacagugugaucu

SEQ ID NO: 94245 - RNA, 19 nt, Artificial Sequence
  Description of Artificial Sequence: Synthetic oligonucleotide
acucucgcauuugccccuc

SEQ ID NO: 94246 - RNA, 19 nt, Artificial Sequence
  Description of Artificial Sequence: Synthetic oligonucleotide
uccucggcgguggguacgc

SEQ ID NO: 94247 - RNA, 19 nt, Artificial Sequence
  Description of Artificial Sequence: Synthetic oligonucleotide
ggguaaucgaacucccacu

SEQ ID NO: 94248 - RNA, 19 nt, Artificial Sequence
  Description of Artificial Sequence: Synthetic oligonucleotide
ucguaaccccgcagcggaa

SEQ ID NO: 94249 - RNA, 19 nt, Artificial Sequence
  Description of Artificial Sequence: Synthetic oligonucleotide
gcgguggguacgcagccgc

SEQ ID NO: 94250 - RNA, 19 nt, Artificial Sequence
  Description of Artificial Sequence: Synthetic oligonucleotide
accgacuuccucggcggug

SEQ ID NO: 94251 - RNA, 19 nt, Artificial Sequence
  Description of Artificial Sequence: Synthetic oligonucleotide
cggaacgacugauuugcag

SEQ ID NO: 94252 - RNA, 19 nt, Artificial Sequence
  Description of Artificial Sequence: Synthetic oligonucleotide
cugcgguaucaaagaaaca

SEQ ID NO: 94253 - RNA, 19 nt, Artificial Sequence
  Description of Artificial Sequence: Synthetic oligonucleotide
aagcccacugacacacauu

SEQ ID NO: 94254 - RNA, 19 nt, Artificial Sequence
  Description of Artificial Sequence: Synthetic oligonucleotide
agccggcuaacagugugau

SEQ ID NO: 94255 - RNA, 19 nt, Artificial Sequence
  Description of Artificial Sequence: Synthetic oligonucleotide
gaucccggcagcagguugu

SEQ ID NO: 94256 - RNA, 19 nt, Artificial Sequence
  Description of Artificial Sequence: Synthetic oligonucleotide
  modified_base (3)..(3): a, c, u, g, unknown or other
  modified_base (17)..(17): a, c, u, g, unknown or other
gcnggaaauccaaaucnua

SEQ ID NO: 94257 - RNA, 19 nt, Artificial Sequence
  Description of Artificial Sequence: Synthetic oligonucleotide
gguggguacgcagccgccc

SEQ ID NO: 94258 - RNA, 19 nt, Artificial Sequence
  Description of Artificial Sequence: Synthetic oligonucleotide
ccgacuuccucggcggugg

SEQ ID NO: 94259 - RNA, 19 nt, Artificial Sequence
  Description of Artificial Sequence: Synthetic oligonucleotide
ccuaaaacccacugugggu

SEQ ID NO: 94260 - RNA, 19 nt, Artificial Sequence
  Description of Artificial Sequence: Synthetic oligonucleotide
gguuaccggucggacauga

SEQ ID NO: 94261 - RNA, 19 nt, Artificial Sequence
  Description of Artificial Sequence: Synthetic oligonucleotide
cacuuuccggaacgacuga

SEQ ID NO: 94262 - RNA, 19 nt, Artificial Sequence
  Description of Artificial Sequence: Synthetic oligonucleotide
cuuuccggaacgacugauu

SEQ ID NO: 94263 - RNA, 19 nt, Artificial Sequence
  Description of Artificial Sequence: Synthetic oligonucleotide
gucuuguaacucucgcauu

SEQ ID NO: 94264 - RNA, 19 nt, Artificial Sequence
  Description of Artificial Sequence: Synthetic oligonucleotide
cgcagcggaaagcaaguuc

SEQ ID NO: 94265 - RNA, 19 nt, Artificial Sequence
  Description of Artificial Sequence: Synthetic oligonucleotide
ggcaaccuuaagauuauuu

SEQ ID NO: 94266 - RNA, 19 nt, Artificial Sequence
  Description of Artificial Sequence: Synthetic oligonucleotide
ccaauugcgcuugcauguc

SEQ ID NO: 94267 - RNA, 19 nt, Artificial Sequence
  Description of Artificial Sequence: Synthetic oligonucleotide
cagucgacaugaugcugcu

SEQ ID NO: 94268 - RNA, 19 nt, Artificial Sequence
  Description of Artificial Sequence: Synthetic oligonucleotide
ccuguaggcaaacccgcaa

SEQ ID NO: 94269 - RNA, 19 nt, Artificial Sequence
  Description of Artificial Sequence: Synthetic oligonucleotide
gccugcgguaucaaagaaa

SEQ ID NO: 94270 - RNA, 19 nt, Artificial Sequence
  Description of Artificial Sequence: Synthetic oligonucleotide
cuugcguauuagcuuucuu

SEQ ID NO: 94271 - RNA, 19 nt, Artificial Sequence
  Description of Artificial Sequence: Synthetic oligonucleotide
aggguccguucaguacuga

SEQ ID NO: 94272 - RNA, 19 nt, Artificial Sequence
  Description of Artificial Sequence: Synthetic oligonucleotide
gccguuuauuuuaucugcu

SEQ ID NO: 94273 - RNA, 19 nt, Artificial Sequence
  Description of Artificial Sequence: Synthetic oligonucleotide
cucgcauuugccccucauu

SEQ ID NO: 94274 - RNA, 19 nt, Artificial Sequence
  Description of Artificial Sequence: Synthetic oligonucleotide
aggcaaccuuaagauuauu

SEQ ID NO: 94275 - RNA, 19 nt, Artificial Sequence
  Description of Artificial Sequence: Synthetic oligonucleotide
guuaccggucggacaugaa

SEQ ID NO: 94276 - RNA, 19 nt, Artificial Sequence
  Description of Artificial Sequence: Synthetic oligonucleotide
cccagucgacaugaugcug

SEQ ID NO: 94277 - RNA, 19 nt, Artificial Sequence
  Description of Artificial Sequence: Synthetic oligonucleotide
cguucaguacugauauucu

SEQ ID NO: 94278 - RNA, 19 nt, Artificial Sequence
  Description of Artificial Sequence: Synthetic oligonucleotide
cagaugaguuacccauuuu

SEQ ID NO: 94279 - RNA, 19 nt, Artificial Sequence
  Description of Artificial Sequence: Synthetic oligonucleotide
ggguccguucaguacugau

SEQ ID NO: 94280 - RNA, 19 nt, Artificial Sequence
  Description of Artificial Sequence: Synthetic oligonucleotide
cgcccggcagacgagccgg

SEQ ID NO: 94281 - RNA, 19 nt, Artificial Sequence
  Description of Artificial Sequence: Synthetic oligonucleotide
ccuuuaccuggguuuuaua

SEQ ID NO: 94282 - RNA, 19 nt, Artificial Sequence
  Description of Artificial Sequence: Synthetic oligonucleotide
ggguuaccggucggacaug

SEQ ID NO: 94283 - RNA, 19 nt, Artificial Sequence
  Description of Artificial Sequence: Synthetic oligonucleotide
ggacuggauuguuccuuau

SEQ ID NO: 94284 - RNA, 19 nt, Artificial Sequence
  Description of Artificial Sequence: Synthetic oligonucleotide
gcggacaaagccagauggu

SEQ ID NO: 94285 - RNA, 19 nt, Artificial Sequence
  Description of Artificial Sequence: Synthetic oligonucleotide
cccgcagcggaaagcaagu

SEQ ID NO: 94286 - RNA, 19 nt, Artificial Sequence
  Description of Artificial Sequence: Synthetic oligonucleotide
ccccagucgacaugaugcu

SEQ ID NO: 94287 - RNA, 19 nt, Artificial Sequence
  Description of Artificial Sequence: Synthetic oligonucleotide
gugaucccuguggcacuua

SEQ ID NO: 94288 - RNA, 19 nt, Artificial Sequence
  Description of Artificial Sequence: Synthetic oligonucleotide
caccgacuuccucggcggu

SEQ ID NO: 94289 - RNA, 19 nt, Artificial Sequence
  Description of Artificial Sequence: Synthetic oligonucleotide
cguaaccccgcagcggaaa

SEQ ID NO: 94290 - RNA, 19 nt, Artificial Sequence
  Description of Artificial Sequence: Synthetic oligonucleotide
cgacaggcguuuucuuaua

SEQ ID NO: 94291 - RNA, 19 nt, Artificial Sequence
  Description of Artificial Sequence: Synthetic oligonucleotide
cggggaaaucaaguccucu

SEQ ID NO: 94292 - RNA, 19 nt, Artificial Sequence
  Description of Artificial Sequence: Synthetic oligonucleotide
ccucggcgguggguacgca

SEQ ID NO: 94293 - RNA, 19 nt, Artificial Sequence
  Description of Artificial Sequence: Synthetic oligonucleotide
aaaaccuugaaguuagaag

SEQ ID NO: 94294 - RNA, 19 nt, Artificial Sequence
  Description of Artificial Sequence: Synthetic oligonucleotide
ucucuuaucaacaugcacc

SEQ ID NO: 94295 - RNA, 19 nt, Artificial Sequence
  Description of Artificial Sequence: Synthetic oligonucleotide
ucccuauaaaauaugacgg

SEQ ID NO: 94296 - RNA, 19 nt, Artificial Sequence
  Description of Artificial Sequence: Synthetic oligonucleotide
aucccuauaaaauaugacg

SEQ ID NO: 94297 - RNA, 19 nt, Artificial Sequence
  Description of Artificial Sequence: Synthetic oligonucleotide
uuuacuagcggcuaugugc

SEQ ID NO: 94298 - RNA, 19 nt, Artificial Sequence
  Description of Artificial Sequence: Synthetic oligonucleotide
auagcuuaaguacaguugg

SEQ ID NO: 94299 - RNA, 19 nt, Artificial Sequence
  Description of Artificial Sequence: Synthetic oligonucleotide
uguauuugcaugucgaucc

SEQ ID NO: 94300 - RNA, 19 nt, Artificial Sequence
  Description of Artificial Sequence: Synthetic oligonucleotide
uuauuaacgagcaaauaca

SEQ ID NO: 94301 - RNA, 19 nt, Artificial Sequence
  Description of Artificial Sequence: Synthetic oligonucleotide
uguucauuguuguaaacag

SEQ ID NO: 94302 - RNA, 19 nt, Artificial Sequence
  Description of Artificial Sequence: Synthetic oligonucleotide
uguucuaucccuauaaaau

SEQ ID NO: 94303 - RNA, 19 nt, Artificial Sequence
  Description of Artificial Sequence: Synthetic oligonucleotide
uauggagucucacugagga

SEQ ID NO: 94304 - RNA, 19 nt, Artificial Sequence
  Description of Artificial Sequence: Synthetic oligonucleotide
gaaguagugaaccaucuac

SEQ ID NO: 94305 - RNA, 19 nt, Artificial Sequence
  Description of Artificial Sequence: Synthetic oligonucleotide
aguuguauuuagcagagca

SEQ ID NO: 94306 - RNA, 19 nt, Artificial Sequence
  Description of Artificial Sequence: Synthetic oligonucleotide
uacugugcgaaucaagucc

SEQ ID NO: 94307 - RNA, 19 nt, Artificial Sequence
  Description of Artificial Sequence: Synthetic oligonucleotide
ucaagagucaacacaguug

SEQ ID NO: 94308 - RNA, 19 nt, Artificial Sequence
  Description of Artificial Sequence: Synthetic oligonucleotide
cuacuugugauacugugcg

SEQ ID NO: 94309 - RNA, 19 nt, Artificial Sequence
  Description of Artificial Sequence: Synthetic oligonucleotide
acagaagauucauucauuc

SEQ ID NO: 94310 - RNA, 19 nt, Artificial Sequence
  Description of Artificial Sequence: Synthetic oligonucleotide
uucuagaagacucaaacuu

SEQ ID NO: 94311 - RNA, 19 nt, Artificial Sequence
  Description of Artificial Sequence: Synthetic oligonucleotide
auaaucggauuguauuugc

SEQ ID NO: 94312 - RNA, 19 nt, Artificial Sequence
  Description of Artificial Sequence: Synthetic oligonucleotide
guacauaugaccauagugc

SEQ ID NO: 94313 - RNA, 19 nt, Artificial Sequence
  Description of Artificial Sequence: Synthetic oligonucleotide
cagagaacccuuauuaacg

SEQ ID NO: 94314 - RNA, 19 nt, Artificial Sequence
  Description of Artificial Sequence: Synthetic oligonucleotide
aaauaaucggauuguauuu

SEQ ID NO: 94315 - RNA, 19 nt, Artificial Sequence
  Description of Artificial Sequence: Synthetic oligonucleotide
agcuuugaaguacauguac

SEQ ID NO: 94316 - RNA, 19 nt, Artificial Sequence
  Description of Artificial Sequence: Synthetic oligonucleotide
accguuuugauaaaauggc

SEQ ID NO: 94317 - RNA, 19 nt, Artificial Sequence
  Description of Artificial Sequence: Synthetic oligonucleotide
aguuacacuacagaacuac

SEQ ID NO: 94318 - RNA, 19 nt, Artificial Sequence
  Description of Artificial Sequence: Synthetic oligonucleotide
uauuccauauuaugggcag

SEQ ID NO: 94319 - RNA, 19 nt, Artificial Sequence
  Description of Artificial Sequence: Synthetic oligonucleotide
ucauuauucacaucugagu

SEQ ID NO: 94320 - RNA, 19 nt, Artificial Sequence
  Description of Artificial Sequence: Synthetic oligonucleotide
aauaaucggauuguauuug

SEQ ID NO: 94321 - RNA, 19 nt, Artificial Sequence
  Description of Artificial Sequence: Synthetic oligonucleotide
ucuaaucacaaaccugcag

SEQ ID NO: 94322 - RNA, 19 nt, Artificial Sequence
  Description of Artificial Sequence: Synthetic oligonucleotide
ugaaucauguggcaccaag

SEQ ID NO: 94323 - RNA, 19 nt, Artificial Sequence
  Description of Artificial Sequence: Synthetic oligonucleotide
aaucaaguccauuggccag

SEQ ID NO: 94324 - RNA, 19 nt, Artificial Sequence
  Description of Artificial Sequence: Synthetic oligonucleotide
auauugauugggcuguauc

SEQ ID NO: 94325 - RNA, 19 nt, Artificial Sequence
  Description of Artificial Sequence: Synthetic oligonucleotide
aaaauggcaagcugugaca

SEQ ID NO: 94326 - RNA, 19 nt, Artificial Sequence
  Description of Artificial Sequence: Synthetic oligonucleotide
acucucgucauauucacug

SEQ ID NO: 94327 - RNA, 19 nt, Artificial Sequence
  Description of Artificial Sequence: Synthetic oligonucleotide
uguuugaaagcugccaggg

SEQ ID NO: 94328 - RNA, 19 nt, Artificial Sequence
  Description of Artificial Sequence: Synthetic oligonucleotide
ugaucuuagugucaucuga

SEQ ID NO: 94329 - RNA, 19 nt, Artificial Sequence
  Description of Artificial Sequence: Synthetic oligonucleotide
agacgaaaccugucaaugc

SEQ ID NO: 94330 - RNA, 19 nt, Artificial Sequence
  Description of Artificial Sequence: Synthetic oligonucleotide
cuugcauggcucuugcucg

SEQ ID NO: 94331 - RNA, 19 nt, Artificial Sequence
  Description of Artificial Sequence: Synthetic oligonucleotide
uguccgaaaucaaugaauc

SEQ ID NO: 94332 - RNA, 19 nt, Artificial Sequence
  Description of Artificial Sequence: Synthetic oligonucleotide
agaacccuuauuaacgagc

SEQ ID NO: 94333 - RNA, 19 nt, Artificial Sequence
  Description of Artificial Sequence: Synthetic oligonucleotide
cauagcuuaaguacaguug

SEQ ID NO: 94334 - RNA, 19 nt, Artificial Sequence
  Description of Artificial Sequence: Synthetic oligonucleotide
aucuacuuaaaccaacccu

SEQ ID NO: 94335 - RNA, 19 nt, Artificial Sequence
  Description of Artificial Sequence: Synthetic oligonucleotide
uuacuagcggcuaugugca

SEQ ID NO: 94336 - RNA, 19 nt, Artificial Sequence
  Description of Artificial Sequence: Synthetic oligonucleotide
ucggauugugaucuuagug

SEQ ID NO: 94337 - RNA, 19 nt, Artificial Sequence
  Description of Artificial Sequence: Synthetic oligonucleotide
gacgcucucaaacucuugg

SEQ ID NO: 94338 - RNA, 19 nt, Artificial Sequence
  Description of Artificial Sequence: Synthetic oligonucleotide
gaaagggucucauucaguc

SEQ ID NO: 94339 - RNA, 19 nt, Artificial Sequence
  Description of Artificial Sequence: Synthetic oligonucleotide
ucuaucccuauaaaauaug

SEQ ID NO: 94340 - RNA, 19 nt, Artificial Sequence
  Description of Artificial Sequence: Synthetic oligonucleotide
uuaggcuaguuuuacuagc

SEQ ID NO: 94341 - RNA, 19 nt, Artificial Sequence
  Description of Artificial Sequence: Synthetic oligonucleotide
ucugauuggugaagggcgg

SEQ ID NO: 94342 - RNA, 19 nt, Artificial Sequence
  Description of Artificial Sequence: Synthetic oligonucleotide
gucucauucagucggacgc

SEQ ID NO: 94343 - RNA, 19 nt, Artificial Sequence
  Description of Artificial Sequence: Synthetic oligonucleotide
gagugaaggagugagacac

SEQ ID NO: 94344 - RNA, 19 nt, Artificial Sequence
  Description of Artificial Sequence: Synthetic oligonucleotide
uguuacacgauguccaguc

SEQ ID NO: 94345 - RNA, 19 nt, Artificial Sequence
  Description of Artificial Sequence: Synthetic oligonucleotide
ugacuaaugagaggcaaag

SEQ ID NO: 94346 - RNA, 19 nt, Artificial Sequence
  Description of Artificial Sequence: Synthetic oligonucleotide
uaucccuauaaaauaugac

SEQ ID NO: 94347 - RNA, 19 nt, Artificial Sequence
  Description of Artificial Sequence: Synthetic oligonucleotide
gggaaacagauauugauug

SEQ ID NO: 94348 - RNA, 19 nt, Artificial Sequence
  Description of Artificial Sequence: Synthetic oligonucleotide
auggauaucaaggacagaa

SEQ ID NO: 94349 - RNA, 19 nt, Artificial Sequence
  Description of Artificial Sequence: Synthetic oligonucleotide
agcuaagaauaucacuguc

SEQ ID NO: 94350 - RNA, 19 nt, Artificial Sequence
  Description of Artificial Sequence: Synthetic oligonucleotide
ucgauuauccacagaggug

SEQ ID NO: 94351 - RNA, 19 nt, Artificial Sequence
  Description of Artificial Sequence: Synthetic oligonucleotide
uauuaugggcagaugguuc

SEQ ID NO: 94352 - RNA, 19 nt, Artificial Sequence
  Description of Artificial Sequence: Synthetic oligonucleotide
cuuccuuagacgaaaccug

SEQ ID NO: 94353 - RNA, 19 nt, Artificial Sequence
  Description of Artificial Sequence: Synthetic oligonucleotide
gaugguuccccaaaguuac

SEQ ID NO: 94354 - RNA, 19 nt, Artificial Sequence
  Description of Artificial Sequence: Synthetic oligonucleotide
augccuuuagcaaacacag

SEQ ID NO: 94355 - RNA, 19 nt, Artificial Sequence
  Description of Artificial Sequence: Synthetic oligonucleotide
auccuauggagucucacug

SEQ ID NO: 94356 - RNA, 19 nt, Artificial Sequence
  Description of Artificial Sequence: Synthetic oligonucleotide
ccauauuaugggcagaugg

SEQ ID NO: 94357 - RNA, 19 nt, Artificial Sequence
  Description of Artificial Sequence: Synthetic oligonucleotide
ucuucuacuacuugugaua

SEQ ID NO: 94358 - RNA, 19 nt, Artificial Sequence
  Description of Artificial Sequence: Synthetic oligonucleotide
uuguccgaaaucaaugaau

SEQ ID NO: 94359 - RNA, 19 nt, Artificial Sequence
  Description of Artificial Sequence: Synthetic oligonucleotide
uagacgaaaccugucaaug

SEQ ID NO: 94360 - RNA, 19 nt, Artificial Sequence
  Description of Artificial Sequence: Synthetic oligonucleotide
gaaaagacugaagcuacug

SEQ ID NO: 94361 - RNA, 19 nt, Artificial Sequence
  Description of Artificial Sequence: Synthetic oligonucleotide
aacacagcgucuaacagaa

SEQ ID NO: 94362 - RNA, 19 nt, Artificial Sequence
  Description of Artificial Sequence: Synthetic oligonucleotide
gaggggaguauguuacacg

SEQ ID NO: 94363 - RNA, 19 nt, Artificial Sequence
  Description of Artificial Sequence: Synthetic oligonucleotide
ugggacuuuacaagcauuc

SEQ ID NO: 94364 - RNA, 19 nt, Artificial Sequence
  Description of Artificial Sequence: Synthetic oligonucleotide
uuuggaauaugaucccggu

SEQ ID NO: 94365 - RNA, 19 nt, Artificial Sequence
  Description of Artificial Sequence: Synthetic oligonucleotide
cuuugcacagcuuuuauua

SEQ ID NO: 94366 - RNA, 19 nt, Artificial Sequence
  Description of Artificial Sequence: Synthetic oligonucleotide
uguccggcuaaaauggcac

SEQ ID NO: 94367 - RNA, 19 nt, Artificial Sequence
  Description of Artificial Sequence: Synthetic oligonucleotide
uuuuacuagcggcuaugug

SEQ ID NO: 94368 - RNA, 19 nt, Artificial Sequence
  Description of Artificial Sequence: Synthetic oligonucleotide
ugcgaggggaguauguuac

SEQ ID NO: 94369 - RNA, 19 nt, Artificial Sequence
  Description of Artificial Sequence: Synthetic oligonucleotide
uuuguccgaaaucaaugaa

SEQ ID NO: 94370 - RNA, 19 nt, Artificial Sequence
  Description of Artificial Sequence: Synthetic oligonucleotide
uggagcuaagaauaucacu

SEQ ID NO: 94371 - RNA, 19 nt, Artificial Sequence
  Description of Artificial Sequence: Synthetic oligonucleotide
aggggaguauguuacacga

SEQ ID NO: 94372 - RNA, 19 nt, Artificial Sequence
  Description of Artificial Sequence: Synthetic oligonucleotide
uacuagaaucaccuccagc

SEQ ID NO: 94373 - RNA, 19 nt, Artificial Sequence
  Description of Artificial Sequence: Synthetic oligonucleotide
aggccaaacauucagggua

SEQ ID NO: 94374 - RNA, 19 nt, Artificial Sequence
  Description of Artificial Sequence: Synthetic oligonucleotide
cugagcguucuucagacug

SEQ ID NO: 94375 - RNA, 19 nt, Artificial Sequence
  Description of Artificial Sequence: Synthetic oligonucleotide
uguaucacuaaaguucuua

SEQ ID NO: 94376 - RNA, 19 nt, Artificial Sequence
  Description of Artificial Sequence: Synthetic oligonucleotide
gacucaauauucucgaagu

SEQ ID NO: 94377 - RNA, 19 nt, Artificial Sequence
  Description of Artificial Sequence: Synthetic oligonucleotide
aaguagugaaccaucuacu

SEQ ID NO: 94378 - RNA, 19 nt, Artificial Sequence
  Description of Artificial Sequence: Synthetic oligonucleotide
acagucaugccuuuagcaa

SEQ ID NO: 94379 - RNA, 19 nt, Artificial Sequence
  Description of Artificial Sequence: Synthetic oligonucleotide
acuggagcuaagaauauca

SEQ ID NO: 94380 - RNA, 19 nt, Artificial Sequence
  Description of Artificial Sequence: Synthetic oligonucleotide
aaccauguccggcuaaaau

SEQ ID NO: 94381 - RNA, 19 nt, Artificial Sequence
  Description of Artificial Sequence: Synthetic oligonucleotide
cucguugacuaagagcugg

SEQ ID NO: 94382 - RNA, 19 nt, Artificial Sequence
  Description of Artificial Sequence: Synthetic oligonucleotide
caccaagucuacaccaagg

SEQ ID NO: 94383 - RNA, 19 nt, Artificial Sequence
  Description of Artificial Sequence: Synthetic oligonucleotide
accauagugcacaacauga

SEQ ID NO: 94384 - RNA, 19 nt, Artificial Sequence
  Description of Artificial Sequence: Synthetic oligonucleotide
ugcaaugaaucauguggca

SEQ ID NO: 94385 - RNA, 19 nt, Artificial Sequence
  Description of Artificial Sequence: Synthetic oligonucleotide
acauuacuagaaucaccuc

SEQ ID NO: 94386 - RNA, 19 nt, Artificial Sequence
  Description of Artificial Sequence: Synthetic oligonucleotide
cauaugaccauagugcaca

SEQ ID NO: 94387 - RNA, 19 nt, Artificial Sequence
  Description of Artificial Sequence: Synthetic oligonucleotide
gucugcguugcacaaagug

SEQ ID NO: 94388 - RNA, 19 nt, Artificial Sequence
  Description of Artificial Sequence: Synthetic oligonucleotide
aguuuauguagaauugugu

SEQ ID NO: 94389 - RNA, 19 nt, Artificial Sequence
  Description of Artificial Sequence: Synthetic oligonucleotide
cuaucccuauaaaauauga

SEQ ID NO: 94390 - RNA, 19 nt, Artificial Sequence
  Description of Artificial Sequence: Synthetic oligonucleotide
uuacuagaaucaccuccag

SEQ ID NO: 94391 - RNA, 19 nt, Artificial Sequence
  Description of Artificial Sequence: Synthetic oligonucleotide
ugcuggaaauauuaauauc

SEQ ID NO: 94392 - RNA, 19 nt, Artificial Sequence
  Description of Artificial Sequence: Synthetic oligonucleotide
uucuaaucacaaaccugca

SEQ ID NO: 94393 - RNA, 19 nt, Artificial Sequence
  Description of Artificial Sequence: Synthetic oligonucleotide
aggucuaagccacacugcu

SEQ ID NO: 94394 - RNA, 19 nt, Artificial Sequence
  Description of Artificial Sequence: Synthetic oligonucleotide
gagaacccuuauuaacgag

SEQ ID NO: 94395 - RNA, 19 nt, Artificial Sequence
  Description of Artificial Sequence: Synthetic oligonucleotide
agggcgguccaaucagugc

SEQ ID NO: 94396 - RNA, 19 nt, Artificial Sequence
  Description of Artificial Sequence: Synthetic oligonucleotide
aguguacacaaauguacau

SEQ ID NO: 94397 - RNA, 19 nt, Artificial Sequence
  Description of Artificial Sequence: Synthetic oligonucleotide
aagacgcaggucauuguag

SEQ ID NO: 94398 - RNA, 19 nt, Artificial Sequence
  Description of Artificial Sequence: Synthetic oligonucleotide
gauacugugcgaaucaagu

SEQ ID NO: 94399 - RNA, 19 nt, Artificial Sequence
  Description of Artificial Sequence: Synthetic oligonucleotide
ucucgucauauucacuguc

SEQ ID NO: 94400 - RNA, 19 nt, Artificial Sequence
  Description of Artificial Sequence: Synthetic oligonucleotide
agcguuccagcacuauccg

SEQ ID NO: 94401 - RNA, 19 nt, Artificial Sequence
  Description of Artificial Sequence: Synthetic oligonucleotide
aagguuccccuacccuugg

SEQ ID NO: 94402 - RNA, 19 nt, Artificial Sequence
  Description of Artificial Sequence: Synthetic oligonucleotide
aggcuaguuuuacuagcgg

SEQ ID NO: 94403 - RNA, 19 nt, Artificial Sequence
  Description of Artificial Sequence: Synthetic oligonucleotide
uacacgauguccagucuuc

SEQ ID NO: 94404 - RNA, 19 nt, Artificial Sequence
  Description of Artificial Sequence: Synthetic oligonucleotide
uuguauuugcaugucgauc

SEQ ID NO: 94405 - RNA, 19 nt, Artificial Sequence
  Description of Artificial Sequence: Synthetic oligonucleotide
uggcgccccauccagguag

SEQ ID NO: 94406 - RNA, 19 nt, Artificial Sequence
  Description of Artificial Sequence: Synthetic oligonucleotide
uuaaaccaacccucaggga

SEQ ID NO: 94407 - RNA, 19 nt, Artificial Sequence
  Description of Artificial Sequence: Synthetic oligonucleotide
uuacacgauguccagucuu

SEQ ID NO: 94408 - RNA, 19 nt, Artificial Sequence
  Description of Artificial Sequence: Synthetic oligonucleotide
ucuugcucguugacuaaga

SEQ ID NO: 94409 - RNA, 19 nt, Artificial Sequence
  Description of Artificial Sequence: Synthetic oligonucleotide
aguacauggguagacugcu

SEQ ID NO: 94410 - RNA, 19 nt, Artificial Sequence
  Description of Artificial Sequence: Synthetic oligonucleotide
auaugacggcaccaucauc

SEQ ID NO: 94411 - RNA, 19 nt, Artificial Sequence
  Description of Artificial Sequence: Synthetic oligonucleotide
gaguacauggguagacugc

SEQ ID NO: 94412 - RNA, 19 nt, Artificial Sequence
  Description of Artificial Sequence: Synthetic oligonucleotide
gaacccuuauuaacgagca

SEQ ID NO: 94413 - RNA, 19 nt, Artificial Sequence
  Description of Artificial Sequence: Synthetic oligonucleotide
uuacaguacauaugaccau

SEQ ID NO: 94414 - RNA, 19 nt, Artificial Sequence
  Description of Artificial Sequence: Synthetic oligonucleotide
cuacccagaaguagugaac

SEQ ID NO: 94415 - RNA, 19 nt, Artificial Sequence
  Description of Artificial Sequence: Synthetic oligonucleotide
uccuauggagucucacuga

SEQ ID NO: 94416 - RNA, 19 nt, Artificial Sequence
  Description of Artificial Sequence: Synthetic oligonucleotide
uacaguacauaugaccaua

SEQ ID NO: 94417 - RNA, 19 nt, Artificial Sequence
  Description of Artificial Sequence: Synthetic oligonucleotide
uuuggcgccccauccaggu

SEQ ID NO: 94418 - RNA, 19 nt, Artificial Sequence
  Description of Artificial Sequence: Synthetic oligonucleotide
caaacauucaggguagaga

SEQ ID NO: 94419 - RNA, 19 nt, Artificial Sequence
  Description of Artificial Sequence: Synthetic oligonucleotide
aguuuuacuagcggcuaug

SEQ ID NO: 94420 - RNA, 19 nt, Artificial Sequence
  Description of Artificial Sequence: Synthetic oligonucleotide
uacaagcauucuagaagac

SEQ ID NO: 94421 - RNA, 19 nt, Artificial Sequence
  Description of Artificial Sequence: Synthetic oligonucleotide
ugcuguucaaguucucgau

SEQ ID NO: 94422 - RNA, 19 nt, Artificial Sequence
  Description of Artificial Sequence: Synthetic oligonucleotide
caaagaaccauggcaaaca

SEQ ID NO: 94423 - RNA, 19 nt, Artificial Sequence
  Description of Artificial Sequence: Synthetic oligonucleotide
ccgaaaucaaugaaucuac

SEQ ID NO: 94424 - RNA, 19 nt, Artificial Sequence
  Description of Artificial Sequence: Synthetic oligonucleotide
ucguugacuaagagcuggc

SEQ ID NO: 94425 - RNA, 19 nt, Artificial Sequence
  Description of Artificial Sequence: Synthetic oligonucleotide
gacgaaaccugucaaugcu

SEQ ID NO: 94426 - RNA, 19 nt, Artificial Sequence
  Description of Artificial Sequence: Synthetic oligonucleotide
cacagucaugccuuuagca

SEQ ID NO: 94427 - RNA, 19 nt, Artificial Sequence
  Description of Artificial Sequence: Synthetic oligonucleotide
acauccuauggagucucac

SEQ ID NO: 94428 - RNA, 19 nt, Artificial Sequence
  Description of Artificial Sequence: Synthetic oligonucleotide
gaagacgcaggucauugua

SEQ ID NO: 94429 - RNA, 19 nt, Artificial Sequence
  Description of Artificial Sequence: Synthetic oligonucleotide
ugguacuccggucauuauu

SEQ ID NO: 94430 - RNA, 19 nt, Artificial Sequence
  Description of Artificial Sequence: Synthetic oligonucleotide
ugcuuucaagagucaacac

SEQ ID NO: 94431 - RNA, 19 nt, Artificial Sequence
  Description of Artificial Sequence: Synthetic oligonucleotide
gugaucuuagugucaucug

SEQ ID NO: 94432 - RNA, 19 nt, Artificial Sequence
  Description of Artificial Sequence: Synthetic oligonucleotide
cccuauaaaauaugacggc

SEQ ID NO: 94433 - RNA, 19 nt, Artificial Sequence
  Description of Artificial Sequence: Synthetic oligonucleotide
acaguacauaugaccauag

SEQ ID NO: 94434 - RNA, 19 nt, Artificial Sequence
  Description of Artificial Sequence: Synthetic oligonucleotide
agcauccuguuuuaggcua

SEQ ID NO: 94435 - RNA, 19 nt, Artificial Sequence
  Description of Artificial Sequence: Synthetic oligonucleotide
cuacuuaaaccaacccuca

SEQ ID NO: 94436 - RNA, 19 nt, Artificial Sequence
  Description of Artificial Sequence: Synthetic oligonucleotide
agcacuauccgcauggauu

SEQ ID NO: 94437 - RNA, 19 nt, Artificial Sequence
  Description of Artificial Sequence: Synthetic oligonucleotide
auauuaugggcagaugguu

SEQ ID NO: 94438 - RNA, 19 nt, Artificial Sequence
  Description of Artificial Sequence: Synthetic oligonucleotide
cagaagauucauucauuca

SEQ ID NO: 94439 - RNA, 19 nt, Artificial Sequence
  Description of Artificial Sequence: Synthetic oligonucleotide
cucgauuauccacagaggu

SEQ ID NO: 94440 - RNA, 19 nt, Artificial Sequence
  Description of Artificial Sequence: Synthetic oligonucleotide
ggucucauucagucggacg

SEQ ID NO: 94441 - RNA, 19 nt, Artificial Sequence
  Description of Artificial Sequence: Synthetic oligonucleotide
agugcaccuacugggagug

SEQ ID NO: 94442 - RNA, 19 nt, Artificial Sequence
  Description of Artificial Sequence: Synthetic oligonucleotide
cauauuaugggcagauggu

SEQ ID NO: 94443 - RNA, 19 nt, Artificial Sequence
  Description of Artificial Sequence: Synthetic oligonucleotide
uaguuuuacuagcggcuau

SEQ ID NO: 94444 - RNA, 19 nt, Artificial Sequence
  Description of Artificial Sequence: Synthetic oligonucleotide
agucggauugugaucuuag

SEQ ID NO: 94445 - RNA, 19 nt, Artificial Sequence
  Description of Artificial Sequence: Synthetic oligonucleotide
gaggggacucaauauucuc

SEQ ID NO: 94446 - RNA, 19 nt, Artificial Sequence
  Description of Artificial Sequence: Synthetic oligonucleotide
aaaccaacccucagggaaa

SEQ ID NO: 94447 - RNA, 19 nt, Artificial Sequence
  Description of Artificial Sequence: Synthetic oligonucleotide
gagaccuuaggauuccagu

SEQ ID NO: 94448 - RNA, 19 nt, Artificial Sequence
  Description of Artificial Sequence: Synthetic oligonucleotide
ucgacugaacugguacucc

SEQ ID NO: 94449 - RNA, 19 nt, Artificial Sequence
  Description of Artificial Sequence: Synthetic oligonucleotide
cauguccggcuaaaauggc

SEQ ID NO: 94450 - RNA, 19 nt, Artificial Sequence
  Description of Artificial Sequence: Synthetic oligonucleotide
uucagucggacgcucucaa

SEQ ID NO: 94451 - RNA, 19 nt, Artificial Sequence
  Description of Artificial Sequence: Synthetic oligonucleotide
uccuuagacgaaaccuguc

SEQ ID NO: 94452 - RNA, 19 nt, Artificial Sequence
  Description of Artificial Sequence: Synthetic oligonucleotide
caacaugcaccaucaacca

SEQ ID NO: 94453 - RNA, 19 nt, Artificial Sequence
  Description of Artificial Sequence: Synthetic oligonucleotide
agguaauguguguaucaau

SEQ ID NO: 94454 - RNA, 19 nt, Artificial Sequence
  Description of Artificial Sequence: Synthetic oligonucleotide
gaggucuaagccacacugc

SEQ ID NO: 94455 - RNA, 19 nt, Artificial Sequence
  Description of Artificial Sequence: Synthetic oligonucleotide
cauagugcaccuacuggga

SEQ ID NO: 94456 - RNA, 19 nt, Artificial Sequence
  Description of Artificial Sequence: Synthetic oligonucleotide
agcugugacauggacuuca

SEQ ID NO: 94457 - RNA, 19 nt, Artificial Sequence
  Description of Artificial Sequence: Synthetic oligonucleotide
cuacccuuggcaaauucaa

SEQ ID NO: 94458 - RNA, 19 nt, Artificial Sequence
  Description of Artificial Sequence: Synthetic oligonucleotide
agaggaaucugagcgcugu

SEQ ID NO: 94459 - RNA, 19 nt, Artificial Sequence
  Description of Artificial Sequence: Synthetic oligonucleotide
cauaguagcaggcuuugcu

SEQ ID NO: 94460 - RNA, 19 nt, Artificial Sequence
  Description of Artificial Sequence: Synthetic oligonucleotide
gguacuccggucauuauuc

SEQ ID NO: 94461 - RNA, 19 nt, Artificial Sequence
  Description of Artificial Sequence: Synthetic oligonucleotide
ggcuaaaauggcacuaccc

SEQ ID NO: 94462 - RNA, 19 nt, Artificial Sequence
  Description of Artificial Sequence: Synthetic oligonucleotide
uccauauuaugggcagaug

SEQ ID NO: 94463 - RNA, 19 nt, Artificial Sequence
  Description of Artificial Sequence: Synthetic oligonucleotide
auaucacugucgacugaac

SEQ ID NO: 94464 - RNA, 19 nt, Artificial Sequence
  Description of Artificial Sequence: Synthetic oligonucleotide
auaugaucccggugauugu

SEQ ID NO: 94465 - RNA, 19 nt, Artificial Sequence
  Description of Artificial Sequence: Synthetic oligonucleotide
cuggcacacuuuaacucug

SEQ ID NO: 94466 - RNA, 19 nt, Artificial Sequence
  Description of Artificial Sequence: Synthetic oligonucleotide
uuucuuugcgaggggagua

SEQ ID NO: 94467 - RNA, 19 nt, Artificial Sequence
  Description of Artificial Sequence: Synthetic oligonucleotide
agcggcuaugugcacauuu

SEQ ID NO: 94468 - RNA, 19 nt, Artificial Sequence
  Description of Artificial Sequence: Synthetic oligonucleotide
gagcuaagaauaucacugu

SEQ ID NO: 94469 - RNA, 19 nt, Artificial Sequence
  Description of Artificial Sequence: Synthetic oligonucleotide
accuugaaguuagaagaga

SEQ ID NO: 94470 - RNA, 19 nt, Artificial Sequence
  Description of Artificial Sequence: Synthetic oligonucleotide
gcacuauccgcauggauuc

SEQ ID NO: 94471 - RNA, 19 nt, Artificial Sequence
  Description of Artificial Sequence: Synthetic oligonucleotide
ccaagucuacaccaaggcc

SEQ ID NO: 94472 - RNA, 19 nt, Artificial Sequence
  Description of Artificial Sequence: Synthetic oligonucleotide
uuaugggcagaugguuccc

SEQ ID NO: 94473 - RNA, 19 nt, Artificial Sequence
  Description of Artificial Sequence: Synthetic oligonucleotide
gacgcaggucauuguagca

SEQ ID NO: 94474 - RNA, 19 nt, Artificial Sequence
  Description of Artificial Sequence: Synthetic oligonucleotide
ucauugagaggggacucaa

SEQ ID NO: 94475 - RNA, 19 nt, Artificial Sequence
  Description of Artificial Sequence: Synthetic oligonucleotide
ugaaggagugagacacuuu

SEQ ID NO: 94476 - RNA, 19 nt, Artificial Sequence
  Description of Artificial Sequence: Synthetic oligonucleotide
gagguaauguguguaucaa

SEQ ID NO: 94477 - RNA, 19 nt, Artificial Sequence
  Description of Artificial Sequence: Synthetic oligonucleotide
uuaccccaaccauguccgg

SEQ ID NO: 94478 - RNA, 19 nt, Artificial Sequence
  Description of Artificial Sequence: Synthetic oligonucleotide
cagucaugccuuuagcaaa

SEQ ID NO: 94479 - RNA, 19 nt, Artificial Sequence
  Description of Artificial Sequence: Synthetic oligonucleotide
agacucaaacuugaagcaa

SEQ ID NO: 94480 - RNA, 19 nt, Artificial Sequence
  Description of Artificial Sequence: Synthetic oligonucleotide
ucucauucagucggacgcu

SEQ ID NO: 94481 - RNA, 19 nt, Artificial Sequence
  Description of Artificial Sequence: Synthetic oligonucleotide
gccugcugacucuagcacg

SEQ ID NO: 94482 - RNA, 19 nt, Artificial Sequence
  Description of Artificial Sequence: Synthetic oligonucleotide
acgcucucaaacucuuggu

SEQ ID NO: 94483 - RNA, 19 nt, Artificial Sequence
  Description of Artificial Sequence: Synthetic oligonucleotide
acuauccgcauggauucug

SEQ ID NO: 94484 - RNA, 19 nt, Artificial Sequence
  Description of Artificial Sequence: Synthetic oligonucleotide
acgaaaccugucaaugcug

SEQ ID NO: 94485 - RNA, 19 nt, Artificial Sequence
  Description of Artificial Sequence: Synthetic oligonucleotide
ccugcugacucuagcacgc

SEQ ID NO: 94486 - RNA, 19 nt, Artificial Sequence
  Description of Artificial Sequence: Synthetic oligonucleotide
acuagcggcuaugugcaca

SEQ ID NO: 94487 - RNA, 19 nt, Artificial Sequence
  Description of Artificial Sequence: Synthetic oligonucleotide
aggaguacauggguagacu

SEQ ID NO: 94488 - RNA, 19 nt, Artificial Sequence
  Description of Artificial Sequence: Synthetic oligonucleotide
uugcgaggggaguauguua

SEQ ID NO: 94489 - RNA, 19 nt, Artificial Sequence
  Description of Artificial Sequence: Synthetic oligonucleotide
acugguacuccggucauua

SEQ ID NO: 94490 - RNA, 19 nt, Artificial Sequence
  Description of Artificial Sequence: Synthetic oligonucleotide
ugcagccaagagaacucaa

SEQ ID NO: 94491 - RNA, 19 nt, Artificial Sequence
  Description of Artificial Sequence: Synthetic oligonucleotide
uuugcgaggggaguauguu

SEQ ID NO: 94492 - RNA, 19 nt, Artificial Sequence
  Description of Artificial Sequence: Synthetic oligonucleotide
ucuuugcgaggggaguaug

SEQ ID NO: 94493 - RNA, 19 nt, Artificial Sequence
  Description of Artificial Sequence: Synthetic oligonucleotide
aagugucgcugcugugacu

SEQ ID NO: 94494 - RNA, 19 nt, Artificial Sequence
  Description of Artificial Sequence: Synthetic oligonucleotide
auauucacugucaguccca

SEQ ID NO: 94495 - RNA, 19 nt, Artificial Sequence
  Description of Artificial Sequence: Synthetic oligonucleotide
ccuauaaaauaugacggca

SEQ ID NO: 94496 - RNA, 19 nt, Artificial Sequence
  Description of Artificial Sequence: Synthetic oligonucleotide
agguuccccuacccuuggc

SEQ ID NO: 94497 - RNA, 19 nt, Artificial Sequence
  Description of Artificial Sequence: Synthetic oligonucleotide
agcuaugagcauccuguuu

SEQ ID NO: 94498 - RNA, 19 nt, Artificial Sequence
  Description of Artificial Sequence: Synthetic oligonucleotide
aggaccccuuuauuuacau

SEQ ID NO: 94499 - RNA, 19 nt, Artificial Sequence
  Description of Artificial Sequence: Synthetic oligonucleotide
agccccucucauugagagg

SEQ ID NO: 94500 - RNA, 19 nt, Artificial Sequence
  Description of Artificial Sequence: Synthetic oligonucleotide
gcaaugaaucauguggcac

SEQ ID NO: 94501 - RNA, 19 nt, Artificial Sequence
  Description of Artificial Sequence: Synthetic oligonucleotide
ucugagcguucuucagacu

SEQ ID NO: 94502 - RNA, 19 nt, Artificial Sequence
  Description of Artificial Sequence: Synthetic oligonucleotide
gucggacgcucucaaacuc

SEQ ID NO: 94503 - RNA, 19 nt, Artificial Sequence
  Description of Artificial Sequence: Synthetic oligonucleotide
gaaggccuccaccguuuug

SEQ ID NO: 94504 - RNA, 19 nt, Artificial Sequence
  Description of Artificial Sequence: Synthetic oligonucleotide
ugauuggugaagggcgguc

SEQ ID NO: 94505 - RNA, 19 nt, Artificial Sequence
  Description of Artificial Sequence: Synthetic oligonucleotide
cugagcgcugucugcguug

SEQ ID NO: 94506 - RNA, 19 nt, Artificial Sequence
  Description of Artificial Sequence: Synthetic oligonucleotide
gucgacugaacugguacuc

SEQ ID NO: 94507 - RNA, 19 nt, Artificial Sequence
  Description of Artificial Sequence: Synthetic oligonucleotide
uccggcuaaaauggcacua

SEQ ID NO: 94508 - RNA, 19 nt, Artificial Sequence
  Description of Artificial Sequence: Synthetic oligonucleotide
cuauccgcauggauucuga

SEQ ID NO: 94509 - RNA, 19 nt, Artificial Sequence
  Description of Artificial Sequence: Synthetic oligonucleotide
augacuaaugagaggcaaa

SEQ ID NO: 94510 - RNA, 19 nt, Artificial Sequence
  Description of Artificial Sequence: Synthetic oligonucleotide
auucagucggacgcucuca

SEQ ID NO: 94511 - RNA, 19 nt, Artificial Sequence
  Description of Artificial Sequence: Synthetic oligonucleotide
ugacucuagcacgcucugc

SEQ ID NO: 94512 - RNA, 19 nt, Artificial Sequence
  Description of Artificial Sequence: Synthetic oligonucleotide
uucuuugcgaggggaguau

SEQ ID NO: 94513 - RNA, 19 nt, Artificial Sequence
  Description of Artificial Sequence: Synthetic oligonucleotide
guuccccuacccuuggcaa

SEQ ID NO: 94514 - RNA, 19 nt, Artificial Sequence
  Description of Artificial Sequence: Synthetic oligonucleotide
gaggccaaacauucagggu

SEQ ID NO: 94515 - RNA, 19 nt, Artificial Sequence
  Description of Artificial Sequence: Synthetic oligonucleotide
auguccggcuaaaauggca

SEQ ID NO: 94516 - RNA, 19 nt, Artificial Sequence
  Description of Artificial Sequence: Synthetic oligonucleotide
ccuuagacgaaaccuguca

SEQ ID NO: 94517 - RNA, 19 nt, Artificial Sequence
  Description of Artificial Sequence: Synthetic oligonucleotide
ggguagacugcugagcuuc

SEQ ID NO: 94518 - RNA, 19 nt, Artificial Sequence
  Description of Artificial Sequence: Synthetic oligonucleotide
ccaagucaagacaguggcc

SEQ ID NO: 94519 - RNA, 19 nt, Artificial Sequence
  Description of Artificial Sequence: Synthetic oligonucleotide
gagcauccuguuuuaggcu

SEQ ID NO: 94520 - RNA, 19 nt, Artificial Sequence
  Description of Artificial Sequence: Synthetic oligonucleotide
cauccuauggagucucacu

SEQ ID NO: 94521 - RNA, 19 nt, Artificial Sequence
  Description of Artificial Sequence: Synthetic oligonucleotide
ucagucggacgcucucaaa

SEQ ID NO: 94522 - RNA, 19 nt, Artificial Sequence
  Description of Artificial Sequence: Synthetic oligonucleotide
cuaguuuuacuagcggcua

SEQ ID NO: 94523 - RNA, 19 nt, Artificial Sequence
  Description of Artificial Sequence: Synthetic oligonucleotide
cauagugcacaacaugauu

SEQ ID NO: 94524 - RNA, 19 nt, Artificial Sequence
  Description of Artificial Sequence: Synthetic oligonucleotide
guacuccggucauuauuca

SEQ ID NO: 94525 - RNA, 19 nt, Artificial Sequence
  Description of Artificial Sequence: Synthetic oligonucleotide
uagagaccuuaggauucca

SEQ ID NO: 94526 - RNA, 19 nt, Artificial Sequence
  Description of Artificial Sequence: Synthetic oligonucleotide
cucauucagucggacgcuc

SEQ ID NO: 94527 - RNA, 19 nt, Artificial Sequence
  Description of Artificial Sequence: Synthetic oligonucleotide
ccucuuuugauugccgcac

SEQ ID NO: 94528 - RNA, 19 nt, Artificial Sequence
  Description of Artificial Sequence: Synthetic oligonucleotide
cgacugaacugguacuccg

SEQ ID NO: 94529 - RNA, 19 nt, Artificial Sequence
  Description of Artificial Sequence: Synthetic oligonucleotide
ucugcggcguaggggucag

SEQ ID NO: 94530 - RNA, 19 nt, Artificial Sequence
  Description of Artificial Sequence: Synthetic oligonucleotide
ccguuuugauaaaauggca

SEQ ID NO: 94531 - RNA, 19 nt, Artificial Sequence
  Description of Artificial Sequence: Synthetic oligonucleotide
uggguagacugcugagcuu

SEQ ID NO: 94532 - RNA, 19 nt, Artificial Sequence
  Description of Artificial Sequence: Synthetic oligonucleotide
guuuuacuagcggcuaugu

SEQ ID NO: 94533 - RNA, 19 nt, Artificial Sequence
  Description of Artificial Sequence: Synthetic oligonucleotide
guacauggguagacugcug

SEQ ID NO: 94534 - RNA, 19 nt, Artificial Sequence
  Description of Artificial Sequence: Synthetic oligonucleotide
ccauaagugggagucugug

SEQ ID NO: 94535 - RNA, 19 nt, Artificial Sequence
  Description of Artificial Sequence: Synthetic oligonucleotide
cucgcaguucaucaacacu

SEQ ID NO: 94536 - RNA, 19 nt, Artificial Sequence
  Description of Artificial Sequence: Synthetic oligonucleotide
gucgauccagaaguuucca

SEQ ID NO: 94537 - RNA, 19 nt, Artificial Sequence
  Description of Artificial Sequence: Synthetic oligonucleotide
agcacgcucugcaaugaau

SEQ ID NO: 94538 - RNA, 19 nt, Artificial Sequence
  Description of Artificial Sequence: Synthetic oligonucleotide
ggugaagggcgguccaauc

SEQ ID NO: 94539 - RNA, 19 nt, Artificial Sequence
  Description of Artificial Sequence: Synthetic oligonucleotide
guuacacgauguccagucu

SEQ ID NO: 94540 - RNA, 19 nt, Artificial Sequence
  Description of Artificial Sequence: Synthetic oligonucleotide
cuuugcgaggggaguaugu

SEQ ID NO: 94541 - RNA, 19 nt, Artificial Sequence
  Description of Artificial Sequence: Synthetic oligonucleotide
cagauauaaagaggccaaa

SEQ ID NO: 94542 - RNA, 19 nt, Artificial Sequence
  Description of Artificial Sequence: Synthetic oligonucleotide
gcagcguuccagcacuauc

SEQ ID NO: 94543 - RNA, 19 nt, Artificial Sequence
  Description of Artificial Sequence: Synthetic oligonucleotide
cucucauugagaggggacu

SEQ ID NO: 94544 - RNA, 19 nt, Artificial Sequence
  Description of Artificial Sequence: Synthetic oligonucleotide
ccccuuuauuuacaugcug

SEQ ID NO: 94545 - RNA, 19 nt, Artificial Sequence
  Description of Artificial Sequence: Synthetic oligonucleotide
cuagcacgcucugcaauga

SEQ ID NO: 94546 - RNA, 19 nt, Artificial Sequence
  Description of Artificial Sequence: Synthetic oligonucleotide
ggaguauguuacacgaugu

SEQ ID NO: 94547 - RNA, 19 nt, Artificial Sequence
  Description of Artificial Sequence: Synthetic oligonucleotide
gucggauugugaucuuagu

SEQ ID NO: 94548 - RNA, 19 nt, Artificial Sequence
  Description of Artificial Sequence: Synthetic oligonucleotide
gauauugauugggcuguau

SEQ ID NO: 94549 - RNA, 19 nt, Artificial Sequence
  Description of Artificial Sequence: Synthetic oligonucleotide
accuacugggaguggccua

SEQ ID NO: 94550 - RNA, 19 nt, Artificial Sequence
  Description of Artificial Sequence: Synthetic oligonucleotide
cuagcggcuaugugcacau

SEQ ID NO: 94551 - RNA, 19 nt, Artificial Sequence
  Description of Artificial Sequence: Synthetic oligonucleotide
caguacauaugaccauagu

SEQ ID NO: 94552 - RNA, 19 nt, Artificial Sequence
  Description of Artificial Sequence: Synthetic oligonucleotide
gcguuccagcacuauccgc

SEQ ID NO: 94553 - RNA, 19 nt, Artificial Sequence
  Description of Artificial Sequence: Synthetic oligonucleotide
ccggcuaaaauggcacuac

SEQ ID NO: 94554 - RNA, 19 nt, Artificial Sequence
  Description of Artificial Sequence: Synthetic oligonucleotide
gcaagcugugacauggacu

SEQ ID NO: 94555 - RNA, 19 nt, Artificial Sequence
  Description of Artificial Sequence: Synthetic oligonucleotide
cggcuaaaauggcacuacc

SEQ ID NO: 94556 - RNA, 19 nt, Artificial Sequence
  Description of Artificial Sequence: Synthetic oligonucleotide
guagaucuugagugcuuuu

SEQ ID NO: 94557 - RNA, 19 nt, Artificial Sequence
  Description of Artificial Sequence: Synthetic oligonucleotide
gaacucaacaggaccccuu

SEQ ID NO: 94558 - RNA, 19 nt, Artificial Sequence
  Description of Artificial Sequence: Synthetic oligonucleotide
agcagcguuccagcacuau

SEQ ID NO: 94559 - RNA, 19 nt, Artificial Sequence
  Description of Artificial Sequence: Synthetic oligonucleotide
cuacacuggcagucagucu

SEQ ID NO: 94560 - RNA, 19 nt, Artificial Sequence
  Description of Artificial Sequence: Synthetic oligonucleotide
cccuuauuaacgagcaaau

SEQ ID NO: 94561 - RNA, 19 nt, Artificial Sequence
  Description of Artificial Sequence: Synthetic oligonucleotide
gugcaccuacugggagugg

SEQ ID NO: 94562 - RNA, 19 nt, Artificial Sequence
  Description of Artificial Sequence: Synthetic oligonucleotide
cgaggggaguauguuacac

SEQ ID NO: 94563 - RNA, 19 nt, Artificial Sequence
  Description of Artificial Sequence: Synthetic oligonucleotide
cauugagaggggacucaau

SEQ ID NO: 94564 - RNA, 19 nt, Artificial Sequence
  Description of Artificial Sequence: Synthetic oligonucleotide
gggcuguaucacuaaaguu

SEQ ID NO: 94565 - RNA, 19 nt, Artificial Sequence
  Description of Artificial Sequence: Synthetic oligonucleotide
cugaaggccuccaccguuu

SEQ ID NO: 94566 - RNA, 19 nt, Artificial Sequence
  Description of Artificial Sequence: Synthetic oligonucleotide
ccuuauuaacgagcaaaua

SEQ ID NO: 94567 - RNA, 19 nt, Artificial Sequence
  Description of Artificial Sequence: Synthetic oligonucleotide
ggacgcucucaaacucuug

SEQ ID NO: 94568 - RNA, 19 nt, Artificial Sequence
  Description of Artificial Sequence: Synthetic oligonucleotide
cccuacccuuggcaaauuc

SEQ ID NO: 94569 - RNA, 19 nt, Artificial Sequence
  Description of Artificial Sequence: Synthetic oligonucleotide
cagucggauugugaucuua

SEQ ID NO: 94570 - RNA, 19 nt, Artificial Sequence
  Description of Artificial Sequence: Synthetic oligonucleotide
caaccauguccggcuaaaa

SEQ ID NO: 94571 - RNA, 19 nt, Artificial Sequence
  Description of Artificial Sequence: Synthetic oligonucleotide
gcgaggggaguauguuaca

SEQ ID NO: 94572 - RNA, 19 nt, Artificial Sequence
  Description of Artificial Sequence: Synthetic oligonucleotide
ccauagugcacaacaugau

SEQ ID NO: 94573 - RNA, 19 nt, Artificial Sequence
  Description of Artificial Sequence: Synthetic oligonucleotide
cccuucauuugccuuaguu

SEQ ID NO: 94574 - RNA, 19 nt, Artificial Sequence
  Description of Artificial Sequence: Synthetic oligonucleotide
ccauuggccagaggaaucu

SEQ ID NO: 94575 - RNA, 19 nt, Artificial Sequence
  Description of Artificial Sequence: Synthetic oligonucleotide
cugguacuccggucauuau

SEQ ID NO: 94576 - RNA, 19 nt, Artificial Sequence
  Description of Artificial Sequence: Synthetic oligonucleotide
uagcggcuaugugcacauu

SEQ ID NO: 94577 - RNA, 19 nt, Artificial Sequence
  Description of Artificial Sequence: Synthetic oligonucleotide
cacuauccgcauggauucu

SEQ ID NO: 94578 - RNA, 19 nt, Artificial Sequence
  Description of Artificial Sequence: Synthetic oligonucleotide
ccagcacuauccgcaugga

SEQ ID NO: 94579 - RNA, 19 nt, Artificial Sequence
  Description of Artificial Sequence: Synthetic oligonucleotide
cugcggcguaggggucagc

SEQ ID NO: 94580 - RNA, 19 nt, Artificial Sequence
  Description of Artificial Sequence: Synthetic oligonucleotide
ccagucggauugugaucuu

SEQ ID NO: 94581 - RNA, 19 nt, Artificial Sequence
  Description of Artificial Sequence: Synthetic oligonucleotide
ccgcacagucaugccuuua

SEQ ID NO: 94582 - RNA, 19 nt, Artificial Sequence
  Description of Artificial Sequence: Synthetic oligonucleotide
ccccuacccuuggcaaauu

SEQ ID NO: 94583 - RNA, 19 nt, Artificial Sequence
  Description of Artificial Sequence: Synthetic oligonucleotide
aauguauuaaauuagcguc

SEQ ID NO: 94584 - RNA, 19 nt, Artificial Sequence
  Description of Artificial Sequence: Synthetic oligonucleotide
acuuauauaaacuagacug

SEQ ID NO: 94585 - RNA, 19 nt, Artificial Sequence
  Description of Artificial Sequence: Synthetic oligonucleotide
uuaauaagaauuaaccacg

SEQ ID NO: 94586 - RNA, 19 nt, Artificial Sequence
  Description of Artificial Sequence: Synthetic oligonucleotide
aaguuaaccacacaagccc

SEQ ID NO: 94587 - RNA, 19 nt, Artificial Sequence
  Description of Artificial Sequence: Synthetic oligonucleotide
ucaaucuauacuuuaaagg

SEQ ID NO: 94588 - RNA, 19 nt, Artificial Sequence
  Description of Artificial Sequence: Synthetic oligonucleotide
aaucaaucuauacagaacu

SEQ ID NO: 94589 - RNA, 19 nt, Artificial Sequence
  Description of Artificial Sequence: Synthetic oligonucleotide
aaucgguucgcuuaucacc

SEQ ID NO: 94590 - RNA, 19 nt, Artificial Sequence
  Description of Artificial Sequence: Synthetic oligonucleotide
aaaguacuaauccuacccc

SEQ ID NO: 94591 - RNA, 19 nt, Artificial Sequence
  Description of Artificial Sequence: Synthetic oligonucleotide
uaauacguaaguaauuuag

SEQ ID NO: 94592 - RNA, 19 nt, Artificial Sequence
  Description of Artificial Sequence: Synthetic oligonucleotide
uauccuaagaaucaggcca

SEQ ID NO: 94593 - RNA, 19 nt, Artificial Sequence
  Description of Artificial Sequence: Synthetic oligonucleotide
gauacuagcaaucaggaga

SEQ ID NO: 94594 - RNA, 19 nt, Artificial Sequence
  Description of Artificial Sequence: Synthetic oligonucleotide
uuuaccuccucucauacag

SEQ ID NO: 94595 - RNA, 19 nt, Artificial Sequence
  Description of Artificial Sequence: Synthetic oligonucleotide
uuucguacccugaauaugg

SEQ ID NO: 94596 - RNA, 19 nt, Artificial Sequence
  Description of Artificial Sequence: Synthetic oligonucleotide
uguaauguacuuauaaagu

SEQ ID NO: 94597 - RNA, 19 nt, Artificial Sequence
  Description of Artificial Sequence: Synthetic oligonucleotide
uaggauacuagcaaucagg

SEQ ID NO: 94598 - RNA, 19 nt, Artificial Sequence
  Description of Artificial Sequence: Synthetic oligonucleotide
aacccuaaaucauuugugg

SEQ ID NO: 94599 - RNA, 19 nt, Artificial Sequence
  Description of Artificial Sequence: Synthetic oligonucleotide
aucuauacuaacugaaaac

SEQ ID NO: 94600 - RNA, 19 nt, Artificial Sequence
  Description of Artificial Sequence: Synthetic oligonucleotide
guaauauucacacagugca

SEQ ID NO: 94601 - RNA, 19 nt, Artificial Sequence
  Description of Artificial Sequence: Synthetic oligonucleotide
ugaagagacaguacaagcc

SEQ ID NO: 94602 - RNA, 19 nt, Artificial Sequence
  Description of Artificial Sequence: Synthetic oligonucleotide
aauguaugccaauuggugu

SEQ ID NO: 94603 - RNA, 19 nt, Artificial Sequence
  Description of Artificial Sequence: Synthetic oligonucleotide
uaauguaugccaauuggug

SEQ ID NO: 94604 - RNA, 19 nt, Artificial Sequence
  Description of Artificial Sequence: Synthetic oligonucleotide
ucuaaucugccuuuuauac

SEQ ID NO: 94605 - RNA, 19 nt, Artificial Sequence
  Description of Artificial Sequence: Synthetic oligonucleotide
ugcaugauuacuucaugcg

SEQ ID NO: 94606 - RNA, 19 nt, Artificial Sequence
  Description of Artificial Sequence: Synthetic oligonucleotide
augccauaauuucagagac

SEQ ID NO: 94607 - RNA, 19 nt, Artificial Sequence
  Description of Artificial Sequence: Synthetic oligonucleotide
acguaaguaauuuaggacu

SEQ ID NO: 94608 - RNA, 19 nt, Artificial Sequence
  Description of Artificial Sequence: Synthetic oligonucleotide
uugauauauguucaaagaa

SEQ ID NO: 94609 - RNA, 19 nt, Artificial Sequence
  Description of Artificial Sequence: Synthetic oligonucleotide
ucuauacuaacugaaaacu

SEQ ID NO: 94610 - RNA, 19 nt, Artificial Sequence
  Description of Artificial Sequence: Synthetic oligonucleotide
aucaaucuauacuuuaaag

SEQ ID NO: 94611 - RNA, 19 nt, Artificial Sequence
  Description of Artificial Sequence: Synthetic oligonucleotide
cuugacuaggauucuagcg

SEQ ID NO: 94612 - RNA, 19 nt, Artificial Sequence
  Description of Artificial Sequence: Synthetic oligonucleotide
uguauaguguuauaauaca

SEQ ID NO: 94613 - RNA, 19 nt, Artificial Sequence
  Description of Artificial Sequence: Synthetic oligonucleotide
auaaacuaaaucuggacaa

SEQ ID NO: 94614 - RNA, 19 nt, Artificial Sequence
  Description of Artificial Sequence: Synthetic oligonucleotide
agaauggaguaauucaguc

SEQ ID NO: 94615 - RNA, 19 nt, Artificial Sequence
  Description of Artificial Sequence: Synthetic oligonucleotide
aaguaucccauuaggauac

SEQ ID NO: 94616 - RNA, 19 nt, Artificial Sequence
  Description of Artificial Sequence: Synthetic oligonucleotide
aaaucgguucgcuuaucac

SEQ ID NO: 94617 - RNA, 19 nt, Artificial Sequence
  Description of Artificial Sequence: Synthetic oligonucleotide
auuagcgucaacucauuag

SEQ ID NO: 94618 - RNA, 19 nt, Artificial Sequence
  Description of Artificial Sequence: Synthetic oligonucleotide
ugugacaagaauuuucuau

SEQ ID NO: 94619 - RNA, 19 nt, Artificial Sequence
  Description of Artificial Sequence: Synthetic oligonucleotide
uuagcgucaacucauuagu

SEQ ID NO: 94620 - RNA, 19 nt, Artificial Sequence
  Description of Artificial Sequence: Synthetic oligonucleotide
agaaugagucauaaaaugg

SEQ ID NO: 94621 - RNA, 19 nt, Artificial Sequence
  Description of Artificial Sequence: Synthetic oligonucleotide
uuuuguagaauuccaguaa

SEQ ID NO: 94622 - RNA, 19 nt, Artificial Sequence
  Description of Artificial Sequence: Synthetic oligonucleotide
uaucccauuaggauacuag

SEQ ID NO: 94623 - RNA, 19 nt, Artificial Sequence
  Description of Artificial Sequence: Synthetic oligonucleotide
caugauuacuucaugcgag

SEQ ID NO: 94624 - RNA, 19 nt, Artificial Sequence
  Description of Artificial Sequence: Synthetic oligonucleotide
cuaugcacugaauaaagug

SEQ ID NO: 94625 - RNA, 19 nt, Artificial Sequence
  Description of Artificial Sequence: Synthetic oligonucleotide
uguccacucaacaucacug

SEQ ID NO: 94626 - RNA, 19 nt, Artificial Sequence
  Description of Artificial Sequence: Synthetic oligonucleotide
auauauguucaaagaaugc

SEQ ID NO: 94627 - RNA, 19 nt, Artificial Sequence
  Description of Artificial Sequence: Synthetic oligonucleotide
uuaaccacgucauauuagu

SEQ ID NO: 94628 - RNA, 19 nt, Artificial Sequence
  Description of Artificial Sequence: Synthetic oligonucleotide
gguaauguaugccaauugg

SEQ ID NO: 94629 - RNA, 19 nt, Artificial Sequence
  Description of Artificial Sequence: Synthetic oligonucleotide
aaguauaagguguuucuau

SEQ ID NO: 94630 - RNA, 19 nt, Artificial Sequence
  Description of Artificial Sequence: Synthetic oligonucleotide
ugagaaucacuccacuacc

SEQ ID NO: 94631 - RNA, 19 nt, Artificial Sequence
  Description of Artificial Sequence: Synthetic oligonucleotide
aaauggcccugccggaucc

SEQ ID NO: 94632 - RNA, 19 nt, Artificial Sequence
  Description of Artificial Sequence: Synthetic oligonucleotide
aacgcugagcacauagucc

SEQ ID NO: 94633 - RNA, 19 nt, Artificial Sequence
  Description of Artificial Sequence: Synthetic oligonucleotide
ugaaugggaagugaccucg

SEQ ID NO: 94634 - RNA, 19 nt, Artificial Sequence
  Description of Artificial Sequence: Synthetic oligonucleotide
acccuaaaucauuuguggc

SEQ ID NO: 94635 - RNA, 19 nt, Artificial Sequence
  Description of Artificial Sequence: Synthetic oligonucleotide
cuaauccuaccccaaaugc

SEQ ID NO: 94636 - RNA, 19 nt, Artificial Sequence
  Description of Artificial Sequence: Synthetic oligonucleotide
ucuacccuguccaagagaa

SEQ ID NO: 94637 - RNA, 19 nt, Artificial Sequence
  Description of Artificial Sequence: Synthetic oligonucleotide
ugcaauaccaugauuugau

SEQ ID NO: 94638 - RNA, 19 nt, Artificial Sequence
  Description of Artificial Sequence: Synthetic oligonucleotide
aaaacauagcagccgauuu

SEQ ID NO: 94639 - RNA, 19 nt, Artificial Sequence
  Description of Artificial Sequence: Synthetic oligonucleotide
uguaagagaauuguauaga

SEQ ID NO: 94640 - RNA, 19 nt, Artificial Sequence
  Description of Artificial Sequence: Synthetic oligonucleotide
agauuguuccaucugucag

SEQ ID NO: 94641 - RNA, 19 nt, Artificial Sequence
  Description of Artificial Sequence: Synthetic oligonucleotide
gaucacagguaacagaaca

SEQ ID NO: 94642 - RNA, 19 nt, Artificial Sequence
  Description of Artificial Sequence: Synthetic oligonucleotide
aaccacgucauauuaguau

SEQ ID NO: 94643 - RNA, 19 nt, Artificial Sequence
  Description of Artificial Sequence: Synthetic oligonucleotide
aaguacuaauccuacccca

SEQ ID NO: 94644 - RNA, 19 nt, Artificial Sequence
  Description of Artificial Sequence: Synthetic oligonucleotide
uaagaaucaggccacuuau

SEQ ID NO: 94645 - RNA, 19 nt, Artificial Sequence
  Description of Artificial Sequence: Synthetic oligonucleotide
aaguccuuugaucucguga

SEQ ID NO: 94646 - RNA, 19 nt, Artificial Sequence
  Description of Artificial Sequence: Synthetic oligonucleotide
uggcuuaaagcuaugcacu

SEQ ID NO: 94647 - RNA, 19 nt, Artificial Sequence
  Description of Artificial Sequence: Synthetic oligonucleotide
agguugaucuacccugucc

SEQ ID NO: 94648 - RNA, 19 nt, Artificial Sequence
  Description of Artificial Sequence: Synthetic oligonucleotide
uuguaguguccaaauagug

SEQ ID NO: 94649 - RNA, 19 nt, Artificial Sequence
  Description of Artificial Sequence: Synthetic oligonucleotide
uauaaacuagacugcuuug

SEQ ID NO: 94650 - RNA, 19 nt, Artificial Sequence
  Description of Artificial Sequence: Synthetic oligonucleotide
aguguauaguguuauaaua

SEQ ID NO: 94651 - RNA, 19 nt, Artificial Sequence
  Description of Artificial Sequence: Synthetic oligonucleotide
agguaauauucacacagug

SEQ ID NO: 94652 - RNA, 19 nt, Artificial Sequence
  Description of Artificial Sequence: Synthetic oligonucleotide
agcugcauaucccaacaac

SEQ ID NO: 94653 - RNA, 19 nt, Artificial Sequence
  Description of Artificial Sequence: Synthetic oligonucleotide
ugugugaaugggaagugac

SEQ ID NO: 94654 - RNA, 19 nt, Artificial Sequence
  Description of Artificial Sequence: Synthetic oligonucleotide
uaaacuagacugcuuugac

SEQ ID NO: 94655 - RNA, 19 nt, Artificial Sequence
  Description of Artificial Sequence: Synthetic oligonucleotide
ugugaaugggaagugaccu

SEQ ID NO: 94656 - RNA, 19 nt, Artificial Sequence
  Description of Artificial Sequence: Synthetic oligonucleotide
acacuuauauaaacuagac

SEQ ID NO: 94657 - RNA, 19 nt, Artificial Sequence
  Description of Artificial Sequence: Synthetic oligonucleotide
aguugugacaagaauuuuc

SEQ ID NO: 94658 - RNA, 19 nt, Artificial Sequence
  Description of Artificial Sequence: Synthetic oligonucleotide
ugaagauagucacuauccu

SEQ ID NO: 94659 - RNA, 19 nt, Artificial Sequence
  Description of Artificial Sequence: Synthetic oligonucleotide
gccacuuauagguacaggg

SEQ ID NO: 94660 - RNA, 19 nt, Artificial Sequence
  Description of Artificial Sequence: Synthetic oligonucleotide
ugugaaccuaugaugcccc

SEQ ID NO: 94661 - RNA, 19 nt, Artificial Sequence
  Description of Artificial Sequence: Synthetic oligonucleotide
cugagaaucacuccacuac

SEQ ID NO: 94662 - RNA, 19 nt, Artificial Sequence
  Description of Artificial Sequence: Synthetic oligonucleotide
uacagucuaaagaaacccu

SEQ ID NO: 94663 - RNA, 19 nt, Artificial Sequence
  Description of Artificial Sequence: Synthetic oligonucleotide
aucgguucgcuuaucaccc

SEQ ID NO: 94664 - RNA, 19 nt, Artificial Sequence
  Description of Artificial Sequence: Synthetic oligonucleotide
aaagaucaccaagccaaac

SEQ ID NO: 94665 - RNA, 19 nt, Artificial Sequence
  Description of Artificial Sequence: Synthetic oligonucleotide
uuauccacugagugaaccc

SEQ ID NO: 94666 - RNA, 19 nt, Artificial Sequence
  Description of Artificial Sequence: Synthetic oligonucleotide
uccaaaguugaguauuaac

SEQ ID NO: 94667 - RNA, 19 nt, Artificial Sequence
  Description of Artificial Sequence: Synthetic oligonucleotide
ugguaauguaugccaauug

SEQ ID NO: 94668 - RNA, 19 nt, Artificial Sequence
  Description of Artificial Sequence: Synthetic oligonucleotide
ucauuaguuugccuguggu

SEQ ID NO: 94669 - RNA, 19 nt, Artificial Sequence
  Description of Artificial Sequence: Synthetic oligonucleotide
aguuuauccacugagugaa

SEQ ID NO: 94670 - RNA, 19 nt, Artificial Sequence
  Description of Artificial Sequence: Synthetic oligonucleotide
auuaguuugccugugguaa

SEQ ID NO: 94671 - RNA, 19 nt, Artificial Sequence
  Description of Artificial Sequence: Synthetic oligonucleotide
uaucacccauuucaaacca

SEQ ID NO: 94672 - RNA, 19 nt, Artificial Sequence
  Description of Artificial Sequence: Synthetic oligonucleotide
acuauuuuggccauguaaa

SEQ ID NO: 94673 - RNA, 19 nt, Artificial Sequence
  Description of Artificial Sequence: Synthetic oligonucleotide
cuauccuaagaaucaggcc

SEQ ID NO: 94674 - RNA, 19 nt, Artificial Sequence
  Description of Artificial Sequence: Synthetic oligonucleotide
uguguuaaccacugcaaua

SEQ ID NO: 94675 - RNA, 19 nt, Artificial Sequence
  Description of Artificial Sequence: Synthetic oligonucleotide
ggccauguaaaguaauacg

SEQ ID NO: 94676 - RNA, 19 nt, Artificial Sequence
  Description of Artificial Sequence: Synthetic oligonucleotide
auuuaccuuagagugaggu

SEQ ID NO: 94677 - RNA, 19 nt, Artificial Sequence
  Description of Artificial Sequence: Synthetic oligonucleotide
aucuauacuuuaaagggcu

SEQ ID NO: 94678 - RNA, 19 nt, Artificial Sequence
  Description of Artificial Sequence: Synthetic oligonucleotide
auuaggauacuagcaauca

SEQ ID NO: 94679 - RNA, 19 nt, Artificial Sequence
  Description of Artificial Sequence: Synthetic oligonucleotide
uugugaaccuaugaugccc

SEQ ID NO: 94680 - RNA, 19 nt, Artificial Sequence
  Description of Artificial Sequence: Synthetic oligonucleotide
uccuauucggagccgggag

SEQ ID NO: 94681 - RNA, 19 nt, Artificial Sequence
  Description of Artificial Sequence: Synthetic oligonucleotide
cacugagugaacccaauac

SEQ ID NO: 94682 - RNA, 19 nt, Artificial Sequence
  Description of Artificial Sequence: Synthetic oligonucleotide
ucgaaguugcccgccaugg

SEQ ID NO: 94683 - RNA, 19 nt, Artificial Sequence
  Description of Artificial Sequence: Synthetic oligonucleotide
ugacuaggauucuagcgcu

SEQ ID NO: 94684 - RNA, 19 nt, Artificial Sequence
  Description of Artificial Sequence: Synthetic oligonucleotide
auaaacuagacugcuuuga

SEQ ID NO: 94685 - RNA, 19 nt, Artificial Sequence
  Description of Artificial Sequence: Synthetic oligonucleotide
uuuagcacugugccaacau

SEQ ID NO: 94686 - RNA, 19 nt, Artificial Sequence
  Description of Artificial Sequence: Synthetic oligonucleotide
uccuaccccaaaugcauag

SEQ ID NO: 94687 - RNA, 19 nt, Artificial Sequence
  Description of Artificial Sequence: Synthetic oligonucleotide
guguuaaccacugcaauac

SEQ ID NO: 94688 - RNA, 19 nt, Artificial Sequence
  Description of Artificial Sequence: Synthetic oligonucleotide
uagcauugugaaccuauga

SEQ ID NO: 94689 - RNA, 19 nt, Artificial Sequence
  Description of Artificial Sequence: Synthetic oligonucleotide
gccauaauuucagagacag

SEQ ID NO: 94690 - RNA, 19 nt, Artificial Sequence
  Description of Artificial Sequence: Synthetic oligonucleotide
uauacuuuaaagggcuuau

SEQ ID NO: 94691 - RNA, 19 nt, Artificial Sequence
  Description of Artificial Sequence: Synthetic oligonucleotide
accuacuauguguuuagca

SEQ ID NO: 94692 - RNA, 19 nt, Artificial Sequence
  Description of Artificial Sequence: Synthetic oligonucleotide
ccuacuauguguuuagcac

SEQ ID NO: 94693 - RNA, 19 nt, Artificial Sequence
  Description of Artificial Sequence: Synthetic oligonucleotide
aucccacuagguaauauuc

SEQ ID NO: 94694 - RNA, 19 nt, Artificial Sequence
  Description of Artificial Sequence: Synthetic oligonucleotide
uuaccuccucucauacagg

SEQ ID NO: 94695 - RNA, 19 nt, Artificial Sequence
  Description of Artificial Sequence: Synthetic oligonucleotide
gaagugaccucguuugcca

SEQ ID NO: 94696 - RNA, 19 nt, Artificial Sequence
  Description of Artificial Sequence: Synthetic oligonucleotide
agaaucacuccacuacccu

SEQ ID NO: 94697 - RNA, 19 nt, Artificial Sequence
  Description of Artificial Sequence: Synthetic oligonucleotide
agcaucugaccccacauaa

SEQ ID NO: 94698 - RNA, 19 nt, Artificial Sequence
  Description of Artificial Sequence: Synthetic oligonucleotide
gguaauauucacacagugc

SEQ ID NO: 94699 - RNA, 19 nt, Artificial Sequence
  Description of Artificial Sequence: Synthetic oligonucleotide
uucaaaucgguucgcuuau

SEQ ID NO: 94700 - RNA, 19 nt, Artificial Sequence
  Description of Artificial Sequence: Synthetic oligonucleotide
ucaggccacuuauagguac

SEQ ID NO: 94701 - RNA, 19 nt, Artificial Sequence
  Description of Artificial Sequence: Synthetic oligonucleotide
aguuucguacccugaauau

SEQ ID NO: 94702 - RNA, 19 nt, Artificial Sequence
  Description of Artificial Sequence: Synthetic oligonucleotide
uuuaccuuagagugaggua

SEQ ID NO: 94703 - RNA, 19 nt, Artificial Sequence
  Description of Artificial Sequence: Synthetic oligonucleotide
auguauuaaauuagcguca

SEQ ID NO: 94704 - RNA, 19 nt, Artificial Sequence
  Description of Artificial Sequence: Synthetic oligonucleotide
guaaguaauuuaggacugg

SEQ ID NO: 94705 - RNA, 19 nt, Artificial Sequence
  Description of Artificial Sequence: Synthetic oligonucleotide
caagugccuuuuaucaccc

SEQ ID NO: 94706 - RNA, 19 nt, Artificial Sequence
  Description of Artificial Sequence: Synthetic oligonucleotide
auaugguaaauacgaguaa

SEQ ID NO: 94707 - RNA, 19 nt, Artificial Sequence
  Description of Artificial Sequence: Synthetic oligonucleotide
augauuacuucaugcgagu

SEQ ID NO: 94708 - RNA, 19 nt, Artificial Sequence
  Description of Artificial Sequence: Synthetic oligonucleotide
gccgauuuuguuuacuuug

SEQ ID NO: 94709 - RNA, 19 nt, Artificial Sequence
  Description of Artificial Sequence: Synthetic oligonucleotide
agaaaguguauaguguuau

SEQ ID NO: 94710 - RNA, 19 nt, Artificial Sequence
  Description of Artificial Sequence: Synthetic oligonucleotide
cucauuaguuugccugugg

SEQ ID NO: 94711 - RNA, 19 nt, Artificial Sequence
  Description of Artificial Sequence: Synthetic oligonucleotide
agucuaaagaaacccuaaa

SEQ ID NO: 94712 - RNA, 19 nt, Artificial Sequence
  Description of Artificial Sequence: Synthetic oligonucleotide
ucuccuauucggagccggg

SEQ ID NO: 94713 - RNA, 19 nt, Artificial Sequence
  Description of Artificial Sequence: Synthetic oligonucleotide
agguauuuaccuccucuca

SEQ ID NO: 94714 - RNA, 19 nt, Artificial Sequence
  Description of Artificial Sequence: Synthetic oligonucleotide
acggacaugugugaauggg

SEQ ID NO: 94715 - RNA, 19 nt, Artificial Sequence
  Description of Artificial Sequence: Synthetic oligonucleotide
aagaauuaaccacgucaua

SEQ ID NO: 94716 - RNA, 19 nt, Artificial Sequence
  Description of Artificial Sequence: Synthetic oligonucleotide
cacuuauagguacagggga

SEQ ID NO: 94717 - RNA, 19 nt, Artificial Sequence
  Description of Artificial Sequence: Synthetic oligonucleotide
gagaaucacuccacuaccc

SEQ ID NO: 94718 - RNA, 19 nt, Artificial Sequence
  Description of Artificial Sequence: Synthetic oligonucleotide
auccuaagaaucaggccac

SEQ ID NO: 94719 - RNA, 19 nt, Artificial Sequence
  Description of Artificial Sequence: Synthetic oligonucleotide
cuuaaagcuaugcacugaa

SEQ ID NO: 94720 - RNA, 19 nt, Artificial Sequence
  Description of Artificial Sequence: Synthetic oligonucleotide
uguaugccaauuggugucc

SEQ ID NO: 94721 - RNA, 19 nt, Artificial Sequence
  Description of Artificial Sequence: Synthetic oligonucleotide
ugauuacuucaugcgagug

SEQ ID NO: 94722 - RNA, 19 nt, Artificial Sequence
  Description of Artificial Sequence: Synthetic oligonucleotide
aauuuaggacuggaacagu

SEQ ID NO: 94723 - RNA, 19 nt, Artificial Sequence
  Description of Artificial Sequence: Synthetic oligonucleotide
ugucccugggccauuuaac

SEQ ID NO: 94724 - RNA, 19 nt, Artificial Sequence
  Description of Artificial Sequence: Synthetic oligonucleotide
uaccuuagagugagguaca

SEQ ID NO: 94725 - RNA, 19 nt, Artificial Sequence
  Description of Artificial Sequence: Synthetic oligonucleotide
cagcagacggacaugugug

SEQ ID NO: 94726 - RNA, 19 nt, Artificial Sequence
  Description of Artificial Sequence: Synthetic oligonucleotide
cuauucggagccgggaggg

SEQ ID NO: 94727 - RNA, 19 nt, Artificial Sequence
  Description of Artificial Sequence: Synthetic oligonucleotide
acugucaagaaaguguaua

SEQ ID NO: 94728 - RNA, 19 nt, Artificial Sequence
  Description of Artificial Sequence: Synthetic oligonucleotide
gcauuuaccuuagagugag

SEQ ID NO: 94729 - RNA, 19 nt, Artificial Sequence
  Description of Artificial Sequence: Synthetic oligonucleotide
auuucaaaucgguucgcuu

SEQ ID NO: 94730 - RNA, 19 nt, Artificial Sequence
  Description of Artificial Sequence: Synthetic oligonucleotide
cuguugaucuauccucagc

SEQ ID NO: 94731 - RNA, 19 nt, Artificial Sequence
  Description of Artificial Sequence: Synthetic oligonucleotide
agggacucacucccgggcg

SEQ ID NO: 94732 - RNA, 19 nt, Artificial Sequence
  Description of Artificial Sequence: Synthetic oligonucleotide
aggauacuagcaaucagga

SEQ ID NO: 94733 - RNA, 19 nt, Artificial Sequence
  Description of Artificial Sequence: Synthetic oligonucleotide
accuguaagagaauuguau

SEQ ID NO: 94734 - RNA, 19 nt, Artificial Sequence
  Description of Artificial Sequence: Synthetic oligonucleotide
gguugaucuacccugucca

SEQ ID NO: 94735 - RNA, 19 nt, Artificial Sequence
  Description of Artificial Sequence: Synthetic oligonucleotide
guuacuuguggaaaauuaa

SEQ ID NO: 94736 - RNA, 19 nt, Artificial Sequence
  Description of Artificial Sequence: Synthetic oligonucleotide
agcgucaacucauuaguuu

SEQ ID NO: 94737 - RNA, 19 nt, Artificial Sequence
  Description of Artificial Sequence: Synthetic oligonucleotide
cacagugcaugauuacuuc

SEQ ID NO: 94738 - RNA, 19 nt, Artificial Sequence
  Description of Artificial Sequence: Synthetic oligonucleotide
guuucguacccugaauaug

SEQ ID NO: 94739 - RNA, 19 nt, Artificial Sequence
  Description of Artificial Sequence: Synthetic oligonucleotide
uuacuuugcucugggacaa

SEQ ID NO: 94740 - RNA, 19 nt, Artificial Sequence
  Description of Artificial Sequence: Synthetic oligonucleotide
gcgucaacucauuaguuug

SEQ ID NO: 94741 - RNA, 19 nt, Artificial Sequence
  Description of Artificial Sequence: Synthetic oligonucleotide
aaaucaggguaagcagugu

SEQ ID NO: 94742 - RNA, 19 nt, Artificial Sequence
  Description of Artificial Sequence: Synthetic oligonucleotide
cuggcccugcaauagcgcc

SEQ ID NO: 94743 - RNA, 19 nt, Artificial Sequence
  Description of Artificial Sequence: Synthetic oligonucleotide
uacuggcuuaaagcuaugc

SEQ ID NO: 94744 - RNA, 19 nt, Artificial Sequence
  Description of Artificial Sequence: Synthetic oligonucleotide
uuaguuugccugugguaau

SEQ ID NO: 94745 - RNA, 19 nt, Artificial Sequence
  Description of Artificial Sequence: Synthetic oligonucleotide
ugguaguauggugucagaa

SEQ ID NO: 94746 - RNA, 19 nt, Artificial Sequence
  Description of Artificial Sequence: Synthetic oligonucleotide
agccucauauuacagucua

SEQ ID NO: 94747 - RNA, 19 nt, Artificial Sequence
  Description of Artificial Sequence: Synthetic oligonucleotide
accccacauaaaucaaucu

SEQ ID NO: 94748 - RNA, 19 nt, Artificial Sequence
  Description of Artificial Sequence: Synthetic oligonucleotide
gaccccacauaaaucaauc

SEQ ID NO: 94749 - RNA, 19 nt, Artificial Sequence
  Description of Artificial Sequence: Synthetic oligonucleotide
aucuccuauucggagccgg

SEQ ID NO: 94750 - RNA, 19 nt, Artificial Sequence
  Description of Artificial Sequence: Synthetic oligonucleotide
uaaccacgucauauuagua

SEQ ID NO: 94751 - RNA, 19 nt, Artificial Sequence
  Description of Artificial Sequence: Synthetic oligonucleotide
cucaagcggccccaguacc

SEQ ID NO: 94752 - RNA, 19 nt, Artificial Sequence
  Description of Artificial Sequence: Synthetic oligonucleotide
agaugcacuugacuaggau

SEQ ID NO: 94753 - RNA, 19 nt, Artificial Sequence
  Description of Artificial Sequence: Synthetic oligonucleotide
ggauacuagcaaucaggag

SEQ ID NO: 94754 - RNA, 19 nt, Artificial Sequence
  Description of Artificial Sequence: Synthetic oligonucleotide
caaaucgguucgcuuauca

SEQ ID NO: 94755 - RNA, 19 nt, Artificial Sequence
  Description of Artificial Sequence: Synthetic oligonucleotide
uucguacccugaauauggu

SEQ ID NO: 94756 - RNA, 19 nt, Artificial Sequence
  Description of Artificial Sequence: Synthetic oligonucleotide
cuucaugcgagugggagga

SEQ ID NO: 94757 - RNA, 19 nt, Artificial Sequence
  Description of Artificial Sequence: Synthetic oligonucleotide
uccgaaacgcugagcacau

SEQ ID NO: 94758 - RNA, 19 nt, Artificial Sequence
  Description of Artificial Sequence: Synthetic oligonucleotide
auauuacagucuaaagaaa

SEQ ID NO: 94759 - RNA, 19 nt, Artificial Sequence
  Description of Artificial Sequence: Synthetic oligonucleotide
guagucaggugaaauaugu

SEQ ID NO: 94760 - RNA, 19 nt, Artificial Sequence
  Description of Artificial Sequence: Synthetic oligonucleotide
gaaauggcccugccggauc

SEQ ID NO: 94761 - RNA, 19 nt, Artificial Sequence
  Description of Artificial Sequence: Synthetic oligonucleotide
gcgacggaggcacuggagg

SEQ ID NO: 94762 - RNA, 19 nt, Artificial Sequence
  Description of Artificial Sequence: Synthetic oligonucleotide
guagcauugugaaccuaug

SEQ ID NO: 94763 - RNA, 19 nt, Artificial Sequence
  Description of Artificial Sequence: Synthetic oligonucleotide
acagucuaaagaaacccua

SEQ ID NO: 94764 - RNA, 19 nt, Artificial Sequence
  Description of Artificial Sequence: Synthetic oligonucleotide
cguaaguaauuuaggacug

SEQ ID NO: 94765 - RNA, 19 nt, Artificial Sequence
  Description of Artificial Sequence: Synthetic oligonucleotide
agcauuuaccuuagaguga

SEQ ID NO: 94766 - RNA, 19 nt, Artificial Sequence
  Description of Artificial Sequence: Synthetic oligonucleotide
guaauguaugccaauuggu

SEQ ID NO: 94767 - RNA, 19 nt, Artificial Sequence
  Description of Artificial Sequence: Synthetic oligonucleotide
ugacaccuguaagagaauu

SEQ ID NO: 94768 - RNA, 19 nt, Artificial Sequence
  Description of Artificial Sequence: Synthetic oligonucleotide
cauuuaccuuagagugagg

SEQ ID NO: 94769 - RNA, 19 nt, Artificial Sequence
  Description of Artificial Sequence: Synthetic oligonucleotide
gaaguccuuugaucucgug

SEQ ID NO: 94770 - RNA, 19 nt, Artificial Sequence
  Description of Artificial Sequence: Synthetic oligonucleotide
aguacuaauccuaccccaa

SEQ ID NO: 94771 - RNA, 19 nt, Artificial Sequence
  Description of Artificial Sequence: Synthetic oligonucleotide
guccacucaacaucacuga

SEQ ID NO: 94772 - RNA, 19 nt, Artificial Sequence
  Description of Artificial Sequence: Synthetic oligonucleotide
cacuuauauaaacuagacu

SEQ ID NO: 94773 - RNA, 19 nt, Artificial Sequence
  Description of Artificial Sequence: Synthetic oligonucleotide
acgucauauuaguauccaa

SEQ ID NO: 94774 - RNA, 19 nt, Artificial Sequence
  Description of Artificial Sequence: Synthetic oligonucleotide
caugcgagugggaggaaca

SEQ ID NO: 94775 - RNA, 19 nt, Artificial Sequence
  Description of Artificial Sequence: Synthetic oligonucleotide
cagucuaaagaaacccuaa

SEQ ID NO: 94776 - RNA, 19 nt, Artificial Sequence
  Description of Artificial Sequence: Synthetic oligonucleotide
ucaugcgagugggaggaac

SEQ ID NO: 94777 - RNA, 19 nt, Artificial Sequence
  Description of Artificial Sequence: Synthetic oligonucleotide
ugaacccaauacuggcuua

SEQ ID NO: 94778 - RNA, 19 nt, Artificial Sequence
  Description of Artificial Sequence: Synthetic oligonucleotide
uagcgucaacucauuaguu

SEQ ID NO: 94779 - RNA, 19 nt, Artificial Sequence
  Description of Artificial Sequence: Synthetic oligonucleotide
aaauuagcgucaacucauu

SEQ ID NO: 94780 - RNA, 19 nt, Artificial Sequence
  Description of Artificial Sequence: Synthetic oligonucleotide
gauucuagcgcuugcuauu

SEQ ID NO: 94781 - RNA, 19 nt, Artificial Sequence
  Description of Artificial Sequence: Synthetic oligonucleotide
acucauuaguuugccugug

SEQ ID NO: 94782 - RNA, 19 nt, Artificial Sequence
  Description of Artificial Sequence: Synthetic oligonucleotide
cauuaguuugccuguggua

SEQ ID NO: 94783 - RNA, 19 nt, Artificial Sequence
  Description of Artificial Sequence: Synthetic oligonucleotide
agccaacuccaaccaaaca

SEQ ID NO: 94784 - RNA, 19 nt, Artificial Sequence
  Description of Artificial Sequence: Synthetic oligonucleotide
augccucuaguaguguucu

SEQ ID NO: 94785 - RNA, 19 nt, Artificial Sequence
  Description of Artificial Sequence: Synthetic oligonucleotide
ucguacccugaauauggua

SEQ ID NO: 94786 - RNA, 19 nt, Artificial Sequence
  Description of Artificial Sequence: Synthetic oligonucleotide
ggaagugaccucguuugcc

SEQ ID NO: 94787 - RNA, 19 nt, Artificial Sequence
  Description of Artificial Sequence: Synthetic oligonucleotide
ccacgucauauuaguaucc

SEQ ID NO: 94788 - RNA, 19 nt, Artificial Sequence
  Description of Artificial Sequence: Synthetic oligonucleotide
ugauuccuguagagcugca

SEQ ID NO: 94789 - RNA, 19 nt, Artificial Sequence
  Description of Artificial Sequence: Synthetic oligonucleotide
guacuaauccuaccccaaa

SEQ ID NO: 94790 - RNA, 19 nt, Artificial Sequence
  Description of Artificial Sequence: Synthetic oligonucleotide
gaucuccuauucggagccg

SEQ ID NO: 94791 - RNA, 19 nt, Artificial Sequence
  Description of Artificial Sequence: Synthetic oligonucleotide
ccuauucggagccgggagg

SEQ ID NO: 94792 - RNA, 19 nt, Artificial Sequence
  Description of Artificial Sequence: Synthetic oligonucleotide
gccaauuggugucccuggg

SEQ ID NO: 94793 - RNA, 19 nt, Artificial Sequence
  Description of Artificial Sequence: Synthetic oligonucleotide
aucaaucuauacagaacua

SEQ ID NO: 94794 - RNA, 19 nt, Artificial Sequence
  Description of Artificial Sequence: Synthetic oligonucleotide
guuaaccacacaagcccuc

SEQ ID NO: 94795 - RNA, 19 nt, Artificial Sequence
  Description of Artificial Sequence: Synthetic oligonucleotide
uccugaccgucaguuuucc

SEQ ID NO: 94796 - RNA, 19 nt, Artificial Sequence
  Description of Artificial Sequence: Synthetic oligonucleotide
gagucucuuagcuguggua

SEQ ID NO: 94797 - RNA, 19 nt, Artificial Sequence
  Description of Artificial Sequence: Synthetic oligonucleotide
cugcaauaccaugauuuga

SEQ ID NO: 94798 - RNA, 19 nt, Artificial Sequence
  Description of Artificial Sequence: Synthetic oligonucleotide
cuagacugcuuugacaccu

SEQ ID NO: 94799 - RNA, 19 nt, Artificial Sequence
  Description of Artificial Sequence: Synthetic oligonucleotide
auucuagcgcuugcuauuu

SEQ ID NO: 94800 - RNA, 19 nt, Artificial Sequence
  Description of Artificial Sequence: Synthetic oligonucleotide
aacccaauacuggcuuaaa

SEQ ID NO: 94801 - RNA, 19 nt, Artificial Sequence
  Description of Artificial Sequence: Synthetic oligonucleotide
cucuaguaguguucucaga

SEQ ID NO: 94802 - RNA, 19 nt, Artificial Sequence
  Description of Artificial Sequence: Synthetic oligonucleotide
cacgucauauuaguaucca

SEQ ID NO: 94803 - RNA, 19 nt, Artificial Sequence
  Description of Artificial Sequence: Synthetic oligonucleotide
cgucauauuaguauccaaa

SEQ ID NO: 94804 - RNA, 19 nt, Artificial Sequence
  Description of Artificial Sequence: Synthetic oligonucleotide
gggacucacucccgggcgg

SEQ ID NO: 94805 - RNA, 19 nt, Artificial Sequence
  Description of Artificial Sequence: Synthetic oligonucleotide
uccuaagaaucaggccacu

SEQ ID NO: 94806 - RNA, 19 nt, Artificial Sequence
  Description of Artificial Sequence: Synthetic oligonucleotide
gcaauguguuaaccacugc

SEQ ID NO: 94807 - RNA, 19 nt, Artificial Sequence
  Description of Artificial Sequence: Synthetic oligonucleotide
gguauuuaccuccucucau

SEQ ID NO: 94808 - RNA, 19 nt, Artificial Sequence
  Description of Artificial Sequence: Synthetic oligonucleotide
ucaaaucgguucgcuuauc

SEQ ID NO: 94809 - RNA, 19 nt, Artificial Sequence
  Description of Artificial Sequence: Synthetic oligonucleotide
ucgguucgcuuaucaccca

SEQ ID NO: 94810 - RNA, 19 nt, Artificial Sequence
  Description of Artificial Sequence: Synthetic oligonucleotide
gagcaucugaccccacaua

SEQ ID NO: 94811 - RNA, 19 nt, Artificial Sequence
  Description of Artificial Sequence: Synthetic oligonucleotide
ccauguaaaguaauacgua

SEQ ID NO: 94812 - RNA, 19 nt, Artificial Sequence
  Description of Artificial Sequence: Synthetic oligonucleotide
caauagcgccaccgccucc

SEQ ID NO: 94813 - RNA, 19 nt, Artificial Sequence
  Description of Artificial Sequence: Synthetic oligonucleotide
uauucggagccgggaggga

SEQ ID NO: 94814 - RNA, 19 nt, Artificial Sequence
  Description of Artificial Sequence: Synthetic oligonucleotide
gcucaagcggccccaguac

SEQ ID NO: 94815 - RNA, 19 nt, Artificial Sequence
  Description of Artificial Sequence: Synthetic oligonucleotide
cagguugaucuacccuguc

SEQ ID NO: 94816 - RNA, 19 nt, Artificial Sequence
  Description of Artificial Sequence: Synthetic oligonucleotide
ggauucuagcgcuugcuau

SEQ ID NO: 94817 - RNA, 19 nt, Artificial Sequence
  Description of Artificial Sequence: Synthetic oligonucleotide
cucgugagguccaguaacu

SEQ ID NO: 94818 - RNA, 19 nt, Artificial Sequence
  Description of Artificial Sequence: Synthetic oligonucleotide
gaacucugacuguccugaa

SEQ ID NO: 94819 - RNA, 19 nt, Artificial Sequence
  Description of Artificial Sequence: Synthetic oligonucleotide
acuacccugccuggaucug

SEQ ID NO: 94820 - RNA, 19 nt, Artificial Sequence
  Description of Artificial Sequence: Synthetic oligonucleotide
cgcgaguuuuccgaaacgc

SEQ ID NO: 94821 - RNA, 19 nt, Artificial Sequence
  Description of Artificial Sequence: Synthetic oligonucleotide
gcaauagcgccaccgccuc

SEQ ID NO: 94822 - RNA, 19 nt, Artificial Sequence
  Description of Artificial Sequence: Synthetic oligonucleotide
aguaucccauuaggauacu

SEQ ID NO: 94823 - RNA, 19 nt, Artificial Sequence
  Description of Artificial Sequence: Synthetic oligonucleotide
accaaguagucaggugaaa

SEQ ID NO: 94824 - RNA, 19 nt, Artificial Sequence
  Description of Artificial Sequence: Synthetic oligonucleotide
accuuagagugagguacaa

SEQ ID NO: 94825 - RNA, 19 nt, Artificial Sequence
  Description of Artificial Sequence: Synthetic oligonucleotide
guguccaaauaguguauuu

SEQ ID NO: 94826 - RNA, 19 nt, Artificial Sequence
  Description of Artificial Sequence: Synthetic oligonucleotide
ugccucuaguaguguucuc

SEQ ID NO: 94827 - RNA, 19 nt, Artificial Sequence
  Description of Artificial Sequence: Synthetic oligonucleotide
gugguaauguaugccaauu

SEQ ID NO: 94828 - RNA, 19 nt, Artificial Sequence
  Description of Artificial Sequence: Synthetic oligonucleotide
auacuggcuuaaagcuaug

SEQ ID NO: 94829 - RNA, 19 nt, Artificial Sequence
  Description of Artificial Sequence: Synthetic oligonucleotide
gacucacucccgggcggag

SEQ ID NO: 94830 - RNA, 19 nt, Artificial Sequence
  Description of Artificial Sequence: Synthetic oligonucleotide
gugcucgagucccgcacca

SEQ ID NO: 94831 - RNA, 19 nt, Artificial Sequence
  Description of Artificial Sequence: Synthetic oligonucleotide
ggcaugggaaaacaagauu

SEQ ID NO: 94832 - RNA, 19 nt, Artificial Sequence
  Description of Artificial Sequence: Synthetic oligonucleotide
ggcucaagcggccccagua

SEQ ID NO: 94833 - RNA, 19 nt, Artificial Sequence
  Description of Artificial Sequence: Synthetic oligonucleotide
cuccuauucggagccggga

SEQ ID NO: 94834 - RNA, 19 nt, Artificial Sequence
  Description of Artificial Sequence: Synthetic oligonucleotide
gguguuucuauuggucaua

SEQ ID NO: 94835 - RNA, 19 nt, Artificial Sequence
  Description of Artificial Sequence: Synthetic oligonucleotide
guaucccauuaggauacua

SEQ ID NO: 94836 - RNA, 19 nt, Artificial Sequence
  Description of Artificial Sequence: Synthetic oligonucleotide
ccgagucgaaguugcccgc

SEQ ID NO: 94837 - RNA, 19 nt, Artificial Sequence
  Description of Artificial Sequence: Synthetic oligonucleotide
gaaugggaagugaccucgu

SEQ ID NO: 94838 - RNA, 19 nt, Artificial Sequence
  Description of Artificial Sequence: Synthetic oligonucleotide
cagccgauuuuguuuacuu

SEQ ID NO: 94839 - RNA, 19 nt, Artificial Sequence
  Description of Artificial Sequence: Synthetic oligonucleotide
ggucuuacuuuggaacucu

SEQ ID NO: 94840 - RNA, 19 nt, Artificial Sequence
  Description of Artificial Sequence: Synthetic oligonucleotide
gaguaagaauggaguaauu

SEQ ID NO: 94841 - RNA, 19 nt, Artificial Sequence
  Description of Artificial Sequence: Synthetic oligonucleotide
gcuaugcacugaauaaagu

SEQ ID NO: 94842 - RNA, 19 nt, Artificial Sequence
  Description of Artificial Sequence: Synthetic oligonucleotide
cagacggacaugugugaau

SEQ ID NO: 94843 - RNA, 19 nt, Artificial Sequence
  Description of Artificial Sequence: Synthetic oligonucleotide
uucaugcgagugggaggaa

SEQ ID NO: 94844 - RNA, 19 nt, Artificial Sequence
  Description of Artificial Sequence: Synthetic oligonucleotide
ccucguuugccauuacacu

SEQ ID NO: 94845 - RNA, 19 nt, Artificial Sequence
  Description of Artificial Sequence: Synthetic oligonucleotide
ccgucaguuuuccacaggu

SEQ ID NO: 94846 - RNA, 19 nt, Artificial Sequence
  Description of Artificial Sequence: Synthetic oligonucleotide
gcgaguuuuccgaaacgcu

SEQ ID NO: 94847 - RNA, 19 nt, Artificial Sequence
  Description of Artificial Sequence: Synthetic oligonucleotide
gcccuccaguuucguaccc

SEQ ID NO: 94848 - RNA, 19 nt, Artificial Sequence
  Description of Artificial Sequence: Synthetic oligonucleotide
gccugagaaucacuccacu

SEQ ID NO: 94849 - RNA, 19 nt, Artificial Sequence
  Description of Artificial Sequence: Synthetic oligonucleotide
guuugccauuacacuccaa

SEQ ID NO: 94850 - RNA, 19 nt, Artificial Sequence
  Description of Artificial Sequence: Synthetic oligonucleotide
cgagucgaaguugcccgcc

SEQ ID NO: 94851 - RNA, 19 nt, Artificial Sequence
  Description of Artificial Sequence: Synthetic oligonucleotide
gacuaggauucuagcgcuu

SEQ ID NO: 94852 - RNA, 19 nt, Artificial Sequence
  Description of Artificial Sequence: Synthetic oligonucleotide
ccgcuggcccugcaauagc

SEQ ID NO: 94853 - RNA, 19 nt, Artificial Sequence
  Description of Artificial Sequence: Synthetic oligonucleotide
gcagaguuuggccccugau

SEQ ID NO: 94854 - RNA, 19 nt, Artificial Sequence
  Description of Artificial Sequence: Synthetic oligonucleotide
cucccgggcggaggcugag

SEQ ID NO: 94855 - RNA, 19 nt, Artificial Sequence
  Description of Artificial Sequence: Synthetic oligonucleotide
ccuaccccaaaugcauaga

SEQ ID NO: 94856 - RNA, 19 nt, Artificial Sequence
  Description of Artificial Sequence: Synthetic oligonucleotide
gcagccgauuuuguuuacu

SEQ ID NO: 94857 - RNA, 19 nt, Artificial Sequence
  Description of Artificial Sequence: Synthetic oligonucleotide
gcgggcgacggaggcacug

SEQ ID NO: 94858 - RNA, 19 nt, Artificial Sequence
  Description of Artificial Sequence: Synthetic oligonucleotide
ccugaccgucaguuuucca

SEQ ID NO: 94859 - RNA, 19 nt, Artificial Sequence
  Description of Artificial Sequence: Synthetic oligonucleotide
cugggccauuuaacaaguu

SEQ ID NO: 94860 - RNA, 19 nt, Artificial Sequence
  Description of Artificial Sequence: Synthetic oligonucleotide
ccuaagaaucaggccacuu

SEQ ID NO: 94861 - RNA, 19 nt, Artificial Sequence
  Description of Artificial Sequence: Synthetic oligonucleotide
ccggcucaagcggccccag

SEQ ID NO: 94862 - RNA, 19 nt, Artificial Sequence
  Description of Artificial Sequence: Synthetic oligonucleotide
gcggccccaguaccagcua

SEQ ID NO: 94863 - RNA, 19 nt, Artificial Sequence
  Description of Artificial Sequence: Synthetic oligonucleotide
cccuccaguuucguacccu

SEQ ID NO: 94864 - RNA, 19 nt, Artificial Sequence
  Description of Artificial Sequence: Synthetic oligonucleotide
cgcgggccgcugcuguuga

SEQ ID NO: 94865 - RNA, 19 nt, Artificial Sequence
  Description of Artificial Sequence: Synthetic oligonucleotide
ccgaaacgcugagcacaua

SEQ ID NO: 94866 - RNA, 19 nt, Artificial Sequence
  Description of Artificial Sequence: Synthetic oligonucleotide
cggcucaagcggccccagu

SEQ ID NO: 94867 - RNA, 19 nt, Artificial Sequence
  Description of Artificial Sequence: Synthetic oligonucleotide
auuuuaauaacuuugaggc

SEQ ID NO: 94868 - RNA, 19 nt, Artificial Sequence
  Description of Artificial Sequence: Synthetic oligonucleotide
uaggaaaucacaauuaagg

SEQ ID NO: 94869 - RNA, 19 nt, Artificial Sequence
  Description of Artificial Sequence: Synthetic oligonucleotide
aacaugguagaguauaugc

SEQ ID NO: 94870 - RNA, 19 nt, Artificial Sequence
  Description of Artificial Sequence: Synthetic oligonucleotide
uguaaugaugcauauaggg

SEQ ID NO: 94871 - RNA, 19 nt, Artificial Sequence
  Description of Artificial Sequence: Synthetic oligonucleotide
aaaccuuuuacuuggacgg

SEQ ID NO: 94872 - RNA, 19 nt, Artificial Sequence
  Description of Artificial Sequence: Synthetic oligonucleotide
aaaaccuuuuacuuggacg

SEQ ID NO: 94873 - RNA, 19 nt, Artificial Sequence
  Description of Artificial Sequence: Synthetic oligonucleotide
acaacaauacgucaugugc

SEQ ID NO: 94874 - RNA, 19 nt, Artificial Sequence
  Description of Artificial Sequence: Synthetic oligonucleotide
acaacuagcccauaggggc

SEQ ID NO: 94875 - RNA, 19 nt, Artificial Sequence
  Description of Artificial Sequence: Synthetic oligonucleotide
uauaaagguaagcugacag

SEQ ID NO: 94876 - RNA, 19 nt, Artificial Sequence
  Description of Artificial Sequence: Synthetic oligonucleotide
aggaaaucacaauuaaggc

SEQ ID NO: 94877 - RNA, 19 nt, Artificial Sequence
  Description of Artificial Sequence: Synthetic oligonucleotide
uggacgguuacuaugaaag

SEQ ID NO: 94878 - RNA, 19 nt, Artificial Sequence
  Description of Artificial Sequence: Synthetic oligonucleotide
ugaaguguaugaaagaccu

SEQ ID NO: 94879 - RNA, 19 nt, Artificial Sequence
  Description of Artificial Sequence: Synthetic oligonucleotide
uuaauaagacugaacauac

SEQ ID NO: 94880 - RNA, 19 nt, Artificial Sequence
  Description of Artificial Sequence: Synthetic oligonucleotide
aacaggucaauuuagcacu

SEQ ID NO: 94881 - RNA, 19 nt, Artificial Sequence
  Description of Artificial Sequence: Synthetic oligonucleotide
uauacaacuagcccauagg

SEQ ID NO: 94882 - RNA, 19 nt, Artificial Sequence
  Description of Artificial Sequence: Synthetic oligonucleotide
aaaccuggcagauguaugg

SEQ ID NO: 94883 - RNA, 19 nt, Artificial Sequence
  Description of Artificial Sequence: Synthetic oligonucleotide
agaaaggacguuuugauga

SEQ ID NO: 94884 - RNA, 19 nt, Artificial Sequence
  Description of Artificial Sequence: Synthetic oligonucleotide
guaauugcaaaccuggcag

SEQ ID NO: 94885 - RNA, 19 nt, Artificial Sequence
  Description of Artificial Sequence: Synthetic oligonucleotide
uauuaguucacuugcaagu

SEQ ID NO: 94886 - RNA, 19 nt, Artificial Sequence
  Description of Artificial Sequence: Synthetic oligonucleotide
auacuaaccaugcuauuac

SEQ ID NO: 94887 - RNA, 19 nt, Artificial Sequence
  Description of Artificial Sequence: Synthetic oligonucleotide
uacuuuauacaacuagccc

SEQ ID NO: 94888 - RNA, 19 nt, Artificial Sequence
  Description of Artificial Sequence: Synthetic oligonucleotide
aacuacaguggacauaugu

SEQ ID NO: 94889 - RNA, 19 nt, Artificial Sequence
  Description of Artificial Sequence: Synthetic oligonucleotide
ugcuaaaagagaccuuugg

SEQ ID NO: 94890 - RNA, 19 nt, Artificial Sequence
  Description of Artificial Sequence: Synthetic oligonucleotide
uuagggucccauuugaagc

SEQ ID NO: 94891 - RNA, 19 nt, Artificial Sequence
  Description of Artificial Sequence: Synthetic oligonucleotide
aagucugauuaauauaggu

SEQ ID NO: 94892 - RNA, 19 nt, Artificial Sequence
  Description of Artificial Sequence: Synthetic oligonucleotide
aaugguagagaagucauga

SEQ ID NO: 94893 - RNA, 19 nt, Artificial Sequence
  Description of Artificial Sequence: Synthetic oligonucleotide
uuauacaacuagcccauag

SEQ ID NO: 94894 - RNA, 19 nt, Artificial Sequence
  Description of Artificial Sequence: Synthetic oligonucleotide
cuacuuuauacaacuagcc

SEQ ID NO: 94895 - RNA, 19 nt, Artificial Sequence
  Description of Artificial Sequence: Synthetic oligonucleotide
ucaugugauuuacauaggc

SEQ ID NO: 94896 - RNA, 19 nt, Artificial Sequence
  Description of Artificial Sequence: Synthetic oligonucleotide
uacaacuagcccauagggg

SEQ ID NO: 94897 - RNA, 19 nt, Artificial Sequence
  Description of Artificial Sequence: Synthetic oligonucleotide
uuuagggucccauuugaag

SEQ ID NO: 94898 - RNA, 19 nt, Artificial Sequence
  Description of Artificial Sequence: Synthetic oligonucleotide
caauuuagcacucuaagca

SEQ ID NO: 94899 - RNA, 19 nt, Artificial Sequence
  Description of Artificial Sequence: Synthetic oligonucleotide
agcauuuaaagguugugug

SEQ ID NO: 94900 - RNA, 19 nt, Artificial Sequence
  Description of Artificial Sequence: Synthetic oligonucleotide
agccauauuaucuaagcca

SEQ ID NO: 94901 - RNA, 19 nt, Artificial Sequence
  Description of Artificial Sequence: Synthetic oligonucleotide
uagauugauuugaugagca

SEQ ID NO: 94902 - RNA, 19 nt, Artificial Sequence
  Description of Artificial Sequence: Synthetic oligonucleotide
aauuuagcacucuaagcau

SEQ ID NO: 94903 - RNA, 19 nt, Artificial Sequence
  Description of Artificial Sequence: Synthetic oligonucleotide
uuugguacaacgauguauu

SEQ ID NO: 94904 - RNA, 19 nt, Artificial Sequence
  Description of Artificial Sequence: Synthetic oligonucleotide
accagguuuaugauuaucc

SEQ ID NO: 94905 - RNA, 19 nt, Artificial Sequence
  Description of Artificial Sequence: Synthetic oligonucleotide
uucauacuaaccaugcuau

SEQ ID NO: 94906 - RNA, 19 nt, Artificial Sequence
  Description of Artificial Sequence: Synthetic oligonucleotide
agguuuaugauuauccuuc

SEQ ID NO: 94907 - RNA, 19 nt, Artificial Sequence
  Description of Artificial Sequence: Synthetic oligonucleotide
cugaaauucauacuaacca

SEQ ID NO: 94908 - RNA, 19 nt, Artificial Sequence
  Description of Artificial Sequence: Synthetic oligonucleotide
aaccccugacguuaacugc

SEQ ID NO: 94909 - RNA, 19 nt, Artificial Sequence
  Description of Artificial Sequence: Synthetic oligonucleotide
gaagcgucuacuuuuauaa

SEQ ID NO: 94910 - RNA, 19 nt, Artificial Sequence
  Description of Artificial Sequence: Synthetic oligonucleotide
cacacuagagaaaugcccc

SEQ ID NO: 94911 - RNA, 19 nt, Artificial Sequence
  Description of Artificial Sequence: Synthetic oligonucleotide
uuuagcacucuaagcaugc

SEQ ID NO: 94912 - RNA, 19 nt, Artificial Sequence
  Description of Artificial Sequence: Synthetic oligonucleotide
aauuaaguaaagucccuua

SEQ ID NO: 94913 - RNA, 19 nt, Artificial Sequence
  Description of Artificial Sequence: Synthetic oligonucleotide
aauuuaguagcugacuuau

SEQ ID NO: 94914 - RNA, 19 nt, Artificial Sequence
  Description of Artificial Sequence: Synthetic oligonucleotide
uuuuaacaggcguugaaaa

SEQ ID NO: 94915 - RNA, 19 nt, Artificial Sequence
  Description of Artificial Sequence: Synthetic oligonucleotide
uaugucagagaaaggacgu

SEQ ID NO: 94916 - RNA, 19 nt, Artificial Sequence
  Description of Artificial Sequence: Synthetic oligonucleotide
uuaaacaugguagaguaua

SEQ ID NO: 94917 - RNA, 19 nt, Artificial Sequence
  Description of Artificial Sequence: Synthetic oligonucleotide
gguacaacgauguauuccc

SEQ ID NO: 94918 - RNA, 19 nt, Artificial Sequence
  Description of Artificial Sequence: Synthetic oligonucleotide
acagaauuuuaacaggcgu

SEQ ID NO: 94919 - RNA, 19 nt, Artificial Sequence
  Description of Artificial Sequence: Synthetic oligonucleotide
acugacuaaaagcacaaau

SEQ ID NO: 94920 - RNA, 19 nt, Artificial Sequence
  Description of Artificial Sequence: Synthetic oligonucleotide
aaaaucaauuuaguagcug

SEQ ID NO: 94921 - RNA, 19 nt, Artificial Sequence
  Description of Artificial Sequence: Synthetic oligonucleotide
cauuuaaagguugugugag

SEQ ID NO: 94922 - RNA, 19 nt, Artificial Sequence
  Description of Artificial Sequence: Synthetic oligonucleotide
cuaauggagguuugaaaag

SEQ ID NO: 94923 - RNA, 19 nt, Artificial Sequence
  Description of Artificial Sequence: Synthetic oligonucleotide
gauucugcacagcuuauac

SEQ ID NO: 94924 - RNA, 19 nt, Artificial Sequence
  Description of Artificial Sequence: Synthetic oligonucleotide
acaugguagaguauaugcc

SEQ ID NO: 94925 - RNA, 19 nt, Artificial Sequence
  Description of Artificial Sequence: Synthetic oligonucleotide
gaugcuucauguaaugaug

SEQ ID NO: 94926 - RNA, 19 nt, Artificial Sequence
  Description of Artificial Sequence: Synthetic oligonucleotide
gaaaauaugaugaucugua

SEQ ID NO: 94927 - RNA, 19 nt, Artificial Sequence
  Description of Artificial Sequence: Synthetic oligonucleotide
caacaggucaauuuagcac

SEQ ID NO: 94928 - RNA, 19 nt, Artificial Sequence
  Description of Artificial Sequence: Synthetic oligonucleotide
ggacauagcaaauucuuag

SEQ ID NO: 94929 - RNA, 19 nt, Artificial Sequence
  Description of Artificial Sequence: Synthetic oligonucleotide
aaagauugaagugaauauu

SEQ ID NO: 94930 - RNA, 19 nt, Artificial Sequence
  Description of Artificial Sequence: Synthetic oligonucleotide
aaagucugauuaauauagg

SEQ ID NO: 94931 - RNA, 19 nt, Artificial Sequence
  Description of Artificial Sequence: Synthetic oligonucleotide
caauuaaggcacacuagag

SEQ ID NO: 94932 - RNA, 19 nt, Artificial Sequence
  Description of Artificial Sequence: Synthetic oligonucleotide
uaaccaugcuauuacuggc

SEQ ID NO: 94933 - RNA, 19 nt, Artificial Sequence
  Description of Artificial Sequence: Synthetic oligonucleotide
cucacuagcaucagaacuc

SEQ ID NO: 94934 - RNA, 19 nt, Artificial Sequence
  Description of Artificial Sequence: Synthetic oligonucleotide
aaauguucggugauguuga

SEQ ID NO: 94935 - RNA, 19 nt, Artificial Sequence
  Description of Artificial Sequence: Synthetic oligonucleotide
caugcuauuacuggcaaac

SEQ ID NO: 94936 - RNA, 19 nt, Artificial Sequence
  Description of Artificial Sequence: Synthetic oligonucleotide
gacagcaaugcgcuaagug

SEQ ID NO: 94937 - RNA, 19 nt, Artificial Sequence
  Description of Artificial Sequence: Synthetic oligonucleotide
uuuaaagguugugugaguc

SEQ ID NO: 94938 - RNA, 19 nt, Artificial Sequence
  Description of Artificial Sequence: Synthetic oligonucleotide
uggacaacaauacgucaug

SEQ ID NO: 94939 - RNA, 19 nt, Artificial Sequence
  Description of Artificial Sequence: Synthetic oligonucleotide
aagucaugaagcgugugug

SEQ ID NO: 94940 - RNA, 19 nt, Artificial Sequence
  Description of Artificial Sequence: Synthetic oligonucleotide
gacaacaauacgucaugug

SEQ ID NO: 94941 - RNA, 19 nt, Artificial Sequence
  Description of Artificial Sequence: Synthetic oligonucleotide
ugacuuaauaagacugaac

SEQ ID NO: 94942 - RNA, 19 nt, Artificial Sequence
  Description of Artificial Sequence: Synthetic oligonucleotide
cuacguuuccuucacaguc

SEQ ID NO: 94943 - RNA, 19 nt, Artificial Sequence
  Description of Artificial Sequence: Synthetic oligonucleotide
ucauacucgaguaccucug

SEQ ID NO: 94944 - RNA, 19 nt, Artificial Sequence
  Description of Artificial Sequence: Synthetic oligonucleotide
uucaccuacacucucccau

SEQ ID NO: 94945 - RNA, 19 nt, Artificial Sequence
  Description of Artificial Sequence: Synthetic oligonucleotide
  modified_base (3)..(3): a, c, u, g, unknown or other
ucnucugaugggaacuaca

SEQ ID NO: 94946 - RNA, 19 nt, Artificial Sequence
  Description of Artificial Sequence: Synthetic oligonucleotide
aacaccucgacguaaccuu

SEQ ID NO: 94947 - RNA, 19 nt, Artificial Sequence
  Description of Artificial Sequence: Synthetic oligonucleotide
uguauuaugucuugcuguu

SEQ ID NO: 94948 - RNA, 19 nt, Artificial Sequence
  Description of Artificial Sequence: Synthetic oligonucleotide
uggaaugacuacaucacuu

SEQ ID NO: 94949 - RNA, 19 nt, Artificial Sequence
  Description of Artificial Sequence: Synthetic oligonucleotide
gguuugaaaagucugauua

SEQ ID NO: 94950 - RNA, 19 nt, Artificial Sequence
  Description of Artificial Sequence: Synthetic oligonucleotide
  modified_base (2)..(2): a, c, u, g, unknown or other
cnucugaugggaacuacac

SEQ ID NO: 94951 - RNA, 19 nt, Artificial Sequence
  Description of Artificial Sequence: Synthetic oligonucleotide
uaauggagguuugaaaagu

SEQ ID NO: 94952 - RNA, 19 nt, Artificial Sequence
  Description of Artificial Sequence: Synthetic oligonucleotide
uuuaugggucuauugcuaa

SEQ ID NO: 94953 - RNA, 19 nt, Artificial Sequence
  Description of Artificial Sequence: Synthetic oligonucleotide
aacugcuacguuuccuuca

SEQ ID NO: 94954 - RNA, 19 nt, Artificial Sequence
  Description of Artificial Sequence: Synthetic oligonucleotide
ucgacguaaccuuaaguuc

SEQ ID NO: 94955 - RNA, 19 nt, Artificial Sequence
  Description of Artificial Sequence: Synthetic oligonucleotide
aacuuauuauuaguucacu

SEQ ID NO: 94956 - RNA, 19 nt, Artificial Sequence
  Description of Artificial Sequence: Synthetic oligonucleotide
ugguacaacgauguauucc

SEQ ID NO: 94957 - RNA, 19 nt, Artificial Sequence
  Description of Artificial Sequence: Synthetic oligonucleotide
acucgugaacaccucgacg

SEQ ID NO: 94958 - RNA, 19 nt, Artificial Sequence
  Description of Artificial Sequence: Synthetic oligonucleotide
aguguaugaaagaccuccc

SEQ ID NO: 94959 - RNA, 19 nt, Artificial Sequence
  Description of Artificial Sequence: Synthetic oligonucleotide
acgguuacuaugaaagcuc

SEQ ID NO: 94960 - RNA, 19 nt, Artificial Sequence
  Description of Artificial Sequence: Synthetic oligonucleotide
ugacguuaacugcgaaucc

SEQ ID NO: 94961 - RNA, 19 nt, Artificial Sequence
  Description of Artificial Sequence: Synthetic oligonucleotide
cugacguuaacugcgaauc

SEQ ID NO: 94962 - RNA, 19 nt, Artificial Sequence
  Description of Artificial Sequence: Synthetic oligonucleotide
cuaguguuguaucugacaa

SEQ ID NO: 94963 - RNA, 19 nt, Artificial Sequence
  Description of Artificial Sequence: Synthetic oligonucleotide
ucacuaaaguuguucaguu

SEQ ID NO: 94964 - RNA, 19 nt, Artificial Sequence
  Description of Artificial Sequence: Synthetic oligonucleotide
gaaauauugucacuggguu

SEQ ID NO: 94965 - RNA, 19 nt, Artificial Sequence
  Description of Artificial Sequence: Synthetic oligonucleotide
agcuguauuaugucuugcu

SEQ ID NO: 94966 - RNA, 19 nt, Artificial Sequence
  Description of Artificial Sequence: Synthetic oligonucleotide
uccuucauauguuguaaaa

SEQ ID NO: 94967 - RNA, 19 nt, Artificial Sequence
  Description of Artificial Sequence: Synthetic oligonucleotide
aauguucggugauguugag

SEQ ID NO: 94968 - RNA, 19 nt, Artificial Sequence
  Description of Artificial Sequence: Synthetic oligonucleotide
uucauguaaugaugcauau

SEQ ID NO: 94969 - RNA, 19 nt, Artificial Sequence
  Description of Artificial Sequence: Synthetic oligonucleotide
  modified_base (7)..(7): a, c, u, g, unknown or other
ugcuucnucugaugggaac

SEQ ID NO: 94970 - RNA, 19 nt, Artificial Sequence
  Description of Artificial Sequence: Synthetic oligonucleotide
uuauaaagguaagcugaca

SEQ ID NO: 94971 - RNA, 19 nt, Artificial Sequence
  Description of Artificial Sequence: Synthetic oligonucleotide
uaacaggcguugaaaacau

SEQ ID NO: 94972 - RNA, 19 nt, Artificial Sequence
  Description of Artificial Sequence: Synthetic oligonucleotide
gcguugaaaacauuuaaca

SEQ ID NO: 94973 - RNA, 19 nt, Artificial Sequence
  Description of Artificial Sequence: Synthetic oligonucleotide
ugcauauaggguguggcaa

SEQ ID NO: 94974 - RNA, 19 nt, Artificial Sequence
  Description of Artificial Sequence: Synthetic oligonucleotide
ugaagcgucuacuuuuaua

SEQ ID NO: 94975 - RNA, 19 nt, Artificial Sequence
  Description of Artificial Sequence: Synthetic oligonucleotide
acuagagaaaugccccuga

SEQ ID NO: 94976 - RNA, 19 nt, Artificial Sequence
  Description of Artificial Sequence: Synthetic oligonucleotide
uacggagcucacuggacag

SEQ ID NO: 94977 - RNA, 19 nt, Artificial Sequence
  Description of Artificial Sequence: Synthetic oligonucleotide
ggaacuggcgguaacagug

SEQ ID NO: 94978 - RNA, 19 nt, Artificial Sequence
  Description of Artificial Sequence: Synthetic oligonucleotide
cucacuggacagcaaugcg

SEQ ID NO: 94979 - RNA, 19 nt, Artificial Sequence
  Description of Artificial Sequence: Synthetic oligonucleotide
gacuaauggagguuugaaa

SEQ ID NO: 94980 - RNA, 19 nt, Artificial Sequence
  Description of Artificial Sequence: Synthetic oligonucleotide
aaaccaacacugccuugcu

SEQ ID NO: 94981 - RNA, 19 nt, Artificial Sequence
  Description of Artificial Sequence: Synthetic oligonucleotide
guagcugacuuauggauaa

SEQ ID NO: 94982 - RNA, 19 nt, Artificial Sequence
  Description of Artificial Sequence: Synthetic oligonucleotide
ugaugcauauagggugugg

SEQ ID NO: 94983 - RNA, 19 nt, Artificial Sequence
  Description of Artificial Sequence: Synthetic oligonucleotide
caaccccugacguuaacug

SEQ ID NO: 94984 - RNA, 19 nt, Artificial Sequence
  Description of Artificial Sequence: Synthetic oligonucleotide
aaaugccccugagauuuuc

SEQ ID NO: 94985 - RNA, 19 nt, Artificial Sequence
  Description of Artificial Sequence: Synthetic oligonucleotide
uaugggucuauugcuaaaa

SEQ ID NO: 94986 - RNA, 19 nt, Artificial Sequence
  Description of Artificial Sequence: Synthetic oligonucleotide
auaauuaaguaaagucccu

SEQ ID NO: 94987 - RNA, 19 nt, Artificial Sequence
  Description of Artificial Sequence: Synthetic oligonucleotide
uaaagguugugugagucuu

SEQ ID NO: 94988 - RNA, 19 nt, Artificial Sequence
  Description of Artificial Sequence: Synthetic oligonucleotide
auuuagcacucuaagcaug

SEQ ID NO: 94989 - RNA, 19 nt, Artificial Sequence
  Description of Artificial Sequence: Synthetic oligonucleotide
ggacauauguaggaaaaug

SEQ ID NO: 94990 - RNA, 19 nt, Artificial Sequence
  Description of Artificial Sequence: Synthetic oligonucleotide
augcauauaggguguggca

SEQ ID NO: 94991 - RNA, 19 nt, Artificial Sequence
  Description of Artificial Sequence: Synthetic oligonucleotide
caaaaccuuuuacuuggac

SEQ ID NO: 94992 - RNA, 19 nt, Artificial Sequence
  Description of Artificial Sequence: Synthetic oligonucleotide
aacugcgaauccugcccag

SEQ ID NO: 94993 - RNA, 19 nt, Artificial Sequence
  Description of Artificial Sequence: Synthetic oligonucleotide
aguauaugccaaagcaugu

SEQ ID NO: 94994 - RNA, 19 nt, Artificial Sequence
  Description of Artificial Sequence: Synthetic oligonucleotide
acuuggacgguuacuauga

SEQ ID NO: 94995 - RNA, 19 nt, Artificial Sequence
  Description of Artificial Sequence: Synthetic oligonucleotide
agucaugaagcgugugugu

SEQ ID NO: 94996 - RNA, 19 nt, Artificial Sequence
  Description of Artificial Sequence: Synthetic oligonucleotide
agucugauuaauauaggua

SEQ ID NO: 94997 - RNA, 19 nt, Artificial Sequence
  Description of Artificial Sequence: Synthetic oligonucleotide
caaauucucaacaggucaa

SEQ ID NO: 94998 - RNA, 19 nt, Artificial Sequence
  Description of Artificial Sequence: Synthetic oligonucleotide
uagagaagucaugaagcgu

SEQ ID NO: 94999 - RNA, 19 nt, Artificial Sequence
  Description of Artificial Sequence: Synthetic oligonucleotide
cauagcaaauucuuagugu

SEQ ID NO: 95000 - RNA, 19 nt, Artificial Sequence
  Description of Artificial Sequence: Synthetic oligonucleotide
ugugguucauaaaccuaau

SEQ ID NO: 95001 - RNA, 19 nt, Artificial Sequence
  Description of Artificial Sequence: Synthetic oligonucleotide
uuacaauugaugggcaguu

SEQ ID NO: 95002 - RNA, 19 nt, Artificial Sequence
  Description of Artificial Sequence: Synthetic oligonucleotide
cucgugaacaccucgacgu

SEQ ID NO: 95003 - RNA, 19 nt, Artificial Sequence
  Description of Artificial Sequence: Synthetic oligonucleotide
gaaaggacguuuugaugaa

SEQ ID NO: 95004 - RNA, 19 nt, Artificial Sequence
  Description of Artificial Sequence: Synthetic oligonucleotide
uuggacgguuacuaugaaa

SEQ ID NO: 95005 - RNA, 19 nt, Artificial Sequence
  Description of Artificial Sequence: Synthetic oligonucleotide
uuaccuucagaaggugaug

SEQ ID NO: 95006 - RNA, 19 nt, Artificial Sequence
  Description of Artificial Sequence: Synthetic oligonucleotide
uuaugggucuauugcuaaa

SEQ ID NO: 95007 - RNA, 19 nt, Artificial Sequence
  Description of Artificial Sequence: Synthetic oligonucleotide
cgacguaaccuuaaguucc

SEQ ID NO: 95008 - RNA, 19 nt, Artificial Sequence
  Description of Artificial Sequence: Synthetic oligonucleotide
cuuagugggagcuucaguu

SEQ ID NO: 95009 - RNA, 19 nt, Artificial Sequence
  Description of Artificial Sequence: Synthetic oligonucleotide
uacaacgauguauucccuu

SEQ ID NO: 95010 - RNA, 19 nt, Artificial Sequence
  Description of Artificial Sequence: Synthetic oligonucleotide
agauugauuugaugagcaa

SEQ ID NO: 95011 - RNA, 19 nt, Artificial Sequence
  Description of Artificial Sequence: Synthetic oligonucleotide
gaauuuuaacaggcguuga

SEQ ID NO: 95012 - RNA, 19 nt, Artificial Sequence
  Description of Artificial Sequence: Synthetic oligonucleotide
cauacuaaccaugcuauua

SEQ ID NO: 95013 - RNA, 19 nt, Artificial Sequence
  Description of Artificial Sequence: Synthetic oligonucleotide
gacgguuacuaugaaagcu

SEQ ID NO: 95014 - RNA, 19 nt, Artificial Sequence
  Description of Artificial Sequence: Synthetic oligonucleotide
caugugauuuacauaggcu

SEQ ID NO: 95015 - RNA, 19 nt, Artificial Sequence
  Description of Artificial Sequence: Synthetic oligonucleotide
caacauucaauacacucgu

SEQ ID NO: 95016 - RNA, 19 nt, Artificial Sequence
  Description of Artificial Sequence: Synthetic oligonucleotide
ugccagcaaccccugacgu

SEQ ID NO: 95017 - RNA, 19 nt, Artificial Sequence
  Description of Artificial Sequence: Synthetic oligonucleotide
aguagcuacaagaguuuca

SEQ ID NO: 95018 - RNA, 19 nt, Artificial Sequence
  Description of Artificial Sequence: Synthetic oligonucleotide
uuacuuggacgguuacuau

SEQ ID NO: 95019 - RNA, 19 nt, Artificial Sequence
  Description of Artificial Sequence: Synthetic oligonucleotide
agaguuucaauaacagauu

SEQ ID NO: 95020 - RNA, 19 nt, Artificial Sequence
  Description of Artificial Sequence: Synthetic oligonucleotide
  modified_base (4)..(4): a, c, u, g, unknown or other
uucnucugaugggaacuac

SEQ ID NO: 95021 - RNA, 19 nt, Artificial Sequence
  Description of Artificial Sequence: Synthetic oligonucleotide
agaaguugggauacacaca

SEQ ID NO: 95022 - RNA, 19 nt, Artificial Sequence
  Description of Artificial Sequence: Synthetic oligonucleotide
cucgacguaaccuuaaguu

SEQ ID NO: 95023 - RNA, 19 nt, Artificial Sequence
  Description of Artificial Sequence: Synthetic oligonucleotide
  modified_base (18)..(18): a, c, u, g, unknown or other
aaugcgcuaagugcuucnu

SEQ ID NO: 95024 - RNA, 19 nt, Artificial Sequence
  Description of Artificial Sequence: Synthetic oligonucleotide
gaacuggcgguaacagugc

SEQ ID NO: 95025 - RNA, 19 nt, Artificial Sequence
  Description of Artificial Sequence: Synthetic oligonucleotide
gcacacuagagaaaugccc

SEQ ID NO: 95026 - RNA, 19 nt, Artificial Sequence
  Description of Artificial Sequence: Synthetic oligonucleotide
caauugaugggcaguuuaa

SEQ ID NO: 95027 - RNA, 19 nt, Artificial Sequence
  Description of Artificial Sequence: Synthetic oligonucleotide
accucgacguaaccuuaag

SEQ ID NO: 95028 - RNA, 19 nt, Artificial Sequence
  Description of Artificial Sequence: Synthetic oligonucleotide
acguuaacugcgaauccug

SEQ ID NO: 95029 - RNA, 19 nt, Artificial Sequence
  Description of Artificial Sequence: Synthetic oligonucleotide
accaugcuauuacuggcaa

SEQ ID NO: 95030 - RNA, 19 nt, Artificial Sequence
  Description of Artificial Sequence: Synthetic oligonucleotide
cugauuaauauagguaaua

SEQ ID NO: 95031 - RNA, 19 nt, Artificial Sequence
  Description of Artificial Sequence: Synthetic oligonucleotide
uggacauauguaggaaaau

SEQ ID NO: 95032 - RNA, 19 nt, Artificial Sequence
  Description of Artificial Sequence: Synthetic oligonucleotide
ucauacuaaccaugcuauu

SEQ ID NO: 95033 - RNA, 19 nt, Artificial Sequence
  Description of Artificial Sequence: Synthetic oligonucleotide
guggacauauguaggaaaa

SEQ ID NO: 95034 - RNA, 19 nt, Artificial Sequence
  Description of Artificial Sequence: Synthetic oligonucleotide
aaaggacguuuugaugaaa

SEQ ID NO: 95035 - RNA, 19 nt, Artificial Sequence
  Description of Artificial Sequence: Synthetic oligonucleotide
guuacaauugaugggcagu

SEQ ID NO: 95036 - RNA, 19 nt, Artificial Sequence
  Description of Artificial Sequence: Synthetic oligonucleotide
ggacgguuacuaugaaagc

SEQ ID NO: 95037 - RNA, 19 nt, Artificial Sequence
  Description of Artificial Sequence: Synthetic oligonucleotide
cugugucauuggaauuggc

SEQ ID NO: 95038 - RNA, 19 nt, Artificial Sequence
  Description of Artificial Sequence: Synthetic oligonucleotide
cuacggagcucacuggaca

SEQ ID NO: 95039 - RNA, 19 nt, Artificial Sequence
  Description of Artificial Sequence: Synthetic oligonucleotide
acaggugauaaggauuuua

SEQ ID NO: 95040 - RNA, 19 nt, Artificial Sequence
  Description of Artificial Sequence: Synthetic oligonucleotide
cacucgugaacaccucgac

SEQ ID NO: 95041 - RNA, 19 nt, Artificial Sequence
  Description of Artificial Sequence: Synthetic oligonucleotide
gguuuaugauuauccuuca

SEQ ID NO: 95042 - RNA, 19 nt, Artificial Sequence
  Description of Artificial Sequence: Synthetic oligonucleotide
ugcuuaccuucagaaggug

SEQ ID NO: 95043 - RNA, 19 nt, Artificial Sequence
  Description of Artificial Sequence: Synthetic oligonucleotide
caugugguucauaaaccua

SEQ ID NO: 95044 - RNA, 19 nt, Artificial Sequence
  Description of Artificial Sequence: Synthetic oligonucleotide
gacguuaacugcgaauccu

SEQ ID NO: 95045 - RNA, 19 nt, Artificial Sequence
  Description of Artificial Sequence: Synthetic oligonucleotide
aggacuaauggagguuuga

SEQ ID NO: 95046 - RNA, 19 nt, Artificial Sequence
  Description of Artificial Sequence: Synthetic oligonucleotide
agcaaccccugacguuaac

SEQ ID NO: 95047 - RNA, 19 nt, Artificial Sequence
  Description of Artificial Sequence: Synthetic oligonucleotide
gaaguguaugaaagaccuc

SEQ ID NO: 95048 - RNA, 19 nt, Artificial Sequence
  Description of Artificial Sequence: Synthetic oligonucleotide
acacugugucauuggaauu

SEQ ID NO: 95049 - RNA, 19 nt, Artificial Sequence
  Description of Artificial Sequence: Synthetic oligonucleotide
cuggacaacaauacgucau

SEQ ID NO: 95050 - RNA, 19 nt, Artificial Sequence
  Description of Artificial Sequence: Synthetic oligonucleotide
aagcgugugugugcucuca

SEQ ID NO: 95051 - RNA, 19 nt, Artificial Sequence
  Description of Artificial Sequence: Synthetic oligonucleotide
cacuacggagcucacugga

SEQ ID NO: 95052 - RNA, 19 nt, Artificial Sequence
  Description of Artificial Sequence: Synthetic oligonucleotide
gcucacuagcaucagaacu

SEQ ID NO: 95053 - RNA, 19 nt, Artificial Sequence
  Description of Artificial Sequence: Synthetic oligonucleotide
acacuuggaaugacuacau

SEQ ID NO: 95054 - RNA, 19 nt, Artificial Sequence
  Description of Artificial Sequence: Synthetic oligonucleotide
ggcacacuagagaaaugcc

SEQ ID NO: 95055 - RNA, 19 nt, Artificial Sequence
  Description of Artificial Sequence: Synthetic oligonucleotide
cuuuagggucccauuugaa

SEQ ID NO: 95056 - RNA, 19 nt, Artificial Sequence
  Description of Artificial Sequence: Synthetic oligonucleotide
cugcgaauccugcccaguc

SEQ ID NO: 95057 - RNA, 19 nt, Artificial Sequence
  Description of Artificial Sequence: Synthetic oligonucleotide
aggcuaacacuuguaugga

SEQ ID NO: 95058 - RNA, 19 nt, Artificial Sequence
  Description of Artificial Sequence: Synthetic oligonucleotide
  modified_base (19)..(19): a, c, u, g, unknown or other
caaugcgcuaagugcuucn

SEQ ID NO: 95059 - RNA, 19 nt, Artificial Sequence
  Description of Artificial Sequence: Synthetic oligonucleotide
acguuuugaugaaaaugaa

SEQ ID NO: 95060 - RNA, 19 nt, Artificial Sequence
  Description of Artificial Sequence: Synthetic oligonucleotide
agagaccuuuggaugacaa

SEQ ID NO: 95061 - RNA, 19 nt, Artificial Sequence
  Description of Artificial Sequence: Synthetic oligonucleotide
gaacaccucgacguaaccu

SEQ ID NO: 95062 - RNA, 19 nt, Artificial Sequence
  Description of Artificial Sequence: Synthetic oligonucleotide
gugguucauaaaccuaaua

SEQ ID NO: 95063 - RNA, 19 nt, Artificial Sequence
  Description of Artificial Sequence: Synthetic oligonucleotide
auaggguguggcaauuuua

SEQ ID NO: 95064 - RNA, 19 nt, Artificial Sequence
  Description of Artificial Sequence: Synthetic oligonucleotide
agguugugugagucuucug

SEQ ID NO: 95065 - RNA, 19 nt, Artificial Sequence
  Description of Artificial Sequence: Synthetic oligonucleotide
guguaugaaagaccucccu

SEQ ID NO: 95066 - RNA, 19 nt, Artificial Sequence
  Description of Artificial Sequence: Synthetic oligonucleotide
acacucgugaacaccucga

SEQ ID NO: 95067 - RNA, 19 nt, Artificial Sequence
  Description of Artificial Sequence: Synthetic oligonucleotide
auguucggugauguugagu

SEQ ID NO: 95068 - RNA, 19 nt, Artificial Sequence
  Description of Artificial Sequence: Synthetic oligonucleotide
ucaccagguuuaugauuau

SEQ ID NO: 95069 - RNA, 19 nt, Artificial Sequence
  Description of Artificial Sequence: Synthetic oligonucleotide
cagguuuaugauuauccuu

SEQ ID NO: 95070 - RNA, 19 nt, Artificial Sequence
  Description of Artificial Sequence: Synthetic oligonucleotide
acguaaccuuaaguuccuc

SEQ ID NO: 95071 - RNA, 19 nt, Artificial Sequence
  Description of Artificial Sequence: Synthetic oligonucleotide
cguuaacugcgaauccugc

SEQ ID NO: 95072 - RNA, 19 nt, Artificial Sequence
  Description of Artificial Sequence: Synthetic oligonucleotide
cuuggaaaaguuguuccau

SEQ ID NO: 95073 - RNA, 19 nt, Artificial Sequence
  Description of Artificial Sequence: Synthetic oligonucleotide
acaauacgucaugugcuuu

SEQ ID NO: 95074 - RNA, 19 nt, Artificial Sequence
  Description of Artificial Sequence: Synthetic oligonucleotide
acacuuguauggaggugca

SEQ ID NO: 95075 - RNA, 19 nt, Artificial Sequence
  Description of Artificial Sequence: Synthetic oligonucleotide
auauaggguguggcaauuu

SEQ ID NO: 95076 - RNA, 19 nt, Artificial Sequence
  Description of Artificial Sequence: Synthetic oligonucleotide
auaggggcggggugggauu

SEQ ID NO: 95077 - RNA, 19 nt, Artificial Sequence
  Description of Artificial Sequence: Synthetic oligonucleotide
cguucagaaguugggauac

SEQ ID NO: 95078 - RNA, 19 nt, Artificial Sequence
  Description of Artificial Sequence: Synthetic oligonucleotide
gcgucuacuuuuauaauua

SEQ ID NO: 95079 - RNA, 19 nt, Artificial Sequence
  Description of Artificial Sequence: Synthetic oligonucleotide
gacguaaccuuaaguuccu

SEQ ID NO: 95080 - RNA, 19 nt, Artificial Sequence
  Description of Artificial Sequence: Synthetic oligonucleotide
  modified_base (15)..(15): a, c, u, g, unknown or other
gcgcuaagugcuucnucug

SEQ ID NO: 95081 - RNA, 19 nt, Artificial Sequence
  Description of Artificial Sequence: Synthetic oligonucleotide
guggggaacuggcgguaac

SEQ ID NO: 95082 - RNA, 19 nt, Artificial Sequence
  Description of Artificial Sequence: Synthetic oligonucleotide
uggcgguaacagugcuggc

SEQ ID NO: 95083 - RNA, 19 nt, Artificial Sequence
  Description of Artificial Sequence: Synthetic oligonucleotide
caauacgucaugugcuuuu

SEQ ID NO: 95084 - RNA, 19 nt, Artificial Sequence
  Description of Artificial Sequence: Synthetic oligonucleotide
augucagagaaaggacguu

SEQ ID NO: 95085 - RNA, 19 nt, Artificial Sequence
  Description of Artificial Sequence: Synthetic oligonucleotide
gcuuaccuucagaagguga

SEQ ID NO: 95086 - RNA, 19 nt, Artificial Sequence
  Description of Artificial Sequence: Synthetic oligonucleotide
cuuggacgguuacuaugaa

SEQ ID NO: 95087 - RNA, 19 nt, Artificial Sequence
  Description of Artificial Sequence: Synthetic oligonucleotide
agcaaugcgcuaagugcuu

SEQ ID NO: 95088 - RNA, 19 nt, Artificial Sequence
  Description of Artificial Sequence: Synthetic oligonucleotide
ugucccuuagugggagcuu

SEQ ID NO: 95089 - RNA, 19 nt, Artificial Sequence
  Description of Artificial Sequence: Synthetic oligonucleotide
ccuuaugaagcaucucugu

SEQ ID NO: 95090 - RNA, 19 nt, Artificial Sequence
  Description of Artificial Sequence: Synthetic oligonucleotide
ccagguuuaugauuauccu

SEQ ID NO: 95091 - RNA, 19 nt, Artificial Sequence
  Description of Artificial Sequence: Synthetic oligonucleotide
caccucgacguaaccuuaa

SEQ ID NO: 95092 - RNA, 19 nt, Artificial Sequence
  Description of Artificial Sequence: Synthetic oligonucleotide
gcauauaggguguggcaau

SEQ ID NO: 95093 - RNA, 19 nt, Artificial Sequence
  Description of Artificial Sequence: Synthetic oligonucleotide
acaccucgacguaaccuua

SEQ ID NO: 95094 - RNA, 19 nt, Artificial Sequence
  Description of Artificial Sequence: Synthetic oligonucleotide
cgguuacuaugaaagcuca

SEQ ID NO: 95095 - RNA, 19 nt, Artificial Sequence
  Description of Artificial Sequence: Synthetic oligonucleotide
cucgaguaccucugauggu

SEQ ID NO: 95096 - RNA, 19 nt, Artificial Sequence
  Description of Artificial Sequence: Synthetic oligonucleotide
ggacaacaauacgucaugu

SEQ ID NO: 95097 - RNA, 19 nt, Artificial Sequence
  Description of Artificial Sequence: Synthetic oligonucleotide
acggcacuacggagcucac

SEQ ID NO: 95098 - RNA, 19 nt, Artificial Sequence
  Description of Artificial Sequence: Synthetic oligonucleotide
ccagcaaccccugacguua

SEQ ID NO: 95099 - RNA, 19 nt, Artificial Sequence
  Description of Artificial Sequence: Synthetic oligonucleotide
gcaaugcgcuaagugcuuc

SEQ ID NO: 95100 - RNA, 19 nt, Artificial Sequence
  Description of Artificial Sequence: Synthetic oligonucleotide
guacaacgauguauucccu

SEQ ID NO: 95101 - RNA, 19 nt, Artificial Sequence
  Description of Artificial Sequence: Synthetic oligonucleotide
ggauucugcacagcuuaua

SEQ ID NO: 95102 - RNA, 19 nt, Artificial Sequence
  Description of Artificial Sequence: Synthetic oligonucleotide
  modified_base (8)..(8): a, c, u, g, unknown or other
gugcuucnucugaugggaa

SEQ ID NO: 95103 - RNA, 19 nt, Artificial Sequence
  Description of Artificial Sequence: Synthetic oligonucleotide
cguaaccuuaaguuccucu

SEQ ID NO: 95104 - RNA, 19 nt, Artificial Sequence
  Description of Artificial Sequence: Synthetic oligonucleotide
cauauaggguguggcaauu

SEQ ID NO: 95105 - RNA, 19 nt, Artificial Sequence
  Description of Artificial Sequence: Synthetic oligonucleotide
cuagcuugcuuggguuuua

SEQ ID NO: 95106 - RNA, 19 nt, Artificial Sequence
  Description of Artificial Sequence: Synthetic oligonucleotide
ccauuugaagcgucuacuu

SEQ ID NO: 95107 - RNA, 19 nt, Artificial Sequence
  Description of Artificial Sequence: Synthetic oligonucleotide
gcaaccccugacguuaacu

SEQ ID NO: 95108 - RNA, 19 nt, Artificial Sequence
  Description of Artificial Sequence: Synthetic oligonucleotide
ccugacguuaacugcgaau

SEQ ID NO: 95109 - RNA, 19 nt, Artificial Sequence
  Description of Artificial Sequence: Synthetic oligonucleotide
cagcaaccccugacguuaa

SEQ ID NO: 95110 - RNA, 19 nt, Artificial Sequence
  Description of Artificial Sequence: Synthetic oligonucleotide
cccauuugaagcgucuacu

SEQ ID NO: 95111 - RNA, 19 nt, Artificial Sequence
  Description of Artificial Sequence: Synthetic oligonucleotide
ccaugcuauuacuggcaaa

SEQ ID NO: 95112 - RNA, 19 nt, Artificial Sequence
  Description of Artificial Sequence: Synthetic oligonucleotide
ccucgacguaaccuuaagu

SEQ ID NO: 95113 - RNA, 19 nt, Artificial Sequence
  Description of Artificial Sequence: Synthetic oligonucleotide
ggcauuucaccagguuuau

SEQ ID NO: 95114 - RNA, 19 nt, Artificial Sequence
  Description of Artificial Sequence: Synthetic oligonucleotide
ccccugacguuaacugcga

SEQ ID NO: 95115 - RNA, 19 nt, Artificial Sequence
  Description of Artificial Sequence: Synthetic oligonucleotide
cccauacuuugguuuggcu

SEQ ID NO: 95116 - RNA, 19 nt, Artificial Sequence
  Description of Artificial Sequence: Synthetic oligonucleotide
ccuugcaauggcgccaccu

SEQ ID NO: 95117 - RNA, 19 nt, Artificial Sequence
  Description of Artificial Sequence: Synthetic oligonucleotide
cccugacguuaacugcgaa

SEQ ID NO: 95118 - RNA, 19 nt, Artificial Sequence
  Description of Artificial Sequence: Synthetic oligonucleotide
cacaggugauaaggauuuu

SEQ ID NO: 95119 - RNA, 19 nt, Artificial Sequence
  Description of Artificial Sequence: Synthetic oligonucleotide
aauuggguuauccaugucc

SEQ ID NO: 95120 - RNA, 19 nt, Artificial Sequence
  Description of Artificial Sequence: Synthetic oligonucleotide
aaucauaaucucuaaaccu

SEQ ID NO: 95121 - RNA, 19 nt, Artificial Sequence
  Description of Artificial Sequence: Synthetic oligonucleotide
uauuaugacuagaugaacc

SEQ ID NO: 95122 - RNA, 19 nt, Artificial Sequence
  Description of Artificial Sequence: Synthetic oligonucleotide
aaugguucaacccuuaaaa

SEQ ID NO: 95123 - RNA, 19 nt, Artificial Sequence
  Description of Artificial Sequence: Synthetic oligonucleotide
uaaaagagguuuuagacgu

SEQ ID NO: 95124 - RNA, 19 nt, Artificial Sequence
  Description of Artificial Sequence: Synthetic oligonucleotide
aauaucgugaaacaggaua

SEQ ID NO: 95125 - RNA, 19 nt, Artificial Sequence
  Description of Artificial Sequence: Synthetic oligonucleotide
aaaccguauuauuucuucc

SEQ ID NO: 95126 - RNA, 19 nt, Artificial Sequence
  Description of Artificial Sequence: Synthetic oligonucleotide
ugauauguaugauucaacc

SEQ ID NO: 95127 - RNA, 19 nt, Artificial Sequence
  Description of Artificial Sequence: Synthetic oligonucleotide
aacaagaauuguaauggcc

SEQ ID NO: 95128 - RNA, 19 nt, Artificial Sequence
  Description of Artificial Sequence: Synthetic oligonucleotide
uuuacauccucaauggacu

SEQ ID NO: 95129 - RNA, 19 nt, Artificial Sequence
  Description of Artificial Sequence: Synthetic oligonucleotide
auugcuauguacccuaauc

SEQ ID NO: 95130 - RNA, 19 nt, Artificial Sequence
  Description of Artificial Sequence: Synthetic oligonucleotide
uuagcaaugguucaacccu

SEQ ID NO: 95131 - RNA, 19 nt, Artificial Sequence
  Description of Artificial Sequence: Synthetic oligonucleotide
ucuacuacuucacuuaagu

SEQ ID NO: 95132 - RNA, 19 nt, Artificial Sequence
  Description of Artificial Sequence: Synthetic oligonucleotide
aaaagacacccauugccgg

SEQ ID NO: 95133 - RNA, 19 nt, Artificial Sequence
  Description of Artificial Sequence: Synthetic oligonucleotide
aaagacacccauugccggc

SEQ ID NO: 95134 - RNA, 19 nt, Artificial Sequence
  Description of Artificial Sequence: Synthetic oligonucleotide
aagucacucacuuaucuca

SEQ ID NO: 95135 - RNA, 19 nt, Artificial Sequence
  Description of Artificial Sequence: Synthetic oligonucleotide
uuuagcaaugguucaaccc

SEQ ID NO: 95136 - RNA, 19 nt, Artificial Sequence
  Description of Artificial Sequence: Synthetic oligonucleotide
acuaugacugaaaugcucc

SEQ ID NO: 95137 - RNA, 19 nt, Artificial Sequence
  Description of Artificial Sequence: Synthetic oligonucleotide
aaaauaucgugaaacagga

SEQ ID NO: 95138 - RNA, 19 nt, Artificial Sequence
  Description of Artificial Sequence: Synthetic oligonucleotide
ugcaaaaugcuucuuauua

SEQ ID NO: 95139 - RNA, 19 nt, Artificial Sequence
  Description of Artificial Sequence: Synthetic oligonucleotide
caaucauaaucucuaaacc

SEQ ID NO: 95140 - RNA, 19 nt, Artificial Sequence
  Description of Artificial Sequence: Synthetic oligonucleotide
uccaauaacugaaguaaag

SEQ ID NO: 95141 - RNA, 19 nt, Artificial Sequence
  Description of Artificial Sequence: Synthetic oligonucleotide
gaaacauagacacucggca

SEQ ID NO: 95142 - RNA, 19 nt, Artificial Sequence
  Description of Artificial Sequence: Synthetic oligonucleotide
aagaagucuacgugcacag

SEQ ID NO: 95143 - RNA, 19 nt, Artificial Sequence
  Description of Artificial Sequence: Synthetic oligonucleotide
cugaaguaaagguagacuc

SEQ ID NO: 95144 - RNA, 19 nt, Artificial Sequence
  Description of Artificial Sequence: Synthetic oligonucleotide
uguaagugacuuugcaggg

SEQ ID NO: 95145 - RNA, 19 nt, Artificial Sequence
  Description of Artificial Sequence: Synthetic oligonucleotide
auuaugacuagaugaaccu

SEQ ID NO: 95146 - RNA, 19 nt, Artificial Sequence
  Description of Artificial Sequence: Synthetic oligonucleotide
gaaaguuccguccguacag

SEQ ID NO: 95147 - RNA, 19 nt, Artificial Sequence
  Description of Artificial Sequence: Synthetic oligonucleotide
uuauaacaaagucacucac

SEQ ID NO: 95148 - RNA, 19 nt, Artificial Sequence
  Description of Artificial Sequence: Synthetic oligonucleotide
agagcuccuauagaaaacc

SEQ ID NO: 95149 - RNA, 19 nt, Artificial Sequence
  Description of Artificial Sequence: Synthetic oligonucleotide
agucuuugggaagugauac

SEQ ID NO: 95150 - RNA, 19 nt, Artificial Sequence
  Description of Artificial Sequence: Synthetic oligonucleotide
uaacaauuaaacucagcac

SEQ ID NO: 95151 - RNA, 19 nt, Artificial Sequence
  Description of Artificial Sequence: Synthetic oligonucleotide
auuguaauggcccuggaua

SEQ ID NO: 95152 - RNA, 19 nt, Artificial Sequence
  Description of Artificial Sequence: Synthetic oligonucleotide
uguacccuaauccuccaag

SEQ ID NO: 95153 - RNA, 19 nt, Artificial Sequence
  Description of Artificial Sequence: Synthetic oligonucleotide
agaaacauagacacucggc

SEQ ID NO: 95154 - RNA, 19 nt, Artificial Sequence
  Description of Artificial Sequence: Synthetic oligonucleotide
ugugagucaacagaugacc

SEQ ID NO: 95155 - RNA, 19 nt, Artificial Sequence
  Description of Artificial Sequence: Synthetic oligonucleotide
ugcauuaccagaagagaug

SEQ ID NO: 95156 - RNA, 19 nt, Artificial Sequence
  Description of Artificial Sequence: Synthetic oligonucleotide
cuauguacccuaauccucc

SEQ ID NO: 95157 - RNA, 19 nt, Artificial Sequence
  Description of Artificial Sequence: Synthetic oligonucleotide
aaccguauuauuucuuccu

SEQ ID NO: 95158 - RNA, 19 nt, Artificial Sequence
  Description of Artificial Sequence: Synthetic oligonucleotide
aacggauaaccccauagaa

SEQ ID NO: 95159 - RNA, 19 nt, Artificial Sequence
  Description of Artificial Sequence: Synthetic oligonucleotide
aaggcuauuucuauaauau

SEQ ID NO: 95160 - RNA, 19 nt, Artificial Sequence
  Description of Artificial Sequence: Synthetic oligonucleotide
auaaaaccguauuauuucu

SEQ ID NO: 95161 - RNA, 19 nt, Artificial Sequence
  Description of Artificial Sequence: Synthetic oligonucleotide
uuagguaccaguuguuacu

SEQ ID NO: 95162 - RNA, 19 nt, Artificial Sequence
  Description of Artificial Sequence: Synthetic oligonucleotide
auccuagacucucuuuucc

SEQ ID NO: 95163 - RNA, 19 nt, Artificial Sequence
  Description of Artificial Sequence: Synthetic oligonucleotide
gauaaccccauagaauggg

SEQ ID NO: 95164 - RNA, 19 nt, Artificial Sequence
  Description of Artificial Sequence: Synthetic oligonucleotide
ugagguagauccuguaacc

SEQ ID NO: 95165 - RNA, 19 nt, Artificial Sequence
  Description of Artificial Sequence: Synthetic oligonucleotide
caguuuuacgaacagcgcc

SEQ ID NO: 95166 - RNA, 19 nt, Artificial Sequence
  Description of Artificial Sequence: Synthetic oligonucleotide
gucuaaguaacacaguguc

SEQ ID NO: 95167 - RNA, 19 nt, Artificial Sequence
  Description of Artificial Sequence: Synthetic oligonucleotide
cuguuauaagaucugguac

SEQ ID NO: 95168 - RNA, 19 nt, Artificial Sequence
  Description of Artificial Sequence: Synthetic oligonucleotide
aaagaagucuacgugcaca

SEQ ID NO: 95169 - RNA, 19 nt, Artificial Sequence
  Description of Artificial Sequence: Synthetic oligonucleotide
gacuagaugaaccuuuguc

SEQ ID NO: 95170 - RNA, 19 nt, Artificial Sequence
  Description of Artificial Sequence: Synthetic oligonucleotide
aagaccauucuaguaacug

SEQ ID NO: 95171 - RNA, 19 nt, Artificial Sequence
  Description of Artificial Sequence: Synthetic oligonucleotide
ucuggauaaucaagcauga

SEQ ID NO: 95172 - RNA, 19 nt, Artificial Sequence
  Description of Artificial Sequence: Synthetic oligonucleotide
uuauuucauauccuugguc

SEQ ID NO: 95173 - RNA, 19 nt, Artificial Sequence
  Description of Artificial Sequence: Synthetic oligonucleotide
aggugaaguagcgagugcc

SEQ ID NO: 95174 - RNA, 19 nt, Artificial Sequence
  Description of Artificial Sequence: Synthetic oligonucleotide
aggguuaacuaucucuguc

SEQ ID NO: 95175 - RNA, 19 nt, Artificial Sequence
  Description of Artificial Sequence: Synthetic oligonucleotide
uagaccgugugcauuacca

SEQ ID NO: 95176 - RNA, 19 nt, Artificial Sequence
  Description of Artificial Sequence: Synthetic oligonucleotide
aauggacuaaaagagguuu

SEQ ID NO: 95177 - RNA, 19 nt, Artificial Sequence
  Description of Artificial Sequence: Synthetic oligonucleotide
cuuccuagagugcaaaaug

SEQ ID NO: 95178 - RNA, 19 nt, Artificial Sequence
  Description of Artificial Sequence: Synthetic oligonucleotide
ugaaaguuccguccguaca

SEQ ID NO: 95179 - RNA, 19 nt, Artificial Sequence
  Description of Artificial Sequence: Synthetic oligonucleotide
aucuggauaaucaagcaug

SEQ ID NO: 95180 - RNA, 19 nt, Artificial Sequence
  Description of Artificial Sequence: Synthetic oligonucleotide
gaugucggggucaucauag

SEQ ID NO: 95181 - RNA, 19 nt, Artificial Sequence
  Description of Artificial Sequence: Synthetic oligonucleotide
cucuaaaccuuccuuuucc

SEQ ID NO: 95182 - RNA, 19 nt, Artificial Sequence
  Description of Artificial Sequence: Synthetic oligonucleotide
ugagucucacuauaguacu

SEQ ID NO: 95183 - RNA, 19 nt, Artificial Sequence
  Description of Artificial Sequence: Synthetic oligonucleotide
aaaguuccguccguacagc

SEQ ID NO: 95184 - RNA, 19 nt, Artificial Sequence
  Description of Artificial Sequence: Synthetic oligonucleotide
uccuuaguagcucuugagu

SEQ ID NO: 95185 - RNA, 19 nt, Artificial Sequence
  Description of Artificial Sequence: Synthetic oligonucleotide
ugcuauguacccuaauccu

SEQ ID NO: 95186 - RNA, 19 nt, Artificial Sequence
  Description of Artificial Sequence: Synthetic oligonucleotide
agaauuguaauggcccugg

SEQ ID NO: 95187 - RNA, 19 nt, Artificial Sequence
  Description of Artificial Sequence: Synthetic oligonucleotide
aucaauguaccauggauuu

SEQ ID NO: 95188 - RNA, 19 nt, Artificial Sequence
  Description of Artificial Sequence: Synthetic oligonucleotide
uuaagagcuccuauagaaa

SEQ ID NO: 95189 - RNA, 19 nt, Artificial Sequence
  Description of Artificial Sequence: Synthetic oligonucleotide
aggaauccuuugcugaagg

SEQ ID NO: 95190 - RNA, 19 nt, Artificial Sequence
  Description of Artificial Sequence: Synthetic oligonucleotide
accguauuauuucuuccuc

SEQ ID NO: 95191 - RNA, 19 nt, Artificial Sequence
  Description of Artificial Sequence: Synthetic oligonucleotide
uguaugauucaaccuccug

SEQ ID NO: 95192 - RNA, 19 nt, Artificial Sequence
  Description of Artificial Sequence: Synthetic oligonucleotide
ccuauagaaaaccuguuag

SEQ ID NO: 95193 - RNA, 19 nt, Artificial Sequence
  Description of Artificial Sequence: Synthetic oligonucleotide
ugcauuguauccccugggc

SEQ ID NO: 95194 - RNA, 19 nt, Artificial Sequence
  Description of Artificial Sequence: Synthetic oligonucleotide
uaagugacuuugcaggguc

SEQ ID NO: 95195 - RNA, 19 nt, Artificial Sequence
  Description of Artificial Sequence: Synthetic oligonucleotide
cuagagucgggucugcagc

SEQ ID NO: 95196 - RNA, 19 nt, Artificial Sequence
  Description of Artificial Sequence: Synthetic oligonucleotide
uacauugcaaguccuccac

SEQ ID NO: 95197 - RNA, 19 nt, Artificial Sequence
  Description of Artificial Sequence: Synthetic oligonucleotide
auauccuagacucucuuuu

SEQ ID NO: 95198 - RNA, 19 nt, Artificial Sequence
  Description of Artificial Sequence: Synthetic oligonucleotide
uccuauagaaaaccuguua

SEQ ID NO: 95199 - RNA, 19 nt, Artificial Sequence
  Description of Artificial Sequence: Synthetic oligonucleotide
uucucgcuggauaaggagu

SEQ ID NO: 95200 - RNA, 19 nt, Artificial Sequence
  Description of Artificial Sequence: Synthetic oligonucleotide
agauucuaugcuuucucca

SEQ ID NO: 95201 - RNA, 19 nt, Artificial Sequence
  Description of Artificial Sequence: Synthetic oligonucleotide
ucugagguagauccuguaa

SEQ ID NO: 95202 - RNA, 19 nt, Artificial Sequence
  Description of Artificial Sequence: Synthetic oligonucleotide
auuaaacucagcacaccuc

SEQ ID NO: 95203 - RNA, 19 nt, Artificial Sequence
  Description of Artificial Sequence: Synthetic oligonucleotide
uucuacuacuucacuuaag

SEQ ID NO: 95204 - RNA, 19 nt, Artificial Sequence
  Description of Artificial Sequence: Synthetic oligonucleotide
gcuagcacgucacugagcc

SEQ ID NO: 95205 - RNA, 19 nt, Artificial Sequence
  Description of Artificial Sequence: Synthetic oligonucleotide
ucaagcaugauggugccuc

SEQ ID NO: 95206 - RNA, 19 nt, Artificial Sequence
  Description of Artificial Sequence: Synthetic oligonucleotide
ugcaucgcaaagaagucua

SEQ ID NO: 95207 - RNA, 19 nt, Artificial Sequence
  Description of Artificial Sequence: Synthetic oligonucleotide
uacuuuaagagcuccuaua

SEQ ID NO: 95208 - RNA, 19 nt, Artificial Sequence
  Description of Artificial Sequence: Synthetic oligonucleotide
ucgugaaacaggauauuua

SEQ ID NO: 95209 - RNA, 19 nt, Artificial Sequence
  Description of Artificial Sequence: Synthetic oligonucleotide
uguccuuaguagcucuuga

SEQ ID NO: 95210 - RNA, 19 nt, Artificial Sequence
  Description of Artificial Sequence: Synthetic oligonucleotide
gggucuaaguaacacagug

SEQ ID NO: 95211 - RNA, 19 nt, Artificial Sequence
  Description of Artificial Sequence: Synthetic oligonucleotide
aagugauacuggaugauau

SEQ ID NO: 95212 - RNA, 19 nt, Artificial Sequence
  Description of Artificial Sequence: Synthetic oligonucleotide
cucguuucuaugcagagaa

SEQ ID NO: 95213 - RNA, 19 nt, Artificial Sequence
  Description of Artificial Sequence: Synthetic oligonucleotide
aaaucugauagaaguuaca

SEQ ID NO: 95214 - RNA, 19 nt, Artificial Sequence
  Description of Artificial Sequence: Synthetic oligonucleotide
gacacucggcaaaauacag

SEQ ID NO: 95215 - RNA, 19 nt, Artificial Sequence
  Description of Artificial Sequence: Synthetic oligonucleotide
uggccaauccaacggauaa

SEQ ID NO: 95216 - RNA, 19 nt, Artificial Sequence
  Description of Artificial Sequence: Synthetic oligonucleotide
guucucgcuggauaaggag

SEQ ID NO: 95217 - RNA, 19 nt, Artificial Sequence
  Description of Artificial Sequence: Synthetic oligonucleotide
uguucucgcuggauaagga

SEQ ID NO: 95218 - RNA, 19 nt, Artificial Sequence
  Description of Artificial Sequence: Synthetic oligonucleotide
auacauugcaaguccucca

SEQ ID NO: 95219 - RNA, 19 nt, Artificial Sequence
  Description of Artificial Sequence: Synthetic oligonucleotide
aggcuauuucuauaauaug

SEQ ID NO: 95220 - RNA, 19 nt, Artificial Sequence
  Description of Artificial Sequence: Synthetic oligonucleotide
agacucuuaauaaaaccgu

SEQ ID NO: 95221 - RNA, 19 nt, Artificial Sequence
  Description of Artificial Sequence: Synthetic oligonucleotide
auacuuuaagagcuccuau

SEQ ID NO: 95222 - RNA, 19 nt, Artificial Sequence
  Description of Artificial Sequence: Synthetic oligonucleotide
auaucgugaaacaggauau

SEQ ID NO: 95223 - RNA, 19 nt, Artificial Sequence
  Description of Artificial Sequence: Synthetic oligonucleotide
acugacaaugacaguggac

SEQ ID NO: 95224 - RNA, 19 nt, Artificial Sequence
  Description of Artificial Sequence: Synthetic oligonucleotide
uggguuauccauguccaca

SEQ ID NO: 95225 - RNA, 19 nt, Artificial Sequence
  Description of Artificial Sequence: Synthetic oligonucleotide
uuuagacgucacaauuaaa

SEQ ID NO: 95226 - RNA, 19 nt, Artificial Sequence
  Description of Artificial Sequence: Synthetic oligonucleotide
aucauaaucucuaaaccuu

SEQ ID NO: 95227 - RNA, 19 nt, Artificial Sequence
  Description of Artificial Sequence: Synthetic oligonucleotide
aaaagagguuuuagacguc

SEQ ID NO: 95228 - RNA, 19 nt, Artificial Sequence
  Description of Artificial Sequence: Synthetic oligonucleotide
aauugcuauguacccuaau

SEQ ID NO: 95229 - RNA, 19 nt, Artificial Sequence
  Description of Artificial Sequence: Synthetic oligonucleotide
ccugguuacuuguacaagc

SEQ ID NO: 95230 - RNA, 19 nt, Artificial Sequence
  Description of Artificial Sequence: Synthetic oligonucleotide
cugaauuguaggaacucca

SEQ ID NO: 95231 - RNA, 19 nt, Artificial Sequence
  Description of Artificial Sequence: Synthetic oligonucleotide
auuggguuauccaugucca

SEQ ID NO: 95232 - RNA, 19 nt, Artificial Sequence
  Description of Artificial Sequence: Synthetic oligonucleotide
cuacuucacuuaaguagcc

SEQ ID NO: 95233 - RNA, 19 nt, Artificial Sequence
  Description of Artificial Sequence: Synthetic oligonucleotide
uauccuagacucucuuuuc

SEQ ID NO: 95234 - RNA, 19 nt, Artificial Sequence
  Description of Artificial Sequence: Synthetic oligonucleotide
gacuaugagcaaugcugcc

SEQ ID NO: 95235 - RNA, 19 nt, Artificial Sequence
  Description of Artificial Sequence: Synthetic oligonucleotide
auucucagaggguuaacua

SEQ ID NO: 95236 - RNA, 19 nt, Artificial Sequence
  Description of Artificial Sequence: Synthetic oligonucleotide
ugauuagaaacaggcugca

SEQ ID NO: 95237 - RNA, 19 nt, Artificial Sequence
  Description of Artificial Sequence: Synthetic oligonucleotide
ugaaguagcgagugccccu

SEQ ID NO: 95238 - RNA, 19 nt, Artificial Sequence
  Description of Artificial Sequence: Synthetic oligonucleotide
aggaaaucagcacuauaua

SEQ ID NO: 95239 - RNA, 19 nt, Artificial Sequence
  Description of Artificial Sequence: Synthetic oligonucleotide
aguugagucuaaauaacaa

SEQ ID NO: 95240 - RNA, 19 nt, Artificial Sequence
  Description of Artificial Sequence: Synthetic oligonucleotide
ucggcaaaauacagacaug

SEQ ID NO: 95241 - RNA, 19 nt, Artificial Sequence
  Description of Artificial Sequence: Synthetic oligonucleotide
ucuaugcagagaacagcaa

SEQ ID NO: 95242 - RNA, 19 nt, Artificial Sequence
  Description of Artificial Sequence: Synthetic oligonucleotide
uccuagacucucuuuuccu

SEQ ID NO: 95243 - RNA, 19 nt, Artificial Sequence
  Description of Artificial Sequence: Synthetic oligonucleotide
caucgcaaagaagucuacg

SEQ ID NO: 95244 - RNA, 19 nt, Artificial Sequence
  Description of Artificial Sequence: Synthetic oligonucleotide
ucauagcacucucuacacu

SEQ ID NO: 95245 - RNA, 19 nt, Artificial Sequence
  Description of Artificial Sequence: Synthetic oligonucleotide
caaggacgcaaaccuagag

SEQ ID NO: 95246 - RNA, 19 nt, Artificial Sequence
  Description of Artificial Sequence: Synthetic oligonucleotide
accuguuagguaccaguug

SEQ ID NO: 95247 - RNA, 19 nt, Artificial Sequence
  Description of Artificial Sequence: Synthetic oligonucleotide
cggauaaccccauagaaug

SEQ ID NO: 95248 - RNA, 19 nt, Artificial Sequence
  Description of Artificial Sequence: Synthetic oligonucleotide
uucacuuaaguagccucca

SEQ ID NO: 95249 - RNA, 19 nt, Artificial Sequence
  Description of Artificial Sequence: Synthetic oligonucleotide
agaccgugugcauuaccag

SEQ ID NO: 95250 - RNA, 19 nt, Artificial Sequence
  Description of Artificial Sequence: Synthetic oligonucleotide
auaaccccauagaaugggg

SEQ ID NO: 95251 - RNA, 19 nt, Artificial Sequence
  Description of Artificial Sequence: Synthetic oligonucleotide
aauccguugucaucaucuu

SEQ ID NO: 95252 - RNA, 19 nt, Artificial Sequence
  Description of Artificial Sequence: Synthetic oligonucleotide
augucggggucaucauagc

SEQ ID NO: 95253 - RNA, 19 nt, Artificial Sequence
  Description of Artificial Sequence: Synthetic oligonucleotide
uguaauggcccuggauacc

SEQ ID NO: 95254 - RNA, 19 nt, Artificial Sequence
  Description of Artificial Sequence: Synthetic oligonucleotide
gguuacuuguacaagcuca

SEQ ID NO: 95255 - RNA, 19 nt, Artificial Sequence
  Description of Artificial Sequence: Synthetic oligonucleotide
cugcauuguauccccuggg

SEQ ID NO: 95256 - RNA, 19 nt, Artificial Sequence
  Description of Artificial Sequence: Synthetic oligonucleotide
uguuagguaccaguuguua

SEQ ID NO: 95257 - RNA, 19 nt, Artificial Sequence
  Description of Artificial Sequence: Synthetic oligonucleotide
cucggcaaaauacagacau

SEQ ID NO: 95258 - RNA, 19 nt, Artificial Sequence
  Description of Artificial Sequence: Synthetic oligonucleotide
aagucuacgugcacagccu

SEQ ID NO: 95259 - RNA, 19 nt, Artificial Sequence
  Description of Artificial Sequence: Synthetic oligonucleotide
uauguacccuaauccucca

SEQ ID NO: 95260 - RNA, 19 nt, Artificial Sequence
  Description of Artificial Sequence: Synthetic oligonucleotide
aagacacccauugccggca

SEQ ID NO: 95261 - RNA, 19 nt, Artificial Sequence
  Description of Artificial Sequence: Synthetic oligonucleotide
aaaucuguucucgcuggau

SEQ ID NO: 95262 - RNA, 19 nt, Artificial Sequence
  Description of Artificial Sequence: Synthetic oligonucleotide
gaaguagcgagugccccug

SEQ ID NO: 95263 - RNA, 19 nt, Artificial Sequence
  Description of Artificial Sequence: Synthetic oligonucleotide
acuuccuagagugcaaaau

SEQ ID NO: 95264 - RNA, 19 nt, Artificial Sequence
  Description of Artificial Sequence: Synthetic oligonucleotide
auauucucagaggguuaac

SEQ ID NO: 95265 - RNA, 19 nt, Artificial Sequence
  Description of Artificial Sequence: Synthetic oligonucleotide
auccugaugcagccucaac

SEQ ID NO: 95266 - RNA, 19 nt, Artificial Sequence
  Description of Artificial Sequence: Synthetic oligonucleotide
ugggucuaaguaacacagu

SEQ ID NO: 95267 - RNA, 19 nt, Artificial Sequence
  Description of Artificial Sequence: Synthetic oligonucleotide
agcuccuauagaaaaccug

SEQ ID NO: 95268 - RNA, 19 nt, Artificial Sequence
  Description of Artificial Sequence: Synthetic oligonucleotide
ggacuaugagcaaugcugc

SEQ ID NO: 95269 - RNA, 19 nt, Artificial Sequence
  Description of Artificial Sequence: Synthetic oligonucleotide
agacacucggcaaaauaca

SEQ ID NO: 95270 - RNA, 19 nt, Artificial Sequence
  Description of Artificial Sequence: Synthetic oligonucleotide
uuaugacuagaugaaccuu

SEQ ID NO: 95271 - RNA, 19 nt, Artificial Sequence
  Description of Artificial Sequence: Synthetic oligonucleotide
guacccuaauccuccaaga

SEQ ID NO: 95272 - RNA, 19 nt, Artificial Sequence
  Description of Artificial Sequence: Synthetic oligonucleotide
caaagaagucuacgugcac

SEQ ID NO: 95273 - RNA, 19 nt, Artificial Sequence
  Description of Artificial Sequence: Synthetic oligonucleotide
cugggagugucuucaagca

SEQ ID NO: 95274 - RNA, 19 nt, Artificial Sequence
  Description of Artificial Sequence: Synthetic oligonucleotide
aacacagcgcuaagcuuug

SEQ ID NO: 95275 - RNA, 19 nt, Artificial Sequence
  Description of Artificial Sequence: Synthetic oligonucleotide
gccaauccaacggauaacc

SEQ ID NO: 95276 - RNA, 19 nt, Artificial Sequence
  Description of Artificial Sequence: Synthetic oligonucleotide
ucgcuggauaaggaguuca

SEQ ID NO: 95277 - RNA, 19 nt, Artificial Sequence
  Description of Artificial Sequence: Synthetic oligonucleotide
agaugcggcauugccuggg

SEQ ID NO: 95278 - RNA, 19 nt, Artificial Sequence
  Description of Artificial Sequence: Synthetic oligonucleotide
guggcucguuucuaugcag

SEQ ID NO: 95279 - RNA, 19 nt, Artificial Sequence
  Description of Artificial Sequence: Synthetic oligonucleotide
ggauaaccccauagaaugg

SEQ ID NO: 95280 - RNA, 19 nt, Artificial Sequence
  Description of Artificial Sequence: Synthetic oligonucleotide
gacucuuaauaaaaccgua

SEQ ID NO: 95281 - RNA, 19 nt, Artificial Sequence
  Description of Artificial Sequence: Synthetic oligonucleotide
cuagaccgugugcauuacc

SEQ ID NO: 95282 - RNA, 19 nt, Artificial Sequence
  Description of Artificial Sequence: Synthetic oligonucleotide
caacggauaaccccauaga

SEQ ID NO: 95283 - RNA, 19 nt, Artificial Sequence
  Description of Artificial Sequence: Synthetic oligonucleotide
gugaaguagcgagugcccc

SEQ ID NO: 95284 - RNA, 19 nt, Artificial Sequence
  Description of Artificial Sequence: Synthetic oligonucleotide
ucucccacuuccgggcagg

SEQ ID NO: 95285 - RNA, 19 nt, Artificial Sequence
  Description of Artificial Sequence: Synthetic oligonucleotide
aaauaucgugaaacaggau

SEQ ID NO: 95286 - RNA, 19 nt, Artificial Sequence
  Description of Artificial Sequence: Synthetic oligonucleotide
ucguuucuaugcagagaac

SEQ ID NO: 95287 - RNA, 19 nt, Artificial Sequence
  Description of Artificial Sequence: Synthetic oligonucleotide
caucuucugacaggggaug

SEQ ID NO: 95288 - RNA, 19 nt, Artificial Sequence
  Description of Artificial Sequence: Synthetic oligonucleotide
cacagcgcuaagcuuugug

SEQ ID NO: 95289 - RNA, 19 nt, Artificial Sequence
  Description of Artificial Sequence: Synthetic oligonucleotide
gcuauuucuauaauaugaa

SEQ ID NO: 95290 - RNA, 19 nt, Artificial Sequence
  Description of Artificial Sequence: Synthetic oligonucleotide
uuggguuauccauguccac

SEQ ID NO: 95291 - RNA, 19 nt, Artificial Sequence
  Description of Artificial Sequence: Synthetic oligonucleotide
uacuuccuagagugcaaaa

SEQ ID NO: 95292 - RNA, 19 nt, Artificial Sequence
  Description of Artificial Sequence: Synthetic oligonucleotide
uuacgaacagcgccuucuu

SEQ ID NO: 95293 - RNA, 19 nt, Artificial Sequence
  Description of Artificial Sequence: Synthetic oligonucleotide
gcuuuaucuucccugcuga

SEQ ID NO: 95294 - RNA, 19 nt, Artificial Sequence
  Description of Artificial Sequence: Synthetic oligonucleotide
guagccuccaaaugcuaaa

SEQ ID NO: 95295 - RNA, 19 nt, Artificial Sequence
  Description of Artificial Sequence: Synthetic oligonucleotide
caaugguucaacccuuaaa

SEQ ID NO: 95296 - RNA, 19 nt, Artificial Sequence
  Description of Artificial Sequence: Synthetic oligonucleotide
cagcuagcacgucacugag

SEQ ID NO: 95297 - RNA, 19 nt, Artificial Sequence
  Description of Artificial Sequence: Synthetic oligonucleotide
caucaauguaccauggauu

SEQ ID NO: 95298 - RNA, 19 nt, Artificial Sequence
  Description of Artificial Sequence: Synthetic oligonucleotide
ccauugccggcaaugggcg

SEQ ID NO: 95299 - RNA, 19 nt, Artificial Sequence
  Description of Artificial Sequence: Synthetic oligonucleotide
agcuagcacgucacugagc

SEQ ID NO: 95300 - RNA, 19 nt, Artificial Sequence
  Description of Artificial Sequence: Synthetic oligonucleotide
accaacaccucuugacaua

SEQ ID NO: 95301 - RNA, 19 nt, Artificial Sequence
  Description of Artificial Sequence: Synthetic oligonucleotide
cuucuggugugauacuuua

SEQ ID NO: 95302 - RNA, 19 nt, Artificial Sequence
  Description of Artificial Sequence: Synthetic oligonucleotide
guagauccuguaaccuuug

SEQ ID NO: 95303 - RNA, 19 nt, Artificial Sequence
  Description of Artificial Sequence: Synthetic oligonucleotide
cauacuuccuagagugcaa

SEQ ID NO: 95304 - RNA, 19 nt, Artificial Sequence
  Description of Artificial Sequence: Synthetic oligonucleotide
agaugucggggucaucaua

SEQ ID NO: 95305 - RNA, 19 nt, Artificial Sequence
  Description of Artificial Sequence: Synthetic oligonucleotide
gccaauuggguuauccaug

SEQ ID NO: 95306 - RNA, 19 nt, Artificial Sequence
  Description of Artificial Sequence: Synthetic oligonucleotide
ccuagacucucuuuuccug

SEQ ID NO: 95307 - RNA, 19 nt, Artificial Sequence
  Description of Artificial Sequence: Synthetic oligonucleotide
acacucggcaaaauacaga

SEQ ID NO: 95308 - RNA, 19 nt, Artificial Sequence
  Description of Artificial Sequence: Synthetic oligonucleotide
aaugggcgccagacagaac

SEQ ID NO: 95309 - RNA, 19 nt, Artificial Sequence
  Description of Artificial Sequence: Synthetic oligonucleotide
cucuagaccgugugcauua

SEQ ID NO: 95310 - RNA, 19 nt, Artificial Sequence
  Description of Artificial Sequence: Synthetic oligonucleotide
ggugaaguagcgagugccc

SEQ ID NO: 95311 - RNA, 19 nt, Artificial Sequence
  Description of Artificial Sequence: Synthetic oligonucleotide
cuagcacgucacugagccc

SEQ ID NO: 95312 - RNA, 19 nt, Artificial Sequence
  Description of Artificial Sequence: Synthetic oligonucleotide
ggacgcaaaccuagagucg

SEQ ID NO: 95313 - RNA, 19 nt, Artificial Sequence
  Description of Artificial Sequence: Synthetic oligonucleotide
ccaauccaacggauaaccc

SEQ ID NO: 95314 - RNA, 19 nt, Artificial Sequence
  Description of Artificial Sequence: Synthetic oligonucleotide
cuguccuuaguagcucuug

SEQ ID NO: 95315 - RNA, 19 nt, Artificial Sequence
  Description of Artificial Sequence: Synthetic oligonucleotide
gcuauguacccuaauccuc

SEQ ID NO: 95316 - RNA, 19 nt, Artificial Sequence
  Description of Artificial Sequence: Synthetic oligonucleotide
agucuacgugcacagccuu

SEQ ID NO: 95317 - RNA, 19 nt, Artificial Sequence
  Description of Artificial Sequence: Synthetic oligonucleotide
gcgcuaagcuuugugcucg

SEQ ID NO: 95318 - RNA, 19 nt, Artificial Sequence
  Description of Artificial Sequence: Synthetic oligonucleotide
gguuaacuaucucuguccu

SEQ ID NO: 95319 - RNA, 19 nt, Artificial Sequence
  Description of Artificial Sequence: Synthetic oligonucleotide
gaugcggcauugccuggga

SEQ ID NO: 95320 - RNA, 19 nt, Artificial Sequence
  Description of Artificial Sequence: Synthetic oligonucleotide
ucuagaccgugugcauuac

SEQ ID NO: 95321 - RNA, 19 nt, Artificial Sequence
  Description of Artificial Sequence: Synthetic oligonucleotide
caccucuagaccgugugca

SEQ ID NO: 95322 - RNA, 19 nt, Artificial Sequence
  Description of Artificial Sequence: Synthetic oligonucleotide
gcuaguuugggaggccucc

SEQ ID NO: 95323 - RNA, 19 nt, Artificial Sequence
  Description of Artificial Sequence: Synthetic oligonucleotide
guuacagucuugaacuuuu

SEQ ID NO: 95324 - RNA, 19 nt, Artificial Sequence
  Description of Artificial Sequence: Synthetic oligonucleotide
gugcagaagaauuguacuu

SEQ ID NO: 95325 - RNA, 19 nt, Artificial Sequence
  Description of Artificial Sequence: Synthetic oligonucleotide
augcggcauugccugggag

SEQ ID NO: 95326 - RNA, 19 nt, Artificial Sequence
  Description of Artificial Sequence: Synthetic oligonucleotide
auguaugauucaaccuccu

SEQ ID NO: 95327 - RNA, 19 nt, Artificial Sequence
  Description of Artificial Sequence: Synthetic oligonucleotide
uccaacggauaaccccaua

SEQ ID NO: 95328 - RNA, 19 nt, Artificial Sequence
  Description of Artificial Sequence: Synthetic oligonucleotide
accucuagaccgugugcau

SEQ ID NO: 95329 - RNA, 19 nt, Artificial Sequence
  Description of Artificial Sequence: Synthetic oligonucleotide
auguacccuaauccuccaa

SEQ ID NO: 95330 - RNA, 19 nt, Artificial Sequence
  Description of Artificial Sequence: Synthetic oligonucleotide
gcaaaccuagagucggguc

SEQ ID NO: 95331 - RNA, 19 nt, Artificial Sequence
  Description of Artificial Sequence: Synthetic oligonucleotide
acgcaaaccuagagucggg

SEQ ID NO: 95332 - RNA, 19 nt, Artificial Sequence
  Description of Artificial Sequence: Synthetic oligonucleotide
ccaguugccaauuggguua

SEQ ID NO: 95333 - RNA, 19 nt, Artificial Sequence
  Description of Artificial Sequence: Synthetic oligonucleotide
ugguuggacucugguacau

SEQ ID NO: 95334 - RNA, 19 nt, Artificial Sequence
  Description of Artificial Sequence: Synthetic oligonucleotide
agcaacauaguggcucguu

SEQ ID NO: 95335 - RNA, 19 nt, Artificial Sequence
  Description of Artificial Sequence: Synthetic oligonucleotide
caggcugcaaggacgcaaa

SEQ ID NO: 95336 - RNA, 19 nt, Artificial Sequence
  Description of Artificial Sequence: Synthetic oligonucleotide
ccguauuauuucuuccuca

SEQ ID NO: 95337 - RNA, 19 nt, Artificial Sequence
  Description of Artificial Sequence: Synthetic oligonucleotide
cucucccacuuccgggcag

SEQ ID NO: 95338 - RNA, 19 nt, Artificial Sequence
  Description of Artificial Sequence: Synthetic oligonucleotide
uaauggcccuggauaccuu

SEQ ID NO: 95339 - RNA, 19 nt, Artificial Sequence
  Description of Artificial Sequence: Synthetic oligonucleotide
guucauggaaggagguugu

SEQ ID NO: 95340 - RNA, 19 nt, Artificial Sequence
  Description of Artificial Sequence: Synthetic oligonucleotide
cagugagcccaccucuaga

SEQ ID NO: 95341 - RNA, 19 nt, Artificial Sequence
  Description of Artificial Sequence: Synthetic oligonucleotide
cuggccaauccaacggaua

SEQ ID NO: 95342 - RNA, 19 nt, Artificial Sequence
  Description of Artificial Sequence: Synthetic oligonucleotide
caauggacuaaaagagguu

SEQ ID NO: 95343 - RNA, 19 nt, Artificial Sequence
  Description of Artificial Sequence: Synthetic oligonucleotide
gucugagguagauccugua

SEQ ID NO: 95344 - RNA, 19 nt, Artificial Sequence
  Description of Artificial Sequence: Synthetic oligonucleotide
gcaaugcugccauugguau

SEQ ID NO: 95345 - RNA, 19 nt, Artificial Sequence
  Description of Artificial Sequence: Synthetic oligonucleotide
ccaccucuagaccgugugc

SEQ ID NO: 95346 - RNA, 19 nt, Artificial Sequence
  Description of Artificial Sequence: Synthetic oligonucleotide
ggcgccagacagaaccacc

SEQ ID NO: 95347 - RNA, 19 nt, Artificial Sequence
  Description of Artificial Sequence: Synthetic oligonucleotide
ggcuggccaauccaacgga

SEQ ID NO: 95348 - RNA, 19 nt, Artificial Sequence
  Description of Artificial Sequence: Synthetic oligonucleotide
uuccgggcagggugucacu

SEQ ID NO: 95349 - RNA, 19 nt, Artificial Sequence
  Description of Artificial Sequence: Synthetic oligonucleotide
agcaaugguucaacccuua

SEQ ID NO: 95350 - RNA, 19 nt, Artificial Sequence
  Description of Artificial Sequence: Synthetic oligonucleotide
gguuggacucugguacaug

SEQ ID NO: 95351 - RNA, 19 nt, Artificial Sequence
  Description of Artificial Sequence: Synthetic oligonucleotide
aguugccaauuggguuauc

SEQ ID NO: 95352 - RNA, 19 nt, Artificial Sequence
  Description of Artificial Sequence: Synthetic oligonucleotide
gcaggaaaucagcacuaua

SEQ ID NO: 95353 - RNA, 19 nt, Artificial Sequence
  Description of Artificial Sequence: Synthetic oligonucleotide
agggucugagguagauccu

SEQ ID NO: 95354 - RNA, 19 nt, Artificial Sequence
  Description of Artificial Sequence: Synthetic oligonucleotide
cuccuauagaaaaccuguu

SEQ ID NO: 95355 - RNA, 19 nt, Artificial Sequence
  Description of Artificial Sequence: Synthetic oligonucleotide
uccgggcagggugucacuu

SEQ ID NO: 95356 - RNA, 19 nt, Artificial Sequence
  Description of Artificial Sequence: Synthetic oligonucleotide
ggcaagucuuugggaagug

SEQ ID NO: 95357 - RNA, 19 nt, Artificial Sequence
  Description of Artificial Sequence: Synthetic oligonucleotide
ggccaauccaacggauaac

SEQ ID NO: 95358 - RNA, 19 nt, Artificial Sequence
  Description of Artificial Sequence: Synthetic oligonucleotide
gcaaugguucaacccuuaa

SEQ ID NO: 95359 - RNA, 19 nt, Artificial Sequence
  Description of Artificial Sequence: Synthetic oligonucleotide
cguccguacagccugcaca

SEQ ID NO: 95360 - RNA, 19 nt, Artificial Sequence
  Description of Artificial Sequence: Synthetic oligonucleotide
gcucguuucuaugcagaga

SEQ ID NO: 95361 - RNA, 19 nt, Artificial Sequence
  Description of Artificial Sequence: Synthetic oligonucleotide
gcaaggacgcaaaccuaga

SEQ ID NO: 95362 - RNA, 19 nt, Artificial Sequence
  Description of Artificial Sequence: Synthetic oligonucleotide
ccaauccguugucaucauc

SEQ ID NO: 95363 - RNA, 19 nt, Artificial Sequence
  Description of Artificial Sequence: Synthetic oligonucleotide
auccaacggauaaccccau

SEQ ID NO: 95364 - RNA, 19 nt, Artificial Sequence
  Description of Artificial Sequence: Synthetic oligonucleotide
cguacagccugcacauuca

SEQ ID NO: 95365 - RNA, 19 nt, Artificial Sequence
  Description of Artificial Sequence: Synthetic oligonucleotide
accgaggcaucuggauaau

SEQ ID NO: 95366 - RNA, 19 nt, Artificial Sequence
  Description of Artificial Sequence: Synthetic oligonucleotide
acacagcgcuaagcuuugu

SEQ ID NO: 95367 - RNA, 19 nt, Artificial Sequence
  Description of Artificial Sequence: Synthetic oligonucleotide
ggcuaguuugggaggccuc

SEQ ID NO: 95368 - RNA, 19 nt, Artificial Sequence
  Description of Artificial Sequence: Synthetic oligonucleotide
cacuuccgggcaggguguc

SEQ ID NO: 95369 - RNA, 19 nt, Artificial Sequence
  Description of Artificial Sequence: Synthetic oligonucleotide
gcgagugccccugaaaguu

SEQ ID NO: 95370 - RNA, 19 nt, Artificial Sequence
  Description of Artificial Sequence: Synthetic oligonucleotide
gugccccugaaaguuccgu

SEQ ID NO: 95371 - RNA, 19 nt, Artificial Sequence
  Description of Artificial Sequence: Synthetic oligonucleotide
ccguccguacagccugcac

SEQ ID NO: 95372 - RNA, 19 nt, Artificial Sequence
  Description of Artificial Sequence: Synthetic oligonucleotide
ccgaggcaucuggauaauc

SEQ ID NO: 95373 - RNA, 19 nt, Artificial Sequence
  Description of Artificial Sequence: Synthetic oligonucleotide
gcuaagcuuugugcucggu

SEQ ID NO: 95374 - RNA, 19 nt, Artificial Sequence
  Description of Artificial Sequence: Synthetic oligonucleotide
cgcaaaccuagagucgggu

SEQ ID NO: 95375 - RNA, 19 nt, Artificial Sequence
  Description of Artificial Sequence: Synthetic oligonucleotide
aacagaguacucuacaugc

SEQ ID NO: 95376 - RNA, 19 nt, Artificial Sequence
  Description of Artificial Sequence: Synthetic oligonucleotide
gaaagaaauacuaaugccg

SEQ ID NO: 95377 - RNA, 19 nt, Artificial Sequence
  Description of Artificial Sequence: Synthetic oligonucleotide
aguggcguuaaauuaaugc

SEQ ID NO: 95378 - RNA, 19 nt, Artificial Sequence
  Description of Artificial Sequence: Synthetic oligonucleotide
uguagugacaaacuugagg

SEQ ID NO: 95379 - RNA, 19 nt, Artificial Sequence
  Description of Artificial Sequence: Synthetic oligonucleotide
auauagaaaggguuguugg

SEQ ID NO: 95380 - RNA, 19 nt, Artificial Sequence
  Description of Artificial Sequence: Synthetic oligonucleotide
gaagcauggucauagcugg

SEQ ID NO: 95381 - RNA, 19 nt, Artificial Sequence
  Description of Artificial Sequence: Synthetic oligonucleotide
ucguaugucacuuuaacgu

SEQ ID NO: 95382 - RNA, 19 nt, Artificial Sequence
  Description of Artificial Sequence: Synthetic oligonucleotide
aggaacuacagcuaaagug

SEQ ID NO: 95383 - RNA, 19 nt, Artificial Sequence
  Description of Artificial Sequence: Synthetic oligonucleotide
uagagcaccucacaaauag

SEQ ID NO: 95384 - RNA, 19 nt, Artificial Sequence
  Description of Artificial Sequence: Synthetic oligonucleotide
uacucuacaugcuaaagug

SEQ ID NO: 95385 - RNA, 19 nt, Artificial Sequence
  Description of Artificial Sequence: Synthetic oligonucleotide
agaaauacuaaugccgucg

SEQ ID NO: 95386 - RNA, 19 nt, Artificial Sequence
  Description of Artificial Sequence: Synthetic oligonucleotide
augccgucgacuuugauag

SEQ ID NO: 95387 - RNA, 19 nt, Artificial Sequence
  Description of Artificial Sequence: Synthetic oligonucleotide
aguaacuggacaugggcgg

SEQ ID NO: 95388 - RNA, 19 nt, Artificial Sequence
  Description of Artificial Sequence: Synthetic oligonucleotide
aauacuaaugccgucgacu

SEQ ID NO: 95389 - RNA, 19 nt, Artificial Sequence
  Description of Artificial Sequence: Synthetic oligonucleotide
acugauacggaguucucac

SEQ ID NO: 95390 - RNA, 19 nt, Artificial Sequence
  Description of Artificial Sequence: Synthetic oligonucleotide
ucgacuuugauagaguuca

SEQ ID NO: 95391 - RNA, 19 nt, Artificial Sequence
  Description of Artificial Sequence: Synthetic oligonucleotide
aaagaaauacuaaugccgu

SEQ ID NO: 95392 - RNA, 19 nt, Artificial Sequence
  Description of Artificial Sequence: Synthetic oligonucleotide
ugauacggaguucucaccc

SEQ ID NO: 95393 - RNA, 19 nt, Artificial Sequence
  Description of Artificial Sequence: Synthetic oligonucleotide
agcaaauuugcgaauggcc

SEQ ID NO: 95394 - RNA, 19 nt, Artificial Sequence
  Description of Artificial Sequence: Synthetic oligonucleotide
aaauacuaaugccgucgac

SEQ ID NO: 95395 - RNA, 19 nt, Artificial Sequence
  Description of Artificial Sequence: Synthetic oligonucleotide
uggcguuaaauuaaugcug

SEQ ID NO: 95396 - RNA, 19 nt, Artificial Sequence
  Description of Artificial Sequence: Synthetic oligonucleotide
uuacguacuggucugacau

SEQ ID NO: 95397 - RNA, 19 nt, Artificial Sequence
  Description of Artificial Sequence: Synthetic oligonucleotide
ggaucgaucaauuucuugc

SEQ ID NO: 95398 - RNA, 19 nt, Artificial Sequence
  Description of Artificial Sequence: Synthetic oligonucleotide
caaucacggaacaucauag

SEQ ID NO: 95399 - RNA, 19 nt, Artificial Sequence
  Description of Artificial Sequence: Synthetic oligonucleotide
ucgacagcaaaucaaucac

SEQ ID NO: 95400 - RNA, 19 nt, Artificial Sequence
  Description of Artificial Sequence: Synthetic oligonucleotide
ucuacugauacggaguucu

SEQ ID NO: 95401 - RNA, 19 nt, Artificial Sequence
  Description of Artificial Sequence: Synthetic oligonucleotide
cauuaugacaucgaucagc

SEQ ID NO: 95402 - RNA, 19 nt, Artificial Sequence
  Description of Artificial Sequence: Synthetic oligonucleotide
aucgaucaauuucuugccc

SEQ ID NO: 95403 - RNA, 19 nt, Artificial Sequence
  Description of Artificial Sequence: Synthetic oligonucleotide
gcugauauaccacucaaag

SEQ ID NO: 95404 - RNA, 19 nt, Artificial Sequence
  Description of Artificial Sequence: Synthetic oligonucleotide
gaucgaucaauuucuugcc

SEQ ID NO: 95405 - RNA, 19 nt, Artificial Sequence
  Description of Artificial Sequence: Synthetic oligonucleotide
cauagagcaggucaagagc

SEQ ID NO: 95406 - RNA, 19 nt, Artificial Sequence
  Description of Artificial Sequence: Synthetic oligonucleotide
aaugccgucgacuuugaua

SEQ ID NO: 95407 - RNA, 19 nt, Artificial Sequence
  Description of Artificial Sequence: Synthetic oligonucleotide
cucuacaugcuaaagugac

SEQ ID NO: 95408 - RNA, 19 nt, Artificial Sequence
  Description of Artificial Sequence: Synthetic oligonucleotide
gucguaugucacuuuaacg

SEQ ID NO: 95409 - RNA, 19 nt, Artificial Sequence
  Description of Artificial Sequence: Synthetic oligonucleotide
uaacguaggaauucucagc

SEQ ID NO: 95410 - RNA, 19 nt, Artificial Sequence
  Description of Artificial Sequence: Synthetic oligonucleotide
agcagcgugauauaucucu

SEQ ID NO: 95411 - RNA, 19 nt, Artificial Sequence
  Description of Artificial Sequence: Synthetic oligonucleotide
guggugaucagguaggaac

SEQ ID NO: 95412 - RNA, 19 nt, Artificial Sequence
  Description of Artificial Sequence: Synthetic oligonucleotide
ugucguaugucacuuuaac

SEQ ID NO: 95413 - RNA, 19 nt, Artificial Sequence
  Description of Artificial Sequence: Synthetic oligonucleotide
ucaaucacggaacaucaua

SEQ ID NO: 95414 - RNA, 19 nt, Artificial Sequence
  Description of Artificial Sequence: Synthetic oligonucleotide
aaauuugcgaauggccuug

SEQ ID NO: 95415 - RNA, 19 nt, Artificial Sequence
  Description of Artificial Sequence: Synthetic oligonucleotide
ugcagcgaugagauggccg

SEQ ID NO: 95416 - RNA, 19 nt, Artificial Sequence
  Description of Artificial Sequence: Synthetic oligonucleotide
aaucacggaacaucauaga

SEQ ID NO: 95417 - RNA, 19 nt, Artificial Sequence
  Description of Artificial Sequence: Synthetic oligonucleotide
uguacaaacugcggcaacc

SEQ ID NO: 95418 - RNA, 19 nt, Artificial Sequence
  Description of Artificial Sequence: Synthetic oligonucleotide
aggcggaucgaucaauuuc

SEQ ID NO: 95419 - RNA, 19 nt, Artificial Sequence
  Description of Artificial Sequence: Synthetic oligonucleotide
ucgaucaauuucuugccca

SEQ ID NO: 95420 - RNA, 19 nt, Artificial Sequence
  Description of Artificial Sequence: Synthetic oligonucleotide
acaaggaugcugauauacc

SEQ ID NO: 95421 - RNA, 19 nt, Artificial Sequence
  Description of Artificial Sequence: Synthetic oligonucleotide
ugaucagguaggaacuaca

SEQ ID NO: 95422 - RNA, 19 nt, Artificial Sequence
  Description of Artificial Sequence: Synthetic oligonucleotide
uccgucauucagcacuggg

SEQ ID NO: 95423 - RNA, 19 nt, Artificial Sequence
  Description of Artificial Sequence: Synthetic oligonucleotide
acuaaugccgucgacuuug

SEQ ID NO: 95424 - RNA, 19 nt, Artificial Sequence
  Description of Artificial Sequence: Synthetic oligonucleotide
gaaguccaacuucucgugg

SEQ ID NO: 95425 - RNA, 19 nt, Artificial Sequence
  Description of Artificial Sequence: Synthetic oligonucleotide
aaugucgacagcaaaucaa

SEQ ID NO: 95426 - RNA, 19 nt, Artificial Sequence
  Description of Artificial Sequence: Synthetic oligonucleotide
aucacgauagguggugccc

SEQ ID NO: 95427 - RNA, 19 nt, Artificial Sequence
  Description of Artificial Sequence: Synthetic oligonucleotide
gucacuuuaacguaggaau

SEQ ID NO: 95428 - RNA, 19 nt, Artificial Sequence
  Description of Artificial Sequence: Synthetic oligonucleotide
cuucucuacaccaggggug

SEQ ID NO: 95429 - RNA, 19 nt, Artificial Sequence
  Description of Artificial Sequence: Synthetic oligonucleotide
gaugcugauauaccacuca

SEQ ID NO: 95430 - RNA, 19 nt, Artificial Sequence
  Description of Artificial Sequence: Synthetic oligonucleotide
agccuuauccacauggguc

SEQ ID NO: 95431 - RNA, 19 nt, Artificial Sequence
  Description of Artificial Sequence: Synthetic oligonucleotide
cacaaggaugcugauauac

SEQ ID NO: 95432 - RNA, 19 nt, Artificial Sequence
  Description of Artificial Sequence: Synthetic oligonucleotide
ucauuaugacaucgaucag

SEQ ID NO: 95433 - RNA, 19 nt, Artificial Sequence
  Description of Artificial Sequence: Synthetic oligonucleotide
gaaauacuaaugccgucga

SEQ ID NO: 95434 - RNA, 19 nt, Artificial Sequence
  Description of Artificial Sequence: Synthetic oligonucleotide
aaggcgcuuacuuccucag

SEQ ID NO: 95435 - RNA, 19 nt, Artificial Sequence
  Description of Artificial Sequence: Synthetic oligonucleotide
uuuacguacuggucugaca

SEQ ID NO: 95436 - RNA, 19 nt, Artificial Sequence
  Description of Artificial Sequence: Synthetic oligonucleotide
ucgaucugcaccacaggga

SEQ ID NO: 95437 - RNA, 19 nt, Artificial Sequence
  Description of Artificial Sequence: Synthetic oligonucleotide
caaugaucuugguaagcag

SEQ ID NO: 95438 - RNA, 19 nt, Artificial Sequence
  Description of Artificial Sequence: Synthetic oligonucleotide
ggcguuaaauuaaugcugg

SEQ ID NO: 95439 - RNA, 19 nt, Artificial Sequence
  Description of Artificial Sequence: Synthetic oligonucleotide
auacuaaugccgucgacuu

SEQ ID NO: 95440 - RNA, 19 nt, Artificial Sequence
  Description of Artificial Sequence: Synthetic oligonucleotide
ucacuuuaacguaggaauu

SEQ ID NO: 95441 - RNA, 19 nt, Artificial Sequence
  Description of Artificial Sequence: Synthetic oligonucleotide
aucgagcggcuguacaugg

SEQ ID NO: 95442 - RNA, 19 nt, Artificial Sequence
  Description of Artificial Sequence: Synthetic oligonucleotide
ucucucucucucuuugggc

SEQ ID NO: 95443 - RNA, 19 nt, Artificial Sequence
  Description of Artificial Sequence: Synthetic oligonucleotide
agcuacccagugcagggac

SEQ ID NO: 95444 - RNA, 19 nt, Artificial Sequence
  Description of Artificial Sequence: Synthetic oligonucleotide
ucuugugccgggacgauuu

SEQ ID NO: 95445 - RNA, 19 nt, Artificial Sequence
  Description of Artificial Sequence: Synthetic oligonucleotide
ucuucucucucucucucuc

SEQ ID NO: 95446 - RNA, 19 nt, Artificial Sequence
  Description of Artificial Sequence: Synthetic oligonucleotide
ucucucucucucucuuugg

SEQ ID NO: 95447 - RNA, 19 nt, Artificial Sequence
  Description of Artificial Sequence: Synthetic oligonucleotide
ggaaggcucagcuugugcc

SEQ ID NO: 95448 - RNA, 19 nt, Artificial Sequence
  Description of Artificial Sequence: Synthetic oligonucleotide
gaaugucgacagcaaauca

SEQ ID NO: 95449 - RNA, 19 nt, Artificial Sequence
  Description of Artificial Sequence: Synthetic oligonucleotide
cagcuuaaugaucuugaug

SEQ ID NO: 95450 - RNA, 19 nt, Artificial Sequence
  Description of Artificial Sequence: Synthetic oligonucleotide
cucucucucucucuuuggg

SEQ ID NO: 95451 - RNA, 19 nt, Artificial Sequence
  Description of Artificial Sequence: Synthetic oligonucleotide
agagcgcgcaggcggaucg

SEQ ID NO: 95452 - RNA, 19 nt, Artificial Sequence
  Description of Artificial Sequence: Synthetic oligonucleotide
cacggaacaucauagagcu

SEQ ID NO: 95453 - RNA, 19 nt, Artificial Sequence
  Description of Artificial Sequence: Synthetic oligonucleotide
uccuucuucucucucucuc

SEQ ID NO: 95454 - RNA, 19 nt, Artificial Sequence
  Description of Artificial Sequence: Synthetic oligonucleotide
ugcagacuaccuacuguca

SEQ ID NO: 95455 - RNA, 19 nt, Artificial Sequence
  Description of Artificial Sequence: Synthetic oligonucleotide
ugcugauauaccacucaaa

SEQ ID NO: 95456 - RNA, 19 nt, Artificial Sequence
  Description of Artificial Sequence: Synthetic oligonucleotide
gucacguggggucaguaac

SEQ ID NO: 95457 - RNA, 19 nt, Artificial Sequence
  Description of Artificial Sequence: Synthetic oligonucleotide
aucacuaggcagagcauuc

SEQ ID NO: 95458 - RNA, 19 nt, Artificial Sequence
  Description of Artificial Sequence: Synthetic oligonucleotide
agggacgaacccaagaugu

SEQ ID NO: 95459 - RNA, 19 nt, Artificial Sequence
  Description of Artificial Sequence: Synthetic oligonucleotide
uccugaucacgauccaugu

SEQ ID NO: 95460 - RNA, 19 nt, Artificial Sequence
  Description of Artificial Sequence: Synthetic oligonucleotide
uacugauacggaguucuca

SEQ ID NO: 95461 - RNA, 19 nt, Artificial Sequence
  Description of Artificial Sequence: Synthetic oligonucleotide
aacuacagcuaaagugcag

SEQ ID NO: 95462 - RNA, 19 nt, Artificial Sequence
  Description of Artificial Sequence: Synthetic oligonucleotide
cugauacggaguucucacc

SEQ ID NO: 95463 - RNA, 19 nt, Artificial Sequence
  Description of Artificial Sequence: Synthetic oligonucleotide
agagcaccucacaaauagc

SEQ ID NO: 95464 - RNA, 19 nt, Artificial Sequence
  Description of Artificial Sequence: Synthetic oligonucleotide
caucacgauagguggugcc

SEQ ID NO: 95465 - RNA, 19 nt, Artificial Sequence
  Description of Artificial Sequence: Synthetic oligonucleotide
acccaauuguugguggagg

SEQ ID NO: 95466 - RNA, 19 nt, Artificial Sequence
  Description of Artificial Sequence: Synthetic oligonucleotide
ugcccuguaggggucauug

SEQ ID NO: 95467 - RNA, 19 nt, Artificial Sequence
  Description of Artificial Sequence: Synthetic oligonucleotide
gucggcacucuguacaaac

SEQ ID NO: 95468 - RNA, 19 nt, Artificial Sequence
  Description of Artificial Sequence: Synthetic oligonucleotide
agguaggaacuacagcuaa

SEQ ID NO: 95469 - RNA, 19 nt, Artificial Sequence
  Description of Artificial Sequence: Synthetic oligonucleotide
guaacuggacaugggcggg

SEQ ID NO: 95470 - RNA, 19 nt, Artificial Sequence
  Description of Artificial Sequence: Synthetic oligonucleotide
auccuggacuccgucauuc

SEQ ID NO: 95471 - RNA, 19 nt, Artificial Sequence
  Description of Artificial Sequence: Synthetic oligonucleotide
ugaggacccaauuguuggu

SEQ ID NO: 95472 - RNA, 19 nt, Artificial Sequence
  Description of Artificial Sequence: Synthetic oligonucleotide
cucucucucucucucuuug

SEQ ID NO: 95473 - RNA, 19 nt, Artificial Sequence
  Description of Artificial Sequence: Synthetic oligonucleotide
ugcggcaaccgcuccacca

SEQ ID NO: 95474 - RNA, 19 nt, Artificial Sequence
  Description of Artificial Sequence: Synthetic oligonucleotide
aggcgcuuacuuccucagc

SEQ ID NO: 95475 - RNA, 19 nt, Artificial Sequence
  Description of Artificial Sequence: Synthetic oligonucleotide
agcgccgaacagcuuaaug

SEQ ID NO: 95476 - RNA, 19 nt, Artificial Sequence
  Description of Artificial Sequence: Synthetic oligonucleotide
agacuaccuacugucaccu

SEQ ID NO: 95477 - RNA, 19 nt, Artificial Sequence
  Description of Artificial Sequence: Synthetic oligonucleotide
guggcggguacccuccagg

SEQ ID NO: 95478 - RNA, 19 nt, Artificial Sequence
  Description of Artificial Sequence: Synthetic oligonucleotide
gaucgagcggcuguacaug

SEQ ID NO: 95479 - RNA, 19 nt, Artificial Sequence
  Description of Artificial Sequence: Synthetic oligonucleotide
ucacuauugucagcagcug

SEQ ID NO: 95480 - RNA, 19 nt, Artificial Sequence
  Description of Artificial Sequence: Synthetic oligonucleotide
ugugccgggacgauuucuu

SEQ ID NO: 95481 - RNA, 19 nt, Artificial Sequence
  Description of Artificial Sequence: Synthetic oligonucleotide
uucuucucucucucucucu

SEQ ID NO: 95482 - RNA, 19 nt, Artificial Sequence
  Description of Artificial Sequence: Synthetic oligonucleotide
cugggugugggaacacuac

SEQ ID NO: 95483 - RNA, 19 nt, Artificial Sequence
  Description of Artificial Sequence: Synthetic oligonucleotide
cuucuucucucucucucuc

SEQ ID NO: 95484 - RNA, 19 nt, Artificial Sequence
  Description of Artificial Sequence: Synthetic oligonucleotide
uucucucucucucucucuu

SEQ ID NO: 95485 - RNA, 19 nt, Artificial Sequence
  Description of Artificial Sequence: Synthetic oligonucleotide
acaaggcgcuuacuuccuc

SEQ ID NO: 95486 - RNA, 19 nt, Artificial Sequence
  Description of Artificial Sequence: Synthetic oligonucleotide
cagggacgaacccaagaug

SEQ ID NO: 95487 - RNA, 19 nt, Artificial Sequence
  Description of Artificial Sequence: Synthetic oligonucleotide
cuaccgggacaccuuuugc

SEQ ID NO: 95488 - RNA, 19 nt, Artificial Sequence
  Description of Artificial Sequence: Synthetic oligonucleotide
cgucauucagcacugggcc

SEQ ID NO: 95489 - RNA, 19 nt, Artificial Sequence
  Description of Artificial Sequence: Synthetic oligonucleotide
agaguacucuacaugcuaa

SEQ ID NO: 95490 - RNA, 19 nt, Artificial Sequence
  Description of Artificial Sequence: Synthetic oligonucleotide
gcgccgaacagcuuaauga

SEQ ID NO: 95491 - RNA, 19 nt, Artificial Sequence
  Description of Artificial Sequence: Synthetic oligonucleotide
aacaaggcgcuuacuuccu

SEQ ID NO: 95492 - RNA, 19 nt, Artificial Sequence
  Description of Artificial Sequence: Synthetic oligonucleotide
uggcggguacccuccaggc

SEQ ID NO: 95493 - RNA, 19 nt, Artificial Sequence
  Description of Artificial Sequence: Synthetic oligonucleotide
ggaaugucgacagcaaauc

SEQ ID NO: 95494 - RNA, 19 nt, Artificial Sequence
  Description of Artificial Sequence: Synthetic oligonucleotide
cacaagcacaccucauuca

SEQ ID NO: 95495 - RNA, 19 nt, Artificial Sequence
  Description of Artificial Sequence: Synthetic oligonucleotide
caggucggcacucuguaca

SEQ ID NO: 95496 - RNA, 19 nt, Artificial Sequence
  Description of Artificial Sequence: Synthetic oligonucleotide
aauuugcgaauggccuuga

SEQ ID NO: 95497 - RNA, 19 nt, Artificial Sequence
  Description of Artificial Sequence: Synthetic oligonucleotide
cgucaugcacugaugagcc

SEQ ID NO: 95498 - RNA, 19 nt, Artificial Sequence
  Description of Artificial Sequence: Synthetic oligonucleotide
uacggaguucucacccuuc

SEQ ID NO: 95499 - RNA, 19 nt, Artificial Sequence
  Description of Artificial Sequence: Synthetic oligonucleotide
cagcaaacaaggcgcuuac

SEQ ID NO: 95500 - RNA, 19 nt, Artificial Sequence
  Description of Artificial Sequence: Synthetic oligonucleotide
ccgucauucagcacugggc

SEQ ID NO: 95501 - RNA, 19 nt, Artificial Sequence
  Description of Artificial Sequence: Synthetic oligonucleotide
aagagcgcgcaggcggauc

SEQ ID NO: 95502 - RNA, 19 nt, Artificial Sequence
  Description of Artificial Sequence: Synthetic oligonucleotide
cccuguaggggucauuggg

SEQ ID NO: 95503 - RNA, 19 nt, Artificial Sequence
  Description of Artificial Sequence: Synthetic oligonucleotide
acguaggaauucucagcca

SEQ ID NO: 95504 - RNA, 19 nt, Artificial Sequence
  Description of Artificial Sequence: Synthetic oligonucleotide
aucuacugauacggaguuc

SEQ ID NO: 95505 - RNA, 19 nt, Artificial Sequence
  Description of Artificial Sequence: Synthetic oligonucleotide
gguaaccuccugugcagcc

SEQ ID NO: 95506 - RNA, 19 nt, Artificial Sequence
  Description of Artificial Sequence: Synthetic oligonucleotide
uaccuacugucaccucuga

SEQ ID NO: 95507 - RNA, 19 nt, Artificial Sequence
  Description of Artificial Sequence: Synthetic oligonucleotide
cgugauauaucucucuuca

SEQ ID NO: 95508 - RNA, 19 nt, Artificial Sequence
  Description of Artificial Sequence: Synthetic oligonucleotide
cgagaggucgaucugcacc

SEQ ID NO: 95509 - RNA, 19 nt, Artificial Sequence
  Description of Artificial Sequence: Synthetic oligonucleotide
gcagacuaccuacugucac

SEQ ID NO: 95510 - RNA, 19 nt, Artificial Sequence
  Description of Artificial Sequence: Synthetic oligonucleotide
gauacggaguucucacccu

SEQ ID NO: 95511 - RNA, 19 nt, Artificial Sequence
  Description of Artificial Sequence: Synthetic oligonucleotide
auacggaguucucacccuu

SEQ ID NO: 95512 - RNA, 19 nt, Artificial Sequence
  Description of Artificial Sequence: Synthetic oligonucleotide
gugaucagguaggaacuac

SEQ ID NO: 95513 - RNA, 19 nt, Artificial Sequence
  Description of Artificial Sequence: Synthetic oligonucleotide
uacuaaugccgucgacuuu

SEQ ID NO: 95514 - RNA, 19 nt, Artificial Sequence
  Description of Artificial Sequence: Synthetic oligonucleotide
cucucucucucuuugggcu

SEQ ID NO: 95515 - RNA, 19 nt, Artificial Sequence
  Description of Artificial Sequence: Synthetic oligonucleotide
gcuaccgggacaccuuuug

SEQ ID NO: 95516 - RNA, 19 nt, Artificial Sequence
  Description of Artificial Sequence: Synthetic oligonucleotide
aucgucguccuuggcaaug

SEQ ID NO: 95517 - RNA, 19 nt, Artificial Sequence
  Description of Artificial Sequence: Synthetic oligonucleotide
cagcuuuacguacuggucu

SEQ ID NO: 95518 - RNA, 19 nt, Artificial Sequence
  Description of Artificial Sequence: Synthetic oligonucleotide
agcaggucaagagcgcgca

SEQ ID NO: 95519 - RNA, 19 nt, Artificial Sequence
  Description of Artificial Sequence: Synthetic oligonucleotide
cuacugauacggaguucuc

SEQ ID NO: 95520 - RNA, 19 nt, Artificial Sequence
  Description of Artificial Sequence: Synthetic oligonucleotide
caguggcguuaaauuaaug

SEQ ID NO: 95521 - RNA, 19 nt, Artificial Sequence
  Description of Artificial Sequence: Synthetic oligonucleotide
ccgucaugcacugaugagc

SEQ ID NO: 95522 - RNA, 19 nt, Artificial Sequence
  Description of Artificial Sequence: Synthetic oligonucleotide
ucgagcggcuguacaugga

SEQ ID NO: 95523 - RNA, 19 nt, Artificial Sequence
  Description of Artificial Sequence: Synthetic oligonucleotide
auagagcuggagggucacg

SEQ ID NO: 95524 - RNA, 19 nt, Artificial Sequence
  Description of Artificial Sequence: Synthetic oligonucleotide
gcgaauggccuugacgcgg

SEQ ID NO: 95525 - RNA, 19 nt, Artificial Sequence
  Description of Artificial Sequence: Synthetic oligonucleotide
gacgaacccaagaugugua

SEQ ID NO: 95526 - RNA, 19 nt, Artificial Sequence
  Description of Artificial Sequence: Synthetic oligonucleotide
gccgucgacuuugauagag

SEQ ID NO: 95527 - RNA, 19 nt, Artificial Sequence
  Description of Artificial Sequence: Synthetic oligonucleotide
guaggaauucucagccaga

SEQ ID NO: 95528 - RNA, 19 nt, Artificial Sequence
  Description of Artificial Sequence: Synthetic oligonucleotide
gaggucgaucugcaccaca

SEQ ID NO: 95529 - RNA, 19 nt, Artificial Sequence
  Description of Artificial Sequence: Synthetic oligonucleotide
caaugcucugaauggugaa

SEQ ID NO: 95530 - RNA, 19 nt, Artificial Sequence
  Description of Artificial Sequence: Synthetic oligonucleotide
aggucggcacucuguacaa

SEQ ID NO: 95531 - RNA, 19 nt, Artificial Sequence
  Description of Artificial Sequence: Synthetic oligonucleotide
ucucucucucucucucuuu

SEQ ID NO: 95532 - RNA, 19 nt, Artificial Sequence
  Description of Artificial Sequence: Synthetic oligonucleotide
uugugccgggacgauuucu

SEQ ID NO: 95533 - RNA, 19 nt, Artificial Sequence
  Description of Artificial Sequence: Synthetic oligonucleotide
caaauuugcgaauggccuu

SEQ ID NO: 95534 - RNA, 19 nt, Artificial Sequence
  Description of Artificial Sequence: Synthetic oligonucleotide
cuggucugacaugggcagg

SEQ ID NO: 95535 - RNA, 19 nt, Artificial Sequence
  Description of Artificial Sequence: Synthetic oligonucleotide
ggcaccgagaggucgaucu

SEQ ID NO: 95536 - RNA, 19 nt, Artificial Sequence
  Description of Artificial Sequence: Synthetic oligonucleotide
uaaugccgucgacuuugau

SEQ ID NO: 95537 - RNA, 19 nt, Artificial Sequence
  Description of Artificial Sequence: Synthetic oligonucleotide
cacgauagguggugcccuc

SEQ ID NO: 95538 - RNA, 19 nt, Artificial Sequence
  Description of Artificial Sequence: Synthetic oligonucleotide
gucagagcgccgaacagcu

SEQ ID NO: 95539 - RNA, 19 nt, Artificial Sequence
  Description of Artificial Sequence: Synthetic oligonucleotide
aucaaucacggaacaucau

SEQ ID NO: 95540 - RNA, 19 nt, Artificial Sequence
  Description of Artificial Sequence: Synthetic oligonucleotide
gacuaccuacugucaccuc

SEQ ID NO: 95541 - RNA, 19 nt, Artificial Sequence
  Description of Artificial Sequence: Synthetic oligonucleotide
ggcggaucgaucaauuucu

SEQ ID NO: 95542 - RNA, 19 nt, Artificial Sequence
  Description of Artificial Sequence: Synthetic oligonucleotide
cacaccgucaugcacugau

SEQ ID NO: 95543 - RNA, 19 nt, Artificial Sequence
  Description of Artificial Sequence: Synthetic oligonucleotide
cuugugccgggacgauuuc

SEQ ID NO: 95544 - RNA, 19 nt, Artificial Sequence
  Description of Artificial Sequence: Synthetic oligonucleotide
ucucuacaccaggggugcc

SEQ ID NO: 95545 - RNA, 19 nt, Artificial Sequence
  Description of Artificial Sequence: Synthetic oligonucleotide
guccuuagcuggagcaaca

SEQ ID NO: 95546 - RNA, 19 nt, Artificial Sequence
  Description of Artificial Sequence: Synthetic oligonucleotide
uugacgcggauggccacau

SEQ ID NO: 95547 - RNA, 19 nt, Artificial Sequence
  Description of Artificial Sequence: Synthetic oligonucleotide
gcuacccagugcagggacg

SEQ ID NO: 95548 - RNA, 19 nt, Artificial Sequence
  Description of Artificial Sequence: Synthetic oligonucleotide
cagcagcgugauauaucuc

SEQ ID NO: 95549 - RNA, 19 nt, Artificial Sequence
  Description of Artificial Sequence: Synthetic oligonucleotide
ugccgucgacuuugauaga

SEQ ID NO: 95550 - RNA, 19 nt, Artificial Sequence
  Description of Artificial Sequence: Synthetic oligonucleotide
gggacgaacccaagaugug

SEQ ID NO: 95551 - RNA, 19 nt, Artificial Sequence
  Description of Artificial Sequence: Synthetic oligonucleotide
acgcggauggccacaucca

SEQ ID NO: 95552 - RNA, 19 nt, Artificial Sequence
  Description of Artificial Sequence: Synthetic oligonucleotide
cuugacgcggauggccaca

SEQ ID NO: 95553 - RNA, 19 nt, Artificial Sequence
  Description of Artificial Sequence: Synthetic oligonucleotide
ggacaccauuccauagagc

SEQ ID NO: 95554 - RNA, 19 nt, Artificial Sequence
  Description of Artificial Sequence: Synthetic oligonucleotide
gugguggaaacagaucuuu

SEQ ID NO: 95555 - RNA, 19 nt, Artificial Sequence
  Description of Artificial Sequence: Synthetic oligonucleotide
cuucucucucucucucucu

SEQ ID NO: 95556 - RNA, 19 nt, Artificial Sequence
  Description of Artificial Sequence: Synthetic oligonucleotide
cugccggcgccgugcgugc

SEQ ID NO: 95557 - RNA, 19 nt, Artificial Sequence
  Description of Artificial Sequence: Synthetic oligonucleotide
gcuguacauggaggcacag

SEQ ID NO: 95558 - RNA, 19 nt, Artificial Sequence
  Description of Artificial Sequence: Synthetic oligonucleotide
cguaugucacuuuaacgua

SEQ ID NO: 95559 - RNA, 19 nt, Artificial Sequence
  Description of Artificial Sequence: Synthetic oligonucleotide
cuccgucauucagcacugg

SEQ ID NO: 95560 - RNA, 19 nt, Artificial Sequence
  Description of Artificial Sequence: Synthetic oligonucleotide
caucacuaggcagagcauu

SEQ ID NO: 95561 - RNA, 19 nt, Artificial Sequence
  Description of Artificial Sequence: Synthetic oligonucleotide
ggguaaccuccugugcagc

SEQ ID NO: 95562 - RNA, 19 nt, Artificial Sequence
  Description of Artificial Sequence: Synthetic oligonucleotide
gugcagcgaugagauggcc

SEQ ID NO: 95563 - RNA, 19 nt, Artificial Sequence
  Description of Artificial Sequence: Synthetic oligonucleotide
ggacgaacccaagaugugu

SEQ ID NO: 95564 - RNA, 19 nt, Artificial Sequence
  Description of Artificial Sequence: Synthetic oligonucleotide
acggaacaucauagagcug

SEQ ID NO: 95565 - RNA, 19 nt, Artificial Sequence
  Description of Artificial Sequence: Synthetic oligonucleotide
gcaggucaagagcgcgcag

SEQ ID NO: 95566 - RNA, 19 nt, Artificial Sequence
  Description of Artificial Sequence: Synthetic oligonucleotide
caggacgcccgcuccugca

SEQ ID NO: 95567 - RNA, 19 nt, Artificial Sequence
  Description of Artificial Sequence: Synthetic oligonucleotide
cucuggggacuucacaguu

SEQ ID NO: 95568 - RNA, 19 nt, Artificial Sequence
  Description of Artificial Sequence: Synthetic oligonucleotide
aggaugcaggacgcccgcu

SEQ ID NO: 95569 - RNA, 19 nt, Artificial Sequence
  Description of Artificial Sequence: Synthetic oligonucleotide
cuucucguggguggcccca

SEQ ID NO: 95570 - RNA, 19 nt, Artificial Sequence
  Description of Artificial Sequence: Synthetic oligonucleotide
uucucguggguggccccau

SEQ ID NO: 95571 - RNA, 19 nt, Artificial Sequence
  Description of Artificial Sequence: Synthetic oligonucleotide
gacgcccgcuccugcaccu

SEQ ID NO: 95572 - RNA, 19 nt, Artificial Sequence
  Description of Artificial Sequence: Synthetic oligonucleotide
gugcagggacgaacccaag

SEQ ID NO: 95573 - RNA, 19 nt, Artificial Sequence
  Description of Artificial Sequence: Synthetic oligonucleotide
cguagagcaccucacaaau

SEQ ID NO: 95574 - RNA, 19 nt, Artificial Sequence
  Description of Artificial Sequence: Synthetic oligonucleotide
guaucgcuucuguggggau

SEQ ID NO: 95575 - RNA, 19 nt, Artificial Sequence
  Description of Artificial Sequence: Synthetic oligonucleotide
gggugugggaacacuacau

SEQ ID NO: 95576 - RNA, 19 nt, Artificial Sequence
  Description of Artificial Sequence: Synthetic oligonucleotide
ccuucuucucucucucucu

SEQ ID NO: 95577 - RNA, 19 nt, Artificial Sequence
  Description of Artificial Sequence: Synthetic oligonucleotide
ccgagaggucgaucugcac

SEQ ID NO: 95578 - RNA, 19 nt, Artificial Sequence
  Description of Artificial Sequence: Synthetic oligonucleotide
caggcggaucgaucaauuu

SEQ ID NO: 95579 - RNA, 19 nt, Artificial Sequence
  Description of Artificial Sequence: Synthetic oligonucleotide
ggggagcucuugauauaga

SEQ ID NO: 95580 - RNA, 19 nt, Artificial Sequence
  Description of Artificial Sequence: Synthetic oligonucleotide
gcggcuguacauggaggca

SEQ ID NO: 95581 - RNA, 19 nt, Artificial Sequence
  Description of Artificial Sequence: Synthetic oligonucleotide
agcuaccgggacaccuuuu

SEQ ID NO: 95582 - RNA, 19 nt, Artificial Sequence
  Description of Artificial Sequence: Synthetic oligonucleotide
ccaguggcguuaaauuaau

SEQ ID NO: 95583 - RNA, 19 nt, Artificial Sequence
  Description of Artificial Sequence: Synthetic oligonucleotide
gaauggccuugacgcggau

SEQ ID NO: 95584 - RNA, 19 nt, Artificial Sequence
  Description of Artificial Sequence: Synthetic oligonucleotide
ugccggcgccgugcgugcc

SEQ ID NO: 95585 - RNA, 19 nt, Artificial Sequence
  Description of Artificial Sequence: Synthetic oligonucleotide
ggugguggaaacagaucuu

SEQ ID NO: 95586 - RNA, 19 nt, Artificial Sequence
  Description of Artificial Sequence: Synthetic oligonucleotide
gagcgcgcaggcggaucga

SEQ ID NO: 95587 - RNA, 19 nt, Artificial Sequence
  Description of Artificial Sequence: Synthetic oligonucleotide
gcucaucacgauagguggu

SEQ ID NO: 95588 - RNA, 19 nt, Artificial Sequence
  Description of Artificial Sequence: Synthetic oligonucleotide
gugccgggacgauuucuuu

SEQ ID NO: 95589 - RNA, 19 nt, Artificial Sequence
  Description of Artificial Sequence: Synthetic oligonucleotide
caucgucguccuuggcaau

SEQ ID NO: 95590 - RNA, 19 nt, Artificial Sequence
  Description of Artificial Sequence: Synthetic oligonucleotide
cagcagcguagagcaccuc

SEQ ID NO: 95591 - RNA, 19 nt, Artificial Sequence
  Description of Artificial Sequence: Synthetic oligonucleotide
cguggcggguacccuccag

SEQ ID NO: 95592 - RNA, 19 nt, Artificial Sequence
  Description of Artificial Sequence: Synthetic oligonucleotide
ggucggcacucuguacaaa

SEQ ID NO: 95593 - RNA, 19 nt, Artificial Sequence
  Description of Artificial Sequence: Synthetic oligonucleotide
cauccuggacuccgucauu

SEQ ID NO: 95594 - RNA, 19 nt, Artificial Sequence
  Description of Artificial Sequence: Synthetic oligonucleotide
cagucacuuggcuguccuu

SEQ ID NO: 95595 - RNA, 19 nt, Artificial Sequence
  Description of Artificial Sequence: Synthetic oligonucleotide
gcaggcggaucgaucaauu

SEQ ID NO: 95596 - RNA, 19 nt, Artificial Sequence
  Description of Artificial Sequence: Synthetic oligonucleotide
ccgugcgugccuuggcucu

SEQ ID NO: 95597 - RNA, 19 nt, Artificial Sequence
  Description of Artificial Sequence: Synthetic oligonucleotide
ccugaucacgauccauguu

SEQ ID NO: 95598 - RNA, 19 nt, Artificial Sequence
  Description of Artificial Sequence: Synthetic oligonucleotide
gagcgccgaacagcuuaau

SEQ ID NO: 95599 - RNA, 19 nt, Artificial Sequence
  Description of Artificial Sequence: Synthetic oligonucleotide
gcggaucgaucaauuucuu

SEQ ID NO: 95600 - RNA, 19 nt, Artificial Sequence
  Description of Artificial Sequence: Synthetic oligonucleotide
ggcccuggaucgagcggcu

SEQ ID NO: 95601 - RNA, 19 nt, Artificial Sequence
  Description of Artificial Sequence: Synthetic oligonucleotide
auaccaauaaaacaugucc

SEQ ID NO: 95602 - RNA, 19 nt, Artificial Sequence
  Description of Artificial Sequence: Synthetic oligonucleotide
ugugagauaugauugaugg

SEQ ID NO: 95603 - RNA, 19 nt, Artificial Sequence
  Description of Artificial Sequence: Synthetic oligonucleotide
aaucuuauguugcuagugc

SEQ ID NO: 95604 - RNA, 19 nt, Artificial Sequence
  Description of Artificial Sequence: Synthetic oligonucleotide
auuguguccaugcauaugc

SEQ ID NO: 95605 - RNA, 19 nt, Artificial Sequence
  Description of Artificial Sequence: Synthetic oligonucleotide
uaauauagcuaucugauca

SEQ ID NO: 95606 - RNA, 19 nt, Artificial Sequence
  Description of Artificial Sequence: Synthetic oligonucleotide
agggaguucgucuauaucc

SEQ ID NO: 95607 - RNA, 19 nt, Artificial Sequence
  Description of Artificial Sequence: Synthetic oligonucleotide
aaccuaaucaguauagugc

SEQ ID NO: 95608 - RNA, 19 nt, Artificial Sequence
  Description of Artificial Sequence: Synthetic oligonucleotide
aguccuauaaauucuaauc

SEQ ID NO: 95609 - RNA, 19 nt, Artificial Sequence
  Description of Artificial Sequence: Synthetic oligonucleotide
uuaaacguaauaaaccaca

SEQ ID NO: 95610 - RNA, 19 nt, Artificial Sequence
  Description of Artificial Sequence: Synthetic oligonucleotide
uaucugaucacuaaugaca

SEQ ID NO: 95611 - RNA, 19 nt, Artificial Sequence
  Description of Artificial Sequence: Synthetic oligonucleotide
uguuaaacguaauaaacca

SEQ ID NO: 95612 - RNA, 19 nt, Artificial Sequence
  Description of Artificial Sequence: Synthetic oligonucleotide
ucaaguauaaguacuccag

SEQ ID NO: 95613 - RNA, 19 nt, Artificial Sequence
  Description of Artificial Sequence: Synthetic oligonucleotide
aaucuuucguuucacauga

SEQ ID NO: 95614 - RNA, 19 nt, Artificial Sequence
  Description of Artificial Sequence: Synthetic oligonucleotide
uuuacauuguuaaugccca

SEQ ID NO: 95615 - RNA, 19 nt, Artificial Sequence
  Description of Artificial Sequence: Synthetic oligonucleotide
uaugcuuacagguagacau

SEQ ID NO: 95616 - RNA, 19 nt, Artificial Sequence
  Description of Artificial Sequence: Synthetic oligonucleotide
acuaugcugacuuccaagc

SEQ ID NO: 95617 - RNA, 19 nt, Artificial Sequence
  Description of Artificial Sequence: Synthetic oligonucleotide
uuaaaaccgaagacuagcg

SEQ ID NO: 95618 - RNA, 19 nt, Artificial Sequence
  Description of Artificial Sequence: Synthetic oligonucleotide
aauucuaaucgagguaucc

SEQ ID NO: 95619 - RNA, 19 nt, Artificial Sequence
  Description of Artificial Sequence: Synthetic oligonucleotide
guccuauaaauucuaaucg

SEQ ID NO: 95620 - RNA, 19 nt, Artificial Sequence
  Description of Artificial Sequence: Synthetic oligonucleotide
aguaugacggaguaauaac

SEQ ID NO: 95621 - RNA, 19 nt, Artificial Sequence
  Description of Artificial Sequence: Synthetic oligonucleotide
ucuacuguaauauccuaag

SEQ ID NO: 95622 - RNA, 19 nt, Artificial Sequence
  Description of Artificial Sequence: Synthetic oligonucleotide
ggaguaauaaccuacauga

SEQ ID NO: 95623 - RNA, 19 nt, Artificial Sequence
  Description of Artificial Sequence: Synthetic oligonucleotide
accaaucucucuucgagcc

SEQ ID NO: 95624 - RNA, 19 nt, Artificial Sequence
  Description of Artificial Sequence: Synthetic oligonucleotide
aaaguggaccuccauuaac

SEQ ID NO: 95625 - RNA, 19 nt, Artificial Sequence
  Description of Artificial Sequence: Synthetic oligonucleotide
uaugugcuuacuuugacac

SEQ ID NO: 95626 - RNA, 19 nt, Artificial Sequence
  Description of Artificial Sequence: Synthetic oligonucleotide
aaacuuagguacaaauuac

SEQ ID NO: 95627 - RNA, 19 nt, Artificial Sequence
  Description of Artificial Sequence: Synthetic oligonucleotide
ugagauaugauugauggaa

SEQ ID NO: 95628 - RNA, 19 nt, Artificial Sequence
  Description of Artificial Sequence: Synthetic oligonucleotide
ucguuucacaugaagaacc

SEQ ID NO: 95629 - RNA, 19 nt, Artificial Sequence
  Description of Artificial Sequence: Synthetic oligonucleotide
caugauugauuccacauag

SEQ ID NO: 95630 - RNA, 19 nt, Artificial Sequence
  Description of Artificial Sequence: Synthetic oligonucleotide
aucuuauguugcuagugcc

SEQ ID NO: 95631 - RNA, 19 nt, Artificial Sequence
  Description of Artificial Sequence: Synthetic oligonucleotide
agaaccauaauucugcaau

SEQ ID NO: 95632 - RNA, 19 nt, Artificial Sequence
  Description of Artificial Sequence: Synthetic oligonucleotide
auuuaggcuggucauaaag

SEQ ID NO: 95633 - RNA, 19 nt, Artificial Sequence
  Description of Artificial Sequence: Synthetic oligonucleotide
ucauaaaguuaucaaggug

SEQ ID NO: 95634 - RNA, 19 nt, Artificial Sequence
  Description of Artificial Sequence: Synthetic oligonucleotide
uagguuuccgaauauaccu

SEQ ID NO: 95635 - RNA, 19 nt, Artificial Sequence
  Description of Artificial Sequence: Synthetic oligonucleotide
auuguaauuaaaccagugu

SEQ ID NO: 95636 - RNA, 19 nt, Artificial Sequence
  Description of Artificial Sequence: Synthetic oligonucleotide
ucuauuuaggagcauaguu

SEQ ID NO: 95637 - RNA, 19 nt, Artificial Sequence
  Description of Artificial Sequence: Synthetic oligonucleotide
uuauaguccuauaaauucu

SEQ ID NO: 95638 - RNA, 19 nt, Artificial Sequence
  Description of Artificial Sequence: Synthetic oligonucleotide
uuuuguaaggguauuccgu

SEQ ID NO: 95639 - RNA, 19 nt, Artificial Sequence
  Description of Artificial Sequence: Synthetic oligonucleotide
aaccaaaaguaugaccagc

SEQ ID NO: 95640 - RNA, 19 nt, Artificial Sequence
  Description of Artificial Sequence: Synthetic oligonucleotide
uauucggacacauuaagau

SEQ ID NO: 95641 - RNA, 19 nt, Artificial Sequence
  Description of Artificial Sequence: Synthetic oligonucleotide
ucgacaaugugccaguucu

SEQ ID NO: 95642 - RNA, 19 nt, Artificial Sequence
  Description of Artificial Sequence: Synthetic oligonucleotide
uuauuugauaagcaacacu

SEQ ID NO: 95643 - RNA, 19 nt, Artificial Sequence
  Description of Artificial Sequence: Synthetic oligonucleotide
gucuauauccaccagaaga

SEQ ID NO: 95644 - RNA, 19 nt, Artificial Sequence
  Description of Artificial Sequence: Synthetic oligonucleotide
uugguaggaacaauggucu

SEQ ID NO: 95645 - RNA, 19 nt, Artificial Sequence
  Description of Artificial Sequence: Synthetic oligonucleotide
uaaauucuaaucgagguau

SEQ ID NO: 95646 - RNA, 19 nt, Artificial Sequence
  Description of Artificial Sequence: Synthetic oligonucleotide
uaccaauaaaacauguccu

SEQ ID NO: 95647 - RNA, 19 nt, Artificial Sequence
  Description of Artificial Sequence: Synthetic oligonucleotide
auaauauagcuaucugauc

SEQ ID NO: 95648 - RNA, 19 nt, Artificial Sequence
  Description of Artificial Sequence: Synthetic oligonucleotide
aaaccaaaaguaugaccag

SEQ ID NO: 95649 - RNA, 19 nt, Artificial Sequence
  Description of Artificial Sequence: Synthetic oligonucleotide
uaaucuuucguuucacaug

SEQ ID NO: 95650 - RNA, 19 nt, Artificial Sequence
  Description of Artificial Sequence: Synthetic oligonucleotide
uaugacggaguaauaaccu

SEQ ID NO: 95651 - RNA, 19 nt, Artificial Sequence
  Description of Artificial Sequence: Synthetic oligonucleotide
uccuauaaauucuaaucga

SEQ ID NO: 95652 - RNA, 19 nt, Artificial Sequence
  Description of Artificial Sequence: Synthetic oligonucleotide
uaugcaugcuuuaaacaca

SEQ ID NO: 95653 - RNA, 19 nt, Artificial Sequence
  Description of Artificial Sequence: Synthetic oligonucleotide
aggaucgccaucugcauac

SEQ ID NO: 95654 - RNA, 19 nt, Artificial Sequence
  Description of Artificial Sequence: Synthetic oligonucleotide
uauccuaagcagaacagaa

SEQ ID NO: 95655 - RNA, 19 nt, Artificial Sequence
  Description of Artificial Sequence: Synthetic oligonucleotide
aaaucuuauguugcuagug

SEQ ID NO: 95656 - RNA, 19 nt, Artificial Sequence
  Description of Artificial Sequence: Synthetic oligonucleotide
cauuaggaacuguugaggc

SEQ ID NO: 95657 - RNA, 19 nt, Artificial Sequence
  Description of Artificial Sequence: Synthetic oligonucleotide
uucuaaucgagguauccug

SEQ ID NO: 95658 - RNA, 19 nt, Artificial Sequence
  Description of Artificial Sequence: Synthetic oligonucleotide
aaaaucuuauguugcuagu

SEQ ID NO: 95659 - RNA, 19 nt, Artificial Sequence
  Description of Artificial Sequence: Synthetic oligonucleotide
aggcuuaacaggcucuagc

SEQ ID NO: 95660 - RNA, 19 nt, Artificial Sequence
  Description of Artificial Sequence: Synthetic oligonucleotide
auaugcauaaucaauuaca

SEQ ID NO: 95661 - RNA, 19 nt, Artificial Sequence
  Description of Artificial Sequence: Synthetic oligonucleotide
accuaaucaguauagugca

SEQ ID NO: 95662 - RNA, 19 nt, Artificial Sequence
  Description of Artificial Sequence: Synthetic oligonucleotide
uauccugaugguuaugugu

SEQ ID NO: 95663 - RNA, 19 nt, Artificial Sequence
  Description of Artificial Sequence: Synthetic oligonucleotide
aguacauaugcauaaucaa

SEQ ID NO: 95664 - RNA, 19 nt, Artificial Sequence
  Description of Artificial Sequence: Synthetic oligonucleotide
uccuaagcagaacagaauu

SEQ ID NO: 95665 - RNA, 19 nt, Artificial Sequence
  Description of Artificial Sequence: Synthetic oligonucleotide
uccgaauauaccugacagg

SEQ ID NO: 95666 - RNA, 19 nt, Artificial Sequence
  Description of Artificial Sequence: Synthetic oligonucleotide
aaaacguuuuccuuccauu

SEQ ID NO: 95667 - RNA, 19 nt, Artificial Sequence
  Description of Artificial Sequence: Synthetic oligonucleotide
ucuaaucgagguauccuga

SEQ ID NO: 95668 - RNA, 19 nt, Artificial Sequence
  Description of Artificial Sequence: Synthetic oligonucleotide
gauaugauugauggaagac

SEQ ID NO: 95669 - RNA, 19 nt, Artificial Sequence
  Description of Artificial Sequence: Synthetic oligonucleotide
ugacggaguaauaaccuac

SEQ ID NO: 95670 - RNA, 19 nt, Artificial Sequence
  Description of Artificial Sequence: Synthetic oligonucleotide
uagucauuaggaacuguug

SEQ ID NO: 95671 - RNA, 19 nt, Artificial Sequence
  Description of Artificial Sequence: Synthetic oligonucleotide
uaaucaguauagugcauga

SEQ ID NO: 95672 - RNA, 19 nt, Artificial Sequence
  Description of Artificial Sequence: Synthetic oligonucleotide
ugaguacauaugcauaauc

SEQ ID NO: 95673 - RNA, 19 nt, Artificial Sequence
  Description of Artificial Sequence: Synthetic oligonucleotide
uuaucaaggugugaguaca

SEQ ID NO: 95674 - RNA, 19 nt, Artificial Sequence
  Description of Artificial Sequence: Synthetic oligonucleotide
uccuccgaagcugagaugc

SEQ ID NO: 95675 - RNA, 19 nt, Artificial Sequence
  Description of Artificial Sequence: Synthetic oligonucleotide
ucgauugcaaacuccuuca

SEQ ID NO: 95676 - RNA, 19 nt, Artificial Sequence
  Description of Artificial Sequence: Synthetic oligonucleotide
ucgucuauauccaccagaa

SEQ ID NO: 95677 - RNA, 19 nt, Artificial Sequence
  Description of Artificial Sequence: Synthetic oligonucleotide
gaugauugcacccucuuua

SEQ ID NO: 95678 - RNA, 19 nt, Artificial Sequence
  Description of Artificial Sequence: Synthetic oligonucleotide
gaguacauaugcauaauca

SEQ ID NO: 95679 - RNA, 19 nt, Artificial Sequence
  Description of Artificial Sequence: Synthetic oligonucleotide
aguucgucuauauccacca

SEQ ID NO: 95680 - RNA, 19 nt, Artificial Sequence
  Description of Artificial Sequence: Synthetic oligonucleotide
uuaaaggucagagaauuuu

SEQ ID NO: 95681 - RNA, 19 nt, Artificial Sequence
  Description of Artificial Sequence: Synthetic oligonucleotide
cauaugcauaaucaauuac

SEQ ID NO: 95682 - RNA, 19 nt, Artificial Sequence
  Description of Artificial Sequence: Synthetic oligonucleotide
uggauuaaauaugcuaucu

SEQ ID NO: 95683 - RNA, 19 nt, Artificial Sequence
  Description of Artificial Sequence: Synthetic oligonucleotide
ucccuuaaaucaaggagac

SEQ ID NO: 95684 - RNA, 19 nt, Artificial Sequence
  Description of Artificial Sequence: Synthetic oligonucleotide
guugggauuguguccaugc

SEQ ID NO: 95685 - RNA, 19 nt, Artificial Sequence
  Description of Artificial Sequence: Synthetic oligonucleotide
acguaauaaaccacauccc

SEQ ID NO: 95686 - RNA, 19 nt, Artificial Sequence
  Description of Artificial Sequence: Synthetic oligonucleotide
guugugucgagaaaucugc

SEQ ID NO: 95687 - RNA, 19 nt, Artificial Sequence
  Description of Artificial Sequence: Synthetic oligonucleotide
aagacuagcguggcacccc

SEQ ID NO: 95688 - RNA, 19 nt, Artificial Sequence
  Description of Artificial Sequence: Synthetic oligonucleotide
agauaugauugauggaaga

SEQ ID NO: 95689 - RNA, 19 nt, Artificial Sequence
  Description of Artificial Sequence: Synthetic oligonucleotide
cuaucugaucacuaaugac

SEQ ID NO: 95690 - RNA, 19 nt, Artificial Sequence
  Description of Artificial Sequence: Synthetic oligonucleotide
uaaaaccgaagacuagcgu

SEQ ID NO: 95691 - RNA, 19 nt, Artificial Sequence
  Description of Artificial Sequence: Synthetic oligonucleotide
ucaaggugugaguacauau

SEQ ID NO: 95692 - RNA, 19 nt, Artificial Sequence
  Description of Artificial Sequence: Synthetic oligonucleotide
auuugguaggaacaauggu

SEQ ID NO: 95693 - RNA, 19 nt, Artificial Sequence
  Description of Artificial Sequence: Synthetic oligonucleotide
aaggucagagaauuuugaa

SEQ ID NO: 95694 - RNA, 19 nt, Artificial Sequence
  Description of Artificial Sequence: Synthetic oligonucleotide
aguggacaaauucccuugg

SEQ ID NO: 95695 - RNA, 19 nt, Artificial Sequence
  Description of Artificial Sequence: Synthetic oligonucleotide
cauuaaaaccgaagacuag

SEQ ID NO: 95696 - RNA, 19 nt, Artificial Sequence
  Description of Artificial Sequence: Synthetic oligonucleotide
agucauguagucauuagga

SEQ ID NO: 95697 - RNA, 19 nt, Artificial Sequence
  Description of Artificial Sequence: Synthetic oligonucleotide
aaaaccuaaucaguauagu

SEQ ID NO: 95698 - RNA, 19 nt, Artificial Sequence
  Description of Artificial Sequence: Synthetic oligonucleotide
uaggauuaaaggucagaga

SEQ ID NO: 95699 - RNA, 19 nt, Artificial Sequence
  Description of Artificial Sequence: Synthetic oligonucleotide
guaugacggaguaauaacc

SEQ ID NO: 95700 - RNA, 19 nt, Artificial Sequence
  Description of Artificial Sequence: Synthetic oligonucleotide
aaggcguaggcacagcaau

SEQ ID NO: 95701 - RNA, 19 nt, Artificial Sequence
  Description of Artificial Sequence: Synthetic oligonucleotide
agucugugagauaugauug

SEQ ID NO: 95702 - RNA, 19 nt, Artificial Sequence
  Description of Artificial Sequence: Synthetic oligonucleotide
cauaauauagcuaucugau

SEQ ID NO: 95703 - RNA, 19 nt, Artificial Sequence
  Description of Artificial Sequence: Synthetic oligonucleotide
cacaauacaaaccugcuua

SEQ ID NO: 95704 - RNA, 19 nt, Artificial Sequence
  Description of Artificial Sequence: Synthetic oligonucleotide
ugcuuacuuugacacaaug

SEQ ID NO: 95705 - RNA, 19 nt, Artificial Sequence
  Description of Artificial Sequence: Synthetic oligonucleotide
uaguauaugcuuuggucuc

SEQ ID NO: 95706 - RNA, 19 nt, Artificial Sequence
  Description of Artificial Sequence: Synthetic oligonucleotide
guaguauaugcuuuggucu

SEQ ID NO: 95707 - RNA, 19 nt, Artificial Sequence
  Description of Artificial Sequence: Synthetic oligonucleotide
gagauaugauugauggaag

SEQ ID NO: 95708 - RNA, 19 nt, Artificial Sequence
  Description of Artificial Sequence: Synthetic oligonucleotide
gucuguagccuguauguag

SEQ ID NO: 95709 - RNA, 19 nt, Artificial Sequence
  Description of Artificial Sequence: Synthetic oligonucleotide
aguucuugcaggcugguua

SEQ ID NO: 95710 - RNA, 19 nt, Artificial Sequence
  Description of Artificial Sequence: Synthetic oligonucleotide
gugucgagaaaucugccug

SEQ ID NO: 95711 - RNA, 19 nt, Artificial Sequence
  Description of Artificial Sequence: Synthetic oligonucleotide
ugugucgagaaaucugccu

SEQ ID NO: 95712 - RNA, 19 nt, Artificial Sequence
  Description of Artificial Sequence: Synthetic oligonucleotide
aggagcauaguuuauuaua

SEQ ID NO: 95713 - RNA, 19 nt, Artificial Sequence
  Description of Artificial Sequence: Synthetic oligonucleotide
auagucccacaguaugacg

SEQ ID NO: 95714 - RNA, 19 nt, Artificial Sequence
  Description of Artificial Sequence: Synthetic oligonucleotide
uaaucgagguauccugaug

SEQ ID NO: 95715 - RNA, 19 nt, Artificial Sequence
  Description of Artificial Sequence: Synthetic oligonucleotide
uauguugcuagugccaggu

SEQ ID NO: 95716 - RNA, 19 nt, Artificial Sequence
  Description of Artificial Sequence: Synthetic oligonucleotide
aauacaugacccacuuucu

SEQ ID NO: 95717 - RNA, 19 nt, Artificial Sequence
  Description of Artificial Sequence: Synthetic oligonucleotide
uuuugagaauaaaguggac

SEQ ID NO: 95718 - RNA, 19 nt, Artificial Sequence
  Description of Artificial Sequence: Synthetic oligonucleotide
aaauucuaaucgagguauc

SEQ ID NO: 95719 - RNA, 19 nt, Artificial Sequence
  Description of Artificial Sequence: Synthetic oligonucleotide
ggcucuagcguuuuguaag

SEQ ID NO: 95720 - RNA, 19 nt, Artificial Sequence
  Description of Artificial Sequence: Synthetic oligonucleotide
ccgaauauaccugacaggg

SEQ ID NO: 95721 - RNA, 19 nt, Artificial Sequence
  Description of Artificial Sequence: Synthetic oligonucleotide
ucuuuaaaggacagcucau

SEQ ID NO: 95722 - RNA, 19 nt, Artificial Sequence
  Description of Artificial Sequence: Synthetic oligonucleotide
auaccugacagggcgcucc

SEQ ID NO: 95723 - RNA, 19 nt, Artificial Sequence
  Description of Artificial Sequence: Synthetic oligonucleotide
uuauguugcuagugccagg

SEQ ID NO: 95724 - RNA, 19 nt, Artificial Sequence
  Description of Artificial Sequence: Synthetic oligonucleotide
cagagaauugggcagucac

SEQ ID NO: 95725 - RNA, 19 nt, Artificial Sequence
  Description of Artificial Sequence: Synthetic oligonucleotide
aauaucccucuaacccucc

SEQ ID NO: 95726 - RNA, 19 nt, Artificial Sequence
  Description of Artificial Sequence: Synthetic oligonucleotide
agguaauggauuaaauaug

SEQ ID NO: 95727 - RNA, 19 nt, Artificial Sequence
  Description of Artificial Sequence: Synthetic oligonucleotide
acauaugcauaaucaauua

SEQ ID NO: 95728 - RNA, 19 nt, Artificial Sequence
  Description of Artificial Sequence: Synthetic oligonucleotide
uucccaauuguaaaaucuu

SEQ ID NO: 95729 - RNA, 19 nt, Artificial Sequence
  Description of Artificial Sequence: Synthetic oligonucleotide
ucuaacccucccuuaaauc

SEQ ID NO: 95730 - RNA, 19 nt, Artificial Sequence
  Description of Artificial Sequence: Synthetic oligonucleotide
guuaaacguaauaaaccac

SEQ ID NO: 95731 - RNA, 19 nt, Artificial Sequence
  Description of Artificial Sequence: Synthetic oligonucleotide
  modified_base (2)..(2): a, c, u, g, unknown or other
unacgguucugguaacucu

SEQ ID NO: 95732 - RNA, 19 nt, Artificial Sequence
  Description of Artificial Sequence: Synthetic oligonucleotide
ucccaauuguaaaaucuua

SEQ ID NO: 95733 - RNA, 19 nt, Artificial Sequence
  Description of Artificial Sequence: Synthetic oligonucleotide
ggaaaaguccagucacucg

SEQ ID NO: 95734 - RNA, 19 nt, Artificial Sequence
  Description of Artificial Sequence: Synthetic oligonucleotide
auaucccucuaacccuccc

SEQ ID NO: 95735 - RNA, 19 nt, Artificial Sequence
  Description of Artificial Sequence: Synthetic oligonucleotide
gcauaauauagcuaucuga

SEQ ID NO: 95736 - RNA, 19 nt, Artificial Sequence
  Description of Artificial Sequence: Synthetic oligonucleotide
ugcuauucggacacauuaa

SEQ ID NO: 95737 - RNA, 19 nt, Artificial Sequence
  Description of Artificial Sequence: Synthetic oligonucleotide
auagaaccauaauucugca

SEQ ID NO: 95738 - RNA, 19 nt, Artificial Sequence
  Description of Artificial Sequence: Synthetic oligonucleotide
uaguccuauaaauucuaau

SEQ ID NO: 95739 - RNA, 19 nt, Artificial Sequence
  Description of Artificial Sequence: Synthetic oligonucleotide
uuuaggagcauaguuuauu

SEQ ID NO: 95740 - RNA, 19 nt, Artificial Sequence
  Description of Artificial Sequence: Synthetic oligonucleotide
aaccauaauucugcaauaa

SEQ ID NO: 95741 - RNA, 19 nt, Artificial Sequence
  Description of Artificial Sequence: Synthetic oligonucleotide
uaaaguggaccuccauuaa

SEQ ID NO: 95742 - RNA, 19 nt, Artificial Sequence
  Description of Artificial Sequence: Synthetic oligonucleotide
uggacaaauucccuugguu

SEQ ID NO: 95743 - RNA, 19 nt, Artificial Sequence
  Description of Artificial Sequence: Synthetic oligonucleotide
uuaaaccagugucauuaua

SEQ ID NO: 95744 - RNA, 19 nt, Artificial Sequence
  Description of Artificial Sequence: Synthetic oligonucleotide
cuaugcugacuuccaagcc

SEQ ID NO: 95745 - RNA, 19 nt, Artificial Sequence
  Description of Artificial Sequence: Synthetic oligonucleotide
cauaugcaugagcacacac

SEQ ID NO: 95746 - RNA, 19 nt, Artificial Sequence
  Description of Artificial Sequence: Synthetic oligonucleotide
ugcauacgggucacuauac

SEQ ID NO: 95747 - RNA, 19 nt, Artificial Sequence
  Description of Artificial Sequence: Synthetic oligonucleotide
ugcuuauuaccuguuuaca

SEQ ID NO: 95748 - RNA, 19 nt, Artificial Sequence
  Description of Artificial Sequence: Synthetic oligonucleotide
uugugucgagaaaucugcc

SEQ ID NO: 95749 - RNA, 19 nt, Artificial Sequence
  Description of Artificial Sequence: Synthetic oligonucleotide
auaagcaacacuagcuaga

SEQ ID NO: 95750 - RNA, 19 nt, Artificial Sequence
  Description of Artificial Sequence: Synthetic oligonucleotide
gguauuccgucccaagucc

SEQ ID NO: 95751 - RNA, 19 nt, Artificial Sequence
  Description of Artificial Sequence: Synthetic oligonucleotide
aguugugucgagaaaucug

SEQ ID NO: 95752 - RNA, 19 nt, Artificial Sequence
  Description of Artificial Sequence: Synthetic oligonucleotide
gcuauucggacacauuaag

SEQ ID NO: 95753 - RNA, 19 nt, Artificial Sequence
  Description of Artificial Sequence: Synthetic oligonucleotide
ccaauuguaaaaucuuaug

SEQ ID NO: 95754 - RNA, 19 nt, Artificial Sequence
  Description of Artificial Sequence: Synthetic oligonucleotide
uguaugcuuacagguagac

SEQ ID NO: 95755 - RNA, 19 nt, Artificial Sequence
  Description of Artificial Sequence: Synthetic oligonucleotide
auucggacacauuaagaua

SEQ ID NO: 95756 - RNA, 19 nt, Artificial Sequence
  Description of Artificial Sequence: Synthetic oligonucleotide
acuguagauaaaauuuaga

SEQ ID NO: 95757 - RNA, 19 nt, Artificial Sequence
  Description of Artificial Sequence: Synthetic oligonucleotide
auccugaugguuaugugug

SEQ ID NO: 95758 - RNA, 19 nt, Artificial Sequence
  Description of Artificial Sequence: Synthetic oligonucleotide
auauuuaggcuggucauaa

SEQ ID NO: 95759 - RNA, 19 nt, Artificial Sequence
  Description of Artificial Sequence: Synthetic oligonucleotide
aagcugagaugcuuggaua

SEQ ID NO: 95760 - RNA, 19 nt, Artificial Sequence
  Description of Artificial Sequence: Synthetic oligonucleotide
auucuaaucgagguauccu

SEQ ID NO: 95761 - RNA, 19 nt, Artificial Sequence
  Description of Artificial Sequence: Synthetic oligonucleotide
cucgcauuuacuaugcugu

SEQ ID NO: 95762 - RNA, 19 nt, Artificial Sequence
  Description of Artificial Sequence: Synthetic oligonucleotide
ccggaaaucugcaaaauuc

SEQ ID NO: 95763 - RNA, 19 nt, Artificial Sequence
  Description of Artificial Sequence: Synthetic oligonucleotide
auauccuaagcagaacaga

SEQ ID NO: 95764 - RNA, 19 nt, Artificial Sequence
  Description of Artificial Sequence: Synthetic oligonucleotide
gaauauuuaggcuggucau

SEQ ID NO: 95765 - RNA, 19 nt, Artificial Sequence
  Description of Artificial Sequence: Synthetic oligonucleotide
uggguaguauaugcuuugg

SEQ ID NO: 95766 - RNA, 19 nt, Artificial Sequence
  Description of Artificial Sequence: Synthetic oligonucleotide
gacucaaguauaaguacuc

SEQ ID NO: 95767 - RNA, 19 nt, Artificial Sequence
  Description of Artificial Sequence: Synthetic oligonucleotide
agcuaucugaucacuaaug

SEQ ID NO: 95768 - RNA, 19 nt, Artificial Sequence
  Description of Artificial Sequence: Synthetic oligonucleotide
  modified_base (18)..(18): a, c, u, g, unknown or other
uaguccgccacccggguna

SEQ ID NO: 95769 - RNA, 19 nt, Artificial Sequence
  Description of Artificial Sequence: Synthetic oligonucleotide
gaguucgucuauauccacc

SEQ ID NO: 95770 - RNA, 19 nt, Artificial Sequence
  Description of Artificial Sequence: Synthetic oligonucleotide
gaucgccaucugcauacgg

SEQ ID NO: 95771 - RNA, 19 nt, Artificial Sequence
  Description of Artificial Sequence: Synthetic oligonucleotide
cuggacuaugcugacuucc

SEQ ID NO: 95772 - RNA, 19 nt, Artificial Sequence
  Description of Artificial Sequence: Synthetic oligonucleotide
aguuaucaaggugugagua

SEQ ID NO: 95773 - RNA, 19 nt, Artificial Sequence
  Description of Artificial Sequence: Synthetic oligonucleotide
cuauucggacacauuaaga

SEQ ID NO: 95774 - RNA, 19 nt, Artificial Sequence
  Description of Artificial Sequence: Synthetic oligonucleotide
guucacuuauguauuuaug

SEQ ID NO: 95775 - RNA, 19 nt, Artificial Sequence
  Description of Artificial Sequence: Synthetic oligonucleotide
cauaguccaccggaggagg

SEQ ID NO: 95776 - RNA, 19 nt, Artificial Sequence
  Description of Artificial Sequence: Synthetic oligonucleotide
ggauuuguucucgacaaug

SEQ ID NO: 95777 - RNA, 19 nt, Artificial Sequence
  Description of Artificial Sequence: Synthetic oligonucleotide
uagcguuuuguaaggguau

SEQ ID NO: 95778 - RNA, 19 nt, Artificial Sequence
  Description of Artificial Sequence: Synthetic oligonucleotide
cccagaauauuuaggcugg

SEQ ID NO: 95779 - RNA, 19 nt, Artificial Sequence
  Description of Artificial Sequence: Synthetic oligonucleotide
ugaucacuaaugacauaau

SEQ ID NO: 95780 - RNA, 19 nt, Artificial Sequence
  Description of Artificial Sequence: Synthetic oligonucleotide
guuacacaaauuggaagca

SEQ ID NO: 95781 - RNA, 19 nt, Artificial Sequence
  Description of Artificial Sequence: Synthetic oligonucleotide
uguuagugaccaugcugca

SEQ ID NO: 95782 - RNA, 19 nt, Artificial Sequence
  Description of Artificial Sequence: Synthetic oligonucleotide
uagaaccauaauucugcaa

SEQ ID NO: 95783 - RNA, 19 nt, Artificial Sequence
  Description of Artificial Sequence: Synthetic oligonucleotide
ggucauugugccauacugg

SEQ ID NO: 95784 - RNA, 19 nt, Artificial Sequence
  Description of Artificial Sequence: Synthetic oligonucleotide
uuugcuauucggacacauu

SEQ ID NO: 95785 - RNA, 19 nt, Artificial Sequence
  Description of Artificial Sequence: Synthetic oligonucleotide
uaggagcauaguuuauuau

SEQ ID NO: 95786 - RNA, 19 nt, Artificial Sequence
  Description of Artificial Sequence: Synthetic oligonucleotide
augauugcacccucuuuaa

SEQ ID NO: 95787 - RNA, 19 nt, Artificial Sequence
  Description of Artificial Sequence: Synthetic oligonucleotide
uguugcauuucagccacaa

SEQ ID NO: 95788 - RNA, 19 nt, Artificial Sequence
  Description of Artificial Sequence: Synthetic oligonucleotide
aggacuagucauguaguca

SEQ ID NO: 95789 - RNA, 19 nt, Artificial Sequence
  Description of Artificial Sequence: Synthetic oligonucleotide
ucugcauacgggucacuau

SEQ ID NO: 95790 - RNA, 19 nt, Artificial Sequence
  Description of Artificial Sequence: Synthetic oligonucleotide
cauuguuaaugcccacaug

SEQ ID NO: 95791 - RNA, 19 nt, Artificial Sequence
  Description of Artificial Sequence: Synthetic oligonucleotide
cacaaugucuuagcuccgg

SEQ ID NO: 95792 - RNA, 19 nt, Artificial Sequence
  Description of Artificial Sequence: Synthetic oligonucleotide
ucccacaguaugacggagu

SEQ ID NO: 95793 - RNA, 19 nt, Artificial Sequence
  Description of Artificial Sequence: Synthetic oligonucleotide
uuacacaaauuggaagcau

SEQ ID NO: 95794 - RNA, 19 nt, Artificial Sequence
  Description of Artificial Sequence: Synthetic oligonucleotide
ugauugcacccucuuuaaa

SEQ ID NO: 95795 - RNA, 19 nt, Artificial Sequence
  Description of Artificial Sequence: Synthetic oligonucleotide
uccgucccaagucccucgg

SEQ ID NO: 95796 - RNA, 19 nt, Artificial Sequence
  Description of Artificial Sequence: Synthetic oligonucleotide
ugcugucauacaucuguaa

SEQ ID NO: 95797 - RNA, 19 nt, Artificial Sequence
  Description of Artificial Sequence: Synthetic oligonucleotide
auacaugacccacuuucuu

SEQ ID NO: 95798 - RNA, 19 nt, Artificial Sequence
  Description of Artificial Sequence: Synthetic oligonucleotide
gcucuagcguuuuguaagg

SEQ ID NO: 95799 - RNA, 19 nt, Artificial Sequence
  Description of Artificial Sequence: Synthetic oligonucleotide
cugaugguuaugugugguc

SEQ ID NO: 95800 - RNA, 19 nt, Artificial Sequence
  Description of Artificial Sequence: Synthetic oligonucleotide
aagaaccuagagacucaag

SEQ ID NO: 95801 - RNA, 19 nt, Artificial Sequence
  Description of Artificial Sequence: Synthetic oligonucleotide
agacuguagauaaaauuua

SEQ ID NO: 95802 - RNA, 19 nt, Artificial Sequence
  Description of Artificial Sequence: Synthetic oligonucleotide
gacggaguaauaaccuaca

SEQ ID NO: 95803 - RNA, 19 nt, Artificial Sequence
  Description of Artificial Sequence: Synthetic oligonucleotide
gcaugcuuuaaacacagua

SEQ ID NO: 95804 - RNA, 19 nt, Artificial Sequence
  Description of Artificial Sequence: Synthetic oligonucleotide
gguagaguugugucgagaa

SEQ ID NO: 95805 - RNA, 19 nt, Artificial Sequence
  Description of Artificial Sequence: Synthetic oligonucleotide
augacggaguaauaaccua

SEQ ID NO: 95806 - RNA, 19 nt, Artificial Sequence
  Description of Artificial Sequence: Synthetic oligonucleotide
guuaaccauauagucccac

SEQ ID NO: 95807 - RNA, 19 nt, Artificial Sequence
  Description of Artificial Sequence: Synthetic oligonucleotide
agagggaguucgucuauau

SEQ ID NO: 95808 - RNA, 19 nt, Artificial Sequence
  Description of Artificial Sequence: Synthetic oligonucleotide
acuagcguggcaccccuau

SEQ ID NO: 95809 - RNA, 19 nt, Artificial Sequence
  Description of Artificial Sequence: Synthetic oligonucleotide
aguauaugcuuuggucucu

SEQ ID NO: 95810 - RNA, 19 nt, Artificial Sequence
  Description of Artificial Sequence: Synthetic oligonucleotide
aucuacuguaauauccuaa

SEQ ID NO: 95811 - RNA, 19 nt, Artificial Sequence
  Description of Artificial Sequence: Synthetic oligonucleotide
uauuuccgugcuucuuaac

SEQ ID NO: 95812 - RNA, 19 nt, Artificial Sequence
  Description of Artificial Sequence: Synthetic oligonucleotide
agagaauugggcagucaca

SEQ ID NO: 95813 - RNA, 19 nt, Artificial Sequence
  Description of Artificial Sequence: Synthetic oligonucleotide
ggagcauaguuuauuauaa

SEQ ID NO: 95814 - RNA, 19 nt, Artificial Sequence
  Description of Artificial Sequence: Synthetic oligonucleotide
aucgagguauccugauggu

SEQ ID NO: 95815 - RNA, 19 nt, Artificial Sequence
  Description of Artificial Sequence: Synthetic oligonucleotide
ucugcgugggaggauuugu

SEQ ID NO: 95816 - RNA, 19 nt, Artificial Sequence
  Description of Artificial Sequence: Synthetic oligonucleotide
aaaaguccagucacucgau

SEQ ID NO: 95817 - RNA, 19 nt, Artificial Sequence
  Description of Artificial Sequence: Synthetic oligonucleotide
augugcuuacuuugacaca

SEQ ID NO: 95818 - RNA, 19 nt, Artificial Sequence
  Description of Artificial Sequence: Synthetic oligonucleotide
uauuuaggcuggucauaaa

SEQ ID NO: 95819 - RNA, 19 nt, Artificial Sequence
  Description of Artificial Sequence: Synthetic oligonucleotide
ggcagucucugguauaaac

SEQ ID NO: 95820 - RNA, 19 nt, Artificial Sequence
  Description of Artificial Sequence: Synthetic oligonucleotide
agaugauugcacccucuuu

SEQ ID NO: 95821 - RNA, 19 nt, Artificial Sequence
  Description of Artificial Sequence: Synthetic oligonucleotide
agguuuccgaauauaccug

SEQ ID NO: 95822 - RNA, 19 nt, Artificial Sequence
  Description of Artificial Sequence: Synthetic oligonucleotide
gugagauaugauugaugga

SEQ ID NO: 95823 - RNA, 19 nt, Artificial Sequence
  Description of Artificial Sequence: Synthetic oligonucleotide
gagggaguucgucuauauc

SEQ ID NO: 95824 - RNA, 19 nt, Artificial Sequence
  Description of Artificial Sequence: Synthetic oligonucleotide
  modified_base (3)..(3): a, c, u, g, unknown or other
gunacgguucugguaacuc

SEQ ID NO: 95825 - RNA, 19 nt, Artificial Sequence
  Description of Artificial Sequence: Synthetic oligonucleotide
acaggcucuagcguuuugu

SEQ ID NO: 95826 - RNA, 19 nt, Artificial Sequence
  Description of Artificial Sequence: Synthetic oligonucleotide
acggaguaauaaccuacau

SEQ ID NO: 95827 - RNA, 19 nt, Artificial Sequence
  Description of Artificial Sequence: Synthetic oligonucleotide
gaugguuaugugugguccu

SEQ ID NO: 95828 - RNA, 19 nt, Artificial Sequence
  Description of Artificial Sequence: Synthetic oligonucleotide
guacauaugcauaaucaau

SEQ ID NO: 95829 - RNA, 19 nt, Artificial Sequence
  Description of Artificial Sequence: Synthetic oligonucleotide
agcguggcaccccuaugug

SEQ ID NO: 95830 - RNA, 19 nt, Artificial Sequence
  Description of Artificial Sequence: Synthetic oligonucleotide
uugaauuguuaaguaucuu

SEQ ID NO: 95831 - RNA, 19 nt, Artificial Sequence
  Description of Artificial Sequence: Synthetic oligonucleotide
auagaugauugcacccucu

SEQ ID NO: 95832 - RNA, 19 nt, Artificial Sequence
  Description of Artificial Sequence: Synthetic oligonucleotide
uguugggauuguguccaug

SEQ ID NO: 95833 - RNA, 19 nt, Artificial Sequence
  Description of Artificial Sequence: Synthetic oligonucleotide
ugguagaguugugucgaga

SEQ ID NO: 95834 - RNA, 19 nt, Artificial Sequence
  Description of Artificial Sequence: Synthetic oligonucleotide
aggcucuagcguuuuguaa

SEQ ID NO: 95835 - RNA, 19 nt, Artificial Sequence
  Description of Artificial Sequence: Synthetic oligonucleotide
aucccucuaacccucccuu

SEQ ID NO: 95836 - RNA, 19 nt, Artificial Sequence
  Description of Artificial Sequence: Synthetic oligonucleotide
guauuccgucccaaguccc

SEQ ID NO: 95837 - RNA, 19 nt, Artificial Sequence
  Description of Artificial Sequence: Synthetic oligonucleotide
agacuagcguggcaccccu

SEQ ID NO: 95838 - RNA, 19 nt, Artificial Sequence
  Description of Artificial Sequence: Synthetic oligonucleotide
cacaguaugacggaguaau

SEQ ID NO: 95839 - RNA, 19 nt, Artificial Sequence
  Description of Artificial Sequence: Synthetic oligonucleotide
aagaagugguagaguugug

SEQ ID NO: 95840 - RNA, 19 nt, Artificial Sequence
  Description of Artificial Sequence: Synthetic oligonucleotide
aguaguccgccacccgggu

SEQ ID NO: 95841 - RNA, 19 nt, Artificial Sequence
  Description of Artificial Sequence: Synthetic oligonucleotide
ugaggcuuaacaggcucua

SEQ ID NO: 95842 - RNA, 19 nt, Artificial Sequence
  Description of Artificial Sequence: Synthetic oligonucleotide
guagaguugugucgagaaa

SEQ ID NO: 95843 - RNA, 19 nt, Artificial Sequence
  Description of Artificial Sequence: Synthetic oligonucleotide
caaugucuuagcuccggaa

SEQ ID NO: 95844 - RNA, 19 nt, Artificial Sequence
  Description of Artificial Sequence: Synthetic oligonucleotide
cuugguucacuuauguauu

SEQ ID NO: 95845 - RNA, 19 nt, Artificial Sequence
  Description of Artificial Sequence: Synthetic oligonucleotide
ugguucacuuauguauuua

SEQ ID NO: 95846 - RNA, 19 nt, Artificial Sequence
  Description of Artificial Sequence: Synthetic oligonucleotide
auaguccuauaaauucuaa

SEQ ID NO: 95847 - RNA, 19 nt, Artificial Sequence
  Description of Artificial Sequence: Synthetic oligonucleotide
cugcauacgggucacuaua

SEQ ID NO: 95848 - RNA, 19 nt, Artificial Sequence
  Description of Artificial Sequence: Synthetic oligonucleotide
cggaguaauaaccuacaug

SEQ ID NO: 95849 - RNA, 19 nt, Artificial Sequence
  Description of Artificial Sequence: Synthetic oligonucleotide
cagccacaauacaaaccug

SEQ ID NO: 95850 - RNA, 19 nt, Artificial Sequence
  Description of Artificial Sequence: Synthetic oligonucleotide
augcuaucugcaaauuaau

SEQ ID NO: 95851 - RNA, 19 nt, Artificial Sequence
  Description of Artificial Sequence: Synthetic oligonucleotide
guaaaacguuuuccuucca

SEQ ID NO: 95852 - RNA, 19 nt, Artificial Sequence
  Description of Artificial Sequence: Synthetic oligonucleotide
auccuaagcagaacagaau

SEQ ID NO: 95853 - RNA, 19 nt, Artificial Sequence
  Description of Artificial Sequence: Synthetic oligonucleotide
uaccugacagggcgcucca

SEQ ID NO: 95854 - RNA, 19 nt, Artificial Sequence
  Description of Artificial Sequence: Synthetic oligonucleotide
agggaaaaguccagucacu

SEQ ID NO: 95855 - RNA, 19 nt, Artificial Sequence
  Description of Artificial Sequence: Synthetic oligonucleotide
ucgagguauccugaugguu

SEQ ID NO: 95856 - RNA, 19 nt, Artificial Sequence
  Description of Artificial Sequence: Synthetic oligonucleotide
gggaaaaguccagucacuc

SEQ ID NO: 95857 - RNA, 19 nt, Artificial Sequence
  Description of Artificial Sequence: Synthetic oligonucleotide
aggaguggacaaauucccu

SEQ ID NO: 95858 - RNA, 19 nt, Artificial Sequence
  Description of Artificial Sequence: Synthetic oligonucleotide
ugacagggcgcuccauauu

SEQ ID NO: 95859 - RNA, 19 nt, Artificial Sequence
  Description of Artificial Sequence: Synthetic oligonucleotide
ggaguucgucuauauccac

SEQ ID NO: 95860 - RNA, 19 nt, Artificial Sequence
  Description of Artificial Sequence: Synthetic oligonucleotide
guccaugcauaugcaugag

SEQ ID NO: 95861 - RNA, 19 nt, Artificial Sequence
  Description of Artificial Sequence: Synthetic oligonucleotide
gguucacuuauguauuuau

SEQ ID NO: 95862 - RNA, 19 nt, Artificial Sequence
  Description of Artificial Sequence: Synthetic oligonucleotide
gcguaggcacagcaauggg

SEQ ID NO: 95863 - RNA, 19 nt, Artificial Sequence
  Description of Artificial Sequence: Synthetic oligonucleotide
gcucucgcauuuacuaugc

SEQ ID NO: 95864 - RNA, 19 nt, Artificial Sequence
  Description of Artificial Sequence: Synthetic oligonucleotide
gggaguucgucuauaucca

SEQ ID NO: 95865 - RNA, 19 nt, Artificial Sequence
  Description of Artificial Sequence: Synthetic oligonucleotide
ucccucuaacccucccuua

SEQ ID NO: 95866 - RNA, 19 nt, Artificial Sequence
  Description of Artificial Sequence: Synthetic oligonucleotide
agcguuuuguaaggguauu

SEQ ID NO: 95867 - RNA, 19 nt, Artificial Sequence
  Description of Artificial Sequence: Synthetic oligonucleotide
cauauuugcaggugcuauu

SEQ ID NO: 95868 - RNA, 19 nt, Artificial Sequence
  Description of Artificial Sequence: Synthetic oligonucleotide
gcuuacuuugacacaaugu

SEQ ID NO: 95869 - RNA, 19 nt, Artificial Sequence
  Description of Artificial Sequence: Synthetic oligonucleotide
cuaaucgagguauccugau

SEQ ID NO: 95870 - RNA, 19 nt, Artificial Sequence
  Description of Artificial Sequence: Synthetic oligonucleotide
gcuccggaaaucugcaaaa

SEQ ID NO: 95871 - RNA, 19 nt, Artificial Sequence
  Description of Artificial Sequence: Synthetic oligonucleotide
auaguccaccggaggaggu

SEQ ID NO: 95872 - RNA, 19 nt, Artificial Sequence
  Description of Artificial Sequence: Synthetic oligonucleotide
ccaccagaagaugucgaag

SEQ ID NO: 95873 - RNA, 19 nt, Artificial Sequence
  Description of Artificial Sequence: Synthetic oligonucleotide
  modified_base (17)..(17): a, c, u, g, unknown or other
aguccgccacccgggunac

SEQ ID NO: 95874 - RNA, 19 nt, Artificial Sequence
  Description of Artificial Sequence: Synthetic oligonucleotide
guggacaaauucccuuggu

SEQ ID NO: 95875 - RNA, 19 nt, Artificial Sequence
  Description of Artificial Sequence: Synthetic oligonucleotide
gcguggcaccccuaugugc

SEQ ID NO: 95876 - RNA, 19 nt, Artificial Sequence
  Description of Artificial Sequence: Synthetic oligonucleotide
acaguaugacggaguaaua

SEQ ID NO: 95877 - RNA, 19 nt, Artificial Sequence
  Description of Artificial Sequence: Synthetic oligonucleotide
cccaauuguaaaaucuuau

SEQ ID NO: 95878 - RNA, 19 nt, Artificial Sequence
  Description of Artificial Sequence: Synthetic oligonucleotide
  modified_base (6)..(6): a, c, u, g, unknown or other
cgggunacgguucugguaa

SEQ ID NO: 95879 - RNA, 19 nt, Artificial Sequence
  Description of Artificial Sequence: Synthetic oligonucleotide
cuuugcuauucggacacau

SEQ ID NO: 95880 - RNA, 19 nt, Artificial Sequence
  Description of Artificial Sequence: Synthetic oligonucleotide
augcugucauacaucugua

SEQ ID NO: 95881 - RNA, 19 nt, Artificial Sequence
  Description of Artificial Sequence: Synthetic oligonucleotide
gcgugggaggauuuguucu

SEQ ID NO: 95882 - RNA, 19 nt, Artificial Sequence
  Description of Artificial Sequence: Synthetic oligonucleotide
ggaucgccaucugcauacg

SEQ ID NO: 95883 - RNA, 19 nt, Artificial Sequence
  Description of Artificial Sequence: Synthetic oligonucleotide
gcguuuuguaaggguauuc

SEQ ID NO: 95884 - RNA, 19 nt, Artificial Sequence
  Description of Artificial Sequence: Synthetic oligonucleotide
  modified_base (5)..(5): a, c, u, g, unknown or other
gggunacgguucugguaac

SEQ ID NO: 95885 - RNA, 19 nt, Artificial Sequence
  Description of Artificial Sequence: Synthetic oligonucleotide
gugaguacauaugcauaau

SEQ ID NO: 95886 - RNA, 19 nt, Artificial Sequence
  Description of Artificial Sequence: Synthetic oligonucleotide
cuggucauugugccauacu

SEQ ID NO: 95887 - RNA, 19 nt, Artificial Sequence
  Description of Artificial Sequence: Synthetic oligonucleotide
ggcaccccuaugugcuuac

SEQ ID NO: 95888 - RNA, 19 nt, Artificial Sequence
  Description of Artificial Sequence: Synthetic oligonucleotide
gggucacuauacugaacua

SEQ ID NO: 95889 - RNA, 19 nt, Artificial Sequence
  Description of Artificial Sequence: Synthetic oligonucleotide
  modified_base (19)..(19): a, c, u, g, unknown or other
guaguccgccacccgggun

SEQ ID NO: 95890 - RNA, 19 nt, Artificial Sequence
  Description of Artificial Sequence: Synthetic oligonucleotide
  modified_base (4)..(4): a, c, u, g, unknown or other
ggunacgguucugguaacu

SEQ ID NO: 95891 - RNA, 19 nt, Artificial Sequence
  Description of Artificial Sequence: Synthetic oligonucleotide
ccuggacuaugcugacuuc

SEQ ID NO: 95892 - RNA, 19 nt, Artificial Sequence
  Description of Artificial Sequence: Synthetic oligonucleotide
gcauacgggucacuauacu

SEQ ID NO: 95893 - RNA, 19 nt, Artificial Sequence
  Description of Artificial Sequence: Synthetic oligonucleotide
cccacaguaugacggagua

SEQ ID NO: 95894 - RNA, 19 nt, Artificial Sequence
  Description of Artificial Sequence: Synthetic oligonucleotide
  modified_base (7)..(7): a, c, u, g, unknown or other
ccgggunacgguucuggua

SEQ ID NO: 95895 - RNA, 19 nt, Artificial Sequence
  Description of Artificial Sequence: Synthetic oligonucleotide
ccaaugcauuuauuugaua

SEQ ID NO: 95896 - RNA, 19 nt, Artificial Sequence
  Description of Artificial Sequence: Synthetic oligonucleotide
cucucgcauuuacuaugcu

SEQ ID NO: 95897 - RNA, 19 nt, Artificial Sequence
  Description of Artificial Sequence: Synthetic oligonucleotide
caccccuaugugcuuacuu

SEQ ID NO: 95898 - RNA, 19 nt, Artificial Sequence
  Description of Artificial Sequence: Synthetic oligonucleotide
  modified_base (12)..(12): a, c, u, g, unknown or other
gccacccgggunacgguuc

SEQ ID NO: 95899 - RNA, 19 nt, Artificial Sequence
  Description of Artificial Sequence: Synthetic oligonucleotide
ccugaugguuauguguggu

SEQ ID NO: 95900 - RNA, 19 nt, Artificial Sequence
  Description of Artificial Sequence: Synthetic oligonucleotide
ccuaaucaguauagugcau

SEQ ID NO: 95901 - RNA, 19 nt, Artificial Sequence
  Description of Artificial Sequence: Synthetic oligonucleotide
ccgucccaagucccucggc

SEQ ID NO: 95902 - RNA, 19 nt, Artificial Sequence
  Description of Artificial Sequence: Synthetic oligonucleotide
gcuagagauuggguaguau

SEQ ID NO: 95903 - RNA, 19 nt, Artificial Sequence
  Description of Artificial Sequence: Synthetic oligonucleotide
gacuagcguggcaccccua

SEQ ID NO: 95904 - RNA, 19 nt, Artificial Sequence
  Description of Artificial Sequence: Synthetic oligonucleotide
gcugguuauuuccgugcuu

SEQ ID NO: 95905 - RNA, 19 nt, Artificial Sequence
  Description of Artificial Sequence: Synthetic oligonucleotide
ccacaguaugacggaguaa

SEQ ID NO: 95906 - RNA, 19 nt, Artificial Sequence
  Description of Artificial Sequence: Synthetic oligonucleotide
  modified_base (8)..(8): a, c, u, g, unknown or other
cccgggunacgguucuggu

SEQ ID NO: 95907 - RNA, 19 nt, Artificial Sequence
  Description of Artificial Sequence: Synthetic oligonucleotide
  modified_base (14)..(14): a, c, u, g, unknown or other
ccgccacccgggunacggu

SEQ ID NO: 95908 - RNA, 19 nt, Artificial Sequence
  Description of Artificial Sequence: Synthetic oligonucleotide
gcaccccuaugugcuuacu

SEQ ID NO: 95909 - RNA, 19 nt, Artificial Sequence
  Description of Artificial Sequence: Synthetic oligonucleotide
  modified_base (13)..(13): a, c, u, g, unknown or other
cgccacccgggunacgguu

SEQ ID NO: 95910 - RNA, 19 nt, Artificial Sequence
  Description of Artificial Sequence: Synthetic oligonucleotide
uuaaagaggaccaauagag

SEQ ID NO: 95911 - RNA, 19 nt, Artificial Sequence
  Description of Artificial Sequence: Synthetic oligonucleotide
aacguauacagguacauuc

SEQ ID NO: 95912 - RNA, 19 nt, Artificial Sequence
  Description of Artificial Sequence: Synthetic oligonucleotide
uauauauauauauaaauuc

SEQ ID NO: 95913 - RNA, 19 nt, Artificial Sequence
  Description of Artificial Sequence: Synthetic oligonucleotide
aauagagagaaccucaugu

SEQ ID NO: 95914 - RNA, 19 nt, Artificial Sequence
  Description of Artificial Sequence: Synthetic oligonucleotide
uguacuaugggauagcaug

SEQ ID NO: 95915 - RNA, 19 nt, Artificial Sequence
  Description of Artificial Sequence: Synthetic oligonucleotide
gagaguaacagcuuuacug

SEQ ID NO: 95916 - RNA, 19 nt, Artificial Sequence
  Description of Artificial Sequence: Synthetic oligonucleotide
aaugcuaacugucucccgg

SEQ ID NO: 95917 - RNA, 19 nt, Artificial Sequence
  Description of Artificial Sequence: Synthetic oligonucleotide
uacauauauauauauauaa

SEQ ID NO: 95918 - RNA, 19 nt, Artificial Sequence
  Description of Artificial Sequence: Synthetic oligonucleotide
aauauaucagugcuuucag

SEQ ID NO: 95919 - RNA, 19 nt, Artificial Sequence
  Description of Artificial Sequence: Synthetic oligonucleotide
uauauauauauaaauucaa

SEQ ID NO: 95920 - RNA, 19 nt, Artificial Sequence
  Description of Artificial Sequence: Synthetic oligonucleotide
aguacuauguacuauggga

SEQ ID NO: 95921 - RNA, 19 nt, Artificial Sequence
  Description of Artificial Sequence: Synthetic oligonucleotide
auuaguacuauguacuaug

SEQ ID NO: 95922 - RNA, 19 nt, Artificial Sequence
  Description of Artificial Sequence: Synthetic oligonucleotide
uuuucugcaacaguggcgg

SEQ ID NO: 95923 - RNA, 19 nt, Artificial Sequence
  Description of Artificial Sequence: Synthetic oligonucleotide
uaaguuacuggauauaauc

SEQ ID NO: 95924 - RNA, 19 nt, Artificial Sequence
  Description of Artificial Sequence: Synthetic oligonucleotide
ucuccuauagaucuugccc

SEQ ID NO: 95925 - RNA, 19 nt, Artificial Sequence
  Description of Artificial Sequence: Synthetic oligonucleotide
aacacauuagucuucuagu

SEQ ID NO: 95926 - RNA, 19 nt, Artificial Sequence
  Description of Artificial Sequence: Synthetic oligonucleotide
ucuguguaaagucagcuaa

SEQ ID NO: 95927 - RNA, 19 nt, Artificial Sequence
  Description of Artificial Sequence: Synthetic oligonucleotide
aguuacuggauauaaucag

SEQ ID NO: 95928 - RNA, 19 nt, Artificial Sequence
  Description of Artificial Sequence: Synthetic oligonucleotide
aguuaaagaggaccaauag

SEQ ID NO: 95929 - RNA, 19 nt, Artificial Sequence
  Description of Artificial Sequence: Synthetic oligonucleotide
aauuuauaaggcaaacucu

SEQ ID NO: 95930 - RNA, 19 nt, Artificial Sequence
  Description of Artificial Sequence: Synthetic oligonucleotide
auauauauauauaaauuca

SEQ ID NO: 95931 - RNA, 19 nt, Artificial Sequence
  Description of Artificial Sequence: Synthetic oligonucleotide
agauguuugccauggaaag

SEQ ID NO: 95932 - RNA, 19 nt, Artificial Sequence
  Description of Artificial Sequence: Synthetic oligonucleotide
uuuguaacgaaaagguguc

SEQ ID NO: 95933 - RNA, 19 nt, Artificial Sequence
  Description of Artificial Sequence: Synthetic oligonucleotide
agaguaacagcuuuacuga

SEQ ID NO: 95934 - RNA, 19 nt, Artificial Sequence
  Description of Artificial Sequence: Synthetic oligonucleotide
uugacgagaaguuucccag

SEQ ID NO: 95935 - RNA, 19 nt, Artificial Sequence
  Description of Artificial Sequence: Synthetic oligonucleotide
gugcuuaacuucuuggugg

SEQ ID NO: 95936 - RNA, 19 nt, Artificial Sequence
  Description of Artificial Sequence: Synthetic oligonucleotide
uacauacauauauauauau

SEQ ID NO: 95937 - RNA, 19 nt, Artificial Sequence
  Description of Artificial Sequence: Synthetic oligonucleotide
aaucaaaagcccagaauag

SEQ ID NO: 95938 - RNA, 19 nt, Artificial Sequence
  Description of Artificial Sequence: Synthetic oligonucleotide
uugaaacguauacagguac

SEQ ID NO: 95939 - RNA, 19 nt, Artificial Sequence
  Description of Artificial Sequence: Synthetic oligonucleotide
uaguacuauguacuauggg

SEQ ID NO: 95940 - RNA, 19 nt, Artificial Sequence
  Description of Artificial Sequence: Synthetic oligonucleotide
uagggagccaaaauagcag

SEQ ID NO: 95941 - RNA, 19 nt, Artificial Sequence
  Description of Artificial Sequence: Synthetic oligonucleotide
agguuuacugaaaugguac

SEQ ID NO: 95942 - RNA, 19 nt, Artificial Sequence
  Description of Artificial Sequence: Synthetic oligonucleotide
uaugggauagcaugguaug

SEQ ID NO: 95943 - RNA, 19 nt, Artificial Sequence
  Description of Artificial Sequence: Synthetic oligonucleotide
auauauauauauauaaauu

SEQ ID NO: 95944 - RNA, 19 nt, Artificial Sequence
  Description of Artificial Sequence: Synthetic oligonucleotide
uauuucaguuaaucggaag

SEQ ID NO: 95945 - RNA, 19 nt, Artificial Sequence
  Description of Artificial Sequence: Synthetic oligonucleotide
ucuaaaguaauugucccaa

SEQ ID NO: 95946 - RNA, 19 nt, Artificial Sequence
  Description of Artificial Sequence: Synthetic oligonucleotide
uaaaacgaccuacuuauuu

SEQ ID NO: 95947 - RNA, 19 nt, Artificial Sequence
  Description of Artificial Sequence: Synthetic oligonucleotide
uuuuguguguguguguugc

SEQ ID NO: 95948 - RNA, 19 nt, Artificial Sequence
  Description of Artificial Sequence: Synthetic oligonucleotide
uguuccccuuauaugagcc

SEQ ID NO: 95949 - RNA, 19 nt, Artificial Sequence
  Description of Artificial Sequence: Synthetic oligonucleotide
cuuauaugagccuggaaca

SEQ ID NO: 95950 - RNA, 19 nt, Artificial Sequence
  Description of Artificial Sequence: Synthetic oligonucleotide
cauacauauauauauauau

SEQ ID NO: 95951 - RNA, 19 nt, Artificial Sequence
  Description of Artificial Sequence: Synthetic oligonucleotide
accuacuuauuuucuaaag

SEQ ID NO: 95952 - RNA, 19 nt, Artificial Sequence
  Description of Artificial Sequence: Synthetic oligonucleotide
ugaaacguauacagguaca

SEQ ID NO: 95953 - RNA, 19 nt, Artificial Sequence
  Description of Artificial Sequence: Synthetic oligonucleotide
cauauauauauauauaaau

SEQ ID NO: 95954 - RNA, 19 nt, Artificial Sequence
  Description of Artificial Sequence: Synthetic oligonucleotide
ucagcuacuaaaugccaug

SEQ ID NO: 95955 - RNA, 19 nt, Artificial Sequence
  Description of Artificial Sequence: Synthetic oligonucleotide
aaagcagaccuaugcauau

SEQ ID NO: 95956 - RNA, 19 nt, Artificial Sequence
  Description of Artificial Sequence: Synthetic oligonucleotide
agucagcuaacucucucgg

SEQ ID NO: 95957 - RNA, 19 nt, Artificial Sequence
  Description of Artificial Sequence: Synthetic oligonucleotide
guuaaagaggaccaauaga

SEQ ID NO: 95958 - RNA, 19 nt, Artificial Sequence
  Description of Artificial Sequence: Synthetic oligonucleotide
uguaacgaaaaggugucca

SEQ ID NO: 95959 - RNA, 19 nt, Artificial Sequence
  Description of Artificial Sequence: Synthetic oligonucleotide
aaagaggugucgccuaccu

SEQ ID NO: 95960 - RNA, 19 nt, Artificial Sequence
  Description of Artificial Sequence: Synthetic oligonucleotide
uuugaaacguauacaggua

SEQ ID NO: 95961 - RNA, 19 nt, Artificial Sequence
  Description of Artificial Sequence: Synthetic oligonucleotide
uuuacuuagcaauguuccu

SEQ ID NO: 95962 - RNA, 19 nt, Artificial Sequence
  Description of Artificial Sequence: Synthetic oligonucleotide
uggggauugaucaaauaua

SEQ ID NO: 95963 - RNA, 19 nt, Artificial Sequence
  Description of Artificial Sequence: Synthetic oligonucleotide
uuucaguuaaucggaagcu

SEQ ID NO: 95964 - RNA, 19 nt, Artificial Sequence
  Description of Artificial Sequence: Synthetic oligonucleotide
augagaguaacagcuuuac

SEQ ID NO: 95965 - RNA, 19 nt, Artificial Sequence
  Description of Artificial Sequence: Synthetic oligonucleotide
auaucagugcuuucaguca

SEQ ID NO: 95966 - RNA, 19 nt, Artificial Sequence
  Description of Artificial Sequence: Synthetic oligonucleotide
ucaaugcuaacugucuccc

SEQ ID NO: 95967 - RNA, 19 nt, Artificial Sequence
  Description of Artificial Sequence: Synthetic oligonucleotide
guaacgaaaagguguccag

SEQ ID NO: 95968 - RNA, 19 nt, Artificial Sequence
  Description of Artificial Sequence: Synthetic oligonucleotide
acaaucuguaaugagagua

SEQ ID NO: 95969 - RNA, 19 nt, Artificial Sequence
  Description of Artificial Sequence: Synthetic oligonucleotide
uuuggggcguccccgaccc

SEQ ID NO: 95970 - RNA, 19 nt, Artificial Sequence
  Description of Artificial Sequence: Synthetic oligonucleotide
ucaaaugcuuuguaacgaa

SEQ ID NO: 95971 - RNA, 19 nt, Artificial Sequence
  Description of Artificial Sequence: Synthetic oligonucleotide
gcuacuaaaugccauggug

SEQ ID NO: 95972 - RNA, 19 nt, Artificial Sequence
  Description of Artificial Sequence: Synthetic oligonucleotide
auagcagauuaguacuaug

SEQ ID NO: 95973 - RNA, 19 nt, Artificial Sequence
  Description of Artificial Sequence: Synthetic oligonucleotide
ugcuuaacuucuugguggc

SEQ ID NO: 95974 - RNA, 19 nt, Artificial Sequence
  Description of Artificial Sequence: Synthetic oligonucleotide
agcccuacccauaaggagg

SEQ ID NO: 95975 - RNA, 19 nt, Artificial Sequence
  Description of Artificial Sequence: Synthetic oligonucleotide
acauauauauauauauaaa

SEQ ID NO: 95976 - RNA, 19 nt, Artificial Sequence
  Description of Artificial Sequence: Synthetic oligonucleotide
cuaacucucucggucacgg

SEQ ID NO: 95977 - RNA, 19 nt, Artificial Sequence
  Description of Artificial Sequence: Synthetic oligonucleotide
ggauugaucaaauauacau

SEQ ID NO: 95978 - RNA, 19 nt, Artificial Sequence
  Description of Artificial Sequence: Synthetic oligonucleotide
uuuucaccugaacaccuuc

SEQ ID NO: 95979 - RNA, 19 nt, Artificial Sequence
  Description of Artificial Sequence: Synthetic oligonucleotide
accgaaggugaauucaaca

SEQ ID NO: 95980 - RNA, 19 nt, Artificial Sequence
  Description of Artificial Sequence: Synthetic oligonucleotide
cagaccguauggaagacuc

SEQ ID NO: 95981 - RNA, 19 nt, Artificial Sequence
  Description of Artificial Sequence: Synthetic oligonucleotide
uugggaaucagaugacauc

SEQ ID NO: 95982 - RNA, 19 nt, Artificial Sequence
  Description of Artificial Sequence: Synthetic oligonucleotide
cuugucuuaucacccaauc

SEQ ID NO: 95983 - RNA, 19 nt, Artificial Sequence
  Description of Artificial Sequence: Synthetic oligonucleotide
uacugaaaugguacaaauu

SEQ ID NO: 95984 - RNA, 19 nt, Artificial Sequence
  Description of Artificial Sequence: Synthetic oligonucleotide
gagcccuacccauaaggag

SEQ ID NO: 95985 - RNA, 19 nt, Artificial Sequence
  Description of Artificial Sequence: Synthetic oligonucleotide
uccccuuauaugagccugg

SEQ ID NO: 95986 - RNA, 19 nt, Artificial Sequence
  Description of Artificial Sequence: Synthetic oligonucleotide
ugagaguaacagcuuuacu

SEQ ID NO: 95987 - RNA, 19 nt, Artificial Sequence
  Description of Artificial Sequence: Synthetic oligonucleotide
ucauuuuaugccuccucuc

SEQ ID NO: 95988 - RNA, 19 nt, Artificial Sequence
  Description of Artificial Sequence: Synthetic oligonucleotide
guauggaagacuccuucac

SEQ ID NO: 95989 - RNA, 19 nt, Artificial Sequence
  Description of Artificial Sequence: Synthetic oligonucleotide
auauaucagugcuuucagu

SEQ ID NO: 95990 - RNA, 19 nt, Artificial Sequence
  Description of Artificial Sequence: Synthetic oligonucleotide
cagauuaguacuauguacu

SEQ ID NO: 95991 - RNA, 19 nt, Artificial Sequence
  Description of Artificial Sequence: Synthetic oligonucleotide
aaccgaaggugaauucaac

SEQ ID NO: 95992 - RNA, 19 nt, Artificial Sequence
  Description of Artificial Sequence: Synthetic oligonucleotide
ucgccuaccuuuucaaagu

SEQ ID NO: 95993 - RNA, 19 nt, Artificial Sequence
  Description of Artificial Sequence: Synthetic oligonucleotide
uucuuaggugguuucugcu

SEQ ID NO: 95994 - RNA, 19 nt, Artificial Sequence
  Description of Artificial Sequence: Synthetic oligonucleotide
uuacuuagcaauguuccuu

SEQ ID NO: 95995 - RNA, 19 nt, Artificial Sequence
  Description of Artificial Sequence: Synthetic oligonucleotide
uaacgaaaagguguccaga

SEQ ID NO: 95996 - RNA, 19 nt, Artificial Sequence
  Description of Artificial Sequence: Synthetic oligonucleotide
uguguguguguguugccac

SEQ ID NO: 95997 - RNA, 19 nt, Artificial Sequence
  Description of Artificial Sequence: Synthetic oligonucleotide
aguuaaucggaagcuuguc

SEQ ID NO: 95998 - RNA, 19 nt, Artificial Sequence
  Description of Artificial Sequence: Synthetic oligonucleotide
gaaccucaugucccguagg

SEQ ID NO: 95999 - RNA, 19 nt, Artificial Sequence
  Description of Artificial Sequence: Synthetic oligonucleotide
gagugucuaauucauuuua

SEQ ID NO: 96000 - RNA, 19 nt, Artificial Sequence
  Description of Artificial Sequence: Synthetic oligonucleotide
agcuaacucucucggucac

SEQ ID NO: 96001 - RNA, 19 nt, Artificial Sequence
  Description of Artificial Sequence: Synthetic oligonucleotide
ucugccagggcguuugauc

SEQ ID NO: 96002 - RNA, 19 nt, Artificial Sequence
  Description of Artificial Sequence: Synthetic oligonucleotide
agauuaguacuauguacua

SEQ ID NO: 96003 - RNA, 19 nt, Artificial Sequence
  Description of Artificial Sequence: Synthetic oligonucleotide
uacuuuccagcagagcggc

SEQ ID NO: 96004 - RNA, 19 nt, Artificial Sequence
  Description of Artificial Sequence: Synthetic oligonucleotide
cuugacgagaaguuuccca

SEQ ID NO: 96005 - RNA, 19 nt, Artificial Sequence
  Description of Artificial Sequence: Synthetic oligonucleotide
gaccugauaaaaguugaga

SEQ ID NO: 96006 - RNA, 19 nt, Artificial Sequence
  Description of Artificial Sequence: Synthetic oligonucleotide
auacauauauauauauaua

SEQ ID NO: 96007 - RNA, 19 nt, Artificial Sequence
  Description of Artificial Sequence: Synthetic oligonucleotide
ucauacauggggccccggu

SEQ ID NO: 96008 - RNA, 19 nt, Artificial Sequence
  Description of Artificial Sequence: Synthetic oligonucleotide
uuauuccccaggcauggua

SEQ ID NO: 96009 - RNA, 19 nt, Artificial Sequence
  Description of Artificial Sequence: Synthetic oligonucleotide
uguugggaaucagaugaca

SEQ ID NO: 96010 - RNA, 19 nt, Artificial Sequence
  Description of Artificial Sequence: Synthetic oligonucleotide
aguaugcaaucaauuccac

SEQ ID NO: 96011 - RNA, 19 nt, Artificial Sequence
  Description of Artificial Sequence: Synthetic oligonucleotide
ggguugucucuucagauug

SEQ ID NO: 96012 - RNA, 19 nt, Artificial Sequence
  Description of Artificial Sequence: Synthetic oligonucleotide
uuccccuuauaugagccug

SEQ ID NO: 96013 - RNA, 19 nt, Artificial Sequence
  Description of Artificial Sequence: Synthetic oligonucleotide
aaugagaguaacagcuuua

SEQ ID NO: 96014 - RNA, 19 nt, Artificial Sequence
  Description of Artificial Sequence: Synthetic oligonucleotide
uuuguguguguguguugcc

SEQ ID NO: 96015 - RNA, 19 nt, Artificial Sequence
  Description of Artificial Sequence: Synthetic oligonucleotide
ggggaguacggucucaugc

SEQ ID NO: 96016 - RNA, 19 nt, Artificial Sequence
  Description of Artificial Sequence: Synthetic oligonucleotide
uuugcgcucucccuccccu

SEQ ID NO: 96017 - RNA, 19 nt, Artificial Sequence
  Description of Artificial Sequence: Synthetic oligonucleotide
aaaccgaaggugaauucaa

SEQ ID NO: 96018 - RNA, 19 nt, Artificial Sequence
  Description of Artificial Sequence: Synthetic oligonucleotide
uuguguguguguguugcca

SEQ ID NO: 96019 - RNA, 19 nt, Artificial Sequence
  Description of Artificial Sequence: Synthetic oligonucleotide
aaguguccuaucuggucau

SEQ ID NO: 96020 - RNA, 19 nt, Artificial Sequence
  Description of Artificial Sequence: Synthetic oligonucleotide
aggcgaugcuuggaaaggc

SEQ ID NO: 96021 - RNA, 19 nt, Artificial Sequence
  Description of Artificial Sequence: Synthetic oligonucleotide
ggggauugaucaaauauac

SEQ ID NO: 96022 - RNA, 19 nt, Artificial Sequence
  Description of Artificial Sequence: Synthetic oligonucleotide
uuuaugccuccucucuaau

SEQ ID NO: 96023 - RNA, 19 nt, Artificial Sequence
  Description of Artificial Sequence: Synthetic oligonucleotide
acauacauauauauauaua

SEQ ID NO: 96024 - RNA, 19 nt, Artificial Sequence
  Description of Artificial Sequence: Synthetic oligonucleotide
uucugccccguuucuuagg

SEQ ID NO: 96025 - RNA, 19 nt, Artificial Sequence
  Description of Artificial Sequence: Synthetic oligonucleotide
guuaccgugaagucaaaau

SEQ ID NO: 96026 - RNA, 19 nt, Artificial Sequence
  Description of Artificial Sequence: Synthetic oligonucleotide
caccccuugacuuuguaaa

SEQ ID NO: 96027 - RNA, 19 nt, Artificial Sequence
  Description of Artificial Sequence: Synthetic oligonucleotide
aaacguauacagguacauu

SEQ ID NO: 96028 - RNA, 19 nt, Artificial Sequence
  Description of Artificial Sequence: Synthetic oligonucleotide
aaccuucaggcaagguggg

SEQ ID NO: 96029 - RNA, 19 nt, Artificial Sequence
  Description of Artificial Sequence: Synthetic oligonucleotide
ccagugcuuaacuucuugg

SEQ ID NO: 96030 - RNA, 19 nt, Artificial Sequence
  Description of Artificial Sequence: Synthetic oligonucleotide
agccaaaauagcagauuag

SEQ ID NO: 96031 - RNA, 19 nt, Artificial Sequence
  Description of Artificial Sequence: Synthetic oligonucleotide
ugcuggugccaauauuuuc

SEQ ID NO: 96032 - RNA, 19 nt, Artificial Sequence
  Description of Artificial Sequence: Synthetic oligonucleotide
gaccuacuuauuuucuaaa

SEQ ID NO: 96033 - RNA, 19 nt, Artificial Sequence
  Description of Artificial Sequence: Synthetic oligonucleotide
uuguaacgaaaaggugucc

SEQ ID NO: 96034 - RNA, 19 nt, Artificial Sequence
  Description of Artificial Sequence: Synthetic oligonucleotide
uuaaaacgaccuacuuauu

SEQ ID NO: 96035 - RNA, 19 nt, Artificial Sequence
  Description of Artificial Sequence: Synthetic oligonucleotide
guagccuguuacuggcugc

SEQ ID NO: 96036 - RNA, 19 nt, Artificial Sequence
  Description of Artificial Sequence: Synthetic oligonucleotide
cauuaggguccaaagaggu

SEQ ID NO: 96037 - RNA, 19 nt, Artificial Sequence
  Description of Artificial Sequence: Synthetic oligonucleotide
acccagauuuuguugggaa

SEQ ID NO: 96038 - RNA, 19 nt, Artificial Sequence
  Description of Artificial Sequence: Synthetic oligonucleotide
acguauacagguacauuca

SEQ ID NO: 96039 - RNA, 19 nt, Artificial Sequence
  Description of Artificial Sequence: Synthetic oligonucleotide
caggcgaugcuuggaaagg

SEQ ID NO: 96040 - RNA, 19 nt, Artificial Sequence
  Description of Artificial Sequence: Synthetic oligonucleotide
uucaguuaaucggaagcuu

SEQ ID NO: 96041 - RNA, 19 nt, Artificial Sequence
  Description of Artificial Sequence: Synthetic oligonucleotide
uacuaugggauagcauggu

SEQ ID NO: 96042 - RNA, 19 nt, Artificial Sequence
  Description of Artificial Sequence: Synthetic oligonucleotide
ucuugacgagaaguuuccc

SEQ ID NO: 96043 - RNA, 19 nt, Artificial Sequence
  Description of Artificial Sequence: Synthetic oligonucleotide
acuaugggauagcauggua

SEQ ID NO: 96044 - RNA, 19 nt, Artificial Sequence
  Description of Artificial Sequence: Synthetic oligonucleotide
cuccuauagaucuugcccu

SEQ ID NO: 96045 - RNA, 19 nt, Artificial Sequence
  Description of Artificial Sequence: Synthetic oligonucleotide
agaccguauggaagacucc

SEQ ID NO: 96046 - RNA, 19 nt, Artificial Sequence
  Description of Artificial Sequence: Synthetic oligonucleotide
auuaggguccaaagaggug

SEQ ID NO: 96047 - RNA, 19 nt, Artificial Sequence
  Description of Artificial Sequence: Synthetic oligonucleotide
ugcaauccacucuguguaa

SEQ ID NO: 96048 - RNA, 19 nt, Artificial Sequence
  Description of Artificial Sequence: Synthetic oligonucleotide
cucaugcacagaccguaug

SEQ ID NO: 96049 - RNA, 19 nt, Artificial Sequence
  Description of Artificial Sequence: Synthetic oligonucleotide
cuaacugucucccgggucu

SEQ ID NO: 96050 - RNA, 19 nt, Artificial Sequence
  Description of Artificial Sequence: Synthetic oligonucleotide
cuggggauugaucaaauau

SEQ ID NO: 96051 - RNA, 19 nt, Artificial Sequence
  Description of Artificial Sequence: Synthetic oligonucleotide
uccuauagaucuugcccuu

SEQ ID NO: 96052 - RNA, 19 nt, Artificial Sequence
  Description of Artificial Sequence: Synthetic oligonucleotide
uggaggacauacagcuauc

SEQ ID NO: 96053 - RNA, 19 nt, Artificial Sequence
  Description of Artificial Sequence: Synthetic oligonucleotide
agagcccuacccauaagga

SEQ ID NO: 96054 - RNA, 19 nt, Artificial Sequence
  Description of Artificial Sequence: Synthetic oligonucleotide
acgaccuacuuauuuucua

SEQ ID NO: 96055 - RNA, 19 nt, Artificial Sequence
  Description of Artificial Sequence: Synthetic oligonucleotide
cuagcugaucugggcaggg

SEQ ID NO: 96056 - RNA, 19 nt, Artificial Sequence
  Description of Artificial Sequence: Synthetic oligonucleotide
cuaugggauagcaugguau

SEQ ID NO: 96057 - RNA, 19 nt, Artificial Sequence
  Description of Artificial Sequence: Synthetic oligonucleotide
ggucuugcgcuucuugaug

SEQ ID NO: 96058 - RNA, 19 nt, Artificial Sequence
  Description of Artificial Sequence: Synthetic oligonucleotide
gcaucuagcugaucugggc

SEQ ID NO: 96059 - RNA, 19 nt, Artificial Sequence
  Description of Artificial Sequence: Synthetic oligonucleotide
gggcauguacccuguuugg

SEQ ID NO: 96060 - RNA, 19 nt, Artificial Sequence
  Description of Artificial Sequence: Synthetic oligonucleotide
agucuauaaguuacuggau

SEQ ID NO: 96061 - RNA, 19 nt, Artificial Sequence
  Description of Artificial Sequence: Synthetic oligonucleotide
cuuaaccucaaugcuaacu

SEQ ID NO: 96062 - RNA, 19 nt, Artificial Sequence
  Description of Artificial Sequence: Synthetic oligonucleotide
cacauuagucuucuagucu

SEQ ID NO: 96063 - RNA, 19 nt, Artificial Sequence
  Description of Artificial Sequence: Synthetic oligonucleotide
gauuaguacuauguacuau

SEQ ID NO: 96064 - RNA, 19 nt, Artificial Sequence
  Description of Artificial Sequence: Synthetic oligonucleotide
agcagagcggccagacuuc

SEQ ID NO: 96065 - RNA, 19 nt, Artificial Sequence
  Description of Artificial Sequence: Synthetic oligonucleotide
gggauagcaugguauguga

SEQ ID NO: 96066 - RNA, 19 nt, Artificial Sequence
  Description of Artificial Sequence: Synthetic oligonucleotide
gcagagagagggacuauag

SEQ ID NO: 96067 - RNA, 19 nt, Artificial Sequence
  Description of Artificial Sequence: Synthetic oligonucleotide
cagcuaacucucucgguca

SEQ ID NO: 96068 - RNA, 19 nt, Artificial Sequence
  Description of Artificial Sequence: Synthetic oligonucleotide
caucauacauggggccccg

SEQ ID NO: 96069 - RNA, 19 nt, Artificial Sequence
  Description of Artificial Sequence: Synthetic oligonucleotide
uguguccucaguggggcau

SEQ ID NO: 96070 - RNA, 19 nt, Artificial Sequence
  Description of Artificial Sequence: Synthetic oligonucleotide
agauugccccucuugucuu

SEQ ID NO: 96071 - RNA, 19 nt, Artificial Sequence
  Description of Artificial Sequence: Synthetic oligonucleotide
uucagucauuuggcuauac

SEQ ID NO: 96072 - RNA, 19 nt, Artificial Sequence
  Description of Artificial Sequence: Synthetic oligonucleotide
uccccucgguguuuguacu

SEQ ID NO: 96073 - RNA, 19 nt, Artificial Sequence
  Description of Artificial Sequence: Synthetic oligonucleotide
ucccaaccucagaugggcu

SEQ ID NO: 96074 - RNA, 19 nt, Artificial Sequence
  Description of Artificial Sequence: Synthetic oligonucleotide
ugcugcgcccuuuggggcu

SEQ ID NO: 96075 - RNA, 19 nt, Artificial Sequence
  Description of Artificial Sequence: Synthetic oligonucleotide
gggaguacggucucaugca

SEQ ID NO: 96076 - RNA, 19 nt, Artificial Sequence
  Description of Artificial Sequence: Synthetic oligonucleotide
cucuguguaaagucagcua

SEQ ID NO: 96077 - RNA, 19 nt, Artificial Sequence
  Description of Artificial Sequence: Synthetic oligonucleotide
cacccaauccccuccccuc

SEQ ID NO: 96078 - RNA, 19 nt, Artificial Sequence
  Description of Artificial Sequence: Synthetic oligonucleotide
cuuugcgcucucccucccc

SEQ ID NO: 96079 - RNA, 19 nt, Artificial Sequence
  Description of Artificial Sequence: Synthetic oligonucleotide
aguuaccgugaagucaaaa

SEQ ID NO: 96080 - RNA, 19 nt, Artificial Sequence
  Description of Artificial Sequence: Synthetic oligonucleotide
cuuucguguccaaccuuca

SEQ ID NO: 96081 - RNA, 19 nt, Artificial Sequence
  Description of Artificial Sequence: Synthetic oligonucleotide
gaguacggucucaugcaca

SEQ ID NO: 96082 - RNA, 19 nt, Artificial Sequence
  Description of Artificial Sequence: Synthetic oligonucleotide
gugucuaguuggugcauaa

SEQ ID NO: 96083 - RNA, 19 nt, Artificial Sequence
  Description of Artificial Sequence: Synthetic oligonucleotide
cagugcuuucagucauuug

SEQ ID NO: 96084 - RNA, 19 nt, Artificial Sequence
  Description of Artificial Sequence: Synthetic oligonucleotide
ggaguacggucucaugcac

SEQ ID NO: 96085 - RNA, 19 nt, Artificial Sequence
  Description of Artificial Sequence: Synthetic oligonucleotide
acagaccguauggaagacu

SEQ ID NO: 96086 - RNA, 19 nt, Artificial Sequence
  Description of Artificial Sequence: Synthetic oligonucleotide
cagcgagccuccucugggc

SEQ ID NO: 96087 - RNA, 19 nt, Artificial Sequence
  Description of Artificial Sequence: Synthetic oligonucleotide
guguguguguguugccaca

SEQ ID NO: 96088 - RNA, 19 nt, Artificial Sequence
  Description of Artificial Sequence: Synthetic oligonucleotide
caguuaaucggaagcuugu

SEQ ID NO: 96089 - RNA, 19 nt, Artificial Sequence
  Description of Artificial Sequence: Synthetic oligonucleotide
uuagaccgaaaggcuuuuc

SEQ ID NO: 96090 - RNA, 19 nt, Artificial Sequence
  Description of Artificial Sequence: Synthetic oligonucleotide
ccuacuuauuuucuaaagu

SEQ ID NO: 96091 - RNA, 19 nt, Artificial Sequence
  Description of Artificial Sequence: Synthetic oligonucleotide
gcuuucagucauuuggcua

SEQ ID NO: 96092 - RNA, 19 nt, Artificial Sequence
  Description of Artificial Sequence: Synthetic oligonucleotide
ucucggucacgggcguccg

SEQ ID NO: 96093 - RNA, 19 nt, Artificial Sequence
  Description of Artificial Sequence: Synthetic oligonucleotide
ggauagcaugguaugugac

SEQ ID NO: 96094 - RNA, 19 nt, Artificial Sequence
  Description of Artificial Sequence: Synthetic oligonucleotide
ccguauggaagacuccuuc

SEQ ID NO: 96095 - RNA, 19 nt, Artificial Sequence
  Description of Artificial Sequence: Synthetic oligonucleotide
agagaaccucaugucccgu

SEQ ID NO: 96096 - RNA, 19 nt, Artificial Sequence
  Description of Artificial Sequence: Synthetic oligonucleotide
uggggcguccccgaccccu

SEQ ID NO: 96097 - RNA, 19 nt, Artificial Sequence
  Description of Artificial Sequence: Synthetic oligonucleotide
gggauugaucaaauauaca

SEQ ID NO: 96098 - RNA, 19 nt, Artificial Sequence
  Description of Artificial Sequence: Synthetic oligonucleotide
aucauacauggggccccgg

SEQ ID NO: 96099 - RNA, 19 nt, Artificial Sequence
  Description of Artificial Sequence: Synthetic oligonucleotide
caugguagggagccaaaau

SEQ ID NO: 96100 - RNA, 19 nt, Artificial Sequence
  Description of Artificial Sequence: Synthetic oligonucleotide
cacagaccguauggaagac

SEQ ID NO: 96101 - RNA, 19 nt, Artificial Sequence
  Description of Artificial Sequence: Synthetic oligonucleotide
ugcugcgaccaugggcuga

SEQ ID NO: 96102 - RNA, 19 nt, Artificial Sequence
  Description of Artificial Sequence: Synthetic oligonucleotide
gauugccccucuugucuua

SEQ ID NO: 96103 - RNA, 19 nt, Artificial Sequence
  Description of Artificial Sequence: Synthetic oligonucleotide
cagggagugucuaauucau

SEQ ID NO: 96104 - RNA, 19 nt, Artificial Sequence
  Description of Artificial Sequence: Synthetic oligonucleotide
ggacccuuuucaccugaac

SEQ ID NO: 96105 - RNA, 19 nt, Artificial Sequence
  Description of Artificial Sequence: Synthetic oligonucleotide
gucagcuaacucucucggu

SEQ ID NO: 96106 - RNA, 19 nt, Artificial Sequence
  Description of Artificial Sequence: Synthetic oligonucleotide
auugccccucuugucuuau

SEQ ID NO: 96107 - RNA, 19 nt, Artificial Sequence
  Description of Artificial Sequence: Synthetic oligonucleotide
cucggucacgggcguccgg

SEQ ID NO: 96108 - RNA, 19 nt, Artificial Sequence
  Description of Artificial Sequence: Synthetic oligonucleotide
caugucccguagggguggg

SEQ ID NO: 96109 - RNA, 19 nt, Artificial Sequence
  Description of Artificial Sequence: Synthetic oligonucleotide
uucugccagggcguuugau

SEQ ID NO: 96110 - RNA, 19 nt, Artificial Sequence
  Description of Artificial Sequence: Synthetic oligonucleotide
cccgaccccugccaguucc

SEQ ID NO: 96111 - RNA, 19 nt, Artificial Sequence
  Description of Artificial Sequence: Synthetic oligonucleotide
cuuuucaccugaacaccuu

SEQ ID NO: 96112 - RNA, 19 nt, Artificial Sequence
  Description of Artificial Sequence: Synthetic oligonucleotide
ggcgaugcuuggaaaggca

SEQ ID NO: 96113 - RNA, 19 nt, Artificial Sequence
  Description of Artificial Sequence: Synthetic oligonucleotide
gcgaccaugggcugagucu

SEQ ID NO: 96114 - RNA, 19 nt, Artificial Sequence
  Description of Artificial Sequence: Synthetic oligonucleotide
cccguuucuuaggaauggc

SEQ ID NO: 96115 - RNA, 19 nt, Artificial Sequence
  Description of Artificial Sequence: Synthetic oligonucleotide
gggugauuugggcuucuua

SEQ ID NO: 96116 - RNA, 19 nt, Artificial Sequence
  Description of Artificial Sequence: Synthetic oligonucleotide
cgaccuacuuauuuucuaa

SEQ ID NO: 96117 - RNA, 19 nt, Artificial Sequence
  Description of Artificial Sequence: Synthetic oligonucleotide
gcauguacccuguuugguu

SEQ ID NO: 96118 - RNA, 19 nt, Artificial Sequence
  Description of Artificial Sequence: Synthetic oligonucleotide
gggaagcacaacauggauu

SEQ ID NO: 96119 - RNA, 19 nt, Artificial Sequence
  Description of Artificial Sequence: Synthetic oligonucleotide
ccaauagagagaaccucau

SEQ ID NO: 96120 - RNA, 19 nt, Artificial Sequence
  Description of Artificial Sequence: Synthetic oligonucleotide
gggguugucucuucagauu

SEQ ID NO: 96121 - RNA, 19 nt, Artificial Sequence
  Description of Artificial Sequence: Synthetic oligonucleotide
ggagccaaaauagcagauu

SEQ ID NO: 96122 - RNA, 19 nt, Artificial Sequence
  Description of Artificial Sequence: Synthetic oligonucleotide
ggcauguacccuguuuggu

SEQ ID NO: 96123 - RNA, 19 nt, Artificial Sequence
  Description of Artificial Sequence: Synthetic oligonucleotide
guacggucucaugcacaga

SEQ ID NO: 96124 - RNA, 19 nt, Artificial Sequence
  Description of Artificial Sequence: Synthetic oligonucleotide
cucucccaguuaccgugaa

SEQ ID NO: 96125 - RNA, 19 nt, Artificial Sequence
  Description of Artificial Sequence: Synthetic oligonucleotide
gggguguuuugaaacguau

SEQ ID NO: 96126 - RNA, 19 nt, Artificial Sequence
  Description of Artificial Sequence: Synthetic oligonucleotide
ccuggggauugaucaaaua

SEQ ID NO: 96127 - RNA, 19 nt, Artificial Sequence
  Description of Artificial Sequence: Synthetic oligonucleotide
ggucucaugcacagaccgu

SEQ ID NO: 96128 - RNA, 19 nt, Artificial Sequence
  Description of Artificial Sequence: Synthetic oligonucleotide
gcgaugcuuggaaaggcau

SEQ ID NO: 96129 - RNA, 19 nt, Artificial Sequence
  Description of Artificial Sequence: Synthetic oligonucleotide
cccuuauaugagccuggaa

SEQ ID NO: 96130 - RNA, 19 nt, Artificial Sequence
  Description of Artificial Sequence: Synthetic oligonucleotide
cguguccaaccuucaggca

SEQ ID NO: 96131 - RNA, 19 nt, Artificial Sequence
  Description of Artificial Sequence: Synthetic oligonucleotide
ccccuuauaugagccugga

SEQ ID NO: 96132 - RNA, 19 nt, Artificial Sequence
  Description of Artificial Sequence: Synthetic oligonucleotide
gggcguccggcuguccaca

SEQ ID NO: 96133 - RNA, 19 nt, Artificial Sequence
  Description of Artificial Sequence: Synthetic oligonucleotide
ccguagggguggggucuag

SEQ ID NO: 96134 - RNA, 19 nt, Artificial Sequence
  Description of Artificial Sequence: Synthetic oligonucleotide
ccccgaccccugccaguuc

SEQ ID NO: 96135 - RNA, 19 nt, Artificial Sequence
  Description of Artificial Sequence: Synthetic oligonucleotide
ccccuaccaucauuuuauu

SEQ ID NO: 96136 - RNA, 19 nt, Artificial Sequence
  Description of Artificial Sequence: Synthetic oligonucleotide
cccucgguguuuguacuuu

SEQ ID NO: 96137 - RNA, 19 nt, Artificial Sequence
  Description of Artificial Sequence: Synthetic oligonucleotide
ccaauacagguagccuguu

SEQ ID NO: 96138 - RNA, 19 nt, Artificial Sequence
  Description of Artificial Sequence: Synthetic oligonucleotide
ccccucgguguuuguacuu

SEQ ID NO: 96139 - RNA, 19 nt, Artificial Sequence
  Description of Artificial Sequence: Synthetic oligonucleotide
cugcgaccaugggcugagu

SEQ ID NO: 96140 - RNA, 19 nt, Artificial Sequence
  Description of Artificial Sequence: Synthetic oligonucleotide
cccuacccauaaggaggaa

SEQ ID NO: 96141 - RNA, 19 nt, Artificial Sequence
  Description of Artificial Sequence: Synthetic oligonucleotide
cccguagggguggggucua

SEQ ID NO: 96142 - RNA, 19 nt, Artificial Sequence
  Description of Artificial Sequence: Synthetic oligonucleotide
aauacaagguaccacaugg

SEQ ID NO: 96143 - RNA, 19 nt, Artificial Sequence
  Description of Artificial Sequence: Synthetic oligonucleotide
aauacgauuaagcaugcuc

SEQ ID NO: 96144 - RNA, 19 nt, Artificial Sequence
  Description of Artificial Sequence: Synthetic oligonucleotide
auucaugcgauucucacgc

SEQ ID NO: 96145 - RNA, 19 nt, Artificial Sequence
  Description of Artificial Sequence: Synthetic oligonucleotide
agggguaucaagcaggucc

SEQ ID NO: 96146 - RNA, 19 nt, Artificial Sequence
  Description of Artificial Sequence: Synthetic oligonucleotide
ugacacguaaagaaaaugg

SEQ ID NO: 96147 - RNA, 19 nt, Artificial Sequence
  Description of Artificial Sequence: Synthetic oligonucleotide
aauagaaagagcaggacag

SEQ ID NO: 96148 - RNA, 19 nt, Artificial Sequence
  Description of Artificial Sequence: Synthetic oligonucleotide
aagaguggugcucaaaggg

SEQ ID NO: 96149 - RNA, 19 nt, Artificial Sequence
  Description of Artificial Sequence: Synthetic oligonucleotide
ucagguugcaaguagaaca

SEQ ID NO: 96150 - RNA, 19 nt, Artificial Sequence
  Description of Artificial Sequence: Synthetic oligonucleotide
cagaauacgauuaagcaug

SEQ ID NO: 96151 - RNA, 19 nt, Artificial Sequence
  Description of Artificial Sequence: Synthetic oligonucleotide
caugcuuacaaguggaugg

SEQ ID NO: 96152 - RNA, 19 nt, Artificial Sequence
  Description of Artificial Sequence: Synthetic oligonucleotide
uccuguauagccaaguccc

SEQ ID NO: 96153 - RNA, 19 nt, Artificial Sequence
  Description of Artificial Sequence: Synthetic oligonucleotide
gugaaagaugaauacaagg

SEQ ID NO: 96154 - RNA, 19 nt, Artificial Sequence
  Description of Artificial Sequence: Synthetic oligonucleotide
accucaguacaauauauac

SEQ ID NO: 96155 - RNA, 19 nt, Artificial Sequence
  Description of Artificial Sequence: Synthetic oligonucleotide
ugaacgaaagucaaguagu

SEQ ID NO: 96156 - RNA, 19 nt, Artificial Sequence
  Description of Artificial Sequence: Synthetic oligonucleotide
gaaacguagcaccaaagag

SEQ ID NO: 96157 - RNA, 19 nt, Artificial Sequence
  Description of Artificial Sequence: Synthetic oligonucleotide
ugaugauagggguagaaca

SEQ ID NO: 96158 - RNA, 19 nt, Artificial Sequence
  Description of Artificial Sequence: Synthetic oligonucleotide
aaagaguggugcucaaagg

SEQ ID NO: 96159 - RNA, 19 nt, Artificial Sequence
  Description of Artificial Sequence: Synthetic oligonucleotide
caucucucagacaagaccc

SEQ ID NO: 96160 - RNA, 19 nt, Artificial Sequence
  Description of Artificial Sequence: Synthetic oligonucleotide
aucauguugacaccauggc

SEQ ID NO: 96161 - RNA, 19 nt, Artificial Sequence
  Description of Artificial Sequence: Synthetic oligonucleotide
ucacgcugcucuaagauag

SEQ ID NO: 96162 - RNA, 19 nt, Artificial Sequence
  Description of Artificial Sequence: Synthetic oligonucleotide
auccuguauagccaagucc

SEQ ID NO: 96163 - RNA, 19 nt, Artificial Sequence
  Description of Artificial Sequence: Synthetic oligonucleotide
augaauacaagguaccaca

SEQ ID NO: 96164 - RNA, 19 nt, Artificial Sequence
  Description of Artificial Sequence: Synthetic oligonucleotide
cucaguggaauccacaacc

SEQ ID NO: 96165 - RNA, 19 nt, Artificial Sequence
  Description of Artificial Sequence: Synthetic oligonucleotide
aucauuucgaguccugagg

SEQ ID NO: 96166 - RNA, 19 nt, Artificial Sequence
  Description of Artificial Sequence: Synthetic oligonucleotide
ugugaaagaugaauacaag

SEQ ID NO: 96167 - RNA, 19 nt, Artificial Sequence
  Description of Artificial Sequence: Synthetic oligonucleotide
uuaagcaugcucuccaaca

SEQ ID NO: 96168 - RNA, 19 nt, Artificial Sequence
  Description of Artificial Sequence: Synthetic oligonucleotide
gauaguagauacugucagg

SEQ ID NO: 96169 - RNA, 19 nt, Artificial Sequence
  Description of Artificial Sequence: Synthetic oligonucleotide
gacacguaaagaaaauggg

SEQ ID NO: 96170 - RNA, 19 nt, Artificial Sequence
  Description of Artificial Sequence: Synthetic oligonucleotide
uuuggagaagcaagaauca

SEQ ID NO: 96171 - RNA, 19 nt, Artificial Sequence
  Description of Artificial Sequence: Synthetic oligonucleotide
acacguaaagaaaaugggc

SEQ ID NO: 96172 - RNA, 19 nt, Artificial Sequence
  Description of Artificial Sequence: Synthetic oligonucleotide
aacgcguucgcuucucuuc

SEQ ID NO: 96173 - RNA, 19 nt, Artificial Sequence
  Description of Artificial Sequence: Synthetic oligonucleotide
agguauaggucacgaaacc

SEQ ID NO: 96174 - RNA, 19 nt, Artificial Sequence
  Description of Artificial Sequence: Synthetic oligonucleotide
uucaauauggggagacucc

SEQ ID NO: 96175 - RNA, 19 nt, Artificial Sequence
  Description of Artificial Sequence: Synthetic oligonucleotide
ucuugaacgaaagucaagu

SEQ ID NO: 96176 - RNA, 19 nt, Artificial Sequence
  Description of Artificial Sequence: Synthetic oligonucleotide
aaacguagcaccaaagagu

SEQ ID NO: 96177 - RNA, 19 nt, Artificial Sequence
  Description of Artificial Sequence: Synthetic oligonucleotide
ggacuaaucauguugacac

SEQ ID NO: 96178 - RNA, 19 nt, Artificial Sequence
  Description of Artificial Sequence: Synthetic oligonucleotide
cuaggucagaccuaggaac

SEQ ID NO: 96179 - RNA, 19 nt, Artificial Sequence
  Description of Artificial Sequence: Synthetic oligonucleotide
cauucgguuauuuuccagc

SEQ ID NO: 96180 - RNA, 19 nt, Artificial Sequence
  Description of Artificial Sequence: Synthetic oligonucleotide
aacuaaagggaggaggcag

SEQ ID NO: 96181 - RNA, 19 nt, Artificial Sequence
  Description of Artificial Sequence: Synthetic oligonucleotide
gacauuuugagagauagaa

SEQ ID NO: 96182 - RNA, 19 nt, Artificial Sequence
  Description of Artificial Sequence: Synthetic oligonucleotide
uuuugagagauagaacuca

SEQ ID NO: 96183 - RNA, 19 nt, Artificial Sequence
  Description of Artificial Sequence: Synthetic oligonucleotide
uucaggagggauaaacgug

SEQ ID NO: 96184 - RNA, 19 nt, Artificial Sequence
  Description of Artificial Sequence: Synthetic oligonucleotide
uagguauaggucacgaaac

SEQ ID NO: 96185 - RNA, 19 nt, Artificial Sequence
  Description of Artificial Sequence: Synthetic oligonucleotide
aggaauaugcacaauagga

SEQ ID NO: 96186 - RNA, 19 nt, Artificial Sequence
  Description of Artificial Sequence: Synthetic oligonucleotide
cacuacaacacaaggguag

SEQ ID NO: 96187 - RNA, 19 nt, Artificial Sequence
  Description of Artificial Sequence: Synthetic oligonucleotide
auuaagcaugcucuccaac

SEQ ID NO: 96188 - RNA, 19 nt, Artificial Sequence
  Description of Artificial Sequence: Synthetic oligonucleotide
aaacuggugacaguuauaa

SEQ ID NO: 96189 - RNA, 19 nt, Artificial Sequence
  Description of Artificial Sequence: Synthetic oligonucleotide
uacaagguaccacauggga

SEQ ID NO: 96190 - RNA, 19 nt, Artificial Sequence
  Description of Artificial Sequence: Synthetic oligonucleotide
guagguaagggacauggug

SEQ ID NO: 96191 - RNA, 19 nt, Artificial Sequence
  Description of Artificial Sequence: Synthetic oligonucleotide
gagccaaagguucuaguag

SEQ ID NO: 96192 - RNA, 19 nt, Artificial Sequence
  Description of Artificial Sequence: Synthetic oligonucleotide
agaaacguagcaccaaaga

SEQ ID NO: 96193 - RNA, 19 nt, Artificial Sequence
  Description of Artificial Sequence: Synthetic oligonucleotide
uucaccuacauagguauag

SEQ ID NO: 96194 - RNA, 19 nt, Artificial Sequence
  Description of Artificial Sequence: Synthetic oligonucleotide
ucgguuauuuuccagcaaa

SEQ ID NO: 96195 - RNA, 19 nt, Artificial Sequence
  Description of Artificial Sequence: Synthetic oligonucleotide
aucggcaggauccccagac

SEQ ID NO: 96196 - RNA, 19 nt, Artificial Sequence
  Description of Artificial Sequence: Synthetic oligonucleotide
aaguaguaaagguccguga

SEQ ID NO: 96197 - RNA, 19 nt, Artificial Sequence
  Description of Artificial Sequence: Synthetic oligonucleotide
cuaagauaguuucaucuuc

SEQ ID NO: 96198 - RNA, 19 nt, Artificial Sequence
  Description of Artificial Sequence: Synthetic oligonucleotide
auaaacgugucugagcucu

SEQ ID NO: 96199 - RNA, 19 nt, Artificial Sequence
  Description of Artificial Sequence: Synthetic oligonucleotide
caagguaccacaugggauc

SEQ ID NO: 96200 - RNA, 19 nt, Artificial Sequence
  Description of Artificial Sequence: Synthetic oligonucleotide
uucuaguagccccucaggu

SEQ ID NO: 96201 - RNA, 19 nt, Artificial Sequence
  Description of Artificial Sequence: Synthetic oligonucleotide
aacuugacggggcagcgga

SEQ ID NO: 96202 - RNA, 19 nt, Artificial Sequence
  Description of Artificial Sequence: Synthetic oligonucleotide
ggucacgaaacccaaagcc

SEQ ID NO: 96203 - RNA, 19 nt, Artificial Sequence
  Description of Artificial Sequence: Synthetic oligonucleotide
caccauucgguuauuuucc

SEQ ID NO: 96204 - RNA, 19 nt, Artificial Sequence
  Description of Artificial Sequence: Synthetic oligonucleotide
ucuaccauggcaucagaau

SEQ ID NO: 96205 - RNA, 19 nt, Artificial Sequence
  Description of Artificial Sequence: Synthetic oligonucleotide
uuggucugagaauuguuga

SEQ ID NO: 96206 - RNA, 19 nt, Artificial Sequence
  Description of Artificial Sequence: Synthetic oligonucleotide
gacuccgcaaugcaggagc

SEQ ID NO: 96207 - RNA, 19 nt, Artificial Sequence
  Description of Artificial Sequence: Synthetic oligonucleotide
aguucuugaacgaaaguca

SEQ ID NO: 96208 - RNA, 19 nt, Artificial Sequence
  Description of Artificial Sequence: Synthetic oligonucleotide
aaaugggcuaccugcuuca

SEQ ID NO: 96209 - RNA, 19 nt, Artificial Sequence
  Description of Artificial Sequence: Synthetic oligonucleotide
auacgauuaagcaugcucu

SEQ ID NO: 96210 - RNA, 19 nt, Artificial Sequence
  Description of Artificial Sequence: Synthetic oligonucleotide
agaauccggagccaaaggu

SEQ ID NO: 96211 - RNA, 19 nt, Artificial Sequence
  Description of Artificial Sequence: Synthetic oligonucleotide
agaagguuaguugugacaa

SEQ ID NO: 96212 - RNA, 19 nt, Artificial Sequence
  Description of Artificial Sequence: Synthetic oligonucleotide
cacgaaauuuucugggccc

SEQ ID NO: 96213 - RNA, 19 nt, Artificial Sequence
  Description of Artificial Sequence: Synthetic oligonucleotide
ucugagaauuguugauucc

SEQ ID NO: 96214 - RNA, 19 nt, Artificial Sequence
  Description of Artificial Sequence: Synthetic oligonucleotide
auugggaccccaugcuuac

SEQ ID NO: 96215 - RNA, 19 nt, Artificial Sequence
  Description of Artificial Sequence: Synthetic oligonucleotide
augagagaauagaaagagc

SEQ ID NO: 96216 - RNA, 19 nt, Artificial Sequence
  Description of Artificial Sequence: Synthetic oligonucleotide
ugagaaacguagcaccaaa

SEQ ID NO: 96217 - RNA, 19 nt, Artificial Sequence
  Description of Artificial Sequence: Synthetic oligonucleotide
caacaaucacuuauuucag

SEQ ID NO: 96218 - RNA, 19 nt, Artificial Sequence
  Description of Artificial Sequence: Synthetic oligonucleotide
acgauuaagcaugcucucc

SEQ ID NO: 96219 - RNA, 19 nt, Artificial Sequence
  Description of Artificial Sequence: Synthetic oligonucleotide
accuacauagguauagguc

SEQ ID NO: 96220 - RNA, 19 nt, Artificial Sequence
  Description of Artificial Sequence: Synthetic oligonucleotide
uaguaaagguccgugaaaa

SEQ ID NO: 96221 - RNA, 19 nt, Artificial Sequence
  Description of Artificial Sequence: Synthetic oligonucleotide
agucgaugcaccacgcugc

SEQ ID NO: 96222 - RNA, 19 nt, Artificial Sequence
  Description of Artificial Sequence: Synthetic oligonucleotide
gagaauccggagccaaagg

SEQ ID NO: 96223 - RNA, 19 nt, Artificial Sequence
  Description of Artificial Sequence: Synthetic oligonucleotide
agaaaguagugagacaaga

SEQ ID NO: 96224 - RNA, 19 nt, Artificial Sequence
  Description of Artificial Sequence: Synthetic oligonucleotide
uacccauagcuccuaaccu

SEQ ID NO: 96225 - RNA, 19 nt, Artificial Sequence
  Description of Artificial Sequence: Synthetic oligonucleotide
auaguagcggaugcucacc

SEQ ID NO: 96226 - RNA, 19 nt, Artificial Sequence
  Description of Artificial Sequence: Synthetic oligonucleotide
caucauuucgaguccugag

SEQ ID NO: 96227 - RNA, 19 nt, Artificial Sequence
  Description of Artificial Sequence: Synthetic oligonucleotide
gacaccaaugugaaagaug

SEQ ID NO: 96228 - RNA, 19 nt, Artificial Sequence
  Description of Artificial Sequence: Synthetic oligonucleotide
agaauacgauuaagcaugc

SEQ ID NO: 96229 - RNA, 19 nt, Artificial Sequence
  Description of Artificial Sequence: Synthetic oligonucleotide
cagguugcaaguagaacac

SEQ ID NO: 96230 - RNA, 19 nt, Artificial Sequence
  Description of Artificial Sequence: Synthetic oligonucleotide
augauagggguagaacaac

SEQ ID NO: 96231 - RNA, 19 nt, Artificial Sequence
  Description of Artificial Sequence: Synthetic oligonucleotide
ugaguucuugaacgaaagu

SEQ ID NO: 96232 - RNA, 19 nt, Artificial Sequence
  Description of Artificial Sequence: Synthetic oligonucleotide
uaaaccaaggggacaggaa

SEQ ID NO: 96233 - RNA, 19 nt, Artificial Sequence
  Description of Artificial Sequence: Synthetic oligonucleotide
ucgcccuuuccucugucgg

SEQ ID NO: 96234 - RNA, 19 nt, Artificial Sequence
  Description of Artificial Sequence: Synthetic oligonucleotide
ggaugugcagaacucuugg

SEQ ID NO: 96235 - RNA, 19 nt, Artificial Sequence
  Description of Artificial Sequence: Synthetic oligonucleotide
ggauuauuggagaauccgg

SEQ ID NO: 96236 - RNA, 19 nt, Artificial Sequence
  Description of Artificial Sequence: Synthetic oligonucleotide
auggggaacgagaagaugu

SEQ ID NO: 96237 - RNA, 19 nt, Artificial Sequence
  Description of Artificial Sequence: Synthetic oligonucleotide
cuaguagccccucagguga

SEQ ID NO: 96238 - RNA, 19 nt, Artificial Sequence
  Description of Artificial Sequence: Synthetic oligonucleotide
cuacauagguauaggucac

SEQ ID NO: 96239 - RNA, 19 nt, Artificial Sequence
  Description of Artificial Sequence: Synthetic oligonucleotide
uuacaaguggauggaaggu

SEQ ID NO: 96240 - RNA, 19 nt, Artificial Sequence
  Description of Artificial Sequence: Synthetic oligonucleotide
uuaaagucagggguuccug

SEQ ID NO: 96241 - RNA, 19 nt, Artificial Sequence
  Description of Artificial Sequence: Synthetic oligonucleotide
agucuguaucaccacugag

SEQ ID NO: 96242 - RNA, 19 nt, Artificial Sequence
  Description of Artificial Sequence: Synthetic oligonucleotide
cacguaaagaaaaugggcu

SEQ ID NO: 96243 - RNA, 19 nt, Artificial Sequence
  Description of Artificial Sequence: Synthetic oligonucleotide
ccuacauagguauagguca

SEQ ID NO: 96244 - RNA, 19 nt, Artificial Sequence
  Description of Artificial Sequence: Synthetic oligonucleotide
uuguugaguucuugaacga

SEQ ID NO: 96245 - RNA, 19 nt, Artificial Sequence
  Description of Artificial Sequence: Synthetic oligonucleotide
agggguagaacaacauugg

SEQ ID NO: 96246 - RNA, 19 nt, Artificial Sequence
  Description of Artificial Sequence: Synthetic oligonucleotide
cuucaauauggggagacuc

SEQ ID NO: 96247 - RNA, 19 nt, Artificial Sequence
  Description of Artificial Sequence: Synthetic oligonucleotide
gaugauagggguagaacaa

SEQ ID NO: 96248 - RNA, 19 nt, Artificial Sequence
  Description of Artificial Sequence: Synthetic oligonucleotide
uacauagguauaggucacg

SEQ ID NO: 96249 - RNA, 19 nt, Artificial Sequence
  Description of Artificial Sequence: Synthetic oligonucleotide
ugacaugcgaggagagcgc

SEQ ID NO: 96250 - RNA, 19 nt, Artificial Sequence
  Description of Artificial Sequence: Synthetic oligonucleotide
gcugcucuaagauaguuuc

SEQ ID NO: 96251 - RNA, 19 nt, Artificial Sequence
  Description of Artificial Sequence: Synthetic oligonucleotide
gagaaacguagcaccaaag

SEQ ID NO: 96252 - RNA, 19 nt, Artificial Sequence
  Description of Artificial Sequence: Synthetic oligonucleotide
cuucuaacgcguucgcuuc

SEQ ID NO: 96253 - RNA, 19 nt, Artificial Sequence
  Description of Artificial Sequence: Synthetic oligonucleotide
guauaggucacgaaaccca

SEQ ID NO: 96254 - RNA, 19 nt, Artificial Sequence
  Description of Artificial Sequence: Synthetic oligonucleotide
uucccuaggucagaccuag

SEQ ID NO: 96255 - RNA, 19 nt, Artificial Sequence
  Description of Artificial Sequence: Synthetic oligonucleotide
aaaggguagguaagggaca

SEQ ID NO: 96256 - RNA, 19 nt, Artificial Sequence
  Description of Artificial Sequence: Synthetic oligonucleotide
acguaaagaaaaugggcua

SEQ ID NO: 96257 - RNA, 19 nt, Artificial Sequence
  Description of Artificial Sequence: Synthetic oligonucleotide
caaguaguaaagguccgug

SEQ ID NO: 96258 - RNA, 19 nt, Artificial Sequence
  Description of Artificial Sequence: Synthetic oligonucleotide
uacgauuaagcaugcucuc

SEQ ID NO: 96259 - RNA, 19 nt, Artificial Sequence
  Description of Artificial Sequence: Synthetic oligonucleotide
auugcugaccucauguaga

SEQ ID NO: 96260 - RNA, 19 nt, Artificial Sequence
  Description of Artificial Sequence: Synthetic oligonucleotide
agaugaauacaagguacca

SEQ ID NO: 96261 - RNA, 19 nt, Artificial Sequence
  Description of Artificial Sequence: Synthetic oligonucleotide
aacgaaagucaaguaguaa

SEQ ID NO: 96262 - RNA, 19 nt, Artificial Sequence
  Description of Artificial Sequence: Synthetic oligonucleotide
acccuugagaaacguagca

SEQ ID NO: 96263 - RNA, 19 nt, Artificial Sequence
  Description of Artificial Sequence: Synthetic oligonucleotide
gagggacuaaucauguuga

SEQ ID NO: 96264 - RNA, 19 nt, Artificial Sequence
  Description of Artificial Sequence: Synthetic oligonucleotide
ucacuacaacacaagggua

SEQ ID NO: 96265 - RNA, 19 nt, Artificial Sequence
  Description of Artificial Sequence: Synthetic oligonucleotide
auagggguagaacaacauu

SEQ ID NO: 96266 - RNA, 19 nt, Artificial Sequence
  Description of Artificial Sequence: Synthetic oligonucleotide
auaugcacaauaggagucu

SEQ ID NO: 96267 - RNA, 19 nt, Artificial Sequence
  Description of Artificial Sequence: Synthetic oligonucleotide
auacaagguaccacauggg

SEQ ID NO: 96268 - RNA, 19 nt, Artificial Sequence
  Description of Artificial Sequence: Synthetic oligonucleotide
agggauaaacgugucugag

SEQ ID NO: 96269 - RNA, 19 nt, Artificial Sequence
  Description of Artificial Sequence: Synthetic oligonucleotide
agguaagggacaugguggu

SEQ ID NO: 96270 - RNA, 19 nt, Artificial Sequence
  Description of Artificial Sequence: Synthetic oligonucleotide
ggauaaacgugucugagcu

SEQ ID NO: 96271 - RNA, 19 nt, Artificial Sequence
  Description of Artificial Sequence: Synthetic oligonucleotide
gucaaguaguaaagguccg

SEQ ID NO: 96272 - RNA, 19 nt, Artificial Sequence
  Description of Artificial Sequence: Synthetic oligonucleotide
ugugucucgcccuuuccuc

SEQ ID NO: 96273 - RNA, 19 nt, Artificial Sequence
  Description of Artificial Sequence: Synthetic oligonucleotide
gugacacguaaagaaaaug

SEQ ID NO: 96274 - RNA, 19 nt, Artificial Sequence
  Description of Artificial Sequence: Synthetic oligonucleotide
auaaaccaaggggacagga

SEQ ID NO: 96275 - RNA, 19 nt, Artificial Sequence
  Description of Artificial Sequence: Synthetic oligonucleotide
ccagacacgaaauuuucug

SEQ ID NO: 96276 - RNA, 19 nt, Artificial Sequence
  Description of Artificial Sequence: Synthetic oligonucleotide
gucagaccuaggaacacag

SEQ ID NO: 96277 - RNA, 19 nt, Artificial Sequence
  Description of Artificial Sequence: Synthetic oligonucleotide
agcggaggggauucaugcg

SEQ ID NO: 96278 - RNA, 19 nt, Artificial Sequence
  Description of Artificial Sequence: Synthetic oligonucleotide
agaggggugacuccgcaau

SEQ ID NO: 96279 - RNA, 19 nt, Artificial Sequence
  Description of Artificial Sequence: Synthetic oligonucleotide
gugaaagagagcugcaugu

SEQ ID NO: 96280 - RNA, 19 nt, Artificial Sequence
  Description of Artificial Sequence: Synthetic oligonucleotide
gaccuaggaacacagggcu

SEQ ID NO: 96281 - RNA, 19 nt, Artificial Sequence
  Description of Artificial Sequence: Synthetic oligonucleotide
gguauaggucacgaaaccc

SEQ ID NO: 96282 - RNA, 19 nt, Artificial Sequence
  Description of Artificial Sequence: Synthetic oligonucleotide
cucaggaccaugguccacc

SEQ ID NO: 96283 - RNA, 19 nt, Artificial Sequence
  Description of Artificial Sequence: Synthetic oligonucleotide
uguugaguucuugaacgaa

SEQ ID NO: 96284 - RNA, 19 nt, Artificial Sequence
  Description of Artificial Sequence: Synthetic oligonucleotide
aguaaagguccgugaaaau

SEQ ID NO: 96285 - RNA, 19 nt, Artificial Sequence
  Description of Artificial Sequence: Synthetic oligonucleotide
aagguaaaauggggaacga

SEQ ID NO: 96286 - RNA, 19 nt, Artificial Sequence
  Description of Artificial Sequence: Synthetic oligonucleotide
uccgcaaugcaggagcgcu

SEQ ID NO: 96287 - RNA, 19 nt, Artificial Sequence
  Description of Artificial Sequence: Synthetic oligonucleotide
gauaaacgugucugagcuc

SEQ ID NO: 96288 - RNA, 19 nt, Artificial Sequence
  Description of Artificial Sequence: Synthetic oligonucleotide
caugcgaggagagcgccgg

SEQ ID NO: 96289 - RNA, 19 nt, Artificial Sequence
  Description of Artificial Sequence: Synthetic oligonucleotide
aaauggggaacgagaagau

SEQ ID NO: 96290 - RNA, 19 nt, Artificial Sequence
  Description of Artificial Sequence: Synthetic oligonucleotide
uugcugaccucauguagaa

SEQ ID NO: 96291 - RNA, 19 nt, Artificial Sequence
  Description of Artificial Sequence: Synthetic oligonucleotide
gggauaaacgugucugagc

SEQ ID NO: 96292 - RNA, 19 nt, Artificial Sequence
  Description of Artificial Sequence: Synthetic oligonucleotide
aggggauucaugcgauucu

SEQ ID NO: 96293 - RNA, 19 nt, Artificial Sequence
  Description of Artificial Sequence: Synthetic oligonucleotide
uugaaccacaaaccccauc

SEQ ID NO: 96294 - RNA, 19 nt, Artificial Sequence
  Description of Artificial Sequence: Synthetic oligonucleotide
aacuggugacaguuauaaa

SEQ ID NO: 96295 - RNA, 19 nt, Artificial Sequence
  Description of Artificial Sequence: Synthetic oligonucleotide
acaguauuguuggggagga

SEQ ID NO: 96296 - RNA, 19 nt, Artificial Sequence
  Description of Artificial Sequence: Synthetic oligonucleotide
cuugcgagacugccguacc

SEQ ID NO: 96297 - RNA, 19 nt, Artificial Sequence
  Description of Artificial Sequence: Synthetic oligonucleotide
guaggagcaggauccuuac

SEQ ID NO: 96298 - RNA, 19 nt, Artificial Sequence
  Description of Artificial Sequence: Synthetic oligonucleotide
gaggggauucaugcgauuc

SEQ ID NO: 96299 - RNA, 19 nt, Artificial Sequence
  Description of Artificial Sequence: Synthetic oligonucleotide
agacggaugugcagaacuc

SEQ ID NO: 96300 - RNA, 19 nt, Artificial Sequence
  Description of Artificial Sequence: Synthetic oligonucleotide
ggagcgcucagguugcaag

SEQ ID NO: 96301 - RNA, 19 nt, Artificial Sequence
  Description of Artificial Sequence: Synthetic oligonucleotide
aguggcuaaacuggugaca

SEQ ID NO: 96302 - RNA, 19 nt, Artificial Sequence
  Description of Artificial Sequence: Synthetic oligonucleotide
gaggagugguacacuugcg

SEQ ID NO: 96303 - RNA, 19 nt, Artificial Sequence
  Description of Artificial Sequence: Synthetic oligonucleotide
gcuuacaaguggauggaag

SEQ ID NO: 96304 - RNA, 19 nt, Artificial Sequence
  Description of Artificial Sequence: Synthetic oligonucleotide
auuucgaguccugaggcuu

SEQ ID NO: 96305 - RNA, 19 nt, Artificial Sequence
  Description of Artificial Sequence: Synthetic oligonucleotide
uucuaacgcguucgcuucu

SEQ ID NO: 96306 - RNA, 19 nt, Artificial Sequence
  Description of Artificial Sequence: Synthetic oligonucleotide
cacacgggagaauacagua

SEQ ID NO: 96307 - RNA, 19 nt, Artificial Sequence
  Description of Artificial Sequence: Synthetic oligonucleotide
uugcgagacugccguacca

SEQ ID NO: 96308 - RNA, 19 nt, Artificial Sequence
  Description of Artificial Sequence: Synthetic oligonucleotide
gguaucaagcagguccagg

SEQ ID NO: 96309 - RNA, 19 nt, Artificial Sequence
  Description of Artificial Sequence: Synthetic oligonucleotide
cucagguugcaaguagaac

SEQ ID NO: 96310 - RNA, 19 nt, Artificial Sequence
  Description of Artificial Sequence: Synthetic oligonucleotide
cucgcccuuuccucugucg

SEQ ID NO: 96311 - RNA, 19 nt, Artificial Sequence
  Description of Artificial Sequence: Synthetic oligonucleotide
aagggguaucaagcagguc

SEQ ID NO: 96312 - RNA, 19 nt, Artificial Sequence
  Description of Artificial Sequence: Synthetic oligonucleotide
ccuaaccugucuuuugaac

SEQ ID NO: 96313 - RNA, 19 nt, Artificial Sequence
  Description of Artificial Sequence: Synthetic oligonucleotide
uggagaauccggagccaaa

SEQ ID NO: 96314 - RNA, 19 nt, Artificial Sequence
  Description of Artificial Sequence: Synthetic oligonucleotide
gugagacaagaugaagaac

SEQ ID NO: 96315 - RNA, 19 nt, Artificial Sequence
  Description of Artificial Sequence: Synthetic oligonucleotide
ugcgagacugccguaccac

SEQ ID NO: 96316 - RNA, 19 nt, Artificial Sequence
  Description of Artificial Sequence: Synthetic oligonucleotide
agacagaagguuaguugug

SEQ ID NO: 96317 - RNA, 19 nt, Artificial Sequence
  Description of Artificial Sequence: Synthetic oligonucleotide
cuccuaaccugucuuuuga

SEQ ID NO: 96318 - RNA, 19 nt, Artificial Sequence
  Description of Artificial Sequence: Synthetic oligonucleotide
acgcguucgcuucucuucu

SEQ ID NO: 96319 - RNA, 19 nt, Artificial Sequence
  Description of Artificial Sequence: Synthetic oligonucleotide
gcucaaaggguagguaagg

SEQ ID NO: 96320 - RNA, 19 nt, Artificial Sequence
  Description of Artificial Sequence: Synthetic oligonucleotide
cucggaauuuggagaagca

SEQ ID NO: 96321 - RNA, 19 nt, Artificial Sequence
  Description of Artificial Sequence: Synthetic oligonucleotide
gaacgaaagucaaguagua

SEQ ID NO: 96322 - RNA, 19 nt, Artificial Sequence
  Description of Artificial Sequence: Synthetic oligonucleotide
augcuuacaaguggaugga

SEQ ID NO: 96323 - RNA, 19 nt, Artificial Sequence
  Description of Artificial Sequence: Synthetic oligonucleotide
acagacggaugugcagaac

SEQ ID NO: 96324 - RNA, 19 nt, Artificial Sequence
  Description of Artificial Sequence: Synthetic oligonucleotide
caccacgcugccauugcug

SEQ ID NO: 96325 - RNA, 19 nt, Artificial Sequence
  Description of Artificial Sequence: Synthetic oligonucleotide
ucggcaggauccccagacu

SEQ ID NO: 96326 - RNA, 19 nt, Artificial Sequence
  Description of Artificial Sequence: Synthetic oligonucleotide
uuggacgcugcugcugggc

SEQ ID NO: 96327 - RNA, 19 nt, Artificial Sequence
  Description of Artificial Sequence: Synthetic oligonucleotide
acuccgcaaugcaggagcg

SEQ ID NO: 96328 - RNA, 19 nt, Artificial Sequence
  Description of Artificial Sequence: Synthetic oligonucleotide
aagugggacuagccccaga

SEQ ID NO: 96329 - RNA, 19 nt, Artificial Sequence
  Description of Artificial Sequence: Synthetic oligonucleotide
ucuaacgcguucgcuucuc

SEQ ID NO: 96330 - RNA, 19 nt, Artificial Sequence
  Description of Artificial Sequence: Synthetic oligonucleotide
uaacgcguucgcuucucuu

SEQ ID NO: 96331 - RNA, 19 nt, Artificial Sequence
  Description of Artificial Sequence: Synthetic oligonucleotide
ggauccuuacccauagcuc

SEQ ID NO: 96332 - RNA, 19 nt, Artificial Sequence
  Description of Artificial Sequence: Synthetic oligonucleotide
gacugccguaccacauuag

SEQ ID NO: 96333 - RNA, 19 nt, Artificial Sequence
  Description of Artificial Sequence: Synthetic oligonucleotide
gugacuccgcaaugcagga

SEQ ID NO: 96334 - RNA, 19 nt, Artificial Sequence
  Description of Artificial Sequence: Synthetic oligonucleotide
gccccuugcgcugauaggc

SEQ ID NO: 96335 - RNA, 19 nt, Artificial Sequence
  Description of Artificial Sequence: Synthetic oligonucleotide
cagucuguaucaccacuga

SEQ ID NO: 96336 - RNA, 19 nt, Artificial Sequence
  Description of Artificial Sequence: Synthetic oligonucleotide
acaugcgaggagagcgccg

SEQ ID NO: 96337 - RNA, 19 nt, Artificial Sequence
  Description of Artificial Sequence: Synthetic oligonucleotide
caccucaguacaauauaua

SEQ ID NO: 96338 - RNA, 19 nt, Artificial Sequence
  Description of Artificial Sequence: Synthetic oligonucleotide
gaagggguaucaagcaggu

SEQ ID NO: 96339 - RNA, 19 nt, Artificial Sequence
  Description of Artificial Sequence: Synthetic oligonucleotide
ccaaagguucuaguagccc

SEQ ID NO: 96340 - RNA, 19 nt, Artificial Sequence
  Description of Artificial Sequence: Synthetic oligonucleotide
auacuugagcgcagugaca

SEQ ID NO: 96341 - RNA, 19 nt, Artificial Sequence
  Description of Artificial Sequence: Synthetic oligonucleotide
aggcaccucaguacaauau

SEQ ID NO: 96342 - RNA, 19 nt, Artificial Sequence
  Description of Artificial Sequence: Synthetic oligonucleotide
gccaaagguucuaguagcc

SEQ ID NO: 96343 - RNA, 19 nt, Artificial Sequence
  Description of Artificial Sequence: Synthetic oligonucleotide
gaauccggagccaaagguu

SEQ ID NO: 96344 - RNA, 19 nt, Artificial Sequence
  Description of Artificial Sequence: Synthetic oligonucleotide
aguugguuuucagucccuu

SEQ ID NO: 96345 - RNA, 19 nt, Artificial Sequence
  Description of Artificial Sequence: Synthetic oligonucleotide
augcgaggagagcgccggg

SEQ ID NO: 96346 - RNA, 19 nt, Artificial Sequence
  Description of Artificial Sequence: Synthetic oligonucleotide
ccagaauacgauuaagcau

SEQ ID NO: 96347 - RNA, 19 nt, Artificial Sequence
  Description of Artificial Sequence: Synthetic oligonucleotide
gcggaggggauucaugcga

SEQ ID NO: 96348 - RNA, 19 nt, Artificial Sequence
  Description of Artificial Sequence: Synthetic oligonucleotide
cacgggagaauacaguauu

SEQ ID NO: 96349 - RNA, 19 nt, Artificial Sequence
  Description of Artificial Sequence: Synthetic oligonucleotide
ugcugaccucauguagaac

SEQ ID NO: 96350 - RNA, 19 nt, Artificial Sequence
  Description of Artificial Sequence: Synthetic oligonucleotide
agcuccuaaccugucuuuu

SEQ ID NO: 96351 - RNA, 19 nt, Artificial Sequence
  Description of Artificial Sequence: Synthetic oligonucleotide
acguagcaccaaagagugg

SEQ ID NO: 96352 - RNA, 19 nt, Artificial Sequence
  Description of Artificial Sequence: Synthetic oligonucleotide
cccuugagaaacguagcac

SEQ ID NO: 96353 - RNA, 19 nt, Artificial Sequence
  Description of Artificial Sequence: Synthetic oligonucleotide
gcaucggcaggauccccag

SEQ ID NO: 96354 - RNA, 19 nt, Artificial Sequence
  Description of Artificial Sequence: Synthetic oligonucleotide
uugcacucccagagguguu

SEQ ID NO: 96355 - RNA, 19 nt, Artificial Sequence
  Description of Artificial Sequence: Synthetic oligonucleotide
caggacuacuccagggucu

SEQ ID NO: 96356 - RNA, 19 nt, Artificial Sequence
  Description of Artificial Sequence: Synthetic oligonucleotide
cauuucgaguccugaggcu

SEQ ID NO: 96357 - RNA, 19 nt, Artificial Sequence
  Description of Artificial Sequence: Synthetic oligonucleotide
acggaugugcagaacucuu

SEQ ID NO: 96358 - RNA, 19 nt, Artificial Sequence
  Description of Artificial Sequence: Synthetic oligonucleotide
gggguaucaagcaggucca

SEQ ID NO: 96359 - RNA, 19 nt, Artificial Sequence
  Description of Artificial Sequence: Synthetic oligonucleotide
ggggauucaugcgauucuc

SEQ ID NO: 96360 - RNA, 19 nt, Artificial Sequence
  Description of Artificial Sequence: Synthetic oligonucleotide
cgauuaagcaugcucucca

SEQ ID NO: 96361 - RNA, 19 nt, Artificial Sequence
  Description of Artificial Sequence: Synthetic oligonucleotide
gagcgccggggccggaaug

SEQ ID NO: 96362 - RNA, 19 nt, Artificial Sequence
  Description of Artificial Sequence: Synthetic oligonucleotide
gguaagggacaugguggug

SEQ ID NO: 96363 - RNA, 19 nt, Artificial Sequence
  Description of Artificial Sequence: Synthetic oligonucleotide
acuugacggggcagcggag

SEQ ID NO: 96364 - RNA, 19 nt, Artificial Sequence
  Description of Artificial Sequence: Synthetic oligonucleotide
gaauacgauuaagcaugcu

SEQ ID NO: 96365 - RNA, 19 nt, Artificial Sequence
  Description of Artificial Sequence: Synthetic oligonucleotide
cuucaccuacauagguaua

SEQ ID NO: 96366 - RNA, 19 nt, Artificial Sequence
  Description of Artificial Sequence: Synthetic oligonucleotide
uggcaucggcaggaucccc

SEQ ID NO: 96367 - RNA, 19 nt, Artificial Sequence
  Description of Artificial Sequence: Synthetic oligonucleotide
ggacauuuugagagauaga

SEQ ID NO: 96368 - RNA, 19 nt, Artificial Sequence
  Description of Artificial Sequence: Synthetic oligonucleotide
cacuuauuucaggagggau

SEQ ID NO: 96369 - RNA, 19 nt, Artificial Sequence
  Description of Artificial Sequence: Synthetic oligonucleotide
ccgaggagugguacacuug

SEQ ID NO: 96370 - RNA, 19 nt, Artificial Sequence
  Description of Artificial Sequence: Synthetic oligonucleotide
cucucagacaagacccuuu

SEQ ID NO: 96371 - RNA, 19 nt, Artificial Sequence
  Description of Artificial Sequence: Synthetic oligonucleotide
gcgagacugccguaccaca

SEQ ID NO: 96372 - RNA, 19 nt, Artificial Sequence
  Description of Artificial Sequence: Synthetic oligonucleotide
gggauagagaccccagguu

SEQ ID NO: 96373 - RNA, 19 nt, Artificial Sequence
  Description of Artificial Sequence: Synthetic oligonucleotide
ggguaucaagcagguccag

SEQ ID NO: 96374 - RNA, 19 nt, Artificial Sequence
  Description of Artificial Sequence: Synthetic oligonucleotide
ggaacccuugagaaacgua

SEQ ID NO: 96375 - RNA, 19 nt, Artificial Sequence
  Description of Artificial Sequence: Synthetic oligonucleotide
gggaggggcuuuauaaagu

SEQ ID NO: 96376 - RNA, 19 nt, Artificial Sequence
  Description of Artificial Sequence: Synthetic oligonucleotide
cucugaugauagggguaga

SEQ ID NO: 96377 - RNA, 19 nt, Artificial Sequence
  Description of Artificial Sequence: Synthetic oligonucleotide
cuaacgcguucgcuucucu

SEQ ID NO: 96378 - RNA, 19 nt, Artificial Sequence
  Description of Artificial Sequence: Synthetic oligonucleotide
gccgcccuuggguaugcuc

SEQ ID NO: 96379 - RNA, 19 nt, Artificial Sequence
  Description of Artificial Sequence: Synthetic oligonucleotide
cgugaaaauguucaccauu

SEQ ID NO: 96380 - RNA, 19 nt, Artificial Sequence
  Description of Artificial Sequence: Synthetic oligonucleotide
ccggagccaaagguucuag

SEQ ID NO: 96381 - RNA, 19 nt, Artificial Sequence
  Description of Artificial Sequence: Synthetic oligonucleotide
cacgcugcucuaagauagu

SEQ ID NO: 96382 - RNA, 19 nt, Artificial Sequence
  Description of Artificial Sequence: Synthetic oligonucleotide
gccagacacgaaauuuucu

SEQ ID NO: 96383 - RNA, 19 nt, Artificial Sequence
  Description of Artificial Sequence: Synthetic oligonucleotide
guucaccauucgguuauuu

SEQ ID NO: 96384 - RNA, 19 nt, Artificial Sequence
  Description of Artificial Sequence: Synthetic oligonucleotide
cccuuguuggcucggaauu

SEQ ID NO: 96385 - RNA, 19 nt, Artificial Sequence
  Description of Artificial Sequence: Synthetic oligonucleotide
ccauccuguauagccaagu

SEQ ID NO: 96386 - RNA, 19 nt, Artificial Sequence
  Description of Artificial Sequence: Synthetic oligonucleotide
cgggagaauacaguauugu

SEQ ID NO: 96387 - RNA, 19 nt, Artificial Sequence
  Description of Artificial Sequence: Synthetic oligonucleotide
ccucuucaauauggggaga

SEQ ID NO: 96388 - RNA, 19 nt, Artificial Sequence
  Description of Artificial Sequence: Synthetic oligonucleotide
ggaggggauucaugcgauu

SEQ ID NO: 96389 - RNA, 19 nt, Artificial Sequence
  Description of Artificial Sequence: Synthetic oligonucleotide
ccgugaaaauguucaccau

SEQ ID NO: 96390 - RNA, 19 nt, Artificial Sequence
  Description of Artificial Sequence: Synthetic oligonucleotide
cccgaggagugguacacuu

SEQ ID NO: 96391 - RNA, 19 nt, Artificial Sequence
  Description of Artificial Sequence: Synthetic oligonucleotide
ggacaggaauaugcacaau

SEQ ID NO: 96392 - RNA, 19 nt, Artificial Sequence
  Description of Artificial Sequence: Synthetic oligonucleotide
cgagacugccguaccacau

SEQ ID NO: 96393 - RNA, 19 nt, Artificial Sequence
  Description of Artificial Sequence: Synthetic oligonucleotide
cgauucucacgcugcucua

SEQ ID NO: 96394 - RNA, 19 nt, Artificial Sequence
  Description of Artificial Sequence: Synthetic oligonucleotide
ccuuguuggcucggaauuu

SEQ ID NO: 96395 - RNA, 19 nt, Artificial Sequence
  Description of Artificial Sequence: Synthetic oligonucleotide
ccaacaugcuucgguccau

SEQ ID NO: 96396 - RNA, 19 nt, Artificial Sequence
  Description of Artificial Sequence: Synthetic oligonucleotide
uuaagaaacacacacacac

SEQ ID NO: 96397 - RNA, 19 nt, Artificial Sequence
  Description of Artificial Sequence: Synthetic oligonucleotide
aacuaguugaauugcaagc

SEQ ID NO: 96398 - RNA, 19 nt, Artificial Sequence
  Description of Artificial Sequence: Synthetic oligonucleotide
aacgauaaagcuuuaaaug

SEQ ID NO: 96399 - RNA, 19 nt, Artificial Sequence
  Description of Artificial Sequence: Synthetic oligonucleotide
aagaaacacacacacacac

SEQ ID NO: 96400 - RNA, 19 nt, Artificial Sequence
  Description of Artificial Sequence: Synthetic oligonucleotide
auguaauuaagucaccacc

SEQ ID NO: 96401 - RNA, 19 nt, Artificial Sequence
  Description of Artificial Sequence: Synthetic oligonucleotide
ucuccuagaaucaauaacc

SEQ ID NO: 96402 - RNA, 19 nt, Artificial Sequence
  Description of Artificial Sequence: Synthetic oligonucleotide
agcguuaacagccaagucc

SEQ ID NO: 96403 - RNA, 19 nt, Artificial Sequence
  Description of Artificial Sequence: Synthetic oligonucleotide
uuaaauugcacaacgauaa

SEQ ID NO: 96404 - RNA, 19 nt, Artificial Sequence
  Description of Artificial Sequence: Synthetic oligonucleotide
agaaauagcaacaagguag

SEQ ID NO: 96405 - RNA, 19 nt, Artificial Sequence
  Description of Artificial Sequence: Synthetic oligonucleotide
accuaaaagcauuucaacc

SEQ ID NO: 96406 - RNA, 19 nt, Artificial Sequence
  Description of Artificial Sequence: Synthetic oligonucleotide
auaaucuuuggguaugacc

SEQ ID NO: 96407 - RNA, 19 nt, Artificial Sequence
  Description of Artificial Sequence: Synthetic oligonucleotide
accaauuuaaguuagggga

SEQ ID NO: 96408 - RNA, 19 nt, Artificial Sequence
  Description of Artificial Sequence: Synthetic oligonucleotide
agauagauguaauuaaguc

SEQ ID NO: 96409 - RNA, 19 nt, Artificial Sequence
  Description of Artificial Sequence: Synthetic oligonucleotide
aaccaauuuaaguuagggg

SEQ ID NO: 96410 - RNA, 19 nt, Artificial Sequence
  Description of Artificial Sequence: Synthetic oligonucleotide
aaccuaaaagcauuucaac

SEQ ID NO: 96411 - RNA, 19 nt, Artificial Sequence
  Description of Artificial Sequence: Synthetic oligonucleotide
ugaccuaccauugagacag

SEQ ID NO: 96412 - RNA, 19 nt, Artificial Sequence
  Description of Artificial Sequence: Synthetic oligonucleotide
acuucaaagggccacgcgc

SEQ ID NO: 96413 - RNA, 19 nt, Artificial Sequence
  Description of Artificial Sequence: Synthetic oligonucleotide
ugugaaaacagcacguucu

SEQ ID NO: 96414 - RNA, 19 nt, Artificial Sequence
  Description of Artificial Sequence: Synthetic oligonucleotide
agaaucaauaaccgagggc

SEQ ID NO: 96415 - RNA, 19 nt, Artificial Sequence
  Description of Artificial Sequence: Synthetic oligonucleotide
agagagaagcguuaacagc

SEQ ID NO: 96416 - RNA, 19 nt, Artificial Sequence
  Description of Artificial Sequence: Synthetic oligonucleotide
ucccaaguuaguaacaacc

SEQ ID NO: 96417 - RNA, 19 nt, Artificial Sequence
  Description of Artificial Sequence: Synthetic oligonucleotide
gaaacacacacacacacac

SEQ ID NO: 96418 - RNA, 19 nt, Artificial Sequence
  Description of Artificial Sequence: Synthetic oligonucleotide
acgauaaagcuuuaaaugu

SEQ ID NO: 96419 - RNA, 19 nt, Artificial Sequence
  Description of Artificial Sequence: Synthetic oligonucleotide
gaaauaaucagaaggcccc

SEQ ID NO: 96420 - RNA, 19 nt, Artificial Sequence
  Description of Artificial Sequence: Synthetic oligonucleotide
cuccguguaaacuucagcg

SEQ ID NO: 96421 - RNA, 19 nt, Artificial Sequence
  Description of Artificial Sequence: Synthetic oligonucleotide
ugaagauaguuagaaauag

SEQ ID NO: 96422 - RNA, 19 nt, Artificial Sequence
  Description of Artificial Sequence: Synthetic oligonucleotide
auuacgguaauucacuggu

SEQ ID NO: 96423 - RNA, 19 nt, Artificial Sequence
  Description of Artificial Sequence: Synthetic oligonucleotide
aucuccuagaaucaauaac

SEQ ID NO: 96424 - RNA, 19 nt, Artificial Sequence
  Description of Artificial Sequence: Synthetic oligonucleotide
accgaaauaaucagaaggc

SEQ ID NO: 96425 - RNA, 19 nt, Artificial Sequence
  Description of Artificial Sequence: Synthetic oligonucleotide
cuagaaucaauaaccgagg

SEQ ID NO: 96426 - RNA, 19 nt, Artificial Sequence
  Description of Artificial Sequence: Synthetic oligonucleotide
uguaacaaaagaacagcgu

SEQ ID NO: 96427 - RNA, 19 nt, Artificial Sequence
  Description of Artificial Sequence: Synthetic oligonucleotide
aacacacacacacacacaa

SEQ ID NO: 96428 - RNA, 19 nt, Artificial Sequence
  Description of Artificial Sequence: Synthetic oligonucleotide
gacgccaugguuuucugcg

SEQ ID NO: 96429 - RNA, 19 nt, Artificial Sequence
  Description of Artificial Sequence: Synthetic oligonucleotide
acaaaagggaguaaccagc

SEQ ID NO: 96430 - RNA, 19 nt, Artificial Sequence
  Description of Artificial Sequence: Synthetic oligonucleotide
ugcacaacgauaaagcuuu

SEQ ID NO: 96431 - RNA, 19 nt, Artificial Sequence
  Description of Artificial Sequence: Synthetic oligonucleotide
gagagaagcguuaacagcc

SEQ ID NO: 96432 - RNA, 19 nt, Artificial Sequence
  Description of Artificial Sequence: Synthetic oligonucleotide
aauucaagguuagacagga

SEQ ID NO: 96433 - RNA, 19 nt, Artificial Sequence
  Description of Artificial Sequence: Synthetic oligonucleotide
uuaacaaagagugcagacc

SEQ ID NO: 96434 - RNA, 19 nt, Artificial Sequence
  Description of Artificial Sequence: Synthetic oligonucleotide
uuaaacuaguugaauugca

SEQ ID NO: 96435 - RNA, 19 nt, Artificial Sequence
  Description of Artificial Sequence: Synthetic oligonucleotide
uacgguaauucacuggugc

SEQ ID NO: 96436 - RNA, 19 nt, Artificial Sequence
  Description of Artificial Sequence: Synthetic oligonucleotide
aauaacugucucuccagca

SEQ ID NO: 96437 - RNA, 19 nt, Artificial Sequence
  Description of Artificial Sequence: Synthetic oligonucleotide
aauuuaaguuaggggaaac

SEQ ID NO: 96438 - RNA, 19 nt, Artificial Sequence
  Description of Artificial Sequence: Synthetic oligonucleotide
aggacgauucaucagcagg

SEQ ID NO: 96439 - RNA, 19 nt, Artificial Sequence
  Description of Artificial Sequence: Synthetic oligonucleotide
uagacagccacaccgaaac

SEQ ID NO: 96440 - RNA, 19 nt, Artificial Sequence
  Description of Artificial Sequence: Synthetic oligonucleotide
ugguaguacugccagacgc

SEQ ID NO: 96441 - RNA, 19 nt, Artificial Sequence
  Description of Artificial Sequence: Synthetic oligonucleotide
acuaguauccaggaaacag

SEQ ID NO: 96442 - RNA, 19 nt, Artificial Sequence
  Description of Artificial Sequence: Synthetic oligonucleotide
aaccugugagcugagauag

SEQ ID NO: 96443 - RNA, 19 nt, Artificial Sequence
  Description of Artificial Sequence: Synthetic oligonucleotide
aucucagacggacagugac

SEQ ID NO: 96444 - RNA, 19 nt, Artificial Sequence
  Description of Artificial Sequence: Synthetic oligonucleotide
gucuaaauaugucacuugc

SEQ ID NO: 96445 - RNA, 19 nt, Artificial Sequence
  Description of Artificial Sequence: Synthetic oligonucleotide
agcaugccuaguuaggaac

SEQ ID NO: 96446 - RNA, 19 nt, Artificial Sequence
  Description of Artificial Sequence: Synthetic oligonucleotide
uuagacuuaucuugagaag

SEQ ID NO: 96447 - RNA, 19 nt, Artificial Sequence
  Description of Artificial Sequence: Synthetic oligonucleotide
agaaggcugaacuaguugu

SEQ ID NO: 96448 - RNA, 19 nt, Artificial Sequence
  Description of Artificial Sequence: Synthetic oligonucleotide
aauaaacuguugguuauca

SEQ ID NO: 96449 - RNA, 19 nt, Artificial Sequence
  Description of Artificial Sequence: Synthetic oligonucleotide
acaaccuaaaagcauuuca

SEQ ID NO: 96450 - RNA, 19 nt, Artificial Sequence
  Description of Artificial Sequence: Synthetic oligonucleotide
gauguaauuaagucaccac

SEQ ID NO: 96451 - RNA, 19 nt, Artificial Sequence
  Description of Artificial Sequence: Synthetic oligonucleotide
ucugcaugagugaagcgug

SEQ ID NO: 96452 - RNA, 19 nt, Artificial Sequence
  Description of Artificial Sequence: Synthetic oligonucleotide
uugaagauaguuagaaaua

SEQ ID NO: 96453 - RNA, 19 nt, Artificial Sequence
  Description of Artificial Sequence: Synthetic oligonucleotide
guacauaaaccacagcaug

SEQ ID NO: 96454 - RNA, 19 nt, Artificial Sequence
  Description of Artificial Sequence: Synthetic oligonucleotide
uauccauucuucuaauccu

SEQ ID NO: 96455 - RNA, 19 nt, Artificial Sequence
  Description of Artificial Sequence: Synthetic oligonucleotide
ucuggcaauuagcaaaaca

SEQ ID NO: 96456 - RNA, 19 nt, Artificial Sequence
  Description of Artificial Sequence: Synthetic oligonucleotide
uggacgagcauucagucaa

SEQ ID NO: 96457 - RNA, 19 nt, Artificial Sequence
  Description of Artificial Sequence: Synthetic oligonucleotide
acgagcauucagucaaugc

SEQ ID NO: 96458 - RNA, 19 nt, Artificial Sequence
  Description of Artificial Sequence: Synthetic oligonucleotide
uggcaauuagcaaaacaug

SEQ ID NO: 96459 - RNA, 19 nt, Artificial Sequence
  Description of Artificial Sequence: Synthetic oligonucleotide
ucuaauccuuaaaaguuaa

SEQ ID NO: 96460 - RNA, 19 nt, Artificial Sequence
  Description of Artificial Sequence: Synthetic oligonucleotide
uaaacuaguugaauugcaa

SEQ ID NO: 96461 - RNA, 19 nt, Artificial Sequence
  Description of Artificial Sequence: Synthetic oligonucleotide
caagcuagcauuaugugga

SEQ ID NO: 96462 - RNA, 19 nt, Artificial Sequence
  Description of Artificial Sequence: Synthetic oligonucleotide
ugugaccuaccauugagac

SEQ ID NO: 96463 - RNA, 19 nt, Artificial Sequence
  Description of Artificial Sequence: Synthetic oligonucleotide
uacaucauuacgguaauuc

SEQ ID NO: 96464 - RNA, 19 nt, Artificial Sequence
  Description of Artificial Sequence: Synthetic oligonucleotide
auuauuaaucagaaccauc

SEQ ID NO: 96465 - RNA, 19 nt, Artificial Sequence
  Description of Artificial Sequence: Synthetic oligonucleotide
cacacacacacacaaacag

SEQ ID NO: 96466 - RNA, 19 nt, Artificial Sequence
  Description of Artificial Sequence: Synthetic oligonucleotide
ucuauucuccgcaaaucca

SEQ ID NO: 96467 - RNA, 19 nt, Artificial Sequence
  Description of Artificial Sequence: Synthetic oligonucleotide
uaguauaaagagacaagaa

SEQ ID NO: 96468 - RNA, 19 nt, Artificial Sequence
  Description of Artificial Sequence: Synthetic oligonucleotide
uagacuuaucuugagaagu

SEQ ID NO: 96469 - RNA, 19 nt, Artificial Sequence
  Description of Artificial Sequence: Synthetic oligonucleotide
cauugagacagucuguaac

SEQ ID NO: 96470 - RNA, 19 nt, Artificial Sequence
  Description of Artificial Sequence: Synthetic oligonucleotide
guauacaacaacaaaggga

SEQ ID NO: 96471 - RNA, 19 nt, Artificial Sequence
  Description of Artificial Sequence: Synthetic oligonucleotide
uaagaaacacacacacaca

SEQ ID NO: 96472 - RNA, 19 nt, Artificial Sequence
  Description of Artificial Sequence: Synthetic oligonucleotide
aaaucugucauaaccaauu

SEQ ID NO: 96473 - RNA, 19 nt, Artificial Sequence
  Description of Artificial Sequence: Synthetic oligonucleotide
cuccuagaaucaauaaccg

SEQ ID NO: 96474 - RNA, 19 nt, Artificial Sequence
  Description of Artificial Sequence: Synthetic oligonucleotide
ucuuauaaucuuuggguau

SEQ ID NO: 96475 - RNA, 19 nt, Artificial Sequence
  Description of Artificial Sequence: Synthetic oligonucleotide
aaccugacauuguacauaa

SEQ ID NO: 96476 - RNA, 19 nt, Artificial Sequence
  Description of Artificial Sequence: Synthetic oligonucleotide
auaacuucugacuaauauu

SEQ ID NO: 96477 - RNA, 19 nt, Artificial Sequence
  Description of Artificial Sequence: Synthetic oligonucleotide
auuuagacuuaucuugaga

SEQ ID NO: 96478 - RNA, 19 nt, Artificial Sequence
  Description of Artificial Sequence: Synthetic oligonucleotide
guagaucugauucauccac

SEQ ID NO: 96479 - RNA, 19 nt, Artificial Sequence
  Description of Artificial Sequence: Synthetic oligonucleotide
acaacgauaaagcuuuaaa

SEQ ID NO: 96480 - RNA, 19 nt, Artificial Sequence
  Description of Artificial Sequence: Synthetic oligonucleotide
ugucuucgcuuuaacagug

SEQ ID NO: 96481 - RNA, 19 nt, Artificial Sequence
  Description of Artificial Sequence: Synthetic oligonucleotide
aguauucccgaaggaaugc

SEQ ID NO: 96482 - RNA, 19 nt, Artificial Sequence
  Description of Artificial Sequence: Synthetic oligonucleotide
cauuacgguaauucacugg

SEQ ID NO: 96483 - RNA, 19 nt, Artificial Sequence
  Description of Artificial Sequence: Synthetic oligonucleotide
uuucgcuugaggauaucug

SEQ ID NO: 96484 - RNA, 19 nt, Artificial Sequence
  Description of Artificial Sequence: Synthetic oligonucleotide
cacacacacacacacaaac

SEQ ID NO: 96485 - RNA, 19 nt, Artificial Sequence
  Description of Artificial Sequence: Synthetic oligonucleotide
ucuuguggcauucuacauc

SEQ ID NO: 96486 - RNA, 19 nt, Artificial Sequence
  Description of Artificial Sequence: Synthetic oligonucleotide
uauuuguggacgagcauuc

SEQ ID NO: 96487 - RNA, 19 nt, Artificial Sequence
  Description of Artificial Sequence: Synthetic oligonucleotide
acaucauuacgguaauuca

SEQ ID NO: 96488 - RNA, 19 nt, Artificial Sequence
  Description of Artificial Sequence: Synthetic oligonucleotide
gauagcaccacggcgucgg

SEQ ID NO: 96489 - RNA, 19 nt, Artificial Sequence
  Description of Artificial Sequence: Synthetic oligonucleotide
acuugcgucauauggaaau

SEQ ID NO: 96490 - RNA, 19 nt, Artificial Sequence
  Description of Artificial Sequence: Synthetic oligonucleotide
aacaaccuaaaagcauuuc

SEQ ID NO: 96491 - RNA, 19 nt, Artificial Sequence
  Description of Artificial Sequence: Synthetic oligonucleotide
ugccuaguuaggaacugag

SEQ ID NO: 96492 - RNA, 19 nt, Artificial Sequence
  Description of Artificial Sequence: Synthetic oligonucleotide
auuucguccucccuggagu

SEQ ID NO: 96493 - RNA, 19 nt, Artificial Sequence
  Description of Artificial Sequence: Synthetic oligonucleotide
gucacuuagaaaccccugc

SEQ ID NO: 96494 - RNA, 19 nt, Artificial Sequence
  Description of Artificial Sequence: Synthetic oligonucleotide
aagcguuaacagccaaguc

SEQ ID NO: 96495 - RNA, 19 nt, Artificial Sequence
  Description of Artificial Sequence: Synthetic oligonucleotide
uugucuucgcuuuaacagu

SEQ ID NO: 96496 - RNA, 19 nt, Artificial Sequence
  Description of Artificial Sequence: Synthetic oligonucleotide
uuaggaacugagaaacuuu

SEQ ID NO: 96497 - RNA, 19 nt, Artificial Sequence
  Description of Artificial Sequence: Synthetic oligonucleotide
aagguagcuuucuacccca

SEQ ID NO: 96498 - RNA, 19 nt, Artificial Sequence
  Description of Artificial Sequence: Synthetic oligonucleotide
uuguggacgagcauucagu

SEQ ID NO: 96499 - RNA, 19 nt, Artificial Sequence
  Description of Artificial Sequence: Synthetic oligonucleotide
ucuucgcuuuaacaguggc

SEQ ID NO: 96500 - RNA, 19 nt, Artificial Sequence
  Description of Artificial Sequence: Synthetic oligonucleotide
ucauuacgguaauucacug

SEQ ID NO: 96501 - RNA, 19 nt, Artificial Sequence
  Description of Artificial Sequence: Synthetic oligonucleotide
ucgguagcugucccggucg

SEQ ID NO: 96502 - RNA, 19 nt, Artificial Sequence
  Description of Artificial Sequence: Synthetic oligonucleotide
uucacauuugucuucgcuu

SEQ ID NO: 96503 - RNA, 19 nt, Artificial Sequence
  Description of Artificial Sequence: Synthetic oligonucleotide
cuuauaaucuuuggguaug

SEQ ID NO: 96504 - RNA, 19 nt, Artificial Sequence
  Description of Artificial Sequence: Synthetic oligonucleotide
aaaccugugagcugagaua

SEQ ID NO: 96505 - RNA, 19 nt, Artificial Sequence
  Description of Artificial Sequence: Synthetic oligonucleotide
aacaaaagaacagcguaua

SEQ ID NO: 96506 - RNA, 19 nt, Artificial Sequence
  Description of Artificial Sequence: Synthetic oligonucleotide
caagguagcuuucuacccc

SEQ ID NO: 96507 - RNA, 19 nt, Artificial Sequence
  Description of Artificial Sequence: Synthetic oligonucleotide
ugagaagucuaagaguaaa

SEQ ID NO: 96508 - RNA, 19 nt, Artificial Sequence
  Description of Artificial Sequence: Synthetic oligonucleotide
ugcgucauauggaaaugga

SEQ ID NO: 96509 - RNA, 19 nt, Artificial Sequence
  Description of Artificial Sequence: Synthetic oligonucleotide
cuaguuguaucugucuggc

SEQ ID NO: 96510 - RNA, 19 nt, Artificial Sequence
  Description of Artificial Sequence: Synthetic oligonucleotide
cauuauguggagcucucug

SEQ ID NO: 96511 - RNA, 19 nt, Artificial Sequence
  Description of Artificial Sequence: Synthetic oligonucleotide
uauauuagauuagcacaca

SEQ ID NO: 96512 - RNA, 19 nt, Artificial Sequence
  Description of Artificial Sequence: Synthetic oligonucleotide
uccuagaaucaauaaccga

SEQ ID NO: 96513 - RNA, 19 nt, Artificial Sequence
  Description of Artificial Sequence: Synthetic oligonucleotide
ucaaacuaguauccaggaa

SEQ ID NO: 96514 - RNA, 19 nt, Artificial Sequence
  Description of Artificial Sequence: Synthetic oligonucleotide
agauguaauuaagucacca

SEQ ID NO: 96515 - RNA, 19 nt, Artificial Sequence
  Description of Artificial Sequence: Synthetic oligonucleotide
cagagaaauucaagguuag

SEQ ID NO: 96516 - RNA, 19 nt, Artificial Sequence
  Description of Artificial Sequence: Synthetic oligonucleotide
aucauuacgguaauucacu

SEQ ID NO: 96517 - RNA, 19 nt, Artificial Sequence
  Description of Artificial Sequence: Synthetic oligonucleotide
ugugagacgcucccacuug

SEQ ID NO: 96518 - RNA, 19 nt, Artificial Sequence
  Description of Artificial Sequence: Synthetic oligonucleotide
cuaaauaugucacuugcgu

SEQ ID NO: 96519 - RNA, 19 nt, Artificial Sequence
  Description of Artificial Sequence: Synthetic oligonucleotide
agaucucagacggacagug

SEQ ID NO: 96520 - RNA, 19 nt, Artificial Sequence
  Description of Artificial Sequence: Synthetic oligonucleotide
acaguaugccaaccauaac

SEQ ID NO: 96521 - RNA, 19 nt, Artificial Sequence
  Description of Artificial Sequence: Synthetic oligonucleotide
gcguauauuagauuagcac

SEQ ID NO: 96522 - RNA, 19 nt, Artificial Sequence
  Description of Artificial Sequence: Synthetic oligonucleotide
uucugaccgacgcugcagc

SEQ ID NO: 96523 - RNA, 19 nt, Artificial Sequence
  Description of Artificial Sequence: Synthetic oligonucleotide
gcuuuaaucuaauaacauc

SEQ ID NO: 96524 - RNA, 19 nt, Artificial Sequence
  Description of Artificial Sequence: Synthetic oligonucleotide
aaauaaucagaaggcccca

SEQ ID NO: 96525 - RNA, 19 nt, Artificial Sequence
  Description of Artificial Sequence: Synthetic oligonucleotide
auuaagucaccacccagua

SEQ ID NO: 96526 - RNA, 19 nt, Artificial Sequence
  Description of Artificial Sequence: Synthetic oligonucleotide
ucgaaguauucccgaagga

SEQ ID NO: 96527 - RNA, 19 nt, Artificial Sequence
  Description of Artificial Sequence: Synthetic oligonucleotide
aggcugaacuaguuguauc

SEQ ID NO: 96528 - RNA, 19 nt, Artificial Sequence
  Description of Artificial Sequence: Synthetic oligonucleotide
uguggacgagcauucaguc

SEQ ID NO: 96529 - RNA, 19 nt, Artificial Sequence
  Description of Artificial Sequence: Synthetic oligonucleotide
cacacacacacaaacagaa

SEQ ID NO: 96530 - RNA, 19 nt, Artificial Sequence
  Description of Artificial Sequence: Synthetic oligonucleotide
uuauuacaucauuacggua

SEQ ID NO: 96531 - RNA, 19 nt, Artificial Sequence
  Description of Artificial Sequence: Synthetic oligonucleotide
uucaaaccggggucggucc

SEQ ID NO: 96532 - RNA, 19 nt, Artificial Sequence
  Description of Artificial Sequence: Synthetic oligonucleotide
uucagcgcugauagcacca

SEQ ID NO: 96533 - RNA, 19 nt, Artificial Sequence
  Description of Artificial Sequence: Synthetic oligonucleotide
aguuaguaacaaccuaaaa

SEQ ID NO: 96534 - RNA, 19 nt, Artificial Sequence
  Description of Artificial Sequence: Synthetic oligonucleotide
caaccuaaaagcauuucaa

SEQ ID NO: 96535 - RNA, 19 nt, Artificial Sequence
  Description of Artificial Sequence: Synthetic oligonucleotide
uuauucugugaccuaccau

SEQ ID NO: 96536 - RNA, 19 nt, Artificial Sequence
  Description of Artificial Sequence: Synthetic oligonucleotide
agggcaauuucaccgaaau

SEQ ID NO: 96537 - RNA, 19 nt, Artificial Sequence
  Description of Artificial Sequence: Synthetic oligonucleotide
uacuuggcgcugcggauag

SEQ ID NO: 96538 - RNA, 19 nt, Artificial Sequence
  Description of Artificial Sequence: Synthetic oligonucleotide
cugcggauagggaaagagc

SEQ ID NO: 96539 - RNA, 19 nt, Artificial Sequence
  Description of Artificial Sequence: Synthetic oligonucleotide
uuacgguaauucacuggug

SEQ ID NO: 96540 - RNA, 19 nt, Artificial Sequence
  Description of Artificial Sequence: Synthetic oligonucleotide
uuauaaucuuuggguauga

SEQ ID NO: 96541 - RNA, 19 nt, Artificial Sequence
  Description of Artificial Sequence: Synthetic oligonucleotide
ugaccgacgcugcagcaca

SEQ ID NO: 96542 - RNA, 19 nt, Artificial Sequence
  Description of Artificial Sequence: Synthetic oligonucleotide
ggacgauucaucagcaggg

SEQ ID NO: 96543 - RNA, 19 nt, Artificial Sequence
  Description of Artificial Sequence: Synthetic oligonucleotide
cuucguuuucugaccgacg

SEQ ID NO: 96544 - RNA, 19 nt, Artificial Sequence
  Description of Artificial Sequence: Synthetic oligonucleotide
agguugaacacuagcacug

SEQ ID NO: 96545 - RNA, 19 nt, Artificial Sequence
  Description of Artificial Sequence: Synthetic oligonucleotide
uggguaugaccuuucuaac

SEQ ID NO: 96546 - RNA, 19 nt, Artificial Sequence
  Description of Artificial Sequence: Synthetic oligonucleotide
gcaacugucccuuuggcca

SEQ ID NO: 96547 - RNA, 19 nt, Artificial Sequence
  Description of Artificial Sequence: Synthetic oligonucleotide
cuucugacuaauauuuaaa

SEQ ID NO: 96548 - RNA, 19 nt, Artificial Sequence
  Description of Artificial Sequence: Synthetic oligonucleotide
cguauauuagauuagcaca

SEQ ID NO: 96549 - RNA, 19 nt, Artificial Sequence
  Description of Artificial Sequence: Synthetic oligonucleotide
gauguuucgcuugaggaua

SEQ ID NO: 96550 - RNA, 19 nt, Artificial Sequence
  Description of Artificial Sequence: Synthetic oligonucleotide
agcgcugauagcaccacgg

SEQ ID NO: 96551 - RNA, 19 nt, Artificial Sequence
  Description of Artificial Sequence: Synthetic oligonucleotide
aaucuuuggguaugaccuu

SEQ ID NO: 96552 - RNA, 19 nt, Artificial Sequence
  Description of Artificial Sequence: Synthetic oligonucleotide
ugcagaccucaaauucucc

SEQ ID NO: 96553 - RNA, 19 nt, Artificial Sequence
  Description of Artificial Sequence: Synthetic oligonucleotide
acgguaauucacuggugca

SEQ ID NO: 96554 - RNA, 19 nt, Artificial Sequence
  Description of Artificial Sequence: Synthetic oligonucleotide
uagaucucacauucccgga

SEQ ID NO: 96555 - RNA, 19 nt, Artificial Sequence
  Description of Artificial Sequence: Synthetic oligonucleotide
cuucagcgcugauagcacc

SEQ ID NO: 96556 - RNA, 19 nt, Artificial Sequence
  Description of Artificial Sequence: Synthetic oligonucleotide
cagcguauauuagauuagc

SEQ ID NO: 96557 - RNA, 19 nt, Artificial Sequence
  Description of Artificial Sequence: Synthetic oligonucleotide
uucccaaguuaguaacaac

SEQ ID NO: 96558 - RNA, 19 nt, Artificial Sequence
  Description of Artificial Sequence: Synthetic oligonucleotide
cuaaggaauucuucauaca

SEQ ID NO: 96559 - RNA, 19 nt, Artificial Sequence
  Description of Artificial Sequence: Synthetic oligonucleotide
acagcguauauuagauuag

SEQ ID NO: 96560 - RNA, 19 nt, Artificial Sequence
  Description of Artificial Sequence: Synthetic oligonucleotide
uccuccguguaaacuucag

SEQ ID NO: 96561 - RNA, 19 nt, Artificial Sequence
  Description of Artificial Sequence: Synthetic oligonucleotide
gaggacgauucaucagcag

SEQ ID NO: 96562 - RNA, 19 nt, Artificial Sequence
  Description of Artificial Sequence: Synthetic oligonucleotide
acuucagcgcugauagcac

SEQ ID NO: 96563 - RNA, 19 nt, Artificial Sequence
  Description of Artificial Sequence: Synthetic oligonucleotide
aaacacacacacacacaca

SEQ ID NO: 96564 - RNA, 19 nt, Artificial Sequence
  Description of Artificial Sequence: Synthetic oligonucleotide
aaaccggggucgguccagc

SEQ ID NO: 96565 - RNA, 19 nt, Artificial Sequence
  Description of Artificial Sequence: Synthetic oligonucleotide
cugugucacuuagaaaccc

SEQ ID NO: 96566 - RNA, 19 nt, Artificial Sequence
  Description of Artificial Sequence: Synthetic oligonucleotide
uucagaccacaaagcuucc

SEQ ID NO: 96567 - RNA, 19 nt, Artificial Sequence
  Description of Artificial Sequence: Synthetic oligonucleotide
gaagcguuaacagccaagu

SEQ ID NO: 96568 - RNA, 19 nt, Artificial Sequence
  Description of Artificial Sequence: Synthetic oligonucleotide
gaaguauucccgaaggaau

SEQ ID NO: 96569 - RNA, 19 nt, Artificial Sequence
  Description of Artificial Sequence: Synthetic oligonucleotide
gguguuccauaaaucaaag

SEQ ID NO: 96570 - RNA, 19 nt, Artificial Sequence
  Description of Artificial Sequence: Synthetic oligonucleotide
cacacuucaaagggccacg

SEQ ID NO: 96571 - RNA, 19 nt, Artificial Sequence
  Description of Artificial Sequence: Synthetic oligonucleotide
cucauugaagauaguuaga

SEQ ID NO: 96572 - RNA, 19 nt, Artificial Sequence
  Description of Artificial Sequence: Synthetic oligonucleotide
ucguuuucugaccgacgcu

SEQ ID NO: 96573 - RNA, 19 nt, Artificial Sequence
  Description of Artificial Sequence: Synthetic oligonucleotide
agccauugucuuauaaucu

SEQ ID NO: 96574 - RNA, 19 nt, Artificial Sequence
  Description of Artificial Sequence: Synthetic oligonucleotide
ggaggggauuauuaaucag

SEQ ID NO: 96575 - RNA, 19 nt, Artificial Sequence
  Description of Artificial Sequence: Synthetic oligonucleotide
ccuaguuaggaacugagaa

SEQ ID NO: 96576 - RNA, 19 nt, Artificial Sequence
  Description of Artificial Sequence: Synthetic oligonucleotide
agcguauauuagauuagca

SEQ ID NO: 96577 - RNA, 19 nt, Artificial Sequence
  Description of Artificial Sequence: Synthetic oligonucleotide
ucaaaccggggucggucca

SEQ ID NO: 96578 - RNA, 19 nt, Artificial Sequence
  Description of Artificial Sequence: Synthetic oligonucleotide
agaaacacacacacacaca

SEQ ID NO: 96579 - RNA, 19 nt, Artificial Sequence
  Description of Artificial Sequence: Synthetic oligonucleotide
auaaaccacagcaugccua

SEQ ID NO: 96580 - RNA, 19 nt, Artificial Sequence
  Description of Artificial Sequence: Synthetic oligonucleotide
agagugcuucccaugagga

SEQ ID NO: 96581 - RNA, 19 nt, Artificial Sequence
  Description of Artificial Sequence: Synthetic oligonucleotide
ccgaggacgauucaucagc

SEQ ID NO: 96582 - RNA, 19 nt, Artificial Sequence
  Description of Artificial Sequence: Synthetic oligonucleotide
gucacuugcgucauaugga

SEQ ID NO: 96583 - RNA, 19 nt, Artificial Sequence
  Description of Artificial Sequence: Synthetic oligonucleotide
aucaaucacguagaaguua

SEQ ID NO: 96584 - RNA, 19 nt, Artificial Sequence
  Description of Artificial Sequence: Synthetic oligonucleotide
cuugcgucauauggaaaug

SEQ ID NO: 96585 - RNA, 19 nt, Artificial Sequence
  Description of Artificial Sequence: Synthetic oligonucleotide
ggcagaucacacuaguuaa

SEQ ID NO: 96586 - RNA, 19 nt, Artificial Sequence
  Description of Artificial Sequence: Synthetic oligonucleotide
uguggcggcccgaggacga

SEQ ID NO: 96587 - RNA, 19 nt, Artificial Sequence
  Description of Artificial Sequence: Synthetic oligonucleotide
guauucccgaaggaaugcc

SEQ ID NO: 96588 - RNA, 19 nt, Artificial Sequence
  Description of Artificial Sequence: Synthetic oligonucleotide
gaagcguggacuggggaga

SEQ ID NO: 96589 - RNA, 19 nt, Artificial Sequence
  Description of Artificial Sequence: Synthetic oligonucleotide
guugaacacuagcacugca

SEQ ID NO: 96590 - RNA, 19 nt, Artificial Sequence
  Description of Artificial Sequence: Synthetic oligonucleotide
acacacacacacaaacaga

SEQ ID NO: 96591 - RNA, 19 nt, Artificial Sequence
  Description of Artificial Sequence: Synthetic oligonucleotide
gucgguccagcuuaacaca

SEQ ID NO: 96592 - RNA, 19 nt, Artificial Sequence
  Description of Artificial Sequence: Synthetic oligonucleotide
acacacacacacacaaaca

SEQ ID NO: 96593 - RNA, 19 nt, Artificial Sequence
  Description of Artificial Sequence: Synthetic oligonucleotide
agagaaauucaagguuaga

SEQ ID NO: 96594 - RNA, 19 nt, Artificial Sequence
  Description of Artificial Sequence: Synthetic oligonucleotide
agccacaccgaaacaguuc

SEQ ID NO: 96595 - RNA, 19 nt, Artificial Sequence
  Description of Artificial Sequence: Synthetic oligonucleotide
acgcgcaaccacuguggcg

SEQ ID NO: 96596 - RNA, 19 nt, Artificial Sequence
  Description of Artificial Sequence: Synthetic oligonucleotide
ugauagcaccacggcgucg

SEQ ID NO: 96597 - RNA, 19 nt, Artificial Sequence
  Description of Artificial Sequence: Synthetic oligonucleotide
aaacgguaggaggggauua

SEQ ID NO: 96598 - RNA, 19 nt, Artificial Sequence
  Description of Artificial Sequence: Synthetic oligonucleotide
guauagacagccacaccga

SEQ ID NO: 96599 - RNA, 19 nt, Artificial Sequence
  Description of Artificial Sequence: Synthetic oligonucleotide
ucccacacuuaaacuaguu

SEQ ID NO: 96600 - RNA, 19 nt, Artificial Sequence
  Description of Artificial Sequence: Synthetic oligonucleotide
gagucgguacgagugccgc

SEQ ID NO: 96601 - RNA, 19 nt, Artificial Sequence
  Description of Artificial Sequence: Synthetic oligonucleotide
ugguaccuagaguccacaa

SEQ ID NO: 96602 - RNA, 19 nt, Artificial Sequence
  Description of Artificial Sequence: Synthetic oligonucleotide
uacgagugccgcucuucug

SEQ ID NO: 96603 - RNA, 19 nt, Artificial Sequence
  Description of Artificial Sequence: Synthetic oligonucleotide
ccgaaauaaucagaaggcc

SEQ ID NO: 96604 - RNA, 19 nt, Artificial Sequence
  Description of Artificial Sequence: Synthetic oligonucleotide
accuaccauugagacaguc

SEQ ID NO: 96605 - RNA, 19 nt, Artificial Sequence
  Description of Artificial Sequence: Synthetic oligonucleotide
agccgucccacuucaacaa

SEQ ID NO: 96606 - RNA, 19 nt, Artificial Sequence
  Description of Artificial Sequence: Synthetic oligonucleotide
cacuaguuaaugacaguua

SEQ ID NO: 96607 - RNA, 19 nt, Artificial Sequence
  Description of Artificial Sequence: Synthetic oligonucleotide
aacgguaggaggggauuau

SEQ ID NO: 96608 - RNA, 19 nt, Artificial Sequence
  Description of Artificial Sequence: Synthetic oligonucleotide
gugaccuaccauugagaca

SEQ ID NO: 96609 - RNA, 19 nt, Artificial Sequence
  Description of Artificial Sequence: Synthetic oligonucleotide
uccucccuggagucgguac

SEQ ID NO: 96610 - RNA, 19 nt, Artificial Sequence
  Description of Artificial Sequence: Synthetic oligonucleotide
guucaaaccggggucgguc

SEQ ID NO: 96611 - RNA, 19 nt, Artificial Sequence
  Description of Artificial Sequence: Synthetic oligonucleotide
uccccaacacugguugccc

SEQ ID NO: 96612 - RNA, 19 nt, Artificial Sequence
  Description of Artificial Sequence: Synthetic oligonucleotide
gaauugcaagcagaugucu

SEQ ID NO: 96613 - RNA, 19 nt, Artificial Sequence
  Description of Artificial Sequence: Synthetic oligonucleotide
gucccacuucaacaaacuc

SEQ ID NO: 96614 - RNA, 19 nt, Artificial Sequence
  Description of Artificial Sequence: Synthetic oligonucleotide
ugguuaucauuggaauaau

SEQ ID NO: 96615 - RNA, 19 nt, Artificial Sequence
  Description of Artificial Sequence: Synthetic oligonucleotide
ccaauuuaaguuaggggaa

SEQ ID NO: 96616 - RNA, 19 nt, Artificial Sequence
  Description of Artificial Sequence: Synthetic oligonucleotide
agagaagcguuaacagcca

SEQ ID NO: 96617 - RNA, 19 nt, Artificial Sequence
  Description of Artificial Sequence: Synthetic oligonucleotide
cugauagcaccacggcguc

SEQ ID NO: 96618 - RNA, 19 nt, Artificial Sequence
  Description of Artificial Sequence: Synthetic oligonucleotide
guggacgagcauucaguca

SEQ ID NO: 96619 - RNA, 19 nt, Artificial Sequence
  Description of Artificial Sequence: Synthetic oligonucleotide
cagccgucccacuucaaca

SEQ ID NO: 96620 - RNA, 19 nt, Artificial Sequence
  Description of Artificial Sequence: Synthetic oligonucleotide
cuugcaccacgaucuucug

SEQ ID NO: 96621 - RNA, 19 nt, Artificial Sequence
  Description of Artificial Sequence: Synthetic oligonucleotide
gacuuaucuugagaagucu

SEQ ID NO: 96622 - RNA, 19 nt, Artificial Sequence
  Description of Artificial Sequence: Synthetic oligonucleotide
gguaccuagaguccacaaa

SEQ ID NO: 96623 - RNA, 19 nt, Artificial Sequence
  Description of Artificial Sequence: Synthetic oligonucleotide
ccaaccauaacuucugacu

SEQ ID NO: 96624 - RNA, 19 nt, Artificial Sequence
  Description of Artificial Sequence: Synthetic oligonucleotide
cacgcgcaaccacuguggc

SEQ ID NO: 96625 - RNA, 19 nt, Artificial Sequence
  Description of Artificial Sequence: Synthetic oligonucleotide
gagaagcguuaacagccaa

SEQ ID NO: 96626 - RNA, 19 nt, Artificial Sequence
  Description of Artificial Sequence: Synthetic oligonucleotide
auuuguggacgagcauuca

SEQ ID NO: 96627 - RNA, 19 nt, Artificial Sequence
  Description of Artificial Sequence: Synthetic oligonucleotide
accgacgcugcagcacagc

SEQ ID NO: 96628 - RNA, 19 nt, Artificial Sequence
  Description of Artificial Sequence: Synthetic oligonucleotide
aaagggccacgcgcaacca

SEQ ID NO: 96629 - RNA, 19 nt, Artificial Sequence
  Description of Artificial Sequence: Synthetic oligonucleotide
gccaaccauaacuucugac

SEQ ID NO: 96630 - RNA, 19 nt, Artificial Sequence
  Description of Artificial Sequence: Synthetic oligonucleotide
auaacacauaaggcuggaa

SEQ ID NO: 96631 - RNA, 19 nt, Artificial Sequence
  Description of Artificial Sequence: Synthetic oligonucleotide
gaucaguauuuggcaccag

SEQ ID NO: 96632 - RNA, 19 nt, Artificial Sequence
  Description of Artificial Sequence: Synthetic oligonucleotide
ccacgcgcaaccacugugg

SEQ ID NO: 96633 - RNA, 19 nt, Artificial Sequence
  Description of Artificial Sequence: Synthetic oligonucleotide
accacuguggcggcccgag

SEQ ID NO: 96634 - RNA, 19 nt, Artificial Sequence
  Description of Artificial Sequence: Synthetic oligonucleotide
cagcgcugauagcaccacg

SEQ ID NO: 96635 - RNA, 19 nt, Artificial Sequence
  Description of Artificial Sequence: Synthetic oligonucleotide
agucgguacgagugccgcu

SEQ ID NO: 96636 - RNA, 19 nt, Artificial Sequence
  Description of Artificial Sequence: Synthetic oligonucleotide
gucgguacgagugccgcuc

SEQ ID NO: 96637 - RNA, 19 nt, Artificial Sequence
  Description of Artificial Sequence: Synthetic oligonucleotide
agauuucguccucccugga

SEQ ID NO: 96638 - RNA, 19 nt, Artificial Sequence
  Description of Artificial Sequence: Synthetic oligonucleotide
ucgguacgagugccgcucu

SEQ ID NO: 96639 - RNA, 19 nt, Artificial Sequence
  Description of Artificial Sequence: Synthetic oligonucleotide
ucgggucgagcagugcaca

SEQ ID NO: 96640 - RNA, 19 nt, Artificial Sequence
  Description of Artificial Sequence: Synthetic oligonucleotide
cuucgcuuuaacaguggcu

SEQ ID NO: 96641 - RNA, 19 nt, Artificial Sequence
  Description of Artificial Sequence: Synthetic oligonucleotide
ucccggucgaugccccaca

SEQ ID NO: 96642 - RNA, 19 nt, Artificial Sequence
  Description of Artificial Sequence: Synthetic oligonucleotide
gaucucagacggacaguga

SEQ ID NO: 96643 - RNA, 19 nt, Artificial Sequence
  Description of Artificial Sequence: Synthetic oligonucleotide
gcugauagcaccacggcgu

SEQ ID NO: 96644 - RNA, 19 nt, Artificial Sequence
  Description of Artificial Sequence: Synthetic oligonucleotide
uuacaucauuacgguaauu

SEQ ID NO: 96645 - RNA, 19 nt, Artificial Sequence
  Description of Artificial Sequence: Synthetic oligonucleotide
cuugaggauaucugagcau

SEQ ID NO: 96646 - RNA, 19 nt, Artificial Sequence
  Description of Artificial Sequence: Synthetic oligonucleotide
ggauguuucgcuugaggau

SEQ ID NO: 96647 - RNA, 19 nt, Artificial Sequence
  Description of Artificial Sequence: Synthetic oligonucleotide
uggcuacuuggcgcugcgg

SEQ ID NO: 96648 - RNA, 19 nt, Artificial Sequence
  Description of Artificial Sequence: Synthetic oligonucleotide
ggagucgguacgagugccg

SEQ ID NO: 96649 - RNA, 19 nt, Artificial Sequence
  Description of Artificial Sequence: Synthetic oligonucleotide
caaaccggggucgguccag

SEQ ID NO: 96650 - RNA, 19 nt, Artificial Sequence
  Description of Artificial Sequence: Synthetic oligonucleotide
caauaaccgagggcagauc

SEQ ID NO: 96651 - RNA, 19 nt, Artificial Sequence
  Description of Artificial Sequence: Synthetic oligonucleotide
ggacacguucaaaccgggg

SEQ ID NO: 96652 - RNA, 19 nt, Artificial Sequence
  Description of Artificial Sequence: Synthetic oligonucleotide
accggaucccauccacuuu

SEQ ID NO: 96653 - RNA, 19 nt, Artificial Sequence
  Description of Artificial Sequence: Synthetic oligonucleotide
acguucuuuucgauggcuu

SEQ ID NO: 96654 - RNA, 19 nt, Artificial Sequence
  Description of Artificial Sequence: Synthetic oligonucleotide
cacaacgauaaagcuuuaa

SEQ ID NO: 96655 - RNA, 19 nt, Artificial Sequence
  Description of Artificial Sequence: Synthetic oligonucleotide
caguauuggccaucuauuu

SEQ ID NO: 96656 - RNA, 19 nt, Artificial Sequence
  Description of Artificial Sequence: Synthetic oligonucleotide
guacgagugccgcucuucu

SEQ ID NO: 96657 - RNA, 19 nt, Artificial Sequence
  Description of Artificial Sequence: Synthetic oligonucleotide
ccgucccacuucaacaaac

SEQ ID NO: 96658 - RNA, 19 nt, Artificial Sequence
  Description of Artificial Sequence: Synthetic oligonucleotide
gguuaucauuggaauaaua

SEQ ID NO: 96659 - RNA, 19 nt, Artificial Sequence
  Description of Artificial Sequence: Synthetic oligonucleotide
gcgcugauagcaccacggc

SEQ ID NO: 96660 - RNA, 19 nt, Artificial Sequence
  Description of Artificial Sequence: Synthetic oligonucleotide
auguuucgcuugaggauau

SEQ ID NO: 96661 - RNA, 19 nt, Artificial Sequence
  Description of Artificial Sequence: Synthetic oligonucleotide
acacacacacacacacaaa

SEQ ID NO: 96662 - RNA, 19 nt, Artificial Sequence
  Description of Artificial Sequence: Synthetic oligonucleotide
gaaacgguaggaggggauu

SEQ ID NO: 96663 - RNA, 19 nt, Artificial Sequence
  Description of Artificial Sequence: Synthetic oligonucleotide
cccgaggacgauucaucag

SEQ ID NO: 96664 - RNA, 19 nt, Artificial Sequence
  Description of Artificial Sequence: Synthetic oligonucleotide
ccaaguuaguaacaaccua

SEQ ID NO: 96665 - RNA, 19 nt, Artificial Sequence
  Description of Artificial Sequence: Synthetic oligonucleotide
acaccggaucccauccacu

SEQ ID NO: 96666 - RNA, 19 nt, Artificial Sequence
  Description of Artificial Sequence: Synthetic oligonucleotide
cccaaguuaguaacaaccu

SEQ ID NO: 96667 - RNA, 19 nt, Artificial Sequence
  Description of Artificial Sequence: Synthetic oligonucleotide
gugagacgcucccacuugu

SEQ ID NO: 96668 - RNA, 19 nt, Artificial Sequence
  Description of Artificial Sequence: Synthetic oligonucleotide
cacuugcgucauauggaaa

SEQ ID NO: 96669 - RNA, 19 nt, Artificial Sequence
  Description of Artificial Sequence: Synthetic oligonucleotide
gaccgacgcugcagcacag

SEQ ID NO: 96670 - RNA, 19 nt, Artificial Sequence
  Description of Artificial Sequence: Synthetic oligonucleotide
gcccgaggacgauucauca

SEQ ID NO: 96671 - RNA, 19 nt, Artificial Sequence
  Description of Artificial Sequence: Synthetic oligonucleotide
cuacuuggcgcugcggaua

SEQ ID NO: 96672 - RNA, 19 nt, Artificial Sequence
  Description of Artificial Sequence: Synthetic oligonucleotide
gcgucauauggaaauggaa

SEQ ID NO: 96673 - RNA, 19 nt, Artificial Sequence
  Description of Artificial Sequence: Synthetic oligonucleotide
gggccucucgggucgagca

SEQ ID NO: 96674 - RNA, 19 nt, Artificial Sequence
  Description of Artificial Sequence: Synthetic oligonucleotide
ccuaccauugagacagucu

SEQ ID NO: 96675 - RNA, 19 nt, Artificial Sequence
  Description of Artificial Sequence: Synthetic oligonucleotide
gcguggacuggggagaaga

SEQ ID NO: 96676 - RNA, 19 nt, Artificial Sequence
  Description of Artificial Sequence: Synthetic oligonucleotide
cgaaguauucccgaaggaa

SEQ ID NO: 96677 - RNA, 19 nt, Artificial Sequence
  Description of Artificial Sequence: Synthetic oligonucleotide
cauucccggagacuccgcu

SEQ ID NO: 96678 - RNA, 19 nt, Artificial Sequence
  Description of Artificial Sequence: Synthetic oligonucleotide
acgguaggaggggauuauu

SEQ ID NO: 96679 - RNA, 19 nt, Artificial Sequence
  Description of Artificial Sequence: Synthetic oligonucleotide
gggcaauuucaccgaaaua

SEQ ID NO: 96680 - RNA, 19 nt, Artificial Sequence
  Description of Artificial Sequence: Synthetic oligonucleotide
agcguggacuggggagaag

SEQ ID NO: 96681 - RNA, 19 nt, Artificial Sequence
  Description of Artificial Sequence: Synthetic oligonucleotide
ccacaccgaaacaguucag

SEQ ID NO: 96682 - RNA, 19 nt, Artificial Sequence
  Description of Artificial Sequence: Synthetic oligonucleotide
cugugagacgcucccacuu

SEQ ID NO: 96683 - RNA, 19 nt, Artificial Sequence
  Description of Artificial Sequence: Synthetic oligonucleotide
guggcugcucuagguguuc

SEQ ID NO: 96684 - RNA, 19 nt, Artificial Sequence
  Description of Artificial Sequence: Synthetic oligonucleotide
gucccggucgaugccccac

SEQ ID NO: 96685 - RNA, 19 nt, Artificial Sequence
  Description of Artificial Sequence: Synthetic oligonucleotide
cgaggacgauucaucagca

SEQ ID NO: 96686 - RNA, 19 nt, Artificial Sequence
  Description of Artificial Sequence: Synthetic oligonucleotide
gcaugccuaguuaggaacu

SEQ ID NO: 96687 - RNA, 19 nt, Artificial Sequence
  Description of Artificial Sequence: Synthetic oligonucleotide
ccaaucuccuagaaucaau

SEQ ID NO: 96688 - RNA, 19 nt, Artificial Sequence
  Description of Artificial Sequence: Synthetic oligonucleotide
cagccacaccgaaacaguu

SEQ ID NO: 96689 - RNA, 19 nt, Artificial Sequence
  Description of Artificial Sequence: Synthetic oligonucleotide
ggcggcccgaggacgauuc

SEQ ID NO: 96690 - RNA, 19 nt, Artificial Sequence
  Description of Artificial Sequence: Synthetic oligonucleotide
ccgacgcugcagcacagca

SEQ ID NO: 96691 - RNA, 19 nt, Artificial Sequence
  Description of Artificial Sequence: Synthetic oligonucleotide
gcgcugcggauagggaaag

SEQ ID NO: 96692 - RNA, 19 nt, Artificial Sequence
  Description of Artificial Sequence: Synthetic oligonucleotide
cccggucgaugccccacag

SEQ ID NO: 96693 - RNA, 19 nt, Artificial Sequence
  Description of Artificial Sequence: Synthetic oligonucleotide
cgggucgagcagugcacag

SEQ ID NO: 96694 - RNA, 19 nt, Artificial Sequence
  Description of Artificial Sequence: Synthetic oligonucleotide
ccgcaaauccaaucuccua

SEQ ID NO: 96695 - RNA, 19 nt, Artificial Sequence
  Description of Artificial Sequence: Synthetic oligonucleotide
gccgucccacuucaacaaa

SEQ ID NO: 96696 - RNA, 19 nt, Artificial Sequence
  Description of Artificial Sequence: Synthetic oligonucleotide
caugggccaaggacacguu

SEQ ID NO: 96697 - RNA, 19 nt, Artificial Sequence
  Description of Artificial Sequence: Synthetic oligonucleotide
caugggccucucgggucga

SEQ ID NO: 96698 - RNA, 19 nt, Artificial Sequence
  Description of Artificial Sequence: Synthetic oligonucleotide
gaccuaccauugagacagu

SEQ ID NO: 96699 - RNA, 19 nt, Artificial Sequence
  Description of Artificial Sequence: Synthetic oligonucleotide
cccuggagucgguacgagu

SEQ ID NO: 96700 - RNA, 19 nt, Artificial Sequence
  Description of Artificial Sequence: Synthetic oligonucleotide
gcggcccgaggacgauuca

SEQ ID NO: 96701 - RNA, 19 nt, Artificial Sequence
  Description of Artificial Sequence: Synthetic oligonucleotide
gcacaacgauaaagcuuua

SEQ ID NO: 96702 - RNA, 19 nt, Artificial Sequence
  Description of Artificial Sequence: Synthetic oligonucleotide
cgagugccgcucuucugua

SEQ ID NO: 96703 - RNA, 19 nt, Artificial Sequence
  Description of Artificial Sequence: Synthetic oligonucleotide
ccaaugcaucagccacugu

SEQ ID NO: 96704 - RNA, 19 nt, Artificial Sequence
  Description of Artificial Sequence: Synthetic oligonucleotide
guggcggcccgaggacgau

SEQ ID NO: 96705 - RNA, 19 nt, Artificial Sequence
  Description of Artificial Sequence: Synthetic oligonucleotide
cacggcgucggcggcccuu

SEQ ID NO: 96706 - RNA, 19 nt, Artificial Sequence
  Description of Artificial Sequence: Synthetic oligonucleotide
cguucaaaccggggucggu

SEQ ID NO: 96707 - RNA, 19 nt, Artificial Sequence
  Description of Artificial Sequence: Synthetic oligonucleotide
uuauaauaugugcagaugc

SEQ ID NO: 96708 - RNA, 19 nt, Artificial Sequence
  Description of Artificial Sequence: Synthetic oligonucleotide
aaaaggauugugccgagac

SEQ ID NO: 96709 - RNA, 19 nt, Artificial Sequence
  Description of Artificial Sequence: Synthetic oligonucleotide
aaucuuauaauaugugcag

SEQ ID NO: 96710 - RNA, 19 nt, Artificial Sequence
  Description of Artificial Sequence: Synthetic oligonucleotide
caaaauuucaguccgaccc

SEQ ID NO: 96711 - RNA, 19 nt, Artificial Sequence
  Description of Artificial Sequence: Synthetic oligonucleotide
aaaauuucaguccgacccc

SEQ ID NO: 96712 - RNA, 19 nt, Artificial Sequence
  Description of Artificial Sequence: Synthetic oligonucleotide
uuaaauuaaguacaggcuc

SEQ ID NO: 96713 - RNA, 19 nt, Artificial Sequence
  Description of Artificial Sequence: Synthetic oligonucleotide
aauaguuccuucaagaaug

SEQ ID NO: 96714 - RNA, 19 nt, Artificial Sequence
  Description of Artificial Sequence: Synthetic oligonucleotide
aaugauuacucccucguug

SEQ ID NO: 96715 - RNA, 19 nt, Artificial Sequence
  Description of Artificial Sequence: Synthetic oligonucleotide
agaguuaucaucucacuuc

SEQ ID NO: 96716 - RNA, 19 nt, Artificial Sequence
  Description of Artificial Sequence: Synthetic oligonucleotide
uuuaauucagauaauccaa

SEQ ID NO: 96717 - RNA, 19 nt, Artificial Sequence
  Description of Artificial Sequence: Synthetic oligonucleotide
aagauugacaaaguguuuc

SEQ ID NO: 96718 - RNA, 19 nt, Artificial Sequence
  Description of Artificial Sequence: Synthetic oligonucleotide
ucaacaacgcuucugcuag

SEQ ID NO: 96719 - RNA, 19 nt, Artificial Sequence
  Description of Artificial Sequence: Synthetic oligonucleotide
ucucaucgaacucugaucc

SEQ ID NO: 96720 - RNA, 19 nt, Artificial Sequence
  Description of Artificial Sequence: Synthetic oligonucleotide
aaaucuuauaauaugugca

SEQ ID NO: 96721 - RNA, 19 nt, Artificial Sequence
  Description of Artificial Sequence: Synthetic oligonucleotide
uguucuaaugauuuaaaua

SEQ ID NO: 96722 - RNA, 19 nt, Artificial Sequence
  Description of Artificial Sequence: Synthetic oligonucleotide
aaccaguagauaaaggcac

SEQ ID NO: 96723 - RNA, 19 nt, Artificial Sequence
  Description of Artificial Sequence: Synthetic oligonucleotide
guucauaugacucccguag

SEQ ID NO: 96724 - RNA, 19 nt, Artificial Sequence
  Description of Artificial Sequence: Synthetic oligonucleotide
aagaaaaugggcaugcaug

SEQ ID NO: 96725 - RNA, 19 nt, Artificial Sequence
  Description of Artificial Sequence: Synthetic oligonucleotide
gaugguguuauauucugug

SEQ ID NO: 96726 - RNA, 19 nt, Artificial Sequence
  Description of Artificial Sequence: Synthetic oligonucleotide
uaaccaguagauaaaggca

SEQ ID NO: 96727 - RNA, 19 nt, Artificial Sequence
  Description of Artificial Sequence: Synthetic oligonucleotide
uagucugccuugaauaagg

SEQ ID NO: 96728 - RNA, 19 nt, Artificial Sequence
  Description of Artificial Sequence: Synthetic oligonucleotide
uuauauucugugcuucugc

SEQ ID NO: 96729 - RNA, 19 nt, Artificial Sequence
  Description of Artificial Sequence: Synthetic oligonucleotide
ugagacguaugccaauggg

SEQ ID NO: 96730 - RNA, 19 nt, Artificial Sequence
  Description of Artificial Sequence: Synthetic oligonucleotide
cauaaguugaaagaccacc

SEQ ID NO: 96731 - RNA, 19 nt, Artificial Sequence
  Description of Artificial Sequence: Synthetic oligonucleotide
augauuacucccucguugg

SEQ ID NO: 96732 - RNA, 19 nt, Artificial Sequence
  Description of Artificial Sequence: Synthetic oligonucleotide
aaaaccccgagacuguaug

SEQ ID NO: 96733 - RNA, 19 nt, Artificial Sequence
  Description of Artificial Sequence: Synthetic oligonucleotide
aaguuuuaaaaccccgaga

SEQ ID NO: 96734 - RNA, 19 nt, Artificial Sequence
  Description of Artificial Sequence: Synthetic oligonucleotide
uuuuacucacuucaaguaa

SEQ ID NO: 96735 - RNA, 19 nt, Artificial Sequence
  Description of Artificial Sequence: Synthetic oligonucleotide
ucaaauagcuucauuuaaa

SEQ ID NO: 96736 - RNA, 19 nt, Artificial Sequence
  Description of Artificial Sequence: Synthetic oligonucleotide
uccggaagcgaacagauaa

SEQ ID NO: 96737 - RNA, 19 nt, Artificial Sequence
  Description of Artificial Sequence: Synthetic oligonucleotide
uguaauaugaucgguucca

SEQ ID NO: 96738 - RNA, 19 nt, Artificial Sequence
  Description of Artificial Sequence: Synthetic oligonucleotide
uuaauaguuccuucaagaa

SEQ ID NO: 96739 - RNA, 19 nt, Artificial Sequence
  Description of Artificial Sequence: Synthetic oligonucleotide
uccucccauacuaacaucc

SEQ ID NO: 96740 - RNA, 19 nt, Artificial Sequence
  Description of Artificial Sequence: Synthetic oligonucleotide
uuaaguacaggcucacuac

SEQ ID NO: 96741 - RNA, 19 nt, Artificial Sequence
  Description of Artificial Sequence: Synthetic oligonucleotide
auaaugauuacucccucgu

SEQ ID NO: 96742 - RNA, 19 nt, Artificial Sequence
  Description of Artificial Sequence: Synthetic oligonucleotide
uaauaguuccuucaagaau

SEQ ID NO: 96743 - RNA, 19 nt, Artificial Sequence
  Description of Artificial Sequence: Synthetic oligonucleotide
ucucauaggucaacaacgc

SEQ ID NO: 96744 - RNA, 19 nt, Artificial Sequence
  Description of Artificial Sequence: Synthetic oligonucleotide
aguacaggcucacuacugg

SEQ ID NO: 96745 - RNA, 19 nt, Artificial Sequence
  Description of Artificial Sequence: Synthetic oligonucleotide
uaugccaaugggaaguaac

SEQ ID NO: 96746 - RNA, 19 nt, Artificial Sequence
  Description of Artificial Sequence: Synthetic oligonucleotide
uuguaauaugaucgguucc

SEQ ID NO: 96747 - RNA, 19 nt, Artificial Sequence
  Description of Artificial Sequence: Synthetic oligonucleotide
ucauaggucaacaacgcuu

SEQ ID NO: 96748 - RNA, 19 nt, Artificial Sequence
  Description of Artificial Sequence: Synthetic oligonucleotide
aucucaucgaacucugauc

SEQ ID NO: 96749 - RNA, 19 nt, Artificial Sequence
  Description of Artificial Sequence: Synthetic oligonucleotide
gaacguaguguacugaaca

SEQ ID NO: 96750 - RNA, 19 nt, Artificial Sequence
  Description of Artificial Sequence: Synthetic oligonucleotide
ugugccgagacaugagacg

SEQ ID NO: 96751 - RNA, 19 nt, Artificial Sequence
  Description of Artificial Sequence: Synthetic oligonucleotide
agacaugagacguaugcca

SEQ ID NO: 96752 - RNA, 19 nt, Artificial Sequence
  Description of Artificial Sequence: Synthetic oligonucleotide
ucaaaauuucaguccgacc

SEQ ID NO: 96753 - RNA, 19 nt, Artificial Sequence
  Description of Artificial Sequence: Synthetic oligonucleotide
uaugaucgguuccaaauau

SEQ ID NO: 96754 - RNA, 19 nt, Artificial Sequence
  Description of Artificial Sequence: Synthetic oligonucleotide
uaugcaauaauagcaugac

SEQ ID NO: 96755 - RNA, 19 nt, Artificial Sequence
  Description of Artificial Sequence: Synthetic oligonucleotide
aaucagacgaguucgccuu

SEQ ID NO: 96756 - RNA, 19 nt, Artificial Sequence
  Description of Artificial Sequence: Synthetic oligonucleotide
uauggguuacuaaucucca

SEQ ID NO: 96757 - RNA, 19 nt, Artificial Sequence
  Description of Artificial Sequence: Synthetic oligonucleotide
aucuaaguccuguaguugu

SEQ ID NO: 96758 - RNA, 19 nt, Artificial Sequence
  Description of Artificial Sequence: Synthetic oligonucleotide
agacgaguucgccuuaagg

SEQ ID NO: 96759 - RNA, 19 nt, Artificial Sequence
  Description of Artificial Sequence: Synthetic oligonucleotide
gacguauuaaggcauuauc

SEQ ID NO: 96760 - RNA, 19 nt, Artificial Sequence
  Description of Artificial Sequence: Synthetic oligonucleotide
gguuacuaaucuccaaugg

SEQ ID NO: 96761 - RNA, 19 nt, Artificial Sequence
  Description of Artificial Sequence: Synthetic oligonucleotide
ggucccuuaaauuaaguac

SEQ ID NO: 96762 - RNA, 19 nt, Artificial Sequence
  Description of Artificial Sequence: Synthetic oligonucleotide
agugagacauguccaagug

SEQ ID NO: 96763 - RNA, 19 nt, Artificial Sequence
  Description of Artificial Sequence: Synthetic oligonucleotide
uggguuacuaaucuccaau

SEQ ID NO: 96764 - RNA, 19 nt, Artificial Sequence
  Description of Artificial Sequence: Synthetic oligonucleotide
aaaggauugugccgagaca

SEQ ID NO: 96765 - RNA, 19 nt, Artificial Sequence
  Description of Artificial Sequence: Synthetic oligonucleotide
aacguaguguacugaacau

SEQ ID NO: 96766 - RNA, 19 nt, Artificial Sequence
  Description of Artificial Sequence: Synthetic oligonucleotide
aaaacuuaaccaguagaua

SEQ ID NO: 96767 - RNA, 19 nt, Artificial Sequence
  Description of Artificial Sequence: Synthetic oligonucleotide
uucaaaauuucaguccgac

SEQ ID NO: 96768 - RNA, 19 nt, Artificial Sequence
  Description of Artificial Sequence: Synthetic oligonucleotide
acaaucagacgaguucgcc

SEQ ID NO: 96769 - RNA, 19 nt, Artificial Sequence
  Description of Artificial Sequence: Synthetic oligonucleotide
aagcuagaggaacguagug

SEQ ID NO: 96770 - RNA, 19 nt, Artificial Sequence
  Description of Artificial Sequence: Synthetic oligonucleotide
cuuauaauaugugcagaug

SEQ ID NO: 96771 - RNA, 19 nt, Artificial Sequence
  Description of Artificial Sequence: Synthetic oligonucleotide
auaugcaauaauagcauga

SEQ ID NO: 96772 - RNA, 19 nt, Artificial Sequence
  Description of Artificial Sequence: Synthetic oligonucleotide
aaacucugauuauaucuuu

SEQ ID NO: 96773 - RNA, 19 nt, Artificial Sequence
  Description of Artificial Sequence: Synthetic oligonucleotide
uaaccauccucuuugcaau

SEQ ID NO: 96774 - RNA, 19 nt, Artificial Sequence
  Description of Artificial Sequence: Synthetic oligonucleotide
uuaauuggcauugcauccu

SEQ ID NO: 96775 - RNA, 19 nt, Artificial Sequence
  Description of Artificial Sequence: Synthetic oligonucleotide
cauaacuccaagcuuuuca

SEQ ID NO: 96776 - RNA, 19 nt, Artificial Sequence
  Description of Artificial Sequence: Synthetic oligonucleotide
ugauuacucccucguuggg

SEQ ID NO: 96777 - RNA, 19 nt, Artificial Sequence
  Description of Artificial Sequence: Synthetic oligonucleotide
uucauaugacucccguaga

SEQ ID NO: 96778 - RNA, 19 nt, Artificial Sequence
  Description of Artificial Sequence: Synthetic oligonucleotide
uacuaacauccauuugugc

SEQ ID NO: 96779 - RNA, 19 nt, Artificial Sequence
  Description of Artificial Sequence: Synthetic oligonucleotide
uagugagacauguccaagu

SEQ ID NO: 96780 - RNA, 19 nt, Artificial Sequence
  Description of Artificial Sequence: Synthetic oligonucleotide
ucuaaugccucugggaaau

SEQ ID NO: 96781 - RNA, 19 nt, Artificial Sequence
  Description of Artificial Sequence: Synthetic oligonucleotide
auguucuaaugauuuaaau

SEQ ID NO: 96782 - RNA, 19 nt, Artificial Sequence
  Description of Artificial Sequence: Synthetic oligonucleotide
cagucgaucaaucugucca

SEQ ID NO: 96783 - RNA, 19 nt, Artificial Sequence
  Description of Artificial Sequence: Synthetic oligonucleotide
augagacguaugccaaugg

SEQ ID NO: 96784 - RNA, 19 nt, Artificial Sequence
  Description of Artificial Sequence: Synthetic oligonucleotide
uccuguaguuguccggaag

SEQ ID NO: 96785 - RNA, 19 nt, Artificial Sequence
  Description of Artificial Sequence: Synthetic oligonucleotide
uguccggaagcgaacagau

SEQ ID NO: 96786 - RNA, 19 nt, Artificial Sequence
  Description of Artificial Sequence: Synthetic oligonucleotide
ucgagcuaugauuucugga

SEQ ID NO: 96787 - RNA, 19 nt, Artificial Sequence
  Description of Artificial Sequence: Synthetic oligonucleotide
caacagccgccuuuaaugc

SEQ ID NO: 96788 - RNA, 19 nt, Artificial Sequence
  Description of Artificial Sequence: Synthetic oligonucleotide
gacguaugccaaugggaag

SEQ ID NO: 96789 - RNA, 19 nt, Artificial Sequence
  Description of Artificial Sequence: Synthetic oligonucleotide
uagaggaacguaguguacu

SEQ ID NO: 96790 - RNA, 19 nt, Artificial Sequence
  Description of Artificial Sequence: Synthetic oligonucleotide
auaugaucgguuccaaaua

SEQ ID NO: 96791 - RNA, 19 nt, Artificial Sequence
  Description of Artificial Sequence: Synthetic oligonucleotide
uugugccgagacaugagac

SEQ ID NO: 96792 - RNA, 19 nt, Artificial Sequence
  Description of Artificial Sequence: Synthetic oligonucleotide
agagaguuaucaucucacu

SEQ ID NO: 96793 - RNA, 19 nt, Artificial Sequence
  Description of Artificial Sequence: Synthetic oligonucleotide
acuagaagcaccuguugua

SEQ ID NO: 96794 - RNA, 19 nt, Artificial Sequence
  Description of Artificial Sequence: Synthetic oligonucleotide
ugaugguguuauauucugu

SEQ ID NO: 96795 - RNA, 19 nt, Artificial Sequence
  Description of Artificial Sequence: Synthetic oligonucleotide
cauaugacucccguagaag

SEQ ID NO: 96796 - RNA, 19 nt, Artificial Sequence
  Description of Artificial Sequence: Synthetic oligonucleotide
ucguucauaugacucccgu

SEQ ID NO: 96797 - RNA, 19 nt, Artificial Sequence
  Description of Artificial Sequence: Synthetic oligonucleotide
aaaacgaccaggacguauu

SEQ ID NO: 96798 - RNA, 19 nt, Artificial Sequence
  Description of Artificial Sequence: Synthetic oligonucleotide
aacuuaaccaguagauaaa

SEQ ID NO: 96799 - RNA, 19 nt, Artificial Sequence
  Description of Artificial Sequence: Synthetic oligonucleotide
aacagccgccuuuaaugca

SEQ ID NO: 96800 - RNA, 19 nt, Artificial Sequence
  Description of Artificial Sequence: Synthetic oligonucleotide
uaauaugaucgguuccaaa

SEQ ID NO: 96801 - RNA, 19 nt, Artificial Sequence
  Description of Artificial Sequence: Synthetic oligonucleotide
aaaccccgagacuguauga

SEQ ID NO: 96802 - RNA, 19 nt, Artificial Sequence
  Description of Artificial Sequence: Synthetic oligonucleotide
cuauaaugauuacucccuc

SEQ ID NO: 96803 - RNA, 19 nt, Artificial Sequence
  Description of Artificial Sequence: Synthetic oligonucleotide
aaguacaggcucacuacug

SEQ ID NO: 96804 - RNA, 19 nt, Artificial Sequence
  Description of Artificial Sequence: Synthetic oligonucleotide
agucgaaacugcuuccuau

SEQ ID NO: 96805 - RNA, 19 nt, Artificial Sequence
  Description of Artificial Sequence: Synthetic oligonucleotide
aggaacguaguguacugaa

SEQ ID NO: 96806 - RNA, 19 nt, Artificial Sequence
  Description of Artificial Sequence: Synthetic oligonucleotide
uucaguccgaccccucaca

SEQ ID NO: 96807 - RNA, 19 nt, Artificial Sequence
  Description of Artificial Sequence: Synthetic oligonucleotide
ucauuaauccugacagcuu

SEQ ID NO: 96808 - RNA, 19 nt, Artificial Sequence
  Description of Artificial Sequence: Synthetic oligonucleotide
auauaugaagaaauugauu

SEQ ID NO: 96809 - RNA, 19 nt, Artificial Sequence
  Description of Artificial Sequence: Synthetic oligonucleotide
cuaaguccuguaguugucc

SEQ ID NO: 96810 - RNA, 19 nt, Artificial Sequence
  Description of Artificial Sequence: Synthetic oligonucleotide
agaagcaccuguuguaaua

SEQ ID NO: 96811 - RNA, 19 nt, Artificial Sequence
  Description of Artificial Sequence: Synthetic oligonucleotide
auagugagacauguccaag

SEQ ID NO: 96812 - RNA, 19 nt, Artificial Sequence
  Description of Artificial Sequence: Synthetic oligonucleotide
guuauauucugugcuucug

SEQ ID NO: 96813 - RNA, 19 nt, Artificial Sequence
  Description of Artificial Sequence: Synthetic oligonucleotide
acguaugccaaugggaagu

SEQ ID NO: 96814 - RNA, 19 nt, Artificial Sequence
  Description of Artificial Sequence: Synthetic oligonucleotide
cuuaugcucuuuugcauga

SEQ ID NO: 96815 - RNA, 19 nt, Artificial Sequence
  Description of Artificial Sequence: Synthetic oligonucleotide
gagacguaugccaauggga

SEQ ID NO: 96816 - RNA, 19 nt, Artificial Sequence
  Description of Artificial Sequence: Synthetic oligonucleotide
ggaaauacccaaaaucaga

SEQ ID NO: 96817 - RNA, 19 nt, Artificial Sequence
  Description of Artificial Sequence: Synthetic oligonucleotide
uaaugauuacucccucguu

SEQ ID NO: 96818 - RNA, 19 nt, Artificial Sequence
  Description of Artificial Sequence: Synthetic oligonucleotide
uguaguuguccggaagcga

SEQ ID NO: 96819 - RNA, 19 nt, Artificial Sequence
  Description of Artificial Sequence: Synthetic oligonucleotide
gauugugccgagacaugag

SEQ ID NO: 96820 - RNA, 19 nt, Artificial Sequence
  Description of Artificial Sequence: Synthetic oligonucleotide
uuccuuugggaaguuuacc

SEQ ID NO: 96821 - RNA, 19 nt, Artificial Sequence
  Description of Artificial Sequence: Synthetic oligonucleotide
caugagacguaugccaaug

SEQ ID NO: 96822 - RNA, 19 nt, Artificial Sequence
  Description of Artificial Sequence: Synthetic oligonucleotide
acugauauaugaagaaauu

SEQ ID NO: 96823 - RNA, 19 nt, Artificial Sequence
  Description of Artificial Sequence: Synthetic oligonucleotide
aaugggcaugcaugcugug

SEQ ID NO: 96824 - RNA, 19 nt, Artificial Sequence
  Description of Artificial Sequence: Synthetic oligonucleotide
cacaaucagacgaguucgc

SEQ ID NO: 96825 - RNA, 19 nt, Artificial Sequence
  Description of Artificial Sequence: Synthetic oligonucleotide
guaaccgccguguucuuga

SEQ ID NO: 96826 - RNA, 19 nt, Artificial Sequence
  Description of Artificial Sequence: Synthetic oligonucleotide
agacguaugccaaugggaa

SEQ ID NO: 96827 - RNA, 19 nt, Artificial Sequence
  Description of Artificial Sequence: Synthetic oligonucleotide
ggcauaaguugaaagacca

SEQ ID NO: 96828 - RNA, 19 nt, Artificial Sequence
  Description of Artificial Sequence: Synthetic oligonucleotide
caauggcagauugaguuuc

SEQ ID NO: 96829 - RNA, 19 nt, Artificial Sequence
  Description of Artificial Sequence: Synthetic oligonucleotide
uaaaaccccgagacuguau

SEQ ID NO: 96830 - RNA, 19 nt, Artificial Sequence
  Description of Artificial Sequence: Synthetic oligonucleotide
auuggagauucaauucucu

SEQ ID NO: 96831 - RNA, 19 nt, Artificial Sequence
  Description of Artificial Sequence: Synthetic oligonucleotide
gucgaaacugcuuccuauc

SEQ ID NO: 96832 - RNA, 19 nt, Artificial Sequence
  Description of Artificial Sequence: Synthetic oligonucleotide
acauaucuaagugaccaua

SEQ ID NO: 96833 - RNA, 19 nt, Artificial Sequence
  Description of Artificial Sequence: Synthetic oligonucleotide
gcuaaucuuucagaaguag

SEQ ID NO: 96834 - RNA, 19 nt, Artificial Sequence
  Description of Artificial Sequence: Synthetic oligonucleotide
aguagacuguaaccgccgu

SEQ ID NO: 96835 - RNA, 19 nt, Artificial Sequence
  Description of Artificial Sequence: Synthetic oligonucleotide
cugggaaauuuguggcacc

SEQ ID NO: 96836 - RNA, 19 nt, Artificial Sequence
  Description of Artificial Sequence: Synthetic oligonucleotide
aucuaaugccucugggaaa

SEQ ID NO: 96837 - RNA, 19 nt, Artificial Sequence
  Description of Artificial Sequence: Synthetic oligonucleotide
ucgacagggagaacaucuc

SEQ ID NO: 96838 - RNA, 19 nt, Artificial Sequence
  Description of Artificial Sequence: Synthetic oligonucleotide
ccuguaguuguccggaagc

SEQ ID NO: 96839 - RNA, 19 nt, Artificial Sequence
  Description of Artificial Sequence: Synthetic oligonucleotide
gacuguaaccgccguguuc

SEQ ID NO: 96840 - RNA, 19 nt, Artificial Sequence
  Description of Artificial Sequence: Synthetic oligonucleotide
gaccucacacgccagucga

SEQ ID NO: 96841 - RNA, 19 nt, Artificial Sequence
  Description of Artificial Sequence: Synthetic oligonucleotide
ucacaagauucuccagcuc

SEQ ID NO: 96842 - RNA, 19 nt, Artificial Sequence
  Description of Artificial Sequence: Synthetic oligonucleotide
aucgaacucugauccagau

SEQ ID NO: 96843 - RNA, 19 nt, Artificial Sequence
  Description of Artificial Sequence: Synthetic oligonucleotide
guuguccggaagcgaacag

SEQ ID NO: 96844 - RNA, 19 nt, Artificial Sequence
  Description of Artificial Sequence: Synthetic oligonucleotide
cucgacagggagaacaucu

SEQ ID NO: 96845 - RNA, 19 nt, Artificial Sequence
  Description of Artificial Sequence: Synthetic oligonucleotide
augccaaugggaaguaacu

SEQ ID NO: 96846 - RNA, 19 nt, Artificial Sequence
  Description of Artificial Sequence: Synthetic oligonucleotide
aaccccgagacuguaugaa

SEQ ID NO: 96847 - RNA, 19 nt, Artificial Sequence
  Description of Artificial Sequence: Synthetic oligonucleotide
guagauaaaggcacaauuu

SEQ ID NO: 96848 - RNA, 19 nt, Artificial Sequence
  Description of Artificial Sequence: Synthetic oligonucleotide
aguuguccggaagcgaaca

SEQ ID NO: 96849 - RNA, 19 nt, Artificial Sequence
  Description of Artificial Sequence: Synthetic oligonucleotide
gagaguuaucaucucacuu

SEQ ID NO: 96850 - RNA, 19 nt, Artificial Sequence
  Description of Artificial Sequence: Synthetic oligonucleotide
uuugugcaagcagcugggc

SEQ ID NO: 96851 - RNA, 19 nt, Artificial Sequence
  Description of Artificial Sequence: Synthetic oligonucleotide
uguaaccgccguguucuug

SEQ ID NO: 96852 - RNA, 19 nt, Artificial Sequence
  Description of Artificial Sequence: Synthetic oligonucleotide
agacuguaugaaaacugga

SEQ ID NO: 96853 - RNA, 19 nt, Artificial Sequence
  Description of Artificial Sequence: Synthetic oligonucleotide
cacucuauguucuaaugau

SEQ ID NO: 96854 - RNA, 19 nt, Artificial Sequence
  Description of Artificial Sequence: Synthetic oligonucleotide
guaguuguccggaagcgaa

SEQ ID NO: 96855 - RNA, 19 nt, Artificial Sequence
  Description of Artificial Sequence: Synthetic oligonucleotide
cugggagugucaugcucag

SEQ ID NO: 96856 - RNA, 19 nt, Artificial Sequence
  Description of Artificial Sequence: Synthetic oligonucleotide
augaucgguuccaaauaug

SEQ ID NO: 96857 - RNA, 19 nt, Artificial Sequence
  Description of Artificial Sequence: Synthetic oligonucleotide
cacacgccagucgaaacug

SEQ ID NO: 96858 - RNA, 19 nt, Artificial Sequence
  Description of Artificial Sequence: Synthetic oligonucleotide
cucguuggguuugaaacca

SEQ ID NO: 96859 - RNA, 19 nt, Artificial Sequence
  Description of Artificial Sequence: Synthetic oligonucleotide
ggaccucacacgccagucg

SEQ ID NO: 96860 - RNA, 19 nt, Artificial Sequence
  Description of Artificial Sequence: Synthetic oligonucleotide
aacgaccaggacguauuaa

SEQ ID NO: 96861 - RNA, 19 nt, Artificial Sequence
  Description of Artificial Sequence: Synthetic oligonucleotide
gagaugacugagaggaacu

SEQ ID NO: 96862 - RNA, 19 nt, Artificial Sequence
  Description of Artificial Sequence: Synthetic oligonucleotide
accaguagauaaaggcaca

SEQ ID NO: 96863 - RNA, 19 nt, Artificial Sequence
  Description of Artificial Sequence: Synthetic oligonucleotide
caagcuagaggaacguagu

SEQ ID NO: 96864 - RNA, 19 nt, Artificial Sequence
  Description of Artificial Sequence: Synthetic oligonucleotide
acacgccagucgaaacugc

SEQ ID NO: 96865 - RNA, 19 nt, Artificial Sequence
  Description of Artificial Sequence: Synthetic oligonucleotide
ugacucccguagaaggauu

SEQ ID NO: 96866 - RNA, 19 nt, Artificial Sequence
  Description of Artificial Sequence: Synthetic oligonucleotide
ggaaauuuguggcaccuau

SEQ ID NO: 96867 - RNA, 19 nt, Artificial Sequence
  Description of Artificial Sequence: Synthetic oligonucleotide
cucccgguuucuuccuuac

SEQ ID NO: 96868 - RNA, 19 nt, Artificial Sequence
  Description of Artificial Sequence: Synthetic oligonucleotide
ugggugccaucauggaaau

SEQ ID NO: 96869 - RNA, 19 nt, Artificial Sequence
  Description of Artificial Sequence: Synthetic oligonucleotide
cauguacuugcuauggguu

SEQ ID NO: 96870 - RNA, 19 nt, Artificial Sequence
  Description of Artificial Sequence: Synthetic oligonucleotide
ucucccgguuucuuccuua

SEQ ID NO: 96871 - RNA, 19 nt, Artificial Sequence
  Description of Artificial Sequence: Synthetic oligonucleotide
gaggaacguaguguacuga

SEQ ID NO: 96872 - RNA, 19 nt, Artificial Sequence
  Description of Artificial Sequence: Synthetic oligonucleotide
gcuauggguuacuaaucuc

SEQ ID NO: 96873 - RNA, 19 nt, Artificial Sequence
  Description of Artificial Sequence: Synthetic oligonucleotide
guauugacagaaacagcua

SEQ ID NO: 96874 - RNA, 19 nt, Artificial Sequence
  Description of Artificial Sequence: Synthetic oligonucleotide
acguaguguacugaacaua

SEQ ID NO: 96875 - RNA, 19 nt, Artificial Sequence
  Description of Artificial Sequence: Synthetic oligonucleotide
cacucauuccaaaucuggu

SEQ ID NO: 96876 - RNA, 19 nt, Artificial Sequence
  Description of Artificial Sequence: Synthetic oligonucleotide
caaugggugccaucaugga

SEQ ID NO: 96877 - RNA, 19 nt, Artificial Sequence
  Description of Artificial Sequence: Synthetic oligonucleotide
ggauugugccgagacauga

SEQ ID NO: 96878 - RNA, 19 nt, Artificial Sequence
  Description of Artificial Sequence: Synthetic oligonucleotide
ucguuggguuugaaaccau

SEQ ID NO: 96879 - RNA, 19 nt, Artificial Sequence
  Description of Artificial Sequence: Synthetic oligonucleotide
uggcaugauuguagcuuua

SEQ ID NO: 96880 - RNA, 19 nt, Artificial Sequence
  Description of Artificial Sequence: Synthetic oligonucleotide
guaguguacugaacauauc

SEQ ID NO: 96881 - RNA, 19 nt, Artificial Sequence
  Description of Artificial Sequence: Synthetic oligonucleotide
cucaucgaacucugaucca

SEQ ID NO: 96882 - RNA, 19 nt, Artificial Sequence
  Description of Artificial Sequence: Synthetic oligonucleotide
cccuuaaauuaaguacagg

SEQ ID NO: 96883 - RNA, 19 nt, Artificial Sequence
  Description of Artificial Sequence: Synthetic oligonucleotide
uggcaccuauaaugauuac

SEQ ID NO: 96884 - RNA, 19 nt, Artificial Sequence
  Description of Artificial Sequence: Synthetic oligonucleotide
uggucccauuagaauuuua

SEQ ID NO: 96885 - RNA, 19 nt, Artificial Sequence
  Description of Artificial Sequence: Synthetic oligonucleotide
ggaacguaguguacugaac

SEQ ID NO: 96886 - RNA, 19 nt, Artificial Sequence
  Description of Artificial Sequence: Synthetic oligonucleotide
ccauacuaacauccauuug

SEQ ID NO: 96887 - RNA, 19 nt, Artificial Sequence
  Description of Artificial Sequence: Synthetic oligonucleotide
ugccgagacaugagacgua

SEQ ID NO: 96888 - RNA, 19 nt, Artificial Sequence
  Description of Artificial Sequence: Synthetic oligonucleotide
agacuguaaccgccguguu

SEQ ID NO: 96889 - RNA, 19 nt, Artificial Sequence
  Description of Artificial Sequence: Synthetic oligonucleotide
gguguuauauucugugcuu

SEQ ID NO: 96890 - RNA, 19 nt, Artificial Sequence
  Description of Artificial Sequence: Synthetic oligonucleotide
cagugcucgacagggagaa

SEQ ID NO: 96891 - RNA, 19 nt, Artificial Sequence
  Description of Artificial Sequence: Synthetic oligonucleotide
gcauaaguugaaagaccac

SEQ ID NO: 96892 - RNA, 19 nt, Artificial Sequence
  Description of Artificial Sequence: Synthetic oligonucleotide
aucagacgaguucgccuua

SEQ ID NO: 96893 - RNA, 19 nt, Artificial Sequence
  Description of Artificial Sequence: Synthetic oligonucleotide
gugccgagacaugagacgu

SEQ ID NO: 96894 - RNA, 19 nt, Artificial Sequence
  Description of Artificial Sequence: Synthetic oligonucleotide
aggacguauuaaggcauua

SEQ ID NO: 96895 - RNA, 19 nt, Artificial Sequence
  Description of Artificial Sequence: Synthetic oligonucleotide
gacugcagggcuacuuaua

SEQ ID NO: 96896 - RNA, 19 nt, Artificial Sequence
  Description of Artificial Sequence: Synthetic oligonucleotide
ggucccauuagaauuuuau

SEQ ID NO: 96897 - RNA, 19 nt, Artificial Sequence
  Description of Artificial Sequence: Synthetic oligonucleotide
uaaccgccguguucuugau

SEQ ID NO: 96898 - RNA, 19 nt, Artificial Sequence
  Description of Artificial Sequence: Synthetic oligonucleotide
ucaaaacgaccaggacgua

SEQ ID NO: 96899 - RNA, 19 nt, Artificial Sequence
  Description of Artificial Sequence: Synthetic oligonucleotide
cuguuguaauaugaucggu

SEQ ID NO: 96900 - RNA, 19 nt, Artificial Sequence
  Description of Artificial Sequence: Synthetic oligonucleotide
caaaacgaccaggacguau

SEQ ID NO: 96901 - RNA, 19 nt, Artificial Sequence
  Description of Artificial Sequence: Synthetic oligonucleotide
cacgccagucgaaacugcu

SEQ ID NO: 96902 - RNA, 19 nt, Artificial Sequence
  Description of Artificial Sequence: Synthetic oligonucleotide
caacaacgcuucugcuaga

SEQ ID NO: 96903 - RNA, 19 nt, Artificial Sequence
  Description of Artificial Sequence: Synthetic oligonucleotide
cagucgaaacugcuuccua

SEQ ID NO: 96904 - RNA, 19 nt, Artificial Sequence
  Description of Artificial Sequence: Synthetic oligonucleotide
cucaggcaauagugagaca

SEQ ID NO: 96905 - RNA, 19 nt, Artificial Sequence
  Description of Artificial Sequence: Synthetic oligonucleotide
ccccgagacuguaugaaaa

SEQ ID NO: 96906 - RNA, 19 nt, Artificial Sequence
  Description of Artificial Sequence: Synthetic oligonucleotide
ggacuuaguguuccugaau

SEQ ID NO: 96907 - RNA, 19 nt, Artificial Sequence
  Description of Artificial Sequence: Synthetic oligonucleotide
acgccagucgaaacugcuu

SEQ ID NO: 96908 - RNA, 19 nt, Artificial Sequence
  Description of Artificial Sequence: Synthetic oligonucleotide
caguagauaaaggcacaau

SEQ ID NO: 96909 - RNA, 19 nt, Artificial Sequence
  Description of Artificial Sequence: Synthetic oligonucleotide
ccaguagauaaaggcacaa

SEQ ID NO: 96910 - RNA, 19 nt, Artificial Sequence
  Description of Artificial Sequence: Synthetic oligonucleotide
ccggaagcgaacagauaaa

SEQ ID NO: 96911 - RNA, 19 nt, Artificial Sequence
  Description of Artificial Sequence: Synthetic oligonucleotide
ggcaugauuguagcuuuau

SEQ ID NO: 96912 - RNA, 19 nt, Artificial Sequence
  Description of Artificial Sequence: Synthetic oligonucleotide
gccucgagcuaugauuucu

SEQ ID NO: 96913 - RNA, 19 nt, Artificial Sequence
  Description of Artificial Sequence: Synthetic oligonucleotide
gggaaauuuguggcaccua

SEQ ID NO: 96914 - RNA, 19 nt, Artificial Sequence
  Description of Artificial Sequence: Synthetic oligonucleotide
guccgaccccucacaucug

SEQ ID NO: 96915 - RNA, 19 nt, Artificial Sequence
  Description of Artificial Sequence: Synthetic oligonucleotide
cguucauaugacucccgua

SEQ ID NO: 96916 - RNA, 19 nt, Artificial Sequence
  Description of Artificial Sequence: Synthetic oligonucleotide
cccguagaaggauucuuau

SEQ ID NO: 96917 - RNA, 19 nt, Artificial Sequence
  Description of Artificial Sequence: Synthetic oligonucleotide
cugcagggcuacuuauauu

SEQ ID NO: 96918 - RNA, 19 nt, Artificial Sequence
  Description of Artificial Sequence: Synthetic oligonucleotide
cucccguagaaggauucuu

SEQ ID NO: 96919 - RNA, 19 nt, Artificial Sequence
  Description of Artificial Sequence: Synthetic oligonucleotide
cgaguucgccuuaaggaau

SEQ ID NO: 96920 - RNA, 19 nt, Artificial Sequence
  Description of Artificial Sequence: Synthetic oligonucleotide
cuguaaccgccguguucuu

SEQ ID NO: 96921 - RNA, 19 nt, Artificial Sequence
  Description of Artificial Sequence: Synthetic oligonucleotide
ccguggcaugauuguagcu

SEQ ID NO: 96922 - RNA, 19 nt, Artificial Sequence
  Description of Artificial Sequence: Synthetic oligonucleotide
cguaugccaaugggaagua

SEQ ID NO: 96923 - RNA, 19 nt, Artificial Sequence
  Description of Artificial Sequence: Synthetic oligonucleotide
aauugcaauaguuacauga

SEQ ID NO: 96924 - RNA, 19 nt, Artificial Sequence
  Description of Artificial Sequence: Synthetic oligonucleotide
aaaguugcuaacuugaaca

SEQ ID NO: 96925 - RNA, 19 nt, Artificial Sequence
  Description of Artificial Sequence: Synthetic oligonucleotide
aauugaugcauauucuacg

SEQ ID NO: 96926 - RNA, 19 nt, Artificial Sequence
  Description of Artificial Sequence: Synthetic oligonucleotide
aaauauguaaagauauggc

SEQ ID NO: 96927 - RNA, 19 nt, Artificial Sequence
  Description of Artificial Sequence: Synthetic oligonucleotide
cugauuacggcuaacaucc

SEQ ID NO: 96928 - RNA, 19 nt, Artificial Sequence
  Description of Artificial Sequence: Synthetic oligonucleotide
aaguucgugcauaagaucc

SEQ ID NO: 96929 - RNA, 19 nt, Artificial Sequence
  Description of Artificial Sequence: Synthetic oligonucleotide
auaagauccaaagagcugc

SEQ ID NO: 96930 - RNA, 19 nt, Artificial Sequence
  Description of Artificial Sequence: Synthetic oligonucleotide
aauuacuagcaacuaagag

SEQ ID NO: 96931 - RNA, 19 nt, Artificial Sequence
  Description of Artificial Sequence: Synthetic oligonucleotide
ugccagagaauauugagcg

SEQ ID NO: 96932 - RNA, 19 nt, Artificial Sequence
  Description of Artificial Sequence: Synthetic oligonucleotide
gacaguauuugauggaugg

SEQ ID NO: 96933 - RNA, 19 nt, Artificial Sequence
  Description of Artificial Sequence: Synthetic oligonucleotide
aauauugagcggucacucc

SEQ ID NO: 96934 - RNA, 19 nt, Artificial Sequence
  Description of Artificial Sequence: Synthetic oligonucleotide
aaacggucuaaguucgugc

SEQ ID NO: 96935 - RNA, 19 nt, Artificial Sequence
  Description of Artificial Sequence: Synthetic oligonucleotide
uuaaacagguucauucccg

SEQ ID NO: 96936 - RNA, 19 nt, Artificial Sequence
  Description of Artificial Sequence: Synthetic oligonucleotide
agcaacuaagaguugacac

SEQ ID NO: 96937 - RNA, 19 nt, Artificial Sequence
  Description of Artificial Sequence: Synthetic oligonucleotide
aaauugaugcauauucuac

SEQ ID NO: 96938 - RNA, 19 nt, Artificial Sequence
  Description of Artificial Sequence: Synthetic oligonucleotide
acgaaaacaagccacucac

SEQ ID NO: 96939 - RNA, 19 nt, Artificial Sequence
  Description of Artificial Sequence: Synthetic oligonucleotide
uuucuaaucagaauccacu

SEQ ID NO: 96940 - RNA, 19 nt, Artificial Sequence
  Description of Artificial Sequence: Synthetic oligonucleotide
gguuauagcguuuaaacag

SEQ ID NO: 96941 - RNA, 19 nt, Artificial Sequence
  Description of Artificial Sequence: Synthetic oligonucleotide
gugcauaagauccaaagag

SEQ ID NO: 96942 - RNA, 19 nt, Artificial Sequence
  Description of Artificial Sequence: Synthetic oligonucleotide
uugguuauagcguuuaaac

SEQ ID NO: 96943 - RNA, 19 nt, Artificial Sequence
  Description of Artificial Sequence: Synthetic oligonucleotide
uucaaacggucuaaguucg

SEQ ID NO: 96944 - RNA, 19 nt, Artificial Sequence
  Description of Artificial Sequence: Synthetic oligonucleotide
ucggugguaacugugaugg

SEQ ID NO: 96945 - RNA, 19 nt, Artificial Sequence
  Description of Artificial Sequence: Synthetic oligonucleotide
ugcauaagauccaaagagc

SEQ ID NO: 96946 - RNA, 19 nt, Artificial Sequence
  Description of Artificial Sequence: Synthetic oligonucleotide
aaaacagauucaaacgguc

SEQ ID NO: 96947 - RNA, 19 nt, Artificial Sequence
  Description of Artificial Sequence: Synthetic oligonucleotide
gugauguuaauuauggucc

SEQ ID NO: 96948 - RNA, 19 nt, Artificial Sequence
  Description of Artificial Sequence: Synthetic oligonucleotide
uucuucuucuucuucuugg

SEQ ID NO: 96949 - RNA, 19 nt, Artificial Sequence
  Description of Artificial Sequence: Synthetic oligonucleotide
aacggugacagaucacacg

SEQ ID NO: 96950 - RNA, 19 nt, Artificial Sequence
  Description of Artificial Sequence: Synthetic oligonucleotide
aaaacggugacagaucaca

SEQ ID NO: 96951 - RNA, 19 nt, Artificial Sequence
  Description of Artificial Sequence: Synthetic oligonucleotide
aguaauguaagacuaucaa

SEQ ID NO: 96952 - RNA, 19 nt, Artificial Sequence
  Description of Artificial Sequence: Synthetic oligonucleotide
ugcgaggagagcuuuacag

SEQ ID NO: 96953 - RNA, 19 nt, Artificial Sequence
  Description of Artificial Sequence: Synthetic oligonucleotide
ucgugcauaagauccaaag

SEQ ID NO: 96954 - RNA, 19 nt, Artificial Sequence
  Description of Artificial Sequence: Synthetic oligonucleotide
uuuccucgagaucacacag

SEQ ID NO: 96955 - RNA, 19 nt, Artificial Sequence
  Description of Artificial Sequence: Synthetic oligonucleotide
gguauuuucuaucccaggg

SEQ ID NO: 96956 - RNA, 19 nt, Artificial Sequence
  Description of Artificial Sequence: Synthetic oligonucleotide
uguaggauguauucuguug

SEQ ID NO: 96957 - RNA, 19 nt, Artificial Sequence
  Description of Artificial Sequence: Synthetic oligonucleotide
ugcacuauuaacaguuaca

SEQ ID NO: 96958 - RNA, 19 nt, Artificial Sequence
  Description of Artificial Sequence: Synthetic oligonucleotide
cuuaaaguugcuaacuuga

SEQ ID NO: 96959 - RNA, 19 nt, Artificial Sequence
  Description of Artificial Sequence: Synthetic oligonucleotide
gaugguauuuucuauccca

SEQ ID NO: 96960 - RNA, 19 nt, Artificial Sequence
  Description of Artificial Sequence: Synthetic oligonucleotide
aucgauauagggcugauua

SEQ ID NO: 96961 - RNA, 19 nt, Artificial Sequence
  Description of Artificial Sequence: Synthetic oligonucleotide
auuggcguuagcaucagcg

SEQ ID NO: 96962 - RNA, 19 nt, Artificial Sequence
  Description of Artificial Sequence: Synthetic oligonucleotide
ugaugcauauucuacgcac

SEQ ID NO: 96963 - RNA, 19 nt, Artificial Sequence
  Description of Artificial Sequence: Synthetic oligonucleotide
ucaaacauguuugguaaag

SEQ ID NO: 96964 - RNA, 19 nt, Artificial Sequence
  Description of Artificial Sequence: Synthetic oligonucleotide
agaagugguagacugagaa

SEQ ID NO: 96965 - RNA, 19 nt, Artificial Sequence
  Description of Artificial Sequence: Synthetic oligonucleotide
aaauucacguuucccgucu

SEQ ID NO: 96966 - RNA, 19 nt, Artificial Sequence
  Description of Artificial Sequence: Synthetic oligonucleotide
ucauaugcucaaaaguggu

SEQ ID NO: 96967 - RNA, 19 nt, Artificial Sequence
  Description of Artificial Sequence: Synthetic oligonucleotide
gauggaucaguaccauugg

SEQ ID NO: 96968 - RNA, 19 nt, Artificial Sequence
  Description of Artificial Sequence: Synthetic oligonucleotide
aauauaguuuaccuuucuu

SEQ ID NO: 96969 - RNA, 19 nt, Artificial Sequence
  Description of Artificial Sequence: Synthetic oligonucleotide
ucuaaucagaauccacucu

SEQ ID NO: 96970 - RNA, 19 nt, Artificial Sequence
  Description of Artificial Sequence: Synthetic oligonucleotide
uuagcguucgacuugguuu

SEQ ID NO: 96971 - RNA, 19 nt, Artificial Sequence
  Description of Artificial Sequence: Synthetic oligonucleotide
guuguaaguugcucggugg

SEQ ID NO: 96972 - RNA, 19 nt, Artificial Sequence
  Description of Artificial Sequence: Synthetic oligonucleotide
ugucguuucucucugugac

SEQ ID NO: 96973 - RNA, 19 nt, Artificial Sequence
  Description of Artificial Sequence: Synthetic oligonucleotide
aguuaaagcugucugacua

SEQ ID NO: 96974 - RNA, 19 nt, Artificial Sequence
  Description of Artificial Sequence: Synthetic oligonucleotide
ucacuagugcucauggucu

SEQ ID NO: 96975 - RNA, 19 nt, Artificial Sequence
  Description of Artificial Sequence: Synthetic oligonucleotide
agcacuuuaucacguuuac

SEQ ID NO: 96976 - RNA, 19 nt, Artificial Sequence
  Description of Artificial Sequence: Synthetic oligonucleotide
uagcguuuaaacagguuca

SEQ ID NO: 96977 - RNA, 19 nt, Artificial Sequence
  Description of Artificial Sequence: Synthetic oligonucleotide
cauuuagaugagaaucacc

SEQ ID NO: 96978 - RNA, 19 nt, Artificial Sequence
  Description of Artificial Sequence: Synthetic oligonucleotide
uccucgagaucacacagug

SEQ ID NO: 96979 - RNA, 19 nt, Artificial Sequence
  Description of Artificial Sequence: Synthetic oligonucleotide
augcacuauuaacaguuac

SEQ ID NO: 96980 - RNA, 19 nt, Artificial Sequence
  Description of Artificial Sequence: Synthetic oligonucleotide
aacagauucaaacggucua

SEQ ID NO: 96981 - RNA, 19 nt, Artificial Sequence
  Description of Artificial Sequence: Synthetic oligonucleotide
aacggucuaaguucgugca

SEQ ID NO: 96982 - RNA, 19 nt, Artificial Sequence
  Description of Artificial Sequence: Synthetic oligonucleotide
cuguaaacuaaaccaagac

SEQ ID NO: 96983 - RNA, 19 nt, Artificial Sequence
  Description of Artificial Sequence: Synthetic oligonucleotide
cucaccuguacucaucugc

SEQ ID NO: 96984 - RNA, 19 nt, Artificial Sequence
  Description of Artificial Sequence: Synthetic oligonucleotide
ugaguuacuucauuuuaaa

SEQ ID NO: 96985 - RNA, 19 nt, Artificial Sequence
  Description of Artificial Sequence: Synthetic oligonucleotide
auuacggcuaacaucccac

SEQ ID NO: 96986 - RNA, 19 nt, Artificial Sequence
  Description of Artificial Sequence: Synthetic oligonucleotide
uguuaauuaugguccuuug

SEQ ID NO: 96987 - RNA, 19 nt, Artificial Sequence
  Description of Artificial Sequence: Synthetic oligonucleotide
gaaauugaugcauauucua

SEQ ID NO: 96988 - RNA, 19 nt, Artificial Sequence
  Description of Artificial Sequence: Synthetic oligonucleotide
auauugagcggucacucca

SEQ ID NO: 96989 - RNA, 19 nt, Artificial Sequence
  Description of Artificial Sequence: Synthetic oligonucleotide
uuugcuuagcguucgacuu

SEQ ID NO: 96990 - RNA, 19 nt, Artificial Sequence
  Description of Artificial Sequence: Synthetic oligonucleotide
aguuguaaguugcucggug

SEQ ID NO: 96991 - RNA, 19 nt, Artificial Sequence
  Description of Artificial Sequence: Synthetic oligonucleotide
aaguugcuaacuugaacau

SEQ ID NO: 96992 - RNA, 19 nt, Artificial Sequence
  Description of Artificial Sequence: Synthetic oligonucleotide
acggugacagaucacacgu

SEQ ID NO: 96993 - RNA, 19 nt, Artificial Sequence
  Description of Artificial Sequence: Synthetic oligonucleotide
ugaugguauuuucuauccc

SEQ ID NO: 96994 - RNA, 19 nt, Artificial Sequence
  Description of Artificial Sequence: Synthetic oligonucleotide
aaguaauguaagacuauca

SEQ ID NO: 96995 - RNA, 19 nt, Artificial Sequence
  Description of Artificial Sequence: Synthetic oligonucleotide
aucagcggagucuggaguc

SEQ ID NO: 96996 - RNA, 19 nt, Artificial Sequence
  Description of Artificial Sequence: Synthetic oligonucleotide
uuauagcguuuaaacaggu

SEQ ID NO: 96997 - RNA, 19 nt, Artificial Sequence
  Description of Artificial Sequence: Synthetic oligonucleotide
guaggauguauucuguuga

SEQ ID NO: 96998 - RNA, 19 nt, Artificial Sequence
  Description of Artificial Sequence: Synthetic oligonucleotide
uuucuucuucuucuucuug

SEQ ID NO: 96999 - RNA, 19 nt, Artificial Sequence
  Description of Artificial Sequence: Synthetic oligonucleotide
cauuuaacccagaccauuc

SEQ ID NO: 97000 - RNA, 19 nt, Artificial Sequence
  Description of Artificial Sequence: Synthetic oligonucleotide
aguccgaccauuuggucug

SEQ ID NO: 97001 - RNA, 19 nt, Artificial Sequence
  Description of Artificial Sequence: Synthetic oligonucleotide
ugugagagaguugucuuca

SEQ ID NO: 97002 - RNA, 19 nt, Artificial Sequence
  Description of Artificial Sequence: Synthetic oligonucleotide
cacuuuaucacguuuacgu

SEQ ID NO: 97003 - RNA, 19 nt, Artificial Sequence
  Description of Artificial Sequence: Synthetic oligonucleotide
aggauguauucuguugacc

SEQ ID NO: 97004 - RNA, 19 nt, Artificial Sequence
  Description of Artificial Sequence: Synthetic oligonucleotide
accuguacucaucugcgag

SEQ ID NO: 97005 - RNA, 19 nt, Artificial Sequence
  Description of Artificial Sequence: Synthetic oligonucleotide
agcagcagcagcagcagcc

SEQ ID NO: 97006 - RNA, 19 nt, Artificial Sequence
  Description of Artificial Sequence: Synthetic oligonucleotide
gauucaaacggucuaaguu

SEQ ID NO: 97007 - RNA, 19 nt, Artificial Sequence
  Description of Artificial Sequence: Synthetic oligonucleotide
uaguccgaccauuuggucu

SEQ ID NO: 97008 - RNA, 19 nt, Artificial Sequence
  Description of Artificial Sequence: Synthetic oligonucleotide
gauaaggugacagauggcu

SEQ ID NO: 97009 - RNA, 19 nt, Artificial Sequence
  Description of Artificial Sequence: Synthetic oligonucleotide
acaauucacuaagugaugu

SEQ ID NO: 97010 - RNA, 19 nt, Artificial Sequence
  Description of Artificial Sequence: Synthetic oligonucleotide
ugauguuaauuaugguccu

SEQ ID NO: 97011 - RNA, 19 nt, Artificial Sequence
  Description of Artificial Sequence: Synthetic oligonucleotide
aaacggugacagaucacac

SEQ ID NO: 97012 - RNA, 19 nt, Artificial Sequence
  Description of Artificial Sequence: Synthetic oligonucleotide
uuaugguccuuugucaaac

SEQ ID NO: 97013 - RNA, 19 nt, Artificial Sequence
  Description of Artificial Sequence: Synthetic oligonucleotide
uaaguucgugcauaagauc

SEQ ID NO: 97014 - RNA, 19 nt, Artificial Sequence
  Description of Artificial Sequence: Synthetic oligonucleotide
uaaucagaauccacucuuc

SEQ ID NO: 97015 - RNA, 19 nt, Artificial Sequence
  Description of Artificial Sequence: Synthetic oligonucleotide
guuaaagcugucugacuac

SEQ ID NO: 97016 - RNA, 19 nt, Artificial Sequence
  Description of Artificial Sequence: Synthetic oligonucleotide
ugauaaggugacagauggc

SEQ ID NO: 97017 - RNA, 19 nt, Artificial Sequence
  Description of Artificial Sequence: Synthetic oligonucleotide
ugcuuagcguucgacuugg

SEQ ID NO: 97018 - RNA, 19 nt, Artificial Sequence
  Description of Artificial Sequence: Synthetic oligonucleotide
agauucaaacggucuaagu

SEQ ID NO: 97019 - RNA, 19 nt, Artificial Sequence
  Description of Artificial Sequence: Synthetic oligonucleotide
gcucgguagagauagcagg

SEQ ID NO: 97020 - RNA, 19 nt, Artificial Sequence
  Description of Artificial Sequence: Synthetic oligonucleotide
ggauggaucaguaccauug

SEQ ID NO: 97021 - RNA, 19 nt, Artificial Sequence
  Description of Artificial Sequence: Synthetic oligonucleotide
cuuguaacaucgguggcac

SEQ ID NO: 97022 - RNA, 19 nt, Artificial Sequence
  Description of Artificial Sequence: Synthetic oligonucleotide
acaucgguggcacuuggga

SEQ ID NO: 97023 - RNA, 19 nt, Artificial Sequence
  Description of Artificial Sequence: Synthetic oligonucleotide
ucgauauagggcugauuac

SEQ ID NO: 97024 - RNA, 19 nt, Artificial Sequence
  Description of Artificial Sequence: Synthetic oligonucleotide
auaguccgaccauuugguc

SEQ ID NO: 97025 - RNA, 19 nt, Artificial Sequence
  Description of Artificial Sequence: Synthetic oligonucleotide
uugcuuagcguucgacuug

SEQ ID NO: 97026 - RNA, 19 nt, Artificial Sequence
  Description of Artificial Sequence: Synthetic oligonucleotide
uccuagcugaaaauacuau

SEQ ID NO: 97027 - RNA, 19 nt, Artificial Sequence
  Description of Artificial Sequence: Synthetic oligonucleotide
gauuacggcuaacauccca

SEQ ID NO: 97028 - RNA, 19 nt, Artificial Sequence
  Description of Artificial Sequence: Synthetic oligonucleotide
uuuagaugagaaucaccuu

SEQ ID NO: 97029 - RNA, 19 nt, Artificial Sequence
  Description of Artificial Sequence: Synthetic oligonucleotide
guaaacagggaacugcugu

SEQ ID NO: 97030 - RNA, 19 nt, Artificial Sequence
  Description of Artificial Sequence: Synthetic oligonucleotide
aguuacagagcggccugcc

SEQ ID NO: 97031 - RNA, 19 nt, Artificial Sequence
  Description of Artificial Sequence: Synthetic oligonucleotide
gucauuagggauggguucc

SEQ ID NO: 97032 - RNA, 19 nt, Artificial Sequence
  Description of Artificial Sequence: Synthetic oligonucleotide
gaucacacgucauuuaaau

SEQ ID NO: 97033 - RNA, 19 nt, Artificial Sequence
  Description of Artificial Sequence: Synthetic oligonucleotide
uauuuguuacucagccuua

SEQ ID NO: 97034 - RNA, 19 nt, Artificial Sequence
  Description of Artificial Sequence: Synthetic oligonucleotide
agguauucaugggaaguuc

SEQ ID NO: 97035 - RNA, 19 nt, Artificial Sequence
  Description of Artificial Sequence: Synthetic oligonucleotide
cacaauugcaauaguuaca

SEQ ID NO: 97036 - RNA, 19 nt, Artificial Sequence
  Description of Artificial Sequence: Synthetic oligonucleotide
ugacagaucacacgucauu

SEQ ID NO: 97037 - RNA, 19 nt, Artificial Sequence
  Description of Artificial Sequence: Synthetic oligonucleotide
gcuguuaugcuucggggag

SEQ ID NO: 97038 - RNA, 19 nt, Artificial Sequence
  Description of Artificial Sequence: Synthetic oligonucleotide
aggagagcuuuacagacuu

SEQ ID NO: 97039 - RNA, 19 nt, Artificial Sequence
  Description of Artificial Sequence: Synthetic oligonucleotide
ucagcacuuuaucacguuu

SEQ ID NO: 97040 - RNA, 19 nt, Artificial Sequence
  Description of Artificial Sequence: Synthetic oligonucleotide
augguauuuucuaucccag

SEQ ID NO: 97041 - RNA, 19 nt, Artificial Sequence
  Description of Artificial Sequence: Synthetic oligonucleotide
uuuucuucuucuucuucuu

SEQ ID NO: 97042 - RNA, 19 nt, Artificial Sequence
  Description of Artificial Sequence: Synthetic oligonucleotide
auuaugguccuuugucaaa

SEQ ID NO: 97043 - RNA, 19 nt, Artificial Sequence
  Description of Artificial Sequence: Synthetic oligonucleotide
uaccauugguuauagcguu

SEQ ID NO: 97044 - RNA, 19 nt, Artificial Sequence
  Description of Artificial Sequence: Synthetic oligonucleotide
auugguuauagcguuuaaa

SEQ ID NO: 97045 - RNA, 19 nt, Artificial Sequence
  Description of Artificial Sequence: Synthetic oligonucleotide
cuguuuugcacugcuuuag

SEQ ID NO: 97046 - RNA, 19 nt, Artificial Sequence
  Description of Artificial Sequence: Synthetic oligonucleotide
gcugauuacggcuaacauc

SEQ ID NO: 97047 - RNA, 19 nt, Artificial Sequence
  Description of Artificial Sequence: Synthetic oligonucleotide
uugucagagucaccaugug

SEQ ID NO: 97048 - RNA, 19 nt, Artificial Sequence
  Description of Artificial Sequence: Synthetic oligonucleotide
uauagcguuuaaacagguu

SEQ ID NO: 97049 - RNA, 19 nt, Artificial Sequence
  Description of Artificial Sequence: Synthetic oligonucleotide
aagccauacguuugucaau

SEQ ID NO: 97050 - RNA, 19 nt, Artificial Sequence
  Description of Artificial Sequence: Synthetic oligonucleotide
ucugggucacuagugcuca

SEQ ID NO: 97051 - RNA, 19 nt, Artificial Sequence
  Description of Artificial Sequence: Synthetic oligonucleotide
acacgaaaacaagccacuc

SEQ ID NO: 97052 - RNA, 19 nt, Artificial Sequence
  Description of Artificial Sequence: Synthetic oligonucleotide
caucccacugauaaucaga

SEQ ID NO: 97053 - RNA, 19 nt, Artificial Sequence
  Description of Artificial Sequence: Synthetic oligonucleotide
uuggacgggcuuuggaggu

SEQ ID NO: 97054 - RNA, 19 nt, Artificial Sequence
  Description of Artificial Sequence: Synthetic oligonucleotide
uagcaacuaagaguugaca

SEQ ID NO: 97055 - RNA, 19 nt, Artificial Sequence
  Description of Artificial Sequence: Synthetic oligonucleotide
uagcguucgacuugguuuu

SEQ ID NO: 97056 - RNA, 19 nt, Artificial Sequence
  Description of Artificial Sequence: Synthetic oligonucleotide
uaucccagggauaguugaa

SEQ ID NO: 97057 - RNA, 19 nt, Artificial Sequence
  Description of Artificial Sequence: Synthetic oligonucleotide
ugacuacuuuuccauucuc

SEQ ID NO: 97058 - RNA, 19 nt, Artificial Sequence
  Description of Artificial Sequence: Synthetic oligonucleotide
uuacggcuaacaucccacu

SEQ ID NO: 97059 - RNA, 19 nt, Artificial Sequence
  Description of Artificial Sequence: Synthetic oligonucleotide
ucuacgcacuacagguuaa

SEQ ID NO: 97060 - RNA, 19 nt, Artificial Sequence
  Description of Artificial Sequence: Synthetic oligonucleotide
uuccucgagaucacacagu

SEQ ID NO: 97061 - RNA, 19 nt, Artificial Sequence
  Description of Artificial Sequence: Synthetic oligonucleotide
agagaauauugagcgguca

SEQ ID NO: 97062 - RNA, 19 nt, Artificial Sequence
  Description of Artificial Sequence: Synthetic oligonucleotide
auguuaauuaugguccuuu

SEQ ID NO: 97063 - RNA, 19 nt, Artificial Sequence
  Description of Artificial Sequence: Synthetic oligonucleotide
uuccugauaacuggagguc

SEQ ID NO: 97064 - RNA, 19 nt, Artificial Sequence
  Description of Artificial Sequence: Synthetic oligonucleotide
uggccaagcaugcacuauu

SEQ ID NO: 97065 - RNA, 19 nt, Artificial Sequence
  Description of Artificial Sequence: Synthetic oligonucleotide
ugauuacggcuaacauccc

SEQ ID NO: 97066 - RNA, 19 nt, Artificial Sequence
  Description of Artificial Sequence: Synthetic oligonucleotide
cacgaaaacaagccacuca

SEQ ID NO: 97067 - RNA, 19 nt, Artificial Sequence
  Description of Artificial Sequence: Synthetic oligonucleotide
uacguuguugucguuucuc

SEQ ID NO: 97068 - RNA, 19 nt, Artificial Sequence
  Description of Artificial Sequence: Synthetic oligonucleotide
acagauucaaacggucuaa

SEQ ID NO: 97069 - RNA, 19 nt, Artificial Sequence
  Description of Artificial Sequence: Synthetic oligonucleotide
uguuuugcuuagcguucga

SEQ ID NO: 97070 - RNA, 19 nt, Artificial Sequence
  Description of Artificial Sequence: Synthetic oligonucleotide
ucauucccggcgccacacg

SEQ ID NO: 97071 - RNA, 19 nt, Artificial Sequence
  Description of Artificial Sequence: Synthetic oligonucleotide
ugcucgucgcgccuccacc

SEQ ID NO: 97072 - RNA, 19 nt, Artificial Sequence
  Description of Artificial Sequence: Synthetic oligonucleotide
uggcucgguagagauagca

SEQ ID NO: 97073 - RNA, 19 nt, Artificial Sequence
  Description of Artificial Sequence: Synthetic oligonucleotide
uucggggaguucuaacaau

SEQ ID NO: 97074 - RNA, 19 nt, Artificial Sequence
  Description of Artificial Sequence: Synthetic oligonucleotide
cucggugguaacugugaug

SEQ ID NO: 97075 - RNA, 19 nt, Artificial Sequence
  Description of Artificial Sequence: Synthetic oligonucleotide
gucucgacaacaucaguua

SEQ ID NO: 97076 - RNA, 19 nt, Artificial Sequence
  Description of Artificial Sequence: Synthetic oligonucleotide
uacuagcaacuaagaguug

SEQ ID NO: 97077 - RNA, 19 nt, Artificial Sequence
  Description of Artificial Sequence: Synthetic oligonucleotide
ggucauuagggauggguuc

SEQ ID NO: 97078 - RNA, 19 nt, Artificial Sequence
  Description of Artificial Sequence: Synthetic oligonucleotide
ccaugugauaaggugacag

SEQ ID NO: 97079 - RNA, 19 nt, Artificial Sequence
  Description of Artificial Sequence: Synthetic oligonucleotide
ucaaacggucuaaguucgu

SEQ ID NO: 97080 - RNA, 19 nt, Artificial Sequence
  Description of Artificial Sequence: Synthetic oligonucleotide
uucgugcauaagauccaaa

SEQ ID NO: 97081 - RNA, 19 nt, Artificial Sequence
  Description of Artificial Sequence: Synthetic oligonucleotide
aaguugcucggugguaacu

SEQ ID NO: 97082 - RNA, 19 nt, Artificial Sequence
  Description of Artificial Sequence: Synthetic oligonucleotide
ccauacguuugucaauugc

SEQ ID NO: 97083 - RNA, 19 nt, Artificial Sequence
  Description of Artificial Sequence: Synthetic oligonucleotide
cauuuuauggugguugugu

SEQ ID NO: 97084 - RNA, 19 nt, Artificial Sequence
  Description of Artificial Sequence: Synthetic oligonucleotide
agucuuucccauuggcguu

SEQ ID NO: 97085 - RNA, 19 nt, Artificial Sequence
  Description of Artificial Sequence: Synthetic oligonucleotide
agcagcagcagcagcagca

SEQ ID NO: 97086 - RNA, 19 nt, Artificial Sequence
  Description of Artificial Sequence: Synthetic oligonucleotide
cagaucacacgucauuuaa

SEQ ID NO: 97087 - RNA, 19 nt, Artificial Sequence
  Description of Artificial Sequence: Synthetic oligonucleotide
agacaguauuugauggaug

SEQ ID NO: 97088 - RNA, 19 nt, Artificial Sequence
  Description of Artificial Sequence: Synthetic oligonucleotide
cacacgucauuuaaaucaa

SEQ ID NO: 97089 - RNA, 19 nt, Artificial Sequence
  Description of Artificial Sequence: Synthetic oligonucleotide
gaaaacggugacagaucac

SEQ ID NO: 97090 - RNA, 19 nt, Artificial Sequence
  Description of Artificial Sequence: Synthetic oligonucleotide
guaaguugcucggugguaa

SEQ ID NO: 97091 - RNA, 19 nt, Artificial Sequence
  Description of Artificial Sequence: Synthetic oligonucleotide
uucauucccggcgccacac

SEQ ID NO: 97092 - RNA, 19 nt, Artificial Sequence
  Description of Artificial Sequence: Synthetic oligonucleotide
gucagagucaccaugugau

SEQ ID NO: 97093 - RNA, 19 nt, Artificial Sequence
  Description of Artificial Sequence: Synthetic oligonucleotide
agccauacguuugucaauu

SEQ ID NO: 97094 - RNA, 19 nt, Artificial Sequence
  Description of Artificial Sequence: Synthetic oligonucleotide
ugggucacuagugcucaug

SEQ ID NO: 97095 - RNA, 19 nt, Artificial Sequence
  Description of Artificial Sequence: Synthetic oligonucleotide
ggcgugaacuguuuugcac

SEQ ID NO: 97096 - RNA, 19 nt, Artificial Sequence
  Description of Artificial Sequence: Synthetic oligonucleotide
ucagcggagucuggagucc

SEQ ID NO: 97097 - RNA, 19 nt, Artificial Sequence
  Description of Artificial Sequence: Synthetic oligonucleotide
uguuaugcuucggggaguu

SEQ ID NO: 97098 - RNA, 19 nt, Artificial Sequence
  Description of Artificial Sequence: Synthetic oligonucleotide
acgggcuuuggagguauuc

SEQ ID NO: 97099 - RNA, 19 nt, Artificial Sequence
  Description of Artificial Sequence: Synthetic oligonucleotide
gccagagaauauugagcgg

SEQ ID NO: 97100 - RNA, 19 nt, Artificial Sequence
  Description of Artificial Sequence: Synthetic oligonucleotide
ggcguuagcaucagcggag

SEQ ID NO: 97101 - RNA, 19 nt, Artificial Sequence
  Description of Artificial Sequence: Synthetic oligonucleotide
gcaacuaagaguugacacu

SEQ ID NO: 97102 - RNA, 19 nt, Artificial Sequence
  Description of Artificial Sequence: Synthetic oligonucleotide
guaccauugguuauagcgu

SEQ ID NO: 97103 - RNA, 19 nt, Artificial Sequence
  Description of Artificial Sequence: Synthetic oligonucleotide
uucccggcgccacacgaaa

SEQ ID NO: 97104 - RNA, 19 nt, Artificial Sequence
  Description of Artificial Sequence: Synthetic oligonucleotide
gacgacagccacucccgca

SEQ ID NO: 97105 - RNA, 19 nt, Artificial Sequence
  Description of Artificial Sequence: Synthetic oligonucleotide
gugguuguguucaguuuug

SEQ ID NO: 97106 - RNA, 19 nt, Artificial Sequence
  Description of Artificial Sequence: Synthetic oligonucleotide
gcuucggggaguucuaaca

SEQ ID NO: 97107 - RNA, 19 nt, Artificial Sequence
  Description of Artificial Sequence: Synthetic oligonucleotide
cuucggggaguucuaacaa

SEQ ID NO: 97108 - RNA, 19 nt, Artificial Sequence
  Description of Artificial Sequence: Synthetic oligonucleotide
uagggcugauuacggcuaa

SEQ ID NO: 97109 - RNA, 19 nt, Artificial Sequence
  Description of Artificial Sequence: Synthetic oligonucleotide
aggucucgacaacaucagu

SEQ ID NO: 97110 - RNA, 19 nt, Artificial Sequence
  Description of Artificial Sequence: Synthetic oligonucleotide
gagcagcagcagcagcagc

SEQ ID NO: 97111 - RNA, 19 nt, Artificial Sequence
  Description of Artificial Sequence: Synthetic oligonucleotide
cuguacucaucugcgagga

SEQ ID NO: 97112 - RNA, 19 nt, Artificial Sequence
  Description of Artificial Sequence: Synthetic oligonucleotide
agaucacacgucauuuaaa

SEQ ID NO: 97113 - RNA, 19 nt, Artificial Sequence
  Description of Artificial Sequence: Synthetic oligonucleotide
cagcacuuuaucacguuua

SEQ ID NO: 97114 - RNA, 19 nt, Artificial Sequence
  Description of Artificial Sequence: Synthetic oligonucleotide
cuagggaaaggaaaauauu

SEQ ID NO: 97115 - RNA, 19 nt, Artificial Sequence
  Description of Artificial Sequence: Synthetic oligonucleotide
acggucuaaguucgugcau

SEQ ID NO: 97116 - RNA, 19 nt, Artificial Sequence
  Description of Artificial Sequence: Synthetic oligonucleotide
auagggcugauuacggcua

SEQ ID NO: 97117 - RNA, 19 nt, Artificial Sequence
  Description of Artificial Sequence: Synthetic oligonucleotide
caucgguggcacuugggaa

SEQ ID NO: 97118 - RNA, 19 nt, Artificial Sequence
  Description of Artificial Sequence: Synthetic oligonucleotide
ccggacgacagccacuccc

SEQ ID NO: 97119 - RNA, 19 nt, Artificial Sequence
  Description of Artificial Sequence: Synthetic oligonucleotide
cucgucggcgcgccgggcc

SEQ ID NO: 97120 - RNA, 19 nt, Artificial Sequence
  Description of Artificial Sequence: Synthetic oligonucleotide
ucaucgauauagggcugau

SEQ ID NO: 97121 - RNA, 19 nt, Artificial Sequence
  Description of Artificial Sequence: Synthetic oligonucleotide
cugacuacuuuuccauucu

SEQ ID NO: 97122 - RNA, 19 nt, Artificial Sequence
  Description of Artificial Sequence: Synthetic oligonucleotide
ggcucgguagagauagcag

SEQ ID NO: 97123 - RNA, 19 nt, Artificial Sequence
  Description of Artificial Sequence: Synthetic oligonucleotide
ggugguaacugugauggua

SEQ ID NO: 97124 - RNA, 19 nt, Artificial Sequence
  Description of Artificial Sequence: Synthetic oligonucleotide
cacagugccugaaaacggu

SEQ ID NO: 97125 - RNA, 19 nt, Artificial Sequence
  Description of Artificial Sequence: Synthetic oligonucleotide
cagaccauucaucaucgau

SEQ ID NO: 97126 - RNA, 19 nt, Artificial Sequence
  Description of Artificial Sequence: Synthetic oligonucleotide
caguuacagagcggccugc

SEQ ID NO: 97127 - RNA, 19 nt, Artificial Sequence
  Description of Artificial Sequence: Synthetic oligonucleotide
cagcagcagcagcagcagc

SEQ ID NO: 97128 - RNA, 19 nt, Artificial Sequence
  Description of Artificial Sequence: Synthetic oligonucleotide
guucgugcauaagauccaa

SEQ ID NO: 97129 - RNA, 19 nt, Artificial Sequence
  Description of Artificial Sequence: Synthetic oligonucleotide
auucuacgcacuacagguu

SEQ ID NO: 97130 - RNA, 19 nt, Artificial Sequence
  Description of Artificial Sequence: Synthetic oligonucleotide
gguauucaugggaaguucu

SEQ ID NO: 97131 - RNA, 19 nt, Artificial Sequence
  Description of Artificial Sequence: Synthetic oligonucleotide
cgagccgagucccucgucg

SEQ ID NO: 97132 - RNA, 19 nt, Artificial Sequence
  Description of Artificial Sequence: Synthetic oligonucleotide
agacuuggucugcgaggga

SEQ ID NO: 97133 - RNA, 19 nt, Artificial Sequence
  Description of Artificial Sequence: Synthetic oligonucleotide
gcgccacacgaaaacaagc

SEQ ID NO: 97134 - RNA, 19 nt, Artificial Sequence
  Description of Artificial Sequence: Synthetic oligonucleotide
agguucauucccggcgcca

SEQ ID NO: 97135 - RNA, 19 nt, Artificial Sequence
  Description of Artificial Sequence: Synthetic oligonucleotide
cugggacuucagaagugaa

SEQ ID NO: 97136 - RNA, 19 nt, Artificial Sequence
  Description of Artificial Sequence: Synthetic oligonucleotide
cggacgacagccacucccg

SEQ ID NO: 97137 - RNA, 19 nt, Artificial Sequence
  Description of Artificial Sequence: Synthetic oligonucleotide
caccuguacucaucugcga

SEQ ID NO: 97138 - RNA, 19 nt, Artificial Sequence
  Description of Artificial Sequence: Synthetic oligonucleotide
gucguuucucucugugacu

SEQ ID NO: 97139 - RNA, 19 nt, Artificial Sequence
  Description of Artificial Sequence: Synthetic oligonucleotide
auggccaagcaugcacuau

SEQ ID NO: 97140 - RNA, 19 nt, Artificial Sequence
  Description of Artificial Sequence: Synthetic oligonucleotide
auauggcagauuacacauu

SEQ ID NO: 97141 - RNA, 19 nt, Artificial Sequence
  Description of Artificial Sequence: Synthetic oligonucleotide
ccucgagaucacacagugc

SEQ ID NO: 97142 - RNA, 19 nt, Artificial Sequence
  Description of Artificial Sequence: Synthetic oligonucleotide
caucagcggagucuggagu

SEQ ID NO: 97143 - RNA, 19 nt, Artificial Sequence
  Description of Artificial Sequence: Synthetic oligonucleotide
gauguuaauuaugguccuu

SEQ ID NO: 97144 - RNA, 19 nt, Artificial Sequence
  Description of Artificial Sequence: Synthetic oligonucleotide
gguucauucccggcgccac

SEQ ID NO: 97145 - RNA, 19 nt, Artificial Sequence
  Description of Artificial Sequence: Synthetic oligonucleotide
gccauacguuugucaauug

SEQ ID NO: 97146 - RNA, 19 nt, Artificial Sequence
  Description of Artificial Sequence: Synthetic oligonucleotide
cuacagguuaaggcaguaa

SEQ ID NO: 97147 - RNA, 19 nt, Artificial Sequence
  Description of Artificial Sequence: Synthetic oligonucleotide
accucccgcuugcgggccg

SEQ ID NO: 97148 - RNA, 19 nt, Artificial Sequence
  Description of Artificial Sequence: Synthetic oligonucleotide
gcagcagcagcagcagcag

SEQ ID NO: 97149 - RNA, 19 nt, Artificial Sequence
  Description of Artificial Sequence: Synthetic oligonucleotide
caauucacuaagugauguu

SEQ ID NO: 97150 - RNA, 19 nt, Artificial Sequence
  Description of Artificial Sequence: Synthetic oligonucleotide
gagucccucgucggcgcgc

SEQ ID NO: 97151 - RNA, 19 nt, Artificial Sequence
  Description of Artificial Sequence: Synthetic oligonucleotide
caucauggcgugaacuguu

SEQ ID NO: 97152 - RNA, 19 nt, Artificial Sequence
  Description of Artificial Sequence: Synthetic oligonucleotide
gggcugauuacggcuaaca

SEQ ID NO: 97153 - RNA, 19 nt, Artificial Sequence
  Description of Artificial Sequence: Synthetic oligonucleotide
cugcucgucgcgccuccac

SEQ ID NO: 97154 - RNA, 19 nt, Artificial Sequence
  Description of Artificial Sequence: Synthetic oligonucleotide
aucauggcgugaacuguuu

SEQ ID NO: 97155 - RNA, 19 nt, Artificial Sequence
  Description of Artificial Sequence: Synthetic oligonucleotide
ggucucgacaacaucaguu

SEQ ID NO: 97156 - RNA, 19 nt, Artificial Sequence
  Description of Artificial Sequence: Synthetic oligonucleotide
gcagcagcagcagcagccc

SEQ ID NO: 97157 - RNA, 19 nt, Artificial Sequence
  Description of Artificial Sequence: Synthetic oligonucleotide
accauugguuauagcguuu

SEQ ID NO: 97158 - RNA, 19 nt, Artificial Sequence
  Description of Artificial Sequence: Synthetic oligonucleotide
cuuagcguucgacuugguu

SEQ ID NO: 97159 - RNA, 19 nt, Artificial Sequence
  Description of Artificial Sequence: Synthetic oligonucleotide
cugcgaggagagcuuuaca

SEQ ID NO: 97160 - RNA, 19 nt, Artificial Sequence
  Description of Artificial Sequence: Synthetic oligonucleotide
agcccggguagcgcuucgg

SEQ ID NO: 97161 - RNA, 19 nt, Artificial Sequence
  Description of Artificial Sequence: Synthetic oligonucleotide
cccggcgccacacgaaaac

SEQ ID NO: 97162 - RNA, 19 nt, Artificial Sequence
  Description of Artificial Sequence: Synthetic oligonucleotide
gucuuucccauuggcguua

SEQ ID NO: 97163 - RNA, 19 nt, Artificial Sequence
  Description of Artificial Sequence: Synthetic oligonucleotide
agcguucgacuugguuuug

SEQ ID NO: 97164 - RNA, 19 nt, Artificial Sequence
  Description of Artificial Sequence: Synthetic oligonucleotide
ggcugauuacggcuaacau

SEQ ID NO: 97165 - RNA, 19 nt, Artificial Sequence
  Description of Artificial Sequence: Synthetic oligonucleotide
gcucaaaaguggugaguua

SEQ ID NO: 97166 - RNA, 19 nt, Artificial Sequence
  Description of Artificial Sequence: Synthetic oligonucleotide
auucccggcgccacacgaa

SEQ ID NO: 97167 - RNA, 19 nt, Artificial Sequence
  Description of Artificial Sequence: Synthetic oligonucleotide
ucugcucgucgcgccucca

SEQ ID NO: 97168 - RNA, 19 nt, Artificial Sequence
  Description of Artificial Sequence: Synthetic oligonucleotide
ggcggccuucuuucuaauc

SEQ ID NO: 97169 - RNA, 19 nt, Artificial Sequence
  Description of Artificial Sequence: Synthetic oligonucleotide
gcggagucuggaguccaag

SEQ ID NO: 97170 - RNA, 19 nt, Artificial Sequence
  Description of Artificial Sequence: Synthetic oligonucleotide
agcggccugccaguuuccu

SEQ ID NO: 97171 - RNA, 19 nt, Artificial Sequence
  Description of Artificial Sequence: Synthetic oligonucleotide
cuccauugauagcaagauu

SEQ ID NO: 97172 - RNA, 19 nt, Artificial Sequence
  Description of Artificial Sequence: Synthetic oligonucleotide
ggccggacgacagccacuc

SEQ ID NO: 97173 - RNA, 19 nt, Artificial Sequence
  Description of Artificial Sequence: Synthetic oligonucleotide
ggucuucagggaaaagccu

SEQ ID NO: 97174 - RNA, 19 nt, Artificial Sequence
  Description of Artificial Sequence: Synthetic oligonucleotide
agcggucacuccaguuccu

SEQ ID NO: 97175 - RNA, 19 nt, Artificial Sequence
  Description of Artificial Sequence: Synthetic oligonucleotide
cuguuaugcuucggggagu

SEQ ID NO: 97176 - RNA, 19 nt, Artificial Sequence
  Description of Artificial Sequence: Synthetic oligonucleotide
ggccaagcaugcacuauua

SEQ ID NO: 97177 - RNA, 19 nt, Artificial Sequence
  Description of Artificial Sequence: Synthetic oligonucleotide
ccauugguuauagcguuua

SEQ ID NO: 97178 - RNA, 19 nt, Artificial Sequence
  Description of Artificial Sequence: Synthetic oligonucleotide
cgagcagcagcagcagcag

SEQ ID NO: 97179 - RNA, 19 nt, Artificial Sequence
  Description of Artificial Sequence: Synthetic oligonucleotide
ccgcgaucacccagcccgg

SEQ ID NO: 97180 - RNA, 19 nt, Artificial Sequence
  Description of Artificial Sequence: Synthetic oligonucleotide
caguuguaaguugcucggu

SEQ ID NO: 97181 - RNA, 19 nt, Artificial Sequence
  Description of Artificial Sequence: Synthetic oligonucleotide
gcggccugccaguuuccuc

SEQ ID NO: 97182 - RNA, 19 nt, Artificial Sequence
  Description of Artificial Sequence: Synthetic oligonucleotide
cggugacagaucacacguc

SEQ ID NO: 97183 - RNA, 19 nt, Artificial Sequence
  Description of Artificial Sequence: Synthetic oligonucleotide
cguuagcaucagcggaguc

SEQ ID NO: 97184 - RNA, 19 nt, Artificial Sequence
  Description of Artificial Sequence: Synthetic oligonucleotide
gcgagggaggcacacuguu

SEQ ID NO: 97185 - RNA, 19 nt, Artificial Sequence
  Description of Artificial Sequence: Synthetic oligonucleotide
caucgauauagggcugauu

SEQ ID NO: 97186 - RNA, 19 nt, Artificial Sequence
  Description of Artificial Sequence: Synthetic oligonucleotide
gcgaucacccagcccgggu

SEQ ID NO: 97187 - RNA, 19 nt, Artificial Sequence
  Description of Artificial Sequence: Synthetic oligonucleotide
gccggacgacagccacucc

SEQ ID NO: 97188 - RNA, 19 nt, Artificial Sequence
  Description of Artificial Sequence: Synthetic oligonucleotide
cggucuaaguucgugcaua

SEQ ID NO: 97189 - RNA, 19 nt, Artificial Sequence
  Description of Artificial Sequence: Synthetic oligonucleotide
cggcgccacacgaaaacaa

SEQ ID NO: 97190 - RNA, 19 nt, Artificial Sequence
  Description of Artificial Sequence: Synthetic oligonucleotide
gcguuagcaucagcggagu

SEQ ID NO: 97191 - RNA, 19 nt, Artificial Sequence
  Description of Artificial Sequence: Synthetic oligonucleotide
cgaucacccagcccgggua

SEQ ID NO: 97192 - RNA, 19 nt, Artificial Sequence
  Description of Artificial Sequence: Synthetic oligonucleotide
ggcgagccgagucccucgu

SEQ ID NO: 97193 - RNA, 19 nt, Artificial Sequence
  Description of Artificial Sequence: Synthetic oligonucleotide
gcgagccgagucccucguc

SEQ ID NO: 97194 - RNA, 19 nt, Artificial Sequence
  Description of Artificial Sequence: Synthetic oligonucleotide
ggacgggcuuuggagguau

SEQ ID NO: 97195 - RNA, 19 nt, Artificial Sequence
  Description of Artificial Sequence: Synthetic oligonucleotide
gcguucgacuugguuuugu

SEQ ID NO: 97196 - RNA, 19 nt, Artificial Sequence
  Description of Artificial Sequence: Synthetic oligonucleotide
gcggucacuccaguuccuu

SEQ ID NO: 97197 - RNA, 19 nt, Artificial Sequence
  Description of Artificial Sequence: Synthetic oligonucleotide
cgagggaggcacacuguuu

SEQ ID NO: 97198 - RNA, 19 nt, Artificial Sequence
  Description of Artificial Sequence: Synthetic oligonucleotide
gcuuagcguucgacuuggu

SEQ ID NO: 97199 - RNA, 19 nt, Artificial Sequence
  Description of Artificial Sequence: Synthetic oligonucleotide
aacgaugcuacauuuaagc

SEQ ID NO: 97200 - RNA, 19 nt, Artificial Sequence
  Description of Artificial Sequence: Synthetic oligonucleotide
uauuguaacacaaagguug

SEQ ID NO: 97201 - RNA, 19 nt, Artificial Sequence
  Description of Artificial Sequence: Synthetic oligonucleotide
uuuauuaagcagcauauag

SEQ ID NO: 97202 - RNA, 19 nt, Artificial Sequence
  Description of Artificial Sequence: Synthetic oligonucleotide
aauaccaagcaucuacugc

SEQ ID NO: 97203 - RNA, 19 nt, Artificial Sequence
  Description of Artificial Sequence: Synthetic oligonucleotide
ucuacuucaguacagauga

SEQ ID NO: 97204 - RNA, 19 nt, Artificial Sequence
  Description of Artificial Sequence: Synthetic oligonucleotide
aauugauguaauaucaccc

SEQ ID NO: 97205 - RNA, 19 nt, Artificial Sequence
  Description of Artificial Sequence: Synthetic oligonucleotide
ugauaaauagacuucauau

SEQ ID NO: 97206 - RNA, 19 nt, Artificial Sequence
  Description of Artificial Sequence: Synthetic oligonucleotide
uauuaagcagcauauagga

SEQ ID NO: 97207 - RNA, 19 nt, Artificial Sequence
  Description of Artificial Sequence: Synthetic oligonucleotide
uaaacucucauucuggucu

SEQ ID NO: 97208 - RNA, 19 nt, Artificial Sequence
  Description of Artificial Sequence: Synthetic oligonucleotide
uuuacuguaaaguccgggg

SEQ ID NO: 97209 - RNA, 19 nt, Artificial Sequence
  Description of Artificial Sequence: Synthetic oligonucleotide
agccaaauuucauucaugc

SEQ ID NO: 97210 - RNA, 19 nt, Artificial Sequence
  Description of Artificial Sequence: Synthetic oligonucleotide
gauuauuggacaauacugg

SEQ ID NO: 97211 - RNA, 19 nt, Artificial Sequence
  Description of Artificial Sequence: Synthetic oligonucleotide
aaauauguaaccaccaaug

SEQ ID NO: 97212 - RNA, 19 nt, Artificial Sequence
  Description of Artificial Sequence: Synthetic oligonucleotide
gaguuuucuaacuagcacc

SEQ ID NO: 97213 - RNA, 19 nt, Artificial Sequence
  Description of Artificial Sequence: Synthetic oligonucleotide
aucacggcaagucaugacc

SEQ ID NO: 97214 - RNA, 19 nt, Artificial Sequence
  Description of Artificial Sequence: Synthetic oligonucleotide
uuuauauuaggagagggga

SEQ ID NO: 97215 - RNA, 19 nt, Artificial Sequence
  Description of Artificial Sequence: Synthetic oligonucleotide
ugauaguuuauugauauga

SEQ ID NO: 97216 - RNA, 19 nt, Artificial Sequence
  Description of Artificial Sequence: Synthetic oligonucleotide
auugauaguuuauugauau

SEQ ID NO: 97217 - RNA, 19 nt, Artificial Sequence
  Description of Artificial Sequence: Synthetic oligonucleotide
aauauguaaccaccaauga

SEQ ID NO: 97218 - RNA, 19 nt, Artificial Sequence
  Description of Artificial Sequence: Synthetic oligonucleotide
aaauguucacaucuggggu

SEQ ID NO: 97219 - RNA, 19 nt, Artificial Sequence
  Description of Artificial Sequence: Synthetic oligonucleotide
agauuaauaaccgugcuug

SEQ ID NO: 97220 - RNA, 19 nt, Artificial Sequence
  Description of Artificial Sequence: Synthetic oligonucleotide
uuucuaacuagcaccaaug

SEQ ID NO: 97221 - RNA, 19 nt, Artificial Sequence
  Description of Artificial Sequence: Synthetic oligonucleotide
ucaagcuuacuuuauuaag

SEQ ID NO: 97222 - RNA, 19 nt, Artificial Sequence
  Description of Artificial Sequence: Synthetic oligonucleotide
cuuauucaaggacaaaccc

SEQ ID NO: 97223 - RNA, 19 nt, Artificial Sequence
  Description of Artificial Sequence: Synthetic oligonucleotide
uauagcaggaaauggacgu

SEQ ID NO: 97224 - RNA, 19 nt, Artificial Sequence
  Description of Artificial Sequence: Synthetic oligonucleotide
ugaaccucuaaguuguaag

SEQ ID NO: 97225 - RNA, 19 nt, Artificial Sequence
  Description of Artificial Sequence: Synthetic oligonucleotide
uggaaucucgcaaugaagu

SEQ ID NO: 97226 - RNA, 19 nt, Artificial Sequence
  Description of Artificial Sequence: Synthetic oligonucleotide
uuccuauucacacccaacc

SEQ ID NO: 97227 - RNA, 19 nt, Artificial Sequence
  Description of Artificial Sequence: Synthetic oligonucleotide
uaguacuugaaccggagca

SEQ ID NO: 97228 - RNA, 19 nt, Artificial Sequence
  Description of Artificial Sequence: Synthetic oligonucleotide
acgaagccaaauuucauuc

SEQ ID NO: 97229 - RNA, 19 nt, Artificial Sequence
  Description of Artificial Sequence: Synthetic oligonucleotide
uguuagugcacauauuaac

SEQ ID NO: 97230 - RNA, 19 nt, Artificial Sequence
  Description of Artificial Sequence: Synthetic oligonucleotide
uagcagauuaauaaccgug

SEQ ID NO: 97231 - RNA, 19 nt, Artificial Sequence
  Description of Artificial Sequence: Synthetic oligonucleotide
ucucauuaucacaacgaag

SEQ ID NO: 97232 - RNA, 19 nt, Artificial Sequence
  Description of Artificial Sequence: Synthetic oligonucleotide
gacauggacgcucaguucc

SEQ ID NO: 97233 - RNA, 19 nt, Artificial Sequence
  Description of Artificial Sequence: Synthetic oligonucleotide
uaugcaauuccaauaaguu

SEQ ID NO: 97234 - RNA, 19 nt, Artificial Sequence
  Description of Artificial Sequence: Synthetic oligonucleotide
cuuauagcaggaaauggac

SEQ ID NO: 97235 - RNA, 19 nt, Artificial Sequence
  Description of Artificial Sequence: Synthetic oligonucleotide
ccaaauuucauucaugccc

SEQ ID NO: 97236 - RNA, 19 nt, Artificial Sequence
  Description of Artificial Sequence: Synthetic oligonucleotide
uugauaugauacugcaagg

SEQ ID NO: 97237 - RNA, 19 nt, Artificial Sequence
  Description of Artificial Sequence: Synthetic oligonucleotide
uuaagagagggcaucaaau

SEQ ID NO: 97238 - RNA, 19 nt, Artificial Sequence
  Description of Artificial Sequence: Synthetic oligonucleotide
agcacaacaacagaucaac

SEQ ID NO: 97239 - RNA, 19 nt, Artificial Sequence
  Description of Artificial Sequence: Synthetic oligonucleotide
ucauauagguuacacccug

SEQ ID NO: 97240 - RNA, 19 nt, Artificial Sequence
  Description of Artificial Sequence: Synthetic oligonucleotide
auuguuauggcuguggagu

SEQ ID NO: 97241 - RNA, 19 nt, Artificial Sequence
  Description of Artificial Sequence: Synthetic oligonucleotide
auaccaagcaucuacugca

SEQ ID NO: 97242 - RNA, 19 nt, Artificial Sequence
  Description of Artificial Sequence: Synthetic oligonucleotide
auuuuaggcagauagugaa

SEQ ID NO: 97243 - RNA, 19 nt, Artificial Sequence
  Description of Artificial Sequence: Synthetic oligonucleotide
accucuaaguuguaagaac

SEQ ID NO: 97244 - RNA, 19 nt, Artificial Sequence
  Description of Artificial Sequence: Synthetic oligonucleotide
uucaacaucaccccuccga

SEQ ID NO: 97245 - RNA, 19 nt, Artificial Sequence
  Description of Artificial Sequence: Synthetic oligonucleotide
uucgguauuccacagucca

SEQ ID NO: 97246 - RNA, 19 nt, Artificial Sequence
  Description of Artificial Sequence: Synthetic oligonucleotide
aauguucgguauuccacag

SEQ ID NO: 97247 - RNA, 19 nt, Artificial Sequence
  Description of Artificial Sequence: Synthetic oligonucleotide
aggacaaacccagucaagc

SEQ ID NO: 97248 - RNA, 19 nt, Artificial Sequence
  Description of Artificial Sequence: Synthetic oligonucleotide
ugauguuaccggcugacug

SEQ ID NO: 97249 - RNA, 19 nt, Artificial Sequence
  Description of Artificial Sequence: Synthetic oligonucleotide
agcagauuaauaaccgugc

SEQ ID NO: 97250 - RNA, 19 nt, Artificial Sequence
  Description of Artificial Sequence: Synthetic oligonucleotide
uuacuguaaaguccggggc

SEQ ID NO: 97251 - RNA, 19 nt, Artificial Sequence
  Description of Artificial Sequence: Synthetic oligonucleotide
ucguaaagcugauugauuc

SEQ ID NO: 97252 - RNA, 19 nt, Artificial Sequence
  Description of Artificial Sequence: Synthetic oligonucleotide
gaagcuaaucugcaggcug

SEQ ID NO: 97253 - RNA, 19 nt, Artificial Sequence
  Description of Artificial Sequence: Synthetic oligonucleotide
ugacugacagcaaguaucc

SEQ ID NO: 97254 - RNA, 19 nt, Artificial Sequence
  Description of Artificial Sequence: Synthetic oligonucleotide
acgguagcagauuaauaac

SEQ ID NO: 97255 - RNA, 19 nt, Artificial Sequence
  Description of Artificial Sequence: Synthetic oligonucleotide
uaauaaccgugcuuguuag

SEQ ID NO: 97256 - RNA, 19 nt, Artificial Sequence
  Description of Artificial Sequence: Synthetic oligonucleotide
uuuggcuagugucaaucag

SEQ ID NO: 97257 - RNA, 19 nt, Artificial Sequence
  Description of Artificial Sequence: Synthetic oligonucleotide
gauaacuugguaguagaug

SEQ ID NO: 97258 - RNA, 19 nt, Artificial Sequence
  Description of Artificial Sequence: Synthetic oligonucleotide
aaacuuuaauauagucagc

SEQ ID NO: 97259 - RNA, 19 nt, Artificial Sequence
  Description of Artificial Sequence: Synthetic oligonucleotide
uucuaacuagcaccaaugc

SEQ ID NO: 97260 - RNA, 19 nt, Artificial Sequence
  Description of Artificial Sequence: Synthetic oligonucleotide
uguaauacaguauggugua

SEQ ID NO: 97261 - RNA, 19 nt, Artificial Sequence
  Description of Artificial Sequence: Synthetic oligonucleotide
auagguuacacccuggaua

SEQ ID NO: 97262 - RNA, 19 nt, Artificial Sequence
  Description of Artificial Sequence: Synthetic oligonucleotide
ugaugccgaauucaggcag

SEQ ID NO: 97263 - RNA, 19 nt, Artificial Sequence
  Description of Artificial Sequence: Synthetic oligonucleotide
guacagaugaaggacaacc

SEQ ID NO: 97264 - RNA, 19 nt, Artificial Sequence
  Description of Artificial Sequence: Synthetic oligonucleotide
aacuuuacuucauauugua

SEQ ID NO: 97265 - RNA, 19 nt, Artificial Sequence
  Description of Artificial Sequence: Synthetic oligonucleotide
aauggacgugucuuugaag

SEQ ID NO: 97266 - RNA, 19 nt, Artificial Sequence
  Description of Artificial Sequence: Synthetic oligonucleotide
gacccgauuuuauauuagg

SEQ ID NO: 97267 - RNA, 19 nt, Artificial Sequence
  Description of Artificial Sequence: Synthetic oligonucleotide
uuucccgccuuccaaagug

SEQ ID NO: 97268 - RNA, 19 nt, Artificial Sequence
  Description of Artificial Sequence: Synthetic oligonucleotide
acacucaggauugaugucg

SEQ ID NO: 97269 - RNA, 19 nt, Artificial Sequence
  Description of Artificial Sequence: Synthetic oligonucleotide
uguaugcaauuccaauaag

SEQ ID NO: 97270 - RNA, 19 nt, Artificial Sequence
  Description of Artificial Sequence: Synthetic oligonucleotide
guuguaagaacugucugcc

SEQ ID NO: 97271 - RNA, 19 nt, Artificial Sequence
  Description of Artificial Sequence: Synthetic oligonucleotide
uucauguugcugaaccgcc

SEQ ID NO: 97272 - RNA, 19 nt, Artificial Sequence
  Description of Artificial Sequence: Synthetic oligonucleotide
ugaauacuaagaguguugu

SEQ ID NO: 97273 - RNA, 19 nt, Artificial Sequence
  Description of Artificial Sequence: Synthetic oligonucleotide
cuaaguuguaagaacuguc

SEQ ID NO: 97274 - RNA, 19 nt, Artificial Sequence
  Description of Artificial Sequence: Synthetic oligonucleotide
uuaaccggucugauaaggc

SEQ ID NO: 97275 - RNA, 19 nt, Artificial Sequence
  Description of Artificial Sequence: Synthetic oligonucleotide
uaagucuaccccuucuggc

SEQ ID NO: 97276 - RNA, 19 nt, Artificial Sequence
  Description of Artificial Sequence: Synthetic oligonucleotide
guaagucuaccccuucugg

SEQ ID NO: 97277 - RNA, 19 nt, Artificial Sequence
  Description of Artificial Sequence: Synthetic oligonucleotide
uccgaugugcaccuccccg

SEQ ID NO: 97278 - RNA, 19 nt, Artificial Sequence
  Description of Artificial Sequence: Synthetic oligonucleotide
ugcuuguuagugcacauau

SEQ ID NO: 97279 - RNA, 19 nt, Artificial Sequence
  Description of Artificial Sequence: Synthetic oligonucleotide
aaucucgcaaugaagugug

SEQ ID NO: 97280 - RNA, 19 nt, Artificial Sequence
  Description of Artificial Sequence: Synthetic oligonucleotide
ugcgucuuaagcagccacg

SEQ ID NO: 97281 - RNA, 19 nt, Artificial Sequence
  Description of Artificial Sequence: Synthetic oligonucleotide
gacuguaacagcgcaacag

SEQ ID NO: 97282 - RNA, 19 nt, Artificial Sequence
  Description of Artificial Sequence: Synthetic oligonucleotide
ggauuauuggacaauacug

SEQ ID NO: 97283 - RNA, 19 nt, Artificial Sequence
  Description of Artificial Sequence: Synthetic oligonucleotide
agucgagagaaauauguaa

SEQ ID NO: 97284 - RNA, 19 nt, Artificial Sequence
  Description of Artificial Sequence: Synthetic oligonucleotide
auauguaaccaccaaugaa

SEQ ID NO: 97285 - RNA, 19 nt, Artificial Sequence
  Description of Artificial Sequence: Synthetic oligonucleotide
auuaucacaacgaagccaa

SEQ ID NO: 97286 - RNA, 19 nt, Artificial Sequence
  Description of Artificial Sequence: Synthetic oligonucleotide
ucuaaguuguaagaacugu

SEQ ID NO: 97287 - RNA, 19 nt, Artificial Sequence
  Description of Artificial Sequence: Synthetic oligonucleotide
uuaucaagaagagcuugag

SEQ ID NO: 97288 - RNA, 19 nt, Artificial Sequence
  Description of Artificial Sequence: Synthetic oligonucleotide
gaauguucgguauuccaca

SEQ ID NO: 97289 - RNA, 19 nt, Artificial Sequence
  Description of Artificial Sequence: Synthetic oligonucleotide
ugcaaccggaauuaggagu

SEQ ID NO: 97290 - RNA, 19 nt, Artificial Sequence
  Description of Artificial Sequence: Synthetic oligonucleotide
gauacugcaaggcugcaaa

SEQ ID NO: 97291 - RNA, 19 nt, Artificial Sequence
  Description of Artificial Sequence: Synthetic oligonucleotide
uuuuggcccgaaauguuca

SEQ ID NO: 97292 - RNA, 19 nt, Artificial Sequence
  Description of Artificial Sequence: Synthetic oligonucleotide
cugauagcaucauacuuug

SEQ ID NO: 97293 - RNA, 19 nt, Artificial Sequence
  Description of Artificial Sequence: Synthetic oligonucleotide
acuguaacagcgcaacaga

SEQ ID NO: 97294 - RNA, 19 nt, Artificial Sequence
  Description of Artificial Sequence: Synthetic oligonucleotide
acccuggauaacuugguag

SEQ ID NO: 97295 - RNA, 19 nt, Artificial Sequence
  Description of Artificial Sequence: Synthetic oligonucleotide
auaaccgugcuuguuagug

SEQ ID NO: 97296 - RNA, 19 nt, Artificial Sequence
  Description of Artificial Sequence: Synthetic oligonucleotide
cugcucguaaagcugauug

SEQ ID NO: 97297 - RNA, 19 nt, Artificial Sequence
  Description of Artificial Sequence: Synthetic oligonucleotide
aaagugaucuccagaucag

SEQ ID NO: 97298 - RNA, 19 nt, Artificial Sequence
  Description of Artificial Sequence: Synthetic oligonucleotide
ucucggcucuuauagcagg

SEQ ID NO: 97299 - RNA, 19 nt, Artificial Sequence
  Description of Artificial Sequence: Synthetic oligonucleotide
gggugucuuauauugaaag

SEQ ID NO: 97300 - RNA, 19 nt, Artificial Sequence
  Description of Artificial Sequence: Synthetic oligonucleotide
gauguuaccggcugacuga

SEQ ID NO: 97301 - RNA, 19 nt, Artificial Sequence
  Description of Artificial Sequence: Synthetic oligonucleotide
uuguuagugcacauauuaa

SEQ ID NO: 97302 - RNA, 19 nt, Artificial Sequence
  Description of Artificial Sequence: Synthetic oligonucleotide
gguagcagauuaauaaccg

SEQ ID NO: 97303 - RNA, 19 nt, Artificial Sequence
  Description of Artificial Sequence: Synthetic oligonucleotide
uaaccggucugauaaggca

SEQ ID NO: 97304 - RNA, 19 nt, Artificial Sequence
  Description of Artificial Sequence: Synthetic oligonucleotide
ucgaggggauaccagacac

SEQ ID NO: 97305 - RNA, 19 nt, Artificial Sequence
  Description of Artificial Sequence: Synthetic oligonucleotide
aaaguccggggcuugagua

SEQ ID NO: 97306 - RNA, 19 nt, Artificial Sequence
  Description of Artificial Sequence: Synthetic oligonucleotide
acgcucaguucccacgucc

SEQ ID NO: 97307 - RNA, 19 nt, Artificial Sequence
  Description of Artificial Sequence: Synthetic oligonucleotide
ugauaagcgguccuuccaa

SEQ ID NO: 97308 - RNA, 19 nt, Artificial Sequence
  Description of Artificial Sequence: Synthetic oligonucleotide
cauauagguuacacccugg

SEQ ID NO: 97309 - RNA, 19 nt, Artificial Sequence
  Description of Artificial Sequence: Synthetic oligonucleotide
cacgguagcagauuaauaa

SEQ ID NO: 97310 - RNA, 19 nt, Artificial Sequence
  Description of Artificial Sequence: Synthetic oligonucleotide
caugagcaucguaaguggg

SEQ ID NO: 97311 - RNA, 19 nt, Artificial Sequence
  Description of Artificial Sequence: Synthetic oligonucleotide
uugauaguuuauugauaug

SEQ ID NO: 97312 - RNA, 19 nt, Artificial Sequence
  Description of Artificial Sequence: Synthetic oligonucleotide
gauccgggagugauaagcg

SEQ ID NO: 97313 - RNA, 19 nt, Artificial Sequence
  Description of Artificial Sequence: Synthetic oligonucleotide
auauagguuacacccugga

SEQ ID NO: 97314 - RNA, 19 nt, Artificial Sequence
  Description of Artificial Sequence: Synthetic oligonucleotide
aucacaacgaagccaaauu

SEQ ID NO: 97315 - RNA, 19 nt, Artificial Sequence
  Description of Artificial Sequence: Synthetic oligonucleotide
aucaacgucuuugucacug

SEQ ID NO: 97316 - RNA, 19 nt, Artificial Sequence
  Description of Artificial Sequence: Synthetic oligonucleotide
gucgagagaaauauguaac

SEQ ID NO: 97317 - RNA, 19 nt, Artificial Sequence
  Description of Artificial Sequence: Synthetic oligonucleotide
cauacugcaucacgguagc

SEQ ID NO: 97318 - RNA, 19 nt, Artificial Sequence
  Description of Artificial Sequence: Synthetic oligonucleotide
cuuuugcacgagucgagag

SEQ ID NO: 97319 - RNA, 19 nt, Artificial Sequence
  Description of Artificial Sequence: Synthetic oligonucleotide
uauagguuacacccuggau

SEQ ID NO: 97320 - RNA, 19 nt, Artificial Sequence
  Description of Artificial Sequence: Synthetic oligonucleotide
ugauagcaucauacuuugg

SEQ ID NO: 97321 - RNA, 19 nt, Artificial Sequence
  Description of Artificial Sequence: Synthetic oligonucleotide
uccgggagugauaagcggu

SEQ ID NO: 97322 - RNA, 19 nt, Artificial Sequence
  Description of Artificial Sequence: Synthetic oligonucleotide
uguuuugauggcgucuccc

SEQ ID NO: 97323 - RNA, 19 nt, Artificial Sequence
  Description of Artificial Sequence: Synthetic oligonucleotide
acaaccggaccucgucugc

SEQ ID NO: 97324 - RNA, 19 nt, Artificial Sequence
  Description of Artificial Sequence: Synthetic oligonucleotide
uggugaauacuaagagugu

SEQ ID NO: 97325 - RNA, 19 nt, Artificial Sequence
  Description of Artificial Sequence: Synthetic oligonucleotide
uucuggugauguuaccggc

SEQ ID NO: 97326 - RNA, 19 nt, Artificial Sequence
  Description of Artificial Sequence: Synthetic oligonucleotide
aggacaaccggaccucguc

SEQ ID NO: 97327 - RNA, 19 nt, Artificial Sequence
  Description of Artificial Sequence: Synthetic oligonucleotide
ucggucagagaaauucacu

SEQ ID NO: 97328 - RNA, 19 nt, Artificial Sequence
  Description of Artificial Sequence: Synthetic oligonucleotide
caaguucuggaauugaugu

SEQ ID NO: 97329 - RNA, 19 nt, Artificial Sequence
  Description of Artificial Sequence: Synthetic oligonucleotide
ccuuaucccguccagagcc

SEQ ID NO: 97330 - RNA, 19 nt, Artificial Sequence
  Description of Artificial Sequence: Synthetic oligonucleotide
gugaauacuaagaguguug

SEQ ID NO: 97331 - RNA, 19 nt, Artificial Sequence
  Description of Artificial Sequence: Synthetic oligonucleotide
aagcgguccuuccaauuca

SEQ ID NO: 97332 - RNA, 19 nt, Artificial Sequence
  Description of Artificial Sequence: Synthetic oligonucleotide
uaccaagcaucuacugcag

SEQ ID NO: 97333 - RNA, 19 nt, Artificial Sequence
  Description of Artificial Sequence: Synthetic oligonucleotide
uaaccgugcuuguuagugc

SEQ ID NO: 97334 - RNA, 19 nt, Artificial Sequence
  Description of Artificial Sequence: Synthetic oligonucleotide
auggauuauuggacaauac

SEQ ID NO: 97335 - RNA, 19 nt, Artificial Sequence
  Description of Artificial Sequence: Synthetic oligonucleotide
gauuggcuaccagaaguag

SEQ ID NO: 97336 - RNA, 19 nt, Artificial Sequence
  Description of Artificial Sequence: Synthetic oligonucleotide
agguguaccgcuggacucc

SEQ ID NO: 97337 - RNA, 19 nt, Artificial Sequence
  Description of Artificial Sequence: Synthetic oligonucleotide
aucaucgaauaccaagcau

SEQ ID NO: 97338 - RNA, 19 nt, Artificial Sequence
  Description of Artificial Sequence: Synthetic oligonucleotide
caacgaugcuacauuuaag

SEQ ID NO: 97339 - RNA, 19 nt, Artificial Sequence
  Description of Artificial Sequence: Synthetic oligonucleotide
guaguacuugaaccggagc

SEQ ID NO: 97340 - RNA, 19 nt, Artificial Sequence
  Description of Artificial Sequence: Synthetic oligonucleotide
acaauacugguaagucuac

SEQ ID NO: 97341 - RNA, 19 nt, Artificial Sequence
  Description of Artificial Sequence: Synthetic oligonucleotide
gacaaccggaccucgucug

SEQ ID NO: 97342 - RNA, 19 nt, Artificial Sequence
  Description of Artificial Sequence: Synthetic oligonucleotide
ucucgcaaugaagugugug

SEQ ID NO: 97343 - RNA, 19 nt, Artificial Sequence
  Description of Artificial Sequence: Synthetic oligonucleotide
auccgggagugauaagcgg

SEQ ID NO: 97344 - RNA, 19 nt, Artificial Sequence
  Description of Artificial Sequence: Synthetic oligonucleotide
ucacgguucagguccguga

SEQ ID NO: 97345 - RNA, 19 nt, Artificial Sequence
  Description of Artificial Sequence: Synthetic oligonucleotide
gcuuauucaaggacaaacc

SEQ ID NO: 97346 - RNA, 19 nt, Artificial Sequence
  Description of Artificial Sequence: Synthetic oligonucleotide
aguucccacgucccguccg

SEQ ID NO: 97347 - RNA, 19 nt, Artificial Sequence
  Description of Artificial Sequence: Synthetic oligonucleotide
cucgcaaugaaguguguga

SEQ ID NO: 97348 - RNA, 19 nt, Artificial Sequence
  Description of Artificial Sequence: Synthetic oligonucleotide
uacuaagaguguuguaaua

SEQ ID NO: 97349 - RNA, 19 nt, Artificial Sequence
  Description of Artificial Sequence: Synthetic oligonucleotide
uaucacaacgaagccaaau

SEQ ID NO: 97350 - RNA, 19 nt, Artificial Sequence
  Description of Artificial Sequence: Synthetic oligonucleotide
acacccaaccacuggugag

SEQ ID NO: 97351 - RNA, 19 nt, Artificial Sequence
  Description of Artificial Sequence: Synthetic oligonucleotide
cauuaucacaacgaagcca

SEQ ID NO: 97352 - RNA, 19 nt, Artificial Sequence
  Description of Artificial Sequence: Synthetic oligonucleotide
ugggguaacuucacauccu

SEQ ID NO: 97353 - RNA, 19 nt, Artificial Sequence
  Description of Artificial Sequence: Synthetic oligonucleotide
uccgaaucaaucuguugua

SEQ ID NO: 97354 - RNA, 19 nt, Artificial Sequence
  Description of Artificial Sequence: Synthetic oligonucleotide
aaggacaaacccagucaag

SEQ ID NO: 97355 - RNA, 19 nt, Artificial Sequence
  Description of Artificial Sequence: Synthetic oligonucleotide
gcacauauuaaccggucug

SEQ ID NO: 97356 - RNA, 19 nt, Artificial Sequence
  Description of Artificial Sequence: Synthetic oligonucleotide
cauacuuauccaaggucca

SEQ ID NO: 97357 - RNA, 19 nt, Artificial Sequence
  Description of Artificial Sequence: Synthetic oligonucleotide
cuuggaaucucgcaaugaa

SEQ ID NO: 97358 - RNA, 19 nt, Artificial Sequence
  Description of Artificial Sequence: Synthetic oligonucleotide
gacugauuggcuaccagaa

SEQ ID NO: 97359 - RNA, 19 nt, Artificial Sequence
  Description of Artificial Sequence: Synthetic oligonucleotide
ugcaaaugucagacacagc

SEQ ID NO: 97360 - RNA, 19 nt, Artificial Sequence
  Description of Artificial Sequence: Synthetic oligonucleotide
auacuuauccaagguccag

SEQ ID NO: 97361 - RNA, 19 nt, Artificial Sequence
  Description of Artificial Sequence: Synthetic oligonucleotide
accgcuggacuccucucgg

SEQ ID NO: 97362 - RNA, 19 nt, Artificial Sequence
  Description of Artificial Sequence: Synthetic oligonucleotide
uggcccgaaauguucacau

SEQ ID NO: 97363 - RNA, 19 nt, Artificial Sequence
  Description of Artificial Sequence: Synthetic oligonucleotide
uccgugacauggacgcuca

SEQ ID NO: 97364 - RNA, 19 nt, Artificial Sequence
  Description of Artificial Sequence: Synthetic oligonucleotide
ugugagcuaggaguuuucu

SEQ ID NO: 97365 - RNA, 19 nt, Artificial Sequence
  Description of Artificial Sequence: Synthetic oligonucleotide
ucacgguagcagauuaaua

SEQ ID NO: 97366 - RNA, 19 nt, Artificial Sequence
  Description of Artificial Sequence: Synthetic oligonucleotide
caacaugcuuauucaagga

SEQ ID NO: 97367 - RNA, 19 nt, Artificial Sequence
  Description of Artificial Sequence: Synthetic oligonucleotide
ggaauguucgguauuccac

SEQ ID NO: 97368 - RNA, 19 nt, Artificial Sequence
  Description of Artificial Sequence: Synthetic oligonucleotide
ggaguuuaauguuaaauuu

SEQ ID NO: 97369 - RNA, 19 nt, Artificial Sequence
  Description of Artificial Sequence: Synthetic oligonucleotide
ugggauuagcuggggaucu

SEQ ID NO: 97370 - RNA, 19 nt, Artificial Sequence
  Description of Artificial Sequence: Synthetic oligonucleotide
gaaucucgcaaugaagugu

SEQ ID NO: 97371 - RNA, 19 nt, Artificial Sequence
  Description of Artificial Sequence: Synthetic oligonucleotide
aucgaggggauaccagaca

SEQ ID NO: 97372 - RNA, 19 nt, Artificial Sequence
  Description of Artificial Sequence: Synthetic oligonucleotide
acauggacgcucaguuccc

SEQ ID NO: 97373 - RNA, 19 nt, Artificial Sequence
  Description of Artificial Sequence: Synthetic oligonucleotide
gucccguccgcguagcagc

SEQ ID NO: 97374 - RNA, 19 nt, Artificial Sequence
  Description of Artificial Sequence: Synthetic oligonucleotide
uuuggcccgaaauguucac

SEQ ID NO: 97375 - RNA, 19 nt, Artificial Sequence
  Description of Artificial Sequence: Synthetic oligonucleotide
ucauggauuauuggacaau

SEQ ID NO: 97376 - RNA, 19 nt, Artificial Sequence
  Description of Artificial Sequence: Synthetic oligonucleotide
ugucgguugugaucuguuc

SEQ ID NO: 97377 - RNA, 19 nt, Artificial Sequence
  Description of Artificial Sequence: Synthetic oligonucleotide
aucacgguagcagauuaau

SEQ ID NO: 97378 - RNA, 19 nt, Artificial Sequence
  Description of Artificial Sequence: Synthetic oligonucleotide
caucaucgaauaccaagca

SEQ ID NO: 97379 - RNA, 19 nt, Artificial Sequence
  Description of Artificial Sequence: Synthetic oligonucleotide
aggaaauggacgugucuuu

SEQ ID NO: 97380 - RNA, 19 nt, Artificial Sequence
  Description of Artificial Sequence: Synthetic oligonucleotide
ugacaucacgguucagguc

SEQ ID NO: 97381 - RNA, 19 nt, Artificial Sequence
  Description of Artificial Sequence: Synthetic oligonucleotide
acccgauuuuauauuagga

SEQ ID NO: 97382 - RNA, 19 nt, Artificial Sequence
  Description of Artificial Sequence: Synthetic oligonucleotide
cacauauuaaccggucuga

SEQ ID NO: 97383 - RNA, 19 nt, Artificial Sequence
  Description of Artificial Sequence: Synthetic oligonucleotide
ccgaaauguucacaucugg

SEQ ID NO: 97384 - RNA, 19 nt, Artificial Sequence
  Description of Artificial Sequence: Synthetic oligonucleotide
cuggcguccauccgaauca

SEQ ID NO: 97385 - RNA, 19 nt, Artificial Sequence
  Description of Artificial Sequence: Synthetic oligonucleotide
acggcaagucaugaccauc

SEQ ID NO: 97386 - RNA, 19 nt, Artificial Sequence
  Description of Artificial Sequence: Synthetic oligonucleotide
caucacggcaagucaugac

SEQ ID NO: 97387 - RNA, 19 nt, Artificial Sequence
  Description of Artificial Sequence: Synthetic oligonucleotide
cagcgcaacagaccagagc

SEQ ID NO: 97388 - RNA, 19 nt, Artificial Sequence
  Description of Artificial Sequence: Synthetic oligonucleotide
gugugaugccgaauucagg

SEQ ID NO: 97389 - RNA, 19 nt, Artificial Sequence
  Description of Artificial Sequence: Synthetic oligonucleotide
ggacugauuggcuaccaga

SEQ ID NO: 97390 - RNA, 19 nt, Artificial Sequence
  Description of Artificial Sequence: Synthetic oligonucleotide
uugugagcuaggaguuuuc

SEQ ID NO: 97391 - RNA, 19 nt, Artificial Sequence
  Description of Artificial Sequence: Synthetic oligonucleotide
ccaucaugagcaucguaag

SEQ ID NO: 97392 - RNA, 19 nt, Artificial Sequence
  Description of Artificial Sequence: Synthetic oligonucleotide
agacccgauuuuauauuag

SEQ ID NO: 97393 - RNA, 19 nt, Artificial Sequence
  Description of Artificial Sequence: Synthetic oligonucleotide
auuaagcagcauauaggaa

SEQ ID NO: 97394 - RNA, 19 nt, Artificial Sequence
  Description of Artificial Sequence: Synthetic oligonucleotide
uagguaucgaggggauacc

SEQ ID NO: 97395 - RNA, 19 nt, Artificial Sequence
  Description of Artificial Sequence: Synthetic oligonucleotide
agguccagugcgucuuaag

SEQ ID NO: 97396 - RNA, 19 nt, Artificial Sequence
  Description of Artificial Sequence: Synthetic oligonucleotide
ggcacugucaccaaaccaa

SEQ ID NO: 97397 - RNA, 19 nt, Artificial Sequence
  Description of Artificial Sequence: Synthetic oligonucleotide
guagcagauuaauaaccgu

SEQ ID NO: 97398 - RNA, 19 nt, Artificial Sequence
  Description of Artificial Sequence: Synthetic oligonucleotide
acauauuaaccggucugau

SEQ ID NO: 97399 - RNA, 19 nt, Artificial Sequence
  Description of Artificial Sequence: Synthetic oligonucleotide
ggaaauggacgugucuuug

SEQ ID NO: 97400 - RNA, 19 nt, Artificial Sequence
  Description of Artificial Sequence: Synthetic oligonucleotide
ugauacugcaaggcugcaa

SEQ ID NO: 97401 - RNA, 19 nt, Artificial Sequence
  Description of Artificial Sequence: Synthetic oligonucleotide
cauggauuauuggacaaua

SEQ ID NO: 97402 - RNA, 19 nt, Artificial Sequence
  Description of Artificial Sequence: Synthetic oligonucleotide
uuaucacaacgaagccaaa

SEQ ID NO: 97403 - RNA, 19 nt, Artificial Sequence
  Description of Artificial Sequence: Synthetic oligonucleotide
ggacaaacccagucaagca

SEQ ID NO: 97404 - RNA, 19 nt, Artificial Sequence
  Description of Artificial Sequence: Synthetic oligonucleotide
uaucccgggauugccuucu

SEQ ID NO: 97405 - RNA, 19 nt, Artificial Sequence
  Description of Artificial Sequence: Synthetic oligonucleotide
uccuuccgugcuccucccg

SEQ ID NO: 97406 - RNA, 19 nt, Artificial Sequence
  Description of Artificial Sequence: Synthetic oligonucleotide
caucaccccuccgaugugc

SEQ ID NO: 97407 - RNA, 19 nt, Artificial Sequence
  Description of Artificial Sequence: Synthetic oligonucleotide
cugggauuagcuggggauc

SEQ ID NO: 97408 - RNA, 19 nt, Artificial Sequence
  Description of Artificial Sequence: Synthetic oligonucleotide
gugugugaugccgaauuca

SEQ ID NO: 97409 - RNA, 19 nt, Artificial Sequence
  Description of Artificial Sequence: Synthetic oligonucleotide
uuggcccgaaauguucaca

SEQ ID NO: 97410 - RNA, 19 nt, Artificial Sequence
  Description of Artificial Sequence: Synthetic oligonucleotide
uuccugauccgggagugau

SEQ ID NO: 97411 - RNA, 19 nt, Artificial Sequence
  Description of Artificial Sequence: Synthetic oligonucleotide
aaccggaauuaggaguuua

SEQ ID NO: 97412 - RNA, 19 nt, Artificial Sequence
  Description of Artificial Sequence: Synthetic oligonucleotide
gguaucgaggggauaccag

SEQ ID NO: 97413 - RNA, 19 nt, Artificial Sequence
  Description of Artificial Sequence: Synthetic oligonucleotide
cagacccgauuuuauauua

SEQ ID NO: 97414 - RNA, 19 nt, Artificial Sequence
  Description of Artificial Sequence: Synthetic oligonucleotide
uguuaccggcugacugaca

SEQ ID NO: 97415 - RNA, 19 nt, Artificial Sequence
  Description of Artificial Sequence: Synthetic oligonucleotide
agguaucgaggggauacca

SEQ ID NO: 97416 - RNA, 19 nt, Artificial Sequence
  Description of Artificial Sequence: Synthetic oligonucleotide
gagucgagagaaauaugua

SEQ ID NO: 97417 - RNA, 19 nt, Artificial Sequence
  Description of Artificial Sequence: Synthetic oligonucleotide
cacccagaauuguugaugu

SEQ ID NO: 97418 - RNA, 19 nt, Artificial Sequence
  Description of Artificial Sequence: Synthetic oligonucleotide
augccgaauucaggcagag

SEQ ID NO: 97419 - RNA, 19 nt, Artificial Sequence
  Description of Artificial Sequence: Synthetic oligonucleotide
ugccgccuuggaaucucgc

SEQ ID NO: 97420 - RNA, 19 nt, Artificial Sequence
  Description of Artificial Sequence: Synthetic oligonucleotide
ucccgggauugccuucuga

SEQ ID NO: 97421 - RNA, 19 nt, Artificial Sequence
  Description of Artificial Sequence: Synthetic oligonucleotide
acugcagacccgauuuuau

SEQ ID NO: 97422 - RNA, 19 nt, Artificial Sequence
  Description of Artificial Sequence: Synthetic oligonucleotide
cccaguugacauuccacug

SEQ ID NO: 97423 - RNA, 19 nt, Artificial Sequence
  Description of Artificial Sequence: Synthetic oligonucleotide
aaggacaaccggaccucgu

SEQ ID NO: 97424 - RNA, 19 nt, Artificial Sequence
  Description of Artificial Sequence: Synthetic oligonucleotide
acaucacgguucagguccg

SEQ ID NO: 97425 - RNA, 19 nt, Artificial Sequence
  Description of Artificial Sequence: Synthetic oligonucleotide
ccgaugugcaccuccccgg

SEQ ID NO: 97426 - RNA, 19 nt, Artificial Sequence
  Description of Artificial Sequence: Synthetic oligonucleotide
gcuaggaguuuucuaacua

SEQ ID NO: 97427 - RNA, 19 nt, Artificial Sequence
  Description of Artificial Sequence: Synthetic oligonucleotide
uccgcguagcagccaucug

SEQ ID NO: 97428 - RNA, 19 nt, Artificial Sequence
  Description of Artificial Sequence: Synthetic oligonucleotide
gugagcuaggaguuuucua

SEQ ID NO: 97429 - RNA, 19 nt, Artificial Sequence
  Description of Artificial Sequence: Synthetic oligonucleotide
gcuggcguccauccgaauc

SEQ ID NO: 97430 - RNA, 19 nt, Artificial Sequence
  Description of Artificial Sequence: Synthetic oligonucleotide
cuuaagcagccacguucuc

SEQ ID NO: 97431 - RNA, 19 nt, Artificial Sequence
  Description of Artificial Sequence: Synthetic oligonucleotide
cacgagucgagagaaauau

SEQ ID NO: 97432 - RNA, 19 nt, Artificial Sequence
  Description of Artificial Sequence: Synthetic oligonucleotide
acgagucgagagaaauaug

SEQ ID NO: 97433 - RNA, 19 nt, Artificial Sequence
  Description of Artificial Sequence: Synthetic oligonucleotide
ucggcucuuauagcaggaa

SEQ ID NO: 97434 - RNA, 19 nt, Artificial Sequence
  Description of Artificial Sequence: Synthetic oligonucleotide
cucggcucuuauagcagga

SEQ ID NO: 97435 - RNA, 19 nt, Artificial Sequence
  Description of Artificial Sequence: Synthetic oligonucleotide
gcaucuacugcagacccga

SEQ ID NO: 97436 - RNA, 19 nt, Artificial Sequence
  Description of Artificial Sequence: Synthetic oligonucleotide
accggaauuaggaguuuaa

SEQ ID NO: 97437 - RNA, 19 nt, Artificial Sequence
  Description of Artificial Sequence: Synthetic oligonucleotide
agguuacacccuggauaac

SEQ ID NO: 97438 - RNA, 19 nt, Artificial Sequence
  Description of Artificial Sequence: Synthetic oligonucleotide
ucuugccgccuuggaaucu

SEQ ID NO: 97439 - RNA, 19 nt, Artificial Sequence
  Description of Artificial Sequence: Synthetic oligonucleotide
uuaucccguccagagccau

SEQ ID NO: 97440 - RNA, 19 nt, Artificial Sequence
  Description of Artificial Sequence: Synthetic oligonucleotide
acacccuggauaacuuggu

SEQ ID NO: 97441 - RNA, 19 nt, Artificial Sequence
  Description of Artificial Sequence: Synthetic oligonucleotide
gguuacacccuggauaacu

SEQ ID NO: 97442 - RNA, 19 nt, Artificial Sequence
  Description of Artificial Sequence: Synthetic oligonucleotide
cagauuaauaaccgugcuu

SEQ ID NO: 97443 - RNA, 19 nt, Artificial Sequence
  Description of Artificial Sequence: Synthetic oligonucleotide
agggugucuuauauugaaa

SEQ ID NO: 97444 - RNA, 19 nt, Artificial Sequence
  Description of Artificial Sequence: Synthetic oligonucleotide
agugcgucuuaagcagcca

SEQ ID NO: 97445 - RNA, 19 nt, Artificial Sequence
  Description of Artificial Sequence: Synthetic oligonucleotide
cugauccgggagugauaag

SEQ ID NO: 97446 - RNA, 19 nt, Artificial Sequence
  Description of Artificial Sequence: Synthetic oligonucleotide
uucccacgucccguccgcg

SEQ ID NO: 97447 - RNA, 19 nt, Artificial Sequence
  Description of Artificial Sequence: Synthetic oligonucleotide
guaucccgggauugccuuc

SEQ ID NO: 97448 - RNA, 19 nt, Artificial Sequence
  Description of Artificial Sequence: Synthetic oligonucleotide
cauccuuaucccguccaga

SEQ ID NO: 97449 - RNA, 19 nt, Artificial Sequence
  Description of Artificial Sequence: Synthetic oligonucleotide
gcagauuaauaaccgugcu

SEQ ID NO: 97450 - RNA, 19 nt, Artificial Sequence
  Description of Artificial Sequence: Synthetic oligonucleotide
gacgcucaguucccacguc

SEQ ID NO: 97451 - RNA, 19 nt, Artificial Sequence
  Description of Artificial Sequence: Synthetic oligonucleotide
caucacgguagcagauuaa

SEQ ID NO: 97452 - RNA, 19 nt, Artificial Sequence
  Description of Artificial Sequence: Synthetic oligonucleotide
cuuuagguaucgaggggau

SEQ ID NO: 97453 - RNA, 19 nt, Artificial Sequence
  Description of Artificial Sequence: Synthetic oligonucleotide
ccuuccgugcuccucccgc

SEQ ID NO: 97454 - RNA, 19 nt, Artificial Sequence
  Description of Artificial Sequence: Synthetic oligonucleotide
ugccgaauucaggcagaga

SEQ ID NO: 97455 - RNA, 19 nt, Artificial Sequence
  Description of Artificial Sequence: Synthetic oligonucleotide
aggucaugauugauaguuu

SEQ ID NO: 97456 - RNA, 19 nt, Artificial Sequence
  Description of Artificial Sequence: Synthetic oligonucleotide
gucaccaaaccaagcggaa

SEQ ID NO: 97457 - RNA, 19 nt, Artificial Sequence
  Description of Artificial Sequence: Synthetic oligonucleotide
gggucaugguuuuacugua

SEQ ID NO: 97458 - RNA, 19 nt, Artificial Sequence
  Description of Artificial Sequence: Synthetic oligonucleotide
cugcagacccgauuuuaua

SEQ ID NO: 97459 - RNA, 19 nt, Artificial Sequence
  Description of Artificial Sequence: Synthetic oligonucleotide
uccggggcuugaguauaug

SEQ ID NO: 97460 - RNA, 19 nt, Artificial Sequence
  Description of Artificial Sequence: Synthetic oligonucleotide
gguaguagauggcuuguuu

SEQ ID NO: 97461 - RNA, 19 nt, Artificial Sequence
  Description of Artificial Sequence: Synthetic oligonucleotide
accggucugauaaggcaaa

SEQ ID NO: 97462 - RNA, 19 nt, Artificial Sequence
  Description of Artificial Sequence: Synthetic oligonucleotide
cucguaaagcugauugauu

SEQ ID NO: 97463 - RNA, 19 nt, Artificial Sequence
  Description of Artificial Sequence: Synthetic oligonucleotide
gucuuauauugaaagucuu

SEQ ID NO: 97464 - RNA, 19 nt, Artificial Sequence
  Description of Artificial Sequence: Synthetic oligonucleotide
auggaccaccuuacagucu

SEQ ID NO: 97465 - RNA, 19 nt, Artificial Sequence
  Description of Artificial Sequence: Synthetic oligonucleotide
ggugaauacuaagaguguu

SEQ ID NO: 97466 - RNA, 19 nt, Artificial Sequence
  Description of Artificial Sequence: Synthetic oligonucleotide
aguccggggcuugaguaua

SEQ ID NO: 97467 - RNA, 19 nt, Artificial Sequence
  Description of Artificial Sequence: Synthetic oligonucleotide
accggaccucgucugcaaa

SEQ ID NO: 97468 - RNA, 19 nt, Artificial Sequence
  Description of Artificial Sequence: Synthetic oligonucleotide
aucaccccuccgaugugca

SEQ ID NO: 97469 - RNA, 19 nt, Artificial Sequence
  Description of Artificial Sequence: Synthetic oligonucleotide
auacugcaucacgguagca

SEQ ID NO: 97470 - RNA, 19 nt, Artificial Sequence
  Description of Artificial Sequence: Synthetic oligonucleotide
caggauugaugucgguugu

SEQ ID NO: 97471 - RNA, 19 nt, Artificial Sequence
  Description of Artificial Sequence: Synthetic oligonucleotide
uggcguccauccgaaucaa

SEQ ID NO: 97472 - RNA, 19 nt, Artificial Sequence
  Description of Artificial Sequence: Synthetic oligonucleotide
ccggaccucgucugcaaac

SEQ ID NO: 97473 - RNA, 19 nt, Artificial Sequence
  Description of Artificial Sequence: Synthetic oligonucleotide
cacccuggauaacuuggua

SEQ ID NO: 97474 - RNA, 19 nt, Artificial Sequence
  Description of Artificial Sequence: Synthetic oligonucleotide
ggacaaccggaccucgucu

SEQ ID NO: 97475 - RNA, 19 nt, Artificial Sequence
  Description of Artificial Sequence: Synthetic oligonucleotide
ggcccgaaauguucacauc

SEQ ID NO: 97476 - RNA, 19 nt, Artificial Sequence
  Description of Artificial Sequence: Synthetic oligonucleotide
ggcuagugucaaucagcga

SEQ ID NO: 97477 - RNA, 19 nt, Artificial Sequence
  Description of Artificial Sequence: Synthetic oligonucleotide
caaccggaccucgucugca

SEQ ID NO: 97478 - RNA, 19 nt, Artificial Sequence
  Description of Artificial Sequence: Synthetic oligonucleotide
aucucgcaaugaagugugu

SEQ ID NO: 97479 - RNA, 19 nt, Artificial Sequence
  Description of Artificial Sequence: Synthetic oligonucleotide
ccgccuuccaaagugaucu

SEQ ID NO: 97480 - RNA, 19 nt, Artificial Sequence
  Description of Artificial Sequence: Synthetic oligonucleotide
cauggacgcucaguuccca

SEQ ID NO: 97481 - RNA, 19 nt, Artificial Sequence
  Description of Artificial Sequence: Synthetic oligonucleotide
gcaaccggaauuaggaguu

SEQ ID NO: 97482 - RNA, 19 nt, Artificial Sequence
  Description of Artificial Sequence: Synthetic oligonucleotide
cacgucccguccgcguagc

SEQ ID NO: 97483 - RNA, 19 nt, Artificial Sequence
  Description of Artificial Sequence: Synthetic oligonucleotide
cgucucugcucuaagggaa

SEQ ID NO: 97484 - RNA, 19 nt, Artificial Sequence
  Description of Artificial Sequence: Synthetic oligonucleotide
gcagacccgauuuuauauu

SEQ ID NO: 97485 - RNA, 19 nt, Artificial Sequence
  Description of Artificial Sequence: Synthetic oligonucleotide
ggaagcuaaucugcaggcu

SEQ ID NO: 97486 - RNA, 19 nt, Artificial Sequence
  Description of Artificial Sequence: Synthetic oligonucleotide
ugcuggcguccauccgaau

SEQ ID NO: 97487 - RNA, 19 nt, Artificial Sequence
  Description of Artificial Sequence: Synthetic oligonucleotide
acgucccguccgcguagca

SEQ ID NO: 97488 - RNA, 19 nt, Artificial Sequence
  Description of Artificial Sequence: Synthetic oligonucleotide
cguaaagcugauugauucu

SEQ ID NO: 97489 - RNA, 19 nt, Artificial Sequence
  Description of Artificial Sequence: Synthetic oligonucleotide
ccgccuuggaaucucgcaa

SEQ ID NO: 97490 - RNA, 19 nt, Artificial Sequence
  Description of Artificial Sequence: Synthetic oligonucleotide
ccgaauucaggcagagacu

SEQ ID NO: 97491 - RNA, 19 nt, Artificial Sequence
  Description of Artificial Sequence: Synthetic oligonucleotide
ccacgucccguccgcguag

SEQ ID NO: 97492 - RNA, 19 nt, Artificial Sequence
  Description of Artificial Sequence: Synthetic oligonucleotide
gcgucuuaagcagccacgu

SEQ ID NO: 97493 - RNA, 19 nt, Artificial Sequence
  Description of Artificial Sequence: Synthetic oligonucleotide
caacgucuuugucacuguu

SEQ ID NO: 97494 - RNA, 19 nt, Artificial Sequence
  Description of Artificial Sequence: Synthetic oligonucleotide
ccggucugauaaggcaaag

SEQ ID NO: 97495 - RNA, 19 nt, Artificial Sequence
  Description of Artificial Sequence: Synthetic oligonucleotide
ccgcuggacuccucucggc

SEQ ID NO: 97496 - RNA, 19 nt, Artificial Sequence
  Description of Artificial Sequence: Synthetic oligonucleotide
agacucggucagagaaauu

SEQ ID NO: 97497 - RNA, 19 nt, Artificial Sequence
  Description of Artificial Sequence: Synthetic oligonucleotide
ccucugcaaccggaauuag

SEQ ID NO: 97498 - RNA, 19 nt, Artificial Sequence
  Description of Artificial Sequence: Synthetic oligonucleotide
cuuccaucaugagcaucgu

SEQ ID NO: 97499 - RNA, 19 nt, Artificial Sequence
  Description of Artificial Sequence: Synthetic oligonucleotide
gcacgagucgagagaaaua

SEQ ID NO: 97500 - RNA, 19 nt, Artificial Sequence
  Description of Artificial Sequence: Synthetic oligonucleotide
ggcuugugagcuaggaguu

SEQ ID NO: 97501 - RNA, 19 nt, Artificial Sequence
  Description of Artificial Sequence: Synthetic oligonucleotide
cgggagugauaagcggucc

SEQ ID NO: 97502 - RNA, 19 nt, Artificial Sequence
  Description of Artificial Sequence: Synthetic oligonucleotide
gcguagcagccaucuggca

SEQ ID NO: 97503 - RNA, 19 nt, Artificial Sequence
  Description of Artificial Sequence: Synthetic oligonucleotide
cacaugcauuauacaugau

SEQ ID NO: 97504 - RNA, 19 nt, Artificial Sequence
  Description of Artificial Sequence: Synthetic oligonucleotide
cgucccguccgcguagcag

SEQ ID NO: 97505 - RNA, 19 nt, Artificial Sequence
  Description of Artificial Sequence: Synthetic oligonucleotide
caucuacugcagacccgau

SEQ ID NO: 97506 - RNA, 19 nt, Artificial Sequence
  Description of Artificial Sequence: Synthetic oligonucleotide
cggucugauaaggcaaaga

SEQ ID NO: 97507 - RNA, 19 nt, Artificial Sequence
  Description of Artificial Sequence: Synthetic oligonucleotide
gguguaccgcuggacuccu

SEQ ID NO: 97508 - RNA, 19 nt, Artificial Sequence
  Description of Artificial Sequence: Synthetic oligonucleotide
ccgugacauggacgcucag

SEQ ID NO: 97509 - RNA, 19 nt, Artificial Sequence
  Description of Artificial Sequence: Synthetic oligonucleotide
ccggaauuaggaguuuaau

SEQ ID NO: 97510 - RNA, 19 nt, Artificial Sequence
  Description of Artificial Sequence: Synthetic oligonucleotide
ccgaaucaaucuguuguau

SEQ ID NO: 97511 - RNA, 19 nt, Artificial Sequence
  Description of Artificial Sequence: Synthetic oligonucleotide
cgugacauggacgcucagu

SEQ ID NO: 97512 - RNA, 19 nt, Artificial Sequence
  Description of Artificial Sequence: Synthetic oligonucleotide
cccacgucccguccgcgua

SEQ ID NO: 97513 - RNA, 19 nt, Artificial Sequence
  Description of Artificial Sequence: Synthetic oligonucleotide
caaccggaauuaggaguuu

SEQ ID NO: 97514 - RNA, 19 nt, Artificial Sequence
  Description of Artificial Sequence: Synthetic oligonucleotide
caucacgguucagguccgu

SEQ ID NO: 97515 - RNA, 19 nt, Artificial Sequence
  Description of Artificial Sequence: Synthetic oligonucleotide
cguccgcguagcagccauc

SEQ ID NO: 97516 - RNA, 19 nt, Artificial Sequence
  Description of Artificial Sequence: Synthetic oligonucleotide
gcccgcgucucugcucuaa

SEQ ID NO: 97517 - RNA, 19 nt, Artificial Sequence
  Description of Artificial Sequence: Synthetic oligonucleotide
ggcguccauccgaaucaau

SEQ ID NO: 97518 - RNA, 19 nt, Artificial Sequence
  Description of Artificial Sequence: Synthetic oligonucleotide
ccguccgcguagcagccau

SEQ ID NO: 97519 - RNA, 19 nt, Artificial Sequence
  Description of Artificial Sequence: Synthetic oligonucleotide
ccccggucacucucagggu

SEQ ID NO: 97520 - RNA, 19 nt, Artificial Sequence
  Description of Artificial Sequence: Synthetic oligonucleotide
cgucuuaagcagccacguu

SEQ ID NO: 97521 - RNA, 19 nt, Artificial Sequence
  Description of Artificial Sequence: Synthetic oligonucleotide
cccguccgcguagcagcca

SEQ ID NO: 97522 - RNA, 19 nt, Artificial Sequence
  Description of Artificial Sequence: Synthetic oligonucleotide
aauaacuaugcucaccugg

SEQ ID NO: 97523 - RNA, 19 nt, Artificial Sequence
  Description of Artificial Sequence: Synthetic oligonucleotide
uuagaauauguuaauaccc

SEQ ID NO: 97524 - RNA, 19 nt, Artificial Sequence
  Description of Artificial Sequence: Synthetic oligonucleotide
aaauauucggauugcaguc

SEQ ID NO: 97525 - RNA, 19 nt, Artificial Sequence
  Description of Artificial Sequence: Synthetic oligonucleotide
aagcuaacaauguaaacag

SEQ ID NO: 97526 - RNA, 19 nt, Artificial Sequence
  Description of Artificial Sequence: Synthetic oligonucleotide
aauuuauauuaguaggaag

SEQ ID NO: 97527 - RNA, 19 nt, Artificial Sequence
  Description of Artificial Sequence: Synthetic oligonucleotide
aauuuagugcaauauacga

SEQ ID NO: 97528 - RNA, 19 nt, Artificial Sequence
  Description of Artificial Sequence: Synthetic oligonucleotide
aaacuguauuacuacauuc

SEQ ID NO: 97529 - RNA, 19 nt, Artificial Sequence
  Description of Artificial Sequence: Synthetic oligonucleotide
ugcuauugaaaucuaauug

SEQ ID NO: 97530 - RNA, 19 nt, Artificial Sequence
  Description of Artificial Sequence: Synthetic oligonucleotide
uaauacuugcucuacagcc

SEQ ID NO: 97531 - RNA, 19 nt, Artificial Sequence
  Description of Artificial Sequence: Synthetic oligonucleotide
uauauuaguaggaagcuaa

SEQ ID NO: 97532 - RNA, 19 nt, Artificial Sequence
  Description of Artificial Sequence: Synthetic oligonucleotide
aacuaggacauauccauag

SEQ ID NO: 97533 - RNA, 19 nt, Artificial Sequence
  Description of Artificial Sequence: Synthetic oligonucleotide
gaaucgaucauauuuugug

SEQ ID NO: 97534 - RNA, 19 nt, Artificial Sequence
  Description of Artificial Sequence: Synthetic oligonucleotide
aacugaggcaagucuaacc

SEQ ID NO: 97535 - RNA, 19 nt, Artificial Sequence
  Description of Artificial Sequence: Synthetic oligonucleotide
aaauaaguuaagcaaguaa

SEQ ID NO: 97536 - RNA, 19 nt, Artificial Sequence
  Description of Artificial Sequence: Synthetic oligonucleotide
aauuuuaaucuguggacug

SEQ ID NO: 97537 - RNA, 19 nt, Artificial Sequence
  Description of Artificial Sequence: Synthetic oligonucleotide
acugcaaaucuguugaaac

SEQ ID NO: 97538 - RNA, 19 nt, Artificial Sequence
  Description of Artificial Sequence: Synthetic oligonucleotide
uccaacauucaacaguagg

SEQ ID NO: 97539 - RNA, 19 nt, Artificial Sequence
  Description of Artificial Sequence: Synthetic oligonucleotide
aauauguuaauacccuacu

SEQ ID NO: 97540 - RNA, 19 nt, Artificial Sequence
  Description of Artificial Sequence: Synthetic oligonucleotide
uuauccaacauucaacagu

SEQ ID NO: 97541 - RNA, 19 nt, Artificial Sequence
  Description of Artificial Sequence: Synthetic oligonucleotide
uuaaccuugaaacucacuu

SEQ ID NO: 97542 - RNA, 19 nt, Artificial Sequence
  Description of Artificial Sequence: Synthetic oligonucleotide
ucauauuuugugaauuggc

SEQ ID NO: 97543 - RNA, 19 nt, Artificial Sequence
  Description of Artificial Sequence: Synthetic oligonucleotide
gaaagcugauuacuaaagg

SEQ ID NO: 97544 - RNA, 19 nt, Artificial Sequence
  Description of Artificial Sequence: Synthetic oligonucleotide
agguucaacaaauuuagug

SEQ ID NO: 97545 - RNA, 19 nt, Artificial Sequence
  Description of Artificial Sequence: Synthetic oligonucleotide
uauccauagauaaaccucu

SEQ ID NO: 97546 - RNA, 19 nt, Artificial Sequence
  Description of Artificial Sequence: Synthetic oligonucleotide
uuuaccagcgauacaaaga

SEQ ID NO: 97547 - RNA, 19 nt, Artificial Sequence
  Description of Artificial Sequence: Synthetic oligonucleotide
uguuuuaccagcgauacaa

SEQ ID NO: 97548 - RNA, 19 nt, Artificial Sequence
  Description of Artificial Sequence: Synthetic oligonucleotide
cauagauaaaccucugagc

SEQ ID NO: 97549 - RNA, 19 nt, Artificial Sequence
  Description of Artificial Sequence: Synthetic oligonucleotide
aucuguugaacaauggacc

SEQ ID NO: 97550 - RNA, 19 nt, Artificial Sequence
  Description of Artificial Sequence: Synthetic oligonucleotide
uucaaaucauugaugcugc

SEQ ID NO: 97551 - RNA, 19 nt, Artificial Sequence
  Description of Artificial Sequence: Synthetic oligonucleotide
ucuuuacuagcaaauguga

SEQ ID NO: 97552 - RNA, 19 nt, Artificial Sequence
  Description of Artificial Sequence: Synthetic oligonucleotide
ucguguaagagaauaagaa

SEQ ID NO: 97553 - RNA, 19 nt, Artificial Sequence
  Description of Artificial Sequence: Synthetic oligonucleotide
gaaacucacuuauaugaag

SEQ ID NO: 97554 - RNA, 19 nt, Artificial Sequence
  Description of Artificial Sequence: Synthetic oligonucleotide
uuaucaagaggagcgaggg

SEQ ID NO: 97555 - RNA, 19 nt, Artificial Sequence
  Description of Artificial Sequence: Synthetic oligonucleotide
agagcguuggccucugucc

SEQ ID NO: 97556 - RNA, 19 nt, Artificial Sequence
  Description of Artificial Sequence: Synthetic oligonucleotide
uagauuugggucuaaggug

SEQ ID NO: 97557 - RNA, 19 nt, Artificial Sequence
  Description of Artificial Sequence: Synthetic oligonucleotide
uguagaucaacugaugaac

SEQ ID NO: 97558 - RNA, 19 nt, Artificial Sequence
  Description of Artificial Sequence: Synthetic oligonucleotide
uauuacauacuuuggugug

SEQ ID NO: 97559 - RNA, 19 nt, Artificial Sequence
  Description of Artificial Sequence: Synthetic oligonucleotide
ugcuguaauauucucgugu

SEQ ID NO: 97560 - RNA, 19 nt, Artificial Sequence
  Description of Artificial Sequence: Synthetic oligonucleotide
gucaagaacacucaugcac

SEQ ID NO: 97561 - RNA, 19 nt, Artificial Sequence
  Description of Artificial Sequence: Synthetic oligonucleotide
uuugugaauuggcacuagg

SEQ ID NO: 97562 - RNA, 19 nt, Artificial Sequence
  Description of Artificial Sequence: Synthetic oligonucleotide
cuagugaauaacuaugcuc

SEQ ID NO: 97563 - RNA, 19 nt, Artificial Sequence
  Description of Artificial Sequence: Synthetic oligonucleotide
ugugaauuggcacuaggaa

SEQ ID NO: 97564 - RNA, 19 nt, Artificial Sequence
  Description of Artificial Sequence: Synthetic oligonucleotide
uuaccagcgauacaaagau

SEQ ID NO: 97565 - RNA, 19 nt, Artificial Sequence
  Description of Artificial Sequence: Synthetic oligonucleotide
aauaaccuagugaauaacu

SEQ ID NO: 97566 - RNA, 19 nt, Artificial Sequence
  Description of Artificial Sequence: Synthetic oligonucleotide
ugaucaaacuguauuacua

SEQ ID NO: 97567 - RNA, 19 nt, Artificial Sequence
  Description of Artificial Sequence: Synthetic oligonucleotide
uuuuaccagcgauacaaag

SEQ ID NO: 97568 - RNA, 19 nt, Artificial Sequence
  Description of Artificial Sequence: Synthetic oligonucleotide
uauccaacauucaacagua

SEQ ID NO: 97569 - RNA, 19 nt, Artificial Sequence
  Description of Artificial Sequence: Synthetic oligonucleotide
ucuguugaacaauggaccc

SEQ ID NO: 97570 - RNA, 19 nt, Artificial Sequence
  Description of Artificial Sequence: Synthetic oligonucleotide
auacaaagaucugagguuc

SEQ ID NO: 97571 - RNA, 19 nt, Artificial Sequence
  Description of Artificial Sequence: Synthetic oligonucleotide
uuuauauuaguaggaagcu

SEQ ID NO: 97572 - RNA, 19 nt, Artificial Sequence
  Description of Artificial Sequence: Synthetic oligonucleotide
aacuaagcagaauuaguaa

SEQ ID NO: 97573 - RNA, 19 nt, Artificial Sequence
  Description of Artificial Sequence: Synthetic oligonucleotide
gaucaaacuguauuacuac

SEQ ID NO: 97574 - RNA, 19 nt, Artificial Sequence
  Description of Artificial Sequence: Synthetic oligonucleotide
ucauaccuaaaagauaaug

SEQ ID NO: 97575 - RNA, 19 nt, Artificial Sequence
  Description of Artificial Sequence: Synthetic oligonucleotide
uggguauuacauacuuugg

SEQ ID NO: 97576 - RNA, 19 nt, Artificial Sequence
  Description of Artificial Sequence: Synthetic oligonucleotide
ugacugacuccuuugagcu

SEQ ID NO: 97577 - RNA, 19 nt, Artificial Sequence
  Description of Artificial Sequence: Synthetic oligonucleotide
acuaagauuccguuggcga

SEQ ID NO: 97578 - RNA, 19 nt, Artificial Sequence
  Description of Artificial Sequence: Synthetic oligonucleotide
gguauuacauacuuuggug

SEQ ID NO: 97579 - RNA, 19 nt, Artificial Sequence
  Description of Artificial Sequence: Synthetic oligonucleotide
ucggauugcagucuuuuga

SEQ ID NO: 97580 - RNA, 19 nt, Artificial Sequence
  Description of Artificial Sequence: Synthetic oligonucleotide
accuggaucaaacaguaga

SEQ ID NO: 97581 - RNA, 19 nt, Artificial Sequence
  Description of Artificial Sequence: Synthetic oligonucleotide
uaagagaugugccuaccac

SEQ ID NO: 97582 - RNA, 19 nt, Artificial Sequence
  Description of Artificial Sequence: Synthetic oligonucleotide
auauuaucccuguuuuaag

SEQ ID NO: 97583 - RNA, 19 nt, Artificial Sequence
  Description of Artificial Sequence: Synthetic oligonucleotide
gaauauguuaauacccuac

SEQ ID NO: 97584 - RNA, 19 nt, Artificial Sequence
  Description of Artificial Sequence: Synthetic oligonucleotide
uuacauuagaccgugggau

SEQ ID NO: 97585 - RNA, 19 nt, Artificial Sequence
  Description of Artificial Sequence: Synthetic oligonucleotide
uccauguagaucaacugau

SEQ ID NO: 97586 - RNA, 19 nt, Artificial Sequence
  Description of Artificial Sequence: Synthetic oligonucleotide
ucuagcaccauugauuuau

SEQ ID NO: 97587 - RNA, 19 nt, Artificial Sequence
  Description of Artificial Sequence: Synthetic oligonucleotide
aguagguuacaggauuacc

SEQ ID NO: 97588 - RNA, 19 nt, Artificial Sequence
  Description of Artificial Sequence: Synthetic oligonucleotide
ucucguguaagagaauaag

SEQ ID NO: 97589 - RNA, 19 nt, Artificial Sequence
  Description of Artificial Sequence: Synthetic oligonucleotide
cauguuucaagcuuaaaua

SEQ ID NO: 97590 - RNA, 19 nt, Artificial Sequence
  Description of Artificial Sequence: Synthetic oligonucleotide
agcaaacgcuuuuaaaaug

SEQ ID NO: 97591 - RNA, 19 nt, Artificial Sequence
  Description of Artificial Sequence: Synthetic oligonucleotide
uagcuaugauuucauaccu

SEQ ID NO: 97592 - RNA, 19 nt, Artificial Sequence
  Description of Artificial Sequence: Synthetic oligonucleotide
uauuaucaagaggagcgag

SEQ ID NO: 97593 - RNA, 19 nt, Artificial Sequence
  Description of Artificial Sequence: Synthetic oligonucleotide
ugcucuacagccuacuguc

SEQ ID NO: 97594 - RNA, 19 nt, Artificial Sequence
  Description of Artificial Sequence: Synthetic oligonucleotide
uaaccuagugaauaacuau

SEQ ID NO: 97595 - RNA, 19 nt, Artificial Sequence
  Description of Artificial Sequence: Synthetic oligonucleotide
aaguagguuacaggauuac

SEQ ID NO: 97596 - RNA, 19 nt, Artificial Sequence
  Description of Artificial Sequence: Synthetic oligonucleotide
cuuauaugaagcugcccac

SEQ ID NO: 97597 - RNA, 19 nt, Artificial Sequence
  Description of Artificial Sequence: Synthetic oligonucleotide
cacauugcuacauaagaca

SEQ ID NO: 97598 - RNA, 19 nt, Artificial Sequence
  Description of Artificial Sequence: Synthetic oligonucleotide
aaguccuacagagauuucu

SEQ ID NO: 97599 - RNA, 19 nt, Artificial Sequence
  Description of Artificial Sequence: Synthetic oligonucleotide
gacugcaaacccuucuugc

SEQ ID NO: 97600 - RNA, 19 nt, Artificial Sequence
  Description of Artificial Sequence: Synthetic oligonucleotide
auuaucaagaggagcgagg

SEQ ID NO: 97601 - RNA, 19 nt, Artificial Sequence
  Description of Artificial Sequence: Synthetic oligonucleotide
uacauucagagaagcgaag

SEQ ID NO: 97602 - RNA, 19 nt, Artificial Sequence
  Description of Artificial Sequence: Synthetic oligonucleotide
accucaugugaggaaaugc

SEQ ID NO: 97603 - RNA, 19 nt, Artificial Sequence
  Description of Artificial Sequence: Synthetic oligonucleotide
agcgagggacugcaaaccc

SEQ ID NO: 97604 - RNA, 19 nt, Artificial Sequence
  Description of Artificial Sequence: Synthetic oligonucleotide
aauggacccuuauuaaauu

SEQ ID NO: 97605 - RNA, 19 nt, Artificial Sequence
  Description of Artificial Sequence: Synthetic oligonucleotide
accagcgauacaaagaucu

SEQ ID NO: 97606 - RNA, 19 nt, Artificial Sequence
  Description of Artificial Sequence: Synthetic oligonucleotide
uauuaguaggaagcuaaca

SEQ ID NO: 97607 - RNA, 19 nt, Artificial Sequence
  Description of Artificial Sequence: Synthetic oligonucleotide
gacaaccugaugucgcuag

SEQ ID NO: 97608 - RNA, 19 nt, Artificial Sequence
  Description of Artificial Sequence: Synthetic oligonucleotide
guagauuugggucuaaggu

SEQ ID NO: 97609 - RNA, 19 nt, Artificial Sequence
  Description of Artificial Sequence: Synthetic oligonucleotide
aguacuguacaggauaagu

SEQ ID NO: 97610 - RNA, 19 nt, Artificial Sequence
  Description of Artificial Sequence: Synthetic oligonucleotide
aacucuagcaccauugauu

SEQ ID NO: 97611 - RNA, 19 nt, Artificial Sequence
  Description of Artificial Sequence: Synthetic oligonucleotide
uggaaucgaucauauuuug

SEQ ID NO: 97612 - RNA, 19 nt, Artificial Sequence
  Description of Artificial Sequence: Synthetic oligonucleotide
uuguguugcagagcguugg

SEQ ID NO: 97613 - RNA, 19 nt, Artificial Sequence
  Description of Artificial Sequence: Synthetic oligonucleotide
gaucagaugcuaccugacc

SEQ ID NO: 97614 - RNA, 19 nt, Artificial Sequence
  Description of Artificial Sequence: Synthetic oligonucleotide
uuacuacauucagagaagc

SEQ ID NO: 97615 - RNA, 19 nt, Artificial Sequence
  Description of Artificial Sequence: Synthetic oligonucleotide
cuacagagauuucucauuc

SEQ ID NO: 97616 - RNA, 19 nt, Artificial Sequence
  Description of Artificial Sequence: Synthetic oligonucleotide
aagauuccguuggcgaugg

SEQ ID NO: 97617 - RNA, 19 nt, Artificial Sequence
  Description of Artificial Sequence: Synthetic oligonucleotide
agcgauacaaagaucugag

SEQ ID NO: 97618 - RNA, 19 nt, Artificial Sequence
  Description of Artificial Sequence: Synthetic oligonucleotide
auugcuacauaagacaauu

SEQ ID NO: 97619 - RNA, 19 nt, Artificial Sequence
  Description of Artificial Sequence: Synthetic oligonucleotide
gagggcauguuguucauuc

SEQ ID NO: 97620 - RNA, 19 nt, Artificial Sequence
  Description of Artificial Sequence: Synthetic oligonucleotide
acucuagcaccauugauuu

SEQ ID NO: 97621 - RNA, 19 nt, Artificial Sequence
  Description of Artificial Sequence: Synthetic oligonucleotide
uauaugaagcugcccacua

SEQ ID NO: 97622 - RNA, 19 nt, Artificial Sequence
  Description of Artificial Sequence: Synthetic oligonucleotide
  modified_base (4)..(4): a, c, u, g, unknown or other
cccngaaaguccuacagag

SEQ ID NO: 97623 - RNA, 19 nt, Artificial Sequence
  Description of Artificial Sequence: Synthetic oligonucleotide
agauuugggucuaaggugu

SEQ ID NO: 97624 - RNA, 19 nt, Artificial Sequence
  Description of Artificial Sequence: Synthetic oligonucleotide
auguagaucaacugaugaa

SEQ ID NO: 97625 - RNA, 19 nt, Artificial Sequence
  Description of Artificial Sequence: Synthetic oligonucleotide
auaugaagcugcccacuag

SEQ ID NO: 97626 - RNA, 19 nt, Artificial Sequence
  Description of Artificial Sequence: Synthetic oligonucleotide
guuacauuagaccguggga

SEQ ID NO: 97627 - RNA, 19 nt, Artificial Sequence
  Description of Artificial Sequence: Synthetic oligonucleotide
accuugaugcugcacagga

SEQ ID NO: 97628 - RNA, 19 nt, Artificial Sequence
  Description of Artificial Sequence: Synthetic oligonucleotide
uuauuaucaagaggagcga

SEQ ID NO: 97629 - RNA, 19 nt, Artificial Sequence
  Description of Artificial Sequence: Synthetic oligonucleotide
agaagcgaaggagugagca

SEQ ID NO: 97630 - RNA, 19 nt, Artificial Sequence
  Description of Artificial Sequence: Synthetic oligonucleotide
cugacgaccuggaucaaac

SEQ ID NO: 97631 - RNA, 19 nt, Artificial Sequence
  Description of Artificial Sequence: Synthetic oligonucleotide
acuaugcucaccugguuaa

SEQ ID NO: 97632 - RNA, 19 nt, Artificial Sequence
  Description of Artificial Sequence: Synthetic oligonucleotide
uuacauacuuuggugugca

SEQ ID NO: 97633 - RNA, 19 nt, Artificial Sequence
  Description of Artificial Sequence: Synthetic oligonucleotide
gaacugacugacuccuuug

SEQ ID NO: 97634 - RNA, 19 nt, Artificial Sequence
  Description of Artificial Sequence: Synthetic oligonucleotide
uaagauuccguuggcgaug

SEQ ID NO: 97635 - RNA, 19 nt, Artificial Sequence
  Description of Artificial Sequence: Synthetic oligonucleotide
gauacaaagaucugagguu

SEQ ID NO: 97636 - RNA, 19 nt, Artificial Sequence
  Description of Artificial Sequence: Synthetic oligonucleotide
auauguuaauacccuacuu

SEQ ID NO: 97637 - RNA, 19 nt, Artificial Sequence
  Description of Artificial Sequence: Synthetic oligonucleotide
uuauaugaagcugcccacu

SEQ ID NO: 97638 - RNA, 19 nt, Artificial Sequence
  Description of Artificial Sequence: Synthetic oligonucleotide
agaauauguuaauacccua

SEQ ID NO: 97639 - RNA, 19 nt, Artificial Sequence
  Description of Artificial Sequence: Synthetic oligonucleotide
gaauaacuaugcucaccug

SEQ ID NO: 97640 - RNA, 19 nt, Artificial Sequence
  Description of Artificial Sequence: Synthetic oligonucleotide
uuugcagguugucuccacu

SEQ ID NO: 97641 - RNA, 19 nt, Artificial Sequence
  Description of Artificial Sequence: Synthetic oligonucleotide
aagcgaaggagugagcaaa

SEQ ID NO: 97642 - RNA, 19 nt, Artificial Sequence
  Description of Artificial Sequence: Synthetic oligonucleotide
cucguguaagagaauaaga

SEQ ID NO: 97643 - RNA, 19 nt, Artificial Sequence
  Description of Artificial Sequence: Synthetic oligonucleotide
auaacuaugcucaccuggu

SEQ ID NO: 97644 - RNA, 19 nt, Artificial Sequence
  Description of Artificial Sequence: Synthetic oligonucleotide
cuguacaggauaagucaag

SEQ ID NO: 97645 - RNA, 19 nt, Artificial Sequence
  Description of Artificial Sequence: Synthetic oligonucleotide
guagacaaccugaugucgc

SEQ ID NO: 97646 - RNA, 19 nt, Artificial Sequence
  Description of Artificial Sequence: Synthetic oligonucleotide
aggauuaccuaguacugua

SEQ ID NO: 97647 - RNA, 19 nt, Artificial Sequence
  Description of Artificial Sequence: Synthetic oligonucleotide
uucucguguaagagaauaa

SEQ ID NO: 97648 - RNA, 19 nt, Artificial Sequence
  Description of Artificial Sequence: Synthetic oligonucleotide
uagguucaggagaguacag

SEQ ID NO: 97649 - RNA, 19 nt, Artificial Sequence
  Description of Artificial Sequence: Synthetic oligonucleotide
gaccgugggauauuagaca

SEQ ID NO: 97650 - RNA, 19 nt, Artificial Sequence
  Description of Artificial Sequence: Synthetic oligonucleotide
gaugaauuaguuccuuuau

SEQ ID NO: 97651 - RNA, 19 nt, Artificial Sequence
  Description of Artificial Sequence: Synthetic oligonucleotide
uagacaaccugaugucgcu

SEQ ID NO: 97652 - RNA, 19 nt, Artificial Sequence
  Description of Artificial Sequence: Synthetic oligonucleotide
uguugaacaauggacccuu

SEQ ID NO: 97653 - RNA, 19 nt, Artificial Sequence
  Description of Artificial Sequence: Synthetic oligonucleotide
aggagaguacagugaauga

SEQ ID NO: 97654 - RNA, 19 nt, Artificial Sequence
  Description of Artificial Sequence: Synthetic oligonucleotide
caaguacuauuaucacccc

SEQ ID NO: 97655 - RNA, 19 nt, Artificial Sequence
  Description of Artificial Sequence: Synthetic oligonucleotide
acauacuuuggugugcagu

SEQ ID NO: 97656 - RNA, 19 nt, Artificial Sequence
  Description of Artificial Sequence: Synthetic oligonucleotide
cauggugaagcaaacuaaa

SEQ ID NO: 97657 - RNA, 19 nt, Artificial Sequence
  Description of Artificial Sequence: Synthetic oligonucleotide
uccuaagagaugugccuac

SEQ ID NO: 97658 - RNA, 19 nt, Artificial Sequence
  Description of Artificial Sequence: Synthetic oligonucleotide
uacauuagaccgugggaua

SEQ ID NO: 97659 - RNA, 19 nt, Artificial Sequence
  Description of Artificial Sequence: Synthetic oligonucleotide
guuaaauauucggauugca

SEQ ID NO: 97660 - RNA, 19 nt, Artificial Sequence
  Description of Artificial Sequence: Synthetic oligonucleotide
aaaguagguuacaggauua

SEQ ID NO: 97661 - RNA, 19 nt, Artificial Sequence
  Description of Artificial Sequence: Synthetic oligonucleotide
ucaugcacauuuugugauc

SEQ ID NO: 97662 - RNA, 19 nt, Artificial Sequence
  Description of Artificial Sequence: Synthetic oligonucleotide
acgggagucagauggaguu

SEQ ID NO: 97663 - RNA, 19 nt, Artificial Sequence
  Description of Artificial Sequence: Synthetic oligonucleotide
cacuaagauuccguuggcg

SEQ ID NO: 97664 - RNA, 19 nt, Artificial Sequence
  Description of Artificial Sequence: Synthetic oligonucleotide
cauugacucacugcaaauc

SEQ ID NO: 97665 - RNA, 19 nt, Artificial Sequence
  Description of Artificial Sequence: Synthetic oligonucleotide
acaaaacagccuaugacua

SEQ ID NO: 97666 - RNA, 19 nt, Artificial Sequence
  Description of Artificial Sequence: Synthetic oligonucleotide
uaacuaggacauauccaua

SEQ ID NO: 97667 - RNA, 19 nt, Artificial Sequence
  Description of Artificial Sequence: Synthetic oligonucleotide
ugcucaccugguuaacaca

SEQ ID NO: 97668 - RNA, 19 nt, Artificial Sequence
  Description of Artificial Sequence: Synthetic oligonucleotide
gcuaugauuucauaccuaa

SEQ ID NO: 97669 - RNA, 19 nt, Artificial Sequence
  Description of Artificial Sequence: Synthetic oligonucleotide
ucgcuagggaaaucagaug

SEQ ID NO: 97670 - RNA, 19 nt, Artificial Sequence
  Description of Artificial Sequence: Synthetic oligonucleotide
cauucagagaagcgaagga

SEQ ID NO: 97671 - RNA, 19 nt, Artificial Sequence
  Description of Artificial Sequence: Synthetic oligonucleotide
auggacccuuauuaaauua

SEQ ID NO: 97672 - RNA, 19 nt, Artificial Sequence
  Description of Artificial Sequence: Synthetic oligonucleotide
caccauugauuuauuagaa

SEQ ID NO: 97673 - RNA, 19 nt, Artificial Sequence
  Description of Artificial Sequence: Synthetic oligonucleotide
gaucugaucggugcuauua

SEQ ID NO: 97674 - RNA, 19 nt, Artificial Sequence
  Description of Artificial Sequence: Synthetic oligonucleotide
ggaagcuaacaauguaaac

SEQ ID NO: 97675 - RNA, 19 nt, Artificial Sequence
  Description of Artificial Sequence: Synthetic oligonucleotide
cagggauuagaauggccuc

SEQ ID NO: 97676 - RNA, 19 nt, Artificial Sequence
  Description of Artificial Sequence: Synthetic oligonucleotide
aaaguccuacagagauuuc

SEQ ID NO: 97677 - RNA, 19 nt, Artificial Sequence
  Description of Artificial Sequence: Synthetic oligonucleotide
acauggugaagcaaacuaa

SEQ ID NO: 97678 - RNA, 19 nt, Artificial Sequence
  Description of Artificial Sequence: Synthetic oligonucleotide
uaguacuguacaggauaag

SEQ ID NO: 97679 - RNA, 19 nt, Artificial Sequence
  Description of Artificial Sequence: Synthetic oligonucleotide
auauucggauugcagucuu

SEQ ID NO: 97680 - RNA, 19 nt, Artificial Sequence
  Description of Artificial Sequence: Synthetic oligonucleotide
gcgauacaaagaucugagg

SEQ ID NO: 97681 - RNA, 19 nt, Artificial Sequence
  Description of Artificial Sequence: Synthetic oligonucleotide
ugacgaccuggaucaaaca

SEQ ID NO: 97682 - RNA, 19 nt, Artificial Sequence
  Description of Artificial Sequence: Synthetic oligonucleotide
agcgaaggagugagcaaac

SEQ ID NO: 97683 - RNA, 19 nt, Artificial Sequence
  Description of Artificial Sequence: Synthetic oligonucleotide
gaagcgaaggagugagcaa

SEQ ID NO: 97684 - RNA, 19 nt, Artificial Sequence
  Description of Artificial Sequence: Synthetic oligonucleotide
acauuagaccgugggauau

SEQ ID NO: 97685 - RNA, 19 nt, Artificial Sequence
  Description of Artificial Sequence: Synthetic oligonucleotide
ugccuacaguuuaccuuag

SEQ ID NO: 97686 - RNA, 19 nt, Artificial Sequence
  Description of Artificial Sequence: Synthetic oligonucleotide
cugaauauuaucccuguuu

SEQ ID NO: 97687 - RNA, 19 nt, Artificial Sequence
  Description of Artificial Sequence: Synthetic oligonucleotide
cacuuauaugaagcugccc

SEQ ID NO: 97688 - RNA, 19 nt, Artificial Sequence
  Description of Artificial Sequence: Synthetic oligonucleotide
gaugucaugguagcuuuua

SEQ ID NO: 97689 - RNA, 19 nt, Artificial Sequence
  Description of Artificial Sequence: Synthetic oligonucleotide
agaugcuaccugaccuccc

SEQ ID NO: 97690 - RNA, 19 nt, Artificial Sequence
  Description of Artificial Sequence: Synthetic oligonucleotide
ggucuaagguguucaaauc

SEQ ID NO: 97691 - RNA, 19 nt, Artificial Sequence
  Description of Artificial Sequence: Synthetic oligonucleotide
agaggagcgagggacugca

SEQ ID NO: 97692 - RNA, 19 nt, Artificial Sequence
  Description of Artificial Sequence: Synthetic oligonucleotide
ggaggcacuuccaauuaag

SEQ ID NO: 97693 - RNA, 19 nt, Artificial Sequence
  Description of Artificial Sequence: Synthetic oligonucleotide
caauggacccuuauuaaau

SEQ ID NO: 97694 - RNA, 19 nt, Artificial Sequence
  Description of Artificial Sequence: Synthetic oligonucleotide
gaggcacuuccaauuaaga

SEQ ID NO: 97695 - RNA, 19 nt, Artificial Sequence
  Description of Artificial Sequence: Synthetic oligonucleotide
gcucaccugguuaacacag

SEQ ID NO: 97696 - RNA, 19 nt, Artificial Sequence
  Description of Artificial Sequence: Synthetic oligonucleotide
auuuauccuaagagaugug

SEQ ID NO: 97697 - RNA, 19 nt, Artificial Sequence
  Description of Artificial Sequence: Synthetic oligonucleotide
cugguugcauuuauccuaa

SEQ ID NO: 97698 - RNA, 19 nt, Artificial Sequence
  Description of Artificial Sequence: Synthetic oligonucleotide
agaacugaggcaagucuaa

SEQ ID NO: 97699 - RNA, 19 nt, Artificial Sequence
  Description of Artificial Sequence: Synthetic oligonucleotide
gguuaacuuuuaauuacuc

SEQ ID NO: 97700 - RNA, 19 nt, Artificial Sequence
  Description of Artificial Sequence: Synthetic oligonucleotide
aaacagccuaugacuaaaa

SEQ ID NO: 97701 - RNA, 19 nt, Artificial Sequence
  Description of Artificial Sequence: Synthetic oligonucleotide
uaccagcgauacaaagauc

SEQ ID NO: 97702 - RNA, 19 nt, Artificial Sequence
  Description of Artificial Sequence: Synthetic oligonucleotide
ggguauuacauacuuuggu

SEQ ID NO: 97703 - RNA, 19 nt, Artificial Sequence
  Description of Artificial Sequence: Synthetic oligonucleotide
ugggucuaagguguucaaa

SEQ ID NO: 97704 - RNA, 19 nt, Artificial Sequence
  Description of Artificial Sequence: Synthetic oligonucleotide
caagucuaaccauuuccua

SEQ ID NO: 97705 - RNA, 19 nt, Artificial Sequence
  Description of Artificial Sequence: Synthetic oligonucleotide
agcguuugggaaagcuguc

SEQ ID NO: 97706 - RNA, 19 nt, Artificial Sequence
  Description of Artificial Sequence: Synthetic oligonucleotide
ccuaguacuguacaggaua

SEQ ID NO: 97707 - RNA, 19 nt, Artificial Sequence
  Description of Artificial Sequence: Synthetic oligonucleotide
cagagcguuggccucuguc

SEQ ID NO: 97708 - RNA, 19 nt, Artificial Sequence
  Description of Artificial Sequence: Synthetic oligonucleotide
cgugggauauuagacacag

SEQ ID NO: 97709 - RNA, 19 nt, Artificial Sequence
  Description of Artificial Sequence: Synthetic oligonucleotide
auccauagauaaaccucug

SEQ ID NO: 97710 - RNA, 19 nt, Artificial Sequence
  Description of Artificial Sequence: Synthetic oligonucleotide
cccuuauuaaauuaacccu

SEQ ID NO: 97711 - RNA, 19 nt, Artificial Sequence
  Description of Artificial Sequence: Synthetic oligonucleotide
agaggacgggagucagaug

SEQ ID NO: 97712 - RNA, 19 nt, Artificial Sequence
  Description of Artificial Sequence: Synthetic oligonucleotide
cuaagauuccguuggcgau

SEQ ID NO: 97713 - RNA, 19 nt, Artificial Sequence
  Description of Artificial Sequence: Synthetic oligonucleotide
gggucuaagguguucaaau

SEQ ID NO: 97714 - RNA, 19 nt, Artificial Sequence
  Description of Artificial Sequence: Synthetic oligonucleotide
aggagggugcuuccacuaa

SEQ ID NO: 97715 - RNA, 19 nt, Artificial Sequence
  Description of Artificial Sequence: Synthetic oligonucleotide
gcaaacgcuuuuaaaaugu

SEQ ID NO: 97716 - RNA, 19 nt, Artificial Sequence
  Description of Artificial Sequence: Synthetic oligonucleotide
gggguuacuggacuuccga

SEQ ID NO: 97717 - RNA, 19 nt, Artificial Sequence
  Description of Artificial Sequence: Synthetic oligonucleotide
ggauuaccuaguacuguac

SEQ ID NO: 97718 - RNA, 19 nt, Artificial Sequence
  Description of Artificial Sequence: Synthetic oligonucleotide
gauaaaccucugagccaac

SEQ ID NO: 97719 - RNA, 19 nt, Artificial Sequence
  Description of Artificial Sequence: Synthetic oligonucleotide
gguguuuacaguggcaccu

SEQ ID NO: 97720 - RNA, 19 nt, Artificial Sequence
  Description of Artificial Sequence: Synthetic oligonucleotide
cuaugcucaccugguuaac

SEQ ID NO: 97721 - RNA, 19 nt, Artificial Sequence
  Description of Artificial Sequence: Synthetic oligonucleotide
auccaacauucaacaguag

SEQ ID NO: 97722 - RNA, 19 nt, Artificial Sequence
  Description of Artificial Sequence: Synthetic oligonucleotide
cuacagccuacugucuuca

SEQ ID NO: 97723 - RNA, 19 nt, Artificial Sequence
  Description of Artificial Sequence: Synthetic oligonucleotide
ccuacaguuuaccuuagcu

SEQ ID NO: 97724 - RNA, 19 nt, Artificial Sequence
  Description of Artificial Sequence: Synthetic oligonucleotide
ggagaguacagugaaugau

SEQ ID NO: 97725 - RNA, 19 nt, Artificial Sequence
  Description of Artificial Sequence: Synthetic oligonucleotide
ccucaugugaggaaaugcu

SEQ ID NO: 97726 - RNA, 19 nt, Artificial Sequence
  Description of Artificial Sequence: Synthetic oligonucleotide
accuaguacuguacaggau

SEQ ID NO: 97727 - RNA, 19 nt, Artificial Sequence
  Description of Artificial Sequence: Synthetic oligonucleotide
ggguuacuggacuuccgaa

SEQ ID NO: 97728 - RNA, 19 nt, Artificial Sequence
  Description of Artificial Sequence: Synthetic oligonucleotide
ugaugucgcuagggaaauc

SEQ ID NO: 97729 - RNA, 19 nt, Artificial Sequence
  Description of Artificial Sequence: Synthetic oligonucleotide
agacaaccugaugucgcua

SEQ ID NO: 97730 - RNA, 19 nt, Artificial Sequence
  Description of Artificial Sequence: Synthetic oligonucleotide
ggaaucgaucauauuuugu

SEQ ID NO: 97731 - RNA, 19 nt, Artificial Sequence
  Description of Artificial Sequence: Synthetic oligonucleotide
acagugcuauugaaaucua

SEQ ID NO: 97732 - RNA, 19 nt, Artificial Sequence
  Description of Artificial Sequence: Synthetic oligonucleotide
gugauuaaauggggaacau

SEQ ID NO: 97733 - RNA, 19 nt, Artificial Sequence
  Description of Artificial Sequence: Synthetic oligonucleotide
gggauuagaauggccucaa

SEQ ID NO: 97734 - RNA, 19 nt, Artificial Sequence
  Description of Artificial Sequence: Synthetic oligonucleotide
ccuagugaauaacuaugcu

SEQ ID NO: 97735 - RNA, 19 nt, Artificial Sequence
  Description of Artificial Sequence: Synthetic oligonucleotide
ggguuacauuagaccgugg

SEQ ID NO: 97736 - RNA, 19 nt, Artificial Sequence
  Description of Artificial Sequence: Synthetic oligonucleotide
cagagcguuugggaaagcu

SEQ ID NO: 97737 - RNA, 19 nt, Artificial Sequence
  Description of Artificial Sequence: Synthetic oligonucleotide
  modified_base (5)..(5): a, c, u, g, unknown or other
ccccngaaaguccuacaga

SEQ ID NO: 97738 - RNA, 19 nt, Artificial Sequence
  Description of Artificial Sequence: Synthetic oligonucleotide
gggaggcacuuccaauuaa

SEQ ID NO: 97739 - RNA, 19 nt, Artificial Sequence
  Description of Artificial Sequence: Synthetic oligonucleotide
cuggaucaaacaguagauu

SEQ ID NO: 97740 - RNA, 19 nt, Artificial Sequence
  Description of Artificial Sequence: Synthetic oligonucleotide
ggugugcaguagugcugug

SEQ ID NO: 97741 - RNA, 19 nt, Artificial Sequence
  Description of Artificial Sequence: Synthetic oligonucleotide
agauuccguuggcgaugga

SEQ ID NO: 97742 - RNA, 19 nt, Artificial Sequence
  Description of Artificial Sequence: Synthetic oligonucleotide
ggucaguagacaaccugau

SEQ ID NO: 97743 - RNA, 19 nt, Artificial Sequence
  Description of Artificial Sequence: Synthetic oligonucleotide
ugcugacgaccuggaucaa

SEQ ID NO: 97744 - RNA, 19 nt, Artificial Sequence
  Description of Artificial Sequence: Synthetic oligonucleotide
gcugacgaccuggaucaaa

SEQ ID NO: 97745 - RNA, 19 nt, Artificial Sequence
  Description of Artificial Sequence: Synthetic oligonucleotide
ccgugggauauuagacaca

SEQ ID NO: 97746 - RNA, 19 nt, Artificial Sequence
  Description of Artificial Sequence: Synthetic oligonucleotide
gcguuugggaaagcugucu

SEQ ID NO: 97747 - RNA, 19 nt, Artificial Sequence
  Description of Artificial Sequence: Synthetic oligonucleotide
cauuagaccgugggauauu

SEQ ID NO: 97748 - RNA, 19 nt, Artificial Sequence
  Description of Artificial Sequence: Synthetic oligonucleotide
gcagagcguuugggaaagc

SEQ ID NO: 97749 - RNA, 19 nt, Artificial Sequence
  Description of Artificial Sequence: Synthetic oligonucleotide
gcgagggacugcaaacccu

SEQ ID NO: 97750 - RNA, 19 nt, Artificial Sequence
  Description of Artificial Sequence: Synthetic oligonucleotide
ccgggcacaagggcuggca

SEQ ID NO: 97751 - RNA, 19 nt, Artificial Sequence
  Description of Artificial Sequence: Synthetic oligonucleotide
gggaacugacugacuccuu

SEQ ID NO: 97752 - RNA, 19 nt, Artificial Sequence
  Description of Artificial Sequence: Synthetic oligonucleotide
aagcaguuuaaguuuagcc

SEQ ID NO: 97753 - RNA, 19 nt, Artificial Sequence
  Description of Artificial Sequence: Synthetic oligonucleotide
uguacuacauuaacaaagg

SEQ ID NO: 97754 - RNA, 19 nt, Artificial Sequence
  Description of Artificial Sequence: Synthetic oligonucleotide
uaaagcauaaaauagguua

SEQ ID NO: 97755 - RNA, 19 nt, Artificial Sequence
  Description of Artificial Sequence: Synthetic oligonucleotide
ugcuccgcgaccuagaucg

SEQ ID NO: 97756 - RNA, 19 nt, Artificial Sequence
  Description of Artificial Sequence: Synthetic oligonucleotide
ucaguaaagaacuaaacau

SEQ ID NO: 97757 - RNA, 19 nt, Artificial Sequence
  Description of Artificial Sequence: Synthetic oligonucleotide
aauagguuaacaaaguaga

SEQ ID NO: 97758 - RNA, 19 nt, Artificial Sequence
  Description of Artificial Sequence: Synthetic oligonucleotide
gguaucaacacuuacgggg

SEQ ID NO: 97759 - RNA, 19 nt, Artificial Sequence
  Description of Artificial Sequence: Synthetic oligonucleotide
uucaauaagccuaauauuu

SEQ ID NO: 97760 - RNA, 19 nt, Artificial Sequence
  Description of Artificial Sequence: Synthetic oligonucleotide
auuuggacuuuauaucucc

SEQ ID NO: 97761 - RNA, 19 nt, Artificial Sequence
  Description of Artificial Sequence: Synthetic oligonucleotide
aggaucuaaauucaauuac

SEQ ID NO: 97762 - RNA, 19 nt, Artificial Sequence
  Description of Artificial Sequence: Synthetic oligonucleotide
uuuaagucagucaauucug

SEQ ID NO: 97763 - RNA, 19 nt, Artificial Sequence
  Description of Artificial Sequence: Synthetic oligonucleotide
auauauacuuauuggggcg

SEQ ID NO: 97764 - RNA, 19 nt, Artificial Sequence
  Description of Artificial Sequence: Synthetic oligonucleotide
aagaguaacugccuaagca

SEQ ID NO: 97765 - RNA, 19 nt, Artificial Sequence
  Description of Artificial Sequence: Synthetic oligonucleotide
aaguauuuaggaugaaaug

SEQ ID NO: 97766 - RNA, 19 nt, Artificial Sequence
  Description of Artificial Sequence: Synthetic oligonucleotide
aagguuguaagguaauuca

SEQ ID NO: 97767 - RNA, 19 nt, Artificial Sequence
  Description of Artificial Sequence: Synthetic oligonucleotide
aagacacgcuuucaugucc

SEQ ID NO: 97768 - RNA, 19 nt, Artificial Sequence
  Description of Artificial Sequence: Synthetic oligonucleotide
aacccuacguauuaaaccu

SEQ ID NO: 97769 - RNA, 19 nt, Artificial Sequence
  Description of Artificial Sequence: Synthetic oligonucleotide
aaagguuguaagguaauuc

SEQ ID NO: 97770 - RNA, 19 nt, Artificial Sequence
  Description of Artificial Sequence: Synthetic oligonucleotide
ugauuauuuaaucccacac

SEQ ID NO: 97771 - RNA, 19 nt, Artificial Sequence
  Description of Artificial Sequence: Synthetic oligonucleotide
ugagguuaaguauuuagga

SEQ ID NO: 97772 - RNA, 19 nt, Artificial Sequence
  Description of Artificial Sequence: Synthetic oligonucleotide
uucaacuauaccuugacua

SEQ ID NO: 97773 - RNA, 19 nt, Artificial Sequence
  Description of Artificial Sequence: Synthetic oligonucleotide
acccaauucuuaaagagcc

SEQ ID NO: 97774 - RNA, 19 nt, Artificial Sequence
  Description of Artificial Sequence: Synthetic oligonucleotide
aguaacuagggucuacagg

SEQ ID NO: 97775 - RNA, 19 nt, Artificial Sequence
  Description of Artificial Sequence: Synthetic oligonucleotide
auuaucuuaauucuacaaa

SEQ ID NO: 97776 - RNA, 19 nt, Artificial Sequence
  Description of Artificial Sequence: Synthetic oligonucleotide
uuaaagagccaacacuucu

SEQ ID NO: 97777 - RNA, 19 nt, Artificial Sequence
  Description of Artificial Sequence: Synthetic oligonucleotide
cacuauauccugaaguuag

SEQ ID NO: 97778 - RNA, 19 nt, Artificial Sequence
  Description of Artificial Sequence: Synthetic oligonucleotide
cugagguuaaguauuuagg

SEQ ID NO: 97779 - RNA, 19 nt, Artificial Sequence
  Description of Artificial Sequence: Synthetic oligonucleotide
cagaacgagccuuugaagg

SEQ ID NO: 97780 - RNA, 19 nt, Artificial Sequence
  Description of Artificial Sequence: Synthetic oligonucleotide
agugcauuuaguaacuagg

SEQ ID NO: 97781 - RNA, 19 nt, Artificial Sequence
  Description of Artificial Sequence: Synthetic oligonucleotide
gauuauuuaaucccacaca

SEQ ID NO: 97782 - RNA, 19 nt, Artificial Sequence
  Description of Artificial Sequence: Synthetic oligonucleotide
acuacauuaacaaaggcaa

SEQ ID NO: 97783 - RNA, 19 nt, Artificial Sequence
  Description of Artificial Sequence: Synthetic oligonucleotide
aacuauaccuugacuaaac

SEQ ID NO: 97784 - RNA, 19 nt, Artificial Sequence
  Description of Artificial Sequence: Synthetic oligonucleotide
aauccaguuauuccuacaa

SEQ ID NO: 97785 - RNA, 19 nt, Artificial Sequence
  Description of Artificial Sequence: Synthetic oligonucleotide
ugaccuauucaauaaggca

SEQ ID NO: 97786 - RNA, 19 nt, Artificial Sequence
  Description of Artificial Sequence: Synthetic oligonucleotide
uauauccugaaguuagucu

SEQ ID NO: 97787 - RNA, 19 nt, Artificial Sequence
  Description of Artificial Sequence: Synthetic oligonucleotide
acuuauugauugcagucuc

SEQ ID NO: 97788 - RNA, 19 nt, Artificial Sequence
  Description of Artificial Sequence: Synthetic oligonucleotide
gcuacugacaccuaucuag

SEQ ID NO: 97789 - RNA, 19 nt, Artificial Sequence
  Description of Artificial Sequence: Synthetic oligonucleotide
uauauacuuauuggggcgg

SEQ ID NO: 97790 - RNA, 19 nt, Artificial Sequence
  Description of Artificial Sequence: Synthetic oligonucleotide
cauaacucgagcuuuauaa

SEQ ID NO: 97791 - RNA, 19 nt, Artificial Sequence
  Description of Artificial Sequence: Synthetic oligonucleotide
ugcgaauccaguuauuccu

SEQ ID NO: 97792 - RNA, 19 nt, Artificial Sequence
  Description of Artificial Sequence: Synthetic oligonucleotide
ugacuaaacacugagguua

SEQ ID NO: 97793 - RNA, 19 nt, Artificial Sequence
  Description of Artificial Sequence: Synthetic oligonucleotide
ucuaaaugagcuuaaucuu

SEQ ID NO: 97794 - RNA, 19 nt, Artificial Sequence
  Description of Artificial Sequence: Synthetic oligonucleotide
ucaauaagccuaauauuuc

SEQ ID NO: 97795 - RNA, 19 nt, Artificial Sequence
  Description of Artificial Sequence: Synthetic oligonucleotide
ggcuaaaacggucaaaugc

SEQ ID NO: 97796 - RNA, 19 nt, Artificial Sequence
  Description of Artificial Sequence: Synthetic oligonucleotide
augacuuuaacaugucuga

SEQ ID NO: 97797 - RNA, 19 nt, Artificial Sequence
  Description of Artificial Sequence: Synthetic oligonucleotide
cuauaccuugacuaaacac

SEQ ID NO: 97798 - RNA, 19 nt, Artificial Sequence
  Description of Artificial Sequence: Synthetic oligonucleotide
ucaacuauaccuugacuaa

SEQ ID NO: 97799 - RNA, 19 nt, Artificial Sequence
  Description of Artificial Sequence: Synthetic oligonucleotide
aggcguccuauguagacgc

SEQ ID NO: 97800 - RNA, 19 nt, Artificial Sequence
  Description of Artificial Sequence: Synthetic oligonucleotide
cugacaccuaucuaggccc

SEQ ID NO: 97801 - RNA, 19 nt, Artificial Sequence
  Description of Artificial Sequence: Synthetic oligonucleotide
agugggaacauaaaggcug

SEQ ID NO: 97802 - RNA, 19 nt, Artificial Sequence
  Description of Artificial Sequence: Synthetic oligonucleotide
uuggauuaacagcacaaaa

SEQ ID NO: 97803 - RNA, 19 nt, Artificial Sequence
  Description of Artificial Sequence: Synthetic oligonucleotide
uguugauacuccacccagg

SEQ ID NO: 97804 - RNA, 19 nt, Artificial Sequence
  Description of Artificial Sequence: Synthetic oligonucleotide
ucuacgaucacgcgcucgc

SEQ ID NO: 97805 - RNA, 19 nt, Artificial Sequence
  Description of Artificial Sequence: Synthetic oligonucleotide
guaacuagggucuacaggu

SEQ ID NO: 97806 - RNA, 19 nt, Artificial Sequence
  Description of Artificial Sequence: Synthetic oligonucleotide
ucacuuauugauugcaguc

SEQ ID NO: 97807 - RNA, 19 nt, Artificial Sequence
  Description of Artificial Sequence: Synthetic oligonucleotide
uguuuagcucguaaacggc

SEQ ID NO: 97808 - RNA, 19 nt, Artificial Sequence
  Description of Artificial Sequence: Synthetic oligonucleotide
aacgugaccuacuucggga

SEQ ID NO: 97809 - RNA, 19 nt, Artificial Sequence
  Description of Artificial Sequence: Synthetic oligonucleotide
ugcauuuaguaacuagggu

SEQ ID NO: 97810 - RNA, 19 nt, Artificial Sequence
  Description of Artificial Sequence: Synthetic oligonucleotide
cuacguauuaaaccugagc

SEQ ID NO: 97811 - RNA, 19 nt, Artificial Sequence
  Description of Artificial Sequence: Synthetic oligonucleotide
guagcuguagccaucgcgg

SEQ ID NO: 97812 - RNA, 19 nt, Artificial Sequence
  Description of Artificial Sequence: Synthetic oligonucleotide
auaagccuguauucuguac

SEQ ID NO: 97813 - RNA, 19 nt, Artificial Sequence
  Description of Artificial Sequence: Synthetic oligonucleotide
uagugcauuuaguaacuag

SEQ ID NO: 97814 - RNA, 19 nt, Artificial Sequence
  Description of Artificial Sequence: Synthetic oligonucleotide
agcgccuauggcuuguucg

SEQ ID NO: 97815 - RNA, 19 nt, Artificial Sequence
  Description of Artificial Sequence: Synthetic oligonucleotide
uaggaucuaaauucaauua

SEQ ID NO: 97816 - RNA, 19 nt, Artificial Sequence
  Description of Artificial Sequence: Synthetic oligonucleotide
caguuuauccaaagcacgc

SEQ ID NO: 97817 - RNA, 19 nt, Artificial Sequence
  Description of Artificial Sequence: Synthetic oligonucleotide
agucaguaaagaacuaaac

SEQ ID NO: 97818 - RNA, 19 nt, Artificial Sequence
  Description of Artificial Sequence: Synthetic oligonucleotide
agugaccuauucaauaagg

SEQ ID NO: 97819 - RNA, 19 nt, Artificial Sequence
  Description of Artificial Sequence: Synthetic oligonucleotide
auucaauaaggcaaucauc

SEQ ID NO: 97820 - RNA, 19 nt, Artificial Sequence
  Description of Artificial Sequence: Synthetic oligonucleotide
ucguaaacggcgucgucgg

SEQ ID NO: 97821 - RNA, 19 nt, Artificial Sequence
  Description of Artificial Sequence: Synthetic oligonucleotide
agucagucaauucugcuaa

SEQ ID NO: 97822 - RNA, 19 nt, Artificial Sequence
  Description of Artificial Sequence: Synthetic oligonucleotide
uaacucgagcuuuauaaaa

SEQ ID NO: 97823 - RNA, 19 nt, Artificial Sequence
  Description of Artificial Sequence: Synthetic oligonucleotide
uuuguucguucuuuaugag

SEQ ID NO: 97824 - RNA, 19 nt, Artificial Sequence
  Description of Artificial Sequence: Synthetic oligonucleotide
ugucccauuauagugugca

SEQ ID NO: 97825 - RNA, 19 nt, Artificial Sequence
  Description of Artificial Sequence: Synthetic oligonucleotide
gaugcauggaaacugcgaa

SEQ ID NO: 97826 - RNA, 19 nt, Artificial Sequence
  Description of Artificial Sequence: Synthetic oligonucleotide
guuuagcucguaaacggcg

SEQ ID NO: 97827 - RNA, 19 nt, Artificial Sequence
  Description of Artificial Sequence: Synthetic oligonucleotide
uuuagcucguaaacggcgu

SEQ ID NO: 97828 - RNA, 19 nt, Artificial Sequence
  Description of Artificial Sequence: Synthetic oligonucleotide
acugcgaauccaguuauuc

SEQ ID NO: 97829 - RNA, 19 nt, Artificial Sequence
  Description of Artificial Sequence: Synthetic oligonucleotide
ucgugguuuaucuucaaua

SEQ ID NO: 97830 - RNA, 19 nt, Artificial Sequence
  Description of Artificial Sequence: Synthetic oligonucleotide
ugcgcauuaguuggcaggg

SEQ ID NO: 97831 - RNA, 19 nt, Artificial Sequence
  Description of Artificial Sequence: Synthetic oligonucleotide
caaguuugcacuauuuuaa

SEQ ID NO: 97832 - RNA, 19 nt, Artificial Sequence
  Description of Artificial Sequence: Synthetic oligonucleotide
gaacgugaccuacuucggg

SEQ ID NO: 97833 - RNA, 19 nt, Artificial Sequence
  Description of Artificial Sequence: Synthetic oligonucleotide
gaagaguaacugccuaagc

SEQ ID NO: 97834 - RNA, 19 nt, Artificial Sequence
  Description of Artificial Sequence: Synthetic oligonucleotide
acuucgggacuucccauac

SEQ ID NO: 97835 - RNA, 19 nt, Artificial Sequence
  Description of Artificial Sequence: Synthetic oligonucleotide
acagaacgagccuuugaag

SEQ ID NO: 97836 - RNA, 19 nt, Artificial Sequence
  Description of Artificial Sequence: Synthetic oligonucleotide
uggacuuuauaucuccuuu

SEQ ID NO: 97837 - RNA, 19 nt, Artificial Sequence
  Description of Artificial Sequence: Synthetic oligonucleotide
aaacggucaaaugccuccg

SEQ ID NO: 97838 - RNA, 19 nt, Artificial Sequence
  Description of Artificial Sequence: Synthetic oligonucleotide
cuaucuaggcccuugaaua

SEQ ID NO: 97839 - RNA, 19 nt, Artificial Sequence
  Description of Artificial Sequence: Synthetic oligonucleotide
cucguaaacggcgucgucg

SEQ ID NO: 97840 - RNA, 19 nt, Artificial Sequence
  Description of Artificial Sequence: Synthetic oligonucleotide
agaacgagccuuugaaggu

SEQ ID NO: 97841 - RNA, 19 nt, Artificial Sequence
  Description of Artificial Sequence: Synthetic oligonucleotide
aacgagaucuagaacggga

SEQ ID NO: 97842 - RNA, 19 nt, Artificial Sequence
  Description of Artificial Sequence: Synthetic oligonucleotide
gggucuacagguaugaacc

SEQ ID NO: 97843 - RNA, 19 nt, Artificial Sequence
  Description of Artificial Sequence: Synthetic oligonucleotide
cauuauagugugcaaagaa

SEQ ID NO: 97844 - RNA, 19 nt, Artificial Sequence
  Description of Artificial Sequence: Synthetic oligonucleotide
aacuagggucuacagguau

SEQ ID NO: 97845 - RNA, 19 nt, Artificial Sequence
  Description of Artificial Sequence: Synthetic oligonucleotide
uauguagacgcgcggcaug

SEQ ID NO: 97846 - RNA, 19 nt, Artificial Sequence
  Description of Artificial Sequence: Synthetic oligonucleotide
auauacuuauuggggcggc

SEQ ID NO: 97847 - RNA, 19 nt, Artificial Sequence
  Description of Artificial Sequence: Synthetic oligonucleotide
agguaucaacacuuacggg

SEQ ID NO: 97848 - RNA, 19 nt, Artificial Sequence
  Description of Artificial Sequence: Synthetic oligonucleotide
gacguuguagcucaggcgu

SEQ ID NO: 97849 - RNA, 19 nt, Artificial Sequence
  Description of Artificial Sequence: Synthetic oligonucleotide
auaacucgagcuuuauaaa

SEQ ID NO: 97850 - RNA, 19 nt, Artificial Sequence
  Description of Artificial Sequence: Synthetic oligonucleotide
aggccaaguacaaacuugg

SEQ ID NO: 97851 - RNA, 19 nt, Artificial Sequence
  Description of Artificial Sequence: Synthetic oligonucleotide
guaucaacacuuacggggc

SEQ ID NO: 97852 - RNA, 19 nt, Artificial Sequence
  Description of Artificial Sequence: Synthetic oligonucleotide
aucgggaucgaccuuugcu

SEQ ID NO: 97853 - RNA, 19 nt, Artificial Sequence
  Description of Artificial Sequence: Synthetic oligonucleotide
aggcucaaaggcuacaaaa

SEQ ID NO: 97854 - RNA, 19 nt, Artificial Sequence
  Description of Artificial Sequence: Synthetic oligonucleotide
ucgggaucgaccuuugcuc

SEQ ID NO: 97855 - RNA, 19 nt, Artificial Sequence
  Description of Artificial Sequence: Synthetic oligonucleotide
acggcgaaggcccgaacac

SEQ ID NO: 97856 - RNA, 19 nt, Artificial Sequence
  Description of Artificial Sequence: Synthetic oligonucleotide
caggccuagauuuuaauaa

SEQ ID NO: 97857 - RNA, 19 nt, Artificial Sequence
  Description of Artificial Sequence: Synthetic oligonucleotide
gauuggauuaacagcacaa

SEQ ID NO: 97858 - RNA, 19 nt, Artificial Sequence
  Description of Artificial Sequence: Synthetic oligonucleotide
auccaguuauuccuacaag

SEQ ID NO: 97859 - RNA, 19 nt, Artificial Sequence
  Description of Artificial Sequence: Synthetic oligonucleotide
augggaaccccgaucagac

SEQ ID NO: 97860 - RNA, 19 nt, Artificial Sequence
  Description of Artificial Sequence: Synthetic oligonucleotide
uaaggcaaucaucuuggua

SEQ ID NO: 97861 - RNA, 19 nt, Artificial Sequence
  Description of Artificial Sequence: Synthetic oligonucleotide
guaaacggcgucgucggcg

SEQ ID NO: 97862 - RNA, 19 nt, Artificial Sequence
  Description of Artificial Sequence: Synthetic oligonucleotide
augggaccgagacuggcuc

SEQ ID NO: 97863 - RNA, 19 nt, Artificial Sequence
  Description of Artificial Sequence: Synthetic oligonucleotide
uucgagaucuacugcggcu

SEQ ID NO: 97864 - RNA, 19 nt, Artificial Sequence
  Description of Artificial Sequence: Synthetic oligonucleotide
cugcgcauuaguuggcagg

SEQ ID NO: 97865 - RNA, 19 nt, Artificial Sequence
  Description of Artificial Sequence: Synthetic oligonucleotide
uuuuaggcucaaaggcuac

SEQ ID NO: 97866 - RNA, 19 nt, Artificial Sequence
  Description of Artificial Sequence: Synthetic oligonucleotide
gaguccucgaacuccacga

SEQ ID NO: 97867 - RNA, 19 nt, Artificial Sequence
  Description of Artificial Sequence: Synthetic oligonucleotide
acgaucacgcgcucgccac

SEQ ID NO: 97868 - RNA, 19 nt, Artificial Sequence
  Description of Artificial Sequence: Synthetic oligonucleotide
gugaccuauucaauaaggc

SEQ ID NO: 97869 - RNA, 19 nt, Artificial Sequence
  Description of Artificial Sequence: Synthetic oligonucleotide
gaguaagagcgccuauggc

SEQ ID NO: 97870 - RNA, 19 nt, Artificial Sequence
  Description of Artificial Sequence: Synthetic oligonucleotide
aacacuuacggggcccuag

SEQ ID NO: 97871 - RNA, 19 nt, Artificial Sequence
  Description of Artificial Sequence: Synthetic oligonucleotide
ugucagaguaggaucuaaa

SEQ ID NO: 97872 - RNA, 19 nt, Artificial Sequence
  Description of Artificial Sequence: Synthetic oligonucleotide
ucgaccuuugcuccgcgac

SEQ ID NO: 97873 - RNA, 19 nt, Artificial Sequence
  Description of Artificial Sequence: Synthetic oligonucleotide
aaaucuaaaugagcuuaau

SEQ ID NO: 97874 - RNA, 19 nt, Artificial Sequence
  Description of Artificial Sequence: Synthetic oligonucleotide
gcaaguaggacaguguccc

SEQ ID NO: 97875 - RNA, 19 nt, Artificial Sequence
  Description of Artificial Sequence: Synthetic oligonucleotide
uugacuaaacacugagguu

SEQ ID NO: 97876 - RNA, 19 nt, Artificial Sequence
  Description of Artificial Sequence: Synthetic oligonucleotide
uagacagauuuucuacaau

SEQ ID NO: 97877 - RNA, 19 nt, Artificial Sequence
  Description of Artificial Sequence: Synthetic oligonucleotide
uuacauaacucgagcuuua

SEQ ID NO: 97878 - RNA, 19 nt, Artificial Sequence
  Description of Artificial Sequence: Synthetic oligonucleotide
uccuauguagacgcgcggc

SEQ ID NO: 97879 - RNA, 19 nt, Artificial Sequence
  Description of Artificial Sequence: Synthetic oligonucleotide
auauuugucucugccagaa

SEQ ID NO: 97880 - RNA, 19 nt, Artificial Sequence
  Description of Artificial Sequence: Synthetic oligonucleotide
uacuuauuggggcggcuaa

SEQ ID NO: 97881 - RNA, 19 nt, Artificial Sequence
  Description of Artificial Sequence: Synthetic oligonucleotide
gaggucgaucucgaggagg

SEQ ID NO: 97882 - RNA, 19 nt, Artificial Sequence
  Description of Artificial Sequence: Synthetic oligonucleotide
gacacuauauccugaaguu

SEQ ID NO: 97883 - RNA, 19 nt, Artificial Sequence
  Description of Artificial Sequence: Synthetic oligonucleotide
ggcauuuaccuauacauua

SEQ ID NO: 97884 - RNA, 19 nt, Artificial Sequence
  Description of Artificial Sequence: Synthetic oligonucleotide
uauggguguuggcauuuac

SEQ ID NO: 97885 - RNA, 19 nt, Artificial Sequence
  Description of Artificial Sequence: Synthetic oligonucleotide
ucugcgcauuaguuggcag

SEQ ID NO: 97886 - RNA, 19 nt, Artificial Sequence
  Description of Artificial Sequence: Synthetic oligonucleotide
aguuuauccaaagcacgcu

SEQ ID NO: 97887 - RNA, 19 nt, Artificial Sequence
  Description of Artificial Sequence: Synthetic oligonucleotide
uacgaucacgcgcucgcca

SEQ ID NO: 97888 - RNA, 19 nt, Artificial Sequence
  Description of Artificial Sequence: Synthetic oligonucleotide
cuucgagaucuacugcggc

SEQ ID NO: 97889 - RNA, 19 nt, Artificial Sequence
  Description of Artificial Sequence: Synthetic oligonucleotide
ucccauuauagugugcaaa

SEQ ID NO: 97890 - RNA, 19 nt, Artificial Sequence
  Description of Artificial Sequence: Synthetic oligonucleotide
uacacuucaguggaauuua

SEQ ID NO: 97891 - RNA, 19 nt, Artificial Sequence
  Description of Artificial Sequence: Synthetic oligonucleotide
gugcucuacgaucacgcgc

SEQ ID NO: 97892 - RNA, 19 nt, Artificial Sequence
  Description of Artificial Sequence: Synthetic oligonucleotide
uggaaacugcgaauccagu

SEQ ID NO: 97893 - RNA, 19 nt, Artificial Sequence
  Description of Artificial Sequence: Synthetic oligonucleotide
ugaauucacuagucaguaa

SEQ ID NO: 97894 - RNA, 19 nt, Artificial Sequence
  Description of Artificial Sequence: Synthetic oligonucleotide
cuauauccugaaguuaguc

SEQ ID NO: 97895 - RNA, 19 nt, Artificial Sequence
  Description of Artificial Sequence: Synthetic oligonucleotide
aggccuagauuuuaauaaa

SEQ ID NO: 97896 - RNA, 19 nt, Artificial Sequence
  Description of Artificial Sequence: Synthetic oligonucleotide
uccacgaaaccguacccau

SEQ ID NO: 97897 - RNA, 19 nt, Artificial Sequence
  Description of Artificial Sequence: Synthetic oligonucleotide
gaacgagccuuugaaggug

SEQ ID NO: 97898 - RNA, 19 nt, Artificial Sequence
  Description of Artificial Sequence: Synthetic oligonucleotide
uuggacuuuauaucuccuu

SEQ ID NO: 97899 - RNA, 19 nt, Artificial Sequence
  Description of Artificial Sequence: Synthetic oligonucleotide
uuacggggcccuaguagug

SEQ ID NO: 97900 - RNA, 19 nt, Artificial Sequence
  Description of Artificial Sequence: Synthetic oligonucleotide
gcuuugacacuauauccug

SEQ ID NO: 97901 - RNA, 19 nt, Artificial Sequence
  Description of Artificial Sequence: Synthetic oligonucleotide
caagacacgcuuucauguc

SEQ ID NO: 97902 - RNA, 19 nt, Artificial Sequence
  Description of Artificial Sequence: Synthetic oligonucleotide
uccgcgaccuagaucggga

SEQ ID NO: 97903 - RNA, 19 nt, Artificial Sequence
  Description of Artificial Sequence: Synthetic oligonucleotide
uucgugguuuaucuucaau

SEQ ID NO: 97904 - RNA, 19 nt, Artificial Sequence
  Description of Artificial Sequence: Synthetic oligonucleotide
uuagcucguaaacggcguc

SEQ ID NO: 97905 - RNA, 19 nt, Artificial Sequence
  Description of Artificial Sequence: Synthetic oligonucleotide
ugcuugccgcaugaaaucc

SEQ ID NO: 97906 - RNA, 19 nt, Artificial Sequence
  Description of Artificial Sequence: Synthetic oligonucleotide
ucgcggacguuguagcuca

SEQ ID NO: 97907 - RNA, 19 nt, Artificial Sequence
  Description of Artificial Sequence: Synthetic oligonucleotide
gaccuugaacgagaucuag

SEQ ID NO: 97908 - RNA, 19 nt, Artificial Sequence
  Description of Artificial Sequence: Synthetic oligonucleotide
ugcgacuccuacuccguga

SEQ ID NO: 97909 - RNA, 19 nt, Artificial Sequence
  Description of Artificial Sequence: Synthetic oligonucleotide
cacagaacgagccuuugaa

SEQ ID NO: 97910 - RNA, 19 nt, Artificial Sequence
  Description of Artificial Sequence: Synthetic oligonucleotide
aacggucaaaugccuccgu

SEQ ID NO: 97911 - RNA, 19 nt, Artificial Sequence
  Description of Artificial Sequence: Synthetic oligonucleotide
uuugcuccgcgaccuagau

SEQ ID NO: 97912 - RNA, 19 nt, Artificial Sequence
  Description of Artificial Sequence: Synthetic oligonucleotide
uugcagucucaacgaacug

SEQ ID NO: 97913 - RNA, 19 nt, Artificial Sequence
  Description of Artificial Sequence: Synthetic oligonucleotide
auaucaagacacgcuuuca

SEQ ID NO: 97914 - RNA, 19 nt, Artificial Sequence
  Description of Artificial Sequence: Synthetic oligonucleotide
cuuugacacuauauccuga

SEQ ID NO: 97915 - RNA, 19 nt, Artificial Sequence
  Description of Artificial Sequence: Synthetic oligonucleotide
gacggcgaaggcccgaaca

SEQ ID NO: 97916 - RNA, 19 nt, Artificial Sequence
  Description of Artificial Sequence: Synthetic oligonucleotide
gaaugggaccgagacuggc

SEQ ID NO: 97917 - RNA, 19 nt, Artificial Sequence
  Description of Artificial Sequence: Synthetic oligonucleotide
auucugcgcauuaguuggc

SEQ ID NO: 97918 - RNA, 19 nt, Artificial Sequence
  Description of Artificial Sequence: Synthetic oligonucleotide
aguaacugccuaagcaagu

SEQ ID NO: 97919 - RNA, 19 nt, Artificial Sequence
  Description of Artificial Sequence: Synthetic oligonucleotide
uaagagcgccuauggcuug

SEQ ID NO: 97920 - RNA, 19 nt, Artificial Sequence
  Description of Artificial Sequence: Synthetic oligonucleotide
cuguacgaacagguggucc

SEQ ID NO: 97921 - RNA, 19 nt, Artificial Sequence
  Description of Artificial Sequence: Synthetic oligonucleotide
cuagaccgugaucuggauc

SEQ ID NO: 97922 - RNA, 19 nt, Artificial Sequence
  Description of Artificial Sequence: Synthetic oligonucleotide
acgaacaggugguccauau

SEQ ID NO: 97923 - RNA, 19 nt, Artificial Sequence
  Description of Artificial Sequence: Synthetic oligonucleotide
guccuauguagacgcgcgg

SEQ ID NO: 97924 - RNA, 19 nt, Artificial Sequence
  Description of Artificial Sequence: Synthetic oligonucleotide
ugacaccuaucuaggcccu

SEQ ID NO: 97925 - RNA, 19 nt, Artificial Sequence
  Description of Artificial Sequence: Synthetic oligonucleotide
augcauggaaacugcgaau

SEQ ID NO: 97926 - RNA, 19 nt, Artificial Sequence
  Description of Artificial Sequence: Synthetic oligonucleotide
gaucgaccuuugcuccgcg

SEQ ID NO: 97927 - RNA, 19 nt, Artificial Sequence
  Description of Artificial Sequence: Synthetic oligonucleotide
gaggcuugccuuguuuuac

SEQ ID NO: 97928 - RNA, 19 nt, Artificial Sequence
  Description of Artificial Sequence: Synthetic oligonucleotide
acggggcccuaguagugac

SEQ ID NO: 97929 - RNA, 19 nt, Artificial Sequence
  Description of Artificial Sequence: Synthetic oligonucleotide
aguaggacagugucccauu

SEQ ID NO: 97930 - RNA, 19 nt, Artificial Sequence
  Description of Artificial Sequence: Synthetic oligonucleotide
guuuaaguuuagccauguc

SEQ ID NO: 97931 - RNA, 19 nt, Artificial Sequence
  Description of Artificial Sequence: Synthetic oligonucleotide
gaccgagacuggcuccggg

SEQ ID NO: 97932 - RNA, 19 nt, Artificial Sequence
  Description of Artificial Sequence: Synthetic oligonucleotide
acuagggucuacagguaug

SEQ ID NO: 97933 - RNA, 19 nt, Artificial Sequence
  Description of Artificial Sequence: Synthetic oligonucleotide
uacuucgggacuucccaua

SEQ ID NO: 97934 - RNA, 19 nt, Artificial Sequence
  Description of Artificial Sequence: Synthetic oligonucleotide
ucaacacuuacggggcccu

SEQ ID NO: 97935 - RNA, 19 nt, Artificial Sequence
  Description of Artificial Sequence: Synthetic oligonucleotide
gaaccccgaucagacuugg

SEQ ID NO: 97936 - RNA, 19 nt, Artificial Sequence
  Description of Artificial Sequence: Synthetic oligonucleotide
uucugcgcauuaguuggca

SEQ ID NO: 97937 - RNA, 19 nt, Artificial Sequence
  Description of Artificial Sequence: Synthetic oligonucleotide
uuccuaagauucugcgcau

SEQ ID NO: 97938 - RNA, 19 nt, Artificial Sequence
  Description of Artificial Sequence: Synthetic oligonucleotide
acuauauccugaaguuagu

SEQ ID NO: 97939 - RNA, 19 nt, Artificial Sequence
  Description of Artificial Sequence: Synthetic oligonucleotide
cuuacggggcccuaguagu

SEQ ID NO: 97940 - RNA, 19 nt, Artificial Sequence
  Description of Artificial Sequence: Synthetic oligonucleotide
aaggcccgaacacgcgccu

SEQ ID NO: 97941 - RNA, 19 nt, Artificial Sequence
  Description of Artificial Sequence: Synthetic oligonucleotide
ugggaccgagacuggcucc

SEQ ID NO: 97942 - RNA, 19 nt, Artificial Sequence
  Description of Artificial Sequence: Synthetic oligonucleotide
auuuaaucccacacaccaa

SEQ ID NO: 97943 - RNA, 19 nt, Artificial Sequence
  Description of Artificial Sequence: Synthetic oligonucleotide
guagcucaggcguccuaug

SEQ ID NO: 97944 - RNA, 19 nt, Artificial Sequence
  Description of Artificial Sequence: Synthetic oligonucleotide
acacuauauccugaaguua

SEQ ID NO: 97945 - RNA, 19 nt, Artificial Sequence
  Description of Artificial Sequence: Synthetic oligonucleotide
uuagugcauuuaguaacua

SEQ ID NO: 97946 - RNA, 19 nt, Artificial Sequence
  Description of Artificial Sequence: Synthetic oligonucleotide
cucuacgaucacgcgcucg

SEQ ID NO: 97947 - RNA, 19 nt, Artificial Sequence
  Description of Artificial Sequence: Synthetic oligonucleotide
gaucgggaucgaccuuugc

SEQ ID NO: 97948 - RNA, 19 nt, Artificial Sequence
  Description of Artificial Sequence: Synthetic oligonucleotide
cagucucaacgaacugggc

SEQ ID NO: 97949 - RNA, 19 nt, Artificial Sequence
  Description of Artificial Sequence: Synthetic oligonucleotide
ugcgugcagucagaaaguc

SEQ ID NO: 97950 - RNA, 19 nt, Artificial Sequence
  Description of Artificial Sequence: Synthetic oligonucleotide
cuuacauaacucgagcuuu

SEQ ID NO: 97951 - RNA, 19 nt, Artificial Sequence
  Description of Artificial Sequence: Synthetic oligonucleotide
auacuuauuggggcggcua

SEQ ID NO: 97952 - RNA, 19 nt, Artificial Sequence
  Description of Artificial Sequence: Synthetic oligonucleotide
gucucaacgaacugggcuu

SEQ ID NO: 97953 - RNA, 19 nt, Artificial Sequence
  Description of Artificial Sequence: Synthetic oligonucleotide
gggaacugaauucacuagu

SEQ ID NO: 97954 - RNA, 19 nt, Artificial Sequence
  Description of Artificial Sequence: Synthetic oligonucleotide
uacggggcccuaguaguga

SEQ ID NO: 97955 - RNA, 19 nt, Artificial Sequence
  Description of Artificial Sequence: Synthetic oligonucleotide
cguccuauguagacgcgcg

SEQ ID NO: 97956 - RNA, 19 nt, Artificial Sequence
  Description of Artificial Sequence: Synthetic oligonucleotide
gaucacgcgcucgccacac

SEQ ID NO: 97957 - RNA, 19 nt, Artificial Sequence
  Description of Artificial Sequence: Synthetic oligonucleotide
cagugucccauuauagugu

SEQ ID NO: 97958 - RNA, 19 nt, Artificial Sequence
  Description of Artificial Sequence: Synthetic oligonucleotide
ccacuaacacaauggggac

SEQ ID NO: 97959 - RNA, 19 nt, Artificial Sequence
  Description of Artificial Sequence: Synthetic oligonucleotide
gguccauauuugucucugc

SEQ ID NO: 97960 - RNA, 19 nt, Artificial Sequence
  Description of Artificial Sequence: Synthetic oligonucleotide
ugcggugcgggugcgggga

SEQ ID NO: 97961 - RNA, 19 nt, Artificial Sequence
  Description of Artificial Sequence: Synthetic oligonucleotide
agcucguaaacggcgucgu

SEQ ID NO: 97962 - RNA, 19 nt, Artificial Sequence
  Description of Artificial Sequence: Synthetic oligonucleotide
acguuguagcucaggcguc

SEQ ID NO: 97963 - RNA, 19 nt, Artificial Sequence
  Description of Artificial Sequence: Synthetic oligonucleotide
caucuugguagcaaacuuu

SEQ ID NO: 97964 - RNA, 19 nt, Artificial Sequence
  Description of Artificial Sequence: Synthetic oligonucleotide
caacuauaccuugacuaaa

SEQ ID NO: 97965 - RNA, 19 nt, Artificial Sequence
  Description of Artificial Sequence: Synthetic oligonucleotide
ggcgaaggcccgaacacgc

SEQ ID NO: 97966 - RNA, 19 nt, Artificial Sequence
  Description of Artificial Sequence: Synthetic oligonucleotide
ucucaacgaacugggcuuu

SEQ ID NO: 97967 - RNA, 19 nt, Artificial Sequence
  Description of Artificial Sequence: Synthetic oligonucleotide
acccuacguauuaaaccug

SEQ ID NO: 97968 - RNA, 19 nt, Artificial Sequence
  Description of Artificial Sequence: Synthetic oligonucleotide
uguagacgcgcggcauggc

SEQ ID NO: 97969 - RNA, 19 nt, Artificial Sequence
  Description of Artificial Sequence: Synthetic oligonucleotide
cucgcggacguuguagcuc

SEQ ID NO: 97970 - RNA, 19 nt, Artificial Sequence
  Description of Artificial Sequence: Synthetic oligonucleotide
aggcccuugaauauccauu

SEQ ID NO: 97971 - RNA, 19 nt, Artificial Sequence
  Description of Artificial Sequence: Synthetic oligonucleotide
aaccccgaucagacuuggg

SEQ ID NO: 97972 - RNA, 19 nt, Artificial Sequence
  Description of Artificial Sequence: Synthetic oligonucleotide
cgugguuuaucuucaauaa

SEQ ID NO: 97973 - RNA, 19 nt, Artificial Sequence
  Description of Artificial Sequence: Synthetic oligonucleotide
gaccuacuucgggacuucc

SEQ ID NO: 97974 - RNA, 19 nt, Artificial Sequence
  Description of Artificial Sequence: Synthetic oligonucleotide
ggucuacagguaugaacca

SEQ ID NO: 97975 - RNA, 19 nt, Artificial Sequence
  Description of Artificial Sequence: Synthetic oligonucleotide
gcgugcucuacgaucacgc

SEQ ID NO: 97976 - RNA, 19 nt, Artificial Sequence
  Description of Artificial Sequence: Synthetic oligonucleotide
cuccgcgaccuagaucggg

SEQ ID NO: 97977 - RNA, 19 nt, Artificial Sequence
  Description of Artificial Sequence: Synthetic oligonucleotide
cuacgaucacgcgcucgcc

SEQ ID NO: 97978 - RNA, 19 nt, Artificial Sequence
  Description of Artificial Sequence: Synthetic oligonucleotide
cuacuccgugaccuucuuc

SEQ ID NO: 97979 - RNA, 19 nt, Artificial Sequence
  Description of Artificial Sequence: Synthetic oligonucleotide
ggcuuccguagcuguagcc

SEQ ID NO: 97980 - RNA, 19 nt, Artificial Sequence
  Description of Artificial Sequence: Synthetic oligonucleotide
ggcuugccuuguuuuacac

SEQ ID NO: 97981 - RNA, 19 nt, Artificial Sequence
  Description of Artificial Sequence: Synthetic oligonucleotide
gggaccgagacuggcuccg

SEQ ID NO: 97982 - RNA, 19 nt, Artificial Sequence
  Description of Artificial Sequence: Synthetic oligonucleotide
uccuaagauucugcgcauu

SEQ ID NO: 97983 - RNA, 19 nt, Artificial Sequence
  Description of Artificial Sequence: Synthetic oligonucleotide
ucgucggcgucgcgggagu

SEQ ID NO: 97984 - RNA, 19 nt, Artificial Sequence
  Description of Artificial Sequence: Synthetic oligonucleotide
gucgucggcgucgcgggag

SEQ ID NO: 97985 - RNA, 19 nt, Artificial Sequence
  Description of Artificial Sequence: Synthetic oligonucleotide
acuugggcuuagauuugcu

SEQ ID NO: 97986 - RNA, 19 nt, Artificial Sequence
  Description of Artificial Sequence: Synthetic oligonucleotide
gcgacuccuacuccgugac

SEQ ID NO: 97987 - RNA, 19 nt, Artificial Sequence
  Description of Artificial Sequence: Synthetic oligonucleotide
ggcgugcucuacgaucacg

SEQ ID NO: 97988 - RNA, 19 nt, Artificial Sequence
  Description of Artificial Sequence: Synthetic oligonucleotide
ccgggaucuggauuuggac

SEQ ID NO: 97989 - RNA, 19 nt, Artificial Sequence
  Description of Artificial Sequence: Synthetic oligonucleotide
acgaaaccguacccauuuu

SEQ ID NO: 97990 - RNA, 19 nt, Artificial Sequence
  Description of Artificial Sequence: Synthetic oligonucleotide
cccuacguauuaaaccuga

SEQ ID NO: 97991 - RNA, 19 nt, Artificial Sequence
  Description of Artificial Sequence: Synthetic oligonucleotide
ggaaccccgaucagacuug

SEQ ID NO: 97992 - RNA, 19 nt, Artificial Sequence
  Description of Artificial Sequence: Synthetic oligonucleotide
caaguaggacaguguccca

SEQ ID NO: 97993 - RNA, 19 nt, Artificial Sequence
  Description of Artificial Sequence: Synthetic oligonucleotide
ggaucgaccuuugcuccgc

SEQ ID NO: 97994 - RNA, 19 nt, Artificial Sequence
  Description of Artificial Sequence: Synthetic oligonucleotide
gucccauuauagugugcaa

SEQ ID NO: 97995 - RNA, 19 nt, Artificial Sequence
  Description of Artificial Sequence: Synthetic oligonucleotide
aacugcgaauccaguuauu

SEQ ID NO: 97996 - RNA, 19 nt, Artificial Sequence
  Description of Artificial Sequence: Synthetic oligonucleotide
uacgaacaggugguccaua

SEQ ID NO: 97997 - RNA, 19 nt, Artificial Sequence
  Description of Artificial Sequence: Synthetic oligonucleotide
cgggaucgaccuuugcucc

SEQ ID NO: 97998 - RNA, 19 nt, Artificial Sequence
  Description of Artificial Sequence: Synthetic oligonucleotide
gagcgccuauggcuuguuc

SEQ ID NO: 97999 - RNA, 19 nt, Artificial Sequence
  Description of Artificial Sequence: Synthetic oligonucleotide
caccuaucuaggcccuuga

SEQ ID NO: 98000 - RNA, 19 nt, Artificial Sequence
  Description of Artificial Sequence: Synthetic oligonucleotide
ggugcgggugcggggacgg

SEQ ID NO: 98001 - RNA, 19 nt, Artificial Sequence
  Description of Artificial Sequence: Synthetic oligonucleotide
cgaauccaguuauuccuac

SEQ ID NO: 98002 - RNA, 19 nt, Artificial Sequence
  Description of Artificial Sequence: Synthetic oligonucleotide
gcguccuauguagacgcgc

SEQ ID NO: 98003 - RNA, 19 nt, Artificial Sequence
  Description of Artificial Sequence: Synthetic oligonucleotide
cacaccaacccuacguauu

SEQ ID NO: 98004 - RNA, 19 nt, Artificial Sequence
  Description of Artificial Sequence: Synthetic oligonucleotide
cgugcucuacgaucacgcg

SEQ ID NO: 98005 - RNA, 19 nt, Artificial Sequence
  Description of Artificial Sequence: Synthetic oligonucleotide
gucggcgucgcgggagucc

SEQ ID NO: 98006 - RNA, 19 nt, Artificial Sequence
  Description of Artificial Sequence: Synthetic oligonucleotide
gggaaccccgaucagacuu

SEQ ID NO: 98007 - RNA, 19 nt, Artificial Sequence
  Description of Artificial Sequence: Synthetic oligonucleotide
ccaggccuagauuuuaaua

SEQ ID NO: 98008 - RNA, 19 nt, Artificial Sequence
  Description of Artificial Sequence: Synthetic oligonucleotide
cuugccgcaugaaauccuu

SEQ ID NO: 98009 - RNA, 19 nt, Artificial Sequence
  Description of Artificial Sequence: Synthetic oligonucleotide
guuuagccaugucacuguu

SEQ ID NO: 98010 - RNA, 19 nt, Artificial Sequence
  Description of Artificial Sequence: Synthetic oligonucleotide
auauggguguuggcauuua

SEQ ID NO: 98011 - RNA, 19 nt, Artificial Sequence
  Description of Artificial Sequence: Synthetic oligonucleotide
gcggcuaaaacggucaaau

SEQ ID NO: 98012 - RNA, 19 nt, Artificial Sequence
  Description of Artificial Sequence: Synthetic oligonucleotide
ccaguuauuccuacaaguu

SEQ ID NO: 98013 - RNA, 19 nt, Artificial Sequence
  Description of Artificial Sequence: Synthetic oligonucleotide
ccgggcgugcucuacgauc

SEQ ID NO: 98014 - RNA, 19 nt, Artificial Sequence
  Description of Artificial Sequence: Synthetic oligonucleotide
cguuguagcucaggcgucc

SEQ ID NO: 98015 - RNA, 19 nt, Artificial Sequence
  Description of Artificial Sequence: Synthetic oligonucleotide
gcgggaucgggaucgaccu

SEQ ID NO: 98016 - RNA, 19 nt, Artificial Sequence
  Description of Artificial Sequence: Synthetic oligonucleotide
gccuuuugagcgggaucgg

SEQ ID NO: 98017 - RNA, 19 nt, Artificial Sequence
  Description of Artificial Sequence: Synthetic oligonucleotide
gcgaaggcccgaacacgcg

SEQ ID NO: 98018 - RNA, 19 nt, Artificial Sequence
  Description of Artificial Sequence: Synthetic oligonucleotide
gcggacguuguagcucagg

SEQ ID NO: 98019 - RNA, 19 nt, Artificial Sequence
  Description of Artificial Sequence: Synthetic oligonucleotide
cuggaucuacuuccagagu

SEQ ID NO: 98020 - RNA, 19 nt, Artificial Sequence
  Description of Artificial Sequence: Synthetic oligonucleotide
caugucagaguaggaucua

SEQ ID NO: 98021 - RNA, 19 nt, Artificial Sequence
  Description of Artificial Sequence: Synthetic oligonucleotide
ggcguccuauguagacgcg

SEQ ID NO: 98022 - RNA, 19 nt, Artificial Sequence
  Description of Artificial Sequence: Synthetic oligonucleotide
ccggaggcuagcugaggug

SEQ ID NO: 98023 - RNA, 19 nt, Artificial Sequence
  Description of Artificial Sequence: Synthetic oligonucleotide
ggggacugauuggauuaac

SEQ ID NO: 98024 - RNA, 19 nt, Artificial Sequence
  Description of Artificial Sequence: Synthetic oligonucleotide
cgagaucuacugcggcugc

SEQ ID NO: 98025 - RNA, 19 nt, Artificial Sequence
  Description of Artificial Sequence: Synthetic oligonucleotide
ggcauggccguggcgggug

SEQ ID NO: 98026 - RNA, 19 nt, Artificial Sequence
  Description of Artificial Sequence: Synthetic oligonucleotide
cuauguagacgcgcggcau

SEQ ID NO: 98027 - RNA, 19 nt, Artificial Sequence
  Description of Artificial Sequence: Synthetic oligonucleotide
cacuuacggggcccuagua

SEQ ID NO: 98028 - RNA, 19 nt, Artificial Sequence
  Description of Artificial Sequence: Synthetic oligonucleotide
ggaucgggaucgaccuuug

SEQ ID NO: 98029 - RNA, 19 nt, Artificial Sequence
  Description of Artificial Sequence: Synthetic oligonucleotide
ccgacuagacagauuuucu

SEQ ID NO: 98030 - RNA, 19 nt, Artificial Sequence
  Description of Artificial Sequence: Synthetic oligonucleotide
ggccaaguacaaacuugga

SEQ ID NO: 98031 - RNA, 19 nt, Artificial Sequence
  Description of Artificial Sequence: Synthetic oligonucleotide
gcgccuauggcuuguucgu

SEQ ID NO: 98032 - RNA, 19 nt, Artificial Sequence
  Description of Artificial Sequence: Synthetic oligonucleotide
ggccaacgcuuuaaaugca

SEQ ID NO: 98033 - RNA, 19 nt, Artificial Sequence
  Description of Artificial Sequence: Synthetic oligonucleotide
gcgaauccaguuauuccua

SEQ ID NO: 98034 - RNA, 19 nt, Artificial Sequence
  Description of Artificial Sequence: Synthetic oligonucleotide
gcgugcagucagaaaguca

SEQ ID NO: 98035 - RNA, 19 nt, Artificial Sequence
  Description of Artificial Sequence: Synthetic oligonucleotide
ggaccgagacuggcuccgg

SEQ ID NO: 98036 - RNA, 19 nt, Artificial Sequence
  Description of Artificial Sequence: Synthetic oligonucleotide
guuguagcucaggcguccu

SEQ ID NO: 98037 - RNA, 19 nt, Artificial Sequence
  Description of Artificial Sequence: Synthetic oligonucleotide
cgggcgugcucuacgauca

SEQ ID NO: 98038 - RNA, 19 nt, Artificial Sequence
  Description of Artificial Sequence: Synthetic oligonucleotide
gcucguaaacggcgucguc

SEQ ID NO: 98039 - RNA, 19 nt, Artificial Sequence
  Description of Artificial Sequence: Synthetic oligonucleotide
cggcgaaggcccgaacacg

SEQ ID NO: 98040 - RNA, 19 nt, Artificial Sequence
  Description of Artificial Sequence: Synthetic oligonucleotide
caggggugaaugggaccga

SEQ ID NO: 98041 - RNA, 19 nt, Artificial Sequence
  Description of Artificial Sequence: Synthetic oligonucleotide
gcuugccgcaugaaauccu

SEQ ID NO: 98042 - RNA, 19 nt, Artificial Sequence
  Description of Artificial Sequence: Synthetic oligonucleotide
gggcgugcucuacgaucac

SEQ ID NO: 98043 - RNA, 19 nt, Artificial Sequence
  Description of Artificial Sequence: Synthetic oligonucleotide
gcuccgcgaccuagaucgg

SEQ ID NO: 98044 - RNA, 19 nt, Artificial Sequence
  Description of Artificial Sequence: Synthetic oligonucleotide
gcucuacgaucacgcgcuc

SEQ ID NO: 98045 - RNA, 19 nt, Artificial Sequence
  Description of Artificial Sequence: Synthetic oligonucleotide
ccguagcuguagccaucgc

SEQ ID NO: 98046 - RNA, 19 nt, Artificial Sequence
  Description of Artificial Sequence: Synthetic oligonucleotide
cuagaucgggagcgacuuu

SEQ ID NO: 98047 - RNA, 19 nt, Artificial Sequence
  Description of Artificial Sequence: Synthetic oligonucleotide
caccgacuagacagauuuu

SEQ ID NO: 98048 - RNA, 19 nt, Artificial Sequence
  Description of Artificial Sequence: Synthetic oligonucleotide
ccucauuuguucguucuuu

SEQ ID NO: 98049 - RNA, 19 nt, Artificial Sequence
  Description of Artificial Sequence: Synthetic oligonucleotide
gcgcauuaguuggcaggga

SEQ ID NO: 98050 - RNA, 19 nt, Artificial Sequence
  Description of Artificial Sequence: Synthetic oligonucleotide
cccgaucagacuugggcuu

SEQ ID NO: 98051 - RNA, 19 nt, Artificial Sequence
  Description of Artificial Sequence: Synthetic oligonucleotide
caacacuuacggggcccua

SEQ ID NO: 98052 - RNA, 19 nt, Artificial Sequence
  Description of Artificial Sequence: Synthetic oligonucleotide
cgcgggaguccucgaacuc

SEQ ID NO: 98053 - RNA, 19 nt, Artificial Sequence
  Description of Artificial Sequence: Synthetic oligonucleotide
gggacggcgaaggcccgaa

SEQ ID NO: 98054 - RNA, 19 nt, Artificial Sequence
  Description of Artificial Sequence: Synthetic oligonucleotide
gugcgggugcggggacggc

SEQ ID NO: 98055 - RNA, 19 nt, Artificial Sequence
  Description of Artificial Sequence: Synthetic oligonucleotide
gcccuugaauauccauuuu

SEQ ID NO: 98056 - RNA, 19 nt, Artificial Sequence
  Description of Artificial Sequence: Synthetic oligonucleotide
cggccguagccgcugaaaa

SEQ ID NO: 98057 - RNA, 19 nt, Artificial Sequence
  Description of Artificial Sequence: Synthetic oligonucleotide
gcggugcgggugcggggac

SEQ ID NO: 98058 - RNA, 19 nt, Artificial Sequence
  Description of Artificial Sequence: Synthetic oligonucleotide
cggggacggcgaaggcccg

SEQ ID NO: 98059 - RNA, 19 nt, Artificial Sequence
  Description of Artificial Sequence: Synthetic oligonucleotide
cgaucacgcgcucgccaca

SEQ ID NO: 98060 - RNA, 19 nt, Artificial Sequence
  Description of Artificial Sequence: Synthetic oligonucleotide
ggcggccguagccgcugaa

SEQ ID NO: 98061 - RNA, 19 nt, Artificial Sequence
  Description of Artificial Sequence: Synthetic oligonucleotide
cgcggacguuguagcucag

SEQ ID NO: 98062 - RNA, 19 nt, Artificial Sequence
  Description of Artificial Sequence: Synthetic oligonucleotide
gcccuaguagugaccuauu

SEQ ID NO: 98063 - RNA, 19 nt, Artificial Sequence
  Description of Artificial Sequence: Synthetic oligonucleotide
cgaacaggugguccauauu

SEQ ID NO: 98064 - RNA, 19 nt, Artificial Sequence
  Description of Artificial Sequence: Synthetic oligonucleotide
cgucggcgucgcgggaguc

SEQ ID NO: 98065 - RNA, 19 nt, Artificial Sequence
  Description of Artificial Sequence: Synthetic oligonucleotide
cccgggcgugcucuacgau

SEQ ID NO: 98066 - RNA, 19 nt, Artificial Sequence
  Description of Artificial Sequence: Synthetic oligonucleotide
cggucgcggcgcgggcccc

SEQ ID NO: 98067 - RNA, 19 nt, Artificial Sequence
  Description of Artificial Sequence: Synthetic oligonucleotide
cgggaucgggaucgaccuu

SEQ ID NO: 98068 - RNA, 19 nt, Artificial Sequence
  Description of Artificial Sequence: Synthetic oligonucleotide
aaaauuucacgauauggag

SEQ ID NO: 98069 - RNA, 19 nt, Artificial Sequence
  Description of Artificial Sequence: Synthetic oligonucleotide
gaaauuugcaaucggaagc

SEQ ID NO: 98070 - RNA, 19 nt, Artificial Sequence
  Description of Artificial Sequence: Synthetic oligonucleotide
uacuuuaucgcucacacgu

SEQ ID NO: 98071 - RNA, 19 nt, Artificial Sequence
  Description of Artificial Sequence: Synthetic oligonucleotide
aacucucgaguauuaagcc

SEQ ID NO: 98072 - RNA, 19 nt, Artificial Sequence
  Description of Artificial Sequence: Synthetic oligonucleotide
aaaagaacgcgcauuacac

SEQ ID NO: 98073 - RNA, 19 nt, Artificial Sequence
  Description of Artificial Sequence: Synthetic oligonucleotide
aaauuucacgauauggagc

SEQ ID NO: 98074 - RNA, 19 nt, Artificial Sequence
  Description of Artificial Sequence: Synthetic oligonucleotide
auccauucgugcuuuaucc

SEQ ID NO: 98075 - RNA, 19 nt, Artificial Sequence
  Description of Artificial Sequence: Synthetic oligonucleotide
ugcguuguagacauaagag

SEQ ID NO: 98076 - RNA, 19 nt, Artificial Sequence
  Description of Artificial Sequence: Synthetic oligonucleotide
agaagcaaaugguaucugc

SEQ ID NO: 98077 - RNA, 19 nt, Artificial Sequence
  Description of Artificial Sequence: Synthetic oligonucleotide
aauacccugcuucaggaug

SEQ ID NO: 98078 - RNA, 19 nt, Artificial Sequence
  Description of Artificial Sequence: Synthetic oligonucleotide
caaagaagacacucgaugc

SEQ ID NO: 98079 - RNA, 19 nt, Artificial Sequence
  Description of Artificial Sequence: Synthetic oligonucleotide
uagagugccauucaagcga

SEQ ID NO: 98080 - RNA, 19 nt, Artificial Sequence
  Description of Artificial Sequence: Synthetic oligonucleotide
gacauuaauugccaaaguc

SEQ ID NO: 98081 - RNA, 19 nt, Artificial Sequence
  Description of Artificial Sequence: Synthetic oligonucleotide
ucuaugccugacaagcagg

SEQ ID NO: 98082 - RNA, 19 nt, Artificial Sequence
  Description of Artificial Sequence: Synthetic oligonucleotide
uguuuaaacgagaccaacu

SEQ ID NO: 98083 - RNA, 19 nt, Artificial Sequence
  Description of Artificial Sequence: Synthetic oligonucleotide
uucggcguguguuuaaacg

SEQ ID NO: 98084 - RNA, 19 nt, Artificial Sequence
  Description of Artificial Sequence: Synthetic oligonucleotide
agccauaagagacaaauau

SEQ ID NO: 98085 - RNA, 19 nt, Artificial Sequence
  Description of Artificial Sequence: Synthetic oligonucleotide
uggggcauacaucaugccg

SEQ ID NO: 98086 - RNA, 19 nt, Artificial Sequence
  Description of Artificial Sequence: Synthetic oligonucleotide
uuuaaacgagaccaacucu

SEQ ID NO: 98087 - RNA, 19 nt, Artificial Sequence
  Description of Artificial Sequence: Synthetic oligonucleotide
uggauacucaucuugggga

SEQ ID NO: 98088 - RNA, 19 nt, Artificial Sequence
  Description of Artificial Sequence: Synthetic oligonucleotide
uaagagacggugguggugg

SEQ ID NO: 98089 - RNA, 19 nt, Artificial Sequence
  Description of Artificial Sequence: Synthetic oligonucleotide
aagaacgcgcauuacacau

SEQ ID NO: 98090 - RNA, 19 nt, Artificial Sequence
  Description of Artificial Sequence: Synthetic oligonucleotide
uuaucaucuucccguagag

SEQ ID NO: 98091 - RNA, 19 nt, Artificial Sequence
  Description of Artificial Sequence: Synthetic oligonucleotide
gaaaagaacgcgcauuaca

SEQ ID NO: 98092 - RNA, 19 nt, Artificial Sequence
  Description of Artificial Sequence: Synthetic oligonucleotide
uccgauuccguccacaaaa

SEQ ID NO: 98093 - RNA, 19 nt, Artificial Sequence
  Description of Artificial Sequence: Synthetic oligonucleotide
gaacucucgaguauuaagc

SEQ ID NO: 98094 - RNA, 19 nt, Artificial Sequence
  Description of Artificial Sequence: Synthetic oligonucleotide
uuaagcgcaguguugaauc

SEQ ID NO: 98095 - RNA, 19 nt, Artificial Sequence
  Description of Artificial Sequence: Synthetic oligonucleotide
uuugcaaucggaagcaaua

SEQ ID NO: 98096 - RNA, 19 nt, Artificial Sequence
  Description of Artificial Sequence: Synthetic oligonucleotide
ucuaguucugugguggagg

SEQ ID NO: 98097 - RNA, 19 nt, Artificial Sequence
  Description of Artificial Sequence: Synthetic oligonucleotide
aaaguuagaaggguccaug

SEQ ID NO: 98098 - RNA, 19 nt, Artificial Sequence
  Description of Artificial Sequence: Synthetic oligonucleotide
guuuaaacgagaccaacuc

SEQ ID NO: 98099 - RNA, 19 nt, Artificial Sequence
  Description of Artificial Sequence: Synthetic oligonucleotide
guagacauaagagacggug

SEQ ID NO: 98100 - RNA, 19 nt, Artificial Sequence
  Description of Artificial Sequence: Synthetic oligonucleotide
aaucacaugcgugcauccc

SEQ ID NO: 98101 - RNA, 19 nt, Artificial Sequence
  Description of Artificial Sequence: Synthetic oligonucleotide
aggcguacuucccagguac

SEQ ID NO: 98102 - RNA, 19 nt, Artificial Sequence
  Description of Artificial Sequence: Synthetic oligonucleotide
uucuguagauaaaccagug

SEQ ID NO: 98103 - RNA, 19 nt, Artificial Sequence
  Description of Artificial Sequence: Synthetic oligonucleotide
aacgagaccaacucucuau

SEQ ID NO: 98104 - RNA, 19 nt, Artificial Sequence
  Description of Artificial Sequence: Synthetic oligonucleotide
acucucgaguauuaagccg

SEQ ID NO: 98105 - RNA, 19 nt, Artificial Sequence
  Description of Artificial Sequence: Synthetic oligonucleotide
cacucgaugcuacagggcg

SEQ ID NO: 98106 - RNA, 19 nt, Artificial Sequence
  Description of Artificial Sequence: Synthetic oligonucleotide
aaagaacgcgcauuacaca

SEQ ID NO: 98107 - RNA, 19 nt, Artificial Sequence
  Description of Artificial Sequence: Synthetic oligonucleotide
cugacauuaauugccaaag

SEQ ID NO: 98108 - RNA, 19 nt, Artificial Sequence
  Description of Artificial Sequence: Synthetic oligonucleotide
uuuaagucagguggcagcc

SEQ ID NO: 98109 - RNA, 19 nt, Artificial Sequence
  Description of Artificial Sequence: Synthetic oligonucleotide
ucggaagcaauauggccgg

SEQ ID NO: 98110 - RNA, 19 nt, Artificial Sequence
  Description of Artificial Sequence: Synthetic oligonucleotide
guauugguaaugcugcgug

SEQ ID NO: 98111 - RNA, 19 nt, Artificial Sequence
  Description of Artificial Sequence: Synthetic oligonucleotide
gaagcaauauggccggccc

SEQ ID NO: 98112 - RNA, 19 nt, Artificial Sequence
  Description of Artificial Sequence: Synthetic oligonucleotide
cauucgugcuuuauccugg

SEQ ID NO: 98113 - RNA, 19 nt, Artificial Sequence
  Description of Artificial Sequence: Synthetic oligonucleotide
ucgaguauuaagccgcuuc

SEQ ID NO: 98114 - RNA, 19 nt, Artificial Sequence
  Description of Artificial Sequence: Synthetic oligonucleotide
ugcacacacacacaugcgu

SEQ ID NO: 98115 - RNA, 19 nt, Artificial Sequence
  Description of Artificial Sequence: Synthetic oligonucleotide
gcgguuuuaauuuuagcag

SEQ ID NO: 98116 - RNA, 19 nt, Artificial Sequence
  Description of Artificial Sequence: Synthetic oligonucleotide
uccauuuggguugugcugc

SEQ ID NO: 98117 - RNA, 19 nt, Artificial Sequence
  Description of Artificial Sequence: Synthetic oligonucleotide
ggcgauagaccccagagcc

SEQ ID NO: 98118 - RNA, 19 nt, Artificial Sequence
  Description of Artificial Sequence: Synthetic oligonucleotide
acaagcaggauuaguuggc

SEQ ID NO: 98119 - RNA, 19 nt, Artificial Sequence
  Description of Artificial Sequence: Synthetic oligonucleotide
agacccggaaaaccuacac

SEQ ID NO: 98120 - RNA, 19 nt, Artificial Sequence
  Description of Artificial Sequence: Synthetic oligonucleotide
ugcaaucggaagcaauaug

SEQ ID NO: 98121 - RNA, 19 nt, Artificial Sequence
  Description of Artificial Sequence: Synthetic oligonucleotide
uuggcgguuuuaauuuuag

SEQ ID NO: 98122 - RNA, 19 nt, Artificial Sequence
  Description of Artificial Sequence: Synthetic oligonucleotide
guagauaaaccagugaaaa

SEQ ID NO: 98123 - RNA, 19 nt, Artificial Sequence
  Description of Artificial Sequence: Synthetic oligonucleotide
ggcgguuuuaauuuuagca

SEQ ID NO: 98124 - RNA, 19 nt, Artificial Sequence
  Description of Artificial Sequence: Synthetic oligonucleotide
ucggcguguguuuaaacga

SEQ ID NO: 98125 - RNA, 19 nt, Artificial Sequence
  Description of Artificial Sequence: Synthetic oligonucleotide
ugcguguacggaacucucg

SEQ ID NO: 98126 - RNA, 19 nt, Artificial Sequence
  Description of Artificial Sequence: Synthetic oligonucleotide
aauauggccggccccucca

SEQ ID NO: 98127 - RNA, 19 nt, Artificial Sequence
  Description of Artificial Sequence: Synthetic oligonucleotide
aggauuaguuggccugacc

SEQ ID NO: 98128 - RNA, 19 nt, Artificial Sequence
  Description of Artificial Sequence: Synthetic oligonucleotide
uguacggaacucucgagua

SEQ ID NO: 98129 - RNA, 19 nt, Artificial Sequence
  Description of Artificial Sequence: Synthetic oligonucleotide
cuuaggugaucagagacuc

SEQ ID NO: 98130 - RNA, 19 nt, Artificial Sequence
  Description of Artificial Sequence: Synthetic oligonucleotide
uagucgucguauuuugcug

SEQ ID NO: 98131 - RNA, 19 nt, Artificial Sequence
  Description of Artificial Sequence: Synthetic oligonucleotide
ugguagucgucguauuuug

SEQ ID NO: 98132 - RNA, 19 nt, Artificial Sequence
  Description of Artificial Sequence: Synthetic oligonucleotide
gauucuaucugcagcagaa

SEQ ID NO: 98133 - RNA, 19 nt, Artificial Sequence
  Description of Artificial Sequence: Synthetic oligonucleotide
aaauugauuucuggauacu

SEQ ID NO: 98134 - RNA, 19 nt, Artificial Sequence
  Description of Artificial Sequence: Synthetic oligonucleotide
caggcgauagaccccagag

SEQ ID NO: 98135 - RNA, 19 nt, Artificial Sequence
  Description of Artificial Sequence: Synthetic oligonucleotide
ugcgugcacacacacacau

SEQ ID NO: 98136 - RNA, 19 nt, Artificial Sequence
  Description of Artificial Sequence: Synthetic oligonucleotide
ugaucuguucuacugccuu

SEQ ID NO: 98137 - RNA, 19 nt, Artificial Sequence
  Description of Artificial Sequence: Synthetic oligonucleotide
cacacacacacaugcgugc

SEQ ID NO: 98138 - RNA, 19 nt, Artificial Sequence
  Description of Artificial Sequence: Synthetic oligonucleotide
ugugcugcaugggaugucc

SEQ ID NO: 98139 - RNA, 19 nt, Artificial Sequence
  Description of Artificial Sequence: Synthetic oligonucleotide
uuugcguguacggaacucu

SEQ ID NO: 98140 - RNA, 19 nt, Artificial Sequence
  Description of Artificial Sequence: Synthetic oligonucleotide
agaagacacucgaugcuac

SEQ ID NO: 98141 - RNA, 19 nt, Artificial Sequence
  Description of Artificial Sequence: Synthetic oligonucleotide
auauggugagguucggcgu

SEQ ID NO: 98142 - RNA, 19 nt, Artificial Sequence
  Description of Artificial Sequence: Synthetic oligonucleotide
uuccguagaucauucuggu

SEQ ID NO: 98143 - RNA, 19 nt, Artificial Sequence
  Description of Artificial Sequence: Synthetic oligonucleotide
uauugguaaugcugcgugu

SEQ ID NO: 98144 - RNA, 19 nt, Artificial Sequence
  Description of Artificial Sequence: Synthetic oligonucleotide
caaucacaugcgugcaucc

SEQ ID NO: 98145 - RNA, 19 nt, Artificial Sequence
  Description of Artificial Sequence: Synthetic oligonucleotide
acgagaccaacucucuaug

SEQ ID NO: 98146 - RNA, 19 nt, Artificial Sequence
  Description of Artificial Sequence: Synthetic oligonucleotide
ggggcauacaucaugccgg

SEQ ID NO: 98147 - RNA, 19 nt, Artificial Sequence
  Description of Artificial Sequence: Synthetic oligonucleotide
acaugcgugcaucccaaug

SEQ ID NO: 98148 - RNA, 19 nt, Artificial Sequence
  Description of Artificial Sequence: Synthetic oligonucleotide
uccgggcaacaucugacca

SEQ ID NO: 98149 - RNA, 19 nt, Artificial Sequence
  Description of Artificial Sequence: Synthetic oligonucleotide
uucaagcgagccaacucuc

SEQ ID NO: 98150 - RNA, 19 nt, Artificial Sequence
  Description of Artificial Sequence: Synthetic oligonucleotide
cauggugacaaaguuagaa

SEQ ID NO: 98151 - RNA, 19 nt, Artificial Sequence
  Description of Artificial Sequence: Synthetic oligonucleotide
acagacccggaaaaccuac

SEQ ID NO: 98152 - RNA, 19 nt, Artificial Sequence
  Description of Artificial Sequence: Synthetic oligonucleotide
uuuaucgcucacacguguu

SEQ ID NO: 98153 - RNA, 19 nt, Artificial Sequence
  Description of Artificial Sequence: Synthetic oligonucleotide
acccuuucuagcaauguca

SEQ ID NO: 98154 - RNA, 19 nt, Artificial Sequence
  Description of Artificial Sequence: Synthetic oligonucleotide
aaacgagaccaacucucua

SEQ ID NO: 98155 - RNA, 19 nt, Artificial Sequence
  Description of Artificial Sequence: Synthetic oligonucleotide
auuaauugccaaagucugu

SEQ ID NO: 98156 - RNA, 19 nt, Artificial Sequence
  Description of Artificial Sequence: Synthetic oligonucleotide
uguagacauaagagacggu

SEQ ID NO: 98157 - RNA, 19 nt, Artificial Sequence
  Description of Artificial Sequence: Synthetic oligonucleotide
ucacaugcgugcaucccaa

SEQ ID NO: 98158 - RNA, 19 nt, Artificial Sequence
  Description of Artificial Sequence: Synthetic oligonucleotide
ccccguaucaugaucuugg

SEQ ID NO: 98159 - RNA, 19 nt, Artificial Sequence
  Description of Artificial Sequence: Synthetic oligonucleotide
caugguagggccgauucuc

SEQ ID NO: 98160 - RNA, 19 nt, Artificial Sequence
  Description of Artificial Sequence: Synthetic oligonucleotide
ugcuuugccgaaccauccu

SEQ ID NO: 98161 - RNA, 19 nt, Artificial Sequence
  Description of Artificial Sequence: Synthetic oligonucleotide
uggcgguuuuaauuuuagc

SEQ ID NO: 98162 - RNA, 19 nt, Artificial Sequence
  Description of Artificial Sequence: Synthetic oligonucleotide
cugcguuguagacauaaga

SEQ ID NO: 98163 - RNA, 19 nt, Artificial Sequence
  Description of Artificial Sequence: Synthetic oligonucleotide
cgugcacacacacacaugc

SEQ ID NO: 98164 - RNA, 19 nt, Artificial Sequence
  Description of Artificial Sequence: Synthetic oligonucleotide
gacucugcguuguagacau

SEQ ID NO: 98165 - RNA, 19 nt, Artificial Sequence
  Description of Artificial Sequence: Synthetic oligonucleotide
gaacgcgcauuacacauua

SEQ ID NO: 98166 - RNA, 19 nt, Artificial Sequence
  Description of Artificial Sequence: Synthetic oligonucleotide
caagcaggauuaguuggcc

SEQ ID NO: 98167 - RNA, 19 nt, Artificial Sequence
  Description of Artificial Sequence: Synthetic oligonucleotide
accaacucucuauguauau

SEQ ID NO: 98168 - RNA, 19 nt, Artificial Sequence
  Description of Artificial Sequence: Synthetic oligonucleotide
aaugggcgcggaaaguccu

SEQ ID NO: 98169 - RNA, 19 nt, Artificial Sequence
  Description of Artificial Sequence: Synthetic oligonucleotide
auaagagacggugguggug

SEQ ID NO: 98170 - RNA, 19 nt, Artificial Sequence
  Description of Artificial Sequence: Synthetic oligonucleotide
ucucgaguauuaagccgcu

SEQ ID NO: 98171 - RNA, 19 nt, Artificial Sequence
  Description of Artificial Sequence: Synthetic oligonucleotide
acacacaaucacaugcgug

SEQ ID NO: 98172 - RNA, 19 nt, Artificial Sequence
  Description of Artificial Sequence: Synthetic oligonucleotide
acucgaugcuacagggcgc

SEQ ID NO: 98173 - RNA, 19 nt, Artificial Sequence
  Description of Artificial Sequence: Synthetic oligonucleotide
agcaauauggccggccccu

SEQ ID NO: 98174 - RNA, 19 nt, Artificial Sequence
  Description of Artificial Sequence: Synthetic oligonucleotide
cuaugccugacaagcagga

SEQ ID NO: 98175 - RNA, 19 nt, Artificial Sequence
  Description of Artificial Sequence: Synthetic oligonucleotide
aaaauaacucaggcugcuu

SEQ ID NO: 98176 - RNA, 19 nt, Artificial Sequence
  Description of Artificial Sequence: Synthetic oligonucleotide
cuccgggcaacaucugacc

SEQ ID NO: 98177 - RNA, 19 nt, Artificial Sequence
  Description of Artificial Sequence: Synthetic oligonucleotide
ggauuaguuggccugaccu

SEQ ID NO: 98178 - RNA, 19 nt, Artificial Sequence
  Description of Artificial Sequence: Synthetic oligonucleotide
acgcgcauuacacauuauu

SEQ ID NO: 98179 - RNA, 19 nt, Artificial Sequence
  Description of Artificial Sequence: Synthetic oligonucleotide
ugaaucccagggcuggauu

SEQ ID NO: 98180 - RNA, 19 nt, Artificial Sequence
  Description of Artificial Sequence: Synthetic oligonucleotide
aacucucuauguauauaau

SEQ ID NO: 98181 - RNA, 19 nt, Artificial Sequence
  Description of Artificial Sequence: Synthetic oligonucleotide
aggcugcugcugcugcugc

SEQ ID NO: 98182 - RNA, 19 nt, Artificial Sequence
  Description of Artificial Sequence: Synthetic oligonucleotide
auauggccggccccuccac

SEQ ID NO: 98183 - RNA, 19 nt, Artificial Sequence
  Description of Artificial Sequence: Synthetic oligonucleotide
gucgucguauuuugcugcc

SEQ ID NO: 98184 - RNA, 19 nt, Artificial Sequence
  Description of Artificial Sequence: Synthetic oligonucleotide
uuuugcguguacggaacuc

SEQ ID NO: 98185 - RNA, 19 nt, Artificial Sequence
  Description of Artificial Sequence: Synthetic oligonucleotide
uucccguagagugccauuc

SEQ ID NO: 98186 - RNA, 19 nt, Artificial Sequence
  Description of Artificial Sequence: Synthetic oligonucleotide
guaaucugcaggugguuua

SEQ ID NO: 98187 - RNA, 19 nt, Artificial Sequence
  Description of Artificial Sequence: Synthetic oligonucleotide
gacccuaugcagaggugcc

SEQ ID NO: 98188 - RNA, 19 nt, Artificial Sequence
  Description of Artificial Sequence: Synthetic oligonucleotide
acccuaugcagaggugccc

SEQ ID NO: 98189 - RNA, 19 nt, Artificial Sequence
  Description of Artificial Sequence: Synthetic oligonucleotide
ucccguagagugccauuca

SEQ ID NO: 98190 - RNA, 19 nt, Artificial Sequence
  Description of Artificial Sequence: Synthetic oligonucleotide
uugcguguacggaacucuc

SEQ ID NO: 98191 - RNA, 19 nt, Artificial Sequence
  Description of Artificial Sequence: Synthetic oligonucleotide
aagaccggggagagcaucu

SEQ ID NO: 98192 - RNA, 19 nt, Artificial Sequence
  Description of Artificial Sequence: Synthetic oligonucleotide
uccauauggugagguucgg

SEQ ID NO: 98193 - RNA, 19 nt, Artificial Sequence
  Description of Artificial Sequence: Synthetic oligonucleotide
cacaggcguacuucccagg

SEQ ID NO: 98194 - RNA, 19 nt, Artificial Sequence
  Description of Artificial Sequence: Synthetic oligonucleotide
auuugcaaucggaagcaau

SEQ ID NO: 98195 - RNA, 19 nt, Artificial Sequence
  Description of Artificial Sequence: Synthetic oligonucleotide
aagggcggcaugcccgcca

SEQ ID NO: 98196 - RNA, 19 nt, Artificial Sequence
  Description of Artificial Sequence: Synthetic oligonucleotide
uacggaacucucgaguauu

SEQ ID NO: 98197 - RNA, 19 nt, Artificial Sequence
  Description of Artificial Sequence: Synthetic oligonucleotide
cgcgcauuacacauuauug

SEQ ID NO: 98198 - RNA, 19 nt, Artificial Sequence
  Description of Artificial Sequence: Synthetic oligonucleotide
acuuuaucgcucacacgug

SEQ ID NO: 98199 - RNA, 19 nt, Artificial Sequence
  Description of Artificial Sequence: Synthetic oligonucleotide
cugcaugggauguccacca

SEQ ID NO: 98200 - RNA, 19 nt, Artificial Sequence
  Description of Artificial Sequence: Synthetic oligonucleotide
uauggccggccccuccaca

SEQ ID NO: 98201 - RNA, 19 nt, Artificial Sequence
  Description of Artificial Sequence: Synthetic oligonucleotide
gugcacacacacacaugcg

SEQ ID NO: 98202 - RNA, 19 nt, Artificial Sequence
  Description of Artificial Sequence: Synthetic oligonucleotide
aagcgcaguguugaaucaa

SEQ ID NO: 98203 - RNA, 19 nt, Artificial Sequence
  Description of Artificial Sequence: Synthetic oligonucleotide
guuccgauuccguccacaa

SEQ ID NO: 98204 - RNA, 19 nt, Artificial Sequence
  Description of Artificial Sequence: Synthetic oligonucleotide
acuuaagcgcaguguugaa

SEQ ID NO: 98205 - RNA, 19 nt, Artificial Sequence
  Description of Artificial Sequence: Synthetic oligonucleotide
ugcguguuucugagcucug

SEQ ID NO: 98206 - RNA, 19 nt, Artificial Sequence
  Description of Artificial Sequence: Synthetic oligonucleotide
guguacggaacucucgagu

SEQ ID NO: 98207 - RNA, 19 nt, Artificial Sequence
  Description of Artificial Sequence: Synthetic oligonucleotide
ucgcucacacguguugcug

SEQ ID NO: 98208 - RNA, 19 nt, Artificial Sequence
  Description of Artificial Sequence: Synthetic oligonucleotide
uuaaagcacaaggcaccau

SEQ ID NO: 98209 - RNA, 19 nt, Artificial Sequence
  Description of Artificial Sequence: Synthetic oligonucleotide
ugcuuuauccugggcugac

SEQ ID NO: 98210 - RNA, 19 nt, Artificial Sequence
  Description of Artificial Sequence: Synthetic oligonucleotide
cagaccuaugguggcuugg

SEQ ID NO: 98211 - RNA, 19 nt, Artificial Sequence
  Description of Artificial Sequence: Synthetic oligonucleotide
augcaggcgauagacccca

SEQ ID NO: 98212 - RNA, 19 nt, Artificial Sequence
  Description of Artificial Sequence: Synthetic oligonucleotide
ggaagcaauauggccggcc

SEQ ID NO: 98213 - RNA, 19 nt, Artificial Sequence
  Description of Artificial Sequence: Synthetic oligonucleotide
guucggcguguguuuaaac

SEQ ID NO: 98214 - RNA, 19 nt, Artificial Sequence
  Description of Artificial Sequence: Synthetic oligonucleotide
cucugcguuguagacauaa

SEQ ID NO: 98215 - RNA, 19 nt, Artificial Sequence
  Description of Artificial Sequence: Synthetic oligonucleotide
cuuuaucgcucacacgugu

SEQ ID NO: 98216 - RNA, 19 nt, Artificial Sequence
  Description of Artificial Sequence: Synthetic oligonucleotide
gacccggaaaaccuacacu

SEQ ID NO: 98217 - RNA, 19 nt, Artificial Sequence
  Description of Artificial Sequence: Synthetic oligonucleotide
guggggcauacaucaugcc

SEQ ID NO: 98218 - RNA, 19 nt, Artificial Sequence
  Description of Artificial Sequence: Synthetic oligonucleotide
augagggugugucgcuccu

SEQ ID NO: 98219 - RNA, 19 nt, Artificial Sequence
  Description of Artificial Sequence: Synthetic oligonucleotide
gguagggccgauucucuga

SEQ ID NO: 98220 - RNA, 19 nt, Artificial Sequence
  Description of Artificial Sequence: Synthetic oligonucleotide
gccgauucucugaaggacc

SEQ ID NO: 98221 - RNA, 19 nt, Artificial Sequence
  Description of Artificial Sequence: Synthetic oligonucleotide
ccguagaucauucuggucu

SEQ ID NO: 98222 - RNA, 19 nt, Artificial Sequence
  Description of Artificial Sequence: Synthetic oligonucleotide
ggugugucgcuccucuuca

SEQ ID NO: 98223 - RNA, 19 nt, Artificial Sequence
  Description of Artificial Sequence: Synthetic oligonucleotide
gucgccaggccucugaaau

SEQ ID NO: 98224 - RNA, 19 nt, Artificial Sequence
  Description of Artificial Sequence: Synthetic oligonucleotide
ugcugcugcugcugcugcc

SEQ ID NO: 98225 - RNA, 19 nt, Artificial Sequence
  Description of Artificial Sequence: Synthetic oligonucleotide
guagggccgauucucugaa

SEQ ID NO: 98226 - RNA, 19 nt, Artificial Sequence
  Description of Artificial Sequence: Synthetic oligonucleotide
gacgguggugguggguugc

SEQ ID NO: 98227 - RNA, 19 nt, Artificial Sequence
  Description of Artificial Sequence: Synthetic oligonucleotide
cguguguuuaaacgagacc

SEQ ID NO: 98228 - RNA, 19 nt, Artificial Sequence
  Description of Artificial Sequence: Synthetic oligonucleotide
uagggccgauucucugaag

SEQ ID NO: 98229 - RNA, 19 nt, Artificial Sequence
  Description of Artificial Sequence: Synthetic oligonucleotide
gcacacacacacaugcgug

SEQ ID NO: 98230 - RNA, 19 nt, Artificial Sequence
  Description of Artificial Sequence: Synthetic oligonucleotide
gcgcauuacacauuauugu

SEQ ID NO: 98231 - RNA, 19 nt, Artificial Sequence
  Description of Artificial Sequence: Synthetic oligonucleotide
gaccaacucucuauguaua

SEQ ID NO: 98232 - RNA, 19 nt, Artificial Sequence
  Description of Artificial Sequence: Synthetic oligonucleotide
gcccaauuaagagacccac

SEQ ID NO: 98233 - RNA, 19 nt, Artificial Sequence
  Description of Artificial Sequence: Synthetic oligonucleotide
uugcgcccaacuuucccuu

SEQ ID NO: 98234 - RNA, 19 nt, Artificial Sequence
  Description of Artificial Sequence: Synthetic oligonucleotide
cugacgcggggagggaucc

SEQ ID NO: 98235 - RNA, 19 nt, Artificial Sequence
  Description of Artificial Sequence: Synthetic oligonucleotide
ccuuggacggagucugaag

SEQ ID NO: 98236 - RNA, 19 nt, Artificial Sequence
  Description of Artificial Sequence: Synthetic oligonucleotide
cuuugccgaaccauccugu

SEQ ID NO: 98237 - RNA, 19 nt, Artificial Sequence
  Description of Artificial Sequence: Synthetic oligonucleotide
ucgucguauuuugcugcca

SEQ ID NO: 98238 - RNA, 19 nt, Artificial Sequence
  Description of Artificial Sequence: Synthetic oligonucleotide
cugcugcugcugcugcugc

SEQ ID NO: 98239 - RNA, 19 nt, Artificial Sequence
  Description of Artificial Sequence: Synthetic oligonucleotide
ccauuguauuggcagugac

SEQ ID NO: 98240 - RNA, 19 nt, Artificial Sequence
  Description of Artificial Sequence: Synthetic oligonucleotide
ggcgacucugcguuguaga

SEQ ID NO: 98241 - RNA, 19 nt, Artificial Sequence
  Description of Artificial Sequence: Synthetic oligonucleotide
ugggcgcggaaaguccuca

SEQ ID NO: 98242 - RNA, 19 nt, Artificial Sequence
  Description of Artificial Sequence: Synthetic oligonucleotide
gcgugcaucccaaugucug

SEQ ID NO: 98243 - RNA, 19 nt, Artificial Sequence
  Description of Artificial Sequence: Synthetic oligonucleotide
agcgcaguguugaaucaaa

SEQ ID NO: 98244 - RNA, 19 nt, Artificial Sequence
  Description of Artificial Sequence: Synthetic oligonucleotide
caucuuugcgcccaacuuu

SEQ ID NO: 98245 - RNA, 19 nt, Artificial Sequence
  Description of Artificial Sequence: Synthetic oligonucleotide
gcguguacggaacucucga

SEQ ID NO: 98246 - RNA, 19 nt, Artificial Sequence
  Description of Artificial Sequence: Synthetic oligonucleotide
cucuccgggcaacaucuga

SEQ ID NO: 98247 - RNA, 19 nt, Artificial Sequence
  Description of Artificial Sequence: Synthetic oligonucleotide
uggugguagucgucguauu

SEQ ID NO: 98248 - RNA, 19 nt, Artificial Sequence
  Description of Artificial Sequence: Synthetic oligonucleotide
gcguguguuuaaacgagac

SEQ ID NO: 98249 - RNA, 19 nt, Artificial Sequence
  Description of Artificial Sequence: Synthetic oligonucleotide
cacgauauggagccagcgu

SEQ ID NO: 98250 - RNA, 19 nt, Artificial Sequence
  Description of Artificial Sequence: Synthetic oligonucleotide
gcgagccaacucucgaagc

SEQ ID NO: 98251 - RNA, 19 nt, Artificial Sequence
  Description of Artificial Sequence: Synthetic oligonucleotide
gcgacucugcguuguagac

SEQ ID NO: 98252 - RNA, 19 nt, Artificial Sequence
  Description of Artificial Sequence: Synthetic oligonucleotide
gcggaaaguccucacucuc

SEQ ID NO: 98253 - RNA, 19 nt, Artificial Sequence
  Description of Artificial Sequence: Synthetic oligonucleotide
cauggcucgggccaucgcu

SEQ ID NO: 98254 - RNA, 19 nt, Artificial Sequence
  Description of Artificial Sequence: Synthetic oligonucleotide
gcgcggaaaguccucacuc

SEQ ID NO: 98255 - RNA, 19 nt, Artificial Sequence
  Description of Artificial Sequence: Synthetic oligonucleotide
ggcggaaccagguggcgga

SEQ ID NO: 98256 - RNA, 19 nt, Artificial Sequence
  Description of Artificial Sequence: Synthetic oligonucleotide
caucgcugacgcggggagg

SEQ ID NO: 98257 - RNA, 19 nt, Artificial Sequence
  Description of Artificial Sequence: Synthetic oligonucleotide
gcggcaucaugcccauagg

SEQ ID NO: 98258 - RNA, 19 nt, Artificial Sequence
  Description of Artificial Sequence: Synthetic oligonucleotide
caccugucaggcuggguaa

SEQ ID NO: 98259 - RNA, 19 nt, Artificial Sequence
  Description of Artificial Sequence: Synthetic oligonucleotide
uuccccuagcucagccaua

SEQ ID NO: 98260 - RNA, 19 nt, Artificial Sequence
  Description of Artificial Sequence: Synthetic oligonucleotide
gagacccacaaaauugauu

SEQ ID NO: 98261 - RNA, 19 nt, Artificial Sequence
  Description of Artificial Sequence: Synthetic oligonucleotide
caguaguauugguaaugcu

SEQ ID NO: 98262 - RNA, 19 nt, Artificial Sequence
  Description of Artificial Sequence: Synthetic oligonucleotide
ccacaggcguacuucccag

SEQ ID NO: 98263 - RNA, 19 nt, Artificial Sequence
  Description of Artificial Sequence: Synthetic oligonucleotide
cagacccggaaaaccuaca

SEQ ID NO: 98264 - RNA, 19 nt, Artificial Sequence
  Description of Artificial Sequence: Synthetic oligonucleotide
ccagugcgugcacacacac

SEQ ID NO: 98265 - RNA, 19 nt, Artificial Sequence
  Description of Artificial Sequence: Synthetic oligonucleotide
agguucggcguguguuuaa

SEQ ID NO: 98266 - RNA, 19 nt, Artificial Sequence
  Description of Artificial Sequence: Synthetic oligonucleotide
augggcgcggaaaguccuc

SEQ ID NO: 98267 - RNA, 19 nt, Artificial Sequence
  Description of Artificial Sequence: Synthetic oligonucleotide
guguugaaucaaacaccga

SEQ ID NO: 98268 - RNA, 19 nt, Artificial Sequence
  Description of Artificial Sequence: Synthetic oligonucleotide
agaacgcgcauuacacauu

SEQ ID NO: 98269 - RNA, 19 nt, Artificial Sequence
  Description of Artificial Sequence: Synthetic oligonucleotide
cuuccccuagcucagccau

SEQ ID NO: 98270 - RNA, 19 nt, Artificial Sequence
  Description of Artificial Sequence: Synthetic oligonucleotide
uggccggccccuccacacu

SEQ ID NO: 98271 - RNA, 19 nt, Artificial Sequence
  Description of Artificial Sequence: Synthetic oligonucleotide
gccagcguguuccgauucc

SEQ ID NO: 98272 - RNA, 19 nt, Artificial Sequence
  Description of Artificial Sequence: Synthetic oligonucleotide
ccagcguguuccgauuccg

SEQ ID NO: 98273 - RNA, 19 nt, Artificial Sequence
  Description of Artificial Sequence: Synthetic oligonucleotide
gcucgggccaucgcugacg

SEQ ID NO: 98274 - RNA, 19 nt, Artificial Sequence
  Description of Artificial Sequence: Synthetic oligonucleotide
cuuaagcgcaguguugaau

SEQ ID NO: 98275 - RNA, 19 nt, Artificial Sequence
  Description of Artificial Sequence: Synthetic oligonucleotide
ggcauacaucaugccggcg

SEQ ID NO: 98276 - RNA, 19 nt, Artificial Sequence
  Description of Artificial Sequence: Synthetic oligonucleotide
cguguacggaacucucgag

SEQ ID NO: 98277 - RNA, 19 nt, Artificial Sequence
  Description of Artificial Sequence: Synthetic oligonucleotide
aacgcgcauuacacauuau

SEQ ID NO: 98278 - RNA, 19 nt, Artificial Sequence
  Description of Artificial Sequence: Synthetic oligonucleotide
gcagaccuaugguggcuug

SEQ ID NO: 98279 - RNA, 19 nt, Artificial Sequence
  Description of Artificial Sequence: Synthetic oligonucleotide
guacggaacucucgaguau

SEQ ID NO: 98280 - RNA, 19 nt, Artificial Sequence
  Description of Artificial Sequence: Synthetic oligonucleotide
auacaucaugccggcggaa

SEQ ID NO: 98281 - RNA, 19 nt, Artificial Sequence
  Description of Artificial Sequence: Synthetic oligonucleotide
ccaucgcugacgcggggag

SEQ ID NO: 98282 - RNA, 19 nt, Artificial Sequence
  Description of Artificial Sequence: Synthetic oligonucleotide
gcugcugcugcugcugcug

SEQ ID NO: 98283 - RNA, 19 nt, Artificial Sequence
  Description of Artificial Sequence: Synthetic oligonucleotide
gcgauagaccccagagccc

SEQ ID NO: 98284 - RNA, 19 nt, Artificial Sequence
  Description of Artificial Sequence: Synthetic oligonucleotide
ggccugaccuuuaguguug

SEQ ID NO: 98285 - RNA, 19 nt, Artificial Sequence
  Description of Artificial Sequence: Synthetic oligonucleotide
gcuuaggugaucagagacu

SEQ ID NO: 98286 - RNA, 19 nt, Artificial Sequence
  Description of Artificial Sequence: Synthetic oligonucleotide
ugggcgacucugcguugua

SEQ ID NO: 98287 - RNA, 19 nt, Artificial Sequence
  Description of Artificial Sequence: Synthetic oligonucleotide
gagguucggcguguguuua

SEQ ID NO: 98288 - RNA, 19 nt, Artificial Sequence
  Description of Artificial Sequence: Synthetic oligonucleotide
ccuaugguggcuugggcgu

SEQ ID NO: 98289 - RNA, 19 nt, Artificial Sequence
  Description of Artificial Sequence: Synthetic oligonucleotide
ggcguguguuuaaacgaga

SEQ ID NO: 98290 - RNA, 19 nt, Artificial Sequence
  Description of Artificial Sequence: Synthetic oligonucleotide
acggaacucucgaguauua

SEQ ID NO: 98291 - RNA, 19 nt, Artificial Sequence
  Description of Artificial Sequence: Synthetic oligonucleotide
ggcccaauuaagagaccca

SEQ ID NO: 98292 - RNA, 19 nt, Artificial Sequence
  Description of Artificial Sequence: Synthetic oligonucleotide
cagugaaaagaacgcgcau

SEQ ID NO: 98293 - RNA, 19 nt, Artificial Sequence
  Description of Artificial Sequence: Synthetic oligonucleotide
ggugguagucgucguauuu

SEQ ID NO: 98294 - RNA, 19 nt, Artificial Sequence
  Description of Artificial Sequence: Synthetic oligonucleotide
cucagccauaagagacaaa

SEQ ID NO: 98295 - RNA, 19 nt, Artificial Sequence
  Description of Artificial Sequence: Synthetic oligonucleotide
gucugccuggaagggucac

SEQ ID NO: 98296 - RNA, 19 nt, Artificial Sequence
  Description of Artificial Sequence: Synthetic oligonucleotide
gcaggcgauagaccccaga

SEQ ID NO: 98297 - RNA, 19 nt, Artificial Sequence
  Description of Artificial Sequence: Synthetic oligonucleotide
gggcgacucugcguuguag

SEQ ID NO: 98298 - RNA, 19 nt, Artificial Sequence
  Description of Artificial Sequence: Synthetic oligonucleotide
agaagaccggggagagcau

SEQ ID NO: 98299 - RNA, 19 nt, Artificial Sequence
  Description of Artificial Sequence: Synthetic oligonucleotide
gcugcugcugcugcugcca

SEQ ID NO: 98300 - RNA, 19 nt, Artificial Sequence
  Description of Artificial Sequence: Synthetic oligonucleotide
gugcgugcacacacacaca

SEQ ID NO: 98301 - RNA, 19 nt, Artificial Sequence
  Description of Artificial Sequence: Synthetic oligonucleotide
ggcgaccaucucugugaug

SEQ ID NO: 98302 - RNA, 19 nt, Artificial Sequence
  Description of Artificial Sequence: Synthetic oligonucleotide
gguucggcguguguuuaaa

SEQ ID NO: 98303 - RNA, 19 nt, Artificial Sequence
  Description of Artificial Sequence: Synthetic oligonucleotide
guucaucgguggugguggu

SEQ ID NO: 98304 - RNA, 19 nt, Artificial Sequence
  Description of Artificial Sequence: Synthetic oligonucleotide
gcgugcacacacacacaug

SEQ ID NO: 98305 - RNA, 19 nt, Artificial Sequence
  Description of Artificial Sequence: Synthetic oligonucleotide
ccggccccuccacacuugg

SEQ ID NO: 98306 - RNA, 19 nt, Artificial Sequence
  Description of Artificial Sequence: Synthetic oligonucleotide
gggugggcgacucugcguu

SEQ ID NO: 98307 - RNA, 19 nt, Artificial Sequence
  Description of Artificial Sequence: Synthetic oligonucleotide
cccacuuaagcgcaguguu

SEQ ID NO: 98308 - RNA, 19 nt, Artificial Sequence
  Description of Artificial Sequence: Synthetic oligonucleotide
ggcgcggaaaguccucacu

SEQ ID NO: 98309 - RNA, 19 nt, Artificial Sequence
  Description of Artificial Sequence: Synthetic oligonucleotide
gugcugcaugggaugucca

SEQ ID NO: 98310 - RNA, 19 nt, Artificial Sequence
  Description of Artificial Sequence: Synthetic oligonucleotide
gggcgcggaaaguccucac

SEQ ID NO: 98311 - RNA, 19 nt, Artificial Sequence
  Description of Artificial Sequence: Synthetic oligonucleotide
cccguagagugccauucaa

SEQ ID NO: 98312 - RNA, 19 nt, Artificial Sequence
  Description of Artificial Sequence: Synthetic oligonucleotide
gugaaucccagggcuggau

SEQ ID NO: 98313 - RNA, 19 nt, Artificial Sequence
  Description of Artificial Sequence: Synthetic oligonucleotide
gccaucgcugacgcgggga

SEQ ID NO: 98314 - RNA, 19 nt, Artificial Sequence
  Description of Artificial Sequence: Synthetic oligonucleotide
gggcuggauuaacccuuuc

SEQ ID NO: 98315 - RNA, 19 nt, Artificial Sequence
  Description of Artificial Sequence: Synthetic oligonucleotide
cgagccaacucucgaagcu

SEQ ID NO: 98316 - RNA, 19 nt, Artificial Sequence
  Description of Artificial Sequence: Synthetic oligonucleotide
cggcggaaccagguggcgg

SEQ ID NO: 98317 - RNA, 19 nt, Artificial Sequence
  Description of Artificial Sequence: Synthetic oligonucleotide
ggcuccauauggugagguu

SEQ ID NO: 98318 - RNA, 19 nt, Artificial Sequence
  Description of Artificial Sequence: Synthetic oligonucleotide
cgacucugcguuguagaca

SEQ ID NO: 98319 - RNA, 19 nt, Artificial Sequence
  Description of Artificial Sequence: Synthetic oligonucleotide
ggcaucccgaagggcggca

SEQ ID NO: 98320 - RNA, 19 nt, Artificial Sequence
  Description of Artificial Sequence: Synthetic oligonucleotide
cgcggaaaguccucacucu

SEQ ID NO: 98321 - RNA, 19 nt, Artificial Sequence
  Description of Artificial Sequence: Synthetic oligonucleotide
ggcugcugcugcugcugcu

SEQ ID NO: 98322 - RNA, 19 nt, Artificial Sequence
  Description of Artificial Sequence: Synthetic oligonucleotide
cccauaggcgguggcggca

SEQ ID NO: 98323 - RNA, 19 nt, Artificial Sequence
  Description of Artificial Sequence: Synthetic oligonucleotide
cucgaguauuaagccgcuu

SEQ ID NO: 98324 - RNA, 19 nt, Artificial Sequence
  Description of Artificial Sequence: Synthetic oligonucleotide
ccccacuuaagcgcagugu

SEQ ID NO: 98325 - RNA, 19 nt, Artificial Sequence
  Description of Artificial Sequence: Synthetic oligonucleotide
cgcucguggugguagucgu

SEQ ID NO: 98326 - RNA, 19 nt, Artificial Sequence
  Description of Artificial Sequence: Synthetic oligonucleotide
gcaucccgaagggcggcau

SEQ ID NO: 98327 - RNA, 19 nt, Artificial Sequence
  Description of Artificial Sequence: Synthetic oligonucleotide
ccauggcgggauggacccu

SEQ ID NO: 98328 - RNA, 19 nt, Artificial Sequence
  Description of Artificial Sequence: Synthetic oligonucleotide
cggccccuccacacuuggu

SEQ ID NO: 98329 - RNA, 19 nt, Artificial Sequence
  Description of Artificial Sequence: Synthetic oligonucleotide
uuugcuauauccaaggcag

SEQ ID NO: 98330 - RNA, 19 nt, Artificial Sequence
  Description of Artificial Sequence: Synthetic oligonucleotide
aaaauguacaguucgcuuc

SEQ ID NO: 98331 - RNA, 19 nt, Artificial Sequence
  Description of Artificial Sequence: Synthetic oligonucleotide
uguaauggcagcuauauac

SEQ ID NO: 98332 - RNA, 19 nt, Artificial Sequence
  Description of Artificial Sequence: Synthetic oligonucleotide
auaaauggucuucacacgc

SEQ ID NO: 98333 - RNA, 19 nt, Artificial Sequence
  Description of Artificial Sequence: Synthetic oligonucleotide
uuuagaugcaugcauaaca

SEQ ID NO: 98334 - RNA, 19 nt, Artificial Sequence
  Description of Artificial Sequence: Synthetic oligonucleotide
auaacuacaggcuuggcag

SEQ ID NO: 98335 - RNA, 19 nt, Artificial Sequence
  Description of Artificial Sequence: Synthetic oligonucleotide
ucuuacuugacgaugacga

SEQ ID NO: 98336 - RNA, 19 nt, Artificial Sequence
  Description of Artificial Sequence: Synthetic oligonucleotide
ucauaaauggucuucacac

SEQ ID NO: 98337 - RNA, 19 nt, Artificial Sequence
  Description of Artificial Sequence: Synthetic oligonucleotide
aauucgagaaauaugaaca

SEQ ID NO: 98338 - RNA, 19 nt, Artificial Sequence
  Description of Artificial Sequence: Synthetic oligonucleotide
ucuauacaggucaagauac

SEQ ID NO: 98339 - RNA, 19 nt, Artificial Sequence
  Description of Artificial Sequence: Synthetic oligonucleotide
uccuauuuggggcuuaggg

SEQ ID NO: 98340 - RNA, 19 nt, Artificial Sequence
  Description of Artificial Sequence: Synthetic oligonucleotide
cacagaacggcacagaggg

SEQ ID NO: 98341 - RNA, 19 nt, Artificial Sequence
  Description of Artificial Sequence: Synthetic oligonucleotide
uguggguugaacuuuccgg

SEQ ID NO: 98342 - RNA, 19 nt, Artificial Sequence
  Description of Artificial Sequence: Synthetic oligonucleotide
aagauacccaaguugguug

SEQ ID NO: 98343 - RNA, 19 nt, Artificial Sequence
  Description of Artificial Sequence: Synthetic oligonucleotide
aguuccaaagacugaauuc

SEQ ID NO: 98344 - RNA, 19 nt, Artificial Sequence
  Description of Artificial Sequence: Synthetic oligonucleotide
gaauucgagaaauaugaac

SEQ ID NO: 98345 - RNA, 19 nt, Artificial Sequence
  Description of Artificial Sequence: Synthetic oligonucleotide
auucgagaaauaugaacac

SEQ ID NO: 98346 - RNA, 19 nt, Artificial Sequence
  Description of Artificial Sequence: Synthetic oligonucleotide
uaagcguuuagaugcaugc

SEQ ID NO: 98347 - RNA, 19 nt, Artificial Sequence
  Description of Artificial Sequence: Synthetic oligonucleotide
cauaacauagagguggacg

SEQ ID NO: 98348 - RNA, 19 nt, Artificial Sequence
  Description of Artificial Sequence: Synthetic oligonucleotide
auaacauagagguggacgu

SEQ ID NO: 98349 - RNA, 19 nt, Artificial Sequence
  Description of Artificial Sequence: Synthetic oligonucleotide
ugggcauuauuccaucgcg

SEQ ID NO: 98350 - RNA, 19 nt, Artificial Sequence
  Description of Artificial Sequence: Synthetic oligonucleotide
uuugcaaucuuguaacuuc

SEQ ID NO: 98351 - RNA, 19 nt, Artificial Sequence
  Description of Artificial Sequence: Synthetic oligonucleotide
uuuccgugcggucauauca

SEQ ID NO: 98352 - RNA, 19 nt, Artificial Sequence
  Description of Artificial Sequence: Synthetic oligonucleotide
gauauacucuuuccgugcg

SEQ ID NO: 98353 - RNA, 19 nt, Artificial Sequence
  Description of Artificial Sequence: Synthetic oligonucleotide
ugguuaacaauguccacag

SEQ ID NO: 98354 - RNA, 19 nt, Artificial Sequence
  Description of Artificial Sequence: Synthetic oligonucleotide
auacauacuauauuccccu

SEQ ID NO: 98355 - RNA, 19 nt, Artificial Sequence
  Description of Artificial Sequence: Synthetic oligonucleotide
ucuccuucgacgaacguga

SEQ ID NO: 98356 - RNA, 19 nt, Artificial Sequence
  Description of Artificial Sequence: Synthetic oligonucleotide
agaugcaugcauaacauag

SEQ ID NO: 98357 - RNA, 19 nt, Artificial Sequence
  Description of Artificial Sequence: Synthetic oligonucleotide
uggcaaaccgguaaggcgc

SEQ ID NO: 98358 - RNA, 19 nt, Artificial Sequence
  Description of Artificial Sequence: Synthetic oligonucleotide
uuggcaaaccgguaaggcg

SEQ ID NO: 98359 - RNA, 19 nt, Artificial Sequence
  Description of Artificial Sequence: Synthetic oligonucleotide
acggauuguuugcuuaucc

SEQ ID NO: 98360 - RNA, 19 nt, Artificial Sequence
  Description of Artificial Sequence: Synthetic oligonucleotide
acaguucgcuucuucauac

SEQ ID NO: 98361 - RNA, 19 nt, Artificial Sequence
  Description of Artificial Sequence: Synthetic oligonucleotide
uucuauacaggucaagaua

SEQ ID NO: 98362 - RNA, 19 nt, Artificial Sequence
  Description of Artificial Sequence: Synthetic oligonucleotide
uuagaugcaugcauaacau

SEQ ID NO: 98363 - RNA, 19 nt, Artificial Sequence
  Description of Artificial Sequence: Synthetic oligonucleotide
cauuauuccaucgcgggcg

SEQ ID NO: 98364 - RNA, 19 nt, Artificial Sequence
  Description of Artificial Sequence: Synthetic oligonucleotide
ucugaugagccacagucac

SEQ ID NO: 98365 - RNA, 19 nt, Artificial Sequence
  Description of Artificial Sequence: Synthetic oligonucleotide
aguaggcuugcuccuaagc

SEQ ID NO: 98366 - RNA, 19 nt, Artificial Sequence
  Description of Artificial Sequence: Synthetic oligonucleotide
uuaggggccaguuccgugg

SEQ ID NO: 98367 - RNA, 19 nt, Artificial Sequence
  Description of Artificial Sequence: Synthetic oligonucleotide
uguguagcuguaaacugug

SEQ ID NO: 98368 - RNA, 19 nt, Artificial Sequence
  Description of Artificial Sequence: Synthetic oligonucleotide
caagucuccuauuuggggc

SEQ ID NO: 98369 - RNA, 19 nt, Artificial Sequence
  Description of Artificial Sequence: Synthetic oligonucleotide
uguacaguucgcuucuuca

SEQ ID NO: 98370 - RNA, 19 nt, Artificial Sequence
  Description of Artificial Sequence: Synthetic oligonucleotide
agaacgguauuccccacgg

SEQ ID NO: 98371 - RNA, 19 nt, Artificial Sequence
  Description of Artificial Sequence: Synthetic oligonucleotide
cauaucacuugaagggugg

SEQ ID NO: 98372 - RNA, 19 nt, Artificial Sequence
  Description of Artificial Sequence: Synthetic oligonucleotide
aaaacgaccgggaccgggc

SEQ ID NO: 98373 - RNA, 19 nt, Artificial Sequence
  Description of Artificial Sequence: Synthetic oligonucleotide
aacuuuaucagacgugguu

SEQ ID NO: 98374 - RNA, 19 nt, Artificial Sequence
  Description of Artificial Sequence: Synthetic oligonucleotide
aguucgcuucuucauacgg

SEQ ID NO: 98375 - RNA, 19 nt, Artificial Sequence
  Description of Artificial Sequence: Synthetic oligonucleotide
aauucggauaagcguuuag

SEQ ID NO: 98376 - RNA, 19 nt, Artificial Sequence
  Description of Artificial Sequence: Synthetic oligonucleotide
uccgauuccauagugaauc

SEQ ID NO: 98377 - RNA, 19 nt, Artificial Sequence
  Description of Artificial Sequence: Synthetic oligonucleotide
aacgguauuccccacggau

SEQ ID NO: 98378 - RNA, 19 nt, Artificial Sequence
  Description of Artificial Sequence: Synthetic oligonucleotide
ucggauaagcguuuagaug

SEQ ID NO: 98379 - RNA, 19 nt, Artificial Sequence
  Description of Artificial Sequence: Synthetic oligonucleotide
uuguuugccgucuuacuug

SEQ ID NO: 98380 - RNA, 19 nt, Artificial Sequence
  Description of Artificial Sequence: Synthetic oligonucleotide
auggcaaucgaguuuaaaa

SEQ ID NO: 98381 - RNA, 19 nt, Artificial Sequence
  Description of Artificial Sequence: Synthetic oligonucleotide
uaaauggucuucacacgcc

SEQ ID NO: 98382 - RNA, 19 nt, Artificial Sequence
  Description of Artificial Sequence: Synthetic oligonucleotide
acacuggguagcuuugagc

SEQ ID NO: 98383 - RNA, 19 nt, Artificial Sequence
  Description of Artificial Sequence: Synthetic oligonucleotide
uccgaaaacgaccgggacc

SEQ ID NO: 98384 - RNA, 19 nt, Artificial Sequence
  Description of Artificial Sequence: Synthetic oligonucleotide
agcgugacgguguuccugc

SEQ ID NO: 98385 - RNA, 19 nt, Artificial Sequence
  Description of Artificial Sequence: Synthetic oligonucleotide
agagguggacguuuucucg

SEQ ID NO: 98386 - RNA, 19 nt, Artificial Sequence
  Description of Artificial Sequence: Synthetic oligonucleotide
cagugauauacucuuuccg

SEQ ID NO: 98387 - RNA, 19 nt, Artificial Sequence
  Description of Artificial Sequence: Synthetic oligonucleotide
aucagacgcacacauccac

SEQ ID NO: 98388 - RNA, 19 nt, Artificial Sequence
  Description of Artificial Sequence: Synthetic oligonucleotide
gaucaccucuccuucgacg

SEQ ID NO: 98389 - RNA, 19 nt, Artificial Sequence
  Description of Artificial Sequence: Synthetic oligonucleotide
ucggcgaugaacucggaca

SEQ ID NO: 98390 - RNA, 19 nt, Artificial Sequence
  Description of Artificial Sequence: Synthetic oligonucleotide
auuauuccaucgcgggcgc

SEQ ID NO: 98391 - RNA, 19 nt, Artificial Sequence
  Description of Artificial Sequence: Synthetic oligonucleotide
agaugcuugcuucuggaug

SEQ ID NO: 98392 - RNA, 19 nt, Artificial Sequence
  Description of Artificial Sequence: Synthetic oligonucleotide
cucuacauggacguguggg

SEQ ID NO: 98393 - RNA, 19 nt, Artificial Sequence
  Description of Artificial Sequence: Synthetic oligonucleotide
cggauaagcguuuagaugc

SEQ ID NO: 98394 - RNA, 19 nt, Artificial Sequence
  Description of Artificial Sequence: Synthetic oligonucleotide
uggaaaacucugccgagga

SEQ ID NO: 98395 - RNA, 19 nt, Artificial Sequence
  Description of Artificial Sequence: Synthetic oligonucleotide
ucuuugcuauauccaaggc

SEQ ID NO: 98396 - RNA, 19 nt, Artificial Sequence
  Description of Artificial Sequence: Synthetic oligonucleotide
auaucucaggggugggccc

SEQ ID NO: 98397 - RNA, 19 nt, Artificial Sequence
  Description of Artificial Sequence: Synthetic oligonucleotide
uccggcuugccguacaugc

SEQ ID NO: 98398 - RNA, 19 nt, Artificial Sequence
  Description of Artificial Sequence: Synthetic oligonucleotide
uuacuugacgaugacgaca

SEQ ID NO: 98399 - RNA, 19 nt, Artificial Sequence
  Description of Artificial Sequence: Synthetic oligonucleotide
uucggauaagcguuuagau

SEQ ID NO: 98400 - RNA, 19 nt, Artificial Sequence
  Description of Artificial Sequence: Synthetic oligonucleotide
cugcuagucagacaggaug

SEQ ID NO: 98401 - RNA, 19 nt, Artificial Sequence
  Description of Artificial Sequence: Synthetic oligonucleotide
uucgagaaauaugaacacc

SEQ ID NO: 98402 - RNA, 19 nt, Artificial Sequence
  Description of Artificial Sequence: Synthetic oligonucleotide
ggaauugcgccuuuguuug

SEQ ID NO: 98403 - RNA, 19 nt, Artificial Sequence
  Description of Artificial Sequence: Synthetic oligonucleotide
auauccaaggcaguuucuc

SEQ ID NO: 98404 - RNA, 19 nt, Artificial Sequence
  Description of Artificial Sequence: Synthetic oligonucleotide
aaaccgguaaggcgcacca

SEQ ID NO: 98405 - RNA, 19 nt, Artificial Sequence
  Description of Artificial Sequence: Synthetic oligonucleotide
gacgaacgugagcucaucg

SEQ ID NO: 98406 - RNA, 19 nt, Artificial Sequence
  Description of Artificial Sequence: Synthetic oligonucleotide
ucuacauggacgugugggu

SEQ ID NO: 98407 - RNA, 19 nt, Artificial Sequence
  Description of Artificial Sequence: Synthetic oligonucleotide
gcaugcauaacauagaggu

SEQ ID NO: 98408 - RNA, 19 nt, Artificial Sequence
  Description of Artificial Sequence: Synthetic oligonucleotide
acgucauucccagggagcc

SEQ ID NO: 98409 - RNA, 19 nt, Artificial Sequence
  Description of Artificial Sequence: Synthetic oligonucleotide
ggcauuauuccaucgcggg

SEQ ID NO: 98410 - RNA, 19 nt, Artificial Sequence
  Description of Artificial Sequence: Synthetic oligonucleotide
aggaauugcgccuuuguuu

SEQ ID NO: 98411 - RNA, 19 nt, Artificial Sequence
  Description of Artificial Sequence: Synthetic oligonucleotide
aguuuaggaagcacucucg

SEQ ID NO: 98412 - RNA, 19 nt, Artificial Sequence
  Description of Artificial Sequence: Synthetic oligonucleotide
aaacgaccgggaccgggcg

SEQ ID NO: 98413 - RNA, 19 nt, Artificial Sequence
  Description of Artificial Sequence: Synthetic oligonucleotide
cuuugcuauauccaaggca

SEQ ID NO: 98414 - RNA, 19 nt, Artificial Sequence
  Description of Artificial Sequence: Synthetic oligonucleotide
auauacucuuuccgugcgg

SEQ ID NO: 98415 - RNA, 19 nt, Artificial Sequence
  Description of Artificial Sequence: Synthetic oligonucleotide
agugguacgggcgucuccg

SEQ ID NO: 98416 - RNA, 19 nt, Artificial Sequence
  Description of Artificial Sequence: Synthetic oligonucleotide
ugcauaacauagaggugga

SEQ ID NO: 98417 - RNA, 19 nt, Artificial Sequence
  Description of Artificial Sequence: Synthetic oligonucleotide
gguuggaccguuuucccgg

SEQ ID NO: 98418 - RNA, 19 nt, Artificial Sequence
  Description of Artificial Sequence: Synthetic oligonucleotide
uacucuacauggacgugug

SEQ ID NO: 98419 - RNA, 19 nt, Artificial Sequence
  Description of Artificial Sequence: Synthetic oligonucleotide
agcguuuagaugcaugcau

SEQ ID NO: 98420 - RNA, 19 nt, Artificial Sequence
  Description of Artificial Sequence: Synthetic oligonucleotide
uggacguguggguugaacu

SEQ ID NO: 98421 - RNA, 19 nt, Artificial Sequence
  Description of Artificial Sequence: Synthetic oligonucleotide
ccuauuuggggcuuagggg

SEQ ID NO: 98422 - RNA, 19 nt, Artificial Sequence
  Description of Artificial Sequence: Synthetic oligonucleotide
uacuggcgaaggcagaaga

SEQ ID NO: 98423 - RNA, 19 nt, Artificial Sequence
  Description of Artificial Sequence: Synthetic oligonucleotide
aaggaauugcgccuuuguu

SEQ ID NO: 98424 - RNA, 19 nt, Artificial Sequence
  Description of Artificial Sequence: Synthetic oligonucleotide
aauacuggcgaaggcagaa

SEQ ID NO: 98425 - RNA, 19 nt, Artificial Sequence
  Description of Artificial Sequence: Synthetic oligonucleotide
cuauacaggucaagauacc

SEQ ID NO: 98426 - RNA, 19 nt, Artificial Sequence
  Description of Artificial Sequence: Synthetic oligonucleotide
uguaaacugugcacacaga

SEQ ID NO: 98427 - RNA, 19 nt, Artificial Sequence
  Description of Artificial Sequence: Synthetic oligonucleotide
auccgaaaacgaccgggac

SEQ ID NO: 98428 - RNA, 19 nt, Artificial Sequence
  Description of Artificial Sequence: Synthetic oligonucleotide
ucagccgucacauccgaaa

SEQ ID NO: 98429 - RNA, 19 nt, Artificial Sequence
  Description of Artificial Sequence: Synthetic oligonucleotide
uauuccaucgcgggcgcgg

SEQ ID NO: 98430 - RNA, 19 nt, Artificial Sequence
  Description of Artificial Sequence: Synthetic oligonucleotide
guaggcuugcuccuaagca

SEQ ID NO: 98431 - RNA, 19 nt, Artificial Sequence
  Description of Artificial Sequence: Synthetic oligonucleotide
cuguccuucgaugugcccg

SEQ ID NO: 98432 - RNA, 19 nt, Artificial Sequence
  Description of Artificial Sequence: Synthetic oligonucleotide
gucgugugcucguagagac

SEQ ID NO: 98433 - RNA, 19 nt, Artificial Sequence
  Description of Artificial Sequence: Synthetic oligonucleotide
uauacucuuuccgugcggu

SEQ ID NO: 98434 - RNA, 19 nt, Artificial Sequence
  Description of Artificial Sequence: Synthetic oligonucleotide
auguacaguucgcuucuuc

SEQ ID NO: 98435 - RNA, 19 nt, Artificial Sequence
  Description of Artificial Sequence: Synthetic oligonucleotide
gaaaacgaccgggaccggg

SEQ ID NO: 98436 - RNA, 19 nt, Artificial Sequence
  Description of Artificial Sequence: Synthetic oligonucleotide
uucugcuagucagacagga

SEQ ID NO: 98437 - RNA, 19 nt, Artificial Sequence
  Description of Artificial Sequence: Synthetic oligonucleotide
agcuauauacauguuguau

SEQ ID NO: 98438 - RNA, 19 nt, Artificial Sequence
  Description of Artificial Sequence: Synthetic oligonucleotide
auauuccccuccugagugg

SEQ ID NO: 98439 - RNA, 19 nt, Artificial Sequence
  Description of Artificial Sequence: Synthetic oligonucleotide
auucggauaagcguuuaga

SEQ ID NO: 98440 - RNA, 19 nt, Artificial Sequence
  Description of Artificial Sequence: Synthetic oligonucleotide
ugaaggguguggacggaca

SEQ ID NO: 98441 - RNA, 19 nt, Artificial Sequence
  Description of Artificial Sequence: Synthetic oligonucleotide
uacccuaauacuggcgaag

SEQ ID NO: 98442 - RNA, 19 nt, Artificial Sequence
  Description of Artificial Sequence: Synthetic oligonucleotide
uacaguucgcuucuucaua

SEQ ID NO: 98443 - RNA, 19 nt, Artificial Sequence
  Description of Artificial Sequence: Synthetic oligonucleotide
auagagguggacguuuucu

SEQ ID NO: 98444 - RNA, 19 nt, Artificial Sequence
  Description of Artificial Sequence: Synthetic oligonucleotide
aguugguugaaagccacgu

SEQ ID NO: 98445 - RNA, 19 nt, Artificial Sequence
  Description of Artificial Sequence: Synthetic oligonucleotide
agccgucacauccgaaaac

SEQ ID NO: 98446 - RNA, 19 nt, Artificial Sequence
  Description of Artificial Sequence: Synthetic oligonucleotide
cauucuauacaggucaaga

SEQ ID NO: 98447 - RNA, 19 nt, Artificial Sequence
  Description of Artificial Sequence: Synthetic oligonucleotide
cagaaccggugcuugauug

SEQ ID NO: 98448 - RNA, 19 nt, Artificial Sequence
  Description of Artificial Sequence: Synthetic oligonucleotide
cugggcauuauuccaucgc

SEQ ID NO: 98449 - RNA, 19 nt, Artificial Sequence
  Description of Artificial Sequence: Synthetic oligonucleotide
cuuacuugacgaugacgac

SEQ ID NO: 98450 - RNA, 19 nt, Artificial Sequence
  Description of Artificial Sequence: Synthetic oligonucleotide
guggguugaacuuuccgga

SEQ ID NO: 98451 - RNA, 19 nt, Artificial Sequence
  Description of Artificial Sequence: Synthetic oligonucleotide
acgucauuaccccaaggaa

SEQ ID NO: 98452 - RNA, 19 nt, Artificial Sequence
  Description of Artificial Sequence: Synthetic oligonucleotide
accguuuucccggcguucc

SEQ ID NO: 98453 - RNA, 19 nt, Artificial Sequence
  Description of Artificial Sequence: Synthetic oligonucleotide
auacucuacauggacgugu

SEQ ID NO: 98454 - RNA, 19 nt, Artificial Sequence
  Description of Artificial Sequence: Synthetic oligonucleotide
gagucgugugcucguagag

SEQ ID NO: 98455 - RNA, 19 nt, Artificial Sequence
  Description of Artificial Sequence: Synthetic oligonucleotide
ucugccgaggacucugugu

SEQ ID NO: 98456 - RNA, 19 nt, Artificial Sequence
  Description of Artificial Sequence: Synthetic oligonucleotide
acgaugaucaccucuccuu

SEQ ID NO: 98457 - RNA, 19 nt, Artificial Sequence
  Description of Artificial Sequence: Synthetic oligonucleotide
uacgguuugcuccuuuaua

SEQ ID NO: 98458 - RNA, 19 nt, Artificial Sequence
  Description of Artificial Sequence: Synthetic oligonucleotide
uucgacgaacgugagcuca

SEQ ID NO: 98459 - RNA, 19 nt, Artificial Sequence
  Description of Artificial Sequence: Synthetic oligonucleotide
ggugcuugauugcugagac

SEQ ID NO: 98460 - RNA, 19 nt, Artificial Sequence
  Description of Artificial Sequence: Synthetic oligonucleotide
aaguugguugaaagccacg

SEQ ID NO: 98461 - RNA, 19 nt, Artificial Sequence
  Description of Artificial Sequence: Synthetic oligonucleotide
uuccccacggauuguuugc

SEQ ID NO: 98462 - RNA, 19 nt, Artificial Sequence
  Description of Artificial Sequence: Synthetic oligonucleotide
gaugcaugcauaacauaga

SEQ ID NO: 98463 - RNA, 19 nt, Artificial Sequence
  Description of Artificial Sequence: Synthetic oligonucleotide
uggacguuuucucgcaguc

SEQ ID NO: 98464 - RNA, 19 nt, Artificial Sequence
  Description of Artificial Sequence: Synthetic oligonucleotide
acgaacgugagcucaucgu

SEQ ID NO: 98465 - RNA, 19 nt, Artificial Sequence
  Description of Artificial Sequence: Synthetic oligonucleotide
gaauugcgccuuuguuugg

SEQ ID NO: 98466 - RNA, 19 nt, Artificial Sequence
  Description of Artificial Sequence: Synthetic oligonucleotide
ugggugagucgugugcucg

SEQ ID NO: 98467 - RNA, 19 nt, Artificial Sequence
  Description of Artificial Sequence: Synthetic oligonucleotide
uuccgugcggucauaucac

SEQ ID NO: 98468 - RNA, 19 nt, Artificial Sequence
  Description of Artificial Sequence: Synthetic oligonucleotide
aacgaccgggaccgggcgg

SEQ ID NO: 98469 - RNA, 19 nt, Artificial Sequence
  Description of Artificial Sequence: Synthetic oligonucleotide
ugcccgauccaccacuccu

SEQ ID NO: 98470 - RNA, 19 nt, Artificial Sequence
  Description of Artificial Sequence: Synthetic oligonucleotide
agggagccguugcacgucc

SEQ ID NO: 98471 - RNA, 19 nt, Artificial Sequence
  Description of Artificial Sequence: Synthetic oligonucleotide
agguaguuuaggaagcacu

SEQ ID NO: 98472 - RNA, 19 nt, Artificial Sequence
  Description of Artificial Sequence: Synthetic oligonucleotide
cagaacgguauuccccacg

SEQ ID NO: 98473 - RNA, 19 nt, Artificial Sequence
  Description of Artificial Sequence: Synthetic oligonucleotide
uguccuucgaugugcccga

SEQ ID NO: 98474 - RNA, 19 nt, Artificial Sequence
  Description of Artificial Sequence: Synthetic oligonucleotide
ucgugugcucguagagacg

SEQ ID NO: 98475 - RNA, 19 nt, Artificial Sequence
  Description of Artificial Sequence: Synthetic oligonucleotide
ucgaugugcccgauccacc

SEQ ID NO: 98476 - RNA, 19 nt, Artificial Sequence
  Description of Artificial Sequence: Synthetic oligonucleotide
agcgugugacuucugugug

SEQ ID NO: 98477 - RNA, 19 nt, Artificial Sequence
  Description of Artificial Sequence: Synthetic oligonucleotide
ccgaaaacgaccgggaccg

SEQ ID NO: 98478 - RNA, 19 nt, Artificial Sequence
  Description of Artificial Sequence: Synthetic oligonucleotide
gcagugauauacucuuucc

SEQ ID NO: 98479 - RNA, 19 nt, Artificial Sequence
  Description of Artificial Sequence: Synthetic oligonucleotide
cauccgauuccauagugaa

SEQ ID NO: 98480 - RNA, 19 nt, Artificial Sequence
  Description of Artificial Sequence: Synthetic oligonucleotide
auacucuuuccgugcgguc

SEQ ID NO: 98481 - RNA, 19 nt, Artificial Sequence
  Description of Artificial Sequence: Synthetic oligonucleotide
aagcguuuagaugcaugca

SEQ ID NO: 98482 - RNA, 19 nt, Artificial Sequence
  Description of Artificial Sequence: Synthetic oligonucleotide
uggguugaacuuuccggac

SEQ ID NO: 98483 - RNA, 19 nt, Artificial Sequence
  Description of Artificial Sequence: Synthetic oligonucleotide
ccaaaguagguuuguguag

SEQ ID NO: 98484 - RNA, 19 nt, Artificial Sequence
  Description of Artificial Sequence: Synthetic oligonucleotide
uccuucgacgaacgugagc

SEQ ID NO: 98485 - RNA, 19 nt, Artificial Sequence
  Description of Artificial Sequence: Synthetic oligonucleotide
aauggcaaucgaguuuaaa

SEQ ID NO: 98486 - RNA, 19 nt, Artificial Sequence
  Description of Artificial Sequence: Synthetic oligonucleotide
uccaucucgucuugacgca

SEQ ID NO: 98487 - RNA, 19 nt, Artificial Sequence
  Description of Artificial Sequence: Synthetic oligonucleotide
acgaugacgacaggcccac

SEQ ID NO: 98488 - RNA, 19 nt, Artificial Sequence
  Description of Artificial Sequence: Synthetic oligonucleotide
uugacgcagguuccauuca

SEQ ID NO: 98489 - RNA, 19 nt, Artificial Sequence
  Description of Artificial Sequence: Synthetic oligonucleotide
uacauacuauauuccccuc

SEQ ID NO: 98490 - RNA, 19 nt, Artificial Sequence
  Description of Artificial Sequence: Synthetic oligonucleotide
uucgggcuguccuucgaug

SEQ ID NO: 98491 - RNA, 19 nt, Artificial Sequence
  Description of Artificial Sequence: Synthetic oligonucleotide
gccgucacauccgaaaacg

SEQ ID NO: 98492 - RNA, 19 nt, Artificial Sequence
  Description of Artificial Sequence: Synthetic oligonucleotide
cucuccuucgacgaacgug

SEQ ID NO: 98493 - RNA, 19 nt, Artificial Sequence
  Description of Artificial Sequence: Synthetic oligonucleotide
uggaccguuuucccggcgu

SEQ ID NO: 98494 - RNA, 19 nt, Artificial Sequence
  Description of Artificial Sequence: Synthetic oligonucleotide
ucugcuagucagacaggau

SEQ ID NO: 98495 - RNA, 19 nt, Artificial Sequence
  Description of Artificial Sequence: Synthetic oligonucleotide
gaacgugagcucaucguca

SEQ ID NO: 98496 - RNA, 19 nt, Artificial Sequence
  Description of Artificial Sequence: Synthetic oligonucleotide
acucuacauggacgugugg

SEQ ID NO: 98497 - RNA, 19 nt, Artificial Sequence
  Description of Artificial Sequence: Synthetic oligonucleotide
uggcccuuccaugaaugag

SEQ ID NO: 98498 - RNA, 19 nt, Artificial Sequence
  Description of Artificial Sequence: Synthetic oligonucleotide
gucacgaugaucaccucuc

SEQ ID NO: 98499 - RNA, 19 nt, Artificial Sequence
  Description of Artificial Sequence: Synthetic oligonucleotide
caguucgcuucuucauacg

SEQ ID NO: 98500 - RNA, 19 nt, Artificial Sequence
  Description of Artificial Sequence: Synthetic oligonucleotide
aggcuuaggcggcaagucu

SEQ ID NO: 98501 - RNA, 19 nt, Artificial Sequence
  Description of Artificial Sequence: Synthetic oligonucleotide
gcggucauaucacuugaag

SEQ ID NO: 98502 - RNA, 19 nt, Artificial Sequence
  Description of Artificial Sequence: Synthetic oligonucleotide
gcuacccuaauacuggcga

SEQ ID NO: 98503 - RNA, 19 nt, Artificial Sequence
  Description of Artificial Sequence: Synthetic oligonucleotide
cuuaggggccaguuccgug

SEQ ID NO: 98504 - RNA, 19 nt, Artificial Sequence
  Description of Artificial Sequence: Synthetic oligonucleotide
auggacguguggguugaac

SEQ ID NO: 98505 - RNA, 19 nt, Artificial Sequence
  Description of Artificial Sequence: Synthetic oligonucleotide
aggcacuccggcuugccgu

SEQ ID NO: 98506 - RNA, 19 nt, Artificial Sequence
  Description of Artificial Sequence: Synthetic oligonucleotide
auacgguuugcuccuuuau

SEQ ID NO: 98507 - RNA, 19 nt, Artificial Sequence
  Description of Artificial Sequence: Synthetic oligonucleotide
uuaggaggaaggucaccua

SEQ ID NO: 98508 - RNA, 19 nt, Artificial Sequence
  Description of Artificial Sequence: Synthetic oligonucleotide
cauccgaaaacgaccggga

SEQ ID NO: 98509 - RNA, 19 nt, Artificial Sequence
  Description of Artificial Sequence: Synthetic oligonucleotide
gucuccggcagcgugggag

SEQ ID NO: 98510 - RNA, 19 nt, Artificial Sequence
  Description of Artificial Sequence: Synthetic oligonucleotide
uuggaccguuuucccggcg

SEQ ID NO: 98511 - RNA, 19 nt, Artificial Sequence
  Description of Artificial Sequence: Synthetic oligonucleotide
agcuccuacacuccugguu

SEQ ID NO: 98512 - RNA, 19 nt, Artificial Sequence
  Description of Artificial Sequence: Synthetic oligonucleotide
ugguacgggcgucuccggc

SEQ ID NO: 98513 - RNA, 19 nt, Artificial Sequence
  Description of Artificial Sequence: Synthetic oligonucleotide
auuccaucgcgggcgcggc

SEQ ID NO: 98514 - RNA, 19 nt, Artificial Sequence
  Description of Artificial Sequence: Synthetic oligonucleotide
gcauuauuccaucgcgggc

SEQ ID NO: 98515 - RNA, 19 nt, Artificial Sequence
  Description of Artificial Sequence: Synthetic oligonucleotide
ggaacauucuauacagguc

SEQ ID NO: 98516 - RNA, 19 nt, Artificial Sequence
  Description of Artificial Sequence: Synthetic oligonucleotide
cuucacacgccucacuuua

SEQ ID NO: 98517 - RNA, 19 nt, Artificial Sequence
  Description of Artificial Sequence: Synthetic oligonucleotide
uucccggcguuccuugggu

SEQ ID NO: 98518 - RNA, 19 nt, Artificial Sequence
  Description of Artificial Sequence: Synthetic oligonucleotide
ggguuggaccguuuucccg

SEQ ID NO: 98519 - RNA, 19 nt, Artificial Sequence
  Description of Artificial Sequence: Synthetic oligonucleotide
cgcguggugaaacuggacg

SEQ ID NO: 98520 - RNA, 19 nt, Artificial Sequence
  Description of Artificial Sequence: Synthetic oligonucleotide
ucuagacuugcaggaggcu

SEQ ID NO: 98521 - RNA, 19 nt, Artificial Sequence
  Description of Artificial Sequence: Synthetic oligonucleotide
agucgugugcucguagaga

SEQ ID NO: 98522 - RNA, 19 nt, Artificial Sequence
  Description of Artificial Sequence: Synthetic oligonucleotide
cacauccgaaaacgaccgg

SEQ ID NO: 98523 - RNA, 19 nt, Artificial Sequence
  Description of Artificial Sequence: Synthetic oligonucleotide
cuugucccgggaguggcag

SEQ ID NO: 98524 - RNA, 19 nt, Artificial Sequence
  Description of Artificial Sequence: Synthetic oligonucleotide
uguggacggacagaagguu

SEQ ID NO: 98525 - RNA, 19 nt, Artificial Sequence
  Description of Artificial Sequence: Synthetic oligonucleotide
ucgacgaacgugagcucau

SEQ ID NO: 98526 - RNA, 19 nt, Artificial Sequence
  Description of Artificial Sequence: Synthetic oligonucleotide
cucggcgaugaacucggac

SEQ ID NO: 98527 - RNA, 19 nt, Artificial Sequence
  Description of Artificial Sequence: Synthetic oligonucleotide
ucuugacgcagguuccauu

SEQ ID NO: 98528 - RNA, 19 nt, Artificial Sequence
  Description of Artificial Sequence: Synthetic oligonucleotide
uuauuccaucgcgggcgcg

SEQ ID NO: 98529 - RNA, 19 nt, Artificial Sequence
  Description of Artificial Sequence: Synthetic oligonucleotide
cauagagguggacguuuuc

SEQ ID NO: 98530 - RNA, 19 nt, Artificial Sequence
  Description of Artificial Sequence: Synthetic oligonucleotide
guaaggcgcaccagguccc

SEQ ID NO: 98531 - RNA, 19 nt, Artificial Sequence
  Description of Artificial Sequence: Synthetic oligonucleotide
ggcauccgauuccauagug

SEQ ID NO: 98532 - RNA, 19 nt, Artificial Sequence
  Description of Artificial Sequence: Synthetic oligonucleotide
guuggaccguuuucccggc

SEQ ID NO: 98533 - RNA, 19 nt, Artificial Sequence
  Description of Artificial Sequence: Synthetic oligonucleotide
agguaauaucucaggggug

SEQ ID NO: 98534 - RNA, 19 nt, Artificial Sequence
  Description of Artificial Sequence: Synthetic oligonucleotide
agccgcguggugaaacugg

SEQ ID NO: 98535 - RNA, 19 nt, Artificial Sequence
  Description of Artificial Sequence: Synthetic oligonucleotide
gggcauuauuccaucgcgg

SEQ ID NO: 98536 - RNA, 19 nt, Artificial Sequence
  Description of Artificial Sequence: Synthetic oligonucleotide
uauuccccacggauuguuu

SEQ ID NO: 98537 - RNA, 19 nt, Artificial Sequence
  Description of Artificial Sequence: Synthetic oligonucleotide
auacuggcgaaggcagaag

SEQ ID NO: 98538 - RNA, 19 nt, Artificial Sequence
  Description of Artificial Sequence: Synthetic oligonucleotide
cgaggcuacccuaauacug

SEQ ID NO: 98539 - RNA, 19 nt, Artificial Sequence
  Description of Artificial Sequence: Synthetic oligonucleotide
cuucauacgguuugcuccu

SEQ ID NO: 98540 - RNA, 19 nt, Artificial Sequence
  Description of Artificial Sequence: Synthetic oligonucleotide
guacgggcgucuccggcag

SEQ ID NO: 98541 - RNA, 19 nt, Artificial Sequence
  Description of Artificial Sequence: Synthetic oligonucleotide
agggagagauccccagcgu

SEQ ID NO: 98542 - RNA, 19 nt, Artificial Sequence
  Description of Artificial Sequence: Synthetic oligonucleotide
cuaguggucugcgugcuga

SEQ ID NO: 98543 - RNA, 19 nt, Artificial Sequence
  Description of Artificial Sequence: Synthetic oligonucleotide
acguguggguugaacuuuc

SEQ ID NO: 98544 - RNA, 19 nt, Artificial Sequence
  Description of Artificial Sequence: Synthetic oligonucleotide
ugcagaaccggugcuugau

SEQ ID NO: 98545 - RNA, 19 nt, Artificial Sequence
  Description of Artificial Sequence: Synthetic oligonucleotide
ucauacgguuugcuccuuu

SEQ ID NO: 98546 - RNA, 19 nt, Artificial Sequence
  Description of Artificial Sequence: Synthetic oligonucleotide
cggcaagucuccuauuugg

SEQ ID NO: 98547 - RNA, 19 nt, Artificial Sequence
  Description of Artificial Sequence: Synthetic oligonucleotide
cuuuccgugcggucauauc

SEQ ID NO: 98548 - RNA, 19 nt, Artificial Sequence
  Description of Artificial Sequence: Synthetic oligonucleotide
uccgugcggucauaucacu

SEQ ID NO: 98549 - RNA, 19 nt, Artificial Sequence
  Description of Artificial Sequence: Synthetic oligonucleotide
guucggaaguuccuaauuu

SEQ ID NO: 98550 - RNA, 19 nt, Artificial Sequence
  Description of Artificial Sequence: Synthetic oligonucleotide
acacggggaacacacccuu

SEQ ID NO: 98551 - RNA, 19 nt, Artificial Sequence
  Description of Artificial Sequence: Synthetic oligonucleotide
gcuuuaauggcaaucgagu

SEQ ID NO: 98552 - RNA, 19 nt, Artificial Sequence
  Description of Artificial Sequence: Synthetic oligonucleotide
gucauaucacuugaagggu

SEQ ID NO: 98553 - RNA, 19 nt, Artificial Sequence
  Description of Artificial Sequence: Synthetic oligonucleotide
caucagacgcacacaucca

SEQ ID NO: 98554 - RNA, 19 nt, Artificial Sequence
  Description of Artificial Sequence: Synthetic oligonucleotide
cuuugucgagggagagaug

SEQ ID NO: 98555 - RNA, 19 nt, Artificial Sequence
  Description of Artificial Sequence: Synthetic oligonucleotide
gucggacaggguucucuug

SEQ ID NO: 98556 - RNA, 19 nt, Artificial Sequence
  Description of Artificial Sequence: Synthetic oligonucleotide
uaauggcaaucgaguuuaa

SEQ ID NO: 98557 - RNA, 19 nt, Artificial Sequence
  Description of Artificial Sequence: Synthetic oligonucleotide
acauggacguguggguuga

SEQ ID NO: 98558 - RNA, 19 nt, Artificial Sequence
  Description of Artificial Sequence: Synthetic oligonucleotide
ucaccucuccuucgacgaa

SEQ ID NO: 98559 - RNA, 19 nt, Artificial Sequence
  Description of Artificial Sequence: Synthetic oligonucleotide
ccuuccaugaaugaguucu

SEQ ID NO: 98560 - RNA, 19 nt, Artificial Sequence
  Description of Artificial Sequence: Synthetic oligonucleotide
ugccgucuuacuugacgau

SEQ ID NO: 98561 - RNA, 19 nt, Artificial Sequence
  Description of Artificial Sequence: Synthetic oligonucleotide
ugccgaggacucuguguca

SEQ ID NO: 98562 - RNA, 19 nt, Artificial Sequence
  Description of Artificial Sequence: Synthetic oligonucleotide
ggaaaacucugccgaggac

SEQ ID NO: 98563 - RNA, 19 nt, Artificial Sequence
  Description of Artificial Sequence: Synthetic oligonucleotide
agauccccagcgugugacu

SEQ ID NO: 98564 - RNA, 19 nt, Artificial Sequence
  Description of Artificial Sequence: Synthetic oligonucleotide
ggggcgggcgaccaugugc

SEQ ID NO: 98565 - RNA, 19 nt, Artificial Sequence
  Description of Artificial Sequence: Synthetic oligonucleotide
cuccuauuuggggcuuagg

SEQ ID NO: 98566 - RNA, 19 nt, Artificial Sequence
  Description of Artificial Sequence: Synthetic oligonucleotide
guggacggacagaagguuc

SEQ ID NO: 98567 - RNA, 19 nt, Artificial Sequence
  Description of Artificial Sequence: Synthetic oligonucleotide
gaacgguauuccccacgga

SEQ ID NO: 98568 - RNA, 19 nt, Artificial Sequence
  Description of Artificial Sequence: Synthetic oligonucleotide
cauacgguuugcuccuuua

SEQ ID NO: 98569 - RNA, 19 nt, Artificial Sequence
  Description of Artificial Sequence: Synthetic oligonucleotide
cuucgacgaacgugagcuc

SEQ ID NO: 98570 - RNA, 19 nt, Artificial Sequence
  Description of Artificial Sequence: Synthetic oligonucleotide
gguggacguuuucucgcag

SEQ ID NO: 98571 - RNA, 19 nt, Artificial Sequence
  Description of Artificial Sequence: Synthetic oligonucleotide
caccucuccuucgacgaac

SEQ ID NO: 98572 - RNA, 19 nt, Artificial Sequence
  Description of Artificial Sequence: Synthetic oligonucleotide
agccguugcacguccucaa

SEQ ID NO: 98573 - RNA, 19 nt, Artificial Sequence
  Description of Artificial Sequence: Synthetic oligonucleotide
cugccacuaguggucugcg

SEQ ID NO: 98574 - RNA, 19 nt, Artificial Sequence
  Description of Artificial Sequence: Synthetic oligonucleotide
cgugcggucauaucacuug

SEQ ID NO: 98575 - RNA, 19 nt, Artificial Sequence
  Description of Artificial Sequence: Synthetic oligonucleotide
cuacccuaauacuggcgaa

SEQ ID NO: 98576 - RNA, 19 nt, Artificial Sequence
  Description of Artificial Sequence: Synthetic oligonucleotide
uccgggcggcggcuuuugg

SEQ ID NO: 98577 - RNA, 19 nt, Artificial Sequence
  Description of Artificial Sequence: Synthetic oligonucleotide
uccccacggauuguuugcu

SEQ ID NO: 98578 - RNA, 19 nt, Artificial Sequence
  Description of Artificial Sequence: Synthetic oligonucleotide
gugguacgggcgucuccgg

SEQ ID NO: 98579 - RNA, 19 nt, Artificial Sequence
  Description of Artificial Sequence: Synthetic oligonucleotide
cagugguacgggcgucucc

SEQ ID NO: 98580 - RNA, 19 nt, Artificial Sequence
  Description of Artificial Sequence: Synthetic oligonucleotide
cuccuucgacgaacgugag

SEQ ID NO: 98581 - RNA, 19 nt, Artificial Sequence
  Description of Artificial Sequence: Synthetic oligonucleotide
acacggagaucugguccgg

SEQ ID NO: 98582 - RNA, 19 nt, Artificial Sequence
  Description of Artificial Sequence: Synthetic oligonucleotide
ugccacuaguggucugcgu

SEQ ID NO: 98583 - RNA, 19 nt, Artificial Sequence
  Description of Artificial Sequence: Synthetic oligonucleotide
cugguccggcauccgauuc

SEQ ID NO: 98584 - RNA, 19 nt, Artificial Sequence
  Description of Artificial Sequence: Synthetic oligonucleotide
acgcacacauccacuccuc

SEQ ID NO: 98585 - RNA, 19 nt, Artificial Sequence
  Description of Artificial Sequence: Synthetic oligonucleotide
ucccggcguuccuugggug

SEQ ID NO: 98586 - RNA, 19 nt, Artificial Sequence
  Description of Artificial Sequence: Synthetic oligonucleotide
gguacgggcgucuccggca

SEQ ID NO: 98587 - RNA, 19 nt, Artificial Sequence
  Description of Artificial Sequence: Synthetic oligonucleotide
gagccguugcacguccuca

SEQ ID NO: 98588 - RNA, 19 nt, Artificial Sequence
  Description of Artificial Sequence: Synthetic oligonucleotide
gaaccggugcuugauugcu

SEQ ID NO: 98589 - RNA, 19 nt, Artificial Sequence
  Description of Artificial Sequence: Synthetic oligonucleotide
acgguauuccccacggauu

SEQ ID NO: 98590 - RNA, 19 nt, Artificial Sequence
  Description of Artificial Sequence: Synthetic oligonucleotide
cacggauuguuugcuuauc

SEQ ID NO: 98591 - RNA, 19 nt, Artificial Sequence
  Description of Artificial Sequence: Synthetic oligonucleotide
caguagugcagaacgguau

SEQ ID NO: 98592 - RNA, 19 nt, Artificial Sequence
  Description of Artificial Sequence: Synthetic oligonucleotide
ggacguuuucucgcagucc

SEQ ID NO: 98593 - RNA, 19 nt, Artificial Sequence
  Description of Artificial Sequence: Synthetic oligonucleotide
cuguagggcuguucuaucu

SEQ ID NO: 98594 - RNA, 19 nt, Artificial Sequence
  Description of Artificial Sequence: Synthetic oligonucleotide
ggcuuaggcggcaagucuc

SEQ ID NO: 98595 - RNA, 19 nt, Artificial Sequence
  Description of Artificial Sequence: Synthetic oligonucleotide
cagcuauauacauguugua

SEQ ID NO: 98596 - RNA, 19 nt, Artificial Sequence
  Description of Artificial Sequence: Synthetic oligonucleotide
ccgucuuacuugacgauga

SEQ ID NO: 98597 - RNA, 19 nt, Artificial Sequence
  Description of Artificial Sequence: Synthetic oligonucleotide
uugucccgggaguggcaga

SEQ ID NO: 98598 - RNA, 19 nt, Artificial Sequence
  Description of Artificial Sequence: Synthetic oligonucleotide
ucugggugaccgccccuuu

SEQ ID NO: 98599 - RNA, 19 nt, Artificial Sequence
  Description of Artificial Sequence: Synthetic oligonucleotide
acuccggcuugccguacau

SEQ ID NO: 98600 - RNA, 19 nt, Artificial Sequence
  Description of Artificial Sequence: Synthetic oligonucleotide
acauagagguggacguuuu

SEQ ID NO: 98601 - RNA, 19 nt, Artificial Sequence
  Description of Artificial Sequence: Synthetic oligonucleotide
gcuuugucgagggagagau

SEQ ID NO: 98602 - RNA, 19 nt, Artificial Sequence
  Description of Artificial Sequence: Synthetic oligonucleotide
caagauacccaaguugguu

SEQ ID NO: 98603 - RNA, 19 nt, Artificial Sequence
  Description of Artificial Sequence: Synthetic oligonucleotide
ggugggcgaguuguagucc

SEQ ID NO: 98604 - RNA, 19 nt, Artificial Sequence
  Description of Artificial Sequence: Synthetic oligonucleotide
gaccguuuucccggcguuc

SEQ ID NO: 98605 - RNA, 19 nt, Artificial Sequence
  Description of Artificial Sequence: Synthetic oligonucleotide
gcuagucagacaggaugug

SEQ ID NO: 98606 - RNA, 19 nt, Artificial Sequence
  Description of Artificial Sequence: Synthetic oligonucleotide
gugggugagucgugugcuc

SEQ ID NO: 98607 - RNA, 19 nt, Artificial Sequence
  Description of Artificial Sequence: Synthetic oligonucleotide
ggauaagcguuuagaugca

SEQ ID NO: 98608 - RNA, 19 nt, Artificial Sequence
  Description of Artificial Sequence: Synthetic oligonucleotide
aguccucggugggucucgg

SEQ ID NO: 98609 - RNA, 19 nt, Artificial Sequence
  Description of Artificial Sequence: Synthetic oligonucleotide
ggcgcaccaggucccgagg

SEQ ID NO: 98610 - RNA, 19 nt, Artificial Sequence
  Description of Artificial Sequence: Synthetic oligonucleotide
cagccgucacauccgaaaa

SEQ ID NO: 98611 - RNA, 19 nt, Artificial Sequence
  Description of Artificial Sequence: Synthetic oligonucleotide
cccgauccaccacuccugg

SEQ ID NO: 98612 - RNA, 19 nt, Artificial Sequence
  Description of Artificial Sequence: Synthetic oligonucleotide
ucucggcgaugaacucgga

SEQ ID NO: 98613 - RNA, 19 nt, Artificial Sequence
  Description of Artificial Sequence: Synthetic oligonucleotide
cacggagaucugguccggc

SEQ ID NO: 98614 - RNA, 19 nt, Artificial Sequence
  Description of Artificial Sequence: Synthetic oligonucleotide
gcauccgauuccauaguga

SEQ ID NO: 98615 - RNA, 19 nt, Artificial Sequence
  Description of Artificial Sequence: Synthetic oligonucleotide
cguguugauuuuccucggc

SEQ ID NO: 98616 - RNA, 19 nt, Artificial Sequence
  Description of Artificial Sequence: Synthetic oligonucleotide
guguggacggacagaaggu

SEQ ID NO: 98617 - RNA, 19 nt, Artificial Sequence
  Description of Artificial Sequence: Synthetic oligonucleotide
gcggcuuuugggguaacuc

SEQ ID NO: 98618 - RNA, 19 nt, Artificial Sequence
  Description of Artificial Sequence: Synthetic oligonucleotide
cguuuagaugcaugcauaa

SEQ ID NO: 98619 - RNA, 19 nt, Artificial Sequence
  Description of Artificial Sequence: Synthetic oligonucleotide
cucaccgcggaaggccaug

SEQ ID NO: 98620 - RNA, 19 nt, Artificial Sequence
  Description of Artificial Sequence: Synthetic oligonucleotide
gacguguggguugaacuuu

SEQ ID NO: 98621 - RNA, 19 nt, Artificial Sequence
  Description of Artificial Sequence: Synthetic oligonucleotide
gcguggugaaacuggacgu

SEQ ID NO: 98622 - RNA, 19 nt, Artificial Sequence
  Description of Artificial Sequence: Synthetic oligonucleotide
ggcugcgcacacuggaaaa

SEQ ID NO: 98623 - RNA, 19 nt, Artificial Sequence
  Description of Artificial Sequence: Synthetic oligonucleotide
cagccgcguggugaaacug

SEQ ID NO: 98624 - RNA, 19 nt, Artificial Sequence
  Description of Artificial Sequence: Synthetic oligonucleotide
acagaacggcacagaggga

SEQ ID NO: 98625 - RNA, 19 nt, Artificial Sequence
  Description of Artificial Sequence: Synthetic oligonucleotide
guccgccuggcagucauaa

SEQ ID NO: 98626 - RNA, 19 nt, Artificial Sequence
  Description of Artificial Sequence: Synthetic oligonucleotide
ggagccguugcacguccuc

SEQ ID NO: 98627 - RNA, 19 nt, Artificial Sequence
  Description of Artificial Sequence: Synthetic oligonucleotide
cggauuguuugcuuaucca

SEQ ID NO: 98628 - RNA, 19 nt, Artificial Sequence
  Description of Artificial Sequence: Synthetic oligonucleotide
ggucuguaauggcagcuau

SEQ ID NO: 98629 - RNA, 19 nt, Artificial Sequence
  Description of Artificial Sequence: Synthetic oligonucleotide
uucauacgguuugcuccuu

SEQ ID NO: 98630 - RNA, 19 nt, Artificial Sequence
  Description of Artificial Sequence: Synthetic oligonucleotide
gcaguagugcagaacggua

SEQ ID NO: 98631 - RNA, 19 nt, Artificial Sequence
  Description of Artificial Sequence: Synthetic oligonucleotide
gcguuuagaugcaugcaua

SEQ ID NO: 98632 - RNA, 19 nt, Artificial Sequence
  Description of Artificial Sequence: Synthetic oligonucleotide
aggcuccauaggagagccg

SEQ ID NO: 98633 - RNA, 19 nt, Artificial Sequence
  Description of Artificial Sequence: Synthetic oligonucleotide
cccacgucauuaccccaag

SEQ ID NO: 98634 - RNA, 19 nt, Artificial Sequence
  Description of Artificial Sequence: Synthetic oligonucleotide
cgugugcucguagagacga

SEQ ID NO: 98635 - RNA, 19 nt, Artificial Sequence
  Description of Artificial Sequence: Synthetic oligonucleotide
cggguuggaccguuuuccc

SEQ ID NO: 98636 - RNA, 19 nt, Artificial Sequence
  Description of Artificial Sequence: Synthetic oligonucleotide
cuccggcuugccguacaug

SEQ ID NO: 98637 - RNA, 19 nt, Artificial Sequence
  Description of Artificial Sequence: Synthetic oligonucleotide
agucuccuauuuggggcuu

SEQ ID NO: 98638 - RNA, 19 nt, Artificial Sequence
  Description of Artificial Sequence: Synthetic oligonucleotide
ccacguggguucugaugag

SEQ ID NO: 98639 - RNA, 19 nt, Artificial Sequence
  Description of Artificial Sequence: Synthetic oligonucleotide
gagggucggacaggguucu

SEQ ID NO: 98640 - RNA, 19 nt, Artificial Sequence
  Description of Artificial Sequence: Synthetic oligonucleotide
ggcaaaccgguaaggcgca

SEQ ID NO: 98641 - RNA, 19 nt, Artificial Sequence
  Description of Artificial Sequence: Synthetic oligonucleotide
cguguggguugaacuuucc

SEQ ID NO: 98642 - RNA, 19 nt, Artificial Sequence
  Description of Artificial Sequence: Synthetic oligonucleotide
gccggguuggaccguuuuc

SEQ ID NO: 98643 - RNA, 19 nt, Artificial Sequence
  Description of Artificial Sequence: Synthetic oligonucleotide
ucggugggucucggcgaug

SEQ ID NO: 98644 - RNA, 19 nt, Artificial Sequence
  Description of Artificial Sequence: Synthetic oligonucleotide
cugcgcacacuggaaaacu

SEQ ID NO: 98645 - RNA, 19 nt, Artificial Sequence
  Description of Artificial Sequence: Synthetic oligonucleotide
cuacauggacguguggguu

SEQ ID NO: 98646 - RNA, 19 nt, Artificial Sequence
  Description of Artificial Sequence: Synthetic oligonucleotide
guauuccccacggauuguu

SEQ ID NO: 98647 - RNA, 19 nt, Artificial Sequence
  Description of Artificial Sequence: Synthetic oligonucleotide
gcgucuccggcagcguggg

SEQ ID NO: 98648 - RNA, 19 nt, Artificial Sequence
  Description of Artificial Sequence: Synthetic oligonucleotide
ggguuccucagagcugaac

SEQ ID NO: 98649 - RNA, 19 nt, Artificial Sequence
  Description of Artificial Sequence: Synthetic oligonucleotide
cucagccgucacauccgaa

SEQ ID NO: 98650 - RNA, 19 nt, Artificial Sequence
  Description of Artificial Sequence: Synthetic oligonucleotide
gcuauauccaaggcaguuu

SEQ ID NO: 98651 - RNA, 19 nt, Artificial Sequence
  Description of Artificial Sequence: Synthetic oligonucleotide
cacuccggcuugccguaca

SEQ ID NO: 98652 - RNA, 19 nt, Artificial Sequence
  Description of Artificial Sequence: Synthetic oligonucleotide
cguuccuuggguggcgaag

SEQ ID NO: 98653 - RNA, 19 nt, Artificial Sequence
  Description of Artificial Sequence: Synthetic oligonucleotide
ggcggcaagucuccuauuu

SEQ ID NO: 98654 - RNA, 19 nt, Artificial Sequence
  Description of Artificial Sequence: Synthetic oligonucleotide
ggcgggcgaccaugugccg

SEQ ID NO: 98655 - RNA, 19 nt, Artificial Sequence
  Description of Artificial Sequence: Synthetic oligonucleotide
gguagcuuugagccucuuu

SEQ ID NO: 98656 - RNA, 19 nt, Artificial Sequence
  Description of Artificial Sequence: Synthetic oligonucleotide
aggcggcaagucuccuauu

SEQ ID NO: 98657 - RNA, 19 nt, Artificial Sequence
  Description of Artificial Sequence: Synthetic oligonucleotide
agcgugggagugaggucau

SEQ ID NO: 98658 - RNA, 19 nt, Artificial Sequence
  Description of Artificial Sequence: Synthetic oligonucleotide
ggucccgaggcuacccuaa

SEQ ID NO: 98659 - RNA, 19 nt, Artificial Sequence
  Description of Artificial Sequence: Synthetic oligonucleotide
ccgccuggcagucauaaau

SEQ ID NO: 98660 - RNA, 19 nt, Artificial Sequence
  Description of Artificial Sequence: Synthetic oligonucleotide
ggcacuccggcuugccgua

SEQ ID NO: 98661 - RNA, 19 nt, Artificial Sequence
  Description of Artificial Sequence: Synthetic oligonucleotide
ccggcguuccuuggguggc

SEQ ID NO: 98662 - RNA, 19 nt, Artificial Sequence
  Description of Artificial Sequence: Synthetic oligonucleotide
cugcgugcugagagggagu

SEQ ID NO: 98663 - RNA, 19 nt, Artificial Sequence
  Description of Artificial Sequence: Synthetic oligonucleotide
ccgcguggugaaacuggac

SEQ ID NO: 98664 - RNA, 19 nt, Artificial Sequence
  Description of Artificial Sequence: Synthetic oligonucleotide
gccgcguggugaaacugga

SEQ ID NO: 98665 - RNA, 19 nt, Artificial Sequence
  Description of Artificial Sequence: Synthetic oligonucleotide
gcccacgucauuaccccaa

SEQ ID NO: 98666 - RNA, 19 nt, Artificial Sequence
  Description of Artificial Sequence: Synthetic oligonucleotide
ccgucgguggugggugacg

SEQ ID NO: 98667 - RNA, 19 nt, Artificial Sequence
  Description of Artificial Sequence: Synthetic oligonucleotide
gggugagucgugugcucgu

SEQ ID NO: 98668 - RNA, 19 nt, Artificial Sequence
  Description of Artificial Sequence: Synthetic oligonucleotide
ggugagucgugugcucgua

SEQ ID NO: 98669 - RNA, 19 nt, Artificial Sequence
  Description of Artificial Sequence: Synthetic oligonucleotide
cuuaggcggcaagucuccu

SEQ ID NO: 98670 - RNA, 19 nt, Artificial Sequence
  Description of Artificial Sequence: Synthetic oligonucleotide
gcagccgcguggugaaacu

SEQ ID NO: 98671 - RNA, 19 nt, Artificial Sequence
  Description of Artificial Sequence: Synthetic oligonucleotide
gggucggacaggguucucu

SEQ ID NO: 98672 - RNA, 19 nt, Artificial Sequence
  Description of Artificial Sequence: Synthetic oligonucleotide
cucggugggucucggcgau

SEQ ID NO: 98673 - RNA, 19 nt, Artificial Sequence
  Description of Artificial Sequence: Synthetic oligonucleotide
gguauuccccacggauugu

SEQ ID NO: 98674 - RNA, 19 nt, Artificial Sequence
  Description of Artificial Sequence: Synthetic oligonucleotide
cccuugccaucagacgcac

SEQ ID NO: 98675 - RNA, 19 nt, Artificial Sequence
  Description of Artificial Sequence: Synthetic oligonucleotide
gccacuuucugagguaguu

SEQ ID NO: 98676 - RNA, 19 nt, Artificial Sequence
  Description of Artificial Sequence: Synthetic oligonucleotide
ccgauuccauagugaaucu

SEQ ID NO: 98677 - RNA, 19 nt, Artificial Sequence
  Description of Artificial Sequence: Synthetic oligonucleotide
ccgaggcuacccuaauacu

SEQ ID NO: 98678 - RNA, 19 nt, Artificial Sequence
  Description of Artificial Sequence: Synthetic oligonucleotide
gggcgaccaugugccgagg

SEQ ID NO: 98679 - RNA, 19 nt, Artificial Sequence
  Description of Artificial Sequence: Synthetic oligonucleotide
gcagaaccggugcuugauu

SEQ ID NO: 98680 - RNA, 19 nt, Artificial Sequence
  Description of Artificial Sequence: Synthetic oligonucleotide
ggcguuccuuggguggcga

SEQ ID NO: 98681 - RNA, 19 nt, Artificial Sequence
  Description of Artificial Sequence: Synthetic oligonucleotide
gcggucugguaugaagggu

SEQ ID NO: 98682 - RNA, 19 nt, Artificial Sequence
  Description of Artificial Sequence: Synthetic oligonucleotide
cagcagcgugacgguguuc

SEQ ID NO: 98683 - RNA, 19 nt, Artificial Sequence
  Description of Artificial Sequence: Synthetic oligonucleotide
ccacggauuguuugcuuau

SEQ ID NO: 98684 - RNA, 19 nt, Artificial Sequence
  Description of Artificial Sequence: Synthetic oligonucleotide
acguggugggcgaguugua

SEQ ID NO: 98685 - RNA, 19 nt, Artificial Sequence
  Description of Artificial Sequence: Synthetic oligonucleotide
gucccgaggcuacccuaau

SEQ ID NO: 98686 - RNA, 19 nt, Artificial Sequence
  Description of Artificial Sequence: Synthetic oligonucleotide
cccagcgugugacuucugu

SEQ ID NO: 98687 - RNA, 19 nt, Artificial Sequence
  Description of Artificial Sequence: Synthetic oligonucleotide
ggaccguuuucccggcguu

SEQ ID NO: 98688 - RNA, 19 nt, Artificial Sequence
  Description of Artificial Sequence: Synthetic oligonucleotide
gcgugacgguguuccugca

SEQ ID NO: 98689 - RNA, 19 nt, Artificial Sequence
  Description of Artificial Sequence: Synthetic oligonucleotide
cgaaaacgaccgggaccgg

SEQ ID NO: 98690 - RNA, 19 nt, Artificial Sequence
  Description of Artificial Sequence: Synthetic oligonucleotide
gccgucgguggugggugac

SEQ ID NO: 98691 - RNA, 19 nt, Artificial Sequence
  Description of Artificial Sequence: Synthetic oligonucleotide
ggucugggugaccgccccu

SEQ ID NO: 98692 - RNA, 19 nt, Artificial Sequence
  Description of Artificial Sequence: Synthetic oligonucleotide
cgacgaacgugagcucauc

SEQ ID NO: 98693 - RNA, 19 nt, Artificial Sequence
  Description of Artificial Sequence: Synthetic oligonucleotide
ggcagcggucugguaugaa

SEQ ID NO: 98694 - RNA, 19 nt, Artificial Sequence
  Description of Artificial Sequence: Synthetic oligonucleotide
gcacuccggcuugccguac

SEQ ID NO: 98695 - RNA, 19 nt, Artificial Sequence
  Description of Artificial Sequence: Synthetic oligonucleotide
cggcguuccuuggguggcg

SEQ ID NO: 98696 - RNA, 19 nt, Artificial Sequence
  Description of Artificial Sequence: Synthetic oligonucleotide
ggccggguuggaccguuuu

SEQ ID NO: 98697 - RNA, 19 nt, Artificial Sequence
  Description of Artificial Sequence: Synthetic oligonucleotide
cgaugacgacaggcccacg

SEQ ID NO: 98698 - RNA, 19 nt, Artificial Sequence
  Description of Artificial Sequence: Synthetic oligonucleotide
ccgugcggucauaucacuu

SEQ ID NO: 98699 - RNA, 19 nt, Artificial Sequence
  Description of Artificial Sequence: Synthetic oligonucleotide
ccgggaccgggcgggccgc

SEQ ID NO: 98700 - RNA, 19 nt, Artificial Sequence
  Description of Artificial Sequence: Synthetic oligonucleotide
ccgauccaccacuccuggu

SEQ ID NO: 98701 - RNA, 19 nt, Artificial Sequence
  Description of Artificial Sequence: Synthetic oligonucleotide
guccuucgaugugcccgau

SEQ ID NO: 98702 - RNA, 19 nt, Artificial Sequence
  Description of Artificial Sequence: Synthetic oligonucleotide
ccucuccuucgacgaacgu

SEQ ID NO: 98703 - RNA, 19 nt, Artificial Sequence
  Description of Artificial Sequence: Synthetic oligonucleotide
ccguuuucccggcguuccu

SEQ ID NO: 98704 - RNA, 19 nt, Artificial Sequence
  Description of Artificial Sequence: Synthetic oligonucleotide
cggcauccgauuccauagu

SEQ ID NO: 98705 - RNA, 19 nt, Artificial Sequence
  Description of Artificial Sequence: Synthetic oligonucleotide
gugggccggguuggaccgu

SEQ ID NO: 98706 - RNA, 19 nt, Artificial Sequence
  Description of Artificial Sequence: Synthetic oligonucleotide
gggagccguugcacguccu

SEQ ID NO: 98707 - RNA, 19 nt, Artificial Sequence
  Description of Artificial Sequence: Synthetic oligonucleotide
gcucaccgcggaaggccau

SEQ ID NO: 98708 - RNA, 19 nt, Artificial Sequence
  Description of Artificial Sequence: Synthetic oligonucleotide
cgucuccggcagcguggga

SEQ ID NO: 98709 - RNA, 19 nt, Artificial Sequence
  Description of Artificial Sequence: Synthetic oligonucleotide
cggcggcuuuugggguaac

SEQ ID NO: 98710 - RNA, 19 nt, Artificial Sequence
  Description of Artificial Sequence: Synthetic oligonucleotide
gggccggguuggaccguuu

SEQ ID NO: 98711 - RNA, 19 nt, Artificial Sequence
  Description of Artificial Sequence: Synthetic oligonucleotide
gcgggccgcugggcauuau

SEQ ID NO: 98712 - RNA, 19 nt, Artificial Sequence
  Description of Artificial Sequence: Synthetic oligonucleotide
cgggaccgggcgggccgcu

SEQ ID NO: 98713 - RNA, 19 nt, Artificial Sequence
  Description of Artificial Sequence: Synthetic oligonucleotide
aagaauaucguuugaauag

SEQ ID NO: 98714 - RNA, 19 nt, Artificial Sequence
  Description of Artificial Sequence: Synthetic oligonucleotide
aaauaguacuguuaaggcg

SEQ ID NO: 98715 - RNA, 19 nt, Artificial Sequence
  Description of Artificial Sequence: Synthetic oligonucleotide
cucaauuagacuaauacug

SEQ ID NO: 98716 - RNA, 19 nt, Artificial Sequence
  Description of Artificial Sequence: Synthetic oligonucleotide
aauaaucuaaugaggaaac

SEQ ID NO: 98717 - RNA, 19 nt, Artificial Sequence
  Description of Artificial Sequence: Synthetic oligonucleotide
guuaaggcgaaucuuaccg

SEQ ID NO: 98718 - RNA, 19 nt, Artificial Sequence
  Description of Artificial Sequence: Synthetic oligonucleotide
uuuuauacaagauucucga

SEQ ID NO: 98719 - RNA, 19 nt, Artificial Sequence
  Description of Artificial Sequence: Synthetic oligonucleotide
aaucuauaaucacagccuc

SEQ ID NO: 98720 - RNA, 19 nt, Artificial Sequence
  Description of Artificial Sequence: Synthetic oligonucleotide
uuuuaguuaacuacguucu

SEQ ID NO: 98721 - RNA, 19 nt, Artificial Sequence
  Description of Artificial Sequence: Synthetic oligonucleotide
caauuuauuccuuaguccc

SEQ ID NO: 98722 - RNA, 19 nt, Artificial Sequence
  Description of Artificial Sequence: Synthetic oligonucleotide
caaaauuccggccaaaacc

SEQ ID NO: 98723 - RNA, 19 nt, Artificial Sequence
  Description of Artificial Sequence: Synthetic oligonucleotide
aucguuuccgggcagaacc

SEQ ID NO: 98724 - RNA, 19 nt, Artificial Sequence
  Description of Artificial Sequence: Synthetic oligonucleotide
gauggaacuaugcucauag

SEQ ID NO: 98725 - RNA, 19 nt, Artificial Sequence
  Description of Artificial Sequence: Synthetic oligonucleotide
cauaauugcacaaaguauc

SEQ ID NO: 98726 - RNA, 19 nt, Artificial Sequence
  Description of Artificial Sequence: Synthetic oligonucleotide
aaucagauuggucucucgg

SEQ ID NO: 98727 - RNA, 19 nt, Artificial Sequence
  Description of Artificial Sequence: Synthetic oligonucleotide
aagugggacguuaagaagc

SEQ ID NO: 98728 - RNA, 19 nt, Artificial Sequence
  Description of Artificial Sequence: Synthetic oligonucleotide
aauaguacuguuaaggcga

SEQ ID NO: 98729 - RNA, 19 nt, Artificial Sequence
  Description of Artificial Sequence: Synthetic oligonucleotide
aaaccaguaagauggaacu

SEQ ID NO: 98730 - RNA, 19 nt, Artificial Sequence
  Description of Artificial Sequence: Synthetic oligonucleotide
uucauaauugcacaaagua

SEQ ID NO: 98731 - RNA, 19 nt, Artificial Sequence
  Description of Artificial Sequence: Synthetic oligonucleotide
caggcaauaaauuuauggg

SEQ ID NO: 98732 - RNA, 19 nt, Artificial Sequence
  Description of Artificial Sequence: Synthetic oligonucleotide
ucucauuaaagcuaugugu

SEQ ID NO: 98733 - RNA, 19 nt, Artificial Sequence
  Description of Artificial Sequence: Synthetic oligonucleotide
ucaaauuagacaacgggaa

SEQ ID NO: 98734 - RNA, 19 nt, Artificial Sequence
  Description of Artificial Sequence: Synthetic oligonucleotide
aaagcuauguguacguugg

SEQ ID NO: 98735 - RNA, 19 nt, Artificial Sequence
  Description of Artificial Sequence: Synthetic oligonucleotide
ugauauguugauaccuugg

SEQ ID NO: 98736 - RNA, 19 nt, Artificial Sequence
  Description of Artificial Sequence: Synthetic oligonucleotide
agaaccaagagggagggcc

SEQ ID NO: 98737 - RNA, 19 nt, Artificial Sequence
  Description of Artificial Sequence: Synthetic oligonucleotide
uuguccucgacaaaguugc

SEQ ID NO: 98738 - RNA, 19 nt, Artificial Sequence
  Description of Artificial Sequence: Synthetic oligonucleotide
uuuaagcaagggcuuaagg

SEQ ID NO: 98739 - RNA, 19 nt, Artificial Sequence
  Description of Artificial Sequence: Synthetic oligonucleotide
uggucaucugucaaaaucc

SEQ ID NO: 98740 - RNA, 19 nt, Artificial Sequence
  Description of Artificial Sequence: Synthetic oligonucleotide
ucagucgugagaaugaaaa

SEQ ID NO: 98741 - RNA, 19 nt, Artificial Sequence
  Description of Artificial Sequence: Synthetic oligonucleotide
agcagcuaaugcuaggccc

SEQ ID NO: 98742 - RNA, 19 nt, Artificial Sequence
  Description of Artificial Sequence: Synthetic oligonucleotide
uauacaagauucucgaauc

SEQ ID NO: 98743 - RNA, 19 nt, Artificial Sequence
  Description of Artificial Sequence: Synthetic oligonucleotide
aacaacguggcacugcuga

SEQ ID NO: 98744 - RNA, 19 nt, Artificial Sequence
  Description of Artificial Sequence: Synthetic oligonucleotide
augaauauccuguaaacaa

SEQ ID NO: 98745 - RNA, 19 nt, Artificial Sequence
  Description of Artificial Sequence: Synthetic oligonucleotide
auacaagauucucgaaucc

SEQ ID NO: 98746 - RNA, 19 nt, Artificial Sequence
  Description of Artificial Sequence: Synthetic oligonucleotide
aguuauucugguucauucg

SEQ ID NO: 98747 - RNA, 19 nt, Artificial Sequence
  Description of Artificial Sequence: Synthetic oligonucleotide
agaccuguaguauacuggg

SEQ ID NO: 98748 - RNA, 19 nt, Artificial Sequence
  Description of Artificial Sequence: Synthetic oligonucleotide
aaaacgucggaaaauguug

SEQ ID NO: 98749 - RNA, 19 nt, Artificial Sequence
  Description of Artificial Sequence: Synthetic oligonucleotide
aaagugggacguuaagaag

SEQ ID NO: 98750 - RNA, 19 nt, Artificial Sequence
  Description of Artificial Sequence: Synthetic oligonucleotide
ucauaauugcacaaaguau

SEQ ID NO: 98751 - RNA, 19 nt, Artificial Sequence
  Description of Artificial Sequence: Synthetic oligonucleotide
uuaagaagcaacggcgucg

SEQ ID NO: 98752 - RNA, 19 nt, Artificial Sequence
  Description of Artificial Sequence: Synthetic oligonucleotide
ucaauuagacuaauacugu

SEQ ID NO: 98753 - RNA, 19 nt, Artificial Sequence
  Description of Artificial Sequence: Synthetic oligonucleotide
gacguuaagaagcaacggc

SEQ ID NO: 98754 - RNA, 19 nt, Artificial Sequence
  Description of Artificial Sequence: Synthetic oligonucleotide
auagggagggcacuagagc

SEQ ID NO: 98755 - RNA, 19 nt, Artificial Sequence
  Description of Artificial Sequence: Synthetic oligonucleotide
aaacgucggaaaauguugc

SEQ ID NO: 98756 - RNA, 19 nt, Artificial Sequence
  Description of Artificial Sequence: Synthetic oligonucleotide
  modified_base (5)..(5): a, c, u, g, unknown or other
agugngggguuccaaaagg

SEQ ID NO: 98757 - RNA, 19 nt, Artificial Sequence
  Description of Artificial Sequence: Synthetic oligonucleotide
uuauuugacugaacgacac

SEQ ID NO: 98758 - RNA, 19 nt, Artificial Sequence
  Description of Artificial Sequence: Synthetic oligonucleotide
aacgggaaauuuuaauuga

SEQ ID NO: 98759 - RNA, 19 nt, Artificial Sequence
  Description of Artificial Sequence: Synthetic oligonucleotide
uuuuaucuaugcuguaaag

SEQ ID NO: 98760 - RNA, 19 nt, Artificial Sequence
  Description of Artificial Sequence: Synthetic oligonucleotide
ucucugcuaaaccaguaag

SEQ ID NO: 98761 - RNA, 19 nt, Artificial Sequence
  Description of Artificial Sequence: Synthetic oligonucleotide
cugaacuaaguucucaggc

SEQ ID NO: 98762 - RNA, 19 nt, Artificial Sequence
  Description of Artificial Sequence: Synthetic oligonucleotide
uaaagcuauguguacguug

SEQ ID NO: 98763 - RNA, 19 nt, Artificial Sequence
  Description of Artificial Sequence: Synthetic oligonucleotide
auuccuuagucccuuauca

SEQ ID NO: 98764 - RNA, 19 nt, Artificial Sequence
  Description of Artificial Sequence: Synthetic oligonucleotide
aguacuguuaaggcgaauc

SEQ ID NO: 98765 - RNA, 19 nt, Artificial Sequence
  Description of Artificial Sequence: Synthetic oligonucleotide
uaaggcucacaauggaggg

SEQ ID NO: 98766 - RNA, 19 nt, Artificial Sequence
  Description of Artificial Sequence: Synthetic oligonucleotide
uugucuuuaccacugggcu

SEQ ID NO: 98767 - RNA, 19 nt, Artificial Sequence
  Description of Artificial Sequence: Synthetic oligonucleotide
aagugacugggauugcuag

SEQ ID NO: 98768 - RNA, 19 nt, Artificial Sequence
  Description of Artificial Sequence: Synthetic oligonucleotide
ugugaagaagcacauggaa

SEQ ID NO: 98769 - RNA, 19 nt, Artificial Sequence
  Description of Artificial Sequence: Synthetic oligonucleotide
ugaacuaaguucucaggca

SEQ ID NO: 98770 - RNA, 19 nt, Artificial Sequence
  Description of Artificial Sequence: Synthetic oligonucleotide
uuaaggcgaaucuuaccgg

SEQ ID NO: 98771 - RNA, 19 nt, Artificial Sequence
  Description of Artificial Sequence: Synthetic oligonucleotide
auaucguuugaauagggau

SEQ ID NO: 98772 - RNA, 19 nt, Artificial Sequence
  Description of Artificial Sequence: Synthetic oligonucleotide
gaaaauugggcacggcuug

SEQ ID NO: 98773 - RNA, 19 nt, Artificial Sequence
  Description of Artificial Sequence: Synthetic oligonucleotide
aauccuuccugagcgaagg

SEQ ID NO: 98774 - RNA, 19 nt, Artificial Sequence
  Description of Artificial Sequence: Synthetic oligonucleotide
ucauccuuaccugaggucc

SEQ ID NO: 98775 - RNA, 19 nt, Artificial Sequence
  Description of Artificial Sequence: Synthetic oligonucleotide
auguugauaccuuggguuc

SEQ ID NO: 98776 - RNA, 19 nt, Artificial Sequence
  Description of Artificial Sequence: Synthetic oligonucleotide
ugauaagagucucugucac

SEQ ID NO: 98777 - RNA, 19 nt, Artificial Sequence
  Description of Artificial Sequence: Synthetic oligonucleotide
auaaggcucacaauggagg

SEQ ID NO: 98778 - RNA, 19 nt, Artificial Sequence
  Description of Artificial Sequence: Synthetic oligonucleotide
agaauaucguuugaauagg

SEQ ID NO: 98779 - RNA, 19 nt, Artificial Sequence
  Description of Artificial Sequence: Synthetic oligonucleotide
guaacuguaagccccaaca

SEQ ID NO: 98780 - RNA, 19 nt, Artificial Sequence
  Description of Artificial Sequence: Synthetic oligonucleotide
ucggagacuaacaaugggu

SEQ ID NO: 98781 - RNA, 19 nt, Artificial Sequence
  Description of Artificial Sequence: Synthetic oligonucleotide
gaaaugaccaaguuggagu

SEQ ID NO: 98782 - RNA, 19 nt, Artificial Sequence
  Description of Artificial Sequence: Synthetic oligonucleotide
uccuguggaaaauugggca

SEQ ID NO: 98783 - RNA, 19 nt, Artificial Sequence
  Description of Artificial Sequence: Synthetic oligonucleotide
aguaucacugaucauuuaa

SEQ ID NO: 98784 - RNA, 19 nt, Artificial Sequence
  Description of Artificial Sequence: Synthetic oligonucleotide
uauggggaaacaugacagg

SEQ ID NO: 98785 - RNA, 19 nt, Artificial Sequence
  Description of Artificial Sequence: Synthetic oligonucleotide
cucaaauuagacaacggga

SEQ ID NO: 98786 - RNA, 19 nt, Artificial Sequence
  Description of Artificial Sequence: Synthetic oligonucleotide
auggggaaacaugacaggc

SEQ ID NO: 98787 - RNA, 19 nt, Artificial Sequence
  Description of Artificial Sequence: Synthetic oligonucleotide
uaaaacgucggaaaauguu

SEQ ID NO: 98788 - RNA, 19 nt, Artificial Sequence
  Description of Artificial Sequence: Synthetic oligonucleotide
uuccagauaacauucuauc

SEQ ID NO: 98789 - RNA, 19 nt, Artificial Sequence
  Description of Artificial Sequence: Synthetic oligonucleotide
  modified_base (3)..(3): a, c, u, g, unknown or other
ugngggguuccaaaaggag

SEQ ID NO: 98790 - RNA, 19 nt, Artificial Sequence
  Description of Artificial Sequence: Synthetic oligonucleotide
aucguuugaauagggauuc

SEQ ID NO: 98791 - RNA, 19 nt, Artificial Sequence
  Description of Artificial Sequence: Synthetic oligonucleotide
acguuaagaagcaacggcg

SEQ ID NO: 98792 - RNA, 19 nt, Artificial Sequence
  Description of Artificial Sequence: Synthetic oligonucleotide
auacucaggauucccaaug

SEQ ID NO: 98793 - RNA, 19 nt, Artificial Sequence
  Description of Artificial Sequence: Synthetic oligonucleotide
acaacgggaaauuuuaauu

SEQ ID NO: 98794 - RNA, 19 nt, Artificial Sequence
  Description of Artificial Sequence: Synthetic oligonucleotide
uuuggucauacuguuacca

SEQ ID NO: 98795 - RNA, 19 nt, Artificial Sequence
  Description of Artificial Sequence: Synthetic oligonucleotide
agcaguaaucaccuaagga

SEQ ID NO: 98796 - RNA, 19 nt, Artificial Sequence
  Description of Artificial Sequence: Synthetic oligonucleotide
uaucguuugaauagggauu

SEQ ID NO: 98797 - RNA, 19 nt, Artificial Sequence
  Description of Artificial Sequence: Synthetic oligonucleotide
gaauaucguuugaauaggg

SEQ ID NO: 98798 - RNA, 19 nt, Artificial Sequence
  Description of Artificial Sequence: Synthetic oligonucleotide
uaaggcgaaucuuaccggc

SEQ ID NO: 98799 - RNA, 19 nt, Artificial Sequence
  Description of Artificial Sequence: Synthetic oligonucleotide
ugaguauagcuaaccacac

SEQ ID NO: 98800 - RNA, 19 nt, Artificial Sequence
  Description of Artificial Sequence: Synthetic oligonucleotide
uaagaagcaacggcgucgg

SEQ ID NO: 98801 - RNA, 19 nt, Artificial Sequence
  Description of Artificial Sequence: Synthetic oligonucleotide
ugggacguuaagaagcaac

SEQ ID NO: 98802 - RNA, 19 nt, Artificial Sequence
  Description of Artificial Sequence: Synthetic oligonucleotide
aacgccacugaugacgcuc

SEQ ID NO: 98803 - RNA, 19 nt, Artificial Sequence
  Description of Artificial Sequence: Synthetic oligonucleotide
ucuacauccaguuccccaa

SEQ ID NO: 98804 - RNA, 19 nt, Artificial Sequence
  Description of Artificial Sequence: Synthetic oligonucleotide
uguuaaggcgaaucuuacc

SEQ ID NO: 98805 - RNA, 19 nt, Artificial Sequence
  Description of Artificial Sequence: Synthetic oligonucleotide
uaaucaccuaaggauaggc

SEQ ID NO: 98806 - RNA, 19 nt, Artificial Sequence
  Description of Artificial Sequence: Synthetic oligonucleotide
aauaucguuugaauaggga

SEQ ID NO: 98807 - RNA, 19 nt, Artificial Sequence
  Description of Artificial Sequence: Synthetic oligonucleotide
acugguugcagaccaaaca

SEQ ID NO: 98808 - RNA, 19 nt, Artificial Sequence
  Description of Artificial Sequence: Synthetic oligonucleotide
uuagucccuuaucacagcu

SEQ ID NO: 98809 - RNA, 19 nt, Artificial Sequence
  Description of Artificial Sequence: Synthetic oligonucleotide
gaagagguuuucgaacccg

SEQ ID NO: 98810 - RNA, 19 nt, Artificial Sequence
  Description of Artificial Sequence: Synthetic oligonucleotide
gauucucgaauccugugga

SEQ ID NO: 98811 - RNA, 19 nt, Artificial Sequence
  Description of Artificial Sequence: Synthetic oligonucleotide
auauguugauaccuugggu

SEQ ID NO: 98812 - RNA, 19 nt, Artificial Sequence
  Description of Artificial Sequence: Synthetic oligonucleotide
ugcucauagaccccucagc

SEQ ID NO: 98813 - RNA, 19 nt, Artificial Sequence
  Description of Artificial Sequence: Synthetic oligonucleotide
uccauaugucuccaugaga

SEQ ID NO: 98814 - RNA, 19 nt, Artificial Sequence
  Description of Artificial Sequence: Synthetic oligonucleotide
ucugaaaucuuugccgaca

SEQ ID NO: 98815 - RNA, 19 nt, Artificial Sequence
  Description of Artificial Sequence: Synthetic oligonucleotide
aguaaucaccuaaggauag

SEQ ID NO: 98816 - RNA, 19 nt, Artificial Sequence
  Description of Artificial Sequence: Synthetic oligonucleotide
ggaacuaugcucauagacc

SEQ ID NO: 98817 - RNA, 19 nt, Artificial Sequence
  Description of Artificial Sequence: Synthetic oligonucleotide
gaaucagauuggucucucg

SEQ ID NO: 98818 - RNA, 19 nt, Artificial Sequence
  Description of Artificial Sequence: Synthetic oligonucleotide
uuaacagggcucuuccuuc

SEQ ID NO: 98819 - RNA, 19 nt, Artificial Sequence
  Description of Artificial Sequence: Synthetic oligonucleotide
caauucaaaauuccggcca

SEQ ID NO: 98820 - RNA, 19 nt, Artificial Sequence
  Description of Artificial Sequence: Synthetic oligonucleotide
aacggcgucggagacuaac

SEQ ID NO: 98821 - RNA, 19 nt, Artificial Sequence
  Description of Artificial Sequence: Synthetic oligonucleotide
aacccgcguucacacaugg

SEQ ID NO: 98822 - RNA, 19 nt, Artificial Sequence
  Description of Artificial Sequence: Synthetic oligonucleotide
uuuauacaagauucucgaa

SEQ ID NO: 98823 - RNA, 19 nt, Artificial Sequence
  Description of Artificial Sequence: Synthetic oligonucleotide
caaaguugcaauuggguaa

SEQ ID NO: 98824 - RNA, 19 nt, Artificial Sequence
  Description of Artificial Sequence: Synthetic oligonucleotide
gaaucuauaaucacagccu

SEQ ID NO: 98825 - RNA, 19 nt, Artificial Sequence
  Description of Artificial Sequence: Synthetic oligonucleotide
uguggaaaauugggcacgg

SEQ ID NO: 98826 - RNA, 19 nt, Artificial Sequence
  Description of Artificial Sequence: Synthetic oligonucleotide
gaacuaaguucucaggcaa

SEQ ID NO: 98827 - RNA, 19 nt, Artificial Sequence
  Description of Artificial Sequence: Synthetic oligonucleotide
gagacuaacaaugggugca

SEQ ID NO: 98828 - RNA, 19 nt, Artificial Sequence
  Description of Artificial Sequence: Synthetic oligonucleotide
uguacguuggcugaauuuu

SEQ ID NO: 98829 - RNA, 19 nt, Artificial Sequence
  Description of Artificial Sequence: Synthetic oligonucleotide
cuuaccggcagcaguaauc

SEQ ID NO: 98830 - RNA, 19 nt, Artificial Sequence
  Description of Artificial Sequence: Synthetic oligonucleotide
auagcuaaccacaccuuuc

SEQ ID NO: 98831 - RNA, 19 nt, Artificial Sequence
  Description of Artificial Sequence: Synthetic oligonucleotide
  modified_base (6)..(6): a, c, u, g, unknown or other
gagugngggguuccaaaag

SEQ ID NO: 98832 - RNA, 19 nt, Artificial Sequence
  Description of Artificial Sequence: Synthetic oligonucleotide
agaccagugcauuuuggca

SEQ ID NO: 98833 - RNA, 19 nt, Artificial Sequence
  Description of Artificial Sequence: Synthetic oligonucleotide
uccucgacaaaguugcaau

SEQ ID NO: 98834 - RNA, 19 nt, Artificial Sequence
  Description of Artificial Sequence: Synthetic oligonucleotide
uccuaaucacagcucaguc

SEQ ID NO: 98835 - RNA, 19 nt, Artificial Sequence
  Description of Artificial Sequence: Synthetic oligonucleotide
ucucgaauccuguggaaaa

SEQ ID NO: 98836 - RNA, 19 nt, Artificial Sequence
  Description of Artificial Sequence: Synthetic oligonucleotide
aaaccuugucugugcuagg

SEQ ID NO: 98837 - RNA, 19 nt, Artificial Sequence
  Description of Artificial Sequence: Synthetic oligonucleotide
uacaagauucucgaauccu

SEQ ID NO: 98838 - RNA, 19 nt, Artificial Sequence
  Description of Artificial Sequence: Synthetic oligonucleotide
gaguauagcuaaccacacc

SEQ ID NO: 98839 - RNA, 19 nt, Artificial Sequence
  Description of Artificial Sequence: Synthetic oligonucleotide
aacgucggaaaauguugca

SEQ ID NO: 98840 - RNA, 19 nt, Artificial Sequence
  Description of Artificial Sequence: Synthetic oligonucleotide
uaugcucauagaccccuca

SEQ ID NO: 98841 - RNA, 19 nt, Artificial Sequence
  Description of Artificial Sequence: Synthetic oligonucleotide
ucuaacagcuuuggaaaac

SEQ ID NO: 98842 - RNA, 19 nt, Artificial Sequence
  Description of Artificial Sequence: Synthetic oligonucleotide
gucgugacuugauauguug

SEQ ID NO: 98843 - RNA, 19 nt, Artificial Sequence
  Description of Artificial Sequence: Synthetic oligonucleotide
uuaguuaacuacguucuuu

SEQ ID NO: 98844 - RNA, 19 nt, Artificial Sequence
  Description of Artificial Sequence: Synthetic oligonucleotide
guuaccaguauccagucgu

SEQ ID NO: 98845 - RNA, 19 nt, Artificial Sequence
  Description of Artificial Sequence: Synthetic oligonucleotide
aagggcuuaaggguuguca

SEQ ID NO: 98846 - RNA, 19 nt, Artificial Sequence
  Description of Artificial Sequence: Synthetic oligonucleotide
uccgcuuccagauaacauu

SEQ ID NO: 98847 - RNA, 19 nt, Artificial Sequence
  Description of Artificial Sequence: Synthetic oligonucleotide
aauugauauaaggcucaca

SEQ ID NO: 98848 - RNA, 19 nt, Artificial Sequence
  Description of Artificial Sequence: Synthetic oligonucleotide
agcgaagggagggaacugc

SEQ ID NO: 98849 - RNA, 19 nt, Artificial Sequence
  Description of Artificial Sequence: Synthetic oligonucleotide
augccaauucaaaauuccg

SEQ ID NO: 98850 - RNA, 19 nt, Artificial Sequence
  Description of Artificial Sequence: Synthetic oligonucleotide
aagcaacggcgucggagac

SEQ ID NO: 98851 - RNA, 19 nt, Artificial Sequence
  Description of Artificial Sequence: Synthetic oligonucleotide
acuaacaaugggugcagaa

SEQ ID NO: 98852 - RNA, 19 nt, Artificial Sequence
  Description of Artificial Sequence: Synthetic oligonucleotide
aacaaugucccugguuugu

SEQ ID NO: 98853 - RNA, 19 nt, Artificial Sequence
  Description of Artificial Sequence: Synthetic oligonucleotide
ccuaaucacagcucagucg

SEQ ID NO: 98854 - RNA, 19 nt, Artificial Sequence
  Description of Artificial Sequence: Synthetic oligonucleotide
uucgaacccgcguucacac

SEQ ID NO: 98855 - RNA, 19 nt, Artificial Sequence
  Description of Artificial Sequence: Synthetic oligonucleotide
gcugauaagagucucuguc

SEQ ID NO: 98856 - RNA, 19 nt, Artificial Sequence
  Description of Artificial Sequence: Synthetic oligonucleotide
acgucggaaaauguugcac

SEQ ID NO: 98857 - RNA, 19 nt, Artificial Sequence
  Description of Artificial Sequence: Synthetic oligonucleotide
gucgugagaaugaaaagca

SEQ ID NO: 98858 - RNA, 19 nt, Artificial Sequence
  Description of Artificial Sequence: Synthetic oligonucleotide
guauacugggaccuuccug

SEQ ID NO: 98859 - RNA, 19 nt, Artificial Sequence
  Description of Artificial Sequence: Synthetic oligonucleotide
cugauaagagucucuguca

SEQ ID NO: 98860 - RNA, 19 nt, Artificial Sequence
  Description of Artificial Sequence: Synthetic oligonucleotide
cuguuaaggcgaaucuuac

SEQ ID NO: 98861 - RNA, 19 nt, Artificial Sequence
  Description of Artificial Sequence: Synthetic oligonucleotide
aucacagaccauaaaauua

SEQ ID NO: 98862 - RNA, 19 nt, Artificial Sequence
  Description of Artificial Sequence: Synthetic oligonucleotide
uuccuuagucccuuaucac

SEQ ID NO: 98863 - RNA, 19 nt, Artificial Sequence
  Description of Artificial Sequence: Synthetic oligonucleotide
gcuauguguacguuggcug

SEQ ID NO: 98864 - RNA, 19 nt, Artificial Sequence
  Description of Artificial Sequence: Synthetic oligonucleotide
uuuaguuaacuacguucuu

SEQ ID NO: 98865 - RNA, 19 nt, Artificial Sequence
  Description of Artificial Sequence: Synthetic oligonucleotide
  modified_base (17)..(17): a, c, u, g, unknown or other
ugaccaaguuggagugngg

SEQ ID NO: 98866 - RNA, 19 nt, Artificial Sequence
  Description of Artificial Sequence: Synthetic oligonucleotide
gggacguuaagaagcaacg

SEQ ID NO: 98867 - RNA, 19 nt, Artificial Sequence
  Description of Artificial Sequence: Synthetic oligonucleotide
guuugaucugacagggaag

SEQ ID NO: 98868 - RNA, 19 nt, Artificial Sequence
  Description of Artificial Sequence: Synthetic oligonucleotide
cagaaucuauaaucacagc

SEQ ID NO: 98869 - RNA, 19 nt, Artificial Sequence
  Description of Artificial Sequence: Synthetic oligonucleotide
ggcaauaaauuuaugggga

SEQ ID NO: 98870 - RNA, 19 nt, Artificial Sequence
  Description of Artificial Sequence: Synthetic oligonucleotide
cuggucuggcuuuucuccg

SEQ ID NO: 98871 - RNA, 19 nt, Artificial Sequence
  Description of Artificial Sequence: Synthetic oligonucleotide
guuaagaagcaacggcguc

SEQ ID NO: 98872 - RNA, 19 nt, Artificial Sequence
  Description of Artificial Sequence: Synthetic oligonucleotide
ucgugagaaugaaaagcaa

SEQ ID NO: 98873 - RNA, 19 nt, Artificial Sequence
  Description of Artificial Sequence: Synthetic oligonucleotide
  modified_base (11)..(11): a, c, u, g, unknown or other
aguuggagugngggguucc

SEQ ID NO: 98874 - RNA, 19 nt, Artificial Sequence
  Description of Artificial Sequence: Synthetic oligonucleotide
aggcgaaucuuaccggcag

SEQ ID NO: 98875 - RNA, 19 nt, Artificial Sequence
  Description of Artificial Sequence: Synthetic oligonucleotide
guaaucaccuaaggauagg

SEQ ID NO: 98876 - RNA, 19 nt, Artificial Sequence
  Description of Artificial Sequence: Synthetic oligonucleotide
gcaauuggguaacuguaag

SEQ ID NO: 98877 - RNA, 19 nt, Artificial Sequence
  Description of Artificial Sequence: Synthetic oligonucleotide
augcucauagaccccucag

SEQ ID NO: 98878 - RNA, 19 nt, Artificial Sequence
  Description of Artificial Sequence: Synthetic oligonucleotide
ccuuagucccuuaucacag

SEQ ID NO: 98879 - RNA, 19 nt, Artificial Sequence
  Description of Artificial Sequence: Synthetic oligonucleotide
cagucgugagaaugaaaag

SEQ ID NO: 98880 - RNA, 19 nt, Artificial Sequence
  Description of Artificial Sequence: Synthetic oligonucleotide
gguaaagugggacguuaag

SEQ ID NO: 98881 - RNA, 19 nt, Artificial Sequence
  Description of Artificial Sequence: Synthetic oligonucleotide
cuugacaucugaacaaugu

SEQ ID NO: 98882 - RNA, 19 nt, Artificial Sequence
  Description of Artificial Sequence: Synthetic oligonucleotide
aguccucaugcuagaauac

SEQ ID NO: 98883 - RNA, 19 nt, Artificial Sequence
  Description of Artificial Sequence: Synthetic oligonucleotide
aggaaccaaaacucaucug

SEQ ID NO: 98884 - RNA, 19 nt, Artificial Sequence
  Description of Artificial Sequence: Synthetic oligonucleotide
gguuugaucugacagggaa

SEQ ID NO: 98885 - RNA, 19 nt, Artificial Sequence
  Description of Artificial Sequence: Synthetic oligonucleotide
aaaauugggcacggcuuga

SEQ ID NO: 98886 - RNA, 19 nt, Artificial Sequence
  Description of Artificial Sequence: Synthetic oligonucleotide
uuuucgaacccgcguucac

SEQ ID NO: 98887 - RNA, 19 nt, Artificial Sequence
  Description of Artificial Sequence: Synthetic oligonucleotide
ggcugaacuaaguucucag

SEQ ID NO: 98888 - RNA, 19 nt, Artificial Sequence
  Description of Artificial Sequence: Synthetic oligonucleotide
ucccuuaucacagcuccga

SEQ ID NO: 98889 - RNA, 19 nt, Artificial Sequence
  Description of Artificial Sequence: Synthetic oligonucleotide
uccggauaaggcuugucuu

SEQ ID NO: 98890 - RNA, 19 nt, Artificial Sequence
  Description of Artificial Sequence: Synthetic oligonucleotide
aacaauagggagggcacua

SEQ ID NO: 98891 - RNA, 19 nt, Artificial Sequence
  Description of Artificial Sequence: Synthetic oligonucleotide
uggguaacuguaagcccca

SEQ ID NO: 98892 - RNA, 19 nt, Artificial Sequence
  Description of Artificial Sequence: Synthetic oligonucleotide
uguugauaccuuggguucu

SEQ ID NO: 98893 - RNA, 19 nt, Artificial Sequence
  Description of Artificial Sequence: Synthetic oligonucleotide
ucauucgccucauccuuac

SEQ ID NO: 98894 - RNA, 19 nt, Artificial Sequence
  Description of Artificial Sequence: Synthetic oligonucleotide
gaaggggcaguccggauaa

SEQ ID NO: 98895 - RNA, 19 nt, Artificial Sequence
  Description of Artificial Sequence: Synthetic oligonucleotide
uaauugauauaaggcucac

SEQ ID NO: 98896 - RNA, 19 nt, Artificial Sequence
  Description of Artificial Sequence: Synthetic oligonucleotide
ggagacuaacaaugggugc

SEQ ID NO: 98897 - RNA, 19 nt, Artificial Sequence
  Description of Artificial Sequence: Synthetic oligonucleotide
agcaagcaggaaauugcac

SEQ ID NO: 98898 - RNA, 19 nt, Artificial Sequence
  Description of Artificial Sequence: Synthetic oligonucleotide
cuauguguacguuggcuga

SEQ ID NO: 98899 - RNA, 19 nt, Artificial Sequence
  Description of Artificial Sequence: Synthetic oligonucleotide
gcuaggggaaagucgaaug

SEQ ID NO: 98900 - RNA, 19 nt, Artificial Sequence
  Description of Artificial Sequence: Synthetic oligonucleotide
ucccauuggucuuggcagc

SEQ ID NO: 98901 - RNA, 19 nt, Artificial Sequence
  Description of Artificial Sequence: Synthetic oligonucleotide
uuucgaacccgcguucaca

SEQ ID NO: 98902 - RNA, 19 nt, Artificial Sequence
  Description of Artificial Sequence: Synthetic oligonucleotide
cacagaccauaaaauuaac

SEQ ID NO: 98903 - RNA, 19 nt, Artificial Sequence
  Description of Artificial Sequence: Synthetic oligonucleotide
agguuuucgaacccgcguu

SEQ ID NO: 98904 - RNA, 19 nt, Artificial Sequence
  Description of Artificial Sequence: Synthetic oligonucleotide
agacuaacaaugggugcag

SEQ ID NO: 98905 - RNA, 19 nt, Artificial Sequence
  Description of Artificial Sequence: Synthetic oligonucleotide
  modified_base (8)..(8): a, c, u, g, unknown or other
uggagugngggguuccaaa

SEQ ID NO: 98906 - RNA, 19 nt, Artificial Sequence
  Description of Artificial Sequence: Synthetic oligonucleotide
cugagcuaagacuuucaga

SEQ ID NO: 98907 - RNA, 19 nt, Artificial Sequence
  Description of Artificial Sequence: Synthetic oligonucleotide
uagagcacgccagcaagca

SEQ ID NO: 98908 - RNA, 19 nt, Artificial Sequence
  Description of Artificial Sequence: Synthetic oligonucleotide
uucauucgccucauccuua

SEQ ID NO: 98909 - RNA, 19 nt, Artificial Sequence
  Description of Artificial Sequence: Synthetic oligonucleotide
gacaacgggaaauuuuaau

SEQ ID NO: 98910 - RNA, 19 nt, Artificial Sequence
  Description of Artificial Sequence: Synthetic oligonucleotide
ugguuugacugaguuauuu

SEQ ID NO: 98911 - RNA, 19 nt, Artificial Sequence
  Description of Artificial Sequence: Synthetic oligonucleotide
ggacguuaagaagcaacgg

SEQ ID NO: 98912 - RNA, 19 nt, Artificial Sequence
  Description of Artificial Sequence: Synthetic oligonucleotide
uguguacguuggcugaauu

SEQ ID NO: 98913 - RNA, 19 nt, Artificial Sequence
  Description of Artificial Sequence: Synthetic oligonucleotide
agaauggaugucagucauc

SEQ ID NO: 98914 - RNA, 19 nt, Artificial Sequence
  Description of Artificial Sequence: Synthetic oligonucleotide
gcgucggagacuaacaaug

SEQ ID NO: 98915 - RNA, 19 nt, Artificial Sequence
  Description of Artificial Sequence: Synthetic oligonucleotide
agcuaaccacaccuuucug

SEQ ID NO: 98916 - RNA, 19 nt, Artificial Sequence
  Description of Artificial Sequence: Synthetic oligonucleotide
uagucccuuaucacagcuc

SEQ ID NO: 98917 - RNA, 19 nt, Artificial Sequence
  Description of Artificial Sequence: Synthetic oligonucleotide
cacugguugcagaccaaac

SEQ ID NO: 98918 - RNA, 19 nt, Artificial Sequence
  Description of Artificial Sequence: Synthetic oligonucleotide
gggaccauuuaacaaggga

SEQ ID NO: 98919 - RNA, 19 nt, Artificial Sequence
  Description of Artificial Sequence: Synthetic oligonucleotide
uguaaacaauagggagggc

SEQ ID NO: 98920 - RNA, 19 nt, Artificial Sequence
  Description of Artificial Sequence: Synthetic oligonucleotide
auuagacaacgggaaauuu

SEQ ID NO: 98921 - RNA, 19 nt, Artificial Sequence
  Description of Artificial Sequence: Synthetic oligonucleotide
aaggcgaaucuuaccggca

SEQ ID NO: 98922 - RNA, 19 nt, Artificial Sequence
  Description of Artificial Sequence: Synthetic oligonucleotide
ucuuaccggcagcaguaau

SEQ ID NO: 98923 - RNA, 19 nt, Artificial Sequence
  Description of Artificial Sequence: Synthetic oligonucleotide
guacuguuaaggcgaaucu

SEQ ID NO: 98924 - RNA, 19 nt, Artificial Sequence
  Description of Artificial Sequence: Synthetic oligonucleotide
ucgccucauccuuaccuga

SEQ ID NO: 98925 - RNA, 19 nt, Artificial Sequence
  Description of Artificial Sequence: Synthetic oligonucleotide
gcagcaguaaucaccuaag

SEQ ID NO: 98926 - RNA, 19 nt, Artificial Sequence
  Description of Artificial Sequence: Synthetic oligonucleotide
aguauccagucgugacuug

SEQ ID NO: 98927 - RNA, 19 nt, Artificial Sequence
  Description of Artificial Sequence: Synthetic oligonucleotide
gucugaaaucuuugccgac

SEQ ID NO: 98928 - RNA, 19 nt, Artificial Sequence
  Description of Artificial Sequence: Synthetic oligonucleotide
auuccggccaaaaccagaa

SEQ ID NO: 98929 - RNA, 19 nt, Artificial Sequence
  Description of Artificial Sequence: Synthetic oligonucleotide
uucggcugugauugucugu

SEQ ID NO: 98930 - RNA, 19 nt, Artificial Sequence
  Description of Artificial Sequence: Synthetic oligonucleotide
cuugauauguugauaccuu

SEQ ID NO: 98931 - RNA, 19 nt, Artificial Sequence
  Description of Artificial Sequence: Synthetic oligonucleotide
caggaaccaaaacucaucu

SEQ ID NO: 98932 - RNA, 19 nt, Artificial Sequence
  Description of Artificial Sequence: Synthetic oligonucleotide
gcugcgguggccuuccaug

SEQ ID NO: 98933 - RNA, 19 nt, Artificial Sequence
  Description of Artificial Sequence: Synthetic oligonucleotide
caaugggugcagaaucaga

SEQ ID NO: 98934 - RNA, 19 nt, Artificial Sequence
  Description of Artificial Sequence: Synthetic oligonucleotide
gaaccagugaccaauccuu

SEQ ID NO: 98935 - RNA, 19 nt, Artificial Sequence
  Description of Artificial Sequence: Synthetic oligonucleotide
ggcagcaguaaucaccuaa

SEQ ID NO: 98936 - RNA, 19 nt, Artificial Sequence
  Description of Artificial Sequence: Synthetic oligonucleotide
ugcuaggggaaagucgaau

SEQ ID NO: 98937 - RNA, 19 nt, Artificial Sequence
  Description of Artificial Sequence: Synthetic oligonucleotide
uguggucaucugucaaaau

SEQ ID NO: 98938 - RNA, 19 nt, Artificial Sequence
  Description of Artificial Sequence: Synthetic oligonucleotide
  modified_base (4)..(4): a, c, u, g, unknown or other
gugngggguuccaaaagga

SEQ ID NO: 98939 - RNA, 19 nt, Artificial Sequence
  Description of Artificial Sequence: Synthetic oligonucleotide
guuuccgggcagaaccaag

SEQ ID NO: 98940 - RNA, 19 nt, Artificial Sequence
  Description of Artificial Sequence: Synthetic oligonucleotide
  modified_base (7)..(7): a, c, u, g, unknown or other
ggagugngggguuccaaaa

SEQ ID NO: 98941 - RNA, 19 nt, Artificial Sequence
  Description of Artificial Sequence: Synthetic oligonucleotide
gcugaugcucucaagugac

SEQ ID NO: 98942 - RNA, 19 nt, Artificial Sequence
  Description of Artificial Sequence: Synthetic oligonucleotide
ggcuggaccuuauuuaaaa

SEQ ID NO: 98943 - RNA, 19 nt, Artificial Sequence
  Description of Artificial Sequence: Synthetic oligonucleotide
guauccagucgugacuuga

SEQ ID NO: 98944 - RNA, 19 nt, Artificial Sequence
  Description of Artificial Sequence: Synthetic oligonucleotide
cggagacuaacaaugggug

SEQ ID NO: 98945 - RNA, 19 nt, Artificial Sequence
  Description of Artificial Sequence: Synthetic oligonucleotide
gcugguuugacugaguuau

SEQ ID NO: 98946 - RNA, 19 nt, Artificial Sequence
  Description of Artificial Sequence: Synthetic oligonucleotide
cucucugcuaaaccaguaa

SEQ ID NO: 98947 - RNA, 19 nt, Artificial Sequence
  Description of Artificial Sequence: Synthetic oligonucleotide
auuuaacaagggaccauuu

SEQ ID NO: 98948 - RNA, 19 nt, Artificial Sequence
  Description of Artificial Sequence: Synthetic oligonucleotide
ccaacgccacugaugacgc

SEQ ID NO: 98949 - RNA, 19 nt, Artificial Sequence
  Description of Artificial Sequence: Synthetic oligonucleotide
guccggauaaggcuugucu

SEQ ID NO: 98950 - RNA, 19 nt, Artificial Sequence
  Description of Artificial Sequence: Synthetic oligonucleotide
uguccucgacaaaguugca

SEQ ID NO: 98951 - RNA, 19 nt, Artificial Sequence
  Description of Artificial Sequence: Synthetic oligonucleotide
uucauucggcugugauugu

SEQ ID NO: 98952 - RNA, 19 nt, Artificial Sequence
  Description of Artificial Sequence: Synthetic oligonucleotide
gacgcucuggagaguggag

SEQ ID NO: 98953 - RNA, 19 nt, Artificial Sequence
  Description of Artificial Sequence: Synthetic oligonucleotide
guuuucgaacccgcguuca

SEQ ID NO: 98954 - RNA, 19 nt, Artificial Sequence
  Description of Artificial Sequence: Synthetic oligonucleotide
acguuggcugaauuuuaua

SEQ ID NO: 98955 - RNA, 19 nt, Artificial Sequence
  Description of Artificial Sequence: Synthetic oligonucleotide
ggggcuggaucguuuccgg

SEQ ID NO: 98956 - RNA, 19 nt, Artificial Sequence
  Description of Artificial Sequence: Synthetic oligonucleotide
gaucguuuccgggcagaac

SEQ ID NO: 98957 - RNA, 19 nt, Artificial Sequence
  Description of Artificial Sequence: Synthetic oligonucleotide
cuaugcucauagaccccuc

SEQ ID NO: 98958 - RNA, 19 nt, Artificial Sequence
  Description of Artificial Sequence: Synthetic oligonucleotide
ccgaucacagaccauaaaa

SEQ ID NO: 98959 - RNA, 19 nt, Artificial Sequence
  Description of Artificial Sequence: Synthetic oligonucleotide
ccgcguucacacaugguag

SEQ ID NO: 98960 - RNA, 19 nt, Artificial Sequence
  Description of Artificial Sequence: Synthetic oligonucleotide
aguccggauaaggcuuguc

SEQ ID NO: 98961 - RNA, 19 nt, Artificial Sequence
  Description of Artificial Sequence: Synthetic oligonucleotide
ggaaccagugaccaauccu

SEQ ID NO: 98962 - RNA, 19 nt, Artificial Sequence
  Description of Artificial Sequence: Synthetic oligonucleotide
ucguuugaauagggauuca

SEQ ID NO: 98963 - RNA, 19 nt, Artificial Sequence
  Description of Artificial Sequence: Synthetic oligonucleotide
cauucgccucauccuuacc

SEQ ID NO: 98964 - RNA, 19 nt, Artificial Sequence
  Description of Artificial Sequence: Synthetic oligonucleotide
ucgaacccgcguucacaca

SEQ ID NO: 98965 - RNA, 19 nt, Artificial Sequence
  Description of Artificial Sequence: Synthetic oligonucleotide
aaguugcaauuggguaacu

SEQ ID NO: 98966 - RNA, 19 nt, Artificial Sequence
  Description of Artificial Sequence: Synthetic oligonucleotide
cuuugccgacagacagggc

SEQ ID NO: 98967 - RNA, 19 nt, Artificial Sequence
  Description of Artificial Sequence: Synthetic oligonucleotide
  modified_base (9)..(9): a, c, u, g, unknown or other
uuggagugngggguuccaa

SEQ ID NO: 98968 - RNA, 19 nt, Artificial Sequence
  Description of Artificial Sequence: Synthetic oligonucleotide
caacaacguggcacugcug

SEQ ID NO: 98969 - RNA, 19 nt, Artificial Sequence
  Description of Artificial Sequence: Synthetic oligonucleotide
  modified_base (10)..(10): a, c, u, g, unknown or other
guuggagugngggguucca

SEQ ID NO: 98970 - RNA, 19 nt, Artificial Sequence
  Description of Artificial Sequence: Synthetic oligonucleotide
gaacccgcguucacacaug

SEQ ID NO: 98971 - RNA, 19 nt, Artificial Sequence
  Description of Artificial Sequence: Synthetic oligonucleotide
auaguacuguuaaggcgaa

SEQ ID NO: 98972 - RNA, 19 nt, Artificial Sequence
  Description of Artificial Sequence: Synthetic oligonucleotide
cucagucgugagaaugaaa

SEQ ID NO: 98973 - RNA, 19 nt, Artificial Sequence
  Description of Artificial Sequence: Synthetic oligonucleotide
gacuaacaaugggugcaga

SEQ ID NO: 98974 - RNA, 19 nt, Artificial Sequence
  Description of Artificial Sequence: Synthetic oligonucleotide
cccauuguggccagcuuuc

SEQ ID NO: 98975 - RNA, 19 nt, Artificial Sequence
  Description of Artificial Sequence: Synthetic oligonucleotide
cauuuaacaagggaccauu

SEQ ID NO: 98976 - RNA, 19 nt, Artificial Sequence
  Description of Artificial Sequence: Synthetic oligonucleotide
agacaacgggaaauuuuaa

SEQ ID NO: 98977 - RNA, 19 nt, Artificial Sequence
  Description of Artificial Sequence: Synthetic oligonucleotide
cguucacacaugguagucg

SEQ ID NO: 98978 - RNA, 19 nt, Artificial Sequence
  Description of Artificial Sequence: Synthetic oligonucleotide
guggaaaauugggcacggc

SEQ ID NO: 98979 - RNA, 19 nt, Artificial Sequence
  Description of Artificial Sequence: Synthetic oligonucleotide
gggcuggaucguuuccggg

SEQ ID NO: 98980 - RNA, 19 nt, Artificial Sequence
  Description of Artificial Sequence: Synthetic oligonucleotide
guauccgucuggucagaua

SEQ ID NO: 98981 - RNA, 19 nt, Artificial Sequence
  Description of Artificial Sequence: Synthetic oligonucleotide
acggcgucggagacuaaca

SEQ ID NO: 98982 - RNA, 19 nt, Artificial Sequence
  Description of Artificial Sequence: Synthetic oligonucleotide
cagccugcuagagcacgcc

SEQ ID NO: 98983 - RNA, 19 nt, Artificial Sequence
  Description of Artificial Sequence: Synthetic oligonucleotide
guccucgacaaaguugcaa

SEQ ID NO: 98984 - RNA, 19 nt, Artificial Sequence
  Description of Artificial Sequence: Synthetic oligonucleotide
agcaacggcgucggagacu

SEQ ID NO: 98985 - RNA, 19 nt, Artificial Sequence
  Description of Artificial Sequence: Synthetic oligonucleotide
gcaauucaauuaaugccaa

SEQ ID NO: 98986 - RNA, 19 nt, Artificial Sequence
  Description of Artificial Sequence: Synthetic oligonucleotide
aggaguuauucugguucau

SEQ ID NO: 98987 - RNA, 19 nt, Artificial Sequence
  Description of Artificial Sequence: Synthetic oligonucleotide
guacguuggcugaauuuua

SEQ ID NO: 98988 - RNA, 19 nt, Artificial Sequence
  Description of Artificial Sequence: Synthetic oligonucleotide
cagugcauuuuggcauuug

SEQ ID NO: 98989 - RNA, 19 nt, Artificial Sequence
  Description of Artificial Sequence: Synthetic oligonucleotide
gccugcuagagcacgccag

SEQ ID NO: 98990 - RNA, 19 nt, Artificial Sequence
  Description of Artificial Sequence: Synthetic oligonucleotide
ggcacggcuugacaucuga

SEQ ID NO: 98991 - RNA, 19 nt, Artificial Sequence
  Description of Artificial Sequence: Synthetic oligonucleotide
agagcugguuugacugagu

SEQ ID NO: 98992 - RNA, 19 nt, Artificial Sequence
  Description of Artificial Sequence: Synthetic oligonucleotide
gguuugacugaguuauuuu

SEQ ID NO: 98993 - RNA, 19 nt, Artificial Sequence
  Description of Artificial Sequence: Synthetic oligonucleotide
agucgugacuugauauguu

SEQ ID NO: 98994 - RNA, 19 nt, Artificial Sequence
  Description of Artificial Sequence: Synthetic oligonucleotide
cuagaauacuguggguccu

SEQ ID NO: 98995 - RNA, 19 nt, Artificial Sequence
  Description of Artificial Sequence: Synthetic oligonucleotide
aucuuaccggcagcaguaa

SEQ ID NO: 98996 - RNA, 19 nt, Artificial Sequence
  Description of Artificial Sequence: Synthetic oligonucleotide
accuaaggauaggcaauuu

SEQ ID NO: 98997 - RNA, 19 nt, Artificial Sequence
  Description of Artificial Sequence: Synthetic oligonucleotide
ccguuggcagguucugccc

SEQ ID NO: 98998 - RNA, 19 nt, Artificial Sequence
  Description of Artificial Sequence: Synthetic oligonucleotide
gguucauucggcugugauu

SEQ ID NO: 98999 - RNA, 19 nt, Artificial Sequence
  Description of Artificial Sequence: Synthetic oligonucleotide
gucauacuguuaccaguau

SEQ ID NO: 99000 - RNA, 19 nt, Artificial Sequence
  Description of Artificial Sequence: Synthetic oligonucleotide
uaguacuguuaaggcgaau

SEQ ID NO: 99001 - RNA, 19 nt, Artificial Sequence
  Description of Artificial Sequence: Synthetic oligonucleotide
cauccuuaccugagguccu

SEQ ID NO: 99002 - RNA, 19 nt, Artificial Sequence
  Description of Artificial Sequence: Synthetic oligonucleotide
cccgcguucacacauggua

SEQ ID NO: 99003 - RNA, 19 nt, Artificial Sequence
  Description of Artificial Sequence: Synthetic oligonucleotide
gggaaacaugacaggcuuc

SEQ ID NO: 99004 - RNA, 19 nt, Artificial Sequence
  Description of Artificial Sequence: Synthetic oligonucleotide
gcaguccggauaaggcuug

SEQ ID NO: 99005 - RNA, 19 nt, Artificial Sequence
  Description of Artificial Sequence: Synthetic oligonucleotide
guauagcuaaccacaccuu

SEQ ID NO: 99006 - RNA, 19 nt, Artificial Sequence
  Description of Artificial Sequence: Synthetic oligonucleotide
cugaugcucucaagugacu

SEQ ID NO: 99007 - RNA, 19 nt, Artificial Sequence
  Description of Artificial Sequence: Synthetic oligonucleotide
auccuuaccugagguccuu

SEQ ID NO: 99008 - RNA, 19 nt, Artificial Sequence
  Description of Artificial Sequence: Synthetic oligonucleotide
gcucacaauggaggggaca

SEQ ID NO: 99009 - RNA, 19 nt, Artificial Sequence
  Description of Artificial Sequence: Synthetic oligonucleotide
gcguucacacaugguaguc

SEQ ID NO: 99010 - RNA, 19 nt, Artificial Sequence
  Description of Artificial Sequence: Synthetic oligonucleotide
ccaguauccagucgugacu

SEQ ID NO: 99011 - RNA, 19 nt, Artificial Sequence
  Description of Artificial Sequence: Synthetic oligonucleotide
cgucggaaaauguugcacu

SEQ ID NO: 99012 - RNA, 19 nt, Artificial Sequence
  Description of Artificial Sequence: Synthetic oligonucleotide
ggcgucggagacuaacaau

SEQ ID NO: 99013 - RNA, 19 nt, Artificial Sequence
  Description of Artificial Sequence: Synthetic oligonucleotide
ccuaaggauaggcaauuuu

SEQ ID NO: 99014 - RNA, 19 nt, Artificial Sequence
  Description of Artificial Sequence: Synthetic oligonucleotide
ggccaaaaccagaaucuau

SEQ ID NO: 99015 - RNA, 19 nt, Artificial Sequence
  Description of Artificial Sequence: Synthetic oligonucleotide
ggcuugacaucugaacaau

SEQ ID NO: 99016 - RNA, 19 nt, Artificial Sequence
  Description of Artificial Sequence: Synthetic oligonucleotide
gguagucgcugccuggcuu

SEQ ID NO: 99017 - RNA, 19 nt, Artificial Sequence
  Description of Artificial Sequence: Synthetic oligonucleotide
caccuaaggauaggcaauu

SEQ ID NO: 99018 - RNA, 19 nt, Artificial Sequence
  Description of Artificial Sequence: Synthetic oligonucleotide
gcucagucgugagaaugaa

SEQ ID NO: 99019 - RNA, 19 nt, Artificial Sequence
  Description of Artificial Sequence: Synthetic oligonucleotide
ggaguuauucugguucauu

SEQ ID NO: 99020 - RNA, 19 nt, Artificial Sequence
  Description of Artificial Sequence: Synthetic oligonucleotide
ggaucguuuccgggcagaa

SEQ ID NO: 99021 - RNA, 19 nt, Artificial Sequence
  Description of Artificial Sequence: Synthetic oligonucleotide
gugcuaggggaaagucgaa

SEQ ID NO: 99022 - RNA, 19 nt, Artificial Sequence
  Description of Artificial Sequence: Synthetic oligonucleotide
acccgcguucacacauggu

SEQ ID NO: 99023 - RNA, 19 nt, Artificial Sequence
  Description of Artificial Sequence: Synthetic oligonucleotide
ggcccaccuggagaaaucu

SEQ ID NO: 99024 - RNA, 19 nt, Artificial Sequence
  Description of Artificial Sequence: Synthetic oligonucleotide
cgaacccgcguucacacau

SEQ ID NO: 99025 - RNA, 19 nt, Artificial Sequence
  Description of Artificial Sequence: Synthetic oligonucleotide
ggagcggcuggaguccccu

SEQ ID NO: 99026 - RNA, 19 nt, Artificial Sequence
  Description of Artificial Sequence: Synthetic oligonucleotide
gguauccgucuggucagau

SEQ ID NO: 99027 - RNA, 19 nt, Artificial Sequence
  Description of Artificial Sequence: Synthetic oligonucleotide
gggcacggcuugacaucug

SEQ ID NO: 99028 - RNA, 19 nt, Artificial Sequence
  Description of Artificial Sequence: Synthetic oligonucleotide
cggcgucggagacuaacaa

SEQ ID NO: 99029 - RNA, 19 nt, Artificial Sequence
  Description of Artificial Sequence: Synthetic oligonucleotide
ccugguccgcuuccagaua

SEQ ID NO: 99030 - RNA, 19 nt, Artificial Sequence
  Description of Artificial Sequence: Synthetic oligonucleotide
caguccggauaaggcuugu

SEQ ID NO: 99031 - RNA, 19 nt, Artificial Sequence
  Description of Artificial Sequence: Synthetic oligonucleotide
caacggcgucggagacuaa

SEQ ID NO: 99032 - RNA, 19 nt, Artificial Sequence
  Description of Artificial Sequence: Synthetic oligonucleotide
aauucaauacuuugggccc

SEQ ID NO: 99033 - RNA, 19 nt, Artificial Sequence
  Description of Artificial Sequence: Synthetic oligonucleotide
agcaauauuaucuacgugg

SEQ ID NO: 99034 - RNA, 19 nt, Artificial Sequence
  Description of Artificial Sequence: Synthetic oligonucleotide
auauugugaauucucaccc

SEQ ID NO: 99035 - RNA, 19 nt, Artificial Sequence
  Description of Artificial Sequence: Synthetic oligonucleotide
cuugauaagacuuaaagca

SEQ ID NO: 99036 - RNA, 19 nt, Artificial Sequence
  Description of Artificial Sequence: Synthetic oligonucleotide
gacgcuuacaacuacaaag

SEQ ID NO: 99037 - RNA, 19 nt, Artificial Sequence
  Description of Artificial Sequence: Synthetic oligonucleotide
uaaaacuuagggauuaacc

SEQ ID NO: 99038 - RNA, 19 nt, Artificial Sequence
  Description of Artificial Sequence: Synthetic oligonucleotide
uacuuaaccaauuagaaua

SEQ ID NO: 99039 - RNA, 19 nt, Artificial Sequence
  Description of Artificial Sequence: Synthetic oligonucleotide
ucuaauuccacacaucaac

SEQ ID NO: 99040 - RNA, 19 nt, Artificial Sequence
  Description of Artificial Sequence: Synthetic oligonucleotide
aaauugaugaaguuuacuu

SEQ ID NO: 99041 - RNA, 19 nt, Artificial Sequence
  Description of Artificial Sequence: Synthetic oligonucleotide
uguucuauaaggcaaggga

SEQ ID NO: 99042 - RNA, 19 nt, Artificial Sequence
  Description of Artificial Sequence: Synthetic oligonucleotide
uuucagaugugucauaggc

SEQ ID NO: 99043 - RNA, 19 nt, Artificial Sequence
  Description of Artificial Sequence: Synthetic oligonucleotide
uuuacuugaaguagauagg

SEQ ID NO: 99044 - RNA, 19 nt, Artificial Sequence
  Description of Artificial Sequence: Synthetic oligonucleotide
uaguaagaguacaugacgg

SEQ ID NO: 99045 - RNA, 19 nt, Artificial Sequence
  Description of Artificial Sequence: Synthetic oligonucleotide
aucuugauaagacuuaaag

SEQ ID NO: 99046 - RNA, 19 nt, Artificial Sequence
  Description of Artificial Sequence: Synthetic oligonucleotide
ucuugauaagacuuaaagc

SEQ ID NO: 99047 - RNA, 19 nt, Artificial Sequence
  Description of Artificial Sequence: Synthetic oligonucleotide
aucagauauaaauacgauc

SEQ ID NO: 99048 - RNA, 19 nt, Artificial Sequence
  Description of Artificial Sequence: Synthetic oligonucleotide
uguaggaguaccaagagua

SEQ ID NO: 99049 - RNA, 19 nt, Artificial Sequence
  Description of Artificial Sequence: Synthetic oligonucleotide
auacuauuauaucacauug

SEQ ID NO: 99050 - RNA, 19 nt, Artificial Sequence
  Description of Artificial Sequence: Synthetic oligonucleotide
uuuaaugcgcacaagugac

SEQ ID NO: 99051 - RNA, 19 nt, Artificial Sequence
  Description of Artificial Sequence: Synthetic oligonucleotide
cauauuguaaccuguauuc

SEQ ID NO: 99052 - RNA, 19 nt, Artificial Sequence
  Description of Artificial Sequence: Synthetic oligonucleotide
ugcgugaagucaaacaagg

SEQ ID NO: 99053 - RNA, 19 nt, Artificial Sequence
  Description of Artificial Sequence: Synthetic oligonucleotide
uugauaagacuuaaagcag

SEQ ID NO: 99054 - RNA, 19 nt, Artificial Sequence
  Description of Artificial Sequence: Synthetic oligonucleotide
aacaucgacacauuuauuu

SEQ ID NO: 99055 - RNA, 19 nt, Artificial Sequence
  Description of Artificial Sequence: Synthetic oligonucleotide
caaacuaaucauuauuccc

SEQ ID NO: 99056 - RNA, 19 nt, Artificial Sequence
  Description of Artificial Sequence: Synthetic oligonucleotide
aguaagaguacaugacggc

SEQ ID NO: 99057 - RNA, 19 nt, Artificial Sequence
  Description of Artificial Sequence: Synthetic oligonucleotide
ugggauaaggugaugaaca

SEQ ID NO: 99058 - RNA, 19 nt, Artificial Sequence
  Description of Artificial Sequence: Synthetic oligonucleotide
aaauacgaucaauaaauaa

SEQ ID NO: 99059 - RNA, 19 nt, Artificial Sequence
  Description of Artificial Sequence: Synthetic oligonucleotide
gauuaaccuacacaggccc

SEQ ID NO: 99060 - RNA, 19 nt, Artificial Sequence
  Description of Artificial Sequence: Synthetic oligonucleotide
aaacuaaucauuauuccca

SEQ ID NO: 99061 - RNA, 19 nt, Artificial Sequence
  Description of Artificial Sequence: Synthetic oligonucleotide
uccagauuaaaucuccuac

SEQ ID NO: 99062 - RNA, 19 nt, Artificial Sequence
  Description of Artificial Sequence: Synthetic oligonucleotide
aacuacaaaguacuguccu

SEQ ID NO: 99063 - RNA, 19 nt, Artificial Sequence
  Description of Artificial Sequence: Synthetic oligonucleotide
aacauugucuagcuuucuc

SEQ ID NO: 99064 - RNA, 19 nt, Artificial Sequence
  Description of Artificial Sequence: Synthetic oligonucleotide
uacagucucaaguaaagga

SEQ ID NO: 99065 - RNA, 19 nt, Artificial Sequence
  Description of Artificial Sequence: Synthetic oligonucleotide
uuugccuaaucauuaagcu

SEQ ID NO: 99066 - RNA, 19 nt, Artificial Sequence
  Description of Artificial Sequence: Synthetic oligonucleotide
cacgacuugaccuacgcgg

SEQ ID NO: 99067 - RNA, 19 nt, Artificial Sequence
  Description of Artificial Sequence: Synthetic oligonucleotide
uaauacauugacuuuccga

SEQ ID NO: 99068 - RNA, 19 nt, Artificial Sequence
  Description of Artificial Sequence: Synthetic oligonucleotide
uuuauuaggugucacuuua

SEQ ID NO: 99069 - RNA, 19 nt, Artificial Sequence
  Description of Artificial Sequence: Synthetic oligonucleotide
aaaggcuuauuacuguaca

SEQ ID NO: 99070 - RNA, 19 nt, Artificial Sequence
  Description of Artificial Sequence: Synthetic oligonucleotide
aucuacgcaguguaguagc

SEQ ID NO: 99071 - RNA, 19 nt, Artificial Sequence
  Description of Artificial Sequence: Synthetic oligonucleotide
uuuugcgaaagcauugcug

SEQ ID NO: 99072 - RNA, 19 nt, Artificial Sequence
  Description of Artificial Sequence: Synthetic oligonucleotide
auacuuugggcccagcauc

SEQ ID NO: 99073 - RNA, 19 nt, Artificial Sequence
  Description of Artificial Sequence: Synthetic oligonucleotide
ugagugaucugggauaagg

SEQ ID NO: 99074 - RNA, 19 nt, Artificial Sequence
  Description of Artificial Sequence: Synthetic oligonucleotide
uuaucuacguggcagucga

SEQ ID NO: 99075 - RNA, 19 nt, Artificial Sequence
  Description of Artificial Sequence: Synthetic oligonucleotide
aaaaucuacgcaguguagu

SEQ ID NO: 99076 - RNA, 19 nt, Artificial Sequence
  Description of Artificial Sequence: Synthetic oligonucleotide
auuaggaacaucgacacau

SEQ ID NO: 99077 - RNA, 19 nt, Artificial Sequence
  Description of Artificial Sequence: Synthetic oligonucleotide
caucgacacauuuauuugg

SEQ ID NO: 99078 - RNA, 19 nt, Artificial Sequence
  Description of Artificial Sequence: Synthetic oligonucleotide
uuugucaaggggcuacaag

SEQ ID NO: 99079 - RNA, 19 nt, Artificial Sequence
  Description of Artificial Sequence: Synthetic oligonucleotide
uaggugucacuuuaaugcg

SEQ ID NO: 99080 - RNA, 19 nt, Artificial Sequence
  Description of Artificial Sequence: Synthetic oligonucleotide
uaaaaucuacgcaguguag

SEQ ID NO: 99081 - RNA, 19 nt, Artificial Sequence
  Description of Artificial Sequence: Synthetic oligonucleotide
acgaucaauaaauaauagu

SEQ ID NO: 99082 - RNA, 19 nt, Artificial Sequence
  Description of Artificial Sequence: Synthetic oligonucleotide
ucuaguuugccuaaucauu

SEQ ID NO: 99083 - RNA, 19 nt, Artificial Sequence
  Description of Artificial Sequence: Synthetic oligonucleotide
uccguuuuaggcaccaaca

SEQ ID NO: 99084 - RNA, 19 nt, Artificial Sequence
  Description of Artificial Sequence: Synthetic oligonucleotide
guucugacacuauucagcc

SEQ ID NO: 99085 - RNA, 19 nt, Artificial Sequence
  Description of Artificial Sequence: Synthetic oligonucleotide
ugaccaacuaggaugcaca

SEQ ID NO: 99086 - RNA, 19 nt, Artificial Sequence
  Description of Artificial Sequence: Synthetic oligonucleotide
aaucaaccagaugagccuc

SEQ ID NO: 99087 - RNA, 19 nt, Artificial Sequence
  Description of Artificial Sequence: Synthetic oligonucleotide
uacaugacggcaugcacgc

SEQ ID NO: 99088 - RNA, 19 nt, Artificial Sequence
  Description of Artificial Sequence: Synthetic oligonucleotide
cacuauucagccuucguug

SEQ ID NO: 99089 - RNA, 19 nt, Artificial Sequence
  Description of Artificial Sequence: Synthetic oligonucleotide
ucauaggcgacgcuacaag

SEQ ID NO: 99090 - RNA, 19 nt, Artificial Sequence
  Description of Artificial Sequence: Synthetic oligonucleotide
uguuuuagcugcaccauau

SEQ ID NO: 99091 - RNA, 19 nt, Artificial Sequence
  Description of Artificial Sequence: Synthetic oligonucleotide
aaagaugcgugugugugug

SEQ ID NO: 99092 - RNA, 19 nt, Artificial Sequence
  Description of Artificial Sequence: Synthetic oligonucleotide
uguaaaaucuacgcagugu

SEQ ID NO: 99093 - RNA, 19 nt, Artificial Sequence
  Description of Artificial Sequence: Synthetic oligonucleotide
gaagcauagucuuaguucu

SEQ ID NO: 99094 - RNA, 19 nt, Artificial Sequence
  Description of Artificial Sequence: Synthetic oligonucleotide
acuauuauauucaaccuau

SEQ ID NO: 99095 - RNA, 19 nt, Artificial Sequence
  Description of Artificial Sequence: Synthetic oligonucleotide
guaccaagaguacagcagc

SEQ ID NO: 99096 - RNA, 19 nt, Artificial Sequence
  Description of Artificial Sequence: Synthetic oligonucleotide
aauuguguuacuauucauu

SEQ ID NO: 99097 - RNA, 19 nt, Artificial Sequence
  Description of Artificial Sequence: Synthetic oligonucleotide
ucacuagaauuucauugca

SEQ ID NO: 99098 - RNA, 19 nt, Artificial Sequence
  Description of Artificial Sequence: Synthetic oligonucleotide
aaaucuacgcaguguagua

SEQ ID NO: 99099 - RNA, 19 nt, Artificial Sequence
  Description of Artificial Sequence: Synthetic oligonucleotide
uggcucuuaauacauugac

SEQ ID NO: 99100 - RNA, 19 nt, Artificial Sequence
  Description of Artificial Sequence: Synthetic oligonucleotide
ggcucaaugaccaacuagg

SEQ ID NO: 99101 - RNA, 19 nt, Artificial Sequence
  Description of Artificial Sequence: Synthetic oligonucleotide
guuugccuaaucauuaagc

SEQ ID NO: 99102 - RNA, 19 nt, Artificial Sequence
  Description of Artificial Sequence: Synthetic oligonucleotide
aaucuacgcaguguaguag

SEQ ID NO: 99103 - RNA, 19 nt, Artificial Sequence
  Description of Artificial Sequence: Synthetic oligonucleotide
uuuguucuauaaggcaagg

SEQ ID NO: 99104 - RNA, 19 nt, Artificial Sequence
  Description of Artificial Sequence: Synthetic oligonucleotide
gauagaaacccugugucuc

SEQ ID NO: 99105 - RNA, 19 nt, Artificial Sequence
  Description of Artificial Sequence: Synthetic oligonucleotide
uacauugacuuuccgaguu

SEQ ID NO: 99106 - RNA, 19 nt, Artificial Sequence
  Description of Artificial Sequence: Synthetic oligonucleotide
uaaccuguauucuaugaua

SEQ ID NO: 99107 - RNA, 19 nt, Artificial Sequence
  Description of Artificial Sequence: Synthetic oligonucleotide
aagacuccacuugacgagg

SEQ ID NO: 99108 - RNA, 19 nt, Artificial Sequence
  Description of Artificial Sequence: Synthetic oligonucleotide
guaaaaucuacgcagugua

SEQ ID NO: 99109 - RNA, 19 nt, Artificial Sequence
  Description of Artificial Sequence: Synthetic oligonucleotide
gacgagguggcucuauacc

SEQ ID NO: 99110 - RNA, 19 nt, Artificial Sequence
  Description of Artificial Sequence: Synthetic oligonucleotide
ucacuguuuaacccauuca

SEQ ID NO: 99111 - RNA, 19 nt, Artificial Sequence
  Description of Artificial Sequence: Synthetic oligonucleotide
guguuuaccccaaaucagg

SEQ ID NO: 99112 - RNA, 19 nt, Artificial Sequence
  Description of Artificial Sequence: Synthetic oligonucleotide
auauuaucuacguggcagu

SEQ ID NO: 99113 - RNA, 19 nt, Artificial Sequence
  Description of Artificial Sequence: Synthetic oligonucleotide
gauuggcugaguuucauua

SEQ ID NO: 99114 - RNA, 19 nt, Artificial Sequence
  Description of Artificial Sequence: Synthetic oligonucleotide
caaacuuccgggagacucg

SEQ ID NO: 99115 - RNA, 19 nt, Artificial Sequence
  Description of Artificial Sequence: Synthetic oligonucleotide
ugcugagccuauaucauaa

SEQ ID NO: 99116 - RNA, 19 nt, Artificial Sequence
  Description of Artificial Sequence: Synthetic oligonucleotide
ucaucauaggcgacgcuac

SEQ ID NO: 99117 - RNA, 19 nt, Artificial Sequence
  Description of Artificial Sequence: Synthetic oligonucleotide
cauaggcgacgcuacaagg

SEQ ID NO: 99118 - RNA, 19 nt, Artificial Sequence
  Description of Artificial Sequence: Synthetic oligonucleotide
ggggcaaccgaacaaaugc

SEQ ID NO: 99119 - RNA, 19 nt, Artificial Sequence
  Description of Artificial Sequence: Synthetic oligonucleotide
uuguguuacuauucauuug

SEQ ID NO: 99120 - RNA, 19 nt, Artificial Sequence
  Description of Artificial Sequence: Synthetic oligonucleotide
acauaauugcaucuuugaa

SEQ ID NO: 99121 - RNA, 19 nt, Artificial Sequence
  Description of Artificial Sequence: Synthetic oligonucleotide
uaucagguaccgaggaugu

SEQ ID NO: 99122 - RNA, 19 nt, Artificial Sequence
  Description of Artificial Sequence: Synthetic oligonucleotide
cauaucgagugucugaaca

SEQ ID NO: 99123 - RNA, 19 nt, Artificial Sequence
  Description of Artificial Sequence: Synthetic oligonucleotide
ggaagcauagucuuaguuc

SEQ ID NO: 99124 - RNA, 19 nt, Artificial Sequence
  Description of Artificial Sequence: Synthetic oligonucleotide
auuaucuacguggcagucg

SEQ ID NO: 99125 - RNA, 19 nt, Artificial Sequence
  Description of Artificial Sequence: Synthetic oligonucleotide
acuugaccuacgcggauuc

SEQ ID NO: 99126 - RNA, 19 nt, Artificial Sequence
  Description of Artificial Sequence: Synthetic oligonucleotide
auucaaccuauuaugaagu

SEQ ID NO: 99127 - RNA, 19 nt, Artificial Sequence
  Description of Artificial Sequence: Synthetic oligonucleotide
cauuaagcuacuuaaccaa

SEQ ID NO: 99128 - RNA, 19 nt, Artificial Sequence
  Description of Artificial Sequence: Synthetic oligonucleotide
agaccuagugaaggaaacc

SEQ ID NO: 99129 - RNA, 19 nt, Artificial Sequence
  Description of Artificial Sequence: Synthetic oligonucleotide
cauugaacaacuuuacaua

SEQ ID NO: 99130 - RNA, 19 nt, Artificial Sequence
  Description of Artificial Sequence: Synthetic oligonucleotide
aagcuaaccucucuuuaaa

SEQ ID NO: 99131 - RNA, 19 nt, Artificial Sequence
  Description of Artificial Sequence: Synthetic oligonucleotide
gagcauauauugugaauuc

SEQ ID NO: 99132 - RNA, 19 nt, Artificial Sequence
  Description of Artificial Sequence: Synthetic oligonucleotide
uucaaccuauuaugaagug

SEQ ID NO: 99133 - RNA, 19 nt, Artificial Sequence
  Description of Artificial Sequence: Synthetic oligonucleotide
guuuuaggcaccaacaucu

SEQ ID NO: 99134 - RNA, 19 nt, Artificial Sequence
  Description of Artificial Sequence: Synthetic oligonucleotide
uuaaugcgcacaagugaca

SEQ ID NO: 99135 - RNA, 19 nt, Artificial Sequence
  Description of Artificial Sequence: Synthetic oligonucleotide
caaggcauaguaagaguac

SEQ ID NO: 99136 - RNA, 19 nt, Artificial Sequence
  Description of Artificial Sequence: Synthetic oligonucleotide
ucacgacuugaccuacgcg

SEQ ID NO: 99137 - RNA, 19 nt, Artificial Sequence
  Description of Artificial Sequence: Synthetic oligonucleotide
ucaaccuauuaugaagugu

SEQ ID NO: 99138 - RNA, 19 nt, Artificial Sequence
  Description of Artificial Sequence: Synthetic oligonucleotide
ucuauaccuuccagucacg

SEQ ID NO: 99139 - RNA, 19 nt, Artificial Sequence
  Description of Artificial Sequence: Synthetic oligonucleotide
uauugugaauucucaccca

SEQ ID NO: 99140 - RNA, 19 nt, Artificial Sequence
  Description of Artificial Sequence: Synthetic oligonucleotide
aagcagcuaagcugguuug

SEQ ID NO: 99141 - RNA, 19 nt, Artificial Sequence
  Description of Artificial Sequence: Synthetic oligonucleotide
acuuuaaugcgcacaagug

SEQ ID NO: 99142 - RNA, 19 nt, Artificial Sequence
  Description of Artificial Sequence: Synthetic oligonucleotide
agcuacuuaaccaauuaga

SEQ ID NO: 99143 - RNA, 19 nt, Artificial Sequence
  Description of Artificial Sequence: Synthetic oligonucleotide
cucaacuauuauauucaac

SEQ ID NO: 99144 - RNA, 19 nt, Artificial Sequence
  Description of Artificial Sequence: Synthetic oligonucleotide
uucauaucgagugucugaa

SEQ ID NO: 99145 - RNA, 19 nt, Artificial Sequence
  Description of Artificial Sequence: Synthetic oligonucleotide
agacaucuuuugucaaggg

SEQ ID NO: 99146 - RNA, 19 nt, Artificial Sequence
  Description of Artificial Sequence: Synthetic oligonucleotide
ucaaugugacgcuuacaac

SEQ ID NO: 99147 - RNA, 19 nt, Artificial Sequence
  Description of Artificial Sequence: Synthetic oligonucleotide
auacgaucaauaaauaaua

SEQ ID NO: 99148 - RNA, 19 nt, Artificial Sequence
  Description of Artificial Sequence: Synthetic oligonucleotide
caaugugacgcuuacaacu

SEQ ID NO: 99149 - RNA, 19 nt, Artificial Sequence
  Description of Artificial Sequence: Synthetic oligonucleotide
ucuacgcaguguaguagcc

SEQ ID NO: 99150 - RNA, 19 nt, Artificial Sequence
  Description of Artificial Sequence: Synthetic oligonucleotide
aaacuuccgggagacucgg

SEQ ID NO: 99151 - RNA, 19 nt, Artificial Sequence
  Description of Artificial Sequence: Synthetic oligonucleotide
aaccuguauucuaugauaa

SEQ ID NO: 99152 - RNA, 19 nt, Artificial Sequence
  Description of Artificial Sequence: Synthetic oligonucleotide
guuucagaugugucauagg

SEQ ID NO: 99153 - RNA, 19 nt, Artificial Sequence
  Description of Artificial Sequence: Synthetic oligonucleotide
ucuacguggcagucgauuc

SEQ ID NO: 99154 - RNA, 19 nt, Artificial Sequence
  Description of Artificial Sequence: Synthetic oligonucleotide
ugggugcuuaauucaauac

SEQ ID NO: 99155 - RNA, 19 nt, Artificial Sequence
  Description of Artificial Sequence: Synthetic oligonucleotide
uguacacuacugugcacug

SEQ ID NO: 99156 - RNA, 19 nt, Artificial Sequence
  Description of Artificial Sequence: Synthetic oligonucleotide
ugcacgccauaguucauag

SEQ ID NO: 99157 - RNA, 19 nt, Artificial Sequence
  Description of Artificial Sequence: Synthetic oligonucleotide
ugauuagauucaagucagc

SEQ ID NO: 99158 - RNA, 19 nt, Artificial Sequence
  Description of Artificial Sequence: Synthetic oligonucleotide
guaugcgugaagucaaaca

SEQ ID NO: 99159 - RNA, 19 nt, Artificial Sequence
  Description of Artificial Sequence: Synthetic oligonucleotide
uuauuaggugucacuuuaa

SEQ ID NO: 99160 - RNA, 19 nt, Artificial Sequence
  Description of Artificial Sequence: Synthetic oligonucleotide
ugucacuuuaaugcgcaca

SEQ ID NO: 99161 - RNA, 19 nt, Artificial Sequence
  Description of Artificial Sequence: Synthetic oligonucleotide
aguaugcgugaagucaaac

SEQ ID NO: 99162 - RNA, 19 nt, Artificial Sequence
  Description of Artificial Sequence: Synthetic oligonucleotide
accuauuaugaaguguuug

SEQ ID NO: 99163 - RNA, 19 nt, Artificial Sequence
  Description of Artificial Sequence: Synthetic oligonucleotide
cagguaccgaggauguugg

SEQ ID NO: 99164 - RNA, 19 nt, Artificial Sequence
  Description of Artificial Sequence: Synthetic oligonucleotide
ucaucuaguuugccuaauc

SEQ ID NO: 99165 - RNA, 19 nt, Artificial Sequence
  Description of Artificial Sequence: Synthetic oligonucleotide
aaccucucuuuaaaagguc

SEQ ID NO: 99166 - RNA, 19 nt, Artificial Sequence
  Description of Artificial Sequence: Synthetic oligonucleotide
agcuaagugaaaguuucug

SEQ ID NO: 99167 - RNA, 19 nt, Artificial Sequence
  Description of Artificial Sequence: Synthetic oligonucleotide
uugccuaaucauuaagcua

SEQ ID NO: 99168 - RNA, 19 nt, Artificial Sequence
  Description of Artificial Sequence: Synthetic oligonucleotide
cuuauuacuguacacuacu

SEQ ID NO: 99169 - RNA, 19 nt, Artificial Sequence
  Description of Artificial Sequence: Synthetic oligonucleotide
aagugggaguaacacuggu

SEQ ID NO: 99170 - RNA, 19 nt, Artificial Sequence
  Description of Artificial Sequence: Synthetic oligonucleotide
aaggggcuacaagcuaacc

SEQ ID NO: 99171 - RNA, 19 nt, Artificial Sequence
  Description of Artificial Sequence: Synthetic oligonucleotide
auaucgagugucugaacaa

SEQ ID NO: 99172 - RNA, 19 nt, Artificial Sequence
  Description of Artificial Sequence: Synthetic oligonucleotide
cuaguuugccuaaucauua

SEQ ID NO: 99173 - RNA, 19 nt, Artificial Sequence
  Description of Artificial Sequence: Synthetic oligonucleotide
uuccgaguucccaagugaa

SEQ ID NO: 99174 - RNA, 19 nt, Artificial Sequence
  Description of Artificial Sequence: Synthetic oligonucleotide
auacauugacuuuccgagu

SEQ ID NO: 99175 - RNA, 19 nt, Artificial Sequence
  Description of Artificial Sequence: Synthetic oligonucleotide
aaaacuggcuugcccggaa

SEQ ID NO: 99176 - RNA, 19 nt, Artificial Sequence
  Description of Artificial Sequence: Synthetic oligonucleotide
aaugugacgcuuacaacua

SEQ ID NO: 99177 - RNA, 19 nt, Artificial Sequence
  Description of Artificial Sequence: Synthetic oligonucleotide
gucacuuuaaugcgcacaa

SEQ ID NO: 99178 - RNA, 19 nt, Artificial Sequence
  Description of Artificial Sequence: Synthetic oligonucleotide
uggggcaaccgaacaaaug

SEQ ID NO: 99179 - RNA, 19 nt, Artificial Sequence
  Description of Artificial Sequence: Synthetic oligonucleotide
guaccgaggauguuggcuc

SEQ ID NO: 99180 - RNA, 19 nt, Artificial Sequence
  Description of Artificial Sequence: Synthetic oligonucleotide
ugugugugugugccaaacu

SEQ ID NO: 99181 - RNA, 19 nt, Artificial Sequence
  Description of Artificial Sequence: Synthetic oligonucleotide
uguuugguuguagcaaacu

SEQ ID NO: 99182 - RNA, 19 nt, Artificial Sequence
  Description of Artificial Sequence: Synthetic oligonucleotide
aauuccguuuuaggcacca

SEQ ID NO: 99183 - RNA, 19 nt, Artificial Sequence
  Description of Artificial Sequence: Synthetic oligonucleotide
aaugcgcacaagugacaga

SEQ ID NO: 99184 - RNA, 19 nt, Artificial Sequence
  Description of Artificial Sequence: Synthetic oligonucleotide
acgcuuacaacuacaaagu

SEQ ID NO: 99185 - RNA, 19 nt, Artificial Sequence
  Description of Artificial Sequence: Synthetic oligonucleotide
uaggcgacgcuacaagguc

SEQ ID NO: 99186 - RNA, 19 nt, Artificial Sequence
  Description of Artificial Sequence: Synthetic oligonucleotide
cuuagggauuaaccuacac

SEQ ID NO: 99187 - RNA, 19 nt, Artificial Sequence
  Description of Artificial Sequence: Synthetic oligonucleotide
ugcgaaagcauugcuguuc

SEQ ID NO: 99188 - RNA, 19 nt, Artificial Sequence
  Description of Artificial Sequence: Synthetic oligonucleotide
gaaguaugcgugaagucaa

SEQ ID NO: 99189 - RNA, 19 nt, Artificial Sequence
  Description of Artificial Sequence: Synthetic oligonucleotide
gugaauucucacccaaauc

SEQ ID NO: 99190 - RNA, 19 nt, Artificial Sequence
  Description of Artificial Sequence: Synthetic oligonucleotide
ugugugugugugugugugc

SEQ ID NO: 99191 - RNA, 19 nt, Artificial Sequence
  Description of Artificial Sequence: Synthetic oligonucleotide
acaagcuaaccucucuuua

SEQ ID NO: 99192 - RNA, 19 nt, Artificial Sequence
  Description of Artificial Sequence: Synthetic oligonucleotide
acuacugugcacugacaaa

SEQ ID NO: 99193 - RNA, 19 nt, Artificial Sequence
  Description of Artificial Sequence: Synthetic oligonucleotide
gucacgacuugaccuacgc

SEQ ID NO: 99194 - RNA, 19 nt, Artificial Sequence
  Description of Artificial Sequence: Synthetic oligonucleotide
ugacgcuuacaacuacaaa

SEQ ID NO: 99195 - RNA, 19 nt, Artificial Sequence
  Description of Artificial Sequence: Synthetic oligonucleotide
ggggcuacaagcuaaccuc

SEQ ID NO: 99196 - RNA, 19 nt, Artificial Sequence
  Description of Artificial Sequence: Synthetic oligonucleotide
ucgacacauuuauuuggcu

SEQ ID NO: 99197 - RNA, 19 nt, Artificial Sequence
  Description of Artificial Sequence: Synthetic oligonucleotide
uaguuugccuaaucauuaa

SEQ ID NO: 99198 - RNA, 19 nt, Artificial Sequence
  Description of Artificial Sequence: Synthetic oligonucleotide
cauagucaugaaccacgcc

SEQ ID NO: 99199 - RNA, 19 nt, Artificial Sequence
  Description of Artificial Sequence: Synthetic oligonucleotide
ccucguaucuugauaagac

SEQ ID NO: 99200 - RNA, 19 nt, Artificial Sequence
  Description of Artificial Sequence: Synthetic oligonucleotide
uggaacgcagugagaaauc

SEQ ID NO: 99201 - RNA, 19 nt, Artificial Sequence
  Description of Artificial Sequence: Synthetic oligonucleotide
cagaaguaugcgugaaguc

SEQ ID NO: 99202 - RNA, 19 nt, Artificial Sequence
  Description of Artificial Sequence: Synthetic oligonucleotide
uucucacuagaauuucauu

SEQ ID NO: 99203 - RNA, 19 nt, Artificial Sequence
  Description of Artificial Sequence: Synthetic oligonucleotide
augggugcuuaauucaaua

SEQ ID NO: 99204 - RNA, 19 nt, Artificial Sequence
  Description of Artificial Sequence: Synthetic oligonucleotide
guuuaccccaaaucaggca

SEQ ID NO: 99205 - RNA, 19 nt, Artificial Sequence
  Description of Artificial Sequence: Synthetic oligonucleotide
uauuaucuacguggcaguc

SEQ ID NO: 99206 - RNA, 19 nt, Artificial Sequence
  Description of Artificial Sequence: Synthetic oligonucleotide
aaccuacacaggcccuuug

SEQ ID NO: 99207 - RNA, 19 nt, Artificial Sequence
  Description of Artificial Sequence: Synthetic oligonucleotide
cauucauaucgagugucug

SEQ ID NO: 99208 - RNA, 19 nt, Artificial Sequence
  Description of Artificial Sequence: Synthetic oligonucleotide
uuaggaacaucgacacauu

SEQ ID NO: 99209 - RNA, 19 nt, Artificial Sequence
  Description of Artificial Sequence: Synthetic oligonucleotide
ucauaucgagugucugaac

SEQ ID NO: 99210 - RNA, 19 nt, Artificial Sequence
  Description of Artificial Sequence: Synthetic oligonucleotide
auuaagcuacuuaaccaau

SEQ ID NO: 99211 - RNA, 19 nt, Artificial Sequence
  Description of Artificial Sequence: Synthetic oligonucleotide
aaccgaacaaaugcuucau

SEQ ID NO: 99212 - RNA, 19 nt, Artificial Sequence
  Description of Artificial Sequence: Synthetic oligonucleotide
gugugugugugugugugcc

SEQ ID NO: 99213 - RNA, 19 nt, Artificial Sequence
  Description of Artificial Sequence: Synthetic oligonucleotide
aguagccucuaauguuuca

SEQ ID NO: 99214 - RNA, 19 nt, Artificial Sequence
  Description of Artificial Sequence: Synthetic oligonucleotide
ucacuuuaaugcgcacaag

SEQ ID NO: 99215 - RNA, 19 nt, Artificial Sequence
  Description of Artificial Sequence: Synthetic oligonucleotide
ugaccuacgcggauucuuu

SEQ ID NO: 99216 - RNA, 19 nt, Artificial Sequence
  Description of Artificial Sequence: Synthetic oligonucleotide
aggcccuuugugcucaacu

SEQ ID NO: 99217 - RNA, 19 nt, Artificial Sequence
  Description of Artificial Sequence: Synthetic oligonucleotide
ggaacaucgacacauuuau

SEQ ID NO: 99218 - RNA, 19 nt, Artificial Sequence
  Description of Artificial Sequence: Synthetic oligonucleotide
agaugcgugugugugugug

SEQ ID NO: 99219 - RNA, 19 nt, Artificial Sequence
  Description of Artificial Sequence: Synthetic oligonucleotide
auaggcgacgcuacaaggu

SEQ ID NO: 99220 - RNA, 19 nt, Artificial Sequence
  Description of Artificial Sequence: Synthetic oligonucleotide
caugacggcaugcacgcca

SEQ ID NO: 99221 - RNA, 19 nt, Artificial Sequence
  Description of Artificial Sequence: Synthetic oligonucleotide
ugugugugugugugugugu

SEQ ID NO: 99222 - RNA, 19 nt, Artificial Sequence
  Description of Artificial Sequence: Synthetic oligonucleotide
accagaagauguucagaaa

SEQ ID NO: 99223 - RNA, 19 nt, Artificial Sequence
  Description of Artificial Sequence: Synthetic oligonucleotide
guuaugaguguaaaaucua

SEQ ID NO: 99224 - RNA, 19 nt, Artificial Sequence
  Description of Artificial Sequence: Synthetic oligonucleotide
aggcgacgcuacaaggucc

SEQ ID NO: 99225 - RNA, 19 nt, Artificial Sequence
  Description of Artificial Sequence: Synthetic oligonucleotide
caagugacagagcauauau

SEQ ID NO: 99226 - RNA, 19 nt, Artificial Sequence
  Description of Artificial Sequence: Synthetic oligonucleotide
gcuacuuaaccaauuagaa

SEQ ID NO: 99227 - RNA, 19 nt, Artificial Sequence
  Description of Artificial Sequence: Synthetic oligonucleotide
ggauuaaccuacacaggcc

SEQ ID NO: 99228 - RNA, 19 nt, Artificial Sequence
  Description of Artificial Sequence: Synthetic oligonucleotide
ugugugugugugugugcca

SEQ ID NO: 99229 - RNA, 19 nt, Artificial Sequence
  Description of Artificial Sequence: Synthetic oligonucleotide
gaaguagauagguucuuuu

SEQ ID NO: 99230 - RNA, 19 nt, Artificial Sequence
  Description of Artificial Sequence: Synthetic oligonucleotide
accuacgcggauucuuugu

SEQ ID NO: 99231 - RNA, 19 nt, Artificial Sequence
  Description of Artificial Sequence: Synthetic oligonucleotide
cuacgcggauucuuuguuc

SEQ ID NO: 99232 - RNA, 19 nt, Artificial Sequence
  Description of Artificial Sequence: Synthetic oligonucleotide
gugugugugugugugugug

SEQ ID NO: 99233 - RNA, 19 nt, Artificial Sequence
  Description of Artificial Sequence: Synthetic oligonucleotide
agauuuguuugcauuuaaa

SEQ ID NO: 99234 - RNA, 19 nt, Artificial Sequence
  Description of Artificial Sequence: Synthetic oligonucleotide
aagcuaagugaaaguuucu

SEQ ID NO: 99235 - RNA, 19 nt, Artificial Sequence
  Description of Artificial Sequence: Synthetic oligonucleotide
agccucguaucuugauaag

SEQ ID NO: 99236 - RNA, 19 nt, Artificial Sequence
  Description of Artificial Sequence: Synthetic oligonucleotide
agguaccgaggauguuggc

SEQ ID NO: 99237 - RNA, 19 nt, Artificial Sequence
  Description of Artificial Sequence: Synthetic oligonucleotide
gauagguucuuuucugauu

SEQ ID NO: 99238 - RNA, 19 nt, Artificial Sequence
  Description of Artificial Sequence: Synthetic oligonucleotide
agucgauucucuggcaggu

SEQ ID NO: 99239 - RNA, 19 nt, Artificial Sequence
  Description of Artificial Sequence: Synthetic oligonucleotide
guaaccuguauucuaugau

SEQ ID NO: 99240 - RNA, 19 nt, Artificial Sequence
  Description of Artificial Sequence: Synthetic oligonucleotide
accucacgugguuaugagu

SEQ ID NO: 99241 - RNA, 19 nt, Artificial Sequence
  Description of Artificial Sequence: Synthetic oligonucleotide
cagccucguaucuugauaa

SEQ ID NO: 99242 - RNA, 19 nt, Artificial Sequence
  Description of Artificial Sequence: Synthetic oligonucleotide
uguaccucacgugguuaug

SEQ ID NO: 99243 - RNA, 19 nt, Artificial Sequence
  Description of Artificial Sequence: Synthetic oligonucleotide
cacuagaauuucauugcaa

SEQ ID NO: 99244 - RNA, 19 nt, Artificial Sequence
  Description of Artificial Sequence: Synthetic oligonucleotide
ugcgcacaagugacagagc

SEQ ID NO: 99245 - RNA, 19 nt, Artificial Sequence
  Description of Artificial Sequence: Synthetic oligonucleotide
aagaugcgugugugugugu

SEQ ID NO: 99246 - RNA, 19 nt, Artificial Sequence
  Description of Artificial Sequence: Synthetic oligonucleotide
ugucaaugugacgcuuaca

SEQ ID NO: 99247 - RNA, 19 nt, Artificial Sequence
  Description of Artificial Sequence: Synthetic oligonucleotide
cccugauuagauucaaguc

SEQ ID NO: 99248 - RNA, 19 nt, Artificial Sequence
  Description of Artificial Sequence: Synthetic oligonucleotide
uacuauucauuugggcuuu

SEQ ID NO: 99249 - RNA, 19 nt, Artificial Sequence
  Description of Artificial Sequence: Synthetic oligonucleotide
cuaaagccuggggcaaccg

SEQ ID NO: 99250 - RNA, 19 nt, Artificial Sequence
  Description of Artificial Sequence: Synthetic oligonucleotide
ggacugaaauauuacagau

SEQ ID NO: 99251 - RNA, 19 nt, Artificial Sequence
  Description of Artificial Sequence: Synthetic oligonucleotide
ccggaauguuaacugacag

SEQ ID NO: 99252 - RNA, 19 nt, Artificial Sequence
  Description of Artificial Sequence: Synthetic oligonucleotide
auuaaccuacacaggcccu

SEQ ID NO: 99253 - RNA, 19 nt, Artificial Sequence
  Description of Artificial Sequence: Synthetic oligonucleotide
augcgugugugugugugug

SEQ ID NO: 99254 - RNA, 19 nt, Artificial Sequence
  Description of Artificial Sequence: Synthetic oligonucleotide
gaugacccugagcuauguc

SEQ ID NO: 99255 - RNA, 19 nt, Artificial Sequence
  Description of Artificial Sequence: Synthetic oligonucleotide
uggcuugcccggaauguua

SEQ ID NO: 99256 - RNA, 19 nt, Artificial Sequence
  Description of Artificial Sequence: Synthetic oligonucleotide
aucauaggcgacgcuacaa

SEQ ID NO: 99257 - RNA, 19 nt, Artificial Sequence
  Description of Artificial Sequence: Synthetic oligonucleotide
uacguggcagucgauucuc

SEQ ID NO: 99258 - RNA, 19 nt, Artificial Sequence
  Description of Artificial Sequence: Synthetic oligonucleotide
ccaagacuccacuugacga

SEQ ID NO: 99259 - RNA, 19 nt, Artificial Sequence
  Description of Artificial Sequence: Synthetic oligonucleotide
uguguaccucacgugguua

SEQ ID NO: 99260 - RNA, 19 nt, Artificial Sequence
  Description of Artificial Sequence: Synthetic oligonucleotide
aaccuauuaugaaguguuu

SEQ ID NO: 99261 - RNA, 19 nt, Artificial Sequence
  Description of Artificial Sequence: Synthetic oligonucleotide
cugacacuauucagccuuc

SEQ ID NO: 99262 - RNA, 19 nt, Artificial Sequence
  Description of Artificial Sequence: Synthetic oligonucleotide
ccgaguucccaagugaaag

SEQ ID NO: 99263 - RNA, 19 nt, Artificial Sequence
  Description of Artificial Sequence: Synthetic oligonucleotide
cuaauguuucaucuaguuu

SEQ ID NO: 99264 - RNA, 19 nt, Artificial Sequence
  Description of Artificial Sequence: Synthetic oligonucleotide
caucagauauaaauacgau

SEQ ID NO: 99265 - RNA, 19 nt, Artificial Sequence
  Description of Artificial Sequence: Synthetic oligonucleotide
guccagauuaaaucuccua

SEQ ID NO: 99266 - RNA, 19 nt, Artificial Sequence
  Description of Artificial Sequence: Synthetic oligonucleotide
cggaauguuaacugacagc

SEQ ID NO: 99267 - RNA, 19 nt, Artificial Sequence
  Description of Artificial Sequence: Synthetic oligonucleotide
cucguaucuugauaagacu

SEQ ID NO: 99268 - RNA, 19 nt, Artificial Sequence
  Description of Artificial Sequence: Synthetic oligonucleotide
ucacgugguuaugagugua

SEQ ID NO: 99269 - RNA, 19 nt, Artificial Sequence
  Description of Artificial Sequence: Synthetic oligonucleotide
acgccauaguucauaguca

SEQ ID NO: 99270 - RNA, 19 nt, Artificial Sequence
  Description of Artificial Sequence: Synthetic oligonucleotide
accgaacaaaugcuucaua

SEQ ID NO: 99271 - RNA, 19 nt, Artificial Sequence
  Description of Artificial Sequence: Synthetic oligonucleotide
gugugugugugugccaaac

SEQ ID NO: 99272 - RNA, 19 nt, Artificial Sequence
  Description of Artificial Sequence: Synthetic oligonucleotide
aucuacguggcagucgauu

SEQ ID NO: 99273 - RNA, 19 nt, Artificial Sequence
  Description of Artificial Sequence: Synthetic oligonucleotide
ugugugugugugugccaaa

SEQ ID NO: 99274 - RNA, 19 nt, Artificial Sequence
  Description of Artificial Sequence: Synthetic oligonucleotide
ccuauuaugaaguguuugu

SEQ ID NO: 99275 - RNA, 19 nt, Artificial Sequence
  Description of Artificial Sequence: Synthetic oligonucleotide
uuuugccgauguaggccuc

SEQ ID NO: 99276 - RNA, 19 nt, Artificial Sequence
  Description of Artificial Sequence: Synthetic oligonucleotide
gguguuugacagcacuuaa

SEQ ID NO: 99277 - RNA, 19 nt, Artificial Sequence
  Description of Artificial Sequence: Synthetic oligonucleotide
uugggcuuugcagcucugu

SEQ ID NO: 99278 - RNA, 19 nt, Artificial Sequence
  Description of Artificial Sequence: Synthetic oligonucleotide
acgacuugaccuacgcgga

SEQ ID NO: 99279 - RNA, 19 nt, Artificial Sequence
  Description of Artificial Sequence: Synthetic oligonucleotide
ugcgugugugugugugugu

SEQ ID NO: 99280 - RNA, 19 nt, Artificial Sequence
  Description of Artificial Sequence: Synthetic oligonucleotide
gacccugagcuaugucuuc

SEQ ID NO: 99281 - RNA, 19 nt, Artificial Sequence
  Description of Artificial Sequence: Synthetic oligonucleotide
agucacgacuugaccuacg

SEQ ID NO: 99282 - RNA, 19 nt, Artificial Sequence
  Description of Artificial Sequence: Synthetic oligonucleotide
aaguaugcgugaagucaaa

SEQ ID NO: 99283 - RNA, 19 nt, Artificial Sequence
  Description of Artificial Sequence: Synthetic oligonucleotide
ggaguaccaagaguacagc

SEQ ID NO: 99284 - RNA, 19 nt, Artificial Sequence
  Description of Artificial Sequence: Synthetic oligonucleotide
aucgagugucugaacaaaa

SEQ ID NO: 99285 - RNA, 19 nt, Artificial Sequence
  Description of Artificial Sequence: Synthetic oligonucleotide
augcuucauaucucaccaa

SEQ ID NO: 99286 - RNA, 19 nt, Artificial Sequence
  Description of Artificial Sequence: Synthetic oligonucleotide
uugcgaaagcauugcuguu

SEQ ID NO: 99287 - RNA, 19 nt, Artificial Sequence
  Description of Artificial Sequence: Synthetic oligonucleotide
guguuugacagcacuuaaa

SEQ ID NO: 99288 - RNA, 19 nt, Artificial Sequence
  Description of Artificial Sequence: Synthetic oligonucleotide
gcccugauuagauucaagu

SEQ ID NO: 99289 - RNA, 19 nt, Artificial Sequence
  Description of Artificial Sequence: Synthetic oligonucleotide
gugacgcuuacaacuacaa

SEQ ID NO: 99290 - RNA, 19 nt, Artificial Sequence
  Description of Artificial Sequence: Synthetic oligonucleotide
cuuaaaacuuagggauuaa

SEQ ID NO: 99291 - RNA, 19 nt, Artificial Sequence
  Description of Artificial Sequence: Synthetic oligonucleotide
uccuaaagccuggggcaac

SEQ ID NO: 99292 - RNA, 19 nt, Artificial Sequence
  Description of Artificial Sequence: Synthetic oligonucleotide
cuuuacauaauugcaucuu

SEQ ID NO: 99293 - RNA, 19 nt, Artificial Sequence
  Description of Artificial Sequence: Synthetic oligonucleotide
gucaaggggcuacaagcua

SEQ ID NO: 99294 - RNA, 19 nt, Artificial Sequence
  Description of Artificial Sequence: Synthetic oligonucleotide
aggcuacgcagcuguuuca

SEQ ID NO: 99295 - RNA, 19 nt, Artificial Sequence
  Description of Artificial Sequence: Synthetic oligonucleotide
ccaagaguacagcagcaca

SEQ ID NO: 99296 - RNA, 19 nt, Artificial Sequence
  Description of Artificial Sequence: Synthetic oligonucleotide
cguuuuaggcaccaacauc

SEQ ID NO: 99297 - RNA, 19 nt, Artificial Sequence
  Description of Artificial Sequence: Synthetic oligonucleotide
gaugcgugugugugugugu

SEQ ID NO: 99298 - RNA, 19 nt, Artificial Sequence
  Description of Artificial Sequence: Synthetic oligonucleotide
caucauaggcgacgcuaca

SEQ ID NO: 99299 - RNA, 19 nt, Artificial Sequence
  Description of Artificial Sequence: Synthetic oligonucleotide
cacgugguuaugaguguaa

SEQ ID NO: 99300 - RNA, 19 nt, Artificial Sequence
  Description of Artificial Sequence: Synthetic oligonucleotide
uaucuacguggcagucgau

SEQ ID NO: 99301 - RNA, 19 nt, Artificial Sequence
  Description of Artificial Sequence: Synthetic oligonucleotide
cuauuaugaaguguuuguu

SEQ ID NO: 99302 - RNA, 19 nt, Artificial Sequence
  Description of Artificial Sequence: Synthetic oligonucleotide
cacuugacgagguggcucu

SEQ ID NO: 99303 - RNA, 19 nt, Artificial Sequence
  Description of Artificial Sequence: Synthetic oligonucleotide
agguuucagaugugucaua

SEQ ID NO: 99304 - RNA, 19 nt, Artificial Sequence
  Description of Artificial Sequence: Synthetic oligonucleotide
uaaccuacacaggcccuuu

SEQ ID NO: 99305 - RNA, 19 nt, Artificial Sequence
  Description of Artificial Sequence: Synthetic oligonucleotide
ugccgauguaggccucaaa

SEQ ID NO: 99306 - RNA, 19 nt, Artificial Sequence
  Description of Artificial Sequence: Synthetic oligonucleotide
gugugugugugugugccaa

SEQ ID NO: 99307 - RNA, 19 nt, Artificial Sequence
  Description of Artificial Sequence: Synthetic oligonucleotide
gugaugacccugagcuaug

SEQ ID NO: 99308 - RNA, 19 nt, Artificial Sequence
  Description of Artificial Sequence: Synthetic oligonucleotide
cuugcccggaauguuaacu

SEQ ID NO: 99309 - RNA, 19 nt, Artificial Sequence
  Description of Artificial Sequence: Synthetic oligonucleotide
ccagauuaaaucuccuacu

SEQ ID NO: 99310 - RNA, 19 nt, Artificial Sequence
  Description of Artificial Sequence: Synthetic oligonucleotide
cuggaacgcagugagaaau

SEQ ID NO: 99311 - RNA, 19 nt, Artificial Sequence
  Description of Artificial Sequence: Synthetic oligonucleotide
cacuuaaaacuuagggauu

SEQ ID NO: 99312 - RNA, 19 nt, Artificial Sequence
  Description of Artificial Sequence: Synthetic oligonucleotide
cagucacgacuugaccuac

SEQ ID NO: 99313 - RNA, 19 nt, Artificial Sequence
  Description of Artificial Sequence: Synthetic oligonucleotide
augcacgccauaguucaua

SEQ ID NO: 99314 - RNA, 19 nt, Artificial Sequence
  Description of Artificial Sequence: Synthetic oligonucleotide
accuuccagucacgacuug

SEQ ID NO: 99315 - RNA, 19 nt, Artificial Sequence
  Description of Artificial Sequence: Synthetic oligonucleotide
cagcccgcaaggcauagua

SEQ ID NO: 99316 - RNA, 19 nt, Artificial Sequence
  Description of Artificial Sequence: Synthetic oligonucleotide
ccagcucagugcugauugg

SEQ ID NO: 99317 - RNA, 19 nt, Artificial Sequence
  Description of Artificial Sequence: Synthetic oligonucleotide
gcgugugugugugugugug

SEQ ID NO: 99318 - RNA, 19 nt, Artificial Sequence
  Description of Artificial Sequence: Synthetic oligonucleotide
auguuggcucaaugaccaa

SEQ ID NO: 99319 - RNA, 19 nt, Artificial Sequence
  Description of Artificial Sequence: Synthetic oligonucleotide
ccgaacaaaugcuucauau

SEQ ID NO: 99320 - RNA, 19 nt, Artificial Sequence
  Description of Artificial Sequence: Synthetic oligonucleotide
gcucaaugaccaacuagga

SEQ ID NO: 99321 - RNA, 19 nt, Artificial Sequence
  Description of Artificial Sequence: Synthetic oligonucleotide
cauuauucccaagcugccu

SEQ ID NO: 99322 - RNA, 19 nt, Artificial Sequence
  Description of Artificial Sequence: Synthetic oligonucleotide
gguaccgaggauguuggcu

SEQ ID NO: 99323 - RNA, 19 nt, Artificial Sequence
  Description of Artificial Sequence: Synthetic oligonucleotide
cuacguggcagucgauucu

SEQ ID NO: 99324 - RNA, 19 nt, Artificial Sequence
  Description of Artificial Sequence: Synthetic oligonucleotide
gccucguaucuugauaaga

SEQ ID NO: 99325 - RNA, 19 nt, Artificial Sequence
  Description of Artificial Sequence: Synthetic oligonucleotide
ggcccuuugugcucaacua

SEQ ID NO: 99326 - RNA, 19 nt, Artificial Sequence
  Description of Artificial Sequence: Synthetic oligonucleotide
gugugugugccaaacuaau

SEQ ID NO: 99327 - RNA, 19 nt, Artificial Sequence
  Description of Artificial Sequence: Synthetic oligonucleotide
gccucuaauguuucaucua

SEQ ID NO: 99328 - RNA, 19 nt, Artificial Sequence
  Description of Artificial Sequence: Synthetic oligonucleotide
gcgaaagcauugcuguucu

SEQ ID NO: 99329 - RNA, 19 nt, Artificial Sequence
  Description of Artificial Sequence: Synthetic oligonucleotide
cucacgugguuaugagugu

SEQ ID NO: 99330 - RNA, 19 nt, Artificial Sequence
  Description of Artificial Sequence: Synthetic oligonucleotide
ggaacgcagugagaaaucu

SEQ ID NO: 99331 - RNA, 19 nt, Artificial Sequence
  Description of Artificial Sequence: Synthetic oligonucleotide
uugccgauguaggccucaa

SEQ ID NO: 99332 - RNA, 19 nt, Artificial Sequence
  Description of Artificial Sequence: Synthetic oligonucleotide
cccggaauguuaacugaca

SEQ ID NO: 99333 - RNA, 19 nt, Artificial Sequence
  Description of Artificial Sequence: Synthetic oligonucleotide
ccagaaguaugcgugaagu

SEQ ID NO: 99334 - RNA, 19 nt, Artificial Sequence
  Description of Artificial Sequence: Synthetic oligonucleotide
acgcuacaagguccagauu

SEQ ID NO: 99335 - RNA, 19 nt, Artificial Sequence
  Description of Artificial Sequence: Synthetic oligonucleotide
auuccguuuuaggcaccaa

SEQ ID NO: 99336 - RNA, 19 nt, Artificial Sequence
  Description of Artificial Sequence: Synthetic oligonucleotide
ccagucacgacuugaccua

SEQ ID NO: 99337 - RNA, 19 nt, Artificial Sequence
  Description of Artificial Sequence: Synthetic oligonucleotide
ggcagucgauucucuggca

SEQ ID NO: 99338 - RNA, 19 nt, Artificial Sequence
  Description of Artificial Sequence: Synthetic oligonucleotide
gacuugaccuacgcggauu

SEQ ID NO: 99339 - RNA, 19 nt, Artificial Sequence
  Description of Artificial Sequence: Synthetic oligonucleotide
gaacgcagugagaaaucuu

SEQ ID NO: 99340 - RNA, 19 nt, Artificial Sequence
  Description of Artificial Sequence: Synthetic oligonucleotide
aucagguaccgaggauguu

SEQ ID NO: 99341 - RNA, 19 nt, Artificial Sequence
  Description of Artificial Sequence: Synthetic oligonucleotide
cgugguuaugaguguaaaa

SEQ ID NO: 99342 - RNA, 19 nt, Artificial Sequence
  Description of Artificial Sequence: Synthetic oligonucleotide
acagugugcugagccuaua

SEQ ID NO: 99343 - RNA, 19 nt, Artificial Sequence
  Description of Artificial Sequence: Synthetic oligonucleotide
cuggggcaaccgaacaaau

SEQ ID NO: 99344 - RNA, 19 nt, Artificial Sequence
  Description of Artificial Sequence: Synthetic oligonucleotide
gcccuuugugcucaacuau

SEQ ID NO: 99345 - RNA, 19 nt, Artificial Sequence
  Description of Artificial Sequence: Synthetic oligonucleotide
gggcaaccgaacaaaugcu

SEQ ID NO: 99346 - RNA, 19 nt, Artificial Sequence
  Description of Artificial Sequence: Synthetic oligonucleotide
ggcuugcccggaauguuaa

SEQ ID NO: 99347 - RNA, 19 nt, Artificial Sequence
  Description of Artificial Sequence: Synthetic oligonucleotide
gggcuacaagcuaaccucu

SEQ ID NO: 99348 - RNA, 19 nt, Artificial Sequence
  Description of Artificial Sequence: Synthetic oligonucleotide
acuugacgagguggcucua

SEQ ID NO: 99349 - RNA, 19 nt, Artificial Sequence
  Description of Artificial Sequence: Synthetic oligonucleotide
caacuaggaugcacagcuu

SEQ ID NO: 99350 - RNA, 19 nt, Artificial Sequence
  Description of Artificial Sequence: Synthetic oligonucleotide
ccguuuuaggcaccaacau

SEQ ID NO: 99351 - RNA, 19 nt, Artificial Sequence
  Description of Artificial Sequence: Synthetic oligonucleotide
cuugaccuacgcggauucu

SEQ ID NO: 99352 - RNA, 19 nt, Artificial Sequence
  Description of Artificial Sequence: Synthetic oligonucleotide
ggaaacccgcagcccgcaa

SEQ ID NO: 99353 - RNA, 19 nt, Artificial Sequence
  Description of Artificial Sequence: Synthetic oligonucleotide
cgcuuacaacuacaaagua

SEQ ID NO: 99354 - RNA, 19 nt, Artificial Sequence
  Description of Artificial Sequence: Synthetic oligonucleotide
cgaguucccaagugaaagu

SEQ ID NO: 99355 - RNA, 19 nt, Artificial Sequence
  Description of Artificial Sequence: Synthetic oligonucleotide
ggcuacgcagcuguuucau

SEQ ID NO: 99356 - RNA, 19 nt, Artificial Sequence
  Description of Artificial Sequence: Synthetic oligonucleotide
gcgacgcuacaagguccag

SEQ ID NO: 99357 - RNA, 19 nt, Artificial Sequence
  Description of Artificial Sequence: Synthetic oligonucleotide
ccgacagguggccucuucu

SEQ ID NO: 99358 - RNA, 19 nt, Artificial Sequence
  Description of Artificial Sequence: Synthetic oligonucleotide
gcacgccauaguucauagu

SEQ ID NO: 99359 - RNA, 19 nt, Artificial Sequence
  Description of Artificial Sequence: Synthetic oligonucleotide
ccuacgcggauucuuuguu

SEQ ID NO: 99360 - RNA, 19 nt, Artificial Sequence
  Description of Artificial Sequence: Synthetic oligonucleotide
ccuaaucauuaagcuacuu

SEQ ID NO: 99361 - RNA, 19 nt, Artificial Sequence
  Description of Artificial Sequence: Synthetic oligonucleotide
cgugugugugugugugugu

SEQ ID NO: 99362 - RNA, 19 nt, Artificial Sequence
  Description of Artificial Sequence: Synthetic oligonucleotide
agccgacagguggccucuu

SEQ ID NO: 99363 - RNA, 19 nt, Artificial Sequence
  Description of Artificial Sequence: Synthetic oligonucleotide
cggcaugcacgccauaguu

SEQ ID NO: 99364 - RNA, 19 nt, Artificial Sequence
  Description of Artificial Sequence: Synthetic oligonucleotide
cgacuugaccuacgcggau

SEQ ID NO: 99365 - RNA, 19 nt, Artificial Sequence
  Description of Artificial Sequence: Synthetic oligonucleotide
aacagaagcgcuuagaacg

SEQ ID NO: 99366 - RNA, 19 nt, Artificial Sequence
  Description of Artificial Sequence: Synthetic oligonucleotide
aacauugggacuuuggagg

SEQ ID NO: 99367 - RNA, 19 nt, Artificial Sequence
  Description of Artificial Sequence: Synthetic oligonucleotide
aaacccuucgauaacaugc

SEQ ID NO: 99368 - RNA, 19 nt, Artificial Sequence
  Description of Artificial Sequence: Synthetic oligonucleotide
ugcuauacaaguuuuacag

SEQ ID NO: 99369 - RNA, 19 nt, Artificial Sequence
  Description of Artificial Sequence: Synthetic oligonucleotide
uuuacaagcgcaaagcccc

SEQ ID NO: 99370 - RNA, 19 nt, Artificial Sequence
  Description of Artificial Sequence: Synthetic oligonucleotide
cuauacaaguuuuacaggc

SEQ ID NO: 99371 - RNA, 19 nt, Artificial Sequence
  Description of Artificial Sequence: Synthetic oligonucleotide
auacacacagcguuaaggc

SEQ ID NO: 99372 - RNA, 19 nt, Artificial Sequence
  Description of Artificial Sequence: Synthetic oligonucleotide
ugaauugacacucugcgcu

SEQ ID NO: 99373 - RNA, 19 nt, Artificial Sequence
  Description of Artificial Sequence: Synthetic oligonucleotide
agcggaugaauucauagac

SEQ ID NO: 99374 - RNA, 19 nt, Artificial Sequence
  Description of Artificial Sequence: Synthetic oligonucleotide
uaaucuccaacucucgggg

SEQ ID NO: 99375 - RNA, 19 nt, Artificial Sequence
  Description of Artificial Sequence: Synthetic oligonucleotide
ggugguaugauccugcugg

SEQ ID NO: 99376 - RNA, 19 nt, Artificial Sequence
  Description of Artificial Sequence: Synthetic oligonucleotide
auagucuagccccuggagc

SEQ ID NO: 99377 - RNA, 19 nt, Artificial Sequence
  Description of Artificial Sequence: Synthetic oligonucleotide
gaggcuagaacauugggac

SEQ ID NO: 99378 - RNA, 19 nt, Artificial Sequence
  Description of Artificial Sequence: Synthetic oligonucleotide
aauccacccguccacagag

SEQ ID NO: 99379 - RNA, 19 nt, Artificial Sequence
  Description of Artificial Sequence: Synthetic oligonucleotide
uuauucucaccauucuggg

SEQ ID NO: 99380 - RNA, 19 nt, Artificial Sequence
  Description of Artificial Sequence: Synthetic oligonucleotide
ugcaacuguaagaucacag

SEQ ID NO: 99381 - RNA, 19 nt, Artificial Sequence
  Description of Artificial Sequence: Synthetic oligonucleotide
ucugacuucccagaguugg

SEQ ID NO: 99382 - RNA, 19 nt, Artificial Sequence
  Description of Artificial Sequence: Synthetic oligonucleotide
aguaacccaacucaaguug

SEQ ID NO: 99383 - RNA, 19 nt, Artificial Sequence
  Description of Artificial Sequence: Synthetic oligonucleotide
gaacauugggacuuuggag

SEQ ID NO: 99384 - RNA, 19 nt, Artificial Sequence
  Description of Artificial Sequence: Synthetic oligonucleotide
auggcauuaucuucugggc

SEQ ID NO: 99385 - RNA, 19 nt, Artificial Sequence
  Description of Artificial Sequence: Synthetic oligonucleotide
gagacauacccucaggaug

SEQ ID NO: 99386 - RNA, 19 nt, Artificial Sequence
  Description of Artificial Sequence: Synthetic oligonucleotide
uauugugcggcugugcugg

SEQ ID NO: 99387 - RNA, 19 nt, Artificial Sequence
  Description of Artificial Sequence: Synthetic oligonucleotide
acucuaggagucuuugagc

SEQ ID NO: 99388 - RNA, 19 nt, Artificial Sequence
  Description of Artificial Sequence: Synthetic oligonucleotide
uuagguagcuguaauugcu

SEQ ID NO: 99389 - RNA, 19 nt, Artificial Sequence
  Description of Artificial Sequence: Synthetic oligonucleotide
gaaauggccccugagagcc

SEQ ID NO: 99390 - RNA, 19 nt, Artificial Sequence
  Description of Artificial Sequence: Synthetic oligonucleotide
gggguuaugagacauaccc

SEQ ID NO: 99391 - RNA, 19 nt, Artificial Sequence
  Description of Artificial Sequence: Synthetic oligonucleotide
uuuggugcaucccacauua

SEQ ID NO: 99392 - RNA, 19 nt, Artificial Sequence
  Description of Artificial Sequence: Synthetic oligonucleotide
aucacaaacccuucgauaa

SEQ ID NO: 99393 - RNA, 19 nt, Artificial Sequence
  Description of Artificial Sequence: Synthetic oligonucleotide
cuguuugcuacaaaacacc

SEQ ID NO: 99394 - RNA, 19 nt, Artificial Sequence
  Description of Artificial Sequence: Synthetic oligonucleotide
gauuugggguuucacaaug

SEQ ID NO: 99395 - RNA, 19 nt, Artificial Sequence
  Description of Artificial Sequence: Synthetic oligonucleotide
uugagauuccccaccagca

SEQ ID NO: 99396 - RNA, 19 nt, Artificial Sequence
  Description of Artificial Sequence: Synthetic oligonucleotide
uguguguaaggaugggcgg

SEQ ID NO: 99397 - RNA, 19 nt, Artificial Sequence
  Description of Artificial Sequence: Synthetic oligonucleotide
cugucaguauuuacaagcg

SEQ ID NO: 99398 - RNA, 19 nt, Artificial Sequence
  Description of Artificial Sequence: Synthetic oligonucleotide
cuuucuauuccccagccuc

SEQ ID NO: 99399 - RNA, 19 nt, Artificial Sequence
  Description of Artificial Sequence: Synthetic oligonucleotide
uguuugcuacaaaacaccu

SEQ ID NO: 99400 - RNA, 19 nt, Artificial Sequence
  Description of Artificial Sequence: Synthetic oligonucleotide
gaaguggugucccaugccc

SEQ ID NO: 99401 - RNA, 19 nt, Artificial Sequence
  Description of Artificial Sequence: Synthetic oligonucleotide
cuuagguagcuguaauugc

SEQ ID NO: 99402 - RNA, 19 nt, Artificial Sequence
  Description of Artificial Sequence: Synthetic oligonucleotide
gaguaagcugaaaaggugc

SEQ ID NO: 99403 - RNA, 19 nt, Artificial Sequence
  Description of Artificial Sequence: Synthetic oligonucleotide
caugcgucaggauuugggg

SEQ ID NO: 99404 - RNA, 19 nt, Artificial Sequence
  Description of Artificial Sequence: Synthetic oligonucleotide
cuaaguggcuguuugcuac

SEQ ID NO: 99405 - RNA, 19 nt, Artificial Sequence
  Description of Artificial Sequence: Synthetic oligonucleotide
aacggaagguuagccaggc

SEQ ID NO: 99406 - RNA, 19 nt, Artificial Sequence
  Description of Artificial Sequence: Synthetic oligonucleotide
ugugggcucacuugguagg

SEQ ID NO: 99407 - RNA, 19 nt, Artificial Sequence
  Description of Artificial Sequence: Synthetic oligonucleotide
ggucacauagucuagcccc

SEQ ID NO: 99408 - RNA, 19 nt, Artificial Sequence
  Description of Artificial Sequence: Synthetic oligonucleotide
agacuagccuugcuggccc

SEQ ID NO: 99409 - RNA, 19 nt, Artificial Sequence
  Description of Artificial Sequence: Synthetic oligonucleotide
agcgcaaagccccaucuuc

SEQ ID NO: 99410 - RNA, 19 nt, Artificial Sequence
  Description of Artificial Sequence: Synthetic oligonucleotide
cugaaaaggugcuuacccc

SEQ ID NO: 99411 - RNA, 19 nt, Artificial Sequence
  Description of Artificial Sequence: Synthetic oligonucleotide
guagcuguaauugcuauac

SEQ ID NO: 99412 - RNA, 19 nt, Artificial Sequence
  Description of Artificial Sequence: Synthetic oligonucleotide
ugagauuccccaccagcag

SEQ ID NO: 99413 - RNA, 19 nt, Artificial Sequence
  Description of Artificial Sequence: Synthetic oligonucleotide
ucauagacaucuucuacau

SEQ ID NO: 99414 - RNA, 19 nt, Artificial Sequence
  Description of Artificial Sequence: Synthetic oligonucleotide
uggaccuagaggcauggca

SEQ ID NO: 99415 - RNA, 19 nt, Artificial Sequence
  Description of Artificial Sequence: Synthetic oligonucleotide
uugcuauacaaguuuuaca

SEQ ID NO: 99416 - RNA, 19 nt, Artificial Sequence
  Description of Artificial Sequence: Synthetic oligonucleotide
uggagggaaccucuaaucu

SEQ ID NO: 99417 - RNA, 19 nt, Artificial Sequence
  Description of Artificial Sequence: Synthetic oligonucleotide
uggcuuaugcagaugggca

SEQ ID NO: 99418 - RNA, 19 nt, Artificial Sequence
  Description of Artificial Sequence: Synthetic oligonucleotide
agaacgcuugaacuuguag

SEQ ID NO: 99419 - RNA, 19 nt, Artificial Sequence
  Description of Artificial Sequence: Synthetic oligonucleotide
uaacccaacucaaguuggg

SEQ ID NO: 99420 - RNA, 19 nt, Artificial Sequence
  Description of Artificial Sequence: Synthetic oligonucleotide
agcuguaauugcuauacaa

SEQ ID NO: 99421 - RNA, 19 nt, Artificial Sequence
  Description of Artificial Sequence: Synthetic oligonucleotide
aacccuucgauaacaugcg

SEQ ID NO: 99422 - RNA, 19 nt, Artificial Sequence
  Description of Artificial Sequence: Synthetic oligonucleotide
gagggaaccucuaaucucc

SEQ ID NO: 99423 - RNA, 19 nt, Artificial Sequence
  Description of Artificial Sequence: Synthetic oligonucleotide
aauugacacucugcgcucg

SEQ ID NO: 99424 - RNA, 19 nt, Artificial Sequence
  Description of Artificial Sequence: Synthetic oligonucleotide
uuucuauuccccagccuca

SEQ ID NO: 99425 - RNA, 19 nt, Artificial Sequence
  Description of Artificial Sequence: Synthetic oligonucleotide
caagugugggaguggaagg

SEQ ID NO: 99426 - RNA, 19 nt, Artificial Sequence
  Description of Artificial Sequence: Synthetic oligonucleotide
guaacccaacucaaguugg

SEQ ID NO: 99427 - RNA, 19 nt, Artificial Sequence
  Description of Artificial Sequence: Synthetic oligonucleotide
gguuaugagacauacccuc

SEQ ID NO: 99428 - RNA, 19 nt, Artificial Sequence
  Description of Artificial Sequence: Synthetic oligonucleotide
gaaguaacccaacucaagu

SEQ ID NO: 99429 - RNA, 19 nt, Artificial Sequence
  Description of Artificial Sequence: Synthetic oligonucleotide
aaggugcuuaccccucccg

SEQ ID NO: 99430 - RNA, 19 nt, Artificial Sequence
  Description of Artificial Sequence: Synthetic oligonucleotide
cucggcaccacuuccuucc

SEQ ID NO: 99431 - RNA, 19 nt, Artificial Sequence
  Description of Artificial Sequence: Synthetic oligonucleotide
gagcccugaccauaaaccc

SEQ ID NO: 99432 - RNA, 19 nt, Artificial Sequence
  Description of Artificial Sequence: Synthetic oligonucleotide
acagaagcgcuuagaacgc

SEQ ID NO: 99433 - RNA, 19 nt, Artificial Sequence
  Description of Artificial Sequence: Synthetic oligonucleotide
aaauccacccguccacaga

SEQ ID NO: 99434 - RNA, 19 nt, Artificial Sequence
  Description of Artificial Sequence: Synthetic oligonucleotide
uguaaggaugggcgggcag

SEQ ID NO: 99435 - RNA, 19 nt, Artificial Sequence
  Description of Artificial Sequence: Synthetic oligonucleotide
guaacugaaagggguacag

SEQ ID NO: 99436 - RNA, 19 nt, Artificial Sequence
  Description of Artificial Sequence: Synthetic oligonucleotide
ucccgcaugugcaugucag

SEQ ID NO: 99437 - RNA, 19 nt, Artificial Sequence
  Description of Artificial Sequence: Synthetic oligonucleotide
agaguaagcugaaaaggug

SEQ ID NO: 99438 - RNA, 19 nt, Artificial Sequence
  Description of Artificial Sequence: Synthetic oligonucleotide
agauagggcuccuccaucu

SEQ ID NO: 99439 - RNA, 19 nt, Artificial Sequence
  Description of Artificial Sequence: Synthetic oligonucleotide
caggacaagucagaggcgg

SEQ ID NO: 99440 - RNA, 19 nt, Artificial Sequence
  Description of Artificial Sequence: Synthetic oligonucleotide
uaagugugggcagacuagc

SEQ ID NO: 99441 - RNA, 19 nt, Artificial Sequence
  Description of Artificial Sequence: Synthetic oligonucleotide
gacaacggaagguuagcca

SEQ ID NO: 99442 - RNA, 19 nt, Artificial Sequence
  Description of Artificial Sequence: Synthetic oligonucleotide
agugugggcagacuagccu

SEQ ID NO: 99443 - RNA, 19 nt, Artificial Sequence
  Description of Artificial Sequence: Synthetic oligonucleotide
cgugcguagaucuucaggg

SEQ ID NO: 99444 - RNA, 19 nt, Artificial Sequence
  Description of Artificial Sequence: Synthetic oligonucleotide
ucgguugaugagcugggcu

SEQ ID NO: 99445 - RNA, 19 nt, Artificial Sequence
  Description of Artificial Sequence: Synthetic oligonucleotide
cuaggagucuuugagcaug

SEQ ID NO: 99446 - RNA, 19 nt, Artificial Sequence
  Description of Artificial Sequence: Synthetic oligonucleotide
gacacucugcgcucgguug

SEQ ID NO: 99447 - RNA, 19 nt, Artificial Sequence
  Description of Artificial Sequence: Synthetic oligonucleotide
uggcuguuugcuacaaaac

SEQ ID NO: 99448 - RNA, 19 nt, Artificial Sequence
  Description of Artificial Sequence: Synthetic oligonucleotide
acucguuuggugcauccca

SEQ ID NO: 99449 - RNA, 19 nt, Artificial Sequence
  Description of Artificial Sequence: Synthetic oligonucleotide
ucuauuccccagccucagg

SEQ ID NO: 99450 - RNA, 19 nt, Artificial Sequence
  Description of Artificial Sequence: Synthetic oligonucleotide
cuacaaaacaccuggagau

SEQ ID NO: 99451 - RNA, 19 nt, Artificial Sequence
  Description of Artificial Sequence: Synthetic oligonucleotide
gcuguaauugcuauacaag

SEQ ID NO: 99452 - RNA, 19 nt, Artificial Sequence
  Description of Artificial Sequence: Synthetic oligonucleotide
guugggacgucuuggguac

SEQ ID NO: 99453 - RNA, 19 nt, Artificial Sequence
  Description of Artificial Sequence: Synthetic oligonucleotide
auugggacuuuggaggaag

SEQ ID NO: 99454 - RNA, 19 nt, Artificial Sequence
  Description of Artificial Sequence: Synthetic oligonucleotide
guguguguguguaaggaug

SEQ ID NO: 99455 - RNA, 19 nt, Artificial Sequence
  Description of Artificial Sequence: Synthetic oligonucleotide
acaugcgucaggauuuggg

SEQ ID NO: 99456 - RNA, 19 nt, Artificial Sequence
  Description of Artificial Sequence: Synthetic oligonucleotide
guaaggaugggcgggcagg

SEQ ID NO: 99457 - RNA, 19 nt, Artificial Sequence
  Description of Artificial Sequence: Synthetic oligonucleotide
gagggguuaugagacauac

SEQ ID NO: 99458 - RNA, 19 nt, Artificial Sequence
  Description of Artificial Sequence: Synthetic oligonucleotide
agacauacccucaggaugu

SEQ ID NO: 99459 - RNA, 19 nt, Artificial Sequence
  Description of Artificial Sequence: Synthetic oligonucleotide
ugagcaugcugaugcgugc

SEQ ID NO: 99460 - RNA, 19 nt, Artificial Sequence
  Description of Artificial Sequence: Synthetic oligonucleotide
ucauagcuugaguuaucug

SEQ ID NO: 99461 - RNA, 19 nt, Artificial Sequence
  Description of Artificial Sequence: Synthetic oligonucleotide
gaucacaaacccuucgaua

SEQ ID NO: 99462 - RNA, 19 nt, Artificial Sequence
  Description of Artificial Sequence: Synthetic oligonucleotide
cucguugggacgucuuggg

SEQ ID NO: 99463 - RNA, 19 nt, Artificial Sequence
  Description of Artificial Sequence: Synthetic oligonucleotide
uugguaaggacaggacaag

SEQ ID NO: 99464 - RNA, 19 nt, Artificial Sequence
  Description of Artificial Sequence: Synthetic oligonucleotide
aggugcuuaccccucccgg

SEQ ID NO: 99465 - RNA, 19 nt, Artificial Sequence
  Description of Artificial Sequence: Synthetic oligonucleotide
cuggcuuaugcagaugggc

SEQ ID NO: 99466 - RNA, 19 nt, Artificial Sequence
  Description of Artificial Sequence: Synthetic oligonucleotide
uaggagucuuugagcaugc

SEQ ID NO: 99467 - RNA, 19 nt, Artificial Sequence
  Description of Artificial Sequence: Synthetic oligonucleotide
acaagcgcaaagccccauc

SEQ ID NO: 99468 - RNA, 19 nt, Artificial Sequence
  Description of Artificial Sequence: Synthetic oligonucleotide
gaaccucuaaucuccaacu

SEQ ID NO: 99469 - RNA, 19 nt, Artificial Sequence
  Description of Artificial Sequence: Synthetic oligonucleotide
ugggcaguagggcacugga

SEQ ID NO: 99470 - RNA, 19 nt, Artificial Sequence
  Description of Artificial Sequence: Synthetic oligonucleotide
gaggguguguguguguaag

SEQ ID NO: 99471 - RNA, 19 nt, Artificial Sequence
  Description of Artificial Sequence: Synthetic oligonucleotide
agcccugaccauaaacccc

SEQ ID NO: 99472 - RNA, 19 nt, Artificial Sequence
  Description of Artificial Sequence: Synthetic oligonucleotide
ugccagauugagugaagga

SEQ ID NO: 99473 - RNA, 19 nt, Artificial Sequence
  Description of Artificial Sequence: Synthetic oligonucleotide
gaauugacacucugcgcuc

SEQ ID NO: 99474 - RNA, 19 nt, Artificial Sequence
  Description of Artificial Sequence: Synthetic oligonucleotide
aacucaaguuggggagccc

SEQ ID NO: 99475 - RNA, 19 nt, Artificial Sequence
  Description of Artificial Sequence: Synthetic oligonucleotide
gagcggaugaauucauaga

SEQ ID NO: 99476 - RNA, 19 nt, Artificial Sequence
  Description of Artificial Sequence: Synthetic oligonucleotide
guuaaggcgucugugccug

SEQ ID NO: 99477 - RNA, 19 nt, Artificial Sequence
  Description of Artificial Sequence: Synthetic oligonucleotide
auugacacucugcgcucgg

SEQ ID NO: 99478 - RNA, 19 nt, Artificial Sequence
  Description of Artificial Sequence: Synthetic oligonucleotide
cauacccucaggaugucca

SEQ ID NO: 99479 - RNA, 19 nt, Artificial Sequence
  Description of Artificial Sequence: Synthetic oligonucleotide
agauuccccaccagcaggg

SEQ ID NO: 99480 - RNA, 19 nt, Artificial Sequence
  Description of Artificial Sequence: Synthetic oligonucleotide
cacggagaccuccucacag

SEQ ID NO: 99481 - RNA, 19 nt, Artificial Sequence
  Description of Artificial Sequence: Synthetic oligonucleotide
caaacccuucgauaacaug

SEQ ID NO: 99482 - RNA, 19 nt, Artificial Sequence
  Description of Artificial Sequence: Synthetic oligonucleotide
gucaggaauaccacuguac

SEQ ID NO: 99483 - RNA, 19 nt, Artificial Sequence
  Description of Artificial Sequence: Synthetic oligonucleotide
ggagcccugaccauaaacc

SEQ ID NO: 99484 - RNA, 19 nt, Artificial Sequence
  Description of Artificial Sequence: Synthetic oligonucleotide
ggugcaucccacauuauac

SEQ ID NO: 99485 - RNA, 19 nt, Artificial Sequence
  Description of Artificial Sequence: Synthetic oligonucleotide
gagacucuaggagucuuug

SEQ ID NO: 99486 - RNA, 19 nt, Artificial Sequence
  Description of Artificial Sequence: Synthetic oligonucleotide
aggguguguguguguaagg

SEQ ID NO: 99487 - RNA, 19 nt, Artificial Sequence
  Description of Artificial Sequence: Synthetic oligonucleotide
agggacgagcgucccaccg

SEQ ID NO: 99488 - RNA, 19 nt, Artificial Sequence
  Description of Artificial Sequence: Synthetic oligonucleotide
gauaggugacaaggguucc

SEQ ID NO: 99489 - RNA, 19 nt, Artificial Sequence
  Description of Artificial Sequence: Synthetic oligonucleotide
gaaggagauugggugggag

SEQ ID NO: 99490 - RNA, 19 nt, Artificial Sequence
  Description of Artificial Sequence: Synthetic oligonucleotide
aguaagcugaaaaggugcu

SEQ ID NO: 99491 - RNA, 19 nt, Artificial Sequence
  Description of Artificial Sequence: Synthetic oligonucleotide
aagcgcuuagaacgcuuga

SEQ ID NO: 99492 - RNA, 19 nt, Artificial Sequence
  Description of Artificial Sequence: Synthetic oligonucleotide
ugcagucgcacacuuccuc

SEQ ID NO: 99493 - RNA, 19 nt, Artificial Sequence
  Description of Artificial Sequence: Synthetic oligonucleotide
gaagcgcuuagaacgcuug

SEQ ID NO: 99494 - RNA, 19 nt, Artificial Sequence
  Description of Artificial Sequence: Synthetic oligonucleotide
uuccuugucuguuggccac

SEQ ID NO: 99495 - RNA, 19 nt, Artificial Sequence
  Description of Artificial Sequence: Synthetic oligonucleotide
gaugcgugcguagaucuuc

SEQ ID NO: 99496 - RNA, 19 nt, Artificial Sequence
  Description of Artificial Sequence: Synthetic oligonucleotide
agguauugugcggcugugc

SEQ ID NO: 99497 - RNA, 19 nt, Artificial Sequence
  Description of Artificial Sequence: Synthetic oligonucleotide
gugccggcgaugcuggagg

SEQ ID NO: 99498 - RNA, 19 nt, Artificial Sequence
  Description of Artificial Sequence: Synthetic oligonucleotide
gugguaugauccugcuggg

SEQ ID NO: 99499 - RNA, 19 nt, Artificial Sequence
  Description of Artificial Sequence: Synthetic oligonucleotide
gacaaggguuccucauagc

SEQ ID NO: 99500 - RNA, 19 nt, Artificial Sequence
  Description of Artificial Sequence: Synthetic oligonucleotide
acauacccucaggaugucc

SEQ ID NO: 99501 - RNA, 19 nt, Artificial Sequence
  Description of Artificial Sequence: Synthetic oligonucleotide
gcuguuugcuacaaaacac

SEQ ID NO: 99502 - RNA, 19 nt, Artificial Sequence
  Description of Artificial Sequence: Synthetic oligonucleotide
aguaacugaaagggguaca

SEQ ID NO: 99503 - RNA, 19 nt, Artificial Sequence
  Description of Artificial Sequence: Synthetic oligonucleotide
uucuauuccccagccucag

SEQ ID NO: 99504 - RNA, 19 nt, Artificial Sequence
  Description of Artificial Sequence: Synthetic oligonucleotide
uuacaagcgcaaagcccca

SEQ ID NO: 99505 - RNA, 19 nt, Artificial Sequence
  Description of Artificial Sequence: Synthetic oligonucleotide
gagcaugcugaugcgugcg

SEQ ID NO: 99506 - RNA, 19 nt, Artificial Sequence
  Description of Artificial Sequence: Synthetic oligonucleotide
cugccggucaggaauacca

SEQ ID NO: 99507 - RNA, 19 nt, Artificial Sequence
  Description of Artificial Sequence: Synthetic oligonucleotide
caggauuugggguuucaca

SEQ ID NO: 99508 - RNA, 19 nt, Artificial Sequence
  Description of Artificial Sequence: Synthetic oligonucleotide
cucguuuggugcaucccac

SEQ ID NO: 99509 - RNA, 19 nt, Artificial Sequence
  Description of Artificial Sequence: Synthetic oligonucleotide
ucccagaaaccuccugcca

SEQ ID NO: 99510 - RNA, 19 nt, Artificial Sequence
  Description of Artificial Sequence: Synthetic oligonucleotide
aacaugcgucaggauuugg

SEQ ID NO: 99511 - RNA, 19 nt, Artificial Sequence
  Description of Artificial Sequence: Synthetic oligonucleotide
uggugguaugauccugcug

SEQ ID NO: 99512 - RNA, 19 nt, Artificial Sequence
  Description of Artificial Sequence: Synthetic oligonucleotide
ggaacagaagcgcuuagaa

SEQ ID NO: 99513 - RNA, 19 nt, Artificial Sequence
  Description of Artificial Sequence: Synthetic oligonucleotide
gcuccggucagagugaaag

SEQ ID NO: 99514 - RNA, 19 nt, Artificial Sequence
  Description of Artificial Sequence: Synthetic oligonucleotide
uagcuguaauugcuauaca

SEQ ID NO: 99515 - RNA, 19 nt, Artificial Sequence
  Description of Artificial Sequence: Synthetic oligonucleotide
ugggacuuuggaggaagcc

SEQ ID NO: 99516 - RNA, 19 nt, Artificial Sequence
  Description of Artificial Sequence: Synthetic oligonucleotide
ccuuagguagcuguaauug

SEQ ID NO: 99517 - RNA, 19 nt, Artificial Sequence
  Description of Artificial Sequence: Synthetic oligonucleotide
guauugugcggcugugcug

SEQ ID NO: 99518 - RNA, 19 nt, Artificial Sequence
  Description of Artificial Sequence: Synthetic oligonucleotide
ggcugcaacuguaagauca

SEQ ID NO: 99519 - RNA, 19 nt, Artificial Sequence
  Description of Artificial Sequence: Synthetic oligonucleotide
gcaggcacggccaaacugg

SEQ ID NO: 99520 - RNA, 19 nt, Artificial Sequence
  Description of Artificial Sequence: Synthetic oligonucleotide
ggucccucuggccuugucg

SEQ ID NO: 99521 - RNA, 19 nt, Artificial Sequence
  Description of Artificial Sequence: Synthetic oligonucleotide
cauuuccaacccugccugg

SEQ ID NO: 99522 - RNA, 19 nt, Artificial Sequence
  Description of Artificial Sequence: Synthetic oligonucleotide
gaaagagucccacucguuu

SEQ ID NO: 99523 - RNA, 19 nt, Artificial Sequence
  Description of Artificial Sequence: Synthetic oligonucleotide
uccuuagguagcuguaauu

SEQ ID NO: 99524 - RNA, 19 nt, Artificial Sequence
  Description of Artificial Sequence: Synthetic oligonucleotide
ucggucagugcaugaacaa

SEQ ID NO: 99525 - RNA, 19 nt, Artificial Sequence
  Description of Artificial Sequence: Synthetic oligonucleotide
aaguacuuccuugucuguu

SEQ ID NO: 99526 - RNA, 19 nt, Artificial Sequence
  Description of Artificial Sequence: Synthetic oligonucleotide
uggaaccuucgcugagggg

SEQ ID NO: 99527 - RNA, 19 nt, Artificial Sequence
  Description of Artificial Sequence: Synthetic oligonucleotide
acuaaguggcuguuugcua

SEQ ID NO: 99528 - RNA, 19 nt, Artificial Sequence
  Description of Artificial Sequence: Synthetic oligonucleotide
ggaaguaacccaacucaag

SEQ ID NO: 99529 - RNA, 19 nt, Artificial Sequence
  Description of Artificial Sequence: Synthetic oligonucleotide
acagaaaucuggggugcag

SEQ ID NO: 99530 - RNA, 19 nt, Artificial Sequence
  Description of Artificial Sequence: Synthetic oligonucleotide
ucuaggagucuuugagcau

SEQ ID NO: 99531 - RNA, 19 nt, Artificial Sequence
  Description of Artificial Sequence: Synthetic oligonucleotide
accggcuggagucuuccug

SEQ ID NO: 99532 - RNA, 19 nt, Artificial Sequence
  Description of Artificial Sequence: Synthetic oligonucleotide
ucaaguuggggagcccuga

SEQ ID NO: 99533 - RNA, 19 nt, Artificial Sequence
  Description of Artificial Sequence: Synthetic oligonucleotide
cagguaagucaugggaggc

SEQ ID NO: 99534 - RNA, 19 nt, Artificial Sequence
  Description of Artificial Sequence: Synthetic oligonucleotide
agguagcuguaauugcuau

SEQ ID NO: 99535 - RNA, 19 nt, Artificial Sequence
  Description of Artificial Sequence: Synthetic oligonucleotide
caacucaaguuggggagcc

SEQ ID NO: 99536 - RNA, 19 nt, Artificial Sequence
  Description of Artificial Sequence: Synthetic oligonucleotide
aggcgucugugccugcagg

SEQ ID NO: 99537 - RNA, 19 nt, Artificial Sequence
  Description of Artificial Sequence: Synthetic oligonucleotide
gagauugggugggagccug

SEQ ID NO: 99538 - RNA, 19 nt, Artificial Sequence
  Description of Artificial Sequence: Synthetic oligonucleotide
agacucuaggagucuuuga

SEQ ID NO: 99539 - RNA, 19 nt, Artificial Sequence
  Description of Artificial Sequence: Synthetic oligonucleotide
aggcagaguuuccguuccc

SEQ ID NO: 99540 - RNA, 19 nt, Artificial Sequence
  Description of Artificial Sequence: Synthetic oligonucleotide
ucguuuggugcaucccaca

SEQ ID NO: 99541 - RNA, 19 nt, Artificial Sequence
  Description of Artificial Sequence: Synthetic oligonucleotide
aggacaagucagaggcggc

SEQ ID NO: 99542 - RNA, 19 nt, Artificial Sequence
  Description of Artificial Sequence: Synthetic oligonucleotide
ggacgucuuggguacaggc

SEQ ID NO: 99543 - RNA, 19 nt, Artificial Sequence
  Description of Artificial Sequence: Synthetic oligonucleotide
agaaccccugugcauacuu

SEQ ID NO: 99544 - RNA, 19 nt, Artificial Sequence
  Description of Artificial Sequence: Synthetic oligonucleotide
caguaacugaaagggguac

SEQ ID NO: 99545 - RNA, 19 nt, Artificial Sequence
  Description of Artificial Sequence: Synthetic oligonucleotide
uaacaugcgucaggauuug

SEQ ID NO: 99546 - RNA, 19 nt, Artificial Sequence
  Description of Artificial Sequence: Synthetic oligonucleotide
agaggcggccugcccuucc

SEQ ID NO: 99547 - RNA, 19 nt, Artificial Sequence
  Description of Artificial Sequence: Synthetic oligonucleotide
gagggcaacucacggccug

SEQ ID NO: 99548 - RNA, 19 nt, Artificial Sequence
  Description of Artificial Sequence: Synthetic oligonucleotide
ucccagaguugguaaggac

SEQ ID NO: 99549 - RNA, 19 nt, Artificial Sequence
  Description of Artificial Sequence: Synthetic oligonucleotide
cuucgauaacaugcgucag

SEQ ID NO: 99550 - RNA, 19 nt, Artificial Sequence
  Description of Artificial Sequence: Synthetic oligonucleotide
acacucugcgcucgguuga

SEQ ID NO: 99551 - RNA, 19 nt, Artificial Sequence
  Description of Artificial Sequence: Synthetic oligonucleotide
cacuugguaggaaguggug

SEQ ID NO: 99552 - RNA, 19 nt, Artificial Sequence
  Description of Artificial Sequence: Synthetic oligonucleotide
aggcuagaacauugggacu

SEQ ID NO: 99553 - RNA, 19 nt, Artificial Sequence
  Description of Artificial Sequence: Synthetic oligonucleotide
ucguugggacgucuugggu

SEQ ID NO: 99554 - RNA, 19 nt, Artificial Sequence
  Description of Artificial Sequence: Synthetic oligonucleotide
gagcgucccaccgggaaag

SEQ ID NO: 99555 - RNA, 19 nt, Artificial Sequence
  Description of Artificial Sequence: Synthetic oligonucleotide
cccaugcccaccaaguccc

SEQ ID NO: 99556 - RNA, 19 nt, Artificial Sequence
  Description of Artificial Sequence: Synthetic oligonucleotide
ggagggaaccucuaaucuc

SEQ ID NO: 99557 - RNA, 19 nt, Artificial Sequence
  Description of Artificial Sequence: Synthetic oligonucleotide
ccuucgauaacaugcguca

SEQ ID NO: 99558 - RNA, 19 nt, Artificial Sequence
  Description of Artificial Sequence: Synthetic oligonucleotide
gguagaacccuggaugcug

SEQ ID NO: 99559 - RNA, 19 nt, Artificial Sequence
  Description of Artificial Sequence: Synthetic oligonucleotide
caacucucggggucugccc

SEQ ID NO: 99560 - RNA, 19 nt, Artificial Sequence
  Description of Artificial Sequence: Synthetic oligonucleotide
ugccggucaggaauaccac

SEQ ID NO: 99561 - RNA, 19 nt, Artificial Sequence
  Description of Artificial Sequence: Synthetic oligonucleotide
uccccucggcaccacuucc

SEQ ID NO: 99562 - RNA, 19 nt, Artificial Sequence
  Description of Artificial Sequence: Synthetic oligonucleotide
gacgucuuggguacaggca

SEQ ID NO: 99563 - RNA, 19 nt, Artificial Sequence
  Description of Artificial Sequence: Synthetic oligonucleotide
ucguguugcccaagagcac

SEQ ID NO: 99564 - RNA, 19 nt, Artificial Sequence
  Description of Artificial Sequence: Synthetic oligonucleotide
ugacacucugcgcucgguu

SEQ ID NO: 99565 - RNA, 19 nt, Artificial Sequence
  Description of Artificial Sequence: Synthetic oligonucleotide
aacuggaccuagaggcaug

SEQ ID NO: 99566 - RNA, 19 nt, Artificial Sequence
  Description of Artificial Sequence: Synthetic oligonucleotide
gguaaggacaggacaaguc

SEQ ID NO: 99567 - RNA, 19 nt, Artificial Sequence
  Description of Artificial Sequence: Synthetic oligonucleotide
gucucguugggacgucuug

SEQ ID NO: 99568 - RNA, 19 nt, Artificial Sequence
  Description of Artificial Sequence: Synthetic oligonucleotide
ggauucuugcagauagggc

SEQ ID NO: 99569 - RNA, 19 nt, Artificial Sequence
  Description of Artificial Sequence: Synthetic oligonucleotide
cacacagcguuaaggcguc

SEQ ID NO: 99570 - RNA, 19 nt, Artificial Sequence
  Description of Artificial Sequence: Synthetic oligonucleotide
ggacgagcgucccaccggg

SEQ ID NO: 99571 - RNA, 19 nt, Artificial Sequence
  Description of Artificial Sequence: Synthetic oligonucleotide
cugacuacuuccuggcuua

SEQ ID NO: 99572 - RNA, 19 nt, Artificial Sequence
  Description of Artificial Sequence: Synthetic oligonucleotide
ggaggcuagaacauuggga

SEQ ID NO: 99573 - RNA, 19 nt, Artificial Sequence
  Description of Artificial Sequence: Synthetic oligonucleotide
gcagucgcacacuuccucc

SEQ ID NO: 99574 - RNA, 19 nt, Artificial Sequence
  Description of Artificial Sequence: Synthetic oligonucleotide
guaacuggaccuagaggca

SEQ ID NO: 99575 - RNA, 19 nt, Artificial Sequence
  Description of Artificial Sequence: Synthetic oligonucleotide
agguaagucaugggaggcu

SEQ ID NO: 99576 - RNA, 19 nt, Artificial Sequence
  Description of Artificial Sequence: Synthetic oligonucleotide
ucagugguggugguaugau

SEQ ID NO: 99577 - RNA, 19 nt, Artificial Sequence
  Description of Artificial Sequence: Synthetic oligonucleotide
cugcgcucgguugaugagc

SEQ ID NO: 99578 - RNA, 19 nt, Artificial Sequence
  Description of Artificial Sequence: Synthetic oligonucleotide
ugcagguauugugcggcug

SEQ ID NO: 99579 - RNA, 19 nt, Artificial Sequence
  Description of Artificial Sequence: Synthetic oligonucleotide
gggcagacuagccuugcug

SEQ ID NO: 99580 - RNA, 19 nt, Artificial Sequence
  Description of Artificial Sequence: Synthetic oligonucleotide
cucugcgcucgguugauga

SEQ ID NO: 99581 - RNA, 19 nt, Artificial Sequence
  Description of Artificial Sequence: Synthetic oligonucleotide
gucggucagugcaugaaca

SEQ ID NO: 99582 - RNA, 19 nt, Artificial Sequence
  Description of Artificial Sequence: Synthetic oligonucleotide
ggaaccuucgcugaggggu

SEQ ID NO: 99583 - RNA, 19 nt, Artificial Sequence
  Description of Artificial Sequence: Synthetic oligonucleotide
aggugugcuggaaccuucg

SEQ ID NO: 99584 - RNA, 19 nt, Artificial Sequence
  Description of Artificial Sequence: Synthetic oligonucleotide
ucacauagucuagccccug

SEQ ID NO: 99585 - RNA, 19 nt, Artificial Sequence
  Description of Artificial Sequence: Synthetic oligonucleotide
uaaggcgucugugccugca

SEQ ID NO: 99586 - RNA, 19 nt, Artificial Sequence
  Description of Artificial Sequence: Synthetic oligonucleotide
aggcacggagaccuccuca

SEQ ID NO: 99587 - RNA, 19 nt, Artificial Sequence
  Description of Artificial Sequence: Synthetic oligonucleotide
caagucagaggcggccugc

SEQ ID NO: 99588 - RNA, 19 nt, Artificial Sequence
  Description of Artificial Sequence: Synthetic oligonucleotide
caccccuagggagagcccc

SEQ ID NO: 99589 - RNA, 19 nt, Artificial Sequence
  Description of Artificial Sequence: Synthetic oligonucleotide
ugaggguguguguguguaa

SEQ ID NO: 99590 - RNA, 19 nt, Artificial Sequence
  Description of Artificial Sequence: Synthetic oligonucleotide
ggacacacugccaguuugg

SEQ ID NO: 99591 - RNA, 19 nt, Artificial Sequence
  Description of Artificial Sequence: Synthetic oligonucleotide
ucugccggucaggaauacc

SEQ ID NO: 99592 - RNA, 19 nt, Artificial Sequence
  Description of Artificial Sequence: Synthetic oligonucleotide
cuugcuccggucagaguga

SEQ ID NO: 99593 - RNA, 19 nt, Artificial Sequence
  Description of Artificial Sequence: Synthetic oligonucleotide
cagucauacacacagcguu

SEQ ID NO: 99594 - RNA, 19 nt, Artificial Sequence
  Description of Artificial Sequence: Synthetic oligonucleotide
cagguguaacuggaccuag

SEQ ID NO: 99595 - RNA, 19 nt, Artificial Sequence
  Description of Artificial Sequence: Synthetic oligonucleotide
ccggcuggagucuuccugg

SEQ ID NO: 99596 - RNA, 19 nt, Artificial Sequence
  Description of Artificial Sequence: Synthetic oligonucleotide
cugaugcgugcguagaucu

SEQ ID NO: 99597 - RNA, 19 nt, Artificial Sequence
  Description of Artificial Sequence: Synthetic oligonucleotide
ugcuuaccccucccgggaa

SEQ ID NO: 99598 - RNA, 19 nt, Artificial Sequence
  Description of Artificial Sequence: Synthetic oligonucleotide
auacccucaggauguccau

SEQ ID NO: 99599 - RNA, 19 nt, Artificial Sequence
  Description of Artificial Sequence: Synthetic oligonucleotide
cuugguaagugugggcaga

SEQ ID NO: 99600 - RNA, 19 nt, Artificial Sequence
  Description of Artificial Sequence: Synthetic oligonucleotide
acccuucgauaacaugcgu

SEQ ID NO: 99601 - RNA, 19 nt, Artificial Sequence
  Description of Artificial Sequence: Synthetic oligonucleotide
gugcaugaacaaugcccug

SEQ ID NO: 99602 - RNA, 19 nt, Artificial Sequence
  Description of Artificial Sequence: Synthetic oligonucleotide
guuuggugugaggagaccu

SEQ ID NO: 99603 - RNA, 19 nt, Artificial Sequence
  Description of Artificial Sequence: Synthetic oligonucleotide
cagugguggugguaugauc

SEQ ID NO: 99604 - RNA, 19 nt, Artificial Sequence
  Description of Artificial Sequence: Synthetic oligonucleotide
uuguggguuguggucccug

SEQ ID NO: 99605 - RNA, 19 nt, Artificial Sequence
  Description of Artificial Sequence: Synthetic oligonucleotide
gguauugugcggcugugcu

SEQ ID NO: 99606 - RNA, 19 nt, Artificial Sequence
  Description of Artificial Sequence: Synthetic oligonucleotide
ugucucguugggacgucuu

SEQ ID NO: 99607 - RNA, 19 nt, Artificial Sequence
  Description of Artificial Sequence: Synthetic oligonucleotide
ggggagaagcugacaacgg

SEQ ID NO: 99608 - RNA, 19 nt, Artificial Sequence
  Description of Artificial Sequence: Synthetic oligonucleotide
ugaugcgugcguagaucuu

SEQ ID NO: 99609 - RNA, 19 nt, Artificial Sequence
  Description of Artificial Sequence: Synthetic oligonucleotide
guagggugggccuggccga

SEQ ID NO: 99610 - RNA, 19 nt, Artificial Sequence
  Description of Artificial Sequence: Synthetic oligonucleotide
uguugcugugcggcgugca

SEQ ID NO: 99611 - RNA, 19 nt, Artificial Sequence
  Description of Artificial Sequence: Synthetic oligonucleotide
cacucguuuggugcauccc

SEQ ID NO: 99612 - RNA, 19 nt, Artificial Sequence
  Description of Artificial Sequence: Synthetic oligonucleotide
ugagcaccggcuggagucu

SEQ ID NO: 99613 - RNA, 19 nt, Artificial Sequence
  Description of Artificial Sequence: Synthetic oligonucleotide
ggagcugcgcacugcugag

SEQ ID NO: 99614 - RNA, 19 nt, Artificial Sequence
  Description of Artificial Sequence: Synthetic oligonucleotide
ggucggucagugcaugaac

SEQ ID NO: 99615 - RNA, 19 nt, Artificial Sequence
  Description of Artificial Sequence: Synthetic oligonucleotide
gcuggaaccuucgcugagg

SEQ ID NO: 99616 - RNA, 19 nt, Artificial Sequence
  Description of Artificial Sequence: Synthetic oligonucleotide
ucgggagguggaugagcug

SEQ ID NO: 99617 - RNA, 19 nt, Artificial Sequence
  Description of Artificial Sequence: Synthetic oligonucleotide
cccuucgauaacaugcguc

SEQ ID NO: 99618 - RNA, 19 nt, Artificial Sequence
  Description of Artificial Sequence: Synthetic oligonucleotide
caacuggcccugucccggg

SEQ ID NO: 99619 - RNA, 19 nt, Artificial Sequence
  Description of Artificial Sequence: Synthetic oligonucleotide
cgcugagggguuaugagac

SEQ ID NO: 99620 - RNA, 19 nt, Artificial Sequence
  Description of Artificial Sequence: Synthetic oligonucleotide
uuaaggcgucugugccugc

SEQ ID NO: 99621 - RNA, 19 nt, Artificial Sequence
  Description of Artificial Sequence: Synthetic oligonucleotide
augggcgggcagguaaguc

SEQ ID NO: 99622 - RNA, 19 nt, Artificial Sequence
  Description of Artificial Sequence: Synthetic oligonucleotide
gguuagccaggccuggaga

SEQ ID NO: 99623 - RNA, 19 nt, Artificial Sequence
  Description of Artificial Sequence: Synthetic oligonucleotide
gugcuuaccccucccggga

SEQ ID NO: 99624 - RNA, 19 nt, Artificial Sequence
  Description of Artificial Sequence: Synthetic oligonucleotide
cacagcguuaaggcgucug

SEQ ID NO: 99625 - RNA, 19 nt, Artificial Sequence
  Description of Artificial Sequence: Synthetic oligonucleotide
cagagcucacacuugaguu

SEQ ID NO: 99626 - RNA, 19 nt, Artificial Sequence
  Description of Artificial Sequence: Synthetic oligonucleotide
ucccucuggccuugucgcc

SEQ ID NO: 99627 - RNA, 19 nt, Artificial Sequence
  Description of Artificial Sequence: Synthetic oligonucleotide
gcagacuagccuugcuggc

SEQ ID NO: 99628 - RNA, 19 nt, Artificial Sequence
  Description of Artificial Sequence: Synthetic oligonucleotide
ccgcaugugcaugucaggg

SEQ ID NO: 99629 - RNA, 19 nt, Artificial Sequence
  Description of Artificial Sequence: Synthetic oligonucleotide
ccuggcuuaugcagauggg

SEQ ID NO: 99630 - RNA, 19 nt, Artificial Sequence
  Description of Artificial Sequence: Synthetic oligonucleotide
augagggugugugugugua

SEQ ID NO: 99631 - RNA, 19 nt, Artificial Sequence
  Description of Artificial Sequence: Synthetic oligonucleotide
ggccugucaguccaggcuc

SEQ ID NO: 99632 - RNA, 19 nt, Artificial Sequence
  Description of Artificial Sequence: Synthetic oligonucleotide
gucagugguggugguauga

SEQ ID NO: 99633 - RNA, 19 nt, Artificial Sequence
  Description of Artificial Sequence: Synthetic oligonucleotide
gucccacucguuuggugca

SEQ ID NO: 99634 - RNA, 19 nt, Artificial Sequence
  Description of Artificial Sequence: Synthetic oligonucleotide
uugcugugcggcgugcauc

SEQ ID NO: 99635 - RNA, 19 nt, Artificial Sequence
  Description of Artificial Sequence: Synthetic oligonucleotide
cuucgcugagggguuauga

SEQ ID NO: 99636 - RNA, 19 nt, Artificial Sequence
  Description of Artificial Sequence: Synthetic oligonucleotide
gaggucggucagugcauga

SEQ ID NO: 99637 - RNA, 19 nt, Artificial Sequence
  Description of Artificial Sequence: Synthetic oligonucleotide
cucauagcuugaguuaucu

SEQ ID NO: 99638 - RNA, 19 nt, Artificial Sequence
  Description of Artificial Sequence: Synthetic oligonucleotide
agagagcggaugaauucau

SEQ ID NO: 99639 - RNA, 19 nt, Artificial Sequence
  Description of Artificial Sequence: Synthetic oligonucleotide
caaggccgccgucugcaac

SEQ ID NO: 99640 - RNA, 19 nt, Artificial Sequence
  Description of Artificial Sequence: Synthetic oligonucleotide
ggguguguguguguaagga

SEQ ID NO: 99641 - RNA, 19 nt, Artificial Sequence
  Description of Artificial Sequence: Synthetic oligonucleotide
ccagaaaccuccugccauc

SEQ ID NO: 99642 - RNA, 19 nt, Artificial Sequence
  Description of Artificial Sequence: Synthetic oligonucleotide
cccuggaugcuguggaaac

SEQ ID NO: 99643 - RNA, 19 nt, Artificial Sequence
  Description of Artificial Sequence: Synthetic oligonucleotide
gcuuagaacgcuugaacuu

SEQ ID NO: 99644 - RNA, 19 nt, Artificial Sequence
  Description of Artificial Sequence: Synthetic oligonucleotide
gguagcuguaauugcuaua

SEQ ID NO: 99645 - RNA, 19 nt, Artificial Sequence
  Description of Artificial Sequence: Synthetic oligonucleotide
ccaacuggcccugucccgg

SEQ ID NO: 99646 - RNA, 19 nt, Artificial Sequence
  Description of Artificial Sequence: Synthetic oligonucleotide
ggagaccuucccagaaacc

SEQ ID NO: 99647 - RNA, 19 nt, Artificial Sequence
  Description of Artificial Sequence: Synthetic oligonucleotide
gggcacggaacuccucugc

SEQ ID NO: 99648 - RNA, 19 nt, Artificial Sequence
  Description of Artificial Sequence: Synthetic oligonucleotide
cuccggucagagugaaaga

SEQ ID NO: 99649 - RNA, 19 nt, Artificial Sequence
  Description of Artificial Sequence: Synthetic oligonucleotide
aggucggucagugcaugaa

SEQ ID NO: 99650 - RNA, 19 nt, Artificial Sequence
  Description of Artificial Sequence: Synthetic oligonucleotide
ccaacucaaguuggggagc

SEQ ID NO: 99651 - RNA, 19 nt, Artificial Sequence
  Description of Artificial Sequence: Synthetic oligonucleotide
gaggcacggagaccuccuc

SEQ ID NO: 99652 - RNA, 19 nt, Artificial Sequence
  Description of Artificial Sequence: Synthetic oligonucleotide
agaagcgcuuagaacgcuu

SEQ ID NO: 99653 - RNA, 19 nt, Artificial Sequence
  Description of Artificial Sequence: Synthetic oligonucleotide
cagguauugugcggcugug

SEQ ID NO: 99654 - RNA, 19 nt, Artificial Sequence
  Description of Artificial Sequence: Synthetic oligonucleotide
cuugguguccuugguaagu

SEQ ID NO: 99655 - RNA, 19 nt, Artificial Sequence
  Description of Artificial Sequence: Synthetic oligonucleotide
gguaggaagugguguccca

SEQ ID NO: 99656 - RNA, 19 nt, Artificial Sequence
  Description of Artificial Sequence: Synthetic oligonucleotide
gcggaugaauucauagaca

SEQ ID NO: 99657 - RNA, 19 nt, Artificial Sequence
  Description of Artificial Sequence: Synthetic oligonucleotide
uacaagcgcaaagccccau

SEQ ID NO: 99658 - RNA, 19 nt, Artificial Sequence
  Description of Artificial Sequence: Synthetic oligonucleotide
gccgccgucugcaacauga

SEQ ID NO: 99659 - RNA, 19 nt, Artificial Sequence
  Description of Artificial Sequence: Synthetic oligonucleotide
gcaagaaccccugugcaua

SEQ ID NO: 99660 - RNA, 19 nt, Artificial Sequence
  Description of Artificial Sequence: Synthetic oligonucleotide
ggcgaugcuggaggcagag

SEQ ID NO: 99661 - RNA, 19 nt, Artificial Sequence
  Description of Artificial Sequence: Synthetic oligonucleotide
ggccuguggugguuuauuc

SEQ ID NO: 99662 - RNA, 19 nt, Artificial Sequence
  Description of Artificial Sequence: Synthetic oligonucleotide
gcgguuguggguugugguc

SEQ ID NO: 99663 - RNA, 19 nt, Artificial Sequence
  Description of Artificial Sequence: Synthetic oligonucleotide
agaucacagcugaggugug

SEQ ID NO: 99664 - RNA, 19 nt, Artificial Sequence
  Description of Artificial Sequence: Synthetic oligonucleotide
ggaaugucuguguggcucu

SEQ ID NO: 99665 - RNA, 19 nt, Artificial Sequence
  Description of Artificial Sequence: Synthetic oligonucleotide
cagggacgagcgucccacc

SEQ ID NO: 99666 - RNA, 19 nt, Artificial Sequence
  Description of Artificial Sequence: Synthetic oligonucleotide
gcagggacgagcgucccac

SEQ ID NO: 99667 - RNA, 19 nt, Artificial Sequence
  Description of Artificial Sequence: Synthetic oligonucleotide
ggaucacaaacccuucgau

SEQ ID NO: 99668 - RNA, 19 nt, Artificial Sequence
  Description of Artificial Sequence: Synthetic oligonucleotide
gucgggagguggaugagcu

SEQ ID NO: 99669 - RNA, 19 nt, Artificial Sequence
  Description of Artificial Sequence: Synthetic oligonucleotide
ugggcucacuugguaggaa

SEQ ID NO: 99670 - RNA, 19 nt, Artificial Sequence
  Description of Artificial Sequence: Synthetic oligonucleotide
cuuaugcagaugggcagua

SEQ ID NO: 99671 - RNA, 19 nt, Artificial Sequence
  Description of Artificial Sequence: Synthetic oligonucleotide
caccuaccucucuucccuc

SEQ ID NO: 99672 - RNA, 19 nt, Artificial Sequence
  Description of Artificial Sequence: Synthetic oligonucleotide
gacauacccucaggauguc

SEQ ID NO: 99673 - RNA, 19 nt, Artificial Sequence
  Description of Artificial Sequence: Synthetic oligonucleotide
ggaacccuggcugccgaug

SEQ ID NO: 99674 - RNA, 19 nt, Artificial Sequence
  Description of Artificial Sequence: Synthetic oligonucleotide
ggugacaaggguuccucau

SEQ ID NO: 99675 - RNA, 19 nt, Artificial Sequence
  Description of Artificial Sequence: Synthetic oligonucleotide
cuugucgccgucgggaggu

SEQ ID NO: 99676 - RNA, 19 nt, Artificial Sequence
  Description of Artificial Sequence: Synthetic oligonucleotide
guagaacccuggaugcugu

SEQ ID NO: 99677 - RNA, 19 nt, Artificial Sequence
  Description of Artificial Sequence: Synthetic oligonucleotide
cacggaacuccucugcaau

SEQ ID NO: 99678 - RNA, 19 nt, Artificial Sequence
  Description of Artificial Sequence: Synthetic oligonucleotide
gguguguguguguaaggau

SEQ ID NO: 99679 - RNA, 19 nt, Artificial Sequence
  Description of Artificial Sequence: Synthetic oligonucleotide
agcgucccaccgggaaagg

SEQ ID NO: 99680 - RNA, 19 nt, Artificial Sequence
  Description of Artificial Sequence: Synthetic oligonucleotide
gggacgucuuggguacagg

SEQ ID NO: 99681 - RNA, 19 nt, Artificial Sequence
  Description of Artificial Sequence: Synthetic oligonucleotide
ugcuccggucagagugaaa

SEQ ID NO: 99682 - RNA, 19 nt, Artificial Sequence
  Description of Artificial Sequence: Synthetic oligonucleotide
gcaguaacugaaaggggua

SEQ ID NO: 99683 - RNA, 19 nt, Artificial Sequence
  Description of Artificial Sequence: Synthetic oligonucleotide
agcaccggcuggagucuuc

SEQ ID NO: 99684 - RNA, 19 nt, Artificial Sequence
  Description of Artificial Sequence: Synthetic oligonucleotide
agucugccggucaggaaua

SEQ ID NO: 99685 - RNA, 19 nt, Artificial Sequence
  Description of Artificial Sequence: Synthetic oligonucleotide
gugggcucacuugguagga

SEQ ID NO: 99686 - RNA, 19 nt, Artificial Sequence
  Description of Artificial Sequence: Synthetic oligonucleotide
gcagguauugugcggcugu

SEQ ID NO: 99687 - RNA, 19 nt, Artificial Sequence
  Description of Artificial Sequence: Synthetic oligonucleotide
ggaccuagaggcauggcau

SEQ ID NO: 99688 - RNA, 19 nt, Artificial Sequence
  Description of Artificial Sequence: Synthetic oligonucleotide
gccgauggggcagugggca

SEQ ID NO: 99689 - RNA, 19 nt, Artificial Sequence
  Description of Artificial Sequence: Synthetic oligonucleotide
ccggcgaugcuggaggcag

SEQ ID NO: 99690 - RNA, 19 nt, Artificial Sequence
  Description of Artificial Sequence: Synthetic oligonucleotide
cggaugaauucauagacau

SEQ ID NO: 99691 - RNA, 19 nt, Artificial Sequence
  Description of Artificial Sequence: Synthetic oligonucleotide
guaggaaguggugucccau

SEQ ID NO: 99692 - RNA, 19 nt, Artificial Sequence
  Description of Artificial Sequence: Synthetic oligonucleotide
gggcaguagggcacuggag

SEQ ID NO: 99693 - RNA, 19 nt, Artificial Sequence
  Description of Artificial Sequence: Synthetic oligonucleotide
gccggaaguacuuccuugu

SEQ ID NO: 99694 - RNA, 19 nt, Artificial Sequence
  Description of Artificial Sequence: Synthetic oligonucleotide
ggauuugggguuucacaau

SEQ ID NO: 99695 - RNA, 19 nt, Artificial Sequence
  Description of Artificial Sequence: Synthetic oligonucleotide
uccguucccugaggucaug

SEQ ID NO: 99696 - RNA, 19 nt, Artificial Sequence
  Description of Artificial Sequence: Synthetic oligonucleotide
cguucccugaggucaugcc

SEQ ID NO: 99697 - RNA, 19 nt, Artificial Sequence
  Description of Artificial Sequence: Synthetic oligonucleotide
cugagggguuaugagacau

SEQ ID NO: 99698 - RNA, 19 nt, Artificial Sequence
  Description of Artificial Sequence: Synthetic oligonucleotide
aaccuucgcugagggguua

SEQ ID NO: 99699 - RNA, 19 nt, Artificial Sequence
  Description of Artificial Sequence: Synthetic oligonucleotide
ccgggaagagucugacuuc

SEQ ID NO: 99700 - RNA, 19 nt, Artificial Sequence
  Description of Artificial Sequence: Synthetic oligonucleotide
guguaaggaugggcgggca

SEQ ID NO: 99701 - RNA, 19 nt, Artificial Sequence
  Description of Artificial Sequence: Synthetic oligonucleotide
ccuugucgccgucgggagg

SEQ ID NO: 99702 - RNA, 19 nt, Artificial Sequence
  Description of Artificial Sequence: Synthetic oligonucleotide
caugagggugugugugugu

SEQ ID NO: 99703 - RNA, 19 nt, Artificial Sequence
  Description of Artificial Sequence: Synthetic oligonucleotide
acucugcgcucgguugaug

SEQ ID NO: 99704 - RNA, 19 nt, Artificial Sequence
  Description of Artificial Sequence: Synthetic oligonucleotide
guaagcugaaaaggugcuu

SEQ ID NO: 99705 - RNA, 19 nt, Artificial Sequence
  Description of Artificial Sequence: Synthetic oligonucleotide
ggguuaugagacauacccu

SEQ ID NO: 99706 - RNA, 19 nt, Artificial Sequence
  Description of Artificial Sequence: Synthetic oligonucleotide
cgucugcaacaugaggugc

SEQ ID NO: 99707 - RNA, 19 nt, Artificial Sequence
  Description of Artificial Sequence: Synthetic oligonucleotide
ggcaagaaccccugugcau

SEQ ID NO: 99708 - RNA, 19 nt, Artificial Sequence
  Description of Artificial Sequence: Synthetic oligonucleotide
ggcccggcggcgguugugg

SEQ ID NO: 99709 - RNA, 19 nt, Artificial Sequence
  Description of Artificial Sequence: Synthetic oligonucleotide
cgcuuagaacgcuugaacu

SEQ ID NO: 99710 - RNA, 19 nt, Artificial Sequence
  Description of Artificial Sequence: Synthetic oligonucleotide
gcggcgugcaucugcugca

SEQ ID NO: 99711 - RNA, 19 nt, Artificial Sequence
  Description of Artificial Sequence: Synthetic oligonucleotide
gguaagucaugggaggcuu

SEQ ID NO: 99712 - RNA, 19 nt, Artificial Sequence
  Description of Artificial Sequence: Synthetic oligonucleotide
cguugggacgucuugggua

SEQ ID NO: 99713 - RNA, 19 nt, Artificial Sequence
  Description of Artificial Sequence: Synthetic oligonucleotide
accccuagggagagccccu

SEQ ID NO: 99714 - RNA, 19 nt, Artificial Sequence
  Description of Artificial Sequence: Synthetic oligonucleotide
cccgggaagagucugacuu

SEQ ID NO: 99715 - RNA, 19 nt, Artificial Sequence
  Description of Artificial Sequence: Synthetic oligonucleotide
gucugccggucaggaauac

SEQ ID NO: 99716 - RNA, 19 nt, Artificial Sequence
  Description of Artificial Sequence: Synthetic oligonucleotide
gaaccuucgcugagggguu

SEQ ID NO: 99717 - RNA, 19 nt, Artificial Sequence
  Description of Artificial Sequence: Synthetic oligonucleotide
gaugggcgggcagguaagu

SEQ ID NO: 99718 - RNA, 19 nt, Artificial Sequence
  Description of Artificial Sequence: Synthetic oligonucleotide
uugucgccgucgggaggug

SEQ ID NO: 99719 - RNA, 19 nt, Artificial Sequence
  Description of Artificial Sequence: Synthetic oligonucleotide
ggccaaacugggcccagcu

SEQ ID NO: 99720 - RNA, 19 nt, Artificial Sequence
  Description of Artificial Sequence: Synthetic oligonucleotide
caggaaugucuguguggcu

SEQ ID NO: 99721 - RNA, 19 nt, Artificial Sequence
  Description of Artificial Sequence: Synthetic oligonucleotide
ccgccgucugcaacaugag

SEQ ID NO: 99722 - RNA, 19 nt, Artificial Sequence
  Description of Artificial Sequence: Synthetic oligonucleotide
ccguucccugaggucaugc

SEQ ID NO: 99723 - RNA, 19 nt, Artificial Sequence
  Description of Artificial Sequence: Synthetic oligonucleotide
uggcugccgauggggcagu

SEQ ID NO: 99724 - RNA, 19 nt, Artificial Sequence
  Description of Artificial Sequence: Synthetic oligonucleotide
gacgagcgucccaccggga

SEQ ID NO: 99725 - RNA, 19 nt, Artificial Sequence
  Description of Artificial Sequence: Synthetic oligonucleotide
ggcagaguuuccguucccu

SEQ ID NO: 99726 - RNA, 19 nt, Artificial Sequence
  Description of Artificial Sequence: Synthetic oligonucleotide
uggcccggcggcgguugug

SEQ ID NO: 99727 - RNA, 19 nt, Artificial Sequence
  Description of Artificial Sequence: Synthetic oligonucleotide
gcgucugugccugcaggca

SEQ ID NO: 99728 - RNA, 19 nt, Artificial Sequence
  Description of Artificial Sequence: Synthetic oligonucleotide
gcgucccaccgggaaaggc

SEQ ID NO: 99729 - RNA, 19 nt, Artificial Sequence
  Description of Artificial Sequence: Synthetic oligonucleotide
aucccacauuauaccuuuu

SEQ ID NO: 99730 - RNA, 19 nt, Artificial Sequence
  Description of Artificial Sequence: Synthetic oligonucleotide
cagaagcgcuuagaacgcu

SEQ ID NO: 99731 - RNA, 19 nt, Artificial Sequence
  Description of Artificial Sequence: Synthetic oligonucleotide
ggagauugggugggagccu

SEQ ID NO: 99732 - RNA, 19 nt, Artificial Sequence
  Description of Artificial Sequence: Synthetic oligonucleotide
gcaugcugaugcgugcgua

SEQ ID NO: 99733 - RNA, 19 nt, Artificial Sequence
  Description of Artificial Sequence: Synthetic oligonucleotide
cagagacucuaggagucuu

SEQ ID NO: 99734 - RNA, 19 nt, Artificial Sequence
  Description of Artificial Sequence: Synthetic oligonucleotide
cugccggaaguacuuccuu

SEQ ID NO: 99735 - RNA, 19 nt, Artificial Sequence
  Description of Artificial Sequence: Synthetic oligonucleotide
gcaucccacauuauaccuu

SEQ ID NO: 99736 - RNA, 19 nt, Artificial Sequence
  Description of Artificial Sequence: Synthetic oligonucleotide
cguuaaggcgucugugccu

SEQ ID NO: 99737 - RNA, 19 nt, Artificial Sequence
  Description of Artificial Sequence: Synthetic oligonucleotide
ggguagaacccuggaugcu

SEQ ID NO: 99738 - RNA, 19 nt, Artificial Sequence
  Description of Artificial Sequence: Synthetic oligonucleotide
ggacuggacuuggggugca

SEQ ID NO: 99739 - RNA, 19 nt, Artificial Sequence
  Description of Artificial Sequence: Synthetic oligonucleotide
ccuggccgagucacaggca

SEQ ID NO: 99740 - RNA, 19 nt, Artificial Sequence
  Description of Artificial Sequence: Synthetic oligonucleotide
gcaccccuagggagagccc

SEQ ID NO: 99741 - RNA, 19 nt, Artificial Sequence
  Description of Artificial Sequence: Synthetic oligonucleotide
ggcgggcagguaagucaug

SEQ ID NO: 99742 - RNA, 19 nt, Artificial Sequence
  Description of Artificial Sequence: Synthetic oligonucleotide
gcgcucgguugaugagcug

SEQ ID NO: 99743 - RNA, 19 nt, Artificial Sequence
  Description of Artificial Sequence: Synthetic oligonucleotide
cugucucguugggacgucu

SEQ ID NO: 99744 - RNA, 19 nt, Artificial Sequence
  Description of Artificial Sequence: Synthetic oligonucleotide
gcaaggccgccgucugcaa

SEQ ID NO: 99745 - RNA, 19 nt, Artificial Sequence
  Description of Artificial Sequence: Synthetic oligonucleotide
cccacucguuuggugcauc

SEQ ID NO: 99746 - RNA, 19 nt, Artificial Sequence
  Description of Artificial Sequence: Synthetic oligonucleotide
cagugccuccagccagucu

SEQ ID NO: 99747 - RNA, 19 nt, Artificial Sequence
  Description of Artificial Sequence: Synthetic oligonucleotide
gggcgggcagguaagucau

SEQ ID NO: 99748 - RNA, 19 nt, Artificial Sequence
  Description of Artificial Sequence: Synthetic oligonucleotide
ccugucucguugggacguc

SEQ ID NO: 99749 - RNA, 19 nt, Artificial Sequence
  Description of Artificial Sequence: Synthetic oligonucleotide
ccgucgggagguggaugag

SEQ ID NO: 99750 - RNA, 19 nt, Artificial Sequence
  Description of Artificial Sequence: Synthetic oligonucleotide
ccagugcugucaguauuua

SEQ ID NO: 99751 - RNA, 19 nt, Artificial Sequence
  Description of Artificial Sequence: Synthetic oligonucleotide
caccggcuggagucuuccu

SEQ ID NO: 99752 - RNA, 19 nt, Artificial Sequence
  Description of Artificial Sequence: Synthetic oligonucleotide
cgagcgucccaccgggaaa

SEQ ID NO: 99753 - RNA, 19 nt, Artificial Sequence
  Description of Artificial Sequence: Synthetic oligonucleotide
ccuagaggcauggcauuau

SEQ ID NO: 99754 - RNA, 19 nt, Artificial Sequence
  Description of Artificial Sequence: Synthetic oligonucleotide
cccugucucguugggacgu

SEQ ID NO: 99755 - RNA, 19 nt, Artificial Sequence
  Description of Artificial Sequence: Synthetic oligonucleotide
ggcugccgauggggcagug

SEQ ID NO: 99756 - RNA, 19 nt, Artificial Sequence
  Description of Artificial Sequence: Synthetic oligonucleotide
gagcaccggcuggagucuu

SEQ ID NO: 99757 - RNA, 19 nt, Artificial Sequence
  Description of Artificial Sequence: Synthetic oligonucleotide
cggccaaacugggcccagc

SEQ ID NO: 99758 - RNA, 19 nt, Artificial Sequence
  Description of Artificial Sequence: Synthetic oligonucleotide
cgccgucgggagguggaug

SEQ ID NO: 99759 - RNA, 19 nt, Artificial Sequence
  Description of Artificial Sequence: Synthetic oligonucleotide
gcgaugcuggaggcagagu

SEQ ID NO: 99760 - RNA, 19 nt, Artificial Sequence
  Description of Artificial Sequence: Synthetic oligonucleotide
ggcggcgguuguggguugu

SEQ ID NO: 99761 - RNA, 19 nt, Artificial Sequence
  Description of Artificial Sequence: Synthetic oligonucleotide
cccgaggcuguggcugaau

SEQ ID NO: 99762 - RNA, 19 nt, Artificial Sequence
  Description of Artificial Sequence: Synthetic oligonucleotide
aagaccgggacacagaggc

SEQ ID NO: 99763 - RNA, 19 nt, Artificial Sequence
  Description of Artificial Sequence: Synthetic oligonucleotide
acagaagucagacugcucc

SEQ ID NO: 99764 - RNA, 19 nt, Artificial Sequence
  Description of Artificial Sequence: Synthetic oligonucleotide
ucuuguuugaacuggaugc

SEQ ID NO: 99765 - RNA, 19 nt, Artificial Sequence
  Description of Artificial Sequence: Synthetic oligonucleotide
auuaauagccuucacguuc

SEQ ID NO: 99766 - RNA, 19 nt, Artificial Sequence
  Description of Artificial Sequence: Synthetic oligonucleotide
aaagaagauagcaagagug

SEQ ID NO: 99767 - RNA, 19 nt, Artificial Sequence
  Description of Artificial Sequence: Synthetic oligonucleotide
ugauuaauagccuucacgu

SEQ ID NO: 99768 - RNA, 19 nt, Artificial Sequence
  Description of Artificial Sequence: Synthetic oligonucleotide
gauaucuccacaaaggcgc

SEQ ID NO: 99769 - RNA, 19 nt, Artificial Sequence
  Description of Artificial Sequence: Synthetic oligonucleotide
caacguugcaccaacagcg

SEQ ID NO: 99770 - RNA, 19 nt, Artificial Sequence
  Description of Artificial Sequence: Synthetic oligonucleotide
ucgagauccauacucauug

SEQ ID NO: 99771 - RNA, 19 nt, Artificial Sequence
  Description of Artificial Sequence: Synthetic oligonucleotide
uccacuacggccaaugacc

SEQ ID NO: 99772 - RNA, 19 nt, Artificial Sequence
  Description of Artificial Sequence: Synthetic oligonucleotide
auuaucauggaacuguccu

SEQ ID NO: 99773 - RNA, 19 nt, Artificial Sequence
  Description of Artificial Sequence: Synthetic oligonucleotide
uauaucauuuaauagguuu

SEQ ID NO: 99774 - RNA, 19 nt, Artificial Sequence
  Description of Artificial Sequence: Synthetic oligonucleotide
aaagugaaccgcuucccuc

SEQ ID NO: 99775 - RNA, 19 nt, Artificial Sequence
  Description of Artificial Sequence: Synthetic oligonucleotide
acaacguugcaccaacagc

SEQ ID NO: 99776 - RNA, 19 nt, Artificial Sequence
  Description of Artificial Sequence: Synthetic oligonucleotide
gaccaauccacacuugugg

SEQ ID NO: 99777 - RNA, 19 nt, Artificial Sequence
  Description of Artificial Sequence: Synthetic oligonucleotide
cugauuaauagccuucacg

SEQ ID NO: 99778 - RNA, 19 nt, Artificial Sequence
  Description of Artificial Sequence: Synthetic oligonucleotide
aguaaugggaguaguaggc

SEQ ID NO: 99779 - RNA, 19 nt, Artificial Sequence
  Description of Artificial Sequence: Synthetic oligonucleotide
aauguuccaacucuaacua

SEQ ID NO: 99780 - RNA, 19 nt, Artificial Sequence
  Description of Artificial Sequence: Synthetic oligonucleotide
uaguaaugggaguaguagg

SEQ ID NO: 99781 - RNA, 19 nt, Artificial Sequence
  Description of Artificial Sequence: Synthetic oligonucleotide
aagaauagggccccgggca

SEQ ID NO: 99782 - RNA, 19 nt, Artificial Sequence
  Description of Artificial Sequence: Synthetic oligonucleotide
gagauaucuccacaaaggc

SEQ ID NO: 99783 - RNA, 19 nt, Artificial Sequence
  Description of Artificial Sequence: Synthetic oligonucleotide
ugaucaucucuccacuacg

SEQ ID NO: 99784 - RNA, 19 nt, Artificial Sequence
  Description of Artificial Sequence: Synthetic oligonucleotide
ucucucaccaaaccaauca

SEQ ID NO: 99785 - RNA, 19 nt, Artificial Sequence
  Description of Artificial Sequence: Synthetic oligonucleotide
ugucccgucaucuuguuug

SEQ ID NO: 99786 - RNA, 19 nt, Artificial Sequence
  Description of Artificial Sequence: Synthetic oligonucleotide
aagugcacacaaaaggugg

SEQ ID NO: 99787 - RNA, 19 nt, Artificial Sequence
  Description of Artificial Sequence: Synthetic oligonucleotide
cagauuuugagcgagcggg

SEQ ID NO: 99788 - RNA, 19 nt, Artificial Sequence
  Description of Artificial Sequence: Synthetic oligonucleotide
uuuaauagguuuuguucug

SEQ ID NO: 99789 - RNA, 19 nt, Artificial Sequence
  Description of Artificial Sequence: Synthetic oligonucleotide
uaucauggaacuguccugg

SEQ ID NO: 99790 - RNA, 19 nt, Artificial Sequence
  Description of Artificial Sequence: Synthetic oligonucleotide
aguuccaccuuuucggccg

SEQ ID NO: 99791 - RNA, 19 nt, Artificial Sequence
  Description of Artificial Sequence: Synthetic oligonucleotide
acagacaagaccgggacac

SEQ ID NO: 99792 - RNA, 19 nt, Artificial Sequence
  Description of Artificial Sequence: Synthetic oligonucleotide
ggcaagugcacacaaaagg

SEQ ID NO: 99793 - RNA, 19 nt, Artificial Sequence
  Description of Artificial Sequence: Synthetic oligonucleotide
ugaaccgcuucccucagag

SEQ ID NO: 99794 - RNA, 19 nt, Artificial Sequence
  Description of Artificial Sequence: Synthetic oligonucleotide
gagauccauacucauugcg

SEQ ID NO: 99795 - RNA, 19 nt, Artificial Sequence
  Description of Artificial Sequence: Synthetic oligonucleotide
uggguaggaauggagaagg

SEQ ID NO: 99796 - RNA, 19 nt, Artificial Sequence
  Description of Artificial Sequence: Synthetic oligonucleotide
uuaauagccuucacguucu

SEQ ID NO: 99797 - RNA, 19 nt, Artificial Sequence
  Description of Artificial Sequence: Synthetic oligonucleotide
cuuuuggacagacucgggg

SEQ ID NO: 99798 - RNA, 19 nt, Artificial Sequence
  Description of Artificial Sequence: Synthetic oligonucleotide
augacaacguaccaggcca

SEQ ID NO: 99799 - RNA, 19 nt, Artificial Sequence
  Description of Artificial Sequence: Synthetic oligonucleotide
uucaauugccugcggagag

SEQ ID NO: 99800 - RNA, 19 nt, Artificial Sequence
  Description of Artificial Sequence: Synthetic oligonucleotide
agaguuccaccuuuucggc

SEQ ID NO: 99801 - RNA, 19 nt, Artificial Sequence
  Description of Artificial Sequence: Synthetic oligonucleotide
ucgcuauuuucuaaggcug

SEQ ID NO: 99802 - RNA, 19 nt, Artificial Sequence
  Description of Artificial Sequence: Synthetic oligonucleotide
gauagcaagagugacuuuc

SEQ ID NO: 99803 - RNA, 19 nt, Artificial Sequence
  Description of Artificial Sequence: Synthetic oligonucleotide
cauuuucuucccaaguggc

SEQ ID NO: 99804 - RNA, 19 nt, Artificial Sequence
  Description of Artificial Sequence: Synthetic oligonucleotide
aagauagcaagagugacuu

SEQ ID NO: 99805 - RNA, 19 nt, Artificial Sequence
  Description of Artificial Sequence: Synthetic oligonucleotide
cacuaaggcaggauggacg

SEQ ID NO: 99806 - RNA, 19 nt, Artificial Sequence
  Description of Artificial Sequence: Synthetic oligonucleotide
aagugaaccgcuucccuca

SEQ ID NO: 99807 - RNA, 19 nt, Artificial Sequence
  Description of Artificial Sequence: Synthetic oligonucleotide
aacacgcaguuacuuggac

SEQ ID NO: 99808 - RNA, 19 nt, Artificial Sequence
  Description of Artificial Sequence: Synthetic oligonucleotide
aacccaaauagugaugcug

SEQ ID NO: 99809 - RNA, 19 nt, Artificial Sequence
  Description of Artificial Sequence: Synthetic oligonucleotide
caacauucagaucauggug

SEQ ID NO: 99810 - RNA, 19 nt, Artificial Sequence
  Description of Artificial Sequence: Synthetic oligonucleotide
gacaacguugcaccaacag

SEQ ID NO: 99811 - RNA, 19 nt, Artificial Sequence
  Description of Artificial Sequence: Synthetic oligonucleotide
gugacugucugucuugggg

SEQ ID NO: 99812 - RNA, 19 nt, Artificial Sequence
  Description of Artificial Sequence: Synthetic oligonucleotide
aacgccucagcaugagggg

SEQ ID NO: 99813 - RNA, 19 nt, Artificial Sequence
  Description of Artificial Sequence: Synthetic oligonucleotide
uuaucauggaacuguccug

SEQ ID NO: 99814 - RNA, 19 nt, Artificial Sequence
  Description of Artificial Sequence: Synthetic oligonucleotide
aggaucccgauuuuggaag

SEQ ID NO: 99815 - RNA, 19 nt, Artificial Sequence
  Description of Artificial Sequence: Synthetic oligonucleotide
  modified_base (7)..(7): a, c, u, g, unknown or other
uugccancggggaucauga

SEQ ID NO: 99816 - RNA, 19 nt, Artificial Sequence
  Description of Artificial Sequence: Synthetic oligonucleotide
uuggggacuccacagaagu

SEQ ID NO: 99817 - RNA, 19 nt, Artificial Sequence
  Description of Artificial Sequence: Synthetic oligonucleotide
ucucgcuauuuucuaaggc

SEQ ID NO: 99818 - RNA, 19 nt, Artificial Sequence
  Description of Artificial Sequence: Synthetic oligonucleotide
aguuacuuggacaugaaaa

SEQ ID NO: 99819 - RNA, 19 nt, Artificial Sequence
  Description of Artificial Sequence: Synthetic oligonucleotide
ucauuuaauagguuuuguu

SEQ ID NO: 99820 - RNA, 19 nt, Artificial Sequence
  Description of Artificial Sequence: Synthetic oligonucleotide
ucgccuuuuggacagacuc

SEQ ID NO: 99821 - RNA, 19 nt, Artificial Sequence
  Description of Artificial Sequence: Synthetic oligonucleotide
  modified_base (2)..(2): a, c, u, g, unknown or other
ancggggaucaugaucucc

SEQ ID NO: 99822 - RNA, 19 nt, Artificial Sequence
  Description of Artificial Sequence: Synthetic oligonucleotide
guggcaacgaucgucaugc

SEQ ID NO: 99823 - RNA, 19 nt, Artificial Sequence
  Description of Artificial Sequence: Synthetic oligonucleotide
agauccauacucauugcgg

SEQ ID NO: 99824 - RNA, 19 nt, Artificial Sequence
  Description of Artificial Sequence: Synthetic oligonucleotide
uucucgcuauuuucuaagg

SEQ ID NO: 99825 - RNA, 19 nt, Artificial Sequence
  Description of Artificial Sequence: Synthetic oligonucleotide
ugaaugccgggguacaggc

SEQ ID NO: 99826 - RNA, 19 nt, Artificial Sequence
  Description of Artificial Sequence: Synthetic oligonucleotide
agagguuaaauucucgcua

SEQ ID NO: 99827 - RNA, 19 nt, Artificial Sequence
  Description of Artificial Sequence: Synthetic oligonucleotide
aaggguuuccggcgcuacc

SEQ ID NO: 99828 - RNA, 19 nt, Artificial Sequence
  Description of Artificial Sequence: Synthetic oligonucleotide
aacagaugacaacguacca

SEQ ID NO: 99829 - RNA, 19 nt, Artificial Sequence
  Description of Artificial Sequence: Synthetic oligonucleotide
  modified_base (14)..(14): a, c, u, g, unknown or other
ugucgccuugccancgggg

SEQ ID NO: 99830 - RNA, 19 nt, Artificial Sequence
  Description of Artificial Sequence: Synthetic oligonucleotide
agcggguucagcaacuggc

SEQ ID NO: 99831 - RNA, 19 nt, Artificial Sequence
  Description of Artificial Sequence: Synthetic oligonucleotide
aaugagagagggaacgccu

SEQ ID NO: 99832 - RNA, 19 nt, Artificial Sequence
  Description of Artificial Sequence: Synthetic oligonucleotide
gaucaucucuccacuacgg

SEQ ID NO: 99833 - RNA, 19 nt, Artificial Sequence
  Description of Artificial Sequence: Synthetic oligonucleotide
gacagauagaugggcaggg

SEQ ID NO: 99834 - RNA, 19 nt, Artificial Sequence
  Description of Artificial Sequence: Synthetic oligonucleotide
guagguauugccccagccc

SEQ ID NO: 99835 - RNA, 19 nt, Artificial Sequence
  Description of Artificial Sequence: Synthetic oligonucleotide
aaccaaucaaauauagaaa

SEQ ID NO: 99836 - RNA, 19 nt, Artificial Sequence
  Description of Artificial Sequence: Synthetic oligonucleotide
ugaccacaccuacugaaug

SEQ ID NO: 99837 - RNA, 19 nt, Artificial Sequence
  Description of Artificial Sequence: Synthetic oligonucleotide
uuaauagguuuuguucugc

SEQ ID NO: 99838 - RNA, 19 nt, Artificial Sequence
  Description of Artificial Sequence: Synthetic oligonucleotide
cuuguuugaacuggaugcg

SEQ ID NO: 99839 - RNA, 19 nt, Artificial Sequence
  Description of Artificial Sequence: Synthetic oligonucleotide
aaggaucccgauuuuggaa

SEQ ID NO: 99840 - RNA, 19 nt, Artificial Sequence
  Description of Artificial Sequence: Synthetic oligonucleotide
caacucgagauccauacuc

SEQ ID NO: 99841 - RNA, 19 nt, Artificial Sequence
  Description of Artificial Sequence: Synthetic oligonucleotide
ugcgugcucacaccgaucu

SEQ ID NO: 99842 - RNA, 19 nt, Artificial Sequence
  Description of Artificial Sequence: Synthetic oligonucleotide
aacguaccaggccaguccu

SEQ ID NO: 99843 - RNA, 19 nt, Artificial Sequence
  Description of Artificial Sequence: Synthetic oligonucleotide
cacaccuacugaaugccgg

SEQ ID NO: 99844 - RNA, 19 nt, Artificial Sequence
  Description of Artificial Sequence: Synthetic oligonucleotide
aaaggcgcccgucugcuga

SEQ ID NO: 99845 - RNA, 19 nt, Artificial Sequence
  Description of Artificial Sequence: Synthetic oligonucleotide
  modified_base (16)..(16): a, c, u, g, unknown or other
gaugucgccuugccancgg

SEQ ID NO: 99846 - RNA, 19 nt, Artificial Sequence
  Description of Artificial Sequence: Synthetic oligonucleotide
uacccacuaaggcaggaug

SEQ ID NO: 99847 - RNA, 19 nt, Artificial Sequence
  Description of Artificial Sequence: Synthetic oligonucleotide
ugcaacacgcaguuacuug

SEQ ID NO: 99848 - RNA, 19 nt, Artificial Sequence
  Description of Artificial Sequence: Synthetic oligonucleotide
ugaacuuugcagccugagu

SEQ ID NO: 99849 - RNA, 19 nt, Artificial Sequence
  Description of Artificial Sequence: Synthetic oligonucleotide
uauugccccagcccugagg

SEQ ID NO: 99850 - RNA, 19 nt, Artificial Sequence
  Description of Artificial Sequence: Synthetic oligonucleotide
cucauugcgguccccaaag

SEQ ID NO: 99851 - RNA, 19 nt, Artificial Sequence
  Description of Artificial Sequence: Synthetic oligonucleotide
gcaacacgcaguuacuugg

SEQ ID NO: 99852 - RNA, 19 nt, Artificial Sequence
  Description of Artificial Sequence: Synthetic oligonucleotide
uugaacuggaugcgcacac

SEQ ID NO: 99853 - RNA, 19 nt, Artificial Sequence
  Description of Artificial Sequence: Synthetic oligonucleotide
gaaugagagagggaacgcc

SEQ ID NO: 99854 - RNA, 19 nt, Artificial Sequence
  Description of Artificial Sequence: Synthetic oligonucleotide
cacccgacaacguugcacc

SEQ ID NO: 99855 - RNA, 19 nt, Artificial Sequence
  Description of Artificial Sequence: Synthetic oligonucleotide
cuggaugcgcacaccagcg

SEQ ID NO: 99856 - RNA, 19 nt, Artificial Sequence
  Description of Artificial Sequence: Synthetic oligonucleotide
acggccaaugaccacaccu

SEQ ID NO: 99857 - RNA, 19 nt, Artificial Sequence
  Description of Artificial Sequence: Synthetic oligonucleotide
uaauagguuuuguucugcu

SEQ ID NO: 99858 - RNA, 19 nt, Artificial Sequence
  Description of Artificial Sequence: Synthetic oligonucleotide
guaaugggaguaguaggcg

SEQ ID NO: 99859 - RNA, 19 nt, Artificial Sequence
  Description of Artificial Sequence: Synthetic oligonucleotide
uccggcgcuacccacuaag

SEQ ID NO: 99860 - RNA, 19 nt, Artificial Sequence
  Description of Artificial Sequence: Synthetic oligonucleotide
acaccuacugaaugccggg

SEQ ID NO: 99861 - RNA, 19 nt, Artificial Sequence
  Description of Artificial Sequence: Synthetic oligonucleotide
auugccugcggagagggag

SEQ ID NO: 99862 - RNA, 19 nt, Artificial Sequence
  Description of Artificial Sequence: Synthetic oligonucleotide
cauugcgguccccaaagcc

SEQ ID NO: 99863 - RNA, 19 nt, Artificial Sequence
  Description of Artificial Sequence: Synthetic oligonucleotide
aggguuuccggcgcuaccc

SEQ ID NO: 99864 - RNA, 19 nt, Artificial Sequence
  Description of Artificial Sequence: Synthetic oligonucleotide
ugcgcuugcuucuuguagu

SEQ ID NO: 99865 - RNA, 19 nt, Artificial Sequence
  Description of Artificial Sequence: Synthetic oligonucleotide
ucuaaggcuggcucaacau

SEQ ID NO: 99866 - RNA, 19 nt, Artificial Sequence
  Description of Artificial Sequence: Synthetic oligonucleotide
agauagaugggcagggcag

SEQ ID NO: 99867 - RNA, 19 nt, Artificial Sequence
  Description of Artificial Sequence: Synthetic oligonucleotide
caacguaccaggccagucc

SEQ ID NO: 99868 - RNA, 19 nt, Artificial Sequence
  Description of Artificial Sequence: Synthetic oligonucleotide
uggcauggcgcccagcgca

SEQ ID NO: 99869 - RNA, 19 nt, Artificial Sequence
  Description of Artificial Sequence: Synthetic oligonucleotide
uuuugagcgagcggguuca

SEQ ID NO: 99870 - RNA, 19 nt, Artificial Sequence
  Description of Artificial Sequence: Synthetic oligonucleotide
uggccuauuuucuuguaau

SEQ ID NO: 99871 - RNA, 19 nt, Artificial Sequence
  Description of Artificial Sequence: Synthetic oligonucleotide
caagaauagggccccgggc

SEQ ID NO: 99872 - RNA, 19 nt, Artificial Sequence
  Description of Artificial Sequence: Synthetic oligonucleotide
uguacaagccaggcagggg

SEQ ID NO: 99873 - RNA, 19 nt, Artificial Sequence
  Description of Artificial Sequence: Synthetic oligonucleotide
aaacccaaauagugaugcu

SEQ ID NO: 99874 - RNA, 19 nt, Artificial Sequence
  Description of Artificial Sequence: Synthetic oligonucleotide
gaaggaucccgauuuugga

SEQ ID NO: 99875 - RNA, 19 nt, Artificial Sequence
  Description of Artificial Sequence: Synthetic oligonucleotide
acuacggccaaugaccaca

SEQ ID NO: 99876 - RNA, 19 nt, Artificial Sequence
  Description of Artificial Sequence: Synthetic oligonucleotide
cuaaggcuggcucaacaug

SEQ ID NO: 99877 - RNA, 19 nt, Artificial Sequence
  Description of Artificial Sequence: Synthetic oligonucleotide
ucaauugccugcggagagg

SEQ ID NO: 99878 - RNA, 19 nt, Artificial Sequence
  Description of Artificial Sequence: Synthetic oligonucleotide
agaauagggccccgggcag

SEQ ID NO: 99879 - RNA, 19 nt, Artificial Sequence
  Description of Artificial Sequence: Synthetic oligonucleotide
ugccggaggagccucuucc

SEQ ID NO: 99880 - RNA, 19 nt, Artificial Sequence
  Description of Artificial Sequence: Synthetic oligonucleotide
aacucgagauccauacuca

SEQ ID NO: 99881 - RNA, 19 nt, Artificial Sequence
  Description of Artificial Sequence: Synthetic oligonucleotide
uuugaacuggaugcgcaca

SEQ ID NO: 99882 - RNA, 19 nt, Artificial Sequence
  Description of Artificial Sequence: Synthetic oligonucleotide
ugcugauuaauagccuuca

SEQ ID NO: 99883 - RNA, 19 nt, Artificial Sequence
  Description of Artificial Sequence: Synthetic oligonucleotide
cacacugcgcucagggagg

SEQ ID NO: 99884 - RNA, 19 nt, Artificial Sequence
  Description of Artificial Sequence: Synthetic oligonucleotide
  modified_base (18)..(18): a, c, u, g, unknown or other
aggaugucgccuugccanc

SEQ ID NO: 99885 - RNA, 19 nt, Artificial Sequence
  Description of Artificial Sequence: Synthetic oligonucleotide
aaucuucucagggccuguc

SEQ ID NO: 99886 - RNA, 19 nt, Artificial Sequence
  Description of Artificial Sequence: Synthetic oligonucleotide
ugacaacguaccaggccag

SEQ ID NO: 99887 - RNA, 19 nt, Artificial Sequence
  Description of Artificial Sequence: Synthetic oligonucleotide
uauaggguggagccaggaa

SEQ ID NO: 99888 - RNA, 19 nt, Artificial Sequence
  Description of Artificial Sequence: Synthetic oligonucleotide
aacagcggcugccggagga

SEQ ID NO: 99889 - RNA, 19 nt, Artificial Sequence
  Description of Artificial Sequence: Synthetic oligonucleotide
gcagagguuaaauucucgc

SEQ ID NO: 99890 - RNA, 19 nt, Artificial Sequence
  Description of Artificial Sequence: Synthetic oligonucleotide
aguucagaguuccaccuuu

SEQ ID NO: 99891 - RNA, 19 nt, Artificial Sequence
  Description of Artificial Sequence: Synthetic oligonucleotide
caacugggcagagaggacc

SEQ ID NO: 99892 - RNA, 19 nt, Artificial Sequence
  Description of Artificial Sequence: Synthetic oligonucleotide
acacgcaguuacuuggaca

SEQ ID NO: 99893 - RNA, 19 nt, Artificial Sequence
  Description of Artificial Sequence: Synthetic oligonucleotide
uccacuaucuggugagauc

SEQ ID NO: 99894 - RNA, 19 nt, Artificial Sequence
  Description of Artificial Sequence: Synthetic oligonucleotide
auaucuccacaaaggcgcc

SEQ ID NO: 99895 - RNA, 19 nt, Artificial Sequence
  Description of Artificial Sequence: Synthetic oligonucleotide
ucgucaugcccacuucaca

SEQ ID NO: 99896 - RNA, 19 nt, Artificial Sequence
  Description of Artificial Sequence: Synthetic oligonucleotide
aggaccgccaccaguggcc

SEQ ID NO: 99897 - RNA, 19 nt, Artificial Sequence
  Description of Artificial Sequence: Synthetic oligonucleotide
agagggagagacaggaaug

SEQ ID NO: 99898 - RNA, 19 nt, Artificial Sequence
  Description of Artificial Sequence: Synthetic oligonucleotide
acccacuaaggcaggaugg

SEQ ID NO: 99899 - RNA, 19 nt, Artificial Sequence
  Description of Artificial Sequence: Synthetic oligonucleotide
aaacaagaauagggccccg

SEQ ID NO: 99900 - RNA, 19 nt, Artificial Sequence
  Description of Artificial Sequence: Synthetic oligonucleotide
accuuuucggccggugccc

SEQ ID NO: 99901 - RNA, 19 nt, Artificial Sequence
  Description of Artificial Sequence: Synthetic oligonucleotide
ucccgauuuuggaaggaaa

SEQ ID NO: 99902 - RNA, 19 nt, Artificial Sequence
  Description of Artificial Sequence: Synthetic oligonucleotide
auugcgguccccaaagcca

SEQ ID NO: 99903 - RNA, 19 nt, Artificial Sequence
  Description of Artificial Sequence: Synthetic oligonucleotide
gaucgucaugcccacuuca

SEQ ID NO: 99904 - RNA, 19 nt, Artificial Sequence
  Description of Artificial Sequence: Synthetic oligonucleotide
acccaaauagugaugcuga

SEQ ID NO: 99905 - RNA, 19 nt, Artificial Sequence
  Description of Artificial Sequence: Synthetic oligonucleotide
uucacguucucaccaccuc

SEQ ID NO: 99906 - RNA, 19 nt, Artificial Sequence
  Description of Artificial Sequence: Synthetic oligonucleotide
aguccccucagugggcucc

SEQ ID NO: 99907 - RNA, 19 nt, Artificial Sequence
  Description of Artificial Sequence: Synthetic oligonucleotide
uagguuggaagguggcaac

SEQ ID NO: 99908 - RNA, 19 nt, Artificial Sequence
  Description of Artificial Sequence: Synthetic oligonucleotide
ucauugcgguccccaaagc

SEQ ID NO: 99909 - RNA, 19 nt, Artificial Sequence
  Description of Artificial Sequence: Synthetic oligonucleotide
cucgcuauuuucuaaggcu

SEQ ID NO: 99910 - RNA, 19 nt, Artificial Sequence
  Description of Artificial Sequence: Synthetic oligonucleotide
gguugcugguaguaauggg

SEQ ID NO: 99911 - RNA, 19 nt, Artificial Sequence
  Description of Artificial Sequence: Synthetic oligonucleotide
  modified_base (8)..(8): a, c, u, g, unknown or other
cuugccancggggaucaug

SEQ ID NO: 99912 - RNA, 19 nt, Artificial Sequence
  Description of Artificial Sequence: Synthetic oligonucleotide
aucgucaugcccacuucac

SEQ ID NO: 99913 - RNA, 19 nt, Artificial Sequence
  Description of Artificial Sequence: Synthetic oligonucleotide
caccuuuucggccggugcc

SEQ ID NO: 99914 - RNA, 19 nt, Artificial Sequence
  Description of Artificial Sequence: Synthetic oligonucleotide
cgucugcugauuaauagcc

SEQ ID NO: 99915 - RNA, 19 nt, Artificial Sequence
  Description of Artificial Sequence: Synthetic oligonucleotide
cacguucucaccaccucug

SEQ ID NO: 99916 - RNA, 19 nt, Artificial Sequence
  Description of Artificial Sequence: Synthetic oligonucleotide
acaacguaccaggccaguc

SEQ ID NO: 99917 - RNA, 19 nt, Artificial Sequence
  Description of Artificial Sequence: Synthetic oligonucleotide
agacucuggccacgcgccc

SEQ ID NO: 99918 - RNA, 19 nt, Artificial Sequence
  Description of Artificial Sequence: Synthetic oligonucleotide
cuccacuacggccaaugac

SEQ ID NO: 99919 - RNA, 19 nt, Artificial Sequence
  Description of Artificial Sequence: Synthetic oligonucleotide
gaaccgcuucccucagagg

SEQ ID NO: 99920 - RNA, 19 nt, Artificial Sequence
  Description of Artificial Sequence: Synthetic oligonucleotide
gagcggguucagcaacugg

SEQ ID NO: 99921 - RNA, 19 nt, Artificial Sequence
  Description of Artificial Sequence: Synthetic oligonucleotide
accuacugaaugccggggu

SEQ ID NO: 99922 - RNA, 19 nt, Artificial Sequence
  Description of Artificial Sequence: Synthetic oligonucleotide
uggccagauuuugagcgag

SEQ ID NO: 99923 - RNA, 19 nt, Artificial Sequence
  Description of Artificial Sequence: Synthetic oligonucleotide
gagguuaaauucucgcuau

SEQ ID NO: 99924 - RNA, 19 nt, Artificial Sequence
  Description of Artificial Sequence: Synthetic oligonucleotide
caagaccgggacacagagg

SEQ ID NO: 99925 - RNA, 19 nt, Artificial Sequence
  Description of Artificial Sequence: Synthetic oligonucleotide
ggcucaacaugaaggaucc

SEQ ID NO: 99926 - RNA, 19 nt, Artificial Sequence
  Description of Artificial Sequence: Synthetic oligonucleotide
ggagacucuggccacgcgc

SEQ ID NO: 99927 - RNA, 19 nt, Artificial Sequence
  Description of Artificial Sequence: Synthetic oligonucleotide
auagcaagagugacuuucu

SEQ ID NO: 99928 - RNA, 19 nt, Artificial Sequence
  Description of Artificial Sequence: Synthetic oligonucleotide
uccacuccgaaggcucugg

SEQ ID NO: 99929 - RNA, 19 nt, Artificial Sequence
  Description of Artificial Sequence: Synthetic oligonucleotide
ggacccugcaccccgggcg

SEQ ID NO: 99930 - RNA, 19 nt, Artificial Sequence
  Description of Artificial Sequence: Synthetic oligonucleotide
gguagguauugccccagcc

SEQ ID NO: 99931 - RNA, 19 nt, Artificial Sequence
  Description of Artificial Sequence: Synthetic oligonucleotide
ugcgacacccacaccuggu

SEQ ID NO: 99932 - RNA, 19 nt, Artificial Sequence
  Description of Artificial Sequence: Synthetic oligonucleotide
acgaucgucaugcccacuu

SEQ ID NO: 99933 - RNA, 19 nt, Artificial Sequence
  Description of Artificial Sequence: Synthetic oligonucleotide
gcaacgaucgucaugccca

SEQ ID NO: 99934 - RNA, 19 nt, Artificial Sequence
  Description of Artificial Sequence: Synthetic oligonucleotide
ggcgcuacccacuaaggca

SEQ ID NO: 99935 - RNA, 19 nt, Artificial Sequence
  Description of Artificial Sequence: Synthetic oligonucleotide
  modified_base (15)..(15): a, c, u, g, unknown or other
augucgccuugccancggg

SEQ ID NO: 99936 - RNA, 19 nt, Artificial Sequence
  Description of Artificial Sequence: Synthetic oligonucleotide
agugaaccgcuucccucag

SEQ ID NO: 99937 - RNA, 19 nt, Artificial Sequence
  Description of Artificial Sequence: Synthetic oligonucleotide
guaagcggccugcugucug

SEQ ID NO: 99938 - RNA, 19 nt, Artificial Sequence
  Description of Artificial Sequence: Synthetic oligonucleotide
agcaacuggcauggcgccc

SEQ ID NO: 99939 - RNA, 19 nt, Artificial Sequence
  Description of Artificial Sequence: Synthetic oligonucleotide
uugccugcggagagggaga

SEQ ID NO: 99940 - RNA, 19 nt, Artificial Sequence
  Description of Artificial Sequence: Synthetic oligonucleotide
cuacugaaugccgggguac

SEQ ID NO: 99941 - RNA, 19 nt, Artificial Sequence
  Description of Artificial Sequence: Synthetic oligonucleotide
uucgccuuuuggacagacu

SEQ ID NO: 99942 - RNA, 19 nt, Artificial Sequence
  Description of Artificial Sequence: Synthetic oligonucleotide
aggcaagugcacacaaaag

SEQ ID NO: 99943 - RNA, 19 nt, Artificial Sequence
  Description of Artificial Sequence: Synthetic oligonucleotide
cugugacugucugucuugg

SEQ ID NO: 99944 - RNA, 19 nt, Artificial Sequence
  Description of Artificial Sequence: Synthetic oligonucleotide
cucggcgucacaacauuca

SEQ ID NO: 99945 - RNA, 19 nt, Artificial Sequence
  Description of Artificial Sequence: Synthetic oligonucleotide
ggguucagcaacuggcaug

SEQ ID NO: 99946 - RNA, 19 nt, Artificial Sequence
  Description of Artificial Sequence: Synthetic oligonucleotide
ucacaacauucagaucaug

SEQ ID NO: 99947 - RNA, 19 nt, Artificial Sequence
  Description of Artificial Sequence: Synthetic oligonucleotide
guagguuggaagguggcaa

SEQ ID NO: 99948 - RNA, 19 nt, Artificial Sequence
  Description of Artificial Sequence: Synthetic oligonucleotide
auacucauugcggucccca

SEQ ID NO: 99949 - RNA, 19 nt, Artificial Sequence
  Description of Artificial Sequence: Synthetic oligonucleotide
cagcaacuggcauggcgcc

SEQ ID NO: 99950 - RNA, 19 nt, Artificial Sequence
  Description of Artificial Sequence: Synthetic oligonucleotide
gauuaauagccuucacguu

SEQ ID NO: 99951 - RNA, 19 nt, Artificial Sequence
  Description of Artificial Sequence: Synthetic oligonucleotide
gccaaugaccaauccacac

SEQ ID NO: 99952 - RNA, 19 nt, Artificial Sequence
  Description of Artificial Sequence: Synthetic oligonucleotide
aguggccacuugcgcuugc

SEQ ID NO: 99953 - RNA, 19 nt, Artificial Sequence
  Description of Artificial Sequence: Synthetic oligonucleotide
uggaugcgcacaccagcgu

SEQ ID NO: 99954 - RNA, 19 nt, Artificial Sequence
  Description of Artificial Sequence: Synthetic oligonucleotide
cuucaauugccugcggaga

SEQ ID NO: 99955 - RNA, 19 nt, Artificial Sequence
  Description of Artificial Sequence: Synthetic oligonucleotide
uuuccggcgcuacccacua

SEQ ID NO: 99956 - RNA, 19 nt, Artificial Sequence
  Description of Artificial Sequence: Synthetic oligonucleotide
  modified_base (4)..(4): a, c, u, g, unknown or other
ccancggggaucaugaucu

SEQ ID NO: 99957 - RNA, 19 nt, Artificial Sequence
  Description of Artificial Sequence: Synthetic oligonucleotide
agccuguacaagccaggca

SEQ ID NO: 99958 - RNA, 19 nt, Artificial Sequence
  Description of Artificial Sequence: Synthetic oligonucleotide
cagagguuaaauucucgcu

SEQ ID NO: 99959 - RNA, 19 nt, Artificial Sequence
  Description of Artificial Sequence: Synthetic oligonucleotide
ggcagagguuaaauucucg

SEQ ID NO: 99960 - RNA, 19 nt, Artificial Sequence
  Description of Artificial Sequence: Synthetic oligonucleotide
uacucauugcgguccccaa

SEQ ID NO: 99961 - RNA, 19 nt, Artificial Sequence
  Description of Artificial Sequence: Synthetic oligonucleotide
uagcaagagugacuuucuu

SEQ ID NO: 99962 - RNA, 19 nt, Artificial Sequence
  Description of Artificial Sequence: Synthetic oligonucleotide
ggggauagagauuuauaua

SEQ ID NO: 99963 - RNA, 19 nt, Artificial Sequence
  Description of Artificial Sequence: Synthetic oligonucleotide
cagcgcaguccccacuucc

SEQ ID NO: 99964 - RNA, 19 nt, Artificial Sequence
  Description of Artificial Sequence: Synthetic oligonucleotide
guaguaggcggcccaggca

SEQ ID NO: 99965 - RNA, 19 nt, Artificial Sequence
  Description of Artificial Sequence: Synthetic oligonucleotide
acccgggacaccccagcag

SEQ ID NO: 99966 - RNA, 19 nt, Artificial Sequence
  Description of Artificial Sequence: Synthetic oligonucleotide
gguggguauaggguggagc

SEQ ID NO: 99967 - RNA, 19 nt, Artificial Sequence
  Description of Artificial Sequence: Synthetic oligonucleotide
ccagauuuugagcgagcgg

SEQ ID NO: 99968 - RNA, 19 nt, Artificial Sequence
  Description of Artificial Sequence: Synthetic oligonucleotide
caccuacugaaugccgggg

SEQ ID NO: 99969 - RNA, 19 nt, Artificial Sequence
  Description of Artificial Sequence: Synthetic oligonucleotide
gguggcaacgaucgucaug

SEQ ID NO: 99970 - RNA, 19 nt, Artificial Sequence
  Description of Artificial Sequence: Synthetic oligonucleotide
auauaucauuuaauagguu

SEQ ID NO: 99971 - RNA, 19 nt, Artificial Sequence
  Description of Artificial Sequence: Synthetic oligonucleotide
acacugcgcucagggaggc

SEQ ID NO: 99972 - RNA, 19 nt, Artificial Sequence
  Description of Artificial Sequence: Synthetic oligonucleotide
caacgaucgucaugcccac

SEQ ID NO: 99973 - RNA, 19 nt, Artificial Sequence
  Description of Artificial Sequence: Synthetic oligonucleotide
auuccucccaggccuuggu

SEQ ID NO: 99974 - RNA, 19 nt, Artificial Sequence
  Description of Artificial Sequence: Synthetic oligonucleotide
guccguaguaagcggccug

SEQ ID NO: 99975 - RNA, 19 nt, Artificial Sequence
  Description of Artificial Sequence: Synthetic oligonucleotide
ccucugccgagauaucucc

SEQ ID NO: 99976 - RNA, 19 nt, Artificial Sequence
  Description of Artificial Sequence: Synthetic oligonucleotide
accgcuucccucagagggg

SEQ ID NO: 99977 - RNA, 19 nt, Artificial Sequence
  Description of Artificial Sequence: Synthetic oligonucleotide
caggaccgccaccaguggc

SEQ ID NO: 99978 - RNA, 19 nt, Artificial Sequence
  Description of Artificial Sequence: Synthetic oligonucleotide
ggccucgccaggcagggag

SEQ ID NO: 99979 - RNA, 19 nt, Artificial Sequence
  Description of Artificial Sequence: Synthetic oligonucleotide
agguuaaauucucgcuauu

SEQ ID NO: 99980 - RNA, 19 nt, Artificial Sequence
  Description of Artificial Sequence: Synthetic oligonucleotide
ccugcggagagggagagac

SEQ ID NO: 99981 - RNA, 19 nt, Artificial Sequence
  Description of Artificial Sequence: Synthetic oligonucleotide
guaggcucggaggcugggg

SEQ ID NO: 99982 - RNA, 19 nt, Artificial Sequence
  Description of Artificial Sequence: Synthetic oligonucleotide
cgcuauuuucuaaggcugg

SEQ ID NO: 99983 - RNA, 19 nt, Artificial Sequence
  Description of Artificial Sequence: Synthetic oligonucleotide
aauagggccccgggcagua

SEQ ID NO: 99984 - RNA, 19 nt, Artificial Sequence
  Description of Artificial Sequence: Synthetic oligonucleotide
caacacgcaguuacuugga

SEQ ID NO: 99985 - RNA, 19 nt, Artificial Sequence
  Description of Artificial Sequence: Synthetic oligonucleotide
  modified_base (5)..(5): a, c, u, g, unknown or other
gccancggggaucaugauc

SEQ ID NO: 99986 - RNA, 19 nt, Artificial Sequence
  Description of Artificial Sequence: Synthetic oligonucleotide
gcgcuacccacuaaggcag

SEQ ID NO: 99987 - RNA, 19 nt, Artificial Sequence
  Description of Artificial Sequence: Synthetic oligonucleotide
gcuugcaucaagggcacac

SEQ ID NO: 99988 - RNA, 19 nt, Artificial Sequence
  Description of Artificial Sequence: Synthetic oligonucleotide
  modified_base (12)..(12): a, c, u, g, unknown or other
ucgccuugccancggggau

SEQ ID NO: 99989 - RNA, 19 nt, Artificial Sequence
  Description of Artificial Sequence: Synthetic oligonucleotide
uugagcgagcggguucagc

SEQ ID NO: 99990 - RNA, 19 nt, Artificial Sequence
  Description of Artificial Sequence: Synthetic oligonucleotide
caaugaccacaccuacuga

SEQ ID NO: 99991 - RNA, 19 nt, Artificial Sequence
  Description of Artificial Sequence: Synthetic oligonucleotide
cuggccuauuuucuuguaa

SEQ ID NO: 99992 - RNA, 19 nt, Artificial Sequence
  Description of Artificial Sequence: Synthetic oligonucleotide
gggcugcgugcucacaccg

SEQ ID NO: 99993 - RNA, 19 nt, Artificial Sequence
  Description of Artificial Sequence: Synthetic oligonucleotide
uacggccaaugaccacacc

SEQ ID NO: 99994 - RNA, 19 nt, Artificial Sequence
  Description of Artificial Sequence: Synthetic oligonucleotide
aaggcuggcucaacaugaa

SEQ ID NO: 99995 - RNA, 19 nt, Artificial Sequence
  Description of Artificial Sequence: Synthetic oligonucleotide
ugccugcggagagggagag

SEQ ID NO: 99996 - RNA, 19 nt, Artificial Sequence
  Description of Artificial Sequence: Synthetic oligonucleotide
  modified_base (17)..(17): a, c, u, g, unknown or other
ggaugucgccuugccancg

SEQ ID NO: 99997 - RNA, 19 nt, Artificial Sequence
  Description of Artificial Sequence: Synthetic oligonucleotide
cacaccugguccaaggaau

SEQ ID NO: 99998 - RNA, 19 nt, Artificial Sequence
  Description of Artificial Sequence: Synthetic oligonucleotide
cccaaauagugaugcugag

SEQ ID NO: 99999 - RNA, 19 nt, Artificial Sequence
  Description of Artificial Sequence: Synthetic oligonucleotide
cguucucgaaggaugucgc

SEQ ID NO: 100000 - RNA, 19 nt, Artificial Sequence
  Description of Artificial Sequence: Synthetic oligonucleotide
cauacucauugcggucccc

SEQ ID NO: 100001 - RNA, 19 nt, Artificial Sequence
  Description of Artificial Sequence: Synthetic oligonucleotide
ccacaccuacugaaugccg

SEQ ID NO: 100002 - RNA, 19 nt, Artificial Sequence
  Description of Artificial Sequence: Synthetic oligonucleotide
uuugagcgagcggguucag

SEQ ID NO: 100003 - RNA, 19 nt, Artificial Sequence
  Description of Artificial Sequence: Synthetic oligonucleotide
  modified_base (13)..(13): a, c, u, g, unknown or other
gucgccuugccancgggga

SEQ ID NO: 100004 - RNA, 19 nt, Artificial Sequence
  Description of Artificial Sequence: Synthetic oligonucleotide
ggaccaccggcaugugggg

SEQ ID NO: 100005 - RNA, 19 nt, Artificial Sequence
  Description of Artificial Sequence: Synthetic oligonucleotide
gcuccggucagggacacac

SEQ ID NO: 100006 - RNA, 19 nt, Artificial Sequence
  Description of Artificial Sequence: Synthetic oligonucleotide
cuucacguucucaccaccu

SEQ ID NO: 100007 - RNA, 19 nt, Artificial Sequence
  Description of Artificial Sequence: Synthetic oligonucleotide
aucccgauuuuggaaggaa

SEQ ID NO: 100008 - RNA, 19 nt, Artificial Sequence
  Description of Artificial Sequence: Synthetic oligonucleotide
ccuuuuggacagacucggg

SEQ ID NO: 100009 - RNA, 19 nt, Artificial Sequence
  Description of Artificial Sequence: Synthetic oligonucleotide
guauaggguggagccagga

SEQ ID NO: 100010 - RNA, 19 nt, Artificial Sequence
  Description of Artificial Sequence: Synthetic oligonucleotide
ggccugucccgucaucuug

SEQ ID NO: 100011 - RNA, 19 nt, Artificial Sequence
  Description of Artificial Sequence: Synthetic oligonucleotide
cacuacggccaaugaccac

SEQ ID NO: 100012 - RNA, 19 nt, Artificial Sequence
  Description of Artificial Sequence: Synthetic oligonucleotide
gacaccccagcaguucaga

SEQ ID NO: 100013 - RNA, 19 nt, Artificial Sequence
  Description of Artificial Sequence: Synthetic oligonucleotide
ccgacaacguugcaccaac

SEQ ID NO: 100014 - RNA, 19 nt, Artificial Sequence
  Description of Artificial Sequence: Synthetic oligonucleotide
gcgcacaagggagaagugc

SEQ ID NO: 100015 - RNA, 19 nt, Artificial Sequence
  Description of Artificial Sequence: Synthetic oligonucleotide
aacgaucgucaugcccacu

SEQ ID NO: 100016 - RNA, 19 nt, Artificial Sequence
  Description of Artificial Sequence: Synthetic oligonucleotide
guauugccccagcccugag

SEQ ID NO: 100017 - RNA, 19 nt, Artificial Sequence
  Description of Artificial Sequence: Synthetic oligonucleotide
gcauuaucauggaacuguc

SEQ ID NO: 100018 - RNA, 19 nt, Artificial Sequence
  Description of Artificial Sequence: Synthetic oligonucleotide
gguauaggguggagccagg

SEQ ID NO: 100019 - RNA, 19 nt, Artificial Sequence
  Description of Artificial Sequence: Synthetic oligonucleotide
gccugcgacacccacaccu

SEQ ID NO: 100020 - RNA, 19 nt, Artificial Sequence
  Description of Artificial Sequence: Synthetic oligonucleotide
acccgacaacguugcacca

SEQ ID NO: 100021 - RNA, 19 nt, Artificial Sequence
  Description of Artificial Sequence: Synthetic oligonucleotide
cauggcgcccagcgcaguc

SEQ ID NO: 100022 - RNA, 19 nt, Artificial Sequence
  Description of Artificial Sequence: Synthetic oligonucleotide
uggggcugcuggccuauuu

SEQ ID NO: 100023 - RNA, 19 nt, Artificial Sequence
  Description of Artificial Sequence: Synthetic oligonucleotide
ugcgggcuccgggagacuc

SEQ ID NO: 100024 - RNA, 19 nt, Artificial Sequence
  Description of Artificial Sequence: Synthetic oligonucleotide
agcgcaguccccacuuccu

SEQ ID NO: 100025 - RNA, 19 nt, Artificial Sequence
  Description of Artificial Sequence: Synthetic oligonucleotide
gggacaccccagcaguuca

SEQ ID NO: 100026 - RNA, 19 nt, Artificial Sequence
  Description of Artificial Sequence: Synthetic oligonucleotide
  modified_base (3)..(3): a, c, u, g, unknown or other
cancggggaucaugaucuc

SEQ ID NO: 100027 - RNA, 19 nt, Artificial Sequence
  Description of Artificial Sequence: Synthetic oligonucleotide
gguuaaauucucgcuauuu

SEQ ID NO: 100028 - RNA, 19 nt, Artificial Sequence
  Description of Artificial Sequence: Synthetic oligonucleotide
cgagauccauacucauugc

SEQ ID NO: 100029 - RNA, 19 nt, Artificial Sequence
  Description of Artificial Sequence: Synthetic oligonucleotide
cugcgugcucacaccgauc

SEQ ID NO: 100030 - RNA, 19 nt, Artificial Sequence
  Description of Artificial Sequence: Synthetic oligonucleotide
gauuuugagcgagcggguu

SEQ ID NO: 100031 - RNA, 19 nt, Artificial Sequence
  Description of Artificial Sequence: Synthetic oligonucleotide
ccaaauagugaugcugaga

SEQ ID NO: 100032 - RNA, 19 nt, Artificial Sequence
  Description of Artificial Sequence: Synthetic oligonucleotide
gguuuccggcgcuacccac

SEQ ID NO: 100033 - RNA, 19 nt, Artificial Sequence
  Description of Artificial Sequence: Synthetic oligonucleotide
accggcauguggggugcuc

SEQ ID NO: 100034 - RNA, 19 nt, Artificial Sequence
  Description of Artificial Sequence: Synthetic oligonucleotide
cacuugcgcuugcuucuug

SEQ ID NO: 100035 - RNA, 19 nt, Artificial Sequence
  Description of Artificial Sequence: Synthetic oligonucleotide
gguauugccccagcccuga

SEQ ID NO: 100036 - RNA, 19 nt, Artificial Sequence
  Description of Artificial Sequence: Synthetic oligonucleotide
  modified_base (6)..(6): a, c, u, g, unknown or other
ugccancggggaucaugau

SEQ ID NO: 100037 - RNA, 19 nt, Artificial Sequence
  Description of Artificial Sequence: Synthetic oligonucleotide
ccaaguggccagauuuuga

SEQ ID NO: 100038 - RNA, 19 nt, Artificial Sequence
  Description of Artificial Sequence: Synthetic oligonucleotide
acgcaguuacuuggacaug

SEQ ID NO: 100039 - RNA, 19 nt, Artificial Sequence
  Description of Artificial Sequence: Synthetic oligonucleotide
ccggcgcuacccacuaagg

SEQ ID NO: 100040 - RNA, 19 nt, Artificial Sequence
  Description of Artificial Sequence: Synthetic oligonucleotide
caacaugaaggaucccgau

SEQ ID NO: 100041 - RNA, 19 nt, Artificial Sequence
  Description of Artificial Sequence: Synthetic oligonucleotide
gggguaggcucggaggcug

SEQ ID NO: 100042 - RNA, 19 nt, Artificial Sequence
  Description of Artificial Sequence: Synthetic oligonucleotide
ccagcgggcgcuucccagc

SEQ ID NO: 100043 - RNA, 19 nt, Artificial Sequence
  Description of Artificial Sequence: Synthetic oligonucleotide
cccucugccgagauaucuc

SEQ ID NO: 100044 - RNA, 19 nt, Artificial Sequence
  Description of Artificial Sequence: Synthetic oligonucleotide
ccacuaucuggugagaucu

SEQ ID NO: 100045 - RNA, 19 nt, Artificial Sequence
  Description of Artificial Sequence: Synthetic oligonucleotide
ggguccacuccgaaggcuc

SEQ ID NO: 100046 - RNA, 19 nt, Artificial Sequence
  Description of Artificial Sequence: Synthetic oligonucleotide
gcaacuggcauggcgccca

SEQ ID NO: 100047 - RNA, 19 nt, Artificial Sequence
  Description of Artificial Sequence: Synthetic oligonucleotide
cugcaccgugccauucuga

SEQ ID NO: 100048 - RNA, 19 nt, Artificial Sequence
  Description of Artificial Sequence: Synthetic oligonucleotide
ccaacugggcagagaggac

SEQ ID NO: 100049 - RNA, 19 nt, Artificial Sequence
  Description of Artificial Sequence: Synthetic oligonucleotide
agguggcaacgaucgucau

SEQ ID NO: 100050 - RNA, 19 nt, Artificial Sequence
  Description of Artificial Sequence: Synthetic oligonucleotide
gcgacacccacaccugguc

SEQ ID NO: 100051 - RNA, 19 nt, Artificial Sequence
  Description of Artificial Sequence: Synthetic oligonucleotide
gggaacgccucagcaugag

SEQ ID NO: 100052 - RNA, 19 nt, Artificial Sequence
  Description of Artificial Sequence: Synthetic oligonucleotide
ccagcgucauucuggaucu

SEQ ID NO: 100053 - RNA, 19 nt, Artificial Sequence
  Description of Artificial Sequence: Synthetic oligonucleotide
gacaacguaccaggccagu

SEQ ID NO: 100054 - RNA, 19 nt, Artificial Sequence
  Description of Artificial Sequence: Synthetic oligonucleotide
cugcgcucagggaggccuc

SEQ ID NO: 100055 - RNA, 19 nt, Artificial Sequence
  Description of Artificial Sequence: Synthetic oligonucleotide
ucccgucaucuuguuugaa

SEQ ID NO: 100056 - RNA, 19 nt, Artificial Sequence
  Description of Artificial Sequence: Synthetic oligonucleotide
cgacacccacaccuggucc

SEQ ID NO: 100057 - RNA, 19 nt, Artificial Sequence
  Description of Artificial Sequence: Synthetic oligonucleotide
cucgccaggcagggagggc

SEQ ID NO: 100058 - RNA, 19 nt, Artificial Sequence
  Description of Artificial Sequence: Synthetic oligonucleotide
guuuccggcgcuacccacu

SEQ ID NO: 100059 - RNA, 19 nt, Artificial Sequence
  Description of Artificial Sequence: Synthetic oligonucleotide
ggacaccccagcaguucag

SEQ ID NO: 100060 - RNA, 19 nt, Artificial Sequence
  Description of Artificial Sequence: Synthetic oligonucleotide
ggauagagauuuauauauu

SEQ ID NO: 100061 - RNA, 19 nt, Artificial Sequence
  Description of Artificial Sequence: Synthetic oligonucleotide
uuccggcgcuacccacuaa

SEQ ID NO: 100062 - RNA, 19 nt, Artificial Sequence
  Description of Artificial Sequence: Synthetic oligonucleotide
cugccggaggagccucuuc

SEQ ID NO: 100063 - RNA, 19 nt, Artificial Sequence
  Description of Artificial Sequence: Synthetic oligonucleotide
gaauagggccccgggcagu

SEQ ID NO: 100064 - RNA, 19 nt, Artificial Sequence
  Description of Artificial Sequence: Synthetic oligonucleotide
cgcaguuacuuggacauga

SEQ ID NO: 100065 - RNA, 19 nt, Artificial Sequence
  Description of Artificial Sequence: Synthetic oligonucleotide
cggcgcuacccacuaaggc

SEQ ID NO: 100066 - RNA, 19 nt, Artificial Sequence
  Description of Artificial Sequence: Synthetic oligonucleotide
ccccaugaugugagcaauc

SEQ ID NO: 100067 - RNA, 19 nt, Artificial Sequence
  Description of Artificial Sequence: Synthetic oligonucleotide
cugcggagagggagagaca

SEQ ID NO: 100068 - RNA, 19 nt, Artificial Sequence
  Description of Artificial Sequence: Synthetic oligonucleotide
ggccagauuuugagcgagc

SEQ ID NO: 100069 - RNA, 19 nt, Artificial Sequence
  Description of Artificial Sequence: Synthetic oligonucleotide
ggguuuccggcgcuaccca

SEQ ID NO: 100070 - RNA, 19 nt, Artificial Sequence
  Description of Artificial Sequence: Synthetic oligonucleotide
gcggguucagcaacuggca

SEQ ID NO: 100071 - RNA, 19 nt, Artificial Sequence
  Description of Artificial Sequence: Synthetic oligonucleotide
ggcggcucggcgucacaac

SEQ ID NO: 100072 - RNA, 19 nt, Artificial Sequence
  Description of Artificial Sequence: Synthetic oligonucleotide
cacccgggacaccccagca

SEQ ID NO: 100073 - RNA, 19 nt, Artificial Sequence
  Description of Artificial Sequence: Synthetic oligonucleotide
ggaggggucugcagcagaa

SEQ ID NO: 100074 - RNA, 19 nt, Artificial Sequence
  Description of Artificial Sequence: Synthetic oligonucleotide
caccccgggcggccguugc

SEQ ID NO: 100075 - RNA, 19 nt, Artificial Sequence
  Description of Artificial Sequence: Synthetic oligonucleotide
ccuacugaaugccggggua

SEQ ID NO: 100076 - RNA, 19 nt, Artificial Sequence
  Description of Artificial Sequence: Synthetic oligonucleotide
gaccgccaccaguggccac

SEQ ID NO: 100077 - RNA, 19 nt, Artificial Sequence
  Description of Artificial Sequence: Synthetic oligonucleotide
gcgucacaacauucagauc

SEQ ID NO: 100078 - RNA, 19 nt, Artificial Sequence
  Description of Artificial Sequence: Synthetic oligonucleotide
acgcgcccgaggcuggcuu

SEQ ID NO: 100079 - RNA, 19 nt, Artificial Sequence
  Description of Artificial Sequence: Synthetic oligonucleotide
ggccuugguguagucugac

SEQ ID NO: 100080 - RNA, 19 nt, Artificial Sequence
  Description of Artificial Sequence: Synthetic oligonucleotide
accccgggcggccguugcu

SEQ ID NO: 100081 - RNA, 19 nt, Artificial Sequence
  Description of Artificial Sequence: Synthetic oligonucleotide
ccuuuucggccggugcccc

SEQ ID NO: 100082 - RNA, 19 nt, Artificial Sequence
  Description of Artificial Sequence: Synthetic oligonucleotide
gguggugcuccaggaccgc

SEQ ID NO: 100083 - RNA, 19 nt, Artificial Sequence
  Description of Artificial Sequence: Synthetic oligonucleotide
gccccgugacacaauguca

SEQ ID NO: 100084 - RNA, 19 nt, Artificial Sequence
  Description of Artificial Sequence: Synthetic oligonucleotide
caguccccucagugggcuc

SEQ ID NO: 100085 - RNA, 19 nt, Artificial Sequence
  Description of Artificial Sequence: Synthetic oligonucleotide
ggggcccaagccuguacaa

SEQ ID NO: 100086 - RNA, 19 nt, Artificial Sequence
  Description of Artificial Sequence: Synthetic oligonucleotide
ccucgccaggcagggaggg

SEQ ID NO: 100087 - RNA, 19 nt, Artificial Sequence
  Description of Artificial Sequence: Synthetic oligonucleotide
gccucgccaggcagggagg

SEQ ID NO: 100088 - RNA, 19 nt, Artificial Sequence
  Description of Artificial Sequence: Synthetic oligonucleotide
gcucggcgucacaacauuc

SEQ ID NO: 100089 - RNA, 19 nt, Artificial Sequence
  Description of Artificial Sequence: Synthetic oligonucleotide
cacugcgcucagggaggcc

SEQ ID NO: 100090 - RNA, 19 nt, Artificial Sequence
  Description of Artificial Sequence: Synthetic oligonucleotide
ggcggcccaggcagcauug

SEQ ID NO: 100091 - RNA, 19 nt, Artificial Sequence
  Description of Artificial Sequence: Synthetic oligonucleotide
gcgugcucacaccgaucug

SEQ ID NO: 100092 - RNA, 19 nt, Artificial Sequence
  Description of Artificial Sequence: Synthetic oligonucleotide
gcugcgugcucacaccgau

SEQ ID NO: 100093 - RNA, 19 nt, Artificial Sequence
  Description of Artificial Sequence: Synthetic oligonucleotide
gcgcuucccagcggugggg

SEQ ID NO: 100094 - RNA, 19 nt, Artificial Sequence
  Description of Artificial Sequence: Synthetic oligonucleotide
gcgucauucuggaucuucu

SEQ ID NO: 100095 - RNA, 19 nt, Artificial Sequence
  Description of Artificial Sequence: Synthetic oligonucleotide
ccccgugacacaaugucau

SEQ ID NO: 100096 - RNA, 19 nt, Artificial Sequence
  Description of Artificial Sequence: Synthetic oligonucleotide
gcuggccuauuuucuugua

SEQ ID NO: 100097 - RNA, 19 nt, Artificial Sequence
  Description of Artificial Sequence: Synthetic oligonucleotide
gaccaccggcauguggggu

SEQ ID NO: 100098 - RNA, 19 nt, Artificial Sequence
  Description of Artificial Sequence: Synthetic oligonucleotide
ccaccggcauguggggugc

SEQ ID NO: 100099 - RNA, 19 nt, Artificial Sequence
  Description of Artificial Sequence: Synthetic oligonucleotide
cgaucgucaugcccacuuc

SEQ ID NO: 100100 - RNA, 19 nt, Artificial Sequence
  Description of Artificial Sequence: Synthetic oligonucleotide
ggucacguucucgaaggau

SEQ ID NO: 100101 - RNA, 19 nt, Artificial Sequence
  Description of Artificial Sequence: Synthetic oligonucleotide
gcggcccaggcagcauugg

SEQ ID NO: 100102 - RNA, 19 nt, Artificial Sequence
  Description of Artificial Sequence: Synthetic oligonucleotide
caaucuucucagggccugu

SEQ ID NO: 100103 - RNA, 19 nt, Artificial Sequence
  Description of Artificial Sequence: Synthetic oligonucleotide
ccgggagacucuggccacg

SEQ ID NO: 100104 - RNA, 19 nt, Artificial Sequence
  Description of Artificial Sequence: Synthetic oligonucleotide
cccacccgggacaccccag

SEQ ID NO: 100105 - RNA, 19 nt, Artificial Sequence
  Description of Artificial Sequence: Synthetic oligonucleotide
uggccucgccaggcaggga

SEQ ID NO: 100106 - RNA, 19 nt, Artificial Sequence
  Description of Artificial Sequence: Synthetic oligonucleotide
ccgugccauucugaccacc

SEQ ID NO: 100107 - RNA, 19 nt, Artificial Sequence
  Description of Artificial Sequence: Synthetic oligonucleotide
ccguugcucucucaccaaa

SEQ ID NO: 100108 - RNA, 19 nt, Artificial Sequence
  Description of Artificial Sequence: Synthetic oligonucleotide
ggcugcgugcucacaccga

SEQ ID NO: 100109 - RNA, 19 nt, Artificial Sequence
  Description of Artificial Sequence: Synthetic oligonucleotide
cccgggacaccccagcagu

SEQ ID NO: 100110 - RNA, 19 nt, Artificial Sequence
  Description of Artificial Sequence: Synthetic oligonucleotide
ccaacucgagauccauacu

SEQ ID NO: 100111 - RNA, 19 nt, Artificial Sequence
  Description of Artificial Sequence: Synthetic oligonucleotide
gccacgcgcccgaggcugg

SEQ ID NO: 100112 - RNA, 19 nt, Artificial Sequence
  Description of Artificial Sequence: Synthetic oligonucleotide
ggcucggcgucacaacauu

SEQ ID NO: 100113 - RNA, 19 nt, Artificial Sequence
  Description of Artificial Sequence: Synthetic oligonucleotide
gccgccugcaacacgcagu

SEQ ID NO: 100114 - RNA, 19 nt, Artificial Sequence
  Description of Artificial Sequence: Synthetic oligonucleotide
ugcaccccgggcggccguu

SEQ ID NO: 100115 - RNA, 19 nt, Artificial Sequence
  Description of Artificial Sequence: Synthetic oligonucleotide
gcggccugcugucuguaau

SEQ ID NO: 100116 - RNA, 19 nt, Artificial Sequence
  Description of Artificial Sequence: Synthetic oligonucleotide
ggccugcgacacccacacc

SEQ ID NO: 100117 - RNA, 19 nt, Artificial Sequence
  Description of Artificial Sequence: Synthetic oligonucleotide
ccggggcccaagccuguac

SEQ ID NO: 100118 - RNA, 19 nt, Artificial Sequence
  Description of Artificial Sequence: Synthetic oligonucleotide
gcgggcgcuucccagcggu

SEQ ID NO: 100119 - RNA, 19 nt, Artificial Sequence
  Description of Artificial Sequence: Synthetic oligonucleotide
gcgcccgucugcugauuaa

SEQ ID NO: 100120 - RNA, 19 nt, Artificial Sequence
  Description of Artificial Sequence: Synthetic oligonucleotide
gcgcccgaggcuggcuugc

SEQ ID NO: 100121 - RNA, 19 nt, Artificial Sequence
  Description of Artificial Sequence: Synthetic oligonucleotide
cgagcggguucagcaacug

SEQ ID NO: 100122 - RNA, 19 nt, Artificial Sequence
  Description of Artificial Sequence: Synthetic oligonucleotide
cugucccgucaucuuguuu

SEQ ID NO: 100123 - RNA, 19 nt, Artificial Sequence
  Description of Artificial Sequence: Synthetic oligonucleotide
ggcaugccaggggcuccug

SEQ ID NO: 100124 - RNA, 19 nt, Artificial Sequence
  Description of Artificial Sequence: Synthetic oligonucleotide
cccgacaacguugcaccaa

SEQ ID NO: 100125 - RNA, 19 nt, Artificial Sequence
  Description of Artificial Sequence: Synthetic oligonucleotide
cggggcccaagccuguaca

SEQ ID NO: 100126 - RNA, 19 nt, Artificial Sequence
  Description of Artificial Sequence: Synthetic oligonucleotide
cgggacaccccagcaguuc

SEQ ID NO: 100127 - RNA, 19 nt, Artificial Sequence
  Description of Artificial Sequence: Synthetic oligonucleotide
ccccgcaggggaaaggguu

SEQ ID NO: 100128 - RNA, 19 nt, Artificial Sequence
  Description of Artificial Sequence: Synthetic oligonucleotide
ggcuugcaucaagggcaca

SEQ ID NO: 100129 - RNA, 19 nt, Artificial Sequence
  Description of Artificial Sequence: Synthetic oligonucleotide
ccgccugcaacacgcaguu

SEQ ID NO: 100130 - RNA, 19 nt, Artificial Sequence
  Description of Artificial Sequence: Synthetic oligonucleotide
aggcgcccgucugcugauu

SEQ ID NO: 100131 - RNA, 19 nt, Artificial Sequence
  Description of Artificial Sequence: Synthetic oligonucleotide
cccgcaggggaaaggguuu

SEQ ID NO: 100132 - RNA, 19 nt, Artificial Sequence
  Description of Artificial Sequence: Synthetic oligonucleotide
gcaccccgggcggccguug

SEQ ID NO: 100133 - RNA, 19 nt, Artificial Sequence
  Description of Artificial Sequence: Synthetic oligonucleotide
cgggcgcuucccagcggug

SEQ ID NO: 100134 - RNA, 19 nt, Artificial Sequence
  Description of Artificial Sequence: Synthetic oligonucleotide
cccagcgcaguccccacuu

SEQ ID NO: 100135 - RNA, 19 nt, Artificial Sequence
  Description of Artificial Sequence: Synthetic oligonucleotide
ccacgcgcccgaggcuggc

SEQ ID NO: 100136 - RNA, 19 nt, Artificial Sequence
  Description of Artificial Sequence: Synthetic oligonucleotide
gccugcggagagggagaga

SEQ ID NO: 100137 - RNA, 19 nt, Artificial Sequence
  Description of Artificial Sequence: Synthetic oligonucleotide
gcccagcgcaguccccacu

SEQ ID NO: 100138 - RNA, 19 nt, Artificial Sequence
  Description of Artificial Sequence: Synthetic oligonucleotide
ccgcuucccucagaggggu

SEQ ID NO: 100139 - RNA, 19 nt, Artificial Sequence
  Description of Artificial Sequence: Synthetic oligonucleotide
cugcaccccgggcggccgu

SEQ ID NO: 100140 - RNA, 19 nt, Artificial Sequence
  Description of Artificial Sequence: Synthetic oligonucleotide
ggcuccggucagggacaca

SEQ ID NO: 100141 - RNA, 19 nt, Artificial Sequence
  Description of Artificial Sequence: Synthetic oligonucleotide
cacgcgcccgaggcuggcu

SEQ ID NO: 100142 - RNA, 19 nt, Artificial Sequence
  Description of Artificial Sequence: Synthetic oligonucleotide
ccguaguaagcggccugcu

SEQ ID NO: 100143 - RNA, 19 nt, Artificial Sequence
  Description of Artificial Sequence: Synthetic oligonucleotide
ccugucccgucaucuuguu

SEQ ID NO: 100144 - RNA, 19 nt, Artificial Sequence
  Description of Artificial Sequence: Synthetic oligonucleotide
ccccagcacccgacaacgu

SEQ ID NO: 100145 - RNA, 19 nt, Artificial Sequence
  Description of Artificial Sequence: Synthetic oligonucleotide
cggcucggcgucacaacau

SEQ ID NO: 100146 - RNA, 19 nt, Artificial Sequence
  Description of Artificial Sequence: Synthetic oligonucleotide
ccgggacaccccagcaguu

SEQ ID NO: 100147 - RNA, 19 nt, Artificial Sequence
  Description of Artificial Sequence: Synthetic oligonucleotide
ggccggggcccaagccugu

SEQ ID NO: 100148 - RNA, 19 nt, Artificial Sequence
  Description of Artificial Sequence: Synthetic oligonucleotide
ccacuugcgcuugcuucuu

SEQ ID NO: 100149 - RNA, 19 nt, Artificial Sequence
  Description of Artificial Sequence: Synthetic oligonucleotide
cagcgucauucuggaucuu

SEQ ID NO: 100150 - RNA, 19 nt, Artificial Sequence
  Description of Artificial Sequence: Synthetic oligonucleotide
cgccugcaacacgcaguua

SEQ ID NO: 100151 - RNA, 19 nt, Artificial Sequence
  Description of Artificial Sequence: Synthetic oligonucleotide
  modified_base (9)..(9): a, c, u, g, unknown or other
ccuugccancggggaucau

SEQ ID NO: 100152 - RNA, 19 nt, Artificial Sequence
  Description of Artificial Sequence: Synthetic oligonucleotide
uucaaaacgaacuaaaugu

SEQ ID NO: 100153 - RNA, 19 nt, Artificial Sequence
  Description of Artificial Sequence: Synthetic oligonucleotide
accacuaccacucagcugc

SEQ ID NO: 100154 - RNA, 19 nt, Artificial Sequence
  Description of Artificial Sequence: Synthetic oligonucleotide
ucuuaaacggcuuaaaccc

SEQ ID NO: 100155 - RNA, 19 nt, Artificial Sequence
  Description of Artificial Sequence: Synthetic oligonucleotide
uuuucgaaaggcaagaucu

SEQ ID NO: 100156 - RNA, 19 nt, Artificial Sequence
  Description of Artificial Sequence: Synthetic oligonucleotide
uuuucaucgauucugacgu

SEQ ID NO: 100157 - RNA, 19 nt, Artificial Sequence
  Description of Artificial Sequence: Synthetic oligonucleotide
aaugaaaccacuaccacuc

SEQ ID NO: 100158 - RNA, 19 nt, Artificial Sequence
  Description of Artificial Sequence: Synthetic oligonucleotide
uguacaauccuauuaacug

SEQ ID NO: 100159 - RNA, 19 nt, Artificial Sequence
  Description of Artificial Sequence: Synthetic oligonucleotide
aauagguuacauaauacuc

SEQ ID NO: 100160 - RNA, 19 nt, Artificial Sequence
  Description of Artificial Sequence: Synthetic oligonucleotide
aaauagguuacauaauacu

SEQ ID NO: 100161 - RNA, 19 nt, Artificial Sequence
  Description of Artificial Sequence: Synthetic oligonucleotide
aauccuauuaacuggagau

SEQ ID NO: 100162 - RNA, 19 nt, Artificial Sequence
  Description of Artificial Sequence: Synthetic oligonucleotide
uuguucauaacgaagcugc

SEQ ID NO: 100163 - RNA, 19 nt, Artificial Sequence
  Description of Artificial Sequence: Synthetic oligonucleotide
aucuuuaugguucggauuc

SEQ ID NO: 100164 - RNA, 19 nt, Artificial Sequence
  Description of Artificial Sequence: Synthetic oligonucleotide
uauucuaaugcguucacgc

SEQ ID NO: 100165 - RNA, 19 nt, Artificial Sequence
  Description of Artificial Sequence: Synthetic oligonucleotide
uaauacuccgaaaagcaag

SEQ ID NO: 100166 - RNA, 19 nt, Artificial Sequence
  Description of Artificial Sequence: Synthetic oligonucleotide
acgaggacugcacagaagc

SEQ ID NO: 100167 - RNA, 19 nt, Artificial Sequence
  Description of Artificial Sequence: Synthetic oligonucleotide
aaaaccgccguggaggucc

SEQ ID NO: 100168 - RNA, 19 nt, Artificial Sequence
  Description of Artificial Sequence: Synthetic oligonucleotide
auagguuacauaauacucc

SEQ ID NO: 100169 - RNA, 19 nt, Artificial Sequence
  Description of Artificial Sequence: Synthetic oligonucleotide
uuuagauacuucuugugug

SEQ ID NO: 100170 - RNA, 19 nt, Artificial Sequence
  Description of Artificial Sequence: Synthetic oligonucleotide
aauguuggguuaucaugcc

SEQ ID NO: 100171 - RNA, 19 nt, Artificial Sequence
  Description of Artificial Sequence: Synthetic oligonucleotide
uaugaucuacaucacgcgg

SEQ ID NO: 100172 - RNA, 19 nt, Artificial Sequence
  Description of Artificial Sequence: Synthetic oligonucleotide
agacuucucucccagaucg

SEQ ID NO: 100173 - RNA, 19 nt, Artificial Sequence
  Description of Artificial Sequence: Synthetic oligonucleotide
uagguuacauaauacuccg

SEQ ID NO: 100174 - RNA, 19 nt, Artificial Sequence
  Description of Artificial Sequence: Synthetic oligonucleotide
uuaugguucggauucaucu

SEQ ID NO: 100175 - RNA, 19 nt, Artificial Sequence
  Description of Artificial Sequence: Synthetic oligonucleotide
aaaucgugcaucugcaucu

SEQ ID NO: 100176 - RNA, 19 nt, Artificial Sequence
  Description of Artificial Sequence: Synthetic oligonucleotide
acggcuuaaacccagagcu

SEQ ID NO: 100177 - RNA, 19 nt, Artificial Sequence
  Description of Artificial Sequence: Synthetic oligonucleotide
uucaauacgaaugcguucc

SEQ ID NO: 100178 - RNA, 19 nt, Artificial Sequence
  Description of Artificial Sequence: Synthetic oligonucleotide
aauacuccgaaaagcaagg

SEQ ID NO: 100179 - RNA, 19 nt, Artificial Sequence
  Description of Artificial Sequence: Synthetic oligonucleotide
aaacgaacuaaauguucuc

SEQ ID NO: 100180 - RNA, 19 nt, Artificial Sequence
  Description of Artificial Sequence: Synthetic oligonucleotide
aguauuaccauauguccug

SEQ ID NO: 100181 - RNA, 19 nt, Artificial Sequence
  Description of Artificial Sequence: Synthetic oligonucleotide
cacgaauuauucuaaugcg

SEQ ID NO: 100182 - RNA, 19 nt, Artificial Sequence
  Description of Artificial Sequence: Synthetic oligonucleotide
ugaguagucaaguaaaguu

SEQ ID NO: 100183 - RNA, 19 nt, Artificial Sequence
  Description of Artificial Sequence: Synthetic oligonucleotide
ugaaguauuacuguucuuc

SEQ ID NO: 100184 - RNA, 19 nt, Artificial Sequence
  Description of Artificial Sequence: Synthetic oligonucleotide
augacguuccacuacaugu

SEQ ID NO: 100185 - RNA, 19 nt, Artificial Sequence
  Description of Artificial Sequence: Synthetic oligonucleotide
ucaugaguagucaaguaaa

SEQ ID NO: 100186 - RNA, 19 nt, Artificial Sequence
  Description of Artificial Sequence: Synthetic oligonucleotide
uuaaacggcuuaaacccag

SEQ ID NO: 100187 - RNA, 19 nt, Artificial Sequence
  Description of Artificial Sequence: Synthetic oligonucleotide
uuguaucccguccaugacg

SEQ ID NO: 100188 - RNA, 19 nt, Artificial Sequence
  Description of Artificial Sequence: Synthetic oligonucleotide
ucuguaauuuucacgucgc

SEQ ID NO: 100189 - RNA, 19 nt, Artificial Sequence
  Description of Artificial Sequence: Synthetic oligonucleotide
uguuagaaaggugucaucu

SEQ ID NO: 100190 - RNA, 19 nt, Artificial Sequence
  Description of Artificial Sequence: Synthetic oligonucleotide
agggauuagggccagcuuc

SEQ ID NO: 100191 - RNA, 19 nt, Artificial Sequence
  Description of Artificial Sequence: Synthetic oligonucleotide
cauaauacuccgaaaagca

SEQ ID NO: 100192 - RNA, 19 nt, Artificial Sequence
  Description of Artificial Sequence: Synthetic oligonucleotide
agauauucuugguugagcu

SEQ ID NO: 100193 - RNA, 19 nt, Artificial Sequence
  Description of Artificial Sequence: Synthetic oligonucleotide
acuccgaaaagcaaggaac

SEQ ID NO: 100194 - RNA, 19 nt, Artificial Sequence
  Description of Artificial Sequence: Synthetic oligonucleotide
uacaauccuauuaacugga

SEQ ID NO: 100195 - RNA, 19 nt, Artificial Sequence
  Description of Artificial Sequence: Synthetic oligonucleotide
ugggguaccuuucaaagcu

SEQ ID NO: 100196 - RNA, 19 nt, Artificial Sequence
  Description of Artificial Sequence: Synthetic oligonucleotide
uaguauuaccauauguccu

SEQ ID NO: 100197 - RNA, 19 nt, Artificial Sequence
  Description of Artificial Sequence: Synthetic oligonucleotide
auggccuacaaugaucucc

SEQ ID NO: 100198 - RNA, 19 nt, Artificial Sequence
  Description of Artificial Sequence: Synthetic oligonucleotide
gaugcacuuaauguaacag

SEQ ID NO: 100199 - RNA, 19 nt, Artificial Sequence
  Description of Artificial Sequence: Synthetic oligonucleotide
uacaugucguucuucgggg

SEQ ID NO: 100200 - RNA, 19 nt, Artificial Sequence
  Description of Artificial Sequence: Synthetic oligonucleotide
agauagagcucucaagcag

SEQ ID NO: 100201 - RNA, 19 nt, Artificial Sequence
  Description of Artificial Sequence: Synthetic oligonucleotide
auuauucuaaugcguucac

SEQ ID NO: 100202 - RNA, 19 nt, Artificial Sequence
  Description of Artificial Sequence: Synthetic oligonucleotide
ugauggccuacaaugaucu

SEQ ID NO: 100203 - RNA, 19 nt, Artificial Sequence
  Description of Artificial Sequence: Synthetic oligonucleotide
uuaccauauguccuggacu

SEQ ID NO: 100204 - RNA, 19 nt, Artificial Sequence
  Description of Artificial Sequence: Synthetic oligonucleotide
cuacaugucguucuucggg

SEQ ID NO: 100205 - RNA, 19 nt, Artificial Sequence
  Description of Artificial Sequence: Synthetic oligonucleotide
cuaugaucuacaucacgcg

SEQ ID NO: 100206 - RNA, 19 nt, Artificial Sequence
  Description of Artificial Sequence: Synthetic oligonucleotide
uucacgaauuauucuaaug

SEQ ID NO: 100207 - RNA, 19 nt, Artificial Sequence
  Description of Artificial Sequence: Synthetic oligonucleotide
agaacuuucucuggcuucc

SEQ ID NO: 100208 - RNA, 19 nt, Artificial Sequence
  Description of Artificial Sequence: Synthetic oligonucleotide
acgaacuaaauguucucuc

SEQ ID NO: 100209 - RNA, 19 nt, Artificial Sequence
  Description of Artificial Sequence: Synthetic oligonucleotide
ucuaaugcguucacgcucu

SEQ ID NO: 100210 - RNA, 19 nt, Artificial Sequence
  Description of Artificial Sequence: Synthetic oligonucleotide
cuaugcugcaaaugaaacc

SEQ ID NO: 100211 - RNA, 19 nt, Artificial Sequence
  Description of Artificial Sequence: Synthetic oligonucleotide
ugaacuuauccguuucuug

SEQ ID NO: 100212 - RNA, 19 nt, Artificial Sequence
  Description of Artificial Sequence: Synthetic oligonucleotide
ucucagucuuucaaaacga

SEQ ID NO: 100213 - RNA, 19 nt, Artificial Sequence
  Description of Artificial Sequence: Synthetic oligonucleotide
ucgagcauuuguaacuacc

SEQ ID NO: 100214 - RNA, 19 nt, Artificial Sequence
  Description of Artificial Sequence: Synthetic oligonucleotide
aacucuagacucccguuug

SEQ ID NO: 100215 - RNA, 19 nt, Artificial Sequence
  Description of Artificial Sequence: Synthetic oligonucleotide
aagcguucgcguuccauuc

SEQ ID NO: 100216 - RNA, 19 nt, Artificial Sequence
  Description of Artificial Sequence: Synthetic oligonucleotide
aaaccacuaccacucagcu

SEQ ID NO: 100217 - RNA, 19 nt, Artificial Sequence
  Description of Artificial Sequence: Synthetic oligonucleotide
uguucaauacgaaugcguu

SEQ ID NO: 100218 - RNA, 19 nt, Artificial Sequence
  Description of Artificial Sequence: Synthetic oligonucleotide
cacuacaugucguucuucg

SEQ ID NO: 100219 - RNA, 19 nt, Artificial Sequence
  Description of Artificial Sequence: Synthetic oligonucleotide
auuuccugacuuucgaugu

SEQ ID NO: 100220 - RNA, 19 nt, Artificial Sequence
  Description of Artificial Sequence: Synthetic oligonucleotide
uguaucccguccaugacgu

SEQ ID NO: 100221 - RNA, 19 nt, Artificial Sequence
  Description of Artificial Sequence: Synthetic oligonucleotide
ucaaaacgaacuaaauguu

SEQ ID NO: 100222 - RNA, 19 nt, Artificial Sequence
  Description of Artificial Sequence: Synthetic oligonucleotide
caaaacgaacuaaauguuc

SEQ ID NO: 100223 - RNA, 19 nt, Artificial Sequence
  Description of Artificial Sequence: Synthetic oligonucleotide
gauucugcuuucuuagaac

SEQ ID NO: 100224 - RNA, 19 nt, Artificial Sequence
  Description of Artificial Sequence: Synthetic oligonucleotide
uucuaaugcguucacgcuc

SEQ ID NO: 100225 - RNA, 19 nt, Artificial Sequence
  Description of Artificial Sequence: Synthetic oligonucleotide
ugcguucacgcucucgacg

SEQ ID NO: 100226 - RNA, 19 nt, Artificial Sequence
  Description of Artificial Sequence: Synthetic oligonucleotide
cuugguugagcuuccacug

SEQ ID NO: 100227 - RNA, 19 nt, Artificial Sequence
  Description of Artificial Sequence: Synthetic oligonucleotide
aggaucacccuucacggag

SEQ ID NO: 100228 - RNA, 19 nt, Artificial Sequence
  Description of Artificial Sequence: Synthetic oligonucleotide
aacgaacuaaauguucucu

SEQ ID NO: 100229 - RNA, 19 nt, Artificial Sequence
  Description of Artificial Sequence: Synthetic oligonucleotide
aucgcucuggccuuucaac

SEQ ID NO: 100230 - RNA, 19 nt, Artificial Sequence
  Description of Artificial Sequence: Synthetic oligonucleotide
uucacgucgcauuagcuuc

SEQ ID NO: 100231 - RNA, 19 nt, Artificial Sequence
  Description of Artificial Sequence: Synthetic oligonucleotide
ugaucuacaucacgcgggc

SEQ ID NO: 100232 - RNA, 19 nt, Artificial Sequence
  Description of Artificial Sequence: Synthetic oligonucleotide
ugaccaacaaaccgcuccc

SEQ ID NO: 100233 - RNA, 19 nt, Artificial Sequence
  Description of Artificial Sequence: Synthetic oligonucleotide
uucaacucuagacucccgu

SEQ ID NO: 100234 - RNA, 19 nt, Artificial Sequence
  Description of Artificial Sequence: Synthetic oligonucleotide
caugaguagucaaguaaag

SEQ ID NO: 100235 - RNA, 19 nt, Artificial Sequence
  Description of Artificial Sequence: Synthetic oligonucleotide
ucucucucgagcaauccgu

SEQ ID NO: 100236 - RNA, 19 nt, Artificial Sequence
  Description of Artificial Sequence: Synthetic oligonucleotide
uuguguucaaaaccgccgu

SEQ ID NO: 100237 - RNA, 19 nt, Artificial Sequence
  Description of Artificial Sequence: Synthetic oligonucleotide
uaauuuucacgucgcauua

SEQ ID NO: 100238 - RNA, 19 nt, Artificial Sequence
  Description of Artificial Sequence: Synthetic oligonucleotide
cuauuaacuggagaugcag

SEQ ID NO: 100239 - RNA, 19 nt, Artificial Sequence
  Description of Artificial Sequence: Synthetic oligonucleotide
uguucaaaaccgccgugga

SEQ ID NO: 100240 - RNA, 19 nt, Artificial Sequence
  Description of Artificial Sequence: Synthetic oligonucleotide
augcacuuaauguaacagu

SEQ ID NO: 100241 - RNA, 19 nt, Artificial Sequence
  Description of Artificial Sequence: Synthetic oligonucleotide
gucagauagagcucucaag

SEQ ID NO: 100242 - RNA, 19 nt, Artificial Sequence
  Description of Artificial Sequence: Synthetic oligonucleotide
acuacaugucguucuucgg

SEQ ID NO: 100243 - RNA, 19 nt, Artificial Sequence
  Description of Artificial Sequence: Synthetic oligonucleotide
cacuacuucgauucccagg

SEQ ID NO: 100244 - RNA, 19 nt, Artificial Sequence
  Description of Artificial Sequence: Synthetic oligonucleotide
ugcguucccuuuccaagcg

SEQ ID NO: 100245 - RNA, 19 nt, Artificial Sequence
  Description of Artificial Sequence: Synthetic oligonucleotide
uuuucacgucgcauuagcu

SEQ ID NO: 100246 - RNA, 19 nt, Artificial Sequence
  Description of Artificial Sequence: Synthetic oligonucleotide
uugauggccuacaaugauc

SEQ ID NO: 100247 - RNA, 19 nt, Artificial Sequence
  Description of Artificial Sequence: Synthetic oligonucleotide
uuaucaugccugcuccuga

SEQ ID NO: 100248 - RNA, 19 nt, Artificial Sequence
  Description of Artificial Sequence: Synthetic oligonucleotide
aaccaacagucagauagag

SEQ ID NO: 100249 - RNA, 19 nt, Artificial Sequence
  Description of Artificial Sequence: Synthetic oligonucleotide
cuuuucgaaaggcaagauc

SEQ ID NO: 100250 - RNA, 19 nt, Artificial Sequence
  Description of Artificial Sequence: Synthetic oligonucleotide
uuuaucuaugcuagcccuc

SEQ ID NO: 100251 - RNA, 19 nt, Artificial Sequence
  Description of Artificial Sequence: Synthetic oligonucleotide
ucgauucugacgucuggcc

SEQ ID NO: 100252 - RNA, 19 nt, Artificial Sequence
  Description of Artificial Sequence: Synthetic oligonucleotide
uacuccgaaaagcaaggaa

SEQ ID NO: 100253 - RNA, 19 nt, Artificial Sequence
  Description of Artificial Sequence: Synthetic oligonucleotide
ucuagacucccguuugucu

SEQ ID NO: 100254 - RNA, 19 nt, Artificial Sequence
  Description of Artificial Sequence: Synthetic oligonucleotide
auucuaaugcguucacgcu

SEQ ID NO: 100255 - RNA, 19 nt, Artificial Sequence
  Description of Artificial Sequence: Synthetic oligonucleotide
uuucuuagaagggucgccu

SEQ ID NO: 100256 - RNA, 19 nt, Artificial Sequence
  Description of Artificial Sequence: Synthetic oligonucleotide
gaacuuauccguuucuugu

SEQ ID NO: 100257 - RNA, 19 nt, Artificial Sequence
  Description of Artificial Sequence: Synthetic oligonucleotide
uguguucaaaaccgccgug

SEQ ID NO: 100258 - RNA, 19 nt, Artificial Sequence
  Description of Artificial Sequence: Synthetic oligonucleotide
uuucaacucuagacucccg

SEQ ID NO: 100259 - RNA, 19 nt, Artificial Sequence
  Description of Artificial Sequence: Synthetic oligonucleotide
acuuauccguuucuugucu

SEQ ID NO: 100260 - RNA, 19 nt, Artificial Sequence
  Description of Artificial Sequence: Synthetic oligonucleotide
aggaucaucucgccuauga

SEQ ID NO: 100261 - RNA, 19 nt, Artificial Sequence
  Description of Artificial Sequence: Synthetic oligonucleotide
uugggguaccuuucaaagc

SEQ ID NO: 100262 - RNA, 19 nt, Artificial Sequence
  Description of Artificial Sequence: Synthetic oligonucleotide
uuucacgucgcauuagcuu

SEQ ID NO: 100263 - RNA, 19 nt, Artificial Sequence
  Description of Artificial Sequence: Synthetic oligonucleotide
cucucucucucuguaagcg

SEQ ID NO: 100264 - RNA, 19 nt, Artificial Sequence
  Description of Artificial Sequence: Synthetic oligonucleotide
guuuaguauuaccauaugu

SEQ ID NO: 100265 - RNA, 19 nt, Artificial Sequence
  Description of Artificial Sequence: Synthetic oligonucleotide
uuaucuaugcuagcccucu

SEQ ID NO: 100266 - RNA, 19 nt, Artificial Sequence
  Description of Artificial Sequence: Synthetic oligonucleotide
guguucaaaaccgccgugg

SEQ ID NO: 100267 - RNA, 19 nt, Artificial Sequence
  Description of Artificial Sequence: Synthetic oligonucleotide
ucucgagcaauccguucag

SEQ ID NO: 100268 - RNA, 19 nt, Artificial Sequence
  Description of Artificial Sequence: Synthetic oligonucleotide
guuuagauacuucuugugu

SEQ ID NO: 100269 - RNA, 19 nt, Artificial Sequence
  Description of Artificial Sequence: Synthetic oligonucleotide
caaugccauagcauuuugc

SEQ ID NO: 100270 - RNA, 19 nt, Artificial Sequence
  Description of Artificial Sequence: Synthetic oligonucleotide
agaugcacuuaauguaaca

SEQ ID NO: 100271 - RNA, 19 nt, Artificial Sequence
  Description of Artificial Sequence: Synthetic oligonucleotide
acuuaauguaacaguaccu

SEQ ID NO: 100272 - RNA, 19 nt, Artificial Sequence
  Description of Artificial Sequence: Synthetic oligonucleotide
ucccguucacgaauuauuc

SEQ ID NO: 100273 - RNA, 19 nt, Artificial Sequence
  Description of Artificial Sequence: Synthetic oligonucleotide
uuacaaugccauagcauuu

SEQ ID NO: 100274 - RNA, 19 nt, Artificial Sequence
  Description of Artificial Sequence: Synthetic oligonucleotide
caaaggacgaggacugcac

SEQ ID NO: 100275 - RNA, 19 nt, Artificial Sequence
  Description of Artificial Sequence: Synthetic oligonucleotide
cucucucucucucuguaag

SEQ ID NO: 100276 - RNA, 19 nt, Artificial Sequence
  Description of Artificial Sequence: Synthetic oligonucleotide
agguccacucuuaaacggc

SEQ ID NO: 100277 - RNA, 19 nt, Artificial Sequence
  Description of Artificial Sequence: Synthetic oligonucleotide
ucaauacgaaugcguuccc

SEQ ID NO: 100278 - RNA, 19 nt, Artificial Sequence
  Description of Artificial Sequence: Synthetic oligonucleotide
aguucauuucuuggaggcg

SEQ ID NO: 100279 - RNA, 19 nt, Artificial Sequence
  Description of Artificial Sequence: Synthetic oligonucleotide
acgaauuauucuaaugcgu

SEQ ID NO: 100280 - RNA, 19 nt, Artificial Sequence
  Description of Artificial Sequence: Synthetic oligonucleotide
uucccguucacgaauuauu

SEQ ID NO: 100281 - RNA, 19 nt, Artificial Sequence
  Description of Artificial Sequence: Synthetic oligonucleotide
ucucucucucucuguaagc

SEQ ID NO: 100282 - RNA, 19 nt, Artificial Sequence
  Description of Artificial Sequence: Synthetic oligonucleotide
cuuccauagccugaggcac

SEQ ID NO: 100283 - RNA, 19 nt, Artificial Sequence
  Description of Artificial Sequence: Synthetic oligonucleotide
guuacauaauacuccgaaa

SEQ ID NO: 100284 - RNA, 19 nt, Artificial Sequence
  Description of Artificial Sequence: Synthetic oligonucleotide
guaccuuucaaagcuuggc

SEQ ID NO: 100285 - RNA, 19 nt, Artificial Sequence
  Description of Artificial Sequence: Synthetic oligonucleotide
uucucucucucucuaguuu

SEQ ID NO: 100286 - RNA, 19 nt, Artificial Sequence
  Description of Artificial Sequence: Synthetic oligonucleotide
aaaccaacagucagauaga

SEQ ID NO: 100287 - RNA, 19 nt, Artificial Sequence
  Description of Artificial Sequence: Synthetic oligonucleotide
augaguagucaaguaaagu

SEQ ID NO: 100288 - RNA, 19 nt, Artificial Sequence
  Description of Artificial Sequence: Synthetic oligonucleotide
uucgcguuccauucucucu

SEQ ID NO: 100289 - RNA, 19 nt, Artificial Sequence
  Description of Artificial Sequence: Synthetic oligonucleotide
guuccauucucucucucuc

SEQ ID NO: 100290 - RNA, 19 nt, Artificial Sequence
  Description of Artificial Sequence: Synthetic oligonucleotide
uggcacuccuaucacuugu

SEQ ID NO: 100291 - RNA, 19 nt, Artificial Sequence
  Description of Artificial Sequence: Synthetic oligonucleotide
ucgccucgugucaugguag

SEQ ID NO: 100292 - RNA, 19 nt, Artificial Sequence
  Description of Artificial Sequence: Synthetic oligonucleotide
ucucucucucucuaguuuu

SEQ ID NO: 100293 - RNA, 19 nt, Artificial Sequence
  Description of Artificial Sequence: Synthetic oligonucleotide
gucgcauuagcuuccaucu

SEQ ID NO: 100294 - RNA, 19 nt, Artificial Sequence
  Description of Artificial Sequence: Synthetic oligonucleotide
guaauuuucacgucgcauu

SEQ ID NO: 100295 - RNA, 19 nt, Artificial Sequence
  Description of Artificial Sequence: Synthetic oligonucleotide
aggcacuacuucgauuccc

SEQ ID NO: 100296 - RNA, 19 nt, Artificial Sequence
  Description of Artificial Sequence: Synthetic oligonucleotide
cuccgaaaagcaaggaaca

SEQ ID NO: 100297 - RNA, 19 nt, Artificial Sequence
  Description of Artificial Sequence: Synthetic oligonucleotide
ucacgucgcauuagcuucc

SEQ ID NO: 100298 - RNA, 19 nt, Artificial Sequence
  Description of Artificial Sequence: Synthetic oligonucleotide
gaaaucaguuguccaugca

SEQ ID NO: 100299 - RNA, 19 nt, Artificial Sequence
  Description of Artificial Sequence: Synthetic oligonucleotide
uaaggaucaucucgccuau

SEQ ID NO: 100300 - RNA, 19 nt, Artificial Sequence
  Description of Artificial Sequence: Synthetic oligonucleotide
caugacguuccacuacaug

SEQ ID NO: 100301 - RNA, 19 nt, Artificial Sequence
  Description of Artificial Sequence: Synthetic oligonucleotide
cuuaaacggcuuaaaccca

SEQ ID NO: 100302 - RNA, 19 nt, Artificial Sequence
  Description of Artificial Sequence: Synthetic oligonucleotide
caucgauucugacgucugg

SEQ ID NO: 100303 - RNA, 19 nt, Artificial Sequence
  Description of Artificial Sequence: Synthetic oligonucleotide
ucauaacgaagcugcugcu

SEQ ID NO: 100304 - RNA, 19 nt, Artificial Sequence
  Description of Artificial Sequence: Synthetic oligonucleotide
gaaccauuaucguucuucu

SEQ ID NO: 100305 - RNA, 19 nt, Artificial Sequence
  Description of Artificial Sequence: Synthetic oligonucleotide
uucucgacaggaucacccu

SEQ ID NO: 100306 - RNA, 19 nt, Artificial Sequence
  Description of Artificial Sequence: Synthetic oligonucleotide
caccguuccuguucaauac

SEQ ID NO: 100307 - RNA, 19 nt, Artificial Sequence
  Description of Artificial Sequence: Synthetic oligonucleotide
uccauucucucucucucua

SEQ ID NO: 100308 - RNA, 19 nt, Artificial Sequence
  Description of Artificial Sequence: Synthetic oligonucleotide
cucgacaggaucacccuuc

SEQ ID NO: 100309 - RNA, 19 nt, Artificial Sequence
  Description of Artificial Sequence: Synthetic oligonucleotide
cucgacgcucucuuucugc

SEQ ID NO: 100310 - RNA, 19 nt, Artificial Sequence
  Description of Artificial Sequence: Synthetic oligonucleotide
ugcaauacaucuggacacu

SEQ ID NO: 100311 - RNA, 19 nt, Artificial Sequence
  Description of Artificial Sequence: Synthetic oligonucleotide
cuuacaccguuccuguuca

SEQ ID NO: 100312 - RNA, 19 nt, Artificial Sequence
  Description of Artificial Sequence: Synthetic oligonucleotide
ggucuagagggauuagggc

SEQ ID NO: 100313 - RNA, 19 nt, Artificial Sequence
  Description of Artificial Sequence: Synthetic oligonucleotide
ugaccggccaucaccaauu

SEQ ID NO: 100314 - RNA, 19 nt, Artificial Sequence
  Description of Artificial Sequence: Synthetic oligonucleotide
uucgccucgugucauggua

SEQ ID NO: 100315 - RNA, 19 nt, Artificial Sequence
  Description of Artificial Sequence: Synthetic oligonucleotide
ucccuuuccaagcguucgc

SEQ ID NO: 100316 - RNA, 19 nt, Artificial Sequence
  Description of Artificial Sequence: Synthetic oligonucleotide
cuuguaucccguccaugac

SEQ ID NO: 100317 - RNA, 19 nt, Artificial Sequence
  Description of Artificial Sequence: Synthetic oligonucleotide
uuccauucucucucucucu

SEQ ID NO: 100318 - RNA, 19 nt, Artificial Sequence
  Description of Artificial Sequence: Synthetic oligonucleotide
uaucccguccaugacguuc

SEQ ID NO: 100319 - RNA, 19 nt, Artificial Sequence
  Description of Artificial Sequence: Synthetic oligonucleotide
ucaacucuagacucccguu

SEQ ID NO: 100320 - RNA, 19 nt, Artificial Sequence
  Description of Artificial Sequence: Synthetic oligonucleotide
ucgacaggaucacccuuca

SEQ ID NO: 100321 - RNA, 19 nt, Artificial Sequence
  Description of Artificial Sequence: Synthetic oligonucleotide
cauaacgaagcugcugcug

SEQ ID NO: 100322 - RNA, 19 nt, Artificial Sequence
  Description of Artificial Sequence: Synthetic oligonucleotide
caauccuauuaacuggaga

SEQ ID NO: 100323 - RNA, 19 nt, Artificial Sequence
  Description of Artificial Sequence: Synthetic oligonucleotide
agcgaccucagcucuguca

SEQ ID NO: 100324 - RNA, 19 nt, Artificial Sequence
  Description of Artificial Sequence: Synthetic oligonucleotide
cagauagagcucucaagca

SEQ ID NO: 100325 - RNA, 19 nt, Artificial Sequence
  Description of Artificial Sequence: Synthetic oligonucleotide
cagaugcacuuaauguaac

SEQ ID NO: 100326 - RNA, 19 nt, Artificial Sequence
  Description of Artificial Sequence: Synthetic oligonucleotide
cucucgagcaauccguuca

SEQ ID NO: 100327 - RNA, 19 nt, Artificial Sequence
  Description of Artificial Sequence: Synthetic oligonucleotide
gaagggucgccuuugacuu

SEQ ID NO: 100328 - RNA, 19 nt, Artificial Sequence
  Description of Artificial Sequence: Synthetic oligonucleotide
cuguacaauccuauuaacu

SEQ ID NO: 100329 - RNA, 19 nt, Artificial Sequence
  Description of Artificial Sequence: Synthetic oligonucleotide
gccuaugaucuacaucacg

SEQ ID NO: 100330 - RNA, 19 nt, Artificial Sequence
  Description of Artificial Sequence: Synthetic oligonucleotide
auuuugccccaggacuucg

SEQ ID NO: 100331 - RNA, 19 nt, Artificial Sequence
  Description of Artificial Sequence: Synthetic oligonucleotide
acaccguuccuguucaaua

SEQ ID NO: 100332 - RNA, 19 nt, Artificial Sequence
  Description of Artificial Sequence: Synthetic oligonucleotide
aggaaaccugccccguucu

SEQ ID NO: 100333 - RNA, 19 nt, Artificial Sequence
  Description of Artificial Sequence: Synthetic oligonucleotide
ucucgacgcucucuuucug

SEQ ID NO: 100334 - RNA, 19 nt, Artificial Sequence
  Description of Artificial Sequence: Synthetic oligonucleotide
acgcucucuuucugcaauc

SEQ ID NO: 100335 - RNA, 19 nt, Artificial Sequence
  Description of Artificial Sequence: Synthetic oligonucleotide
ucccuucacuuuuccacga

SEQ ID NO: 100336 - RNA, 19 nt, Artificial Sequence
  Description of Artificial Sequence: Synthetic oligonucleotide
gaucuacaucacgcgggcg

SEQ ID NO: 100337 - RNA, 19 nt, Artificial Sequence
  Description of Artificial Sequence: Synthetic oligonucleotide
auucucucucucucuaguu

SEQ ID NO: 100338 - RNA, 19 nt, Artificial Sequence
  Description of Artificial Sequence: Synthetic oligonucleotide
uccgaaaagcaaggaacaa

SEQ ID NO: 100339 - RNA, 19 nt, Artificial Sequence
  Description of Artificial Sequence: Synthetic oligonucleotide
cuuugaccaacaaaccgcu

SEQ ID NO: 100340 - RNA, 19 nt, Artificial Sequence
  Description of Artificial Sequence: Synthetic oligonucleotide
agggucgccuuugacuuuc

SEQ ID NO: 100341 - RNA, 19 nt, Artificial Sequence
  Description of Artificial Sequence: Synthetic oligonucleotide
cucgccuaugaucuacauc

SEQ ID NO: 100342 - RNA, 19 nt, Artificial Sequence
  Description of Artificial Sequence: Synthetic oligonucleotide
gguaccuuucaaagcuugg

SEQ ID NO: 100343 - RNA, 19 nt, Artificial Sequence
  Description of Artificial Sequence: Synthetic oligonucleotide
acucuagacucccguuugu

SEQ ID NO: 100344 - RNA, 19 nt, Artificial Sequence
  Description of Artificial Sequence: Synthetic oligonucleotide
aaccgccucggugccaauc

SEQ ID NO: 100345 - RNA, 19 nt, Artificial Sequence
  Description of Artificial Sequence: Synthetic oligonucleotide
caucucgccuaugaucuac

SEQ ID NO: 100346 - RNA, 19 nt, Artificial Sequence
  Description of Artificial Sequence: Synthetic oligonucleotide
cauuaucguucuucucauc

SEQ ID NO: 100347 - RNA, 19 nt, Artificial Sequence
  Description of Artificial Sequence: Synthetic oligonucleotide
cuccccucacacugugucc

SEQ ID NO: 100348 - RNA, 19 nt, Artificial Sequence
  Description of Artificial Sequence: Synthetic oligonucleotide
cucugugcgauggagaugu

SEQ ID NO: 100349 - RNA, 19 nt, Artificial Sequence
  Description of Artificial Sequence: Synthetic oligonucleotide
uaggcgcucucucucucuc

SEQ ID NO: 100350 - RNA, 19 nt, Artificial Sequence
  Description of Artificial Sequence: Synthetic oligonucleotide
uuucaucgauucugacguc

SEQ ID NO: 100351 - RNA, 19 nt, Artificial Sequence
  Description of Artificial Sequence: Synthetic oligonucleotide
uacaccguuccuguucaau

SEQ ID NO: 100352 - RNA, 19 nt, Artificial Sequence
  Description of Artificial Sequence: Synthetic oligonucleotide
gagggugagcgaccucagc

SEQ ID NO: 100353 - RNA, 19 nt, Artificial Sequence
  Description of Artificial Sequence: Synthetic oligonucleotide
guaagcguucccguucuuc

SEQ ID NO: 100354 - RNA, 19 nt, Artificial Sequence
  Description of Artificial Sequence: Synthetic oligonucleotide
guucgcguuccauucucuc

SEQ ID NO: 100355 - RNA, 19 nt, Artificial Sequence
  Description of Artificial Sequence: Synthetic oligonucleotide
uaccaucuuuaugguucgg

SEQ ID NO: 100356 - RNA, 19 nt, Artificial Sequence
  Description of Artificial Sequence: Synthetic oligonucleotide
gaucgcucuggccuuucaa

SEQ ID NO: 100357 - RNA, 19 nt, Artificial Sequence
  Description of Artificial Sequence: Synthetic oligonucleotide
acgcgggcguuucaaagaa

SEQ ID NO: 100358 - RNA, 19 nt, Artificial Sequence
  Description of Artificial Sequence: Synthetic oligonucleotide
gaaaagcauccccggggaa

SEQ ID NO: 100359 - RNA, 19 nt, Artificial Sequence
  Description of Artificial Sequence: Synthetic oligonucleotide
ucucgccuaugaucuacau

SEQ ID NO: 100360 - RNA, 19 nt, Artificial Sequence
  Description of Artificial Sequence: Synthetic oligonucleotide
uccuucucgacaggaucac

SEQ ID NO: 100361 - RNA, 19 nt, Artificial Sequence
  Description of Artificial Sequence: Synthetic oligonucleotide
ugucgagggugagcgaccu

SEQ ID NO: 100362 - RNA, 19 nt, Artificial Sequence
  Description of Artificial Sequence: Synthetic oligonucleotide
accugccccguucucgaug

SEQ ID NO: 100363 - RNA, 19 nt, Artificial Sequence
  Description of Artificial Sequence: Synthetic oligonucleotide
auacuccgaaaagcaagga

SEQ ID NO: 100364 - RNA, 19 nt, Artificial Sequence
  Description of Artificial Sequence: Synthetic oligonucleotide
ccuuacaccguuccuguuc

SEQ ID NO: 100365 - RNA, 19 nt, Artificial Sequence
  Description of Artificial Sequence: Synthetic oligonucleotide
gauggccuacaaugaucuc

SEQ ID NO: 100366 - RNA, 19 nt, Artificial Sequence
  Description of Artificial Sequence: Synthetic oligonucleotide
guuggucuagagggauuag

SEQ ID NO: 100367 - RNA, 19 nt, Artificial Sequence
  Description of Artificial Sequence: Synthetic oligonucleotide
cuguaauuuucacgucgca

SEQ ID NO: 100368 - RNA, 19 nt, Artificial Sequence
  Description of Artificial Sequence: Synthetic oligonucleotide
ucuacaucacgcgggcguu

SEQ ID NO: 100369 - RNA, 19 nt, Artificial Sequence
  Description of Artificial Sequence: Synthetic oligonucleotide
cucuagacucccguuuguc

SEQ ID NO: 100370 - RNA, 19 nt, Artificial Sequence
  Description of Artificial Sequence: Synthetic oligonucleotide
caaaccgcucccgucuuuc

SEQ ID NO: 100371 - RNA, 19 nt, Artificial Sequence
  Description of Artificial Sequence: Synthetic oligonucleotide
aaucgugcaucugcaucua

SEQ ID NO: 100372 - RNA, 19 nt, Artificial Sequence
  Description of Artificial Sequence: Synthetic oligonucleotide
agucacggcaggacgcuug

SEQ ID NO: 100373 - RNA, 19 nt, Artificial Sequence
  Description of Artificial Sequence: Synthetic oligonucleotide
cacgcgggcguuucaaaga

SEQ ID NO: 100374 - RNA, 19 nt, Artificial Sequence
  Description of Artificial Sequence: Synthetic oligonucleotide
aaggaucaucucgccuaug

SEQ ID NO: 100375 - RNA, 19 nt, Artificial Sequence
  Description of Artificial Sequence: Synthetic oligonucleotide
ccuguucaauacgaaugcg

SEQ ID NO: 100376 - RNA, 19 nt, Artificial Sequence
  Description of Artificial Sequence: Synthetic oligonucleotide
gacuucucucccagaucgc

SEQ ID NO: 100377 - RNA, 19 nt, Artificial Sequence
  Description of Artificial Sequence: Synthetic oligonucleotide
acggcaggacgcuuguguu

SEQ ID NO: 100378 - RNA, 19 nt, Artificial Sequence
  Description of Artificial Sequence: Synthetic oligonucleotide
cauucucucucucucuagu

SEQ ID NO: 100379 - RNA, 19 nt, Artificial Sequence
  Description of Artificial Sequence: Synthetic oligonucleotide
agaucgcucuggccuuuca

SEQ ID NO: 100380 - RNA, 19 nt, Artificial Sequence
  Description of Artificial Sequence: Synthetic oligonucleotide
aagggucgccuuugacuuu

SEQ ID NO: 100381 - RNA, 19 nt, Artificial Sequence
  Description of Artificial Sequence: Synthetic oligonucleotide
ggguaccuuucaaagcuug

SEQ ID NO: 100382 - RNA, 19 nt, Artificial Sequence
  Description of Artificial Sequence: Synthetic oligonucleotide
aguuuacaggagaucucaa

SEQ ID NO: 100383 - RNA, 19 nt, Artificial Sequence
  Description of Artificial Sequence: Synthetic oligonucleotide
aucacgcgggcguuucaaa

SEQ ID NO: 100384 - RNA, 19 nt, Artificial Sequence
  Description of Artificial Sequence: Synthetic oligonucleotide
ucgucucucuccccucgua

SEQ ID NO: 100385 - RNA, 19 nt, Artificial Sequence
  Description of Artificial Sequence: Synthetic oligonucleotide
ggcgcucucucucucucug

SEQ ID NO: 100386 - RNA, 19 nt, Artificial Sequence
  Description of Artificial Sequence: Synthetic oligonucleotide
ggacuucgagcauuuguaa

SEQ ID NO: 100387 - RNA, 19 nt, Artificial Sequence
  Description of Artificial Sequence: Synthetic oligonucleotide
cauauuugccaaacagguu

SEQ ID NO: 100388 - RNA, 19 nt, Artificial Sequence
  Description of Artificial Sequence: Synthetic oligonucleotide
gcucucgacgcucucuuuc

SEQ ID NO: 100389 - RNA, 19 nt, Artificial Sequence
  Description of Artificial Sequence: Synthetic oligonucleotide
cacuugaaccauuaucguu

SEQ ID NO: 100390 - RNA, 19 nt, Artificial Sequence
  Description of Artificial Sequence: Synthetic oligonucleotide
agguuacauaauacuccga

SEQ ID NO: 100391 - RNA, 19 nt, Artificial Sequence
  Description of Artificial Sequence: Synthetic oligonucleotide
ccauucucucucucucuag

SEQ ID NO: 100392 - RNA, 19 nt, Artificial Sequence
  Description of Artificial Sequence: Synthetic oligonucleotide
gggugagcgaccucagcuc

SEQ ID NO: 100393 - RNA, 19 nt, Artificial Sequence
  Description of Artificial Sequence: Synthetic oligonucleotide
cgucgcauuagcuuccauc

SEQ ID NO: 100394 - RNA, 19 nt, Artificial Sequence
  Description of Artificial Sequence: Synthetic oligonucleotide
uugaaccauuaucguucuu

SEQ ID NO: 100395 - RNA, 19 nt, Artificial Sequence
  Description of Artificial Sequence: Synthetic oligonucleotide
ugucguucuucgggguagu

SEQ ID NO: 100396 - RNA, 19 nt, Artificial Sequence
  Description of Artificial Sequence: Synthetic oligonucleotide
ccuauuaacuggagaugca

SEQ ID NO: 100397 - RNA, 19 nt, Artificial Sequence
  Description of Artificial Sequence: Synthetic oligonucleotide
ccguucacgaauuauucua

SEQ ID NO: 100398 - RNA, 19 nt, Artificial Sequence
  Description of Artificial Sequence: Synthetic oligonucleotide
acgcucucgacgcucucuu

SEQ ID NO: 100399 - RNA, 19 nt, Artificial Sequence
  Description of Artificial Sequence: Synthetic oligonucleotide
gcucuguuggcgauaguca

SEQ ID NO: 100400 - RNA, 19 nt, Artificial Sequence
  Description of Artificial Sequence: Synthetic oligonucleotide
acaucacgcgggcguuuca

SEQ ID NO: 100401 - RNA, 19 nt, Artificial Sequence
  Description of Artificial Sequence: Synthetic oligonucleotide
uguaagcguucccguucuu

SEQ ID NO: 100402 - RNA, 19 nt, Artificial Sequence
  Description of Artificial Sequence: Synthetic oligonucleotide
uguuggcgauagucagauc

SEQ ID NO: 100403 - RNA, 19 nt, Artificial Sequence
  Description of Artificial Sequence: Synthetic oligonucleotide
gaccggccaucaccaauuc

SEQ ID NO: 100404 - RNA, 19 nt, Artificial Sequence
  Description of Artificial Sequence: Synthetic oligonucleotide
gugucgagggugagcgacc

SEQ ID NO: 100405 - RNA, 19 nt, Artificial Sequence
  Description of Artificial Sequence: Synthetic oligonucleotide
aacuaccuuugcacuuaaa

SEQ ID NO: 100406 - RNA, 19 nt, Artificial Sequence
  Description of Artificial Sequence: Synthetic oligonucleotide
ggcgauagucagauccaug

SEQ ID NO: 100407 - RNA, 19 nt, Artificial Sequence
  Description of Artificial Sequence: Synthetic oligonucleotide
aaccugccccguucucgau

SEQ ID NO: 100408 - RNA, 19 nt, Artificial Sequence
  Description of Artificial Sequence: Synthetic oligonucleotide
ccgucuuucaaaggacgag

SEQ ID NO: 100409 - RNA, 19 nt, Artificial Sequence
  Description of Artificial Sequence: Synthetic oligonucleotide
gugcgauggagaugugcaa

SEQ ID NO: 100410 - RNA, 19 nt, Artificial Sequence
  Description of Artificial Sequence: Synthetic oligonucleotide
cucuuugaacuuauccguu

SEQ ID NO: 100411 - RNA, 19 nt, Artificial Sequence
  Description of Artificial Sequence: Synthetic oligonucleotide
uccuuacaccguuccuguu

SEQ ID NO: 100412 - RNA, 19 nt, Artificial Sequence
  Description of Artificial Sequence: Synthetic oligonucleotide
aggcgcucucucucucucu

SEQ ID NO: 100413 - RNA, 19 nt, Artificial Sequence
  Description of Artificial Sequence: Synthetic oligonucleotide
caagcguucgcguuccauu

SEQ ID NO: 100414 - RNA, 19 nt, Artificial Sequence
  Description of Artificial Sequence: Synthetic oligonucleotide
acaaaccgcucccgucuuu

SEQ ID NO: 100415 - RNA, 19 nt, Artificial Sequence
  Description of Artificial Sequence: Synthetic oligonucleotide
cuguaagcguucccguucu

SEQ ID NO: 100416 - RNA, 19 nt, Artificial Sequence
  Description of Artificial Sequence: Synthetic oligonucleotide
cucucgacgcucucuuucu

SEQ ID NO: 100417 - RNA, 19 nt, Artificial Sequence
  Description of Artificial Sequence: Synthetic oligonucleotide
cuguuggcgauagucagau

SEQ ID NO: 100418 - RNA, 19 nt, Artificial Sequence
  Description of Artificial Sequence: Synthetic oligonucleotide
caacucuagacucccguuu

SEQ ID NO: 100419 - RNA, 19 nt, Artificial Sequence
  Description of Artificial Sequence: Synthetic oligonucleotide
cuaaugcguucacgcucuc

SEQ ID NO: 100420 - RNA, 19 nt, Artificial Sequence
  Description of Artificial Sequence: Synthetic oligonucleotide
uccaagcguucgcguucca

SEQ ID NO: 100421 - RNA, 19 nt, Artificial Sequence
  Description of Artificial Sequence: Synthetic oligonucleotide
ucacgcucucgacgcucuc

SEQ ID NO: 100422 - RNA, 19 nt, Artificial Sequence
  Description of Artificial Sequence: Synthetic oligonucleotide
ucccguccaugacguucca

SEQ ID NO: 100423 - RNA, 19 nt, Artificial Sequence
  Description of Artificial Sequence: Synthetic oligonucleotide
ccguuccuguucaauacga

SEQ ID NO: 100424 - RNA, 19 nt, Artificial Sequence
  Description of Artificial Sequence: Synthetic oligonucleotide
gcgauggagaugugcaaua

SEQ ID NO: 100425 - RNA, 19 nt, Artificial Sequence
  Description of Artificial Sequence: Synthetic oligonucleotide
gucguucuucgggguagug

SEQ ID NO: 100426 - RNA, 19 nt, Artificial Sequence
  Description of Artificial Sequence: Synthetic oligonucleotide
cgaauuauucuaaugcguu

SEQ ID NO: 100427 - RNA, 19 nt, Artificial Sequence
  Description of Artificial Sequence: Synthetic oligonucleotide
gguccacuuguaucccguc

SEQ ID NO: 100428 - RNA, 19 nt, Artificial Sequence
  Description of Artificial Sequence: Synthetic oligonucleotide
cccgucuuucaaaggacga

SEQ ID NO: 100429 - RNA, 19 nt, Artificial Sequence
  Description of Artificial Sequence: Synthetic oligonucleotide
cguucacgaauuauucuaa

SEQ ID NO: 100430 - RNA, 19 nt, Artificial Sequence
  Description of Artificial Sequence: Synthetic oligonucleotide
aaaccgccucggugccaau

SEQ ID NO: 100431 - RNA, 19 nt, Artificial Sequence
  Description of Artificial Sequence: Synthetic oligonucleotide
gcguucgcguuccauucuc

SEQ ID NO: 100432 - RNA, 19 nt, Artificial Sequence
  Description of Artificial Sequence: Synthetic oligonucleotide
caucacgcgggcguuucaa

SEQ ID NO: 100433 - RNA, 19 nt, Artificial Sequence
  Description of Artificial Sequence: Synthetic oligonucleotide
aaccgccguggagguccac

SEQ ID NO: 100434 - RNA, 19 nt, Artificial Sequence
  Description of Artificial Sequence: Synthetic oligonucleotide
cuuuaugguucggauucau

SEQ ID NO: 100435 - RNA, 19 nt, Artificial Sequence
  Description of Artificial Sequence: Synthetic oligonucleotide
gggauuagggccagcuucu

SEQ ID NO: 100436 - RNA, 19 nt, Artificial Sequence
  Description of Artificial Sequence: Synthetic oligonucleotide
caaaaccgccguggagguc

SEQ ID NO: 100437 - RNA, 19 nt, Artificial Sequence
  Description of Artificial Sequence: Synthetic oligonucleotide
gucacggcaggacgcuugu

SEQ ID NO: 100438 - RNA, 19 nt, Artificial Sequence
  Description of Artificial Sequence: Synthetic oligonucleotide
cuaggcgcucucucucucu

SEQ ID NO: 100439 - RNA, 19 nt, Artificial Sequence
  Description of Artificial Sequence: Synthetic oligonucleotide
ccguccaugacguuccacu

SEQ ID NO: 100440 - RNA, 19 nt, Artificial Sequence
  Description of Artificial Sequence: Synthetic oligonucleotide
gguccacucuuaaacggcu

SEQ ID NO: 100441 - RNA, 19 nt, Artificial Sequence
  Description of Artificial Sequence: Synthetic oligonucleotide
ccuucucgacaggaucacc

SEQ ID NO: 100442 - RNA, 19 nt, Artificial Sequence
  Description of Artificial Sequence: Synthetic oligonucleotide
acgucgcauuagcuuccau

SEQ ID NO: 100443 - RNA, 19 nt, Artificial Sequence
  Description of Artificial Sequence: Synthetic oligonucleotide
gcucucucucucucuguaa

SEQ ID NO: 100444 - RNA, 19 nt, Artificial Sequence
  Description of Artificial Sequence: Synthetic oligonucleotide
gaacuuucucuggcuuccu

SEQ ID NO: 100445 - RNA, 19 nt, Artificial Sequence
  Description of Artificial Sequence: Synthetic oligonucleotide
cugaccggccaucaccaau

SEQ ID NO: 100446 - RNA, 19 nt, Artificial Sequence
  Description of Artificial Sequence: Synthetic oligonucleotide
accucucgucugucuguuu

SEQ ID NO: 100447 - RNA, 19 nt, Artificial Sequence
  Description of Artificial Sequence: Synthetic oligonucleotide
cuucccguucacgaauuau

SEQ ID NO: 100448 - RNA, 19 nt, Artificial Sequence
  Description of Artificial Sequence: Synthetic oligonucleotide
cucucucgagcaauccguu

SEQ ID NO: 100449 - RNA, 19 nt, Artificial Sequence
  Description of Artificial Sequence: Synthetic oligonucleotide
cugaggcacuacuucgauu

SEQ ID NO: 100450 - RNA, 19 nt, Artificial Sequence
  Description of Artificial Sequence: Synthetic oligonucleotide
ggcuuacuugcuucagaau

SEQ ID NO: 100451 - RNA, 19 nt, Artificial Sequence
  Description of Artificial Sequence: Synthetic oligonucleotide
guagugcugugcuccgcuu

SEQ ID NO: 100452 - RNA, 19 nt, Artificial Sequence
  Description of Artificial Sequence: Synthetic oligonucleotide
cacgucgcauuagcuucca

SEQ ID NO: 100453 - RNA, 19 nt, Artificial Sequence
  Description of Artificial Sequence: Synthetic oligonucleotide
cccguucacgaauuauucu

SEQ ID NO: 100454 - RNA, 19 nt, Artificial Sequence
  Description of Artificial Sequence: Synthetic oligonucleotide
ccucggugccaauccuuuc

SEQ ID NO: 100455 - RNA, 19 nt, Artificial Sequence
  Description of Artificial Sequence: Synthetic oligonucleotide
cgccuaugaucuacaucac

SEQ ID NO: 100456 - RNA, 19 nt, Artificial Sequence
  Description of Artificial Sequence: Synthetic oligonucleotide
ccacuacaugucguucuuc

SEQ ID NO: 100457 - RNA, 19 nt, Artificial Sequence
  Description of Artificial Sequence: Synthetic oligonucleotide
ccgaaaagcaaggaacaau

SEQ ID NO: 100458 - RNA, 19 nt, Artificial Sequence
  Description of Artificial Sequence: Synthetic oligonucleotide
ccacugacccagauauucu

SEQ ID NO: 100459 - RNA, 19 nt, Artificial Sequence
  Description of Artificial Sequence: Synthetic oligonucleotide
gcgggcguuucaaagaauu

SEQ ID NO: 100460 - RNA, 19 nt, Artificial Sequence
  Description of Artificial Sequence: Synthetic oligonucleotide
ggaucacccuucacggagu

SEQ ID NO: 100461 - RNA, 19 nt, Artificial Sequence
  Description of Artificial Sequence: Synthetic oligonucleotide
cguucucgaugacugaagu

SEQ ID NO: 100462 - RNA, 19 nt, Artificial Sequence
  Description of Artificial Sequence: Synthetic oligonucleotide
cacgcucucgacgcucucu

SEQ ID NO: 100463 - RNA, 19 nt, Artificial Sequence
  Description of Artificial Sequence: Synthetic oligonucleotide
ccuggacucuuugaacuua

SEQ ID NO: 100464 - RNA, 19 nt, Artificial Sequence
  Description of Artificial Sequence: Synthetic oligonucleotide
gggugucgagggugagcga

SEQ ID NO: 100465 - RNA, 19 nt, Artificial Sequence
  Description of Artificial Sequence: Synthetic oligonucleotide
cccguccaugacguuccac

SEQ ID NO: 100466 - RNA, 19 nt, Artificial Sequence
  Description of Artificial Sequence: Synthetic oligonucleotide
gcguucccuuuccaagcgu

SEQ ID NO: 100467 - RNA, 19 nt, Artificial Sequence
  Description of Artificial Sequence: Synthetic oligonucleotide
guaucccguccaugacguu

SEQ ID NO: 100468 - RNA, 19 nt, Artificial Sequence
  Description of Artificial Sequence: Synthetic oligonucleotide
cccguuugucuguggacau

SEQ ID NO: 100469 - RNA, 19 nt, Artificial Sequence
  Description of Artificial Sequence: Synthetic oligonucleotide
cuacaucacgcgggcguuu

SEQ ID NO: 100470 - RNA, 19 nt, Artificial Sequence
  Description of Artificial Sequence: Synthetic oligonucleotide
cgcucucucucucucugua

SEQ ID NO: 100471 - RNA, 19 nt, Artificial Sequence
  Description of Artificial Sequence: Synthetic oligonucleotide
gcgcucucucucucucugu

SEQ ID NO: 100472 - RNA, 19 nt, Artificial Sequence
  Description of Artificial Sequence: Synthetic oligonucleotide
gccucggugccaauccuuu

SEQ ID NO: 100473 - RNA, 19 nt, Artificial Sequence
  Description of Artificial Sequence: Synthetic oligonucleotide
ccaugacguuccacuacau

SEQ ID NO: 100474 - RNA, 19 nt, Artificial Sequence
  Description of Artificial Sequence: Synthetic oligonucleotide
cgacgcucucuuucugcaa

SEQ ID NO: 100475 - RNA, 19 nt, Artificial Sequence
  Description of Artificial Sequence: Synthetic oligonucleotide
ccaagcguucgcguuccau

SEQ ID NO: 100476 - RNA, 19 nt, Artificial Sequence
  Description of Artificial Sequence: Synthetic oligonucleotide
cgccucggugccaauccuu

SEQ ID NO: 100477 - RNA, 19 nt, Artificial Sequence
  Description of Artificial Sequence: Synthetic oligonucleotide
cgcgggcguuucaaagaau

SEQ ID NO: 100478 - RNA, 19 nt, Artificial Sequence
  Description of Artificial Sequence: Synthetic oligonucleotide
aaacuaugauuuuagaggc

SEQ ID NO: 100479 - RNA, 19 nt, Artificial Sequence
  Description of Artificial Sequence: Synthetic oligonucleotide
aauuaaaugaguggcaugg

SEQ ID NO: 100480 - RNA, 19 nt, Artificial Sequence
  Description of Artificial Sequence: Synthetic oligonucleotide
aauauaacugccccauuac

SEQ ID NO: 100481 - RNA, 19 nt, Artificial Sequence
  Description of Artificial Sequence: Synthetic oligonucleotide
gaaacaguaucacauagag

SEQ ID NO: 100482 - RNA, 19 nt, Artificial Sequence
  Description of Artificial Sequence: Synthetic oligonucleotide
uuugucgacaaguaaaucc

SEQ ID NO: 100483 - RNA, 19 nt, Artificial Sequence
  Description of Artificial Sequence: Synthetic oligonucleotide
aauaccgaauaauuaucac

SEQ ID NO: 100484 - RNA, 19 nt, Artificial Sequence
  Description of Artificial Sequence: Synthetic oligonucleotide
aauaaucuacucucccagc

SEQ ID NO: 100485 - RNA, 19 nt, Artificial Sequence
  Description of Artificial Sequence: Synthetic oligonucleotide
aacauagcaacaaagaccu

SEQ ID NO: 100486 - RNA, 19 nt, Artificial Sequence
  Description of Artificial Sequence: Synthetic oligonucleotide
auguauuccgugcucaucc

SEQ ID NO: 100487 - RNA, 19 nt, Artificial Sequence
  Description of Artificial Sequence: Synthetic oligonucleotide
  modified_base (6)..(6): a, c, u, g, unknown or other
uaugunuuccucuucacug

SEQ ID NO: 100488 - RNA, 19 nt, Artificial Sequence
  Description of Artificial Sequence: Synthetic oligonucleotide
uugucgacaaguaaauccg

SEQ ID NO: 100489 - RNA, 19 nt, Artificial Sequence
  Description of Artificial Sequence: Synthetic oligonucleotide
ucuaguugcuuucaugggg

SEQ ID NO: 100490 - RNA, 19 nt, Artificial Sequence
  Description of Artificial Sequence: Synthetic oligonucleotide
uggaacgucauaaucaagc

SEQ ID NO: 100491 - RNA, 19 nt, Artificial Sequence
  Description of Artificial Sequence: Synthetic oligonucleotide
uauaagaccucacuuaggu

SEQ ID NO: 100492 - RNA, 19 nt, Artificial Sequence
  Description of Artificial Sequence: Synthetic oligonucleotide
uuauugucaucaaugguag

SEQ ID NO: 100493 - RNA, 19 nt, Artificial Sequence
  Description of Artificial Sequence: Synthetic oligonucleotide
uucuaauuauuauaucuag

SEQ ID NO: 100494 - RNA, 19 nt, Artificial Sequence
  Description of Artificial Sequence: Synthetic oligonucleotide
aaguguaggacacaaacau

SEQ ID NO: 100495 - RNA, 19 nt, Artificial Sequence
  Description of Artificial Sequence: Synthetic oligonucleotide
uuuuaaaccuagaucaagu

SEQ ID NO: 100496 - RNA, 19 nt, Artificial Sequence
  Description of Artificial Sequence: Synthetic oligonucleotide
agauaauuuggggaaagcc

SEQ ID NO: 100497 - RNA, 19 nt, Artificial Sequence
  Description of Artificial Sequence: Synthetic oligonucleotide
agaaauaccgaauaauuau

SEQ ID NO: 100498 - RNA, 19 nt, Artificial Sequence
  Description of Artificial Sequence: Synthetic oligonucleotide
gaauaaucuacucucccag

SEQ ID NO: 100499 - RNA, 19 nt, Artificial Sequence
  Description of Artificial Sequence: Synthetic oligonucleotide
aggacaauuaaaugagugg

SEQ ID NO: 100500 - RNA, 19 nt, Artificial Sequence
  Description of Artificial Sequence: Synthetic oligonucleotide
auuauaucuaguugcuuuc

SEQ ID NO: 100501 - RNA, 19 nt, Artificial Sequence
  Description of Artificial Sequence: Synthetic oligonucleotide
ugauuuuagaggcuggcug

SEQ ID NO: 100502 - RNA, 19 nt, Artificial Sequence
  Description of Artificial Sequence: Synthetic oligonucleotide
accuagaucaaguaaccac

SEQ ID NO: 100503 - RNA, 19 nt, Artificial Sequence
  Description of Artificial Sequence: Synthetic oligonucleotide
auaacucccagaaauaccg

SEQ ID NO: 100504 - RNA, 19 nt, Artificial Sequence
  Description of Artificial Sequence: Synthetic oligonucleotide
uauuucugacaacaacugg

SEQ ID NO: 100505 - RNA, 19 nt, Artificial Sequence
  Description of Artificial Sequence: Synthetic oligonucleotide
ugcauuaaaaucccuacuc

SEQ ID NO: 100506 - RNA, 19 nt, Artificial Sequence
  Description of Artificial Sequence: Synthetic oligonucleotide
uguguuacgguuaugcaaa

SEQ ID NO: 100507 - RNA, 19 nt, Artificial Sequence
  Description of Artificial Sequence: Synthetic oligonucleotide
aaaccuagaucaaguaacc

SEQ ID NO: 100508 - RNA, 19 nt, Artificial Sequence
  Description of Artificial Sequence: Synthetic oligonucleotide
cuucccgucagccauaagg

SEQ ID NO: 100509 - RNA, 19 nt, Artificial Sequence
  Description of Artificial Sequence: Synthetic oligonucleotide
ucuaauuauuauaucuagu

SEQ ID NO: 100510 - RNA, 19 nt, Artificial Sequence
  Description of Artificial Sequence: Synthetic oligonucleotide
uuucuaauuauuauaucua

SEQ ID NO: 100511 - RNA, 19 nt, Artificial Sequence
  Description of Artificial Sequence: Synthetic oligonucleotide
auccauaaaauuuaggauu

SEQ ID NO: 100512 - RNA, 19 nt, Artificial Sequence
  Description of Artificial Sequence: Synthetic oligonucleotide
uaucuaccaacuuuuaaga

SEQ ID NO: 100513 - RNA, 19 nt, Artificial Sequence
  Description of Artificial Sequence: Synthetic oligonucleotide
uuauaauuacucuuacagu

SEQ ID NO: 100514 - RNA, 19 nt, Artificial Sequence
  Description of Artificial Sequence: Synthetic oligonucleotide
uuacgguuaugcaaaauac

SEQ ID NO: 100515 - RNA, 19 nt, Artificial Sequence
  Description of Artificial Sequence: Synthetic oligonucleotide
agagcaugaaauaucuacc

SEQ ID NO: 100516 - RNA, 19 nt, Artificial Sequence
  Description of Artificial Sequence: Synthetic oligonucleotide
uuccauuaauaaauaagga

SEQ ID NO: 100517 - RNA, 19 nt, Artificial Sequence
  Description of Artificial Sequence: Synthetic oligonucleotide
aacucuaagccuugccuuc

SEQ ID NO: 100518 - RNA, 19 nt, Artificial Sequence
  Description of Artificial Sequence: Synthetic oligonucleotide
acagauauaaucccucuga

SEQ ID NO: 100519 - RNA, 19 nt, Artificial Sequence
  Description of Artificial Sequence: Synthetic oligonucleotide
ugucuauucuguuagugcu

SEQ ID NO: 100520 - RNA, 19 nt, Artificial Sequence
  Description of Artificial Sequence: Synthetic oligonucleotide
aucacuacuaaugccaccg

SEQ ID NO: 100521 - RNA, 19 nt, Artificial Sequence
  Description of Artificial Sequence: Synthetic oligonucleotide
auacuuuuacuaugcuagc

SEQ ID NO: 100522 - RNA, 19 nt, Artificial Sequence
  Description of Artificial Sequence: Synthetic oligonucleotide
aaauccgcagaucucacau

SEQ ID NO: 100523 - RNA, 19 nt, Artificial Sequence
  Description of Artificial Sequence: Synthetic oligonucleotide
agaggaaacaauaaugugu

SEQ ID NO: 100524 - RNA, 19 nt, Artificial Sequence
  Description of Artificial Sequence: Synthetic oligonucleotide
aucugugucucccaaugac

SEQ ID NO: 100525 - RNA, 19 nt, Artificial Sequence
  Description of Artificial Sequence: Synthetic oligonucleotide
auuaucacaacuauaucca

SEQ ID NO: 100526 - RNA, 19 nt, Artificial Sequence
  Description of Artificial Sequence: Synthetic oligonucleotide
uguaccaauguaccaaagu

SEQ ID NO: 100527 - RNA, 19 nt, Artificial Sequence
  Description of Artificial Sequence: Synthetic oligonucleotide
aguaagagcaugaaauauc

SEQ ID NO: 100528 - RNA, 19 nt, Artificial Sequence
  Description of Artificial Sequence: Synthetic oligonucleotide
uugucuauucuguuagugc

SEQ ID NO: 100529 - RNA, 19 nt, Artificial Sequence
  Description of Artificial Sequence: Synthetic oligonucleotide
gguagcaccgaguauaucc

SEQ ID NO: 100530 - RNA, 19 nt, Artificial Sequence
  Description of Artificial Sequence: Synthetic oligonucleotide
  modified_base (2)..(2): a, c, u, g, unknown or other
unuuccucuucacugauua

SEQ ID NO: 100531 - RNA, 19 nt, Artificial Sequence
  Description of Artificial Sequence: Synthetic oligonucleotide
aaauaccgaauaauuauca

SEQ ID NO: 100532 - RNA, 19 nt, Artificial Sequence
  Description of Artificial Sequence: Synthetic oligonucleotide
acuaugcuagcacuuguuc

SEQ ID NO: 100533 - RNA, 19 nt, Artificial Sequence
  Description of Artificial Sequence: Synthetic oligonucleotide
aauguguuacgguuaugca

SEQ ID NO: 100534 - RNA, 19 nt, Artificial Sequence
  Description of Artificial Sequence: Synthetic oligonucleotide
uaaaagauaguaagagcau

SEQ ID NO: 100535 - RNA, 19 nt, Artificial Sequence
  Description of Artificial Sequence: Synthetic oligonucleotide
uaggauugccaauugauau

SEQ ID NO: 100536 - RNA, 19 nt, Artificial Sequence
  Description of Artificial Sequence: Synthetic oligonucleotide
gaaggcgagagauagaugu

SEQ ID NO: 100537 - RNA, 19 nt, Artificial Sequence
  Description of Artificial Sequence: Synthetic oligonucleotide
ucuaccaacuuuuaagauu

SEQ ID NO: 100538 - RNA, 19 nt, Artificial Sequence
  Description of Artificial Sequence: Synthetic oligonucleotide
cauaacucccagaaauacc

SEQ ID NO: 100539 - RNA, 19 nt, Artificial Sequence
  Description of Artificial Sequence: Synthetic oligonucleotide
auaaaauuuaggauugcca

SEQ ID NO: 100540 - RNA, 19 nt, Artificial Sequence
  Description of Artificial Sequence: Synthetic oligonucleotide
aucuguguaccaauguacc

SEQ ID NO: 100541 - RNA, 19 nt, Artificial Sequence
  Description of Artificial Sequence: Synthetic oligonucleotide
ucgacaaguaaauccgcag

SEQ ID NO: 100542 - RNA, 19 nt, Artificial Sequence
  Description of Artificial Sequence: Synthetic oligonucleotide
uuuacuaugcuagcacuug

SEQ ID NO: 100543 - RNA, 19 nt, Artificial Sequence
  Description of Artificial Sequence: Synthetic oligonucleotide
uguaauugguucugacuug

SEQ ID NO: 100544 - RNA, 19 nt, Artificial Sequence
  Description of Artificial Sequence: Synthetic oligonucleotide
aaaacacgaucugugucuc

SEQ ID NO: 100545 - RNA, 19 nt, Artificial Sequence
  Description of Artificial Sequence: Synthetic oligonucleotide
uggguguacaguaagcguc

SEQ ID NO: 100546 - RNA, 19 nt, Artificial Sequence
  Description of Artificial Sequence: Synthetic oligonucleotide
ugccccauuacaauauucu

SEQ ID NO: 100547 - RNA, 19 nt, Artificial Sequence
  Description of Artificial Sequence: Synthetic oligonucleotide
aaucagacuuuccauuaau

SEQ ID NO: 100548 - RNA, 19 nt, Artificial Sequence
  Description of Artificial Sequence: Synthetic oligonucleotide
agacgaguugcaacgaacc

SEQ ID NO: 100549 - RNA, 19 nt, Artificial Sequence
  Description of Artificial Sequence: Synthetic oligonucleotide
uguguuuaagauuguuccu

SEQ ID NO: 100550 - RNA, 19 nt, Artificial Sequence
  Description of Artificial Sequence: Synthetic oligonucleotide
ugcagucccauuuauaauu

SEQ ID NO: 100551 - RNA, 19 nt, Artificial Sequence
  Description of Artificial Sequence: Synthetic oligonucleotide
uuguaauggcuucucgccc

SEQ ID NO: 100552 - RNA, 19 nt, Artificial Sequence
  Description of Artificial Sequence: Synthetic oligonucleotide
aagcagagaaaauuugaua

SEQ ID NO: 100553 - RNA, 19 nt, Artificial Sequence
  Description of Artificial Sequence: Synthetic oligonucleotide
uuaggauugccaauugaua

SEQ ID NO: 100554 - RNA, 19 nt, Artificial Sequence
  Description of Artificial Sequence: Synthetic oligonucleotide
auugccaauugauauugga

SEQ ID NO: 100555 - RNA, 19 nt, Artificial Sequence
  Description of Artificial Sequence: Synthetic oligonucleotide
aaucccuacucccaaggaa

SEQ ID NO: 100556 - RNA, 19 nt, Artificial Sequence
  Description of Artificial Sequence: Synthetic oligonucleotide
aagggaugccuuuugucga

SEQ ID NO: 100557 - RNA, 19 nt, Artificial Sequence
  Description of Artificial Sequence: Synthetic oligonucleotide
ugugguagcaccgaguaua

SEQ ID NO: 100558 - RNA, 19 nt, Artificial Sequence
  Description of Artificial Sequence: Synthetic oligonucleotide
gaacgucauaaucaagcug

SEQ ID NO: 100559 - RNA, 19 nt, Artificial Sequence
  Description of Artificial Sequence: Synthetic oligonucleotide
ggacaauuaaaugaguggc

SEQ ID NO: 100560 - RNA, 19 nt, Artificial Sequence
  Description of Artificial Sequence: Synthetic oligonucleotide
aacccaagcaaggaguaug

SEQ ID NO: 100561 - RNA, 19 nt, Artificial Sequence
  Description of Artificial Sequence: Synthetic oligonucleotide
gagcaugaaauaucuacca

SEQ ID NO: 100562 - RNA, 19 nt, Artificial Sequence
  Description of Artificial Sequence: Synthetic oligonucleotide
ugugaaucauccuguguac

SEQ ID NO: 100563 - RNA, 19 nt, Artificial Sequence
  Description of Artificial Sequence: Synthetic oligonucleotide
cuauaagaccucacuuagg

SEQ ID NO: 100564 - RNA, 19 nt, Artificial Sequence
  Description of Artificial Sequence: Synthetic oligonucleotide
ugaccagcccuucacgugc

SEQ ID NO: 100565 - RNA, 19 nt, Artificial Sequence
  Description of Artificial Sequence: Synthetic oligonucleotide
caacgaaccagucuuggac

SEQ ID NO: 100566 - RNA, 19 nt, Artificial Sequence
  Description of Artificial Sequence: Synthetic oligonucleotide
cuugcagacgaguugcaac

SEQ ID NO: 100567 - RNA, 19 nt, Artificial Sequence
  Description of Artificial Sequence: Synthetic oligonucleotide
cuaugauuuuagaggcugg

SEQ ID NO: 100568 - RNA, 19 nt, Artificial Sequence
  Description of Artificial Sequence: Synthetic oligonucleotide
gcuauaagaccucacuuag

SEQ ID NO: 100569 - RNA, 19 nt, Artificial Sequence
  Description of Artificial Sequence: Synthetic oligonucleotide
uuuuacuaugcuagcacuu

SEQ ID NO: 100570 - RNA, 19 nt, Artificial Sequence
  Description of Artificial Sequence: Synthetic oligonucleotide
auaguaagagcaugaaaua

SEQ ID NO: 100571 - RNA, 19 nt, Artificial Sequence
  Description of Artificial Sequence: Synthetic oligonucleotide
gacuaaacccugugaaaug

SEQ ID NO: 100572 - RNA, 19 nt, Artificial Sequence
  Description of Artificial Sequence: Synthetic oligonucleotide
cugaucuguaugauguuug

SEQ ID NO: 100573 - RNA, 19 nt, Artificial Sequence
  Description of Artificial Sequence: Synthetic oligonucleotide
accgaauaauuaucacaac

SEQ ID NO: 100574 - RNA, 19 nt, Artificial Sequence
  Description of Artificial Sequence: Synthetic oligonucleotide
auguguuacgguuaugcaa

SEQ ID NO: 100575 - RNA, 19 nt, Artificial Sequence
  Description of Artificial Sequence: Synthetic oligonucleotide
cuagaggaaacaauaaugu

SEQ ID NO: 100576 - RNA, 19 nt, Artificial Sequence
  Description of Artificial Sequence: Synthetic oligonucleotide
augucgcagaaguuguuuc

SEQ ID NO: 100577 - RNA, 19 nt, Artificial Sequence
  Description of Artificial Sequence: Synthetic oligonucleotide
guuacgguuaugcaaaaua

SEQ ID NO: 100578 - RNA, 19 nt, Artificial Sequence
  Description of Artificial Sequence: Synthetic oligonucleotide
ggucuaguugcagaaaugg

SEQ ID NO: 100579 - RNA, 19 nt, Artificial Sequence
  Description of Artificial Sequence: Synthetic oligonucleotide
uaggucuaguugcagaaau

SEQ ID NO: 100580 - RNA, 19 nt, Artificial Sequence
  Description of Artificial Sequence: Synthetic oligonucleotide
acauagagccccauuuuac

SEQ ID NO: 100581 - RNA, 19 nt, Artificial Sequence
  Description of Artificial Sequence: Synthetic oligonucleotide
aaguaaauccgcagaucuc

SEQ ID NO: 100582 - RNA, 19 nt, Artificial Sequence
  Description of Artificial Sequence: Synthetic oligonucleotide
ugauuaacuaucucuucuu

SEQ ID NO: 100583 - RNA, 19 nt, Artificial Sequence
  Description of Artificial Sequence: Synthetic oligonucleotide
uuacuaugcuagcacuugu

SEQ ID NO: 100584 - RNA, 19 nt, Artificial Sequence
  Description of Artificial Sequence: Synthetic oligonucleotide
acaaguaaauccgcagauc

SEQ ID NO: 100585 - RNA, 19 nt, Artificial Sequence
  Description of Artificial Sequence: Synthetic oligonucleotide
agccauaaggcucacccgu

SEQ ID NO: 100586 - RNA, 19 nt, Artificial Sequence
  Description of Artificial Sequence: Synthetic oligonucleotide
uacuuuuacuaugcuagca

SEQ ID NO: 100587 - RNA, 19 nt, Artificial Sequence
  Description of Artificial Sequence: Synthetic oligonucleotide
auuaaaugaguggcauggg

SEQ ID NO: 100588 - RNA, 19 nt, Artificial Sequence
  Description of Artificial Sequence: Synthetic oligonucleotide
caauuaaaugaguggcaug

SEQ ID NO: 100589 - RNA, 19 nt, Artificial Sequence
  Description of Artificial Sequence: Synthetic oligonucleotide
caaaggguaaguguaggac

SEQ ID NO: 100590 - RNA, 19 nt, Artificial Sequence
  Description of Artificial Sequence: Synthetic oligonucleotide
gaaccucugugguagcacc

SEQ ID NO: 100591 - RNA, 19 nt, Artificial Sequence
  Description of Artificial Sequence: Synthetic oligonucleotide
aguugcaacgaaccagucu

SEQ ID NO: 100592 - RNA, 19 nt, Artificial Sequence
  Description of Artificial Sequence: Synthetic oligonucleotide
agacugauguucuucugga

SEQ ID NO: 100593 - RNA, 19 nt, Artificial Sequence
  Description of Artificial Sequence: Synthetic oligonucleotide
aggaaauauaacugcccca

SEQ ID NO: 100594 - RNA, 19 nt, Artificial Sequence
  Description of Artificial Sequence: Synthetic oligonucleotide
uaguaagagcaugaaauau

SEQ ID NO: 100595 - RNA, 19 nt, Artificial Sequence
  Description of Artificial Sequence: Synthetic oligonucleotide
aaugaguggcaugggaaga

SEQ ID NO: 100596 - RNA, 19 nt, Artificial Sequence
  Description of Artificial Sequence: Synthetic oligonucleotide
aaaugggaauggugcuuag

SEQ ID NO: 100597 - RNA, 19 nt, Artificial Sequence
  Description of Artificial Sequence: Synthetic oligonucleotide
uacuacugcgccagccgcg

SEQ ID NO: 100598 - RNA, 19 nt, Artificial Sequence
  Description of Artificial Sequence: Synthetic oligonucleotide
uccgaguauucucaguguc

SEQ ID NO: 100599 - RNA, 19 nt, Artificial Sequence
  Description of Artificial Sequence: Synthetic oligonucleotide
uggguuagugcccaagaua

SEQ ID NO: 100600 - RNA, 19 nt, Artificial Sequence
  Description of Artificial Sequence: Synthetic oligonucleotide
accgaguauauccgaguuc

SEQ ID NO: 100601 - RNA, 19 nt, Artificial Sequence
  Description of Artificial Sequence: Synthetic oligonucleotide
auauccgaguucaugacca

SEQ ID NO: 100602 - RNA, 19 nt, Artificial Sequence
  Description of Artificial Sequence: Synthetic oligonucleotide
ugcaacgaaccagucuugg

SEQ ID NO: 100603 - RNA, 19 nt, Artificial Sequence
  Description of Artificial Sequence: Synthetic oligonucleotide
guagcaccgaguauauccg

SEQ ID NO: 100604 - RNA, 19 nt, Artificial Sequence
  Description of Artificial Sequence: Synthetic oligonucleotide
aguauucucagugucucga

SEQ ID NO: 100605 - RNA, 19 nt, Artificial Sequence
  Description of Artificial Sequence: Synthetic oligonucleotide
cugacaacaacuggccagg

SEQ ID NO: 100606 - RNA, 19 nt, Artificial Sequence
  Description of Artificial Sequence: Synthetic oligonucleotide
uggagggaugacuaguuau

SEQ ID NO: 100607 - RNA, 19 nt, Artificial Sequence
  Description of Artificial Sequence: Synthetic oligonucleotide
acgaguugcaacgaaccag

SEQ ID NO: 100608 - RNA, 19 nt, Artificial Sequence
  Description of Artificial Sequence: Synthetic oligonucleotide
agcugaauuaggguuuuag

SEQ ID NO: 100609 - RNA, 19 nt, Artificial Sequence
  Description of Artificial Sequence: Synthetic oligonucleotide
uauuggagggaugacuagu

SEQ ID NO: 100610 - RNA, 19 nt, Artificial Sequence
  Description of Artificial Sequence: Synthetic oligonucleotide
agauguuuacaaugcaguu

SEQ ID NO: 100611 - RNA, 19 nt, Artificial Sequence
  Description of Artificial Sequence: Synthetic oligonucleotide
gacaauuaaaugaguggca

SEQ ID NO: 100612 - RNA, 19 nt, Artificial Sequence
  Description of Artificial Sequence: Synthetic oligonucleotide
ucgaaggcgagagauagau

SEQ ID NO: 100613 - RNA, 19 nt, Artificial Sequence
  Description of Artificial Sequence: Synthetic oligonucleotide
caccuaucucucaucacag

SEQ ID NO: 100614 - RNA, 19 nt, Artificial Sequence
  Description of Artificial Sequence: Synthetic oligonucleotide
guaagcgucuuucagagau

SEQ ID NO: 100615 - RNA, 19 nt, Artificial Sequence
  Description of Artificial Sequence: Synthetic oligonucleotide
auggugcuuaguuuacuca

SEQ ID NO: 100616 - RNA, 19 nt, Artificial Sequence
  Description of Artificial Sequence: Synthetic oligonucleotide
uaaauccgcagaucucaca

SEQ ID NO: 100617 - RNA, 19 nt, Artificial Sequence
  Description of Artificial Sequence: Synthetic oligonucleotide
agaaccucugugguagcac

SEQ ID NO: 100618 - RNA, 19 nt, Artificial Sequence
  Description of Artificial Sequence: Synthetic oligonucleotide
agcaugaaauaucuaccaa

SEQ ID NO: 100619 - RNA, 19 nt, Artificial Sequence
  Description of Artificial Sequence: Synthetic oligonucleotide
uggaccuagagcuccgagu

SEQ ID NO: 100620 - RNA, 19 nt, Artificial Sequence
  Description of Artificial Sequence: Synthetic oligonucleotide
cuacucccaaggaaauuag

SEQ ID NO: 100621 - RNA, 19 nt, Artificial Sequence
  Description of Artificial Sequence: Synthetic oligonucleotide
accuaucucucaucacagg

SEQ ID NO: 100622 - RNA, 19 nt, Artificial Sequence
  Description of Artificial Sequence: Synthetic oligonucleotide
gguggguguacaguaagcg

SEQ ID NO: 100623 - RNA, 19 nt, Artificial Sequence
  Description of Artificial Sequence: Synthetic oligonucleotide
uaagcgucuuucagagaug

SEQ ID NO: 100624 - RNA, 19 nt, Artificial Sequence
  Description of Artificial Sequence: Synthetic oligonucleotide
augcuagcacuuguucucc

SEQ ID NO: 100625 - RNA, 19 nt, Artificial Sequence
  Description of Artificial Sequence: Synthetic oligonucleotide
ugacauagagccccauuuu

SEQ ID NO: 100626 - RNA, 19 nt, Artificial Sequence
  Description of Artificial Sequence: Synthetic oligonucleotide
guuaugcaaaauacaccag

SEQ ID NO: 100627 - RNA, 19 nt, Artificial Sequence
  Description of Artificial Sequence: Synthetic oligonucleotide
cauagagccccauuuuaca

SEQ ID NO: 100628 - RNA, 19 nt, Artificial Sequence
  Description of Artificial Sequence: Synthetic oligonucleotide
aaccuagaucaaguaacca

SEQ ID NO: 100629 - RNA, 19 nt, Artificial Sequence
  Description of Artificial Sequence: Synthetic oligonucleotide
uacucccaaggaaauuaga

SEQ ID NO: 100630 - RNA, 19 nt, Artificial Sequence
  Description of Artificial Sequence: Synthetic oligonucleotide
auagggaggagcugcacuu

SEQ ID NO: 100631 - RNA, 19 nt, Artificial Sequence
  Description of Artificial Sequence: Synthetic oligonucleotide
caguaucacauagagcaac

SEQ ID NO: 100632 - RNA, 19 nt, Artificial Sequence
  Description of Artificial Sequence: Synthetic oligonucleotide
aaggcgagagauagauguc

SEQ ID NO: 100633 - RNA, 19 nt, Artificial Sequence
  Description of Artificial Sequence: Synthetic oligonucleotide
ccuguguacugccagauug

SEQ ID NO: 100634 - RNA, 19 nt, Artificial Sequence
  Description of Artificial Sequence: Synthetic oligonucleotide
guaagagcaugaaauaucu

SEQ ID NO: 100635 - RNA, 19 nt, Artificial Sequence
  Description of Artificial Sequence: Synthetic oligonucleotide
  modified_base (7)..(7): a, c, u, g, unknown or other
guaugunuuccucuucacu

SEQ ID NO: 100636 - RNA, 19 nt, Artificial Sequence
  Description of Artificial Sequence: Synthetic oligonucleotide
aaugggaauggugcuuagu

SEQ ID NO: 100637 - RNA, 19 nt, Artificial Sequence
  Description of Artificial Sequence: Synthetic oligonucleotide
acuuagguugguggcagag

SEQ ID NO: 100638 - RNA, 19 nt, Artificial Sequence
  Description of Artificial Sequence: Synthetic oligonucleotide
uucgacaucccuucagcuu

SEQ ID NO: 100639 - RNA, 19 nt, Artificial Sequence
  Description of Artificial Sequence: Synthetic oligonucleotide
aggcuauaagaccucacuu

SEQ ID NO: 100640 - RNA, 19 nt, Artificial Sequence
  Description of Artificial Sequence: Synthetic oligonucleotide
uacuaugcuagcacuuguu

SEQ ID NO: 100641 - RNA, 19 nt, Artificial Sequence
  Description of Artificial Sequence: Synthetic oligonucleotide
aggauugccaauugauauu

SEQ ID NO: 100642 - RNA, 19 nt, Artificial Sequence
  Description of Artificial Sequence: Synthetic oligonucleotide
uaacucccagaaauaccga

SEQ ID NO: 100643 - RNA, 19 nt, Artificial Sequence
  Description of Artificial Sequence: Synthetic oligonucleotide
caucacuacuaaugccacc

SEQ ID NO: 100644 - RNA, 19 nt, Artificial Sequence
  Description of Artificial Sequence: Synthetic oligonucleotide
gacaaguaaauccgcagau

SEQ ID NO: 100645 - RNA, 19 nt, Artificial Sequence
  Description of Artificial Sequence: Synthetic oligonucleotide
gggaugacuaguuauuuaa

SEQ ID NO: 100646 - RNA, 19 nt, Artificial Sequence
  Description of Artificial Sequence: Synthetic oligonucleotide
gaggcuauaagaccucacu

SEQ ID NO: 100647 - RNA, 19 nt, Artificial Sequence
  Description of Artificial Sequence: Synthetic oligonucleotide
gacgaguugcaacgaacca

SEQ ID NO: 100648 - RNA, 19 nt, Artificial Sequence
  Description of Artificial Sequence: Synthetic oligonucleotide
agcaacccaagcaaggagu

SEQ ID NO: 100649 - RNA, 19 nt, Artificial Sequence
  Description of Artificial Sequence: Synthetic oligonucleotide
uuuugucgacaaguaaauc

SEQ ID NO: 100650 - RNA, 19 nt, Artificial Sequence
  Description of Artificial Sequence: Synthetic oligonucleotide
uugcaacgaaccagucuug

SEQ ID NO: 100651 - RNA, 19 nt, Artificial Sequence
  Description of Artificial Sequence: Synthetic oligonucleotide
agagauagauguccugcua

SEQ ID NO: 100652 - RNA, 19 nt, Artificial Sequence
  Description of Artificial Sequence: Synthetic oligonucleotide
gaauuaggguuuuagucuu

SEQ ID NO: 100653 - RNA, 19 nt, Artificial Sequence
  Description of Artificial Sequence: Synthetic oligonucleotide
guauuccgugcucaucccc

SEQ ID NO: 100654 - RNA, 19 nt, Artificial Sequence
  Description of Artificial Sequence: Synthetic oligonucleotide
gcugcgaggcuauaagacc

SEQ ID NO: 100655 - RNA, 19 nt, Artificial Sequence
  Description of Artificial Sequence: Synthetic oligonucleotide
agacagucuaaaugugaaa

SEQ ID NO: 100656 - RNA, 19 nt, Artificial Sequence
  Description of Artificial Sequence: Synthetic oligonucleotide
cagccauaaggcucacccg

SEQ ID NO: 100657 - RNA, 19 nt, Artificial Sequence
  Description of Artificial Sequence: Synthetic oligonucleotide
uagaucaaguaaccaccua

SEQ ID NO: 100658 - RNA, 19 nt, Artificial Sequence
  Description of Artificial Sequence: Synthetic oligonucleotide
gaaaugggaauggugcuua

SEQ ID NO: 100659 - RNA, 19 nt, Artificial Sequence
  Description of Artificial Sequence: Synthetic oligonucleotide
acuacugcgccagccgcgg

SEQ ID NO: 100660 - RNA, 19 nt, Artificial Sequence
  Description of Artificial Sequence: Synthetic oligonucleotide
ucuaagccuugccuucaaa

SEQ ID NO: 100661 - RNA, 19 nt, Artificial Sequence
  Description of Artificial Sequence: Synthetic oligonucleotide
cuggaacgucauaaucaag

SEQ ID NO: 100662 - RNA, 19 nt, Artificial Sequence
  Description of Artificial Sequence: Synthetic oligonucleotide
uugauauuggagggaugac

SEQ ID NO: 100663 - RNA, 19 nt, Artificial Sequence
  Description of Artificial Sequence: Synthetic oligonucleotide
cagcaacccaagcaaggag

SEQ ID NO: 100664 - RNA, 19 nt, Artificial Sequence
  Description of Artificial Sequence: Synthetic oligonucleotide
ccuuuugucgacaaguaaa

SEQ ID NO: 100665 - RNA, 19 nt, Artificial Sequence
  Description of Artificial Sequence: Synthetic oligonucleotide
uuggagggaugacuaguua

SEQ ID NO: 100666 - RNA, 19 nt, Artificial Sequence
  Description of Artificial Sequence: Synthetic oligonucleotide
agggaugacuaguuauuua

SEQ ID NO: 100667 - RNA, 19 nt, Artificial Sequence
  Description of Artificial Sequence: Synthetic oligonucleotide
gggaauggugcuuaguuua

SEQ ID NO: 100668 - RNA, 19 nt, Artificial Sequence
  Description of Artificial Sequence: Synthetic oligonucleotide
cuuuugucgacaaguaaau

SEQ ID NO: 100669 - RNA, 19 nt, Artificial Sequence
  Description of Artificial Sequence: Synthetic oligonucleotide
ucucuccccucaccauggg

SEQ ID NO: 100670 - RNA, 19 nt, Artificial Sequence
  Description of Artificial Sequence: Synthetic oligonucleotide
ggcuauaagaccucacuua

SEQ ID NO: 100671 - RNA, 19 nt, Artificial Sequence
  Description of Artificial Sequence: Synthetic oligonucleotide
aucccuacucccaaggaaa

SEQ ID NO: 100672 - RNA, 19 nt, Artificial Sequence
  Description of Artificial Sequence: Synthetic oligonucleotide
ccgcuucccacaaagauuc

SEQ ID NO: 100673 - RNA, 19 nt, Artificial Sequence
  Description of Artificial Sequence: Synthetic oligonucleotide
ugacuucgacaucccuuca

SEQ ID NO: 100674 - RNA, 19 nt, Artificial Sequence
  Description of Artificial Sequence: Synthetic oligonucleotide
aguaagcgucuuucagaga

SEQ ID NO: 100675 - RNA, 19 nt, Artificial Sequence
  Description of Artificial Sequence: Synthetic oligonucleotide
auaaucaagcugaucugua

SEQ ID NO: 100676 - RNA, 19 nt, Artificial Sequence
  Description of Artificial Sequence: Synthetic oligonucleotide
ucccuacucccaaggaaau

SEQ ID NO: 100677 - RNA, 19 nt, Artificial Sequence
  Description of Artificial Sequence: Synthetic oligonucleotide
cugcaguaugacuucgaca

SEQ ID NO: 100678 - RNA, 19 nt, Artificial Sequence
  Description of Artificial Sequence: Synthetic oligonucleotide
ugcgaggcuauaagaccuc

SEQ ID NO: 100679 - RNA, 19 nt, Artificial Sequence
  Description of Artificial Sequence: Synthetic oligonucleotide
gucgacaaguaaauccgca

SEQ ID NO: 100680 - RNA, 19 nt, Artificial Sequence
  Description of Artificial Sequence: Synthetic oligonucleotide
agcacaauauucacagaua

SEQ ID NO: 100681 - RNA, 19 nt, Artificial Sequence
  Description of Artificial Sequence: Synthetic oligonucleotide
uguuacgguuaugcaaaau

SEQ ID NO: 100682 - RNA, 19 nt, Artificial Sequence
  Description of Artificial Sequence: Synthetic oligonucleotide
ucccuuacacaugcucccc

SEQ ID NO: 100683 - RNA, 19 nt, Artificial Sequence
  Description of Artificial Sequence: Synthetic oligonucleotide
aggucuaguugcagaaaug

SEQ ID NO: 100684 - RNA, 19 nt, Artificial Sequence
  Description of Artificial Sequence: Synthetic oligonucleotide
cacugauuaacuaucucuu

SEQ ID NO: 100685 - RNA, 19 nt, Artificial Sequence
  Description of Artificial Sequence: Synthetic oligonucleotide
cagugucugacuaaacccu

SEQ ID NO: 100686 - RNA, 19 nt, Artificial Sequence
  Description of Artificial Sequence: Synthetic oligonucleotide
gccauauggagguuuggga

SEQ ID NO: 100687 - RNA, 19 nt, Artificial Sequence
  Description of Artificial Sequence: Synthetic oligonucleotide
ccuaucucucaucacagga

SEQ ID NO: 100688 - RNA, 19 nt, Artificial Sequence
  Description of Artificial Sequence: Synthetic oligonucleotide
agaugacccagcucccuua

SEQ ID NO: 100689 - RNA, 19 nt, Artificial Sequence
  Description of Artificial Sequence: Synthetic oligonucleotide
cauagggcaguccccucuc

SEQ ID NO: 100690 - RNA, 19 nt, Artificial Sequence
  Description of Artificial Sequence: Synthetic oligonucleotide
guuuaagauuguuccugua

SEQ ID NO: 100691 - RNA, 19 nt, Artificial Sequence
  Description of Artificial Sequence: Synthetic oligonucleotide
agcuccgaguauucucagu

SEQ ID NO: 100692 - RNA, 19 nt, Artificial Sequence
  Description of Artificial Sequence: Synthetic oligonucleotide
cugcgaggcuauaagaccu

SEQ ID NO: 100693 - RNA, 19 nt, Artificial Sequence
  Description of Artificial Sequence: Synthetic oligonucleotide
ccaccuaucucucaucaca

SEQ ID NO: 100694 - RNA, 19 nt, Artificial Sequence
  Description of Artificial Sequence: Synthetic oligonucleotide
cugacauagagccccauuu

SEQ ID NO: 100695 - RNA, 19 nt, Artificial Sequence
  Description of Artificial Sequence: Synthetic oligonucleotide
accuagagcuccgaguauu

SEQ ID NO: 100696 - RNA, 19 nt, Artificial Sequence
  Description of Artificial Sequence: Synthetic oligonucleotide
cugcacuucuaauucucaa

SEQ ID NO: 100697 - RNA, 19 nt, Artificial Sequence
  Description of Artificial Sequence: Synthetic oligonucleotide
ccgaguauauccgaguuca

SEQ ID NO: 100698 - RNA, 19 nt, Artificial Sequence
  Description of Artificial Sequence: Synthetic oligonucleotide
ggcuaggucuaguugcaga

SEQ ID NO: 100699 - RNA, 19 nt, Artificial Sequence
  Description of Artificial Sequence: Synthetic oligonucleotide
caauugauauuggagggau

SEQ ID NO: 100700 - RNA, 19 nt, Artificial Sequence
  Description of Artificial Sequence: Synthetic oligonucleotide
ugccagauugugggaacuc

SEQ ID NO: 100701 - RNA, 19 nt, Artificial Sequence
  Description of Artificial Sequence: Synthetic oligonucleotide
ucuucccgucagccauaag

SEQ ID NO: 100702 - RNA, 19 nt, Artificial Sequence
  Description of Artificial Sequence: Synthetic oligonucleotide
cauuagccugggacuuuuc

SEQ ID NO: 100703 - RNA, 19 nt, Artificial Sequence
  Description of Artificial Sequence: Synthetic oligonucleotide
cuggcaucccaaccaguga

SEQ ID NO: 100704 - RNA, 19 nt, Artificial Sequence
  Description of Artificial Sequence: Synthetic oligonucleotide
  modified_base (19)..(19): a, c, u, g, unknown or other
ugggucuaucuuguaugun

SEQ ID NO: 100705 - RNA, 19 nt, Artificial Sequence
  Description of Artificial Sequence: Synthetic oligonucleotide
gcccaagauaucugugcug

SEQ ID NO: 100706 - RNA, 19 nt, Artificial Sequence
  Description of Artificial Sequence: Synthetic oligonucleotide
gcgagagauagauguccug

SEQ ID NO: 100707 - RNA, 19 nt, Artificial Sequence
  Description of Artificial Sequence: Synthetic oligonucleotide
guaugacuucgacaucccu

SEQ ID NO: 100708 - RNA, 19 nt, Artificial Sequence
  Description of Artificial Sequence: Synthetic oligonucleotide
gugugagggagguccaagu

SEQ ID NO: 100709 - RNA, 19 nt, Artificial Sequence
  Description of Artificial Sequence: Synthetic oligonucleotide
gaguugcaacgaaccaguc

SEQ ID NO: 100710 - RNA, 19 nt, Artificial Sequence
  Description of Artificial Sequence: Synthetic oligonucleotide
cucgaaggcgagagauaga

SEQ ID NO: 100711 - RNA, 19 nt, Artificial Sequence
  Description of Artificial Sequence: Synthetic oligonucleotide
gagggaugacuaguuauuu

SEQ ID NO: 100712 - RNA, 19 nt, Artificial Sequence
  Description of Artificial Sequence: Synthetic oligonucleotide
cacgaucugugucucccaa

SEQ ID NO: 100713 - RNA, 19 nt, Artificial Sequence
  Description of Artificial Sequence: Synthetic oligonucleotide
ccccaaaugagaggccagg

SEQ ID NO: 100714 - RNA, 19 nt, Artificial Sequence
  Description of Artificial Sequence: Synthetic oligonucleotide
cuaggucuaguugcagaaa

SEQ ID NO: 100715 - RNA, 19 nt, Artificial Sequence
  Description of Artificial Sequence: Synthetic oligonucleotide
gccuuuugucgacaaguaa

SEQ ID NO: 100716 - RNA, 19 nt, Artificial Sequence
  Description of Artificial Sequence: Synthetic oligonucleotide
ccuacucccaaggaaauua

SEQ ID NO: 100717 - RNA, 19 nt, Artificial Sequence
  Description of Artificial Sequence: Synthetic oligonucleotide
agggcccgagcacaauauu

SEQ ID NO: 100718 - RNA, 19 nt, Artificial Sequence
  Description of Artificial Sequence: Synthetic oligonucleotide
cgacaaguaaauccgcaga

SEQ ID NO: 100719 - RNA, 19 nt, Artificial Sequence
  Description of Artificial Sequence: Synthetic oligonucleotide
gggcccgagcacaauauuc

SEQ ID NO: 100720 - RNA, 19 nt, Artificial Sequence
  Description of Artificial Sequence: Synthetic oligonucleotide
ccaauugauauuggaggga

SEQ ID NO: 100721 - RNA, 19 nt, Artificial Sequence
  Description of Artificial Sequence: Synthetic oligonucleotide
caauguauuccgugcucau

SEQ ID NO: 100722 - RNA, 19 nt, Artificial Sequence
  Description of Artificial Sequence: Synthetic oligonucleotide
gugcucuaugacaauguau

SEQ ID NO: 100723 - RNA, 19 nt, Artificial Sequence
  Description of Artificial Sequence: Synthetic oligonucleotide
gugucucgaaggcgagaga

SEQ ID NO: 100724 - RNA, 19 nt, Artificial Sequence
  Description of Artificial Sequence: Synthetic oligonucleotide
ugguagcaccgaguauauc

SEQ ID NO: 100725 - RNA, 19 nt, Artificial Sequence
  Description of Artificial Sequence: Synthetic oligonucleotide
cuuagguugguggcagagu

SEQ ID NO: 100726 - RNA, 19 nt, Artificial Sequence
  Description of Artificial Sequence: Synthetic oligonucleotide
cugcuacuacugcgccagc

SEQ ID NO: 100727 - RNA, 19 nt, Artificial Sequence
  Description of Artificial Sequence: Synthetic oligonucleotide
caccggagacugauguucu

SEQ ID NO: 100728 - RNA, 19 nt, Artificial Sequence
  Description of Artificial Sequence: Synthetic oligonucleotide
ggcaugucgcagaaguugu

SEQ ID NO: 100729 - RNA, 19 nt, Artificial Sequence
  Description of Artificial Sequence: Synthetic oligonucleotide
gguuagugcccaagauauc

SEQ ID NO: 100730 - RNA, 19 nt, Artificial Sequence
  Description of Artificial Sequence: Synthetic oligonucleotide
caccgaguauauccgaguu

SEQ ID NO: 100731 - RNA, 19 nt, Artificial Sequence
  Description of Artificial Sequence: Synthetic oligonucleotide
uugagggcccgagcacaau

SEQ ID NO: 100732 - RNA, 19 nt, Artificial Sequence
  Description of Artificial Sequence: Synthetic oligonucleotide
gaccuagagcuccgaguau

SEQ ID NO: 100733 - RNA, 19 nt, Artificial Sequence
  Description of Artificial Sequence: Synthetic oligonucleotide
cgaggcuauaagaccucac

SEQ ID NO: 100734 - RNA, 19 nt, Artificial Sequence
  Description of Artificial Sequence: Synthetic oligonucleotide
cgaguugcaacgaaccagu

SEQ ID NO: 100735 - RNA, 19 nt, Artificial Sequence
  Description of Artificial Sequence: Synthetic oligonucleotide
gagggcccgagcacaauau

SEQ ID NO: 100736 - RNA, 19 nt, Artificial Sequence
  Description of Artificial Sequence: Synthetic oligonucleotide
gcaacccaagcaaggagua

SEQ ID NO: 100737 - RNA, 19 nt, Artificial Sequence
  Description of Artificial Sequence: Synthetic oligonucleotide
ggagggaugacuaguuauu

SEQ ID NO: 100738 - RNA, 19 nt, Artificial Sequence
  Description of Artificial Sequence: Synthetic oligonucleotide
ggguguacaguaagcgucu

SEQ ID NO: 100739 - RNA, 19 nt, Artificial Sequence
  Description of Artificial Sequence: Synthetic oligonucleotide
cgaaggcgagagauagaug

SEQ ID NO: 100740 - RNA, 19 nt, Artificial Sequence
  Description of Artificial Sequence: Synthetic oligonucleotide
ccgaguauucucagugucu

SEQ ID NO: 100741 - RNA, 19 nt, Artificial Sequence
  Description of Artificial Sequence: Synthetic oligonucleotide
gccaauuaagggaugccuu

SEQ ID NO: 100742 - RNA, 19 nt, Artificial Sequence
  Description of Artificial Sequence: Synthetic oligonucleotide
cguucugucccacugcagu

SEQ ID NO: 100743 - RNA, 19 nt, Artificial Sequence
  Description of Artificial Sequence: Synthetic oligonucleotide
gcgaggcuauaagaccuca

SEQ ID NO: 100744 - RNA, 19 nt, Artificial Sequence
  Description of Artificial Sequence: Synthetic oligonucleotide
gccagauugugggaacucu

SEQ ID NO: 100745 - RNA, 19 nt, Artificial Sequence
  Description of Artificial Sequence: Synthetic oligonucleotide
ccgcggcuaggucuaguug

SEQ ID NO: 100746 - RNA, 19 nt, Artificial Sequence
  Description of Artificial Sequence: Synthetic oligonucleotide
agccgcggcuaggucuagu

SEQ ID NO: 100747 - RNA, 19 nt, Artificial Sequence
  Description of Artificial Sequence: Synthetic oligonucleotide
ccagauugugggaacucuu

SEQ ID NO: 100748 - RNA, 19 nt, Artificial Sequence
  Description of Artificial Sequence: Synthetic oligonucleotide
gccgcuucccacaaagauu

SEQ ID NO: 100749 - RNA, 19 nt, Artificial Sequence
  Description of Artificial Sequence: Synthetic oligonucleotide
caacccaagcaaggaguau

SEQ ID NO: 100750 - RNA, 19 nt, Artificial Sequence
  Description of Artificial Sequence: Synthetic oligonucleotide
gcucacccguucuguccca

SEQ ID NO: 100751 - RNA, 19 nt, Artificial Sequence
  Description of Artificial Sequence: Synthetic oligonucleotide
gccgcggcuaggucuaguu

SEQ ID NO: 100752 - RNA, 19 nt, Artificial Sequence
  Description of Artificial Sequence: Synthetic oligonucleotide
cagccgcggcuaggucuag

SEQ ID NO: 100753 - RNA, 19 nt, Artificial Sequence
  Description of Artificial Sequence: Synthetic oligonucleotide
gccauaaggcucacccguu

SEQ ID NO: 100754 - RNA, 19 nt, Artificial Sequence
  Description of Artificial Sequence: Synthetic oligonucleotide
gguguacaguaagcgucuu

SEQ ID NO: 100755 - RNA, 19 nt, Artificial Sequence
  Description of Artificial Sequence: Synthetic oligonucleotide
gcaugucgcagaaguuguu

SEQ ID NO: 100756 - RNA, 19 nt, Artificial Sequence
  Description of Artificial Sequence: Synthetic oligonucleotide
gccauuagccugggacuuu

SEQ ID NO: 100757 - RNA, 19 nt, Artificial Sequence
  Description of Artificial Sequence: Synthetic oligonucleotide
gcgccagccgcggcuaggu

SEQ ID NO: 100758 - RNA, 19 nt, Artificial Sequence
  Description of Artificial Sequence: Synthetic oligonucleotide
cgaguauauccgaguucau

SEQ ID NO: 100759 - RNA, 19 nt, Artificial Sequence
  Description of Artificial Sequence: Synthetic oligonucleotide
ggucugcugcgaggcuaua

SEQ ID NO: 100760 - RNA, 19 nt, Artificial Sequence
  Description of Artificial Sequence: Synthetic oligonucleotide
cccuacucccaaggaaauu

SEQ ID NO: 100761 - RNA, 19 nt, Artificial Sequence
  Description of Artificial Sequence: Synthetic oligonucleotide
cgccagccgcggcuagguc

SEQ ID NO: 100762 - RNA, 19 nt, Artificial Sequence
  Description of Artificial Sequence: Synthetic oligonucleotide
aucacuuuaauauuaaggg

SEQ ID NO: 100763 - RNA, 19 nt, Artificial Sequence
  Description of Artificial Sequence: Synthetic oligonucleotide
uuagagaauaguuucaagg

SEQ ID NO: 100764 - RNA, 19 nt, Artificial Sequence
  Description of Artificial Sequence: Synthetic oligonucleotide
auuaucuauaaguaugacc

SEQ ID NO: 100765 - RNA, 19 nt, Artificial Sequence
  Description of Artificial Sequence: Synthetic oligonucleotide
gaagauaguaguuuuagag

SEQ ID NO: 100766 - RNA, 19 nt, Artificial Sequence
  Description of Artificial Sequence: Synthetic oligonucleotide
agacaaaugacgcugacac

SEQ ID NO: 100767 - RNA, 19 nt, Artificial Sequence
  Description of Artificial Sequence: Synthetic oligonucleotide
uuucuuaugacucaauaca

SEQ ID NO: 100768 - RNA, 19 nt, Artificial Sequence
  Description of Artificial Sequence: Synthetic oligonucleotide
cauacaaccagcaaacugc

SEQ ID NO: 100769 - RNA, 19 nt, Artificial Sequence
  Description of Artificial Sequence: Synthetic oligonucleotide
aagaugaugcucaagacuc

SEQ ID NO: 100770 - RNA, 19 nt, Artificial Sequence
  Description of Artificial Sequence: Synthetic oligonucleotide
uaaacuaccaugauuuucu

SEQ ID NO: 100771 - RNA, 19 nt, Artificial Sequence
  Description of Artificial Sequence: Synthetic oligonucleotide
uaacuuacuggaaucaugc

SEQ ID NO: 100772 - RNA, 19 nt, Artificial Sequence
  Description of Artificial Sequence: Synthetic oligonucleotide
augaccauaaguucuagag

SEQ ID NO: 100773 - RNA, 19 nt, Artificial Sequence
  Description of Artificial Sequence: Synthetic oligonucleotide
accuaaagaagauaggaag

SEQ ID NO: 100774 - RNA, 19 nt, Artificial Sequence
  Description of Artificial Sequence: Synthetic oligonucleotide
aagauacaaacugccaucc

SEQ ID NO: 100775 - RNA, 19 nt, Artificial Sequence
  Description of Artificial Sequence: Synthetic oligonucleotide
aagauaguaguuuuagaga

SEQ ID NO: 100776 - RNA, 19 nt, Artificial Sequence
  Description of Artificial Sequence: Synthetic oligonucleotide
agauauucuaguaaguacg

SEQ ID NO: 100777 - RNA, 19 nt, Artificial Sequence
  Description of Artificial Sequence: Synthetic oligonucleotide
ugcuauucaugcaagagca

SEQ ID NO: 100778 - RNA, 19 nt, Artificial Sequence
  Description of Artificial Sequence: Synthetic oligonucleotide
uuuaccuaaagaagauagg

SEQ ID NO: 100779 - RNA, 19 nt, Artificial Sequence
  Description of Artificial Sequence: Synthetic oligonucleotide
uguaauaggaacaguggca

SEQ ID NO: 100780 - RNA, 19 nt, Artificial Sequence
  Description of Artificial Sequence: Synthetic oligonucleotide
aacgaaguaccauggagag

SEQ ID NO: 100781 - RNA, 19 nt, Artificial Sequence
  Description of Artificial Sequence: Synthetic oligonucleotide
uauaccauauuauaauccu

SEQ ID NO: 100782 - RNA, 19 nt, Artificial Sequence
  Description of Artificial Sequence: Synthetic oligonucleotide
augcuauucaugcaagagc

SEQ ID NO: 100783 - RNA, 19 nt, Artificial Sequence
  Description of Artificial Sequence: Synthetic oligonucleotide
agguagauaauauuuuauc

SEQ ID NO: 100784 - RNA, 19 nt, Artificial Sequence
  Description of Artificial Sequence: Synthetic oligonucleotide
acuaagugaaacuccaaag

SEQ ID NO: 100785 - RNA, 19 nt, Artificial Sequence
  Description of Artificial Sequence: Synthetic oligonucleotide
uauucuacuuaauaccuug

SEQ ID NO: 100786 - RNA, 19 nt, Artificial Sequence
  Description of Artificial Sequence: Synthetic oligonucleotide
uucuuaugacucaauacag

SEQ ID NO: 100787 - RNA, 19 nt, Artificial Sequence
  Description of Artificial Sequence: Synthetic oligonucleotide
agaaauguacuguauacgu

SEQ ID NO: 100788 - RNA, 19 nt, Artificial Sequence
  Description of Artificial Sequence: Synthetic oligonucleotide
aaggguauuaauguaaggu

SEQ ID NO: 100789 - RNA, 19 nt, Artificial Sequence
  Description of Artificial Sequence: Synthetic oligonucleotide
uccuguaauaggaacagug

SEQ ID NO: 100790 - RNA, 19 nt, Artificial Sequence
  Description of Artificial Sequence: Synthetic oligonucleotide
aaaccaguuaauaggcugc

SEQ ID NO: 100791 - RNA, 19 nt, Artificial Sequence
  Description of Artificial Sequence: Synthetic oligonucleotide
aaacacuaagugaaacucc

SEQ ID NO: 100792 - RNA, 19 nt, Artificial Sequence
  Description of Artificial Sequence: Synthetic oligonucleotide
uacaucucuauaaacuacc

SEQ ID NO: 100793 - RNA, 19 nt, Artificial Sequence
  Description of Artificial Sequence: Synthetic oligonucleotide
uagagguuaacacuuaauc

SEQ ID NO: 100794 - RNA, 19 nt, Artificial Sequence
  Description of Artificial Sequence: Synthetic oligonucleotide
aauccuguaacuaaaugcu

SEQ ID NO: 100795 - RNA, 19 nt, Artificial Sequence
  Description of Artificial Sequence: Synthetic oligonucleotide
auaccaugaaacaagcagc

SEQ ID NO: 100796 - RNA, 19 nt, Artificial Sequence
  Description of Artificial Sequence: Synthetic oligonucleotide
aguuuggccacugaaaagg

SEQ ID NO: 100797 - RNA, 19 nt, Artificial Sequence
  Description of Artificial Sequence: Synthetic oligonucleotide
uguacuguauacgucacag

SEQ ID NO: 100798 - RNA, 19 nt, Artificial Sequence
  Description of Artificial Sequence: Synthetic oligonucleotide
auaaguaugaccauaaguu

SEQ ID NO: 100799 - RNA, 19 nt, Artificial Sequence
  Description of Artificial Sequence: Synthetic oligonucleotide
aacgcagggaggcauauug

SEQ ID NO: 100800 - RNA, 19 nt, Artificial Sequence
  Description of Artificial Sequence: Synthetic oligonucleotide
auauccuaaugauacaucu

SEQ ID NO: 100801 - RNA, 19 nt, Artificial Sequence
  Description of Artificial Sequence: Synthetic oligonucleotide
ucuacagcuucaaacgugc

SEQ ID NO: 100802 - RNA, 19 nt, Artificial Sequence
  Description of Artificial Sequence: Synthetic oligonucleotide
uaaguacgcacaaacauuc

SEQ ID NO: 100803 - RNA, 19 nt, Artificial Sequence
  Description of Artificial Sequence: Synthetic oligonucleotide
uuaccuaaagaagauagga

SEQ ID NO: 100804 - RNA, 19 nt, Artificial Sequence
  Description of Artificial Sequence: Synthetic oligonucleotide
auuggguuggccauggacc

SEQ ID NO: 100805 - RNA, 19 nt, Artificial Sequence
  Description of Artificial Sequence: Synthetic oligonucleotide
gauugagaaaguccucugg

SEQ ID NO: 100806 - RNA, 19 nt, Artificial Sequence
  Description of Artificial Sequence: Synthetic oligonucleotide
aauacccucaacuuauaaa

SEQ ID NO: 100807 - RNA, 19 nt, Artificial Sequence
  Description of Artificial Sequence: Synthetic oligonucleotide
aguaaguacgcacaaacau

SEQ ID NO: 100808 - RNA, 19 nt, Artificial Sequence
  Description of Artificial Sequence: Synthetic oligonucleotide
cugacagaacucaacaugc

SEQ ID NO: 100809 - RNA, 19 nt, Artificial Sequence
  Description of Artificial Sequence: Synthetic oligonucleotide
ugaaauaggguaauauuua

SEQ ID NO: 100810 - RNA, 19 nt, Artificial Sequence
  Description of Artificial Sequence: Synthetic oligonucleotide
aguaccuucaacuaaccaa

SEQ ID NO: 100811 - RNA, 19 nt, Artificial Sequence
  Description of Artificial Sequence: Synthetic oligonucleotide
uucaagacaaaugacgcug

SEQ ID NO: 100812 - RNA, 19 nt, Artificial Sequence
  Description of Artificial Sequence: Synthetic oligonucleotide
aaugcuacuauauccuaau

SEQ ID NO: 100813 - RNA, 19 nt, Artificial Sequence
  Description of Artificial Sequence: Synthetic oligonucleotide
agggacuacaaauacuuag

SEQ ID NO: 100814 - RNA, 19 nt, Artificial Sequence
  Description of Artificial Sequence: Synthetic oligonucleotide
auacccucaacuuauaaaa

SEQ ID NO: 100815 - RNA, 19 nt, Artificial Sequence
  Description of Artificial Sequence: Synthetic oligonucleotide
auaacgaaauauccaaaug

SEQ ID NO: 100816 - RNA, 19 nt, Artificial Sequence
  Description of Artificial Sequence: Synthetic oligonucleotide
ucuauaaacuaccaugauu

SEQ ID NO: 100817 - RNA, 19 nt, Artificial Sequence
  Description of Artificial Sequence: Synthetic oligonucleotide
auuauaauccuucauuguu

SEQ ID NO: 100818 - RNA, 19 nt, Artificial Sequence
  Description of Artificial Sequence: Synthetic oligonucleotide
auccuaaugauacaucucu

SEQ ID NO: 100819 - RNA, 19 nt, Artificial Sequence
  Description of Artificial Sequence: Synthetic oligonucleotide
agaaauagagaaaaugucu

SEQ ID NO: 100820 - RNA, 19 nt, Artificial Sequence
  Description of Artificial Sequence: Synthetic oligonucleotide
cauaguaccuucaacuaac

SEQ ID NO: 100821 - RNA, 19 nt, Artificial Sequence
  Description of Artificial Sequence: Synthetic oligonucleotide
gagaauaguuucaagguug

SEQ ID NO: 100822 - RNA, 19 nt, Artificial Sequence
  Description of Artificial Sequence: Synthetic oligonucleotide
uuuagagaauaguuucaag

SEQ ID NO: 100823 - RNA, 19 nt, Artificial Sequence
  Description of Artificial Sequence: Synthetic oligonucleotide
augcucaagacucaaaggu

SEQ ID NO: 100824 - RNA, 19 nt, Artificial Sequence
  Description of Artificial Sequence: Synthetic oligonucleotide
uuaagccuaucccuggaag

SEQ ID NO: 100825 - RNA, 19 nt, Artificial Sequence
  Description of Artificial Sequence: Synthetic oligonucleotide
cauccuguuaguuuugaag

SEQ ID NO: 100826 - RNA, 19 nt, Artificial Sequence
  Description of Artificial Sequence: Synthetic oligonucleotide
auuuuaagccuaucccugg

SEQ ID NO: 100827 - RNA, 19 nt, Artificial Sequence
  Description of Artificial Sequence: Synthetic oligonucleotide
uaacuaaaugcuacuauau

SEQ ID NO: 100828 - RNA, 19 nt, Artificial Sequence
  Description of Artificial Sequence: Synthetic oligonucleotide
guuaauaggcugcaaaauc

SEQ ID NO: 100829 - RNA, 19 nt, Artificial Sequence
  Description of Artificial Sequence: Synthetic oligonucleotide
aacaggcuuaaguagcugu

SEQ ID NO: 100830 - RNA, 19 nt, Artificial Sequence
  Description of Artificial Sequence: Synthetic oligonucleotide
uaaggguauucccagauua

SEQ ID NO: 100831 - RNA, 19 nt, Artificial Sequence
  Description of Artificial Sequence: Synthetic oligonucleotide
aagcugacaguuuggccac

SEQ ID NO: 100832 - RNA, 19 nt, Artificial Sequence
  Description of Artificial Sequence: Synthetic oligonucleotide
ugaauuccaaaaccuugag

SEQ ID NO: 100833 - RNA, 19 nt, Artificial Sequence
  Description of Artificial Sequence: Synthetic oligonucleotide
accauaacgaaauauccaa

SEQ ID NO: 100834 - RNA, 19 nt, Artificial Sequence
  Description of Artificial Sequence: Synthetic oligonucleotide
agcaagguaccauucaaug

SEQ ID NO: 100835 - RNA, 19 nt, Artificial Sequence
  Description of Artificial Sequence: Synthetic oligonucleotide
aaguaugaccauaaguucu

SEQ ID NO: 100836 - RNA, 19 nt, Artificial Sequence
  Description of Artificial Sequence: Synthetic oligonucleotide
ucuuacuagugccugauuu

SEQ ID NO: 100837 - RNA, 19 nt, Artificial Sequence
  Description of Artificial Sequence: Synthetic oligonucleotide
ucuuaugacucaauacagu

SEQ ID NO: 100838 - RNA, 19 nt, Artificial Sequence
  Description of Artificial Sequence: Synthetic oligonucleotide
aaagaagauaggaaguuaa

SEQ ID NO: 100839 - RNA, 19 nt, Artificial Sequence
  Description of Artificial Sequence: Synthetic oligonucleotide
uucucuaacuuacuggaau

SEQ ID NO: 100840 - RNA, 19 nt, Artificial Sequence
  Description of Artificial Sequence: Synthetic oligonucleotide
uguuaugcauugccaauca

SEQ ID NO: 100841 - RNA, 19 nt, Artificial Sequence
  Description of Artificial Sequence: Synthetic oligonucleotide
aguuacuauuccugggcac

SEQ ID NO: 100842 - RNA, 19 nt, Artificial Sequence
  Description of Artificial Sequence: Synthetic oligonucleotide
cagauucaaguauuuauug

SEQ ID NO: 100843 - RNA, 19 nt, Artificial Sequence
  Description of Artificial Sequence: Synthetic oligonucleotide
aaaggcuuauguagacugc

SEQ ID NO: 100844 - RNA, 19 nt, Artificial Sequence
  Description of Artificial Sequence: Synthetic oligonucleotide
uacgucacagcuuccauac

SEQ ID NO: 100845 - RNA, 19 nt, Artificial Sequence
  Description of Artificial Sequence: Synthetic oligonucleotide
auguggauugagaaagucc

SEQ ID NO: 100846 - RNA, 19 nt, Artificial Sequence
  Description of Artificial Sequence: Synthetic oligonucleotide
aagucguuugaugacaaga

SEQ ID NO: 100847 - RNA, 19 nt, Artificial Sequence
  Description of Artificial Sequence: Synthetic oligonucleotide
aauguacuguauacgucac

SEQ ID NO: 100848 - RNA, 19 nt, Artificial Sequence
  Description of Artificial Sequence: Synthetic oligonucleotide
aggaccauaacgaaauauc

SEQ ID NO: 100849 - RNA, 19 nt, Artificial Sequence
  Description of Artificial Sequence: Synthetic oligonucleotide
acuaaccaaguagaaauag

SEQ ID NO: 100850 - RNA, 19 nt, Artificial Sequence
  Description of Artificial Sequence: Synthetic oligonucleotide
uuccauucaaaagacuacc

SEQ ID NO: 100851 - RNA, 19 nt, Artificial Sequence
  Description of Artificial Sequence: Synthetic oligonucleotide
uguauaaauuucuguucca

SEQ ID NO: 100852 - RNA, 19 nt, Artificial Sequence
  Description of Artificial Sequence: Synthetic oligonucleotide
cuaacuuacuggaaucaug

SEQ ID NO: 100853 - RNA, 19 nt, Artificial Sequence
  Description of Artificial Sequence: Synthetic oligonucleotide
auguuaaggguauucccag

SEQ ID NO: 100854 - RNA, 19 nt, Artificial Sequence
  Description of Artificial Sequence: Synthetic oligonucleotide
acuaugaguccuguaauag

SEQ ID NO: 100855 - RNA, 19 nt, Artificial Sequence
  Description of Artificial Sequence: Synthetic oligonucleotide
ucaaacgugccuuugucau

SEQ ID NO: 100856 - RNA, 19 nt, Artificial Sequence
  Description of Artificial Sequence: Synthetic oligonucleotide
ugugaacagagcacuguug

SEQ ID NO: 100857 - RNA, 19 nt, Artificial Sequence
  Description of Artificial Sequence: Synthetic oligonucleotide
aacauggcucuucaauugu

SEQ ID NO: 100858 - RNA, 19 nt, Artificial Sequence
  Description of Artificial Sequence: Synthetic oligonucleotide
uaacagugaaauaggguaa

SEQ ID NO: 100859 - RNA, 19 nt, Artificial Sequence
  Description of Artificial Sequence: Synthetic oligonucleotide
uacuuaauaccuugaauuu

SEQ ID NO: 100860 - RNA, 19 nt, Artificial Sequence
  Description of Artificial Sequence: Synthetic oligonucleotide
cuacugaugcucaaagaug

SEQ ID NO: 100861 - RNA, 19 nt, Artificial Sequence
  Description of Artificial Sequence: Synthetic oligonucleotide
acaaccagcaaacugccau

SEQ ID NO: 100862 - RNA, 19 nt, Artificial Sequence
  Description of Artificial Sequence: Synthetic oligonucleotide
guccgguuaagugugaagg

SEQ ID NO: 100863 - RNA, 19 nt, Artificial Sequence
  Description of Artificial Sequence: Synthetic oligonucleotide
gaaaggauacgcaaugaca

SEQ ID NO: 100864 - RNA, 19 nt, Artificial Sequence
  Description of Artificial Sequence: Synthetic oligonucleotide
uaaagcugacaguuuggcc

SEQ ID NO: 100865 - RNA, 19 nt, Artificial Sequence
  Description of Artificial Sequence: Synthetic oligonucleotide
gaagguacauuuuaagccu

SEQ ID NO: 100866 - RNA, 19 nt, Artificial Sequence
  Description of Artificial Sequence: Synthetic oligonucleotide
uuucaagacaaaugacgcu

SEQ ID NO: 100867 - RNA, 19 nt, Artificial Sequence
  Description of Artificial Sequence: Synthetic oligonucleotide
aaacgugccuuugucaucu

SEQ ID NO: 100868 - RNA, 19 nt, Artificial Sequence
  Description of Artificial Sequence: Synthetic oligonucleotide
uauuaaggguauuaaugua

SEQ ID NO: 100869 - RNA, 19 nt, Artificial Sequence
  Description of Artificial Sequence: Synthetic oligonucleotide
cauucuauacacauacaga

SEQ ID NO: 100870 - RNA, 19 nt, Artificial Sequence
  Description of Artificial Sequence: Synthetic oligonucleotide
ucaaagucguuugaugaca

SEQ ID NO: 100871 - RNA, 19 nt, Artificial Sequence
  Description of Artificial Sequence: Synthetic oligonucleotide
caagacuaucaucaaaguc

SEQ ID NO: 100872 - RNA, 19 nt, Artificial Sequence
  Description of Artificial Sequence: Synthetic oligonucleotide
guagaacgaaguaccaugg

SEQ ID NO: 100873 - RNA, 19 nt, Artificial Sequence
  Description of Artificial Sequence: Synthetic oligonucleotide
ugugguaccacuagcuuuu

SEQ ID NO: 100874 - RNA, 19 nt, Artificial Sequence
  Description of Artificial Sequence: Synthetic oligonucleotide
ugaagauaugcuguuggga

SEQ ID NO: 100875 - RNA, 19 nt, Artificial Sequence
  Description of Artificial Sequence: Synthetic oligonucleotide
uucuacuuaauaccuugaa

SEQ ID NO: 100876 - RNA, 19 nt, Artificial Sequence
  Description of Artificial Sequence: Synthetic oligonucleotide
uuuaucauauggagaggaa

SEQ ID NO: 100877 - RNA, 19 nt, Artificial Sequence
  Description of Artificial Sequence: Synthetic oligonucleotide
acuaucaucaaagucguuu

SEQ ID NO: 100878 - RNA, 19 nt, Artificial Sequence
  Description of Artificial Sequence: Synthetic oligonucleotide
uuuuaagccuaucccugga

SEQ ID NO: 100879 - RNA, 19 nt, Artificial Sequence
  Description of Artificial Sequence: Synthetic oligonucleotide
aaaaggggaggcuacuauu

SEQ ID NO: 100880 - RNA, 19 nt, Artificial Sequence
  Description of Artificial Sequence: Synthetic oligonucleotide
aaagugaguggggagauuu

SEQ ID NO: 100881 - RNA, 19 nt, Artificial Sequence
  Description of Artificial Sequence: Synthetic oligonucleotide
aggguauuaauguaaggua

SEQ ID NO: 100882 - RNA, 19 nt, Artificial Sequence
  Description of Artificial Sequence: Synthetic oligonucleotide
auacaaccagcaaacugcc

SEQ ID NO: 100883 - RNA, 19 nt, Artificial Sequence
  Description of Artificial Sequence: Synthetic oligonucleotide
cagaagugaauuccaaaac

SEQ ID NO: 100884 - RNA, 19 nt, Artificial Sequence
  Description of Artificial Sequence: Synthetic oligonucleotide
ccuucaacuaaccaaguag

SEQ ID NO: 100885 - RNA, 19 nt, Artificial Sequence
  Description of Artificial Sequence: Synthetic oligonucleotide
caugcuauucaugcaagag

SEQ ID NO: 100886 - RNA, 19 nt, Artificial Sequence
  Description of Artificial Sequence: Synthetic oligonucleotide
aggauacgcaaugacaaag

SEQ ID NO: 100887 - RNA, 19 nt, Artificial Sequence
  Description of Artificial Sequence: Synthetic oligonucleotide
uauccuaaugauacaucuc

SEQ ID NO: 100888 - RNA, 19 nt, Artificial Sequence
  Description of Artificial Sequence: Synthetic oligonucleotide
gaacgaaguaccauggaga

SEQ ID NO: 100889 - RNA, 19 nt, Artificial Sequence
  Description of Artificial Sequence: Synthetic oligonucleotide
acauuaauuacuguuccau

SEQ ID NO: 100890 - RNA, 19 nt, Artificial Sequence
  Description of Artificial Sequence: Synthetic oligonucleotide
ggucuacuaaagcugacag

SEQ ID NO: 100891 - RNA, 19 nt, Artificial Sequence
  Description of Artificial Sequence: Synthetic oligonucleotide
aggggcauaugacaccggg

SEQ ID NO: 100892 - RNA, 19 nt, Artificial Sequence
  Description of Artificial Sequence: Synthetic oligonucleotide
uuaaagggacuguuuguaa

SEQ ID NO: 100893 - RNA, 19 nt, Artificial Sequence
  Description of Artificial Sequence: Synthetic oligonucleotide
agauaauauuuuaucauau

SEQ ID NO: 100894 - RNA, 19 nt, Artificial Sequence
  Description of Artificial Sequence: Synthetic oligonucleotide
acauguuaacuguucuuca

SEQ ID NO: 100895 - RNA, 19 nt, Artificial Sequence
  Description of Artificial Sequence: Synthetic oligonucleotide
cugauguuaaggguauucc

SEQ ID NO: 100896 - RNA, 19 nt, Artificial Sequence
  Description of Artificial Sequence: Synthetic oligonucleotide
gaggcaacacuaugagucc

SEQ ID NO: 100897 - RNA, 19 nt, Artificial Sequence
  Description of Artificial Sequence: Synthetic oligonucleotide
acuauauccuaaugauaca

SEQ ID NO: 100898 - RNA, 19 nt, Artificial Sequence
  Description of Artificial Sequence: Synthetic oligonucleotide
auaaguucuagaggcaaca

SEQ ID NO: 100899 - RNA, 19 nt, Artificial Sequence
  Description of Artificial Sequence: Synthetic oligonucleotide
ggcuuauguagacugcugg

SEQ ID NO: 100900 - RNA, 19 nt, Artificial Sequence
  Description of Artificial Sequence: Synthetic oligonucleotide
ggaguuacuauuccugggc

SEQ ID NO: 100901 - RNA, 19 nt, Artificial Sequence
  Description of Artificial Sequence: Synthetic oligonucleotide
ccuguaauaggaacagugg

SEQ ID NO: 100902 - RNA, 19 nt, Artificial Sequence
  Description of Artificial Sequence: Synthetic oligonucleotide
cauaaguucuagaggcaac

SEQ ID NO: 100903 - RNA, 19 nt, Artificial Sequence
  Description of Artificial Sequence: Synthetic oligonucleotide
uucuaguaaguacgcacaa

SEQ ID NO: 100904 - RNA, 19 nt, Artificial Sequence
  Description of Artificial Sequence: Synthetic oligonucleotide
auaguaccuucaacuaacc

SEQ ID NO: 100905 - RNA, 19 nt, Artificial Sequence
  Description of Artificial Sequence: Synthetic oligonucleotide
uuuaagccuaucccuggaa

SEQ ID NO: 100906 - RNA, 19 nt, Artificial Sequence
  Description of Artificial Sequence: Synthetic oligonucleotide
uaguaccuucaacuaacca

SEQ ID NO: 100907 - RNA, 19 nt, Artificial Sequence
  Description of Artificial Sequence: Synthetic oligonucleotide
cuaacaggcuuucucuaac

SEQ ID NO: 100908 - RNA, 19 nt, Artificial Sequence
  Description of Artificial Sequence: Synthetic oligonucleotide
acaggcaauauucuacuua

SEQ ID NO: 100909 - RNA, 19 nt, Artificial Sequence
  Description of Artificial Sequence: Synthetic oligonucleotide
uuauguggauugagaaagu

SEQ ID NO: 100910 - RNA, 19 nt, Artificial Sequence
  Description of Artificial Sequence: Synthetic oligonucleotide
caagguaccauucaaugua

SEQ ID NO: 100911 - RNA, 19 nt, Artificial Sequence
  Description of Artificial Sequence: Synthetic oligonucleotide
gaaauguacuguauacguc

SEQ ID NO: 100912 - RNA, 19 nt, Artificial Sequence
  Description of Artificial Sequence: Synthetic oligonucleotide
cauauggagaggaacucca

SEQ ID NO: 100913 - RNA, 19 nt, Artificial Sequence
  Description of Artificial Sequence: Synthetic oligonucleotide
uacaagguuuagcuuuacu

SEQ ID NO: 100914 - RNA, 19 nt, Artificial Sequence
  Description of Artificial Sequence: Synthetic oligonucleotide
agucuacagcuucaaacgu

SEQ ID NO: 100915 - RNA, 19 nt, Artificial Sequence
  Description of Artificial Sequence: Synthetic oligonucleotide
auucuaguaaguacgcaca

SEQ ID NO: 100916 - RNA, 19 nt, Artificial Sequence
  Description of Artificial Sequence: Synthetic oligonucleotide
gcuuauguagacugcuggg

SEQ ID NO: 100917 - RNA, 19 nt, Artificial Sequence
  Description of Artificial Sequence: Synthetic oligonucleotide
cuuacuggaaucaugcuau

SEQ ID NO: 100918 - RNA, 19 nt, Artificial Sequence
  Description of Artificial Sequence: Synthetic oligonucleotide
uagaacgaaguaccaugga

SEQ ID NO: 100919 - RNA, 19 nt, Artificial Sequence
  Description of Artificial Sequence: Synthetic oligonucleotide
aacagugaaauaggguaau

SEQ ID NO: 100920 - RNA, 19 nt, Artificial Sequence
  Description of Artificial Sequence: Synthetic oligonucleotide
aguuaauaggcugcaaaau

SEQ ID NO: 100921 - RNA, 19 nt, Artificial Sequence
  Description of Artificial Sequence: Synthetic oligonucleotide
uccgguuaagugugaagga

SEQ ID NO: 100922 - RNA, 19 nt, Artificial Sequence
  Description of Artificial Sequence: Synthetic oligonucleotide
uguuaaggguauucccaga

SEQ ID NO: 100923 - RNA, 19 nt, Artificial Sequence
  Description of Artificial Sequence: Synthetic oligonucleotide
acuagugccugauuuugau

SEQ ID NO: 100924 - RNA, 19 nt, Artificial Sequence
  Description of Artificial Sequence: Synthetic oligonucleotide
gaccauaacgaaauaucca

SEQ ID NO: 100925 - RNA, 19 nt, Artificial Sequence
  Description of Artificial Sequence: Synthetic oligonucleotide
acaauuuggaaguggcauu

SEQ ID NO: 100926 - RNA, 19 nt, Artificial Sequence
  Description of Artificial Sequence: Synthetic oligonucleotide
gguaccacuagcuuuucca

SEQ ID NO: 100927 - RNA, 19 nt, Artificial Sequence
  Description of Artificial Sequence: Synthetic oligonucleotide
uauguggauugagaaaguc

SEQ ID NO: 100928 - RNA, 19 nt, Artificial Sequence
  Description of Artificial Sequence: Synthetic oligonucleotide
acgaaauauccaaauguca

SEQ ID NO: 100929 - RNA, 19 nt, Artificial Sequence
  Description of Artificial Sequence: Synthetic oligonucleotide
gaguuacuauuccugggca

SEQ ID NO: 100930 - RNA, 19 nt, Artificial Sequence
  Description of Artificial Sequence: Synthetic oligonucleotide
uuucucuaacuuacuggaa

SEQ ID NO: 100931 - RNA, 19 nt, Artificial Sequence
  Description of Artificial Sequence: Synthetic oligonucleotide
uguaccgugcacugggcaa

SEQ ID NO: 100932 - RNA, 19 nt, Artificial Sequence
  Description of Artificial Sequence: Synthetic oligonucleotide
gauuauucuccaugccaga

SEQ ID NO: 100933 - RNA, 19 nt, Artificial Sequence
  Description of Artificial Sequence: Synthetic oligonucleotide
cucaacagcccucauguga

SEQ ID NO: 100934 - RNA, 19 nt, Artificial Sequence
  Description of Artificial Sequence: Synthetic oligonucleotide
gcauacaaccagcaaacug

SEQ ID NO: 100935 - RNA, 19 nt, Artificial Sequence
  Description of Artificial Sequence: Synthetic oligonucleotide
aguacgcacaaacauucua

SEQ ID NO: 100936 - RNA, 19 nt, Artificial Sequence
  Description of Artificial Sequence: Synthetic oligonucleotide
uccuguuaguuuugaagau

SEQ ID NO: 100937 - RNA, 19 nt, Artificial Sequence
  Description of Artificial Sequence: Synthetic oligonucleotide
uguguguaucccacaguaa

SEQ ID NO: 100938 - RNA, 19 nt, Artificial Sequence
  Description of Artificial Sequence: Synthetic oligonucleotide
aagggacuguuuguaaggu

SEQ ID NO: 100939 - RNA, 19 nt, Artificial Sequence
  Description of Artificial Sequence: Synthetic oligonucleotide
aguccgguuaagugugaag

SEQ ID NO: 100940 - RNA, 19 nt, Artificial Sequence
  Description of Artificial Sequence: Synthetic oligonucleotide
aggggaggcuacuauuuug

SEQ ID NO: 100941 - RNA, 19 nt, Artificial Sequence
  Description of Artificial Sequence: Synthetic oligonucleotide
acaugcaaugagauguuug

SEQ ID NO: 100942 - RNA, 19 nt, Artificial Sequence
  Description of Artificial Sequence: Synthetic oligonucleotide
agugcugauguuaagggua

SEQ ID NO: 100943 - RNA, 19 nt, Artificial Sequence
  Description of Artificial Sequence: Synthetic oligonucleotide
uguauacgucacagcuucc

SEQ ID NO: 100944 - RNA, 19 nt, Artificial Sequence
  Description of Artificial Sequence: Synthetic oligonucleotide
uacgcacaaacauucuaua

SEQ ID NO: 100945 - RNA, 19 nt, Artificial Sequence
  Description of Artificial Sequence: Synthetic oligonucleotide
uccuaaugauacaucucua

SEQ ID NO: 100946 - RNA, 19 nt, Artificial Sequence
  Description of Artificial Sequence: Synthetic oligonucleotide
ggaaucucaccuuuuaucu

SEQ ID NO: 100947 - RNA, 19 nt, Artificial Sequence
  Description of Artificial Sequence: Synthetic oligonucleotide
acaggcuuaaguagcuguc

SEQ ID NO: 100948 - RNA, 19 nt, Artificial Sequence
  Description of Artificial Sequence: Synthetic oligonucleotide
gaguccuguaauaggaaca

SEQ ID NO: 100949 - RNA, 19 nt, Artificial Sequence
  Description of Artificial Sequence: Synthetic oligonucleotide
caguuaauaggcugcaaaa

SEQ ID NO: 100950 - RNA, 19 nt, Artificial Sequence
  Description of Artificial Sequence: Synthetic oligonucleotide
ucuaguaaguacgcacaaa

SEQ ID NO: 100951 - RNA, 19 nt, Artificial Sequence
  Description of Artificial Sequence: Synthetic oligonucleotide
gggcauaugacaccgggac

SEQ ID NO: 100952 - RNA, 19 nt, Artificial Sequence
  Description of Artificial Sequence: Synthetic oligonucleotide
uagaggcaacacuaugagu

SEQ ID NO: 100953 - RNA, 19 nt, Artificial Sequence
  Description of Artificial Sequence: Synthetic oligonucleotide
guacuguauacgucacagc

SEQ ID NO: 100954 - RNA, 19 nt, Artificial Sequence
  Description of Artificial Sequence: Synthetic oligonucleotide
aaccaguuaauaggcugca

SEQ ID NO: 100955 - RNA, 19 nt, Artificial Sequence
  Description of Artificial Sequence: Synthetic oligonucleotide
augcuacuauauccuaaug

SEQ ID NO: 100956 - RNA, 19 nt, Artificial Sequence
  Description of Artificial Sequence: Synthetic oligonucleotide
aagugaguggggagauuuc

SEQ ID NO: 100957 - RNA, 19 nt, Artificial Sequence
  Description of Artificial Sequence: Synthetic oligonucleotide
auauucuaguaaguacgca

SEQ ID NO: 100958 - RNA, 19 nt, Artificial Sequence
  Description of Artificial Sequence: Synthetic oligonucleotide
gcauaugacaccgggacug

SEQ ID NO: 100959 - RNA, 19 nt, Artificial Sequence
  Description of Artificial Sequence: Synthetic oligonucleotide
agucguuugaugacaagau

SEQ ID NO: 100960 - RNA, 19 nt, Artificial Sequence
  Description of Artificial Sequence: Synthetic oligonucleotide
agauacaaacugccauccu

SEQ ID NO: 100961 - RNA, 19 nt, Artificial Sequence
  Description of Artificial Sequence: Synthetic oligonucleotide
augacaccgggacuguggu

SEQ ID NO: 100962 - RNA, 19 nt, Artificial Sequence
  Description of Artificial Sequence: Synthetic oligonucleotide
gcuacuauauccuaaugau

SEQ ID NO: 100963 - RNA, 19 nt, Artificial Sequence
  Description of Artificial Sequence: Synthetic oligonucleotide
gacaguuuggccacugaaa

SEQ ID NO: 100964 - RNA, 19 nt, Artificial Sequence
  Description of Artificial Sequence: Synthetic oligonucleotide
aaaugacgcugacaccaua

SEQ ID NO: 100965 - RNA, 19 nt, Artificial Sequence
  Description of Artificial Sequence: Synthetic oligonucleotide
gcuacuauuuugucacuac

SEQ ID NO: 100966 - RNA, 19 nt, Artificial Sequence
  Description of Artificial Sequence: Synthetic oligonucleotide
aagguaccauucaauguau

SEQ ID NO: 100967 - RNA, 19 nt, Artificial Sequence
  Description of Artificial Sequence: Synthetic oligonucleotide
acacuuaauccuguaacua

SEQ ID NO: 100968 - RNA, 19 nt, Artificial Sequence
  Description of Artificial Sequence: Synthetic oligonucleotide
ggggaaauuggguuggcca

SEQ ID NO: 100969 - RNA, 19 nt, Artificial Sequence
  Description of Artificial Sequence: Synthetic oligonucleotide
cuacuauauccuaaugaua

SEQ ID NO: 100970 - RNA, 19 nt, Artificial Sequence
  Description of Artificial Sequence: Synthetic oligonucleotide
aggucuacuaaagcugaca

SEQ ID NO: 100971 - RNA, 19 nt, Artificial Sequence
  Description of Artificial Sequence: Synthetic oligonucleotide
accgggacuguggugacag

SEQ ID NO: 100972 - RNA, 19 nt, Artificial Sequence
  Description of Artificial Sequence: Synthetic oligonucleotide
auacgucacagcuuccaua

SEQ ID NO: 100973 - RNA, 19 nt, Artificial Sequence
  Description of Artificial Sequence: Synthetic oligonucleotide
aaggguauucccagauuau

SEQ ID NO: 100974 - RNA, 19 nt, Artificial Sequence
  Description of Artificial Sequence: Synthetic oligonucleotide
accuucaacuaaccaagua

SEQ ID NO: 100975 - RNA, 19 nt, Artificial Sequence
  Description of Artificial Sequence: Synthetic oligonucleotide
aguaugaccauaaguucua

SEQ ID NO: 100976 - RNA, 19 nt, Artificial Sequence
  Description of Artificial Sequence: Synthetic oligonucleotide
auucuacuuaauaccuuga

SEQ ID NO: 100977 - RNA, 19 nt, Artificial Sequence
  Description of Artificial Sequence: Synthetic oligonucleotide
ggaagauaguaguuuuaga

SEQ ID NO: 100978 - RNA, 19 nt, Artificial Sequence
  Description of Artificial Sequence: Synthetic oligonucleotide
guuaaggguauucccagau

SEQ ID NO: 100979 - RNA, 19 nt, Artificial Sequence
  Description of Artificial Sequence: Synthetic oligonucleotide
gagaggaguuacuauuccu

SEQ ID NO: 100980 - RNA, 19 nt, Artificial Sequence
  Description of Artificial Sequence: Synthetic oligonucleotide
cuaagucaauugccuuuac

SEQ ID NO: 100981 - RNA, 19 nt, Artificial Sequence
  Description of Artificial Sequence: Synthetic oligonucleotide
gcuacugaugcucaaagau

SEQ ID NO: 100982 - RNA, 19 nt, Artificial Sequence
  Description of Artificial Sequence: Synthetic oligonucleotide
aaguacgcacaaacauucu

SEQ ID NO: 100983 - RNA, 19 nt, Artificial Sequence
  Description of Artificial Sequence: Synthetic oligonucleotide
caguugacccacugucuac

SEQ ID NO: 100984 - RNA, 19 nt, Artificial Sequence
  Description of Artificial Sequence: Synthetic oligonucleotide
caaacgugccuuugucauc

SEQ ID NO: 100985 - RNA, 19 nt, Artificial Sequence
  Description of Artificial Sequence: Synthetic oligonucleotide
acgcugacaccauagucua

SEQ ID NO: 100986 - RNA, 19 nt, Artificial Sequence
  Description of Artificial Sequence: Synthetic oligonucleotide
caaagucguuugaugacaa

SEQ ID NO: 100987 - RNA, 19 nt, Artificial Sequence
  Description of Artificial Sequence: Synthetic oligonucleotide
cuauauccuaaugauacau

SEQ ID NO: 100988 - RNA, 19 nt, Artificial Sequence
  Description of Artificial Sequence: Synthetic oligonucleotide
agugccugauuuugaugaa

SEQ ID NO: 100989 - RNA, 19 nt, Artificial Sequence
  Description of Artificial Sequence: Synthetic oligonucleotide
auaccauauuauaauccuu

SEQ ID NO: 100990 - RNA, 19 nt, Artificial Sequence
  Description of Artificial Sequence: Synthetic oligonucleotide
gggacuguuuguaagguaa

SEQ ID NO: 100991 - RNA, 19 nt, Artificial Sequence
  Description of Artificial Sequence: Synthetic oligonucleotide
cuacuauuuugucacuacu

SEQ ID NO: 100992 - RNA, 19 nt, Artificial Sequence
  Description of Artificial Sequence: Synthetic oligonucleotide
accauaaguucuagaggca

SEQ ID NO: 100993 - RNA, 19 nt, Artificial Sequence
  Description of Artificial Sequence: Synthetic oligonucleotide
cacuaugaguccuguaaua

SEQ ID NO: 100994 - RNA, 19 nt, Artificial Sequence
  Description of Artificial Sequence: Synthetic oligonucleotide
ggacaguccuauucauggc

SEQ ID NO: 100995 - RNA, 19 nt, Artificial Sequence
  Description of Artificial Sequence: Synthetic oligonucleotide
caggucuacuaaagcugac

SEQ ID NO: 100996 - RNA, 19 nt, Artificial Sequence
  Description of Artificial Sequence: Synthetic oligonucleotide
ccuaaagaagauaggaagu

SEQ ID NO: 100997 - RNA, 19 nt, Artificial Sequence
  Description of Artificial Sequence: Synthetic oligonucleotide
gguaccauucaauguauau

SEQ ID NO: 100998 - RNA, 19 nt, Artificial Sequence
  Description of Artificial Sequence: Synthetic oligonucleotide
guaaguacgcacaaacauu

SEQ ID NO: 100999 - RNA, 19 nt, Artificial Sequence
  Description of Artificial Sequence: Synthetic oligonucleotide
aggguauucccagauuauu

SEQ ID NO: 101000 - RNA, 19 nt, Artificial Sequence
  Description of Artificial Sequence: Synthetic oligonucleotide
ugcaauuugcaggggcaua

SEQ ID NO: 101001 - RNA, 19 nt, Artificial Sequence
  Description of Artificial Sequence: Synthetic oligonucleotide
agggacuguuuguaaggua

SEQ ID NO: 101002 - RNA, 19 nt, Artificial Sequence
  Description of Artificial Sequence: Synthetic oligonucleotide
agguuuagcuuuacuuuaa

SEQ ID NO: 101003 - RNA, 19 nt, Artificial Sequence
  Description of Artificial Sequence: Synthetic oligonucleotide
aggcuuauguagacugcug

SEQ ID NO: 101004 - RNA, 19 nt, Artificial Sequence
  Description of Artificial Sequence: Synthetic oligonucleotide
aacugccaugcagauucaa

SEQ ID NO: 101005 - RNA, 19 nt, Artificial Sequence
  Description of Artificial Sequence: Synthetic oligonucleotide
gggagucugaaaggauacg

SEQ ID NO: 101006 - RNA, 19 nt, Artificial Sequence
  Description of Artificial Sequence: Synthetic oligonucleotide
agccuaucccuggaaggug

SEQ ID NO: 101007 - RNA, 19 nt, Artificial Sequence
  Description of Artificial Sequence: Synthetic oligonucleotide
guaccauucaauguauauu

SEQ ID NO: 101008 - RNA, 19 nt, Artificial Sequence
  Description of Artificial Sequence: Synthetic oligonucleotide
auaugacaccgggacugug

SEQ ID NO: 101009 - RNA, 19 nt, Artificial Sequence
  Description of Artificial Sequence: Synthetic oligonucleotide
aggcaacacuaugaguccu

SEQ ID NO: 101010 - RNA, 19 nt, Artificial Sequence
  Description of Artificial Sequence: Synthetic oligonucleotide
ccgagguaagggcucagag

SEQ ID NO: 101011 - RNA, 19 nt, Artificial Sequence
  Description of Artificial Sequence: Synthetic oligonucleotide
gaaaaugucuaaggaccau

SEQ ID NO: 101012 - RNA, 19 nt, Artificial Sequence
  Description of Artificial Sequence: Synthetic oligonucleotide
caacaggcuuaaguagcug

SEQ ID NO: 101013 - RNA, 19 nt, Artificial Sequence
  Description of Artificial Sequence: Synthetic oligonucleotide
gcaagguaccauucaaugu

SEQ ID NO: 101014 - RNA, 19 nt, Artificial Sequence
  Description of Artificial Sequence: Synthetic oligonucleotide
gcuuaaguagcuguccaaa

SEQ ID NO: 101015 - RNA, 19 nt, Artificial Sequence
  Description of Artificial Sequence: Synthetic oligonucleotide
cugcaaugccuccagauuu

SEQ ID NO: 101016 - RNA, 19 nt, Artificial Sequence
  Description of Artificial Sequence: Synthetic oligonucleotide
ccaggucuacuaaagcuga

SEQ ID NO: 101017 - RNA, 19 nt, Artificial Sequence
  Description of Artificial Sequence: Synthetic oligonucleotide
caggggcauaugacaccgg

SEQ ID NO: 101018 - RNA, 19 nt, Artificial Sequence
  Description of Artificial Sequence: Synthetic oligonucleotide
guggauugagaaaguccuc

SEQ ID NO: 101019 - RNA, 19 nt, Artificial Sequence
  Description of Artificial Sequence: Synthetic oligonucleotide
cagugaaauaggguaauau

SEQ ID NO: 101020 - RNA, 19 nt, Artificial Sequence
  Description of Artificial Sequence: Synthetic oligonucleotide
ggcaacacuaugaguccug

SEQ ID NO: 101021 - RNA, 19 nt, Artificial Sequence
  Description of Artificial Sequence: Synthetic oligonucleotide
cuguaccgugcacugggca

SEQ ID NO: 101022 - RNA, 19 nt, Artificial Sequence
  Description of Artificial Sequence: Synthetic oligonucleotide
acgcaaugacaaaguaccu

SEQ ID NO: 101023 - RNA, 19 nt, Artificial Sequence
  Description of Artificial Sequence: Synthetic oligonucleotide
agguacauuuuaagccuau

SEQ ID NO: 101024 - RNA, 19 nt, Artificial Sequence
  Description of Artificial Sequence: Synthetic oligonucleotide
acgucacagcuuccauaca

SEQ ID NO: 101025 - RNA, 19 nt, Artificial Sequence
  Description of Artificial Sequence: Synthetic oligonucleotide
acauggcucuucaauugua

SEQ ID NO: 101026 - RNA, 19 nt, Artificial Sequence
  Description of Artificial Sequence: Synthetic oligonucleotide
accaguuaauaggcugcaa

SEQ ID NO: 101027 - RNA, 19 nt, Artificial Sequence
  Description of Artificial Sequence: Synthetic oligonucleotide
ggauacgcaaugacaaagu

SEQ ID NO: 101028 - RNA, 19 nt, Artificial Sequence
  Description of Artificial Sequence: Synthetic oligonucleotide
gaaugacauugaugucagu

SEQ ID NO: 101029 - RNA, 19 nt, Artificial Sequence
  Description of Artificial Sequence: Synthetic oligonucleotide
caggagcaaucuuacuagu

SEQ ID NO: 101030 - RNA, 19 nt, Artificial Sequence
  Description of Artificial Sequence: Synthetic oligonucleotide
gguuggaaaccugaguuuu

SEQ ID NO: 101031 - RNA, 19 nt, Artificial Sequence
  Description of Artificial Sequence: Synthetic oligonucleotide
cagagcacuguugagcaau

SEQ ID NO: 101032 - RNA, 19 nt, Artificial Sequence
  Description of Artificial Sequence: Synthetic oligonucleotide
ccuguaccgugcacugggc

SEQ ID NO: 101033 - RNA, 19 nt, Artificial Sequence
  Description of Artificial Sequence: Synthetic oligonucleotide
ggcuacuauuuugucacua

SEQ ID NO: 101034 - RNA, 19 nt, Artificial Sequence
  Description of Artificial Sequence: Synthetic oligonucleotide
agguaccauucaauguaua

SEQ ID NO: 101035 - RNA, 19 nt, Artificial Sequence
  Description of Artificial Sequence: Synthetic oligonucleotide
ggcauaugacaccgggacu

SEQ ID NO: 101036 - RNA, 19 nt, Artificial Sequence
  Description of Artificial Sequence: Synthetic oligonucleotide
ggggaggcuacuauuuugu

SEQ ID NO: 101037 - RNA, 19 nt, Artificial Sequence
  Description of Artificial Sequence: Synthetic oligonucleotide
gggguagaacgaaguacca

SEQ ID NO: 101038 - RNA, 19 nt, Artificial Sequence
  Description of Artificial Sequence: Synthetic oligonucleotide
gcaauuugcaggggcauau

SEQ ID NO: 101039 - RNA, 19 nt, Artificial Sequence
  Description of Artificial Sequence: Synthetic oligonucleotide
cauaugacaccgggacugu

SEQ ID NO: 101040 - RNA, 19 nt, Artificial Sequence
  Description of Artificial Sequence: Synthetic oligonucleotide
gugguaccacuagcuuuuc

SEQ ID NO: 101041 - RNA, 19 nt, Artificial Sequence
  Description of Artificial Sequence: Synthetic oligonucleotide
ccuuuaccuaaagaagaua

SEQ ID NO: 101042 - RNA, 19 nt, Artificial Sequence
  Description of Artificial Sequence: Synthetic oligonucleotide
ccaugcagauucaaguauu

SEQ ID NO: 101043 - RNA, 19 nt, Artificial Sequence
  Description of Artificial Sequence: Synthetic oligonucleotide
caguccgguuaagugugaa

SEQ ID NO: 101044 - RNA, 19 nt, Artificial Sequence
  Description of Artificial Sequence: Synthetic oligonucleotide
gcuggucaguuugcaacaa

SEQ ID NO: 101045 - RNA, 19 nt, Artificial Sequence
  Description of Artificial Sequence: Synthetic oligonucleotide
ccaaaggcuuauguagacu

SEQ ID NO: 101046 - RNA, 19 nt, Artificial Sequence
  Description of Artificial Sequence: Synthetic oligonucleotide
ccgguuaagugugaaggau

SEQ ID NO: 101047 - RNA, 19 nt, Artificial Sequence
  Description of Artificial Sequence: Synthetic oligonucleotide
cuaaacauaaauuauggag

SEQ ID NO: 101048 - RNA, 19 nt, Artificial Sequence
  Description of Artificial Sequence: Synthetic oligonucleotide
acaauaauucuuaagaggc

SEQ ID NO: 101049 - RNA, 19 nt, Artificial Sequence
  Description of Artificial Sequence: Synthetic oligonucleotide
aauuaguuaagugagaacu

SEQ ID NO: 101050 - RNA, 19 nt, Artificial Sequence
  Description of Artificial Sequence: Synthetic oligonucleotide
aaaguuuguaauaacaguc

SEQ ID NO: 101051 - RNA, 19 nt, Artificial Sequence
  Description of Artificial Sequence: Synthetic oligonucleotide
uguaauaacagucucagua

SEQ ID NO: 101052 - RNA, 19 nt, Artificial Sequence
  Description of Artificial Sequence: Synthetic oligonucleotide
auagucaaaauucugagca

SEQ ID NO: 101053 - RNA, 19 nt, Artificial Sequence
  Description of Artificial Sequence: Synthetic oligonucleotide
aaccuggugauucaugacc

SEQ ID NO: 101054 - RNA, 19 nt, Artificial Sequence
  Description of Artificial Sequence: Synthetic oligonucleotide
aguguaaaccuacaaacac

SEQ ID NO: 101055 - RNA, 19 nt, Artificial Sequence
  Description of Artificial Sequence: Synthetic oligonucleotide
auacauacuacuugauucc

SEQ ID NO: 101056 - RNA, 19 nt, Artificial Sequence
  Description of Artificial Sequence: Synthetic oligonucleotide
ugaacauuucuauugaucu

SEQ ID NO: 101057 - RNA, 19 nt, Artificial Sequence
  Description of Artificial Sequence: Synthetic oligonucleotide
ugcuauacaucauacaaag

SEQ ID NO: 101058 - RNA, 19 nt, Artificial Sequence
  Description of Artificial Sequence: Synthetic oligonucleotide
aaagcguagccguaggugg

SEQ ID NO: 101059 - RNA, 19 nt, Artificial Sequence
  Description of Artificial Sequence: Synthetic oligonucleotide
aacuaauacugcuauuuag

SEQ ID NO: 101060 - RNA, 19 nt, Artificial Sequence
  Description of Artificial Sequence: Synthetic oligonucleotide
agaaauagcacugugacga

SEQ ID NO: 101061 - RNA, 19 nt, Artificial Sequence
  Description of Artificial Sequence: Synthetic oligonucleotide
cucacaguaauuucaauag

SEQ ID NO: 101062 - RNA, 19 nt, Artificial Sequence
  Description of Artificial Sequence: Synthetic oligonucleotide
cuuagaacucaucaugucg

SEQ ID NO: 101063 - RNA, 19 nt, Artificial Sequence
  Description of Artificial Sequence: Synthetic oligonucleotide
aagcuuguaacuaauacug

SEQ ID NO: 101064 - RNA, 19 nt, Artificial Sequence
  Description of Artificial Sequence: Synthetic oligonucleotide
uccuuaacaagaaagaguu

SEQ ID NO: 101065 - RNA, 19 nt, Artificial Sequence
  Description of Artificial Sequence: Synthetic oligonucleotide
uuauucagaaacagauggg

SEQ ID NO: 101066 - RNA, 19 nt, Artificial Sequence
  Description of Artificial Sequence: Synthetic oligonucleotide
cauaguaagagacccauac

SEQ ID NO: 101067 - RNA, 19 nt, Artificial Sequence
  Description of Artificial Sequence: Synthetic oligonucleotide
uguaugaauguaaacaguu

SEQ ID NO: 101068 - RNA, 19 nt, Artificial Sequence
  Description of Artificial Sequence: Synthetic oligonucleotide
caugaggucuuuauaaacc

SEQ ID NO: 101069 - RNA, 19 nt, Artificial Sequence
  Description of Artificial Sequence: Synthetic oligonucleotide
auucuuaagaggcccauag

SEQ ID NO: 101070 - RNA, 19 nt, Artificial Sequence
  Description of Artificial Sequence: Synthetic oligonucleotide
aauuauggaguacauguuu

SEQ ID NO: 101071 - RNA, 19 nt, Artificial Sequence
  Description of Artificial Sequence: Synthetic oligonucleotide
uuaucuuaguaaccugagg

SEQ ID NO: 101072 - RNA, 19 nt, Artificial Sequence
  Description of Artificial Sequence: Synthetic oligonucleotide
auaaaucauacuugucgac

SEQ ID NO: 101073 - RNA, 19 nt, Artificial Sequence
  Description of Artificial Sequence: Synthetic oligonucleotide
aaccccaacacuauguggg

SEQ ID NO: 101074 - RNA, 19 nt, Artificial Sequence
  Description of Artificial Sequence: Synthetic oligonucleotide
auaagcacgggucccuucc

SEQ ID NO: 101075 - RNA, 19 nt, Artificial Sequence
  Description of Artificial Sequence: Synthetic oligonucleotide
cuuaagucagagcucaagc

SEQ ID NO: 101076 - RNA, 19 nt, Artificial Sequence
  Description of Artificial Sequence: Synthetic oligonucleotide
aauaaacacaccaugcuau

SEQ ID NO: 101077 - RNA, 19 nt, Artificial Sequence
  Description of Artificial Sequence: Synthetic oligonucleotide
guaagagacccauacuagg

SEQ ID NO: 101078 - RNA, 19 nt, Artificial Sequence
  Description of Artificial Sequence: Synthetic oligonucleotide
ucgaaacucaacaaacugu

SEQ ID NO: 101079 - RNA, 19 nt, Artificial Sequence
  Description of Artificial Sequence: Synthetic oligonucleotide
ucuaaacauaaauuaugga

SEQ ID NO: 101080 - RNA, 19 nt, Artificial Sequence
  Description of Artificial Sequence: Synthetic oligonucleotide
cuagguugcacaaaauaug

SEQ ID NO: 101081 - RNA, 19 nt, Artificial Sequence
  Description of Artificial Sequence: Synthetic oligonucleotide
aaauauaguaaaggguuga

SEQ ID NO: 101082 - RNA, 19 nt, Artificial Sequence
  Description of Artificial Sequence: Synthetic oligonucleotide
auaaagagcuagaaauagc

SEQ ID NO: 101083 - RNA, 19 nt, Artificial Sequence
  Description of Artificial Sequence: Synthetic oligonucleotide
cuugucgacaaucuccucc

SEQ ID NO: 101084 - RNA, 19 nt, Artificial Sequence
  Description of Artificial Sequence: Synthetic oligonucleotide
auuacuccuauccuggggu

SEQ ID NO: 101085 - RNA, 19 nt, Artificial Sequence
  Description of Artificial Sequence: Synthetic oligonucleotide
ucuagccuugcccagaaaa

SEQ ID NO: 101086 - RNA, 19 nt, Artificial Sequence
  Description of Artificial Sequence: Synthetic oligonucleotide
ucuccuuaacaagaaagag

SEQ ID NO: 101087 - RNA, 19 nt, Artificial Sequence
  Description of Artificial Sequence: Synthetic oligonucleotide
ugaggguuaaagauuugga

SEQ ID NO: 101088 - RNA, 19 nt, Artificial Sequence
  Description of Artificial Sequence: Synthetic oligonucleotide
agguauacaaucagaauag

SEQ ID NO: 101089 - RNA, 19 nt, Artificial Sequence
  Description of Artificial Sequence: Synthetic oligonucleotide
uucaagagagcuuagcauu

SEQ ID NO: 101090 - RNA, 19 nt, Artificial Sequence
  Description of Artificial Sequence: Synthetic oligonucleotide
ucacguuauacucccaacu

SEQ ID NO: 101091 - RNA, 19 nt, Artificial Sequence
  Description of Artificial Sequence: Synthetic oligonucleotide
ucgaguguguuugauauca

SEQ ID NO: 101092 - RNA, 19 nt, Artificial Sequence
  Description of Artificial Sequence: Synthetic oligonucleotide
ucauuaucucaauaugccu

SEQ ID NO: 101093 - RNA, 19 nt, Artificial Sequence
  Description of Artificial Sequence: Synthetic oligonucleotide
aucucuaaccaucaucugu

SEQ ID NO: 101094 - RNA, 19 nt, Artificial Sequence
  Description of Artificial Sequence: Synthetic oligonucleotide
uuuaucggcgucuauuuua

SEQ ID NO: 101095 - RNA, 19 nt, Artificial Sequence
  Description of Artificial Sequence: Synthetic oligonucleotide
aauguagguuccucugucu

SEQ ID NO: 101096 - RNA, 19 nt, Artificial Sequence
  Description of Artificial Sequence: Synthetic oligonucleotide
ugaggucuuuauaaaccag

SEQ ID NO: 101097 - RNA, 19 nt, Artificial Sequence
  Description of Artificial Sequence: Synthetic oligonucleotide
uacuacuugauuccuaauu

SEQ ID NO: 101098 - RNA, 19 nt, Artificial Sequence
  Description of Artificial Sequence: Synthetic oligonucleotide
ucucuaaccaucaucuguu

SEQ ID NO: 101099 - RNA, 19 nt, Artificial Sequence
  Description of Artificial Sequence: Synthetic oligonucleotide
auauggguaaauaguuggc

SEQ ID NO: 101100 - RNA, 19 nt, Artificial Sequence
  Description of Artificial Sequence: Synthetic oligonucleotide
uauccugggguuaaaacuu

SEQ ID NO: 101101 - RNA, 19 nt, Artificial Sequence
  Description of Artificial Sequence: Synthetic oligonucleotide
ugaccuuccuaccaacccc

SEQ ID NO: 101102 - RNA, 19 nt, Artificial Sequence
  Description of Artificial Sequence: Synthetic oligonucleotide
uuugccuacaagugugggc

SEQ ID NO: 101103 - RNA, 19 nt, Artificial Sequence
  Description of Artificial Sequence: Synthetic oligonucleotide
acguuauacucccaacuag

SEQ ID NO: 101104 - RNA, 19 nt, Artificial Sequence
  Description of Artificial Sequence: Synthetic oligonucleotide
auagucugaagggaggauc

SEQ ID NO: 101105 - RNA, 19 nt, Artificial Sequence
  Description of Artificial Sequence: Synthetic oligonucleotide
uccucgugaauccagcgcu

SEQ ID NO: 101106 - RNA, 19 nt, Artificial Sequence
  Description of Artificial Sequence: Synthetic oligonucleotide
auguguuauucagauauag

SEQ ID NO: 101107 - RNA, 19 nt, Artificial Sequence
  Description of Artificial Sequence: Synthetic oligonucleotide
uuaucucgaaacucaacaa

SEQ ID NO: 101108 - RNA, 19 nt, Artificial Sequence
  Description of Artificial Sequence: Synthetic oligonucleotide
ggcaauuaggucuccaucc

SEQ ID NO: 101109 - RNA, 19 nt, Artificial Sequence
  Description of Artificial Sequence: Synthetic oligonucleotide
agaguaaagggcuaauguu

SEQ ID NO: 101110 - RNA, 19 nt, Artificial Sequence
  Description of Artificial Sequence: Synthetic oligonucleotide
uccuucacguuauacuccc

SEQ ID NO: 101111 - RNA, 19 nt, Artificial Sequence
  Description of Artificial Sequence: Synthetic oligonucleotide
ugugacgagaucauacaua

SEQ ID NO: 101112 - RNA, 19 nt, Artificial Sequence
  Description of Artificial Sequence: Synthetic oligonucleotide
ucuaaggcucucuugucac

SEQ ID NO: 101113 - RNA, 19 nt, Artificial Sequence
  Description of Artificial Sequence: Synthetic oligonucleotide
gaggccauccucauugagg

SEQ ID NO: 101114 - RNA, 19 nt, Artificial Sequence
  Description of Artificial Sequence: Synthetic oligonucleotide
uacaugucaccaauauacu

SEQ ID NO: 101115 - RNA, 19 nt, Artificial Sequence
  Description of Artificial Sequence: Synthetic oligonucleotide
augauagcccaccuuucuc

SEQ ID NO: 101116 - RNA, 19 nt, Artificial Sequence
  Description of Artificial Sequence: Synthetic oligonucleotide
aaaacuugguuuacacucu

SEQ ID NO: 101117 - RNA, 19 nt, Artificial Sequence
  Description of Artificial Sequence: Synthetic oligonucleotide
uuaguuaagugagaacuau

SEQ ID NO: 101118 - RNA, 19 nt, Artificial Sequence
  Description of Artificial Sequence: Synthetic oligonucleotide
guuaggcucugcucuaagg

SEQ ID NO: 101119 - RNA, 19 nt, Artificial Sequence
  Description of Artificial Sequence: Synthetic oligonucleotide
uguagguuccucugucugc

SEQ ID NO: 101120 - RNA, 19 nt, Artificial Sequence
  Description of Artificial Sequence: Synthetic oligonucleotide
aguagcgcaaacaauuuca

SEQ ID NO: 101121 - RNA, 19 nt, Artificial Sequence
  Description of Artificial Sequence: Synthetic oligonucleotide
gaggguuaaagauuuggaa

SEQ ID NO: 101122 - RNA, 19 nt, Artificial Sequence
  Description of Artificial Sequence: Synthetic oligonucleotide
cacugugacgagaucauac

SEQ ID NO: 101123 - RNA, 19 nt, Artificial Sequence
  Description of Artificial Sequence: Synthetic oligonucleotide
auaguaagagacccauacu

SEQ ID NO: 101124 - RNA, 19 nt, Artificial Sequence
  Description of Artificial Sequence: Synthetic oligonucleotide
uucacgucaguguuaggcu

SEQ ID NO: 101125 - RNA, 19 nt, Artificial Sequence
  Description of Artificial Sequence: Synthetic oligonucleotide
ucuuaucucgaaacucaac

SEQ ID NO: 101126 - RNA, 19 nt, Artificial Sequence
  Description of Artificial Sequence: Synthetic oligonucleotide
auggcuugggugaaguuac

SEQ ID NO: 101127 - RNA, 19 nt, Artificial Sequence
  Description of Artificial Sequence: Synthetic oligonucleotide
gguuguggaagaccaaagg

SEQ ID NO: 101128 - RNA, 19 nt, Artificial Sequence
  Description of Artificial Sequence: Synthetic oligonucleotide
ucauuacuccuauccuggg

SEQ ID NO: 101129 - RNA, 19 nt, Artificial Sequence
  Description of Artificial Sequence: Synthetic oligonucleotide
acugugacgagaucauaca

SEQ ID NO: 101130 - RNA, 19 nt, Artificial Sequence
  Description of Artificial Sequence: Synthetic oligonucleotide
acuagguugcacaaaauau

SEQ ID NO: 101131 - RNA, 19 nt, Artificial Sequence
  Description of Artificial Sequence: Synthetic oligonucleotide
uccacugacguucuacguc

SEQ ID NO: 101132 - RNA, 19 nt, Artificial Sequence
  Description of Artificial Sequence: Synthetic oligonucleotide
uccuugguaagcuugccau

SEQ ID NO: 101133 - RNA, 19 nt, Artificial Sequence
  Description of Artificial Sequence: Synthetic oligonucleotide
cuucuagaucaaugaaacc

SEQ ID NO: 101134 - RNA, 19 nt, Artificial Sequence
  Description of Artificial Sequence: Synthetic oligonucleotide
cuauuuagcuauuguccac

SEQ ID NO: 101135 - RNA, 19 nt, Artificial Sequence
  Description of Artificial Sequence: Synthetic oligonucleotide
uccugggguuaaaacuucg

SEQ ID NO: 101136 - RNA, 19 nt, Artificial Sequence
  Description of Artificial Sequence: Synthetic oligonucleotide
acagcuaguccuaaaggag

SEQ ID NO: 101137 - RNA, 19 nt, Artificial Sequence
  Description of Artificial Sequence: Synthetic oligonucleotide
accaugcuauacaucauac

SEQ ID NO: 101138 - RNA, 19 nt, Artificial Sequence
  Description of Artificial Sequence: Synthetic oligonucleotide
auagacuagaugccuggcu

SEQ ID NO: 101139 - RNA, 19 nt, Artificial Sequence
  Description of Artificial Sequence: Synthetic oligonucleotide
uucuaguuggaaacagguc

SEQ ID NO: 101140 - RNA, 19 nt, Artificial Sequence
  Description of Artificial Sequence: Synthetic oligonucleotide
aguuagcaaacagcuaguc

SEQ ID NO: 101141 - RNA, 19 nt, Artificial Sequence
  Description of Artificial Sequence: Synthetic oligonucleotide
agcuuguaacuaauacugc

SEQ ID NO: 101142 - RNA, 19 nt, Artificial Sequence
  Description of Artificial Sequence: Synthetic oligonucleotide
cauacuagguugcacaaaa

SEQ ID NO: 101143 - RNA, 19 nt, Artificial Sequence
  Description of Artificial Sequence: Synthetic oligonucleotide
gugucgagcugucuuacag

SEQ ID NO: 101144 - RNA, 19 nt, Artificial Sequence
  Description of Artificial Sequence: Synthetic oligonucleotide
acgggucccuuccaguccc

SEQ ID NO: 101145 - RNA, 19 nt, Artificial Sequence
  Description of Artificial Sequence: Synthetic oligonucleotide
cucauagacuagaugccug

SEQ ID NO: 101146 - RNA, 19 nt, Artificial Sequence
  Description of Artificial Sequence: Synthetic oligonucleotide
acgagaucauacauacuac

SEQ ID NO: 101147 - RNA, 19 nt, Artificial Sequence
  Description of Artificial Sequence: Synthetic oligonucleotide
cauuucuauugaucucagg

SEQ ID NO: 101148 - RNA, 19 nt, Artificial Sequence
  Description of Artificial Sequence: Synthetic oligonucleotide
agugugugacauucacguc

SEQ ID NO: 101149 - RNA, 19 nt, Artificial Sequence
  Description of Artificial Sequence: Synthetic oligonucleotide
uucacguuauacucccaac

SEQ ID NO: 101150 - RNA, 19 nt, Artificial Sequence
  Description of Artificial Sequence: Synthetic oligonucleotide
cauacuacuugauuccuaa

SEQ ID NO: 101151 - RNA, 19 nt, Artificial Sequence
  Description of Artificial Sequence: Synthetic oligonucleotide
accaauacucaaauucaag

SEQ ID NO: 101152 - RNA, 19 nt, Artificial Sequence
  Description of Artificial Sequence: Synthetic oligonucleotide
uguuaggcucugcucuaag

SEQ ID NO: 101153 - RNA, 19 nt, Artificial Sequence
  Description of Artificial Sequence: Synthetic oligonucleotide
uguuugauaucaagagcuu

SEQ ID NO: 101154 - RNA, 19 nt, Artificial Sequence
  Description of Artificial Sequence: Synthetic oligonucleotide
ucuuaguaaccugaggguu

SEQ ID NO: 101155 - RNA, 19 nt, Artificial Sequence
  Description of Artificial Sequence: Synthetic oligonucleotide
ucauagucugaagggagga

SEQ ID NO: 101156 - RNA, 19 nt, Artificial Sequence
  Description of Artificial Sequence: Synthetic oligonucleotide
aagcguagccguagguggc

SEQ ID NO: 101157 - RNA, 19 nt, Artificial Sequence
  Description of Artificial Sequence: Synthetic oligonucleotide
aggaaacgaggccauccuc

SEQ ID NO: 101158 - RNA, 19 nt, Artificial Sequence
  Description of Artificial Sequence: Synthetic oligonucleotide
uuucuccggagcuccacgc

SEQ ID NO: 101159 - RNA, 19 nt, Artificial Sequence
  Description of Artificial Sequence: Synthetic oligonucleotide
auguccagaauaugccaug

SEQ ID NO: 101160 - RNA, 19 nt, Artificial Sequence
  Description of Artificial Sequence: Synthetic oligonucleotide
aacucaucaugucgcacua

SEQ ID NO: 101161 - RNA, 19 nt, Artificial Sequence
  Description of Artificial Sequence: Synthetic oligonucleotide
aaacuugguuuacacucua

SEQ ID NO: 101162 - RNA, 19 nt, Artificial Sequence
  Description of Artificial Sequence: Synthetic oligonucleotide
guucagauaugaccauccc

SEQ ID NO: 101163 - RNA, 19 nt, Artificial Sequence
  Description of Artificial Sequence: Synthetic oligonucleotide
gaaacagauggguaccugu

SEQ ID NO: 101164 - RNA, 19 nt, Artificial Sequence
  Description of Artificial Sequence: Synthetic oligonucleotide
accgggaucuagccuugcc

SEQ ID NO: 101165 - RNA, 19 nt, Artificial Sequence
  Description of Artificial Sequence: Synthetic oligonucleotide
aaccaauacucaaauucaa

SEQ ID NO: 101166 - RNA, 19 nt, Artificial Sequence
  Description of Artificial Sequence: Synthetic oligonucleotide
cuauccugggguuaaaacu

SEQ ID NO: 101167 - RNA, 19 nt, Artificial Sequence
  Description of Artificial Sequence: Synthetic oligonucleotide
auaaacacaccaugcuaua

SEQ ID NO: 101168 - RNA, 19 nt, Artificial Sequence
  Description of Artificial Sequence: Synthetic oligonucleotide
auagagcuuuucaacagga

SEQ ID NO: 101169 - RNA, 19 nt, Artificial Sequence
  Description of Artificial Sequence: Synthetic oligonucleotide
uaaggcucucuugucacac

SEQ ID NO: 101170 - RNA, 19 nt, Artificial Sequence
  Description of Artificial Sequence: Synthetic oligonucleotide
ccaagcuuguaacuaauac

SEQ ID NO: 101171 - RNA, 19 nt, Artificial Sequence
  Description of Artificial Sequence: Synthetic oligonucleotide
acucauagacuagaugccu

SEQ ID NO: 101172 - RNA, 19 nt, Artificial Sequence
  Description of Artificial Sequence: Synthetic oligonucleotide
gguucagauaugaccaucc

SEQ ID NO: 101173 - RNA, 19 nt, Artificial Sequence
  Description of Artificial Sequence: Synthetic oligonucleotide
guaacuaauacugcuauuu

SEQ ID NO: 101174 - RNA, 19 nt, Artificial Sequence
  Description of Artificial Sequence: Synthetic oligonucleotide
gaucccugguccaaucagc

SEQ ID NO: 101175 - RNA, 19 nt, Artificial Sequence
  Description of Artificial Sequence: Synthetic oligonucleotide
aggaaagcgguaaauuccu

SEQ ID NO: 101176 - RNA, 19 nt, Artificial Sequence
  Description of Artificial Sequence: Synthetic oligonucleotide
acacccuucuaagccaggg

SEQ ID NO: 101177 - RNA, 19 nt, Artificial Sequence
  Description of Artificial Sequence: Synthetic oligonucleotide
agagagaaaggcagaugag

SEQ ID NO: 101178 - RNA, 19 nt, Artificial Sequence
  Description of Artificial Sequence: Synthetic oligonucleotide
guuugccuacaaguguggg

SEQ ID NO: 101179 - RNA, 19 nt, Artificial Sequence
  Description of Artificial Sequence: Synthetic oligonucleotide
ggccacuuguaaaauagag

SEQ ID NO: 101180 - RNA, 19 nt, Artificial Sequence
  Description of Artificial Sequence: Synthetic oligonucleotide
ugacguucuacguccucgu

SEQ ID NO: 101181 - RNA, 19 nt, Artificial Sequence
  Description of Artificial Sequence: Synthetic oligonucleotide
gugacauucacgucagugu

SEQ ID NO: 101182 - RNA, 19 nt, Artificial Sequence
  Description of Artificial Sequence: Synthetic oligonucleotide
cucugugugcccauccauc

SEQ ID NO: 101183 - RNA, 19 nt, Artificial Sequence
  Description of Artificial Sequence: Synthetic oligonucleotide
agaauguucauuacuccua

SEQ ID NO: 101184 - RNA, 19 nt, Artificial Sequence
  Description of Artificial Sequence: Synthetic oligonucleotide
agcgguaaauuccuccuuu

SEQ ID NO: 101185 - RNA, 19 nt, Artificial Sequence
  Description of Artificial Sequence: Synthetic oligonucleotide
cuucgaguguguuugauau

SEQ ID NO: 101186 - RNA, 19 nt, Artificial Sequence
  Description of Artificial Sequence: Synthetic oligonucleotide
auuaguuaagugagaacua

SEQ ID NO: 101187 - RNA, 19 nt, Artificial Sequence
  Description of Artificial Sequence: Synthetic oligonucleotide
uugcuaaggacggcaaccu

SEQ ID NO: 101188 - RNA, 19 nt, Artificial Sequence
  Description of Artificial Sequence: Synthetic oligonucleotide
ucgcacuaaggccucccca

SEQ ID NO: 101189 - RNA, 19 nt, Artificial Sequence
  Description of Artificial Sequence: Synthetic oligonucleotide
uuaaaccuccgcucaucuc

SEQ ID NO: 101190 - RNA, 19 nt, Artificial Sequence
  Description of Artificial Sequence: Synthetic oligonucleotide
uuccacugacguucuacgu

SEQ ID NO: 101191 - RNA, 19 nt, Artificial Sequence
  Description of Artificial Sequence: Synthetic oligonucleotide
aaccugaggguuaaagauu

SEQ ID NO: 101192 - RNA, 19 nt, Artificial Sequence
  Description of Artificial Sequence: Synthetic oligonucleotide
aaggcucucuugucacaca

SEQ ID NO: 101193 - RNA, 19 nt, Artificial Sequence
  Description of Artificial Sequence: Synthetic oligonucleotide
ccacugacguucuacgucc

SEQ ID NO: 101194 - RNA, 19 nt, Artificial Sequence
  Description of Artificial Sequence: Synthetic oligonucleotide
uacugcuauuuagcuauug

SEQ ID NO: 101195 - RNA, 19 nt, Artificial Sequence
  Description of Artificial Sequence: Synthetic oligonucleotide
aauucuuaagaggcccaua

SEQ ID NO: 101196 - RNA, 19 nt, Artificial Sequence
  Description of Artificial Sequence: Synthetic oligonucleotide
acuucgaguguguuugaua

SEQ ID NO: 101197 - RNA, 19 nt, Artificial Sequence
  Description of Artificial Sequence: Synthetic oligonucleotide
aggacggcaaccuggugau

SEQ ID NO: 101198 - RNA, 19 nt, Artificial Sequence
  Description of Artificial Sequence: Synthetic oligonucleotide
guccucgugaauccagcgc

SEQ ID NO: 101199 - RNA, 19 nt, Artificial Sequence
  Description of Artificial Sequence: Synthetic oligonucleotide
uucuaagccagggcuggug

SEQ ID NO: 101200 - RNA, 19 nt, Artificial Sequence
  Description of Artificial Sequence: Synthetic oligonucleotide
auacucccaacuagagaac

SEQ ID NO: 101201 - RNA, 19 nt, Artificial Sequence
  Description of Artificial Sequence: Synthetic oligonucleotide
cauagacuagaugccuggc

SEQ ID NO: 101202 - RNA, 19 nt, Artificial Sequence
  Description of Artificial Sequence: Synthetic oligonucleotide
cugaaaggccacuuguaaa

SEQ ID NO: 101203 - RNA, 19 nt, Artificial Sequence
  Description of Artificial Sequence: Synthetic oligonucleotide
aagcgguaaauuccuccuu

SEQ ID NO: 101204 - RNA, 19 nt, Artificial Sequence
  Description of Artificial Sequence: Synthetic oligonucleotide
caucucuaaccaucaucug

SEQ ID NO: 101205 - RNA, 19 nt, Artificial Sequence
  Description of Artificial Sequence: Synthetic oligonucleotide
ugacgagaucauacauacu

SEQ ID NO: 101206 - RNA, 19 nt, Artificial Sequence
  Description of Artificial Sequence: Synthetic oligonucleotide
gaggucgugccccuuccac

SEQ ID NO: 101207 - RNA, 19 nt, Artificial Sequence
  Description of Artificial Sequence: Synthetic oligonucleotide
gagcugucuuacagcaccg

SEQ ID NO: 101208 - RNA, 19 nt, Artificial Sequence
  Description of Artificial Sequence: Synthetic oligonucleotide
ugugucgagcugucuuaca

SEQ ID NO: 101209 - RNA, 19 nt, Artificial Sequence
  Description of Artificial Sequence: Synthetic oligonucleotide
acguccucgugaauccagc

SEQ ID NO: 101210 - RNA, 19 nt, Artificial Sequence
  Description of Artificial Sequence: Synthetic oligonucleotide
ggaucaucuaaagcguagc

SEQ ID NO: 101211 - RNA, 19 nt, Artificial Sequence
  Description of Artificial Sequence: Synthetic oligonucleotide
uguggcaauuaggucucca

SEQ ID NO: 101212 - RNA, 19 nt, Artificial Sequence
  Description of Artificial Sequence: Synthetic oligonucleotide
agauggguaccuguuugca

SEQ ID NO: 101213 - RNA, 19 nt, Artificial Sequence
  Description of Artificial Sequence: Synthetic oligonucleotide
gucuauauccuccauuguu

SEQ ID NO: 101214 - RNA, 19 nt, Artificial Sequence
  Description of Artificial Sequence: Synthetic oligonucleotide
cuucacguuauacucccaa

SEQ ID NO: 101215 - RNA, 19 nt, Artificial Sequence
  Description of Artificial Sequence: Synthetic oligonucleotide
uucgaguguguuugauauc

SEQ ID NO: 101216 - RNA, 19 nt, Artificial Sequence
  Description of Artificial Sequence: Synthetic oligonucleotide
cgagcugucuuacagcacc

SEQ ID NO: 101217 - RNA, 19 nt, Artificial Sequence
  Description of Artificial Sequence: Synthetic oligonucleotide
gacguucuacguccucgug

SEQ ID NO: 101218 - RNA, 19 nt, Artificial Sequence
  Description of Artificial Sequence: Synthetic oligonucleotide
aacuucgaguguguuugau

SEQ ID NO: 101219 - RNA, 19 nt, Artificial Sequence
  Description of Artificial Sequence: Synthetic oligonucleotide
cacguuauacucccaacua

SEQ ID NO: 101220 - RNA, 19 nt, Artificial Sequence
  Description of Artificial Sequence: Synthetic oligonucleotide
gaucuagccuugcccagaa

SEQ ID NO: 101221 - RNA, 19 nt, Artificial Sequence
  Description of Artificial Sequence: Synthetic oligonucleotide
ggguaaauaguuggcaaca

SEQ ID NO: 101222 - RNA, 19 nt, Artificial Sequence
  Description of Artificial Sequence: Synthetic oligonucleotide
ucgagcugucuuacagcac

SEQ ID NO: 101223 - RNA, 19 nt, Artificial Sequence
  Description of Artificial Sequence: Synthetic oligonucleotide
uugugucgagcugucuuac

SEQ ID NO: 101224 - RNA, 19 nt, Artificial Sequence
  Description of Artificial Sequence: Synthetic oligonucleotide
uucaguaggcuugcucaaa

SEQ ID NO: 101225 - RNA, 19 nt, Artificial Sequence
  Description of Artificial Sequence: Synthetic oligonucleotide
ggaaacgaggccauccuca

SEQ ID NO: 101226 - RNA, 19 nt, Artificial Sequence
  Description of Artificial Sequence: Synthetic oligonucleotide
cuacaagugugggcugagg

SEQ ID NO: 101227 - RNA, 19 nt, Artificial Sequence
  Description of Artificial Sequence: Synthetic oligonucleotide
cuaguccuaaaggaggaaa

SEQ ID NO: 101228 - RNA, 19 nt, Artificial Sequence
  Description of Artificial Sequence: Synthetic oligonucleotide
ugaggucgugccccuucca

SEQ ID NO: 101229 - RNA, 19 nt, Artificial Sequence
  Description of Artificial Sequence: Synthetic oligonucleotide
cauaagcacgggucccuuc

SEQ ID NO: 101230 - RNA, 19 nt, Artificial Sequence
  Description of Artificial Sequence: Synthetic oligonucleotide
caugucgcacuaaggccuc

SEQ ID NO: 101231 - RNA, 19 nt, Artificial Sequence
  Description of Artificial Sequence: Synthetic oligonucleotide
ugucgcacuaaggccuccc

SEQ ID NO: 101232 - RNA, 19 nt, Artificial Sequence
  Description of Artificial Sequence: Synthetic oligonucleotide
aacuugguuuacacucuau

SEQ ID NO: 101233 - RNA, 19 nt, Artificial Sequence
  Description of Artificial Sequence: Synthetic oligonucleotide
ugccucagacuugauuuaa

SEQ ID NO: 101234 - RNA, 19 nt, Artificial Sequence
  Description of Artificial Sequence: Synthetic oligonucleotide
uuacuccuauccugggguu

SEQ ID NO: 101235 - RNA, 19 nt, Artificial Sequence
  Description of Artificial Sequence: Synthetic oligonucleotide
acggcaaccuggugauuca

SEQ ID NO: 101236 - RNA, 19 nt, Artificial Sequence
  Description of Artificial Sequence: Synthetic oligonucleotide
uccuaccaaccccaccuuu

SEQ ID NO: 101237 - RNA, 19 nt, Artificial Sequence
  Description of Artificial Sequence: Synthetic oligonucleotide
gccuuuucaugucuuagaa

SEQ ID NO: 101238 - RNA, 19 nt, Artificial Sequence
  Description of Artificial Sequence: Synthetic oligonucleotide
ugguagcagcuaagcuugc

SEQ ID NO: 101239 - RNA, 19 nt, Artificial Sequence
  Description of Artificial Sequence: Synthetic oligonucleotide
cacgccgcaggacaccgug

SEQ ID NO: 101240 - RNA, 19 nt, Artificial Sequence
  Description of Artificial Sequence: Synthetic oligonucleotide
gucgcacuaaggccucccc

SEQ ID NO: 101241 - RNA, 19 nt, Artificial Sequence
  Description of Artificial Sequence: Synthetic oligonucleotide
ucgugaauccagcgcuuuu

SEQ ID NO: 101242 - RNA, 19 nt, Artificial Sequence
  Description of Artificial Sequence: Synthetic oligonucleotide
ccucacaguaauuucaaua

SEQ ID NO: 101243 - RNA, 19 nt, Artificial Sequence
  Description of Artificial Sequence: Synthetic oligonucleotide
gacccauacuagguugcac

SEQ ID NO: 101244 - RNA, 19 nt, Artificial Sequence
  Description of Artificial Sequence: Synthetic oligonucleotide
cuaaggcucucuugucaca

SEQ ID NO: 101245 - RNA, 19 nt, Artificial Sequence
  Description of Artificial Sequence: Synthetic oligonucleotide
caugauagcccaccuuucu

SEQ ID NO: 101246 - RNA, 19 nt, Artificial Sequence
  Description of Artificial Sequence: Synthetic oligonucleotide
gcgucuauuuuaucuacaa

SEQ ID NO: 101247 - RNA, 19 nt, Artificial Sequence
  Description of Artificial Sequence: Synthetic oligonucleotide
cuaaggacggcaaccuggu

SEQ ID NO: 101248 - RNA, 19 nt, Artificial Sequence
  Description of Artificial Sequence: Synthetic oligonucleotide
cugguuaagugugugacau

SEQ ID NO: 101249 - RNA, 19 nt, Artificial Sequence
  Description of Artificial Sequence: Synthetic oligonucleotide
gcgguaaauuccuccuuug

SEQ ID NO: 101250 - RNA, 19 nt, Artificial Sequence
  Description of Artificial Sequence: Synthetic oligonucleotide
ccuuaacaagaaagaguug

SEQ ID NO: 101251 - RNA, 19 nt, Artificial Sequence
  Description of Artificial Sequence: Synthetic oligonucleotide
cuuugucgcugagcugagg

SEQ ID NO: 101252 - RNA, 19 nt, Artificial Sequence
  Description of Artificial Sequence: Synthetic oligonucleotide
ggaagucaaguugugucga

SEQ ID NO: 101253 - RNA, 19 nt, Artificial Sequence
  Description of Artificial Sequence: Synthetic oligonucleotide
cguuauacucccaacuaga

SEQ ID NO: 101254 - RNA, 19 nt, Artificial Sequence
  Description of Artificial Sequence: Synthetic oligonucleotide
cuccgugacaaacccaucu

SEQ ID NO: 101255 - RNA, 19 nt, Artificial Sequence
  Description of Artificial Sequence: Synthetic oligonucleotide
gggaucuagccuugcccag

SEQ ID NO: 101256 - RNA, 19 nt, Artificial Sequence
  Description of Artificial Sequence: Synthetic oligonucleotide
ccgggaucuagccuugccc

SEQ ID NO: 101257 - RNA, 19 nt, Artificial Sequence
  Description of Artificial Sequence: Synthetic oligonucleotide
ucccgguucuuaucucgaa

SEQ ID NO: 101258 - RNA, 19 nt, Artificial Sequence
  Description of Artificial Sequence: Synthetic oligonucleotide
ugguuaagugugugacauu

SEQ ID NO: 101259 - RNA, 19 nt, Artificial Sequence
  Description of Artificial Sequence: Synthetic oligonucleotide
augucgcacuaaggccucc

SEQ ID NO: 101260 - RNA, 19 nt, Artificial Sequence
  Description of Artificial Sequence: Synthetic oligonucleotide
gaaagaguaaagggcuaau

SEQ ID NO: 101261 - RNA, 19 nt, Artificial Sequence
  Description of Artificial Sequence: Synthetic oligonucleotide
gugaauccagcgcuuuugu

SEQ ID NO: 101262 - RNA, 19 nt, Artificial Sequence
  Description of Artificial Sequence: Synthetic oligonucleotide
gugauucaugaccuuccua

SEQ ID NO: 101263 - RNA, 19 nt, Artificial Sequence
  Description of Artificial Sequence: Synthetic oligonucleotide
uacuccuauccugggguua

SEQ ID NO: 101264 - RNA, 19 nt, Artificial Sequence
  Description of Artificial Sequence: Synthetic oligonucleotide
gguccagguucagauauga

SEQ ID NO: 101265 - RNA, 19 nt, Artificial Sequence
  Description of Artificial Sequence: Synthetic oligonucleotide
gccccuuccacugacguuc

SEQ ID NO: 101266 - RNA, 19 nt, Artificial Sequence
  Description of Artificial Sequence: Synthetic oligonucleotide
guguacugaucagaguugu

SEQ ID NO: 101267 - RNA, 19 nt, Artificial Sequence
  Description of Artificial Sequence: Synthetic oligonucleotide
ucauaagcacgggucccuu

SEQ ID NO: 101268 - RNA, 19 nt, Artificial Sequence
  Description of Artificial Sequence: Synthetic oligonucleotide
cugcacgacuaugucuuuc

SEQ ID NO: 101269 - RNA, 19 nt, Artificial Sequence
  Description of Artificial Sequence: Synthetic oligonucleotide
aggccacuuguaaaauaga

SEQ ID NO: 101270 - RNA, 19 nt, Artificial Sequence
  Description of Artificial Sequence: Synthetic oligonucleotide
caucuaaagcguagccgua

SEQ ID NO: 101271 - RNA, 19 nt, Artificial Sequence
  Description of Artificial Sequence: Synthetic oligonucleotide
cuaaagcguagccguaggu

SEQ ID NO: 101272 - RNA, 19 nt, Artificial Sequence
  Description of Artificial Sequence: Synthetic oligonucleotide
ccaauauacucuucuagau

SEQ ID NO: 101273 - RNA, 19 nt, Artificial Sequence
  Description of Artificial Sequence: Synthetic oligonucleotide
ccucauaagcacggguccc

SEQ ID NO: 101274 - RNA, 19 nt, Artificial Sequence
  Description of Artificial Sequence: Synthetic oligonucleotide
ccaugcuauacaucauaca

SEQ ID NO: 101275 - RNA, 19 nt, Artificial Sequence
  Description of Artificial Sequence: Synthetic oligonucleotide
uuguggcaauuaggucucc

SEQ ID NO: 101276 - RNA, 19 nt, Artificial Sequence
  Description of Artificial Sequence: Synthetic oligonucleotide
cacuuguaaaauagagcuu

SEQ ID NO: 101277 - RNA, 19 nt, Artificial Sequence
  Description of Artificial Sequence: Synthetic oligonucleotide
cugugacgagaucauacau

SEQ ID NO: 101278 - RNA, 19 nt, Artificial Sequence
  Description of Artificial Sequence: Synthetic oligonucleotide
ugccccuuccacugacguu

SEQ ID NO: 101279 - RNA, 19 nt, Artificial Sequence
  Description of Artificial Sequence: Synthetic oligonucleotide
guagcgcaaacaauuucau

SEQ ID NO: 101280 - RNA, 19 nt, Artificial Sequence
  Description of Artificial Sequence: Synthetic oligonucleotide
cgugaauccagcgcuuuug

SEQ ID NO: 101281 - RNA, 19 nt, Artificial Sequence
  Description of Artificial Sequence: Synthetic oligonucleotide
cguccucgugaauccagcg

SEQ ID NO: 101282 - RNA, 19 nt, Artificial Sequence
  Description of Artificial Sequence: Synthetic oligonucleotide
cugcauggucauagucuga

SEQ ID NO: 101283 - RNA, 19 nt, Artificial Sequence
  Description of Artificial Sequence: Synthetic oligonucleotide
ggguuaaaacuucgagugu

SEQ ID NO: 101284 - RNA, 19 nt, Artificial Sequence
  Description of Artificial Sequence: Synthetic oligonucleotide
ggcgucuauuuuaucuaca

SEQ ID NO: 101285 - RNA, 19 nt, Artificial Sequence
  Description of Artificial Sequence: Synthetic oligonucleotide
acucaucaugucgcacuaa

SEQ ID NO: 101286 - RNA, 19 nt, Artificial Sequence
  Description of Artificial Sequence: Synthetic oligonucleotide
ccugggguuaaaacuucga

SEQ ID NO: 101287 - RNA, 19 nt, Artificial Sequence
  Description of Artificial Sequence: Synthetic oligonucleotide
caaaggguagguccagguu

SEQ ID NO: 101288 - RNA, 19 nt, Artificial Sequence
  Description of Artificial Sequence: Synthetic oligonucleotide
cuuuaucggcgucuauuuu

SEQ ID NO: 101289 - RNA, 19 nt, Artificial Sequence
  Description of Artificial Sequence: Synthetic oligonucleotide
gugccccuuccacugacgu

SEQ ID NO: 101290 - RNA, 19 nt, Artificial Sequence
  Description of Artificial Sequence: Synthetic oligonucleotide
gcucaagcucugguaagca

SEQ ID NO: 101291 - RNA, 19 nt, Artificial Sequence
  Description of Artificial Sequence: Synthetic oligonucleotide
cccauacuagguugcacaa

SEQ ID NO: 101292 - RNA, 19 nt, Artificial Sequence
  Description of Artificial Sequence: Synthetic oligonucleotide
gucgugccccuuccacuga

SEQ ID NO: 101293 - RNA, 19 nt, Artificial Sequence
  Description of Artificial Sequence: Synthetic oligonucleotide
gcgcuuuugugcaaacuua

SEQ ID NO: 101294 - RNA, 19 nt, Artificial Sequence
  Description of Artificial Sequence: Synthetic oligonucleotide
cauagucugaagggaggau

SEQ ID NO: 101295 - RNA, 19 nt, Artificial Sequence
  Description of Artificial Sequence: Synthetic oligonucleotide
cucuaaccaucaucuguuu

SEQ ID NO: 101296 - RNA, 19 nt, Artificial Sequence
  Description of Artificial Sequence: Synthetic oligonucleotide
gcacuaaggccuccccaaa

SEQ ID NO: 101297 - RNA, 19 nt, Artificial Sequence
  Description of Artificial Sequence: Synthetic oligonucleotide
caccgggaucuagccuugc

SEQ ID NO: 101298 - RNA, 19 nt, Artificial Sequence
  Description of Artificial Sequence: Synthetic oligonucleotide
gugcaggaaagcgguaaau

SEQ ID NO: 101299 - RNA, 19 nt, Artificial Sequence
  Description of Artificial Sequence: Synthetic oligonucleotide
cgugccccuuccacugacg

SEQ ID NO: 101300 - RNA, 19 nt, Artificial Sequence
  Description of Artificial Sequence: Synthetic oligonucleotide
accccaccuuuuaguguca

SEQ ID NO: 101301 - RNA, 19 nt, Artificial Sequence
  Description of Artificial Sequence: Synthetic oligonucleotide
ccauaguaagagacccaua

SEQ ID NO: 101302 - RNA, 19 nt, Artificial Sequence
  Description of Artificial Sequence: Synthetic oligonucleotide
cccauaguaagagacccau

SEQ ID NO: 101303 - RNA, 19 nt, Artificial Sequence
  Description of Artificial Sequence: Synthetic oligonucleotide
gccucagacuugauuuaaa

SEQ ID NO: 101304 - RNA, 19 nt, Artificial Sequence
  Description of Artificial Sequence: Synthetic oligonucleotide
gcaccgggaucuagccuug

SEQ ID NO: 101305 - RNA, 19 nt, Artificial Sequence
  Description of Artificial Sequence: Synthetic oligonucleotide
guucuacguccucgugaau

SEQ ID NO: 101306 - RNA, 19 nt, Artificial Sequence
  Description of Artificial Sequence: Synthetic oligonucleotide
cucgugaauccagcgcuuu

SEQ ID NO: 101307 - RNA, 19 nt, Artificial Sequence
  Description of Artificial Sequence: Synthetic oligonucleotide
cuccuauccugggguuaaa

SEQ ID NO: 101308 - RNA, 19 nt, Artificial Sequence
  Description of Artificial Sequence: Synthetic oligonucleotide
cauugaggucgugccccuu

SEQ ID NO: 101309 - RNA, 19 nt, Artificial Sequence
  Description of Artificial Sequence: Synthetic oligonucleotide
cugguccaaucagcagcau

SEQ ID NO: 101310 - RNA, 19 nt, Artificial Sequence
  Description of Artificial Sequence: Synthetic oligonucleotide
ccucgugaauccagcgcuu

SEQ ID NO: 101311 - RNA, 19 nt, Artificial Sequence
  Description of Artificial Sequence: Synthetic oligonucleotide
ccccuuccacugacguucu

SEQ ID NO: 101312 - RNA, 19 nt, Artificial Sequence
  Description of Artificial Sequence: Synthetic oligonucleotide
ccugcacgacuaugucuuu

SEQ ID NO: 101313 - RNA, 19 nt, Artificial Sequence
  Description of Artificial Sequence: Synthetic oligonucleotide
aaaacuacacuauuccuac

SEQ ID NO: 101314 - RNA, 19 nt, Artificial Sequence
  Description of Artificial Sequence: Synthetic oligonucleotide
uguuauguuauuaaggucu

SEQ ID NO: 101315 - RNA, 19 nt, Artificial Sequence
  Description of Artificial Sequence: Synthetic oligonucleotide
aaaaguaucagggugggag

SEQ ID NO: 101316 - RNA, 19 nt, Artificial Sequence
  Description of Artificial Sequence: Synthetic oligonucleotide
aaaugaaucgaaguauccc

SEQ ID NO: 101317 - RNA, 19 nt, Artificial Sequence
  Description of Artificial Sequence: Synthetic oligonucleotide
ucuauuguuaggauucugg

SEQ ID NO: 101318 - RNA, 19 nt, Artificial Sequence
  Description of Artificial Sequence: Synthetic oligonucleotide
uucccuaguaagaauaugg

SEQ ID NO: 101319 - RNA, 19 nt, Artificial Sequence
  Description of Artificial Sequence: Synthetic oligonucleotide
aaugcguauauaaugaaag

SEQ ID NO: 101320 - RNA, 19 nt, Artificial Sequence
  Description of Artificial Sequence: Synthetic oligonucleotide
uucauaacacuuaacagac

SEQ ID NO: 101321 - RNA, 19 nt, Artificial Sequence
  Description of Artificial Sequence: Synthetic oligonucleotide
aauugcuagacucacuuga

SEQ ID NO: 101322 - RNA, 19 nt, Artificial Sequence
  Description of Artificial Sequence: Synthetic oligonucleotide
acauguaugacuuuacaug

SEQ ID NO: 101323 - RNA, 19 nt, Artificial Sequence
  Description of Artificial Sequence: Synthetic oligonucleotide
aauaagaguugcuccgugg

SEQ ID NO: 101324 - RNA, 19 nt, Artificial Sequence
  Description of Artificial Sequence: Synthetic oligonucleotide
acuauuccuacauugaugu

SEQ ID NO: 101325 - RNA, 19 nt, Artificial Sequence
  Description of Artificial Sequence: Synthetic oligonucleotide
uaucuuacuauucccaaug

SEQ ID NO: 101326 - RNA, 19 nt, Artificial Sequence
  Description of Artificial Sequence: Synthetic oligonucleotide
agaaacuacucuuucacug

SEQ ID NO: 101327 - RNA, 19 nt, Artificial Sequence
  Description of Artificial Sequence: Synthetic oligonucleotide
aaucgaaguaucccaaaug

SEQ ID NO: 101328 - RNA, 19 nt, Artificial Sequence
  Description of Artificial Sequence: Synthetic oligonucleotide
uguaaugcaggccaagccu

SEQ ID NO: 101329 - RNA, 19 nt, Artificial Sequence
  Description of Artificial Sequence: Synthetic oligonucleotide
ugaacaaaguuauuagacu

SEQ ID NO: 101330 - RNA, 19 nt, Artificial Sequence
  Description of Artificial Sequence: Synthetic oligonucleotide
guuagaguggcuuugcuac

SEQ ID NO: 101331 - RNA, 19 nt, Artificial Sequence
  Description of Artificial Sequence: Synthetic oligonucleotide
ugcuguacaucuauggagc

SEQ ID NO: 101332 - RNA, 19 nt, Artificial Sequence
  Description of Artificial Sequence: Synthetic oligonucleotide
auaagaguugcuccguggg

SEQ ID NO: 101333 - RNA, 19 nt, Artificial Sequence
  Description of Artificial Sequence: Synthetic oligonucleotide
cuauuguuaggauucuggg

SEQ ID NO: 101334 - RNA, 19 nt, Artificial Sequence
  Description of Artificial Sequence: Synthetic oligonucleotide
gucacuuagacuguuagag

SEQ ID NO: 101335 - RNA, 19 nt, Artificial Sequence
  Description of Artificial Sequence: Synthetic oligonucleotide
aucgaaguaucccaaaugu

SEQ ID NO: 101336 - RNA, 19 nt, Artificial Sequence
  Description of Artificial Sequence: Synthetic oligonucleotide
ucugucaacauugauguac

SEQ ID NO: 101337 - RNA, 19 nt, Artificial Sequence
  Description of Artificial Sequence: Synthetic oligonucleotide
uacuugaauucccaccacg

SEQ ID NO: 101338 - RNA, 19 nt, Artificial Sequence
  Description of Artificial Sequence: Synthetic oligonucleotide
uccuaguuuagacuuuucc

SEQ ID NO: 101339 - RNA, 19 nt, Artificial Sequence
  Description of Artificial Sequence: Synthetic oligonucleotide
gaugugaaagcccagcgca

SEQ ID NO: 101340 - RNA, 19 nt, Artificial Sequence
  Description of Artificial Sequence: Synthetic oligonucleotide
agauaguccauacacuaug

SEQ ID NO: 101341 - RNA, 19 nt, Artificial Sequence
  Description of Artificial Sequence: Synthetic oligonucleotide
cuggauucuacuccaaccg

SEQ ID NO: 101342 - RNA, 19 nt, Artificial Sequence
  Description of Artificial Sequence: Synthetic oligonucleotide
aacuacacuauuccuacau

SEQ ID NO: 101343 - RNA, 19 nt, Artificial Sequence
  Description of Artificial Sequence: Synthetic oligonucleotide
aaacaagaagguguuaugu

SEQ ID NO: 101344 - RNA, 19 nt, Artificial Sequence
  Description of Artificial Sequence: Synthetic oligonucleotide
cacuuagacuguuagagug

SEQ ID NO: 101345 - RNA, 19 nt, Artificial Sequence
  Description of Artificial Sequence: Synthetic oligonucleotide
ugcacuacauggagaaggg

SEQ ID NO: 101346 - RNA, 19 nt, Artificial Sequence
  Description of Artificial Sequence: Synthetic oligonucleotide
guaccuuaggguucaaggg

SEQ ID NO: 101347 - RNA, 19 nt, Artificial Sequence
  Description of Artificial Sequence: Synthetic oligonucleotide
gacgaaaccaggcugcccc

SEQ ID NO: 101348 - RNA, 19 nt, Artificial Sequence
  Description of Artificial Sequence: Synthetic oligonucleotide
ucuuaagugggguagccgu

SEQ ID NO: 101349 - RNA, 19 nt, Artificial Sequence
  Description of Artificial Sequence: Synthetic oligonucleotide
uuagucgaguccuucaaac

SEQ ID NO: 101350 - RNA, 19 nt, Artificial Sequence
  Description of Artificial Sequence: Synthetic oligonucleotide
auugacacuagcucuguca

SEQ ID NO: 101351 - RNA, 19 nt, Artificial Sequence
  Description of Artificial Sequence: Synthetic oligonucleotide
uaugggugcagaaacuacu

SEQ ID NO: 101352 - RNA, 19 nt, Artificial Sequence
  Description of Artificial Sequence: Synthetic oligonucleotide
cuaauugacacuagcucug

SEQ ID NO: 101353 - RNA, 19 nt, Artificial Sequence
  Description of Artificial Sequence: Synthetic oligonucleotide
uggugcuguacaucuaugg

SEQ ID NO: 101354 - RNA, 19 nt, Artificial Sequence
  Description of Artificial Sequence: Synthetic oligonucleotide
accacacuuacaucuacuc

SEQ ID NO: 101355 - RNA, 19 nt, Artificial Sequence
  Description of Artificial Sequence: Synthetic oligonucleotide
uacuucagcccagagacag

SEQ ID NO: 101356 - RNA, 19 nt, Artificial Sequence
  Description of Artificial Sequence: Synthetic oligonucleotide
agagauaguccauacacua

SEQ ID NO: 101357 - RNA, 19 nt, Artificial Sequence
  Description of Artificial Sequence: Synthetic oligonucleotide
uagacucacuugaauuagg

SEQ ID NO: 101358 - RNA, 19 nt, Artificial Sequence
  Description of Artificial Sequence: Synthetic oligonucleotide
aagaccuagaggguuuggg

SEQ ID NO: 101359 - RNA, 19 nt, Artificial Sequence
  Description of Artificial Sequence: Synthetic oligonucleotide
aacaagaagguguuauguu

SEQ ID NO: 101360 - RNA, 19 nt, Artificial Sequence
  Description of Artificial Sequence: Synthetic oligonucleotide
ugauuccaagguuaaguca

SEQ ID NO: 101361 - RNA, 19 nt, Artificial Sequence
  Description of Artificial Sequence: Synthetic oligonucleotide
augucacuuagacuguuag

SEQ ID NO: 101362 - RNA, 19 nt, Artificial Sequence
  Description of Artificial Sequence: Synthetic oligonucleotide
aggaugugaaagcccagcg

SEQ ID NO: 101363 - RNA, 19 nt, Artificial Sequence
  Description of Artificial Sequence: Synthetic oligonucleotide
uguuacugacccugaaacc

SEQ ID NO: 101364 - RNA, 19 nt, Artificial Sequence
  Description of Artificial Sequence: Synthetic oligonucleotide
agcgaucuguaaugcaggc

SEQ ID NO: 101365 - RNA, 19 nt, Artificial Sequence
  Description of Artificial Sequence: Synthetic oligonucleotide
aauugacacuagcucuguc

SEQ ID NO: 101366 - RNA, 19 nt, Artificial Sequence
  Description of Artificial Sequence: Synthetic oligonucleotide
ggcaauaagaguugcuccg

SEQ ID NO: 101367 - RNA, 19 nt, Artificial Sequence
  Description of Artificial Sequence: Synthetic oligonucleotide
agcauucacagaaggauac

SEQ ID NO: 101368 - RNA, 19 nt, Artificial Sequence
  Description of Artificial Sequence: Synthetic oligonucleotide
uuuaucguccacacccaug

SEQ ID NO: 101369 - RNA, 19 nt, Artificial Sequence
  Description of Artificial Sequence: Synthetic oligonucleotide
gugacuagacccuucuugc

SEQ ID NO: 101370 - RNA, 19 nt, Artificial Sequence
  Description of Artificial Sequence: Synthetic oligonucleotide
ugcguauauaaugaaagau

SEQ ID NO: 101371 - RNA, 19 nt, Artificial Sequence
  Description of Artificial Sequence: Synthetic oligonucleotide
agacucacuugaauuaggc

SEQ ID NO: 101372 - RNA, 19 nt, Artificial Sequence
  Description of Artificial Sequence: Synthetic oligonucleotide
cugcacuacauggagaagg

SEQ ID NO: 101373 - RNA, 19 nt, Artificial Sequence
  Description of Artificial Sequence: Synthetic oligonucleotide
aucaggacagguguauagc

SEQ ID NO: 101374 - RNA, 19 nt, Artificial Sequence
  Description of Artificial Sequence: Synthetic oligonucleotide
auguaagggagcuuacucu

SEQ ID NO: 101375 - RNA, 19 nt, Artificial Sequence
  Description of Artificial Sequence: Synthetic oligonucleotide
uguuagaagucaucuccug

SEQ ID NO: 101376 - RNA, 19 nt, Artificial Sequence
  Description of Artificial Sequence: Synthetic oligonucleotide
cugaucacagaaacaggcc

SEQ ID NO: 101377 - RNA, 19 nt, Artificial Sequence
  Description of Artificial Sequence: Synthetic oligonucleotide
acuugaauucccaccacgg

SEQ ID NO: 101378 - RNA, 19 nt, Artificial Sequence
  Description of Artificial Sequence: Synthetic oligonucleotide
ucccuaguaagaauauggu

SEQ ID NO: 101379 - RNA, 19 nt, Artificial Sequence
  Description of Artificial Sequence: Synthetic oligonucleotide
uggauucuacuccaaccgc

SEQ ID NO: 101380 - RNA, 19 nt, Artificial Sequence
  Description of Artificial Sequence: Synthetic oligonucleotide
cacuauuccuacauugaug

SEQ ID NO: 101381 - RNA, 19 nt, Artificial Sequence
  Description of Artificial Sequence: Synthetic oligonucleotide
uaaccacccacucaucccu

SEQ ID NO: 101382 - RNA, 19 nt, Artificial Sequence
  Description of Artificial Sequence: Synthetic oligonucleotide
gagcuaugggugcagaaac

SEQ ID NO: 101383 - RNA, 19 nt, Artificial Sequence
  Description of Artificial Sequence: Synthetic oligonucleotide
cacagauccuacuuccacc

SEQ ID NO: 101384 - RNA, 19 nt, Artificial Sequence
  Description of Artificial Sequence: Synthetic oligonucleotide
acuuaacagacaagugccc

SEQ ID NO: 101385 - RNA, 19 nt, Artificial Sequence
  Description of Artificial Sequence: Synthetic oligonucleotide
aaauguaagggagcuuacu

SEQ ID NO: 101386 - RNA, 19 nt, Artificial Sequence
  Description of Artificial Sequence: Synthetic oligonucleotide
aaucccgaaugcugggucu

SEQ ID NO: 101387 - RNA, 19 nt, Artificial Sequence
  Description of Artificial Sequence: Synthetic oligonucleotide
gcuuauagcuucuacccag

SEQ ID NO: 101388 - RNA, 19 nt, Artificial Sequence
  Description of Artificial Sequence: Synthetic oligonucleotide
aagucaacauuggcgauga

SEQ ID NO: 101389 - RNA, 19 nt, Artificial Sequence
  Description of Artificial Sequence: Synthetic oligonucleotide
aguuauuagacugggcaga

SEQ ID NO: 101390 - RNA, 19 nt, Artificial Sequence
  Description of Artificial Sequence: Synthetic oligonucleotide
uccgaagagcguucgcacg

SEQ ID NO: 101391 - RNA, 19 nt, Artificial Sequence
  Description of Artificial Sequence: Synthetic oligonucleotide
cuguaaugcaggccaagcc

SEQ ID NO: 101392 - RNA, 19 nt, Artificial Sequence
  Description of Artificial Sequence: Synthetic oligonucleotide
uugguugauguuagaaguc

SEQ ID NO: 101393 - RNA, 19 nt, Artificial Sequence
  Description of Artificial Sequence: Synthetic oligonucleotide
uaugguuaucaggacaggu

SEQ ID NO: 101394 - RNA, 19 nt, Artificial Sequence
  Description of Artificial Sequence: Synthetic oligonucleotide
uuaucuuacuauucccaau

SEQ ID NO: 101395 - RNA, 19 nt, Artificial Sequence
  Description of Artificial Sequence: Synthetic oligonucleotide
augcguauauaaugaaaga

SEQ ID NO: 101396 - RNA, 19 nt, Artificial Sequence
  Description of Artificial Sequence: Synthetic oligonucleotide
cuuagacuguuagaguggc

SEQ ID NO: 101397 - RNA, 19 nt, Artificial Sequence
  Description of Artificial Sequence: Synthetic oligonucleotide
acuuagacuguuagagugg

SEQ ID NO: 101398 - RNA, 19 nt, Artificial Sequence
  Description of Artificial Sequence: Synthetic oligonucleotide
uccuuaugugacagguaag

SEQ ID NO: 101399 - RNA, 19 nt, Artificial Sequence
  Description of Artificial Sequence: Synthetic oligonucleotide
acaucuauggagccccuca

SEQ ID NO: 101400 - RNA, 19 nt, Artificial Sequence
  Description of Artificial Sequence: Synthetic oligonucleotide
uguuaggauucugggacag

SEQ ID NO: 101401 - RNA, 19 nt, Artificial Sequence
  Description of Artificial Sequence: Synthetic oligonucleotide
uguuagaguggcuuugcua

SEQ ID NO: 101402 - RNA, 19 nt, Artificial Sequence
  Description of Artificial Sequence: Synthetic oligonucleotide
uguaugccguguccuuugg

SEQ ID NO: 101403 - RNA, 19 nt, Artificial Sequence
  Description of Artificial Sequence: Synthetic oligonucleotide
uucaccacuuagucgaguc

SEQ ID NO: 101404 - RNA, 19 nt, Artificial Sequence
  Description of Artificial Sequence: Synthetic oligonucleotide
ucacuuagacuguuagagu

SEQ ID NO: 101405 - RNA, 19 nt, Artificial Sequence
  Description of Artificial Sequence: Synthetic oligonucleotide
ugcagucaauacuugaauu

SEQ ID NO: 101406 - RNA, 19 nt, Artificial Sequence
  Description of Artificial Sequence: Synthetic oligonucleotide
cuagcucugucacuccucc

SEQ ID NO: 101407 - RNA, 19 nt, Artificial Sequence
  Description of Artificial Sequence: Synthetic oligonucleotide
gcccaaaccauuuacugcc

SEQ ID NO: 101408 - RNA, 19 nt, Artificial Sequence
  Description of Artificial Sequence: Synthetic oligonucleotide
uaugguaccuuaggguuca

SEQ ID NO: 101409 - RNA, 19 nt, Artificial Sequence
  Description of Artificial Sequence: Synthetic oligonucleotide
gguguuauguuauuaaggu

SEQ ID NO: 101410 - RNA, 19 nt, Artificial Sequence
  Description of Artificial Sequence: Synthetic oligonucleotide
ucaccacuuagucgagucc

SEQ ID NO: 101411 - RNA, 19 nt, Artificial Sequence
  Description of Artificial Sequence: Synthetic oligonucleotide
acugcuaugguccguccgu

SEQ ID NO: 101412 - RNA, 19 nt, Artificial Sequence
  Description of Artificial Sequence: Synthetic oligonucleotide
uagucgaguccuucaaaca

SEQ ID NO: 101413 - RNA, 19 nt, Artificial Sequence
  Description of Artificial Sequence: Synthetic oligonucleotide
guuauuagacugggcagag

SEQ ID NO: 101414 - RNA, 19 nt, Artificial Sequence
  Description of Artificial Sequence: Synthetic oligonucleotide
uggacuuaaaacagcccua

SEQ ID NO: 101415 - RNA, 19 nt, Artificial Sequence
  Description of Artificial Sequence: Synthetic oligonucleotide
uucuacccagccccaaagc

SEQ ID NO: 101416 - RNA, 19 nt, Artificial Sequence
  Description of Artificial Sequence: Synthetic oligonucleotide
ucauaacacuuaacagaca

SEQ ID NO: 101417 - RNA, 19 nt, Artificial Sequence
  Description of Artificial Sequence: Synthetic oligonucleotide
aaacuacacuauuccuaca

SEQ ID NO: 101418 - RNA, 19 nt, Artificial Sequence
  Description of Artificial Sequence: Synthetic oligonucleotide
uagacuguuagaguggcuu

SEQ ID NO: 101419 - RNA, 19 nt, Artificial Sequence
  Description of Artificial Sequence: Synthetic oligonucleotide
cagcgaucuguaaugcagg

SEQ ID NO: 101420 - RNA, 19 nt, Artificial Sequence
  Description of Artificial Sequence: Synthetic oligonucleotide
cuaugggugcagaaacuac

SEQ ID NO: 101421 - RNA, 19 nt, Artificial Sequence
  Description of Artificial Sequence: Synthetic oligonucleotide
guccguuuguccaaagucc

SEQ ID NO: 101422 - RNA, 19 nt, Artificial Sequence
  Description of Artificial Sequence: Synthetic oligonucleotide
agucauggauuaaacaaga

SEQ ID NO: 101423 - RNA, 19 nt, Artificial Sequence
  Description of Artificial Sequence: Synthetic oligonucleotide
acacuauuccuacauugau

SEQ ID NO: 101424 - RNA, 19 nt, Artificial Sequence
  Description of Artificial Sequence: Synthetic oligonucleotide
ucgaguccuucaaacacuc

SEQ ID NO: 101425 - RNA, 19 nt, Artificial Sequence
  Description of Artificial Sequence: Synthetic oligonucleotide
uccaccccaguuucuuugg

SEQ ID NO: 101426 - RNA, 19 nt, Artificial Sequence
  Description of Artificial Sequence: Synthetic oligonucleotide
uuaucagaacaagguagga

SEQ ID NO: 101427 - RNA, 19 nt, Artificial Sequence
  Description of Artificial Sequence: Synthetic oligonucleotide
ucuugccuuucccauggcu

SEQ ID NO: 101428 - RNA, 19 nt, Artificial Sequence
  Description of Artificial Sequence: Synthetic oligonucleotide
gaacccuuggugcuguaca

SEQ ID NO: 101429 - RNA, 19 nt, Artificial Sequence
  Description of Artificial Sequence: Synthetic oligonucleotide
uuauuagacugggcagagg

SEQ ID NO: 101430 - RNA, 19 nt, Artificial Sequence
  Description of Artificial Sequence: Synthetic oligonucleotide
ucucacaaguccugcauuu

SEQ ID NO: 101431 - RNA, 19 nt, Artificial Sequence
  Description of Artificial Sequence: Synthetic oligonucleotide
guagccgugaccuugcacu

SEQ ID NO: 101432 - RNA, 19 nt, Artificial Sequence
  Description of Artificial Sequence: Synthetic oligonucleotide
ucccaaauguaagggagcu

SEQ ID NO: 101433 - RNA, 19 nt, Artificial Sequence
  Description of Artificial Sequence: Synthetic oligonucleotide
caaagucccaggcuacuug

SEQ ID NO: 101434 - RNA, 19 nt, Artificial Sequence
  Description of Artificial Sequence: Synthetic oligonucleotide
cuuaagugggguagccgug

SEQ ID NO: 101435 - RNA, 19 nt, Artificial Sequence
  Description of Artificial Sequence: Synthetic oligonucleotide
augcagucaauacuugaau

SEQ ID NO: 101436 - RNA, 19 nt, Artificial Sequence
  Description of Artificial Sequence: Synthetic oligonucleotide
ugucuuaagugggguagcc

SEQ ID NO: 101437 - RNA, 19 nt, Artificial Sequence
  Description of Artificial Sequence: Synthetic oligonucleotide
cuuacaucuacucugucau

SEQ ID NO: 101438 - RNA, 19 nt, Artificial Sequence
  Description of Artificial Sequence: Synthetic oligonucleotide
caaauguaagggagcuuac

SEQ ID NO: 101439 - RNA, 19 nt, Artificial Sequence
  Description of Artificial Sequence: Synthetic oligonucleotide
uuuuaucguccacacccau

SEQ ID NO: 101440 - RNA, 19 nt, Artificial Sequence
  Description of Artificial Sequence: Synthetic oligonucleotide
caagucaacauuggcgaug

SEQ ID NO: 101441 - RNA, 19 nt, Artificial Sequence
  Description of Artificial Sequence: Synthetic oligonucleotide
ggcuauuuccucccaauac

SEQ ID NO: 101442 - RNA, 19 nt, Artificial Sequence
  Description of Artificial Sequence: Synthetic oligonucleotide
uuuccucuauuguuaggau

SEQ ID NO: 101443 - RNA, 19 nt, Artificial Sequence
  Description of Artificial Sequence: Synthetic oligonucleotide
caauaagaguugcuccgug

SEQ ID NO: 101444 - RNA, 19 nt, Artificial Sequence
  Description of Artificial Sequence: Synthetic oligonucleotide
ugagccuagcaaagggaaa

SEQ ID NO: 101445 - RNA, 19 nt, Artificial Sequence
  Description of Artificial Sequence: Synthetic oligonucleotide
gggcaauaagaguugcucc

SEQ ID NO: 101446 - RNA, 19 nt, Artificial Sequence
  Description of Artificial Sequence: Synthetic oligonucleotide
augguccguccguuugucc

SEQ ID NO: 101447 - RNA, 19 nt, Artificial Sequence
  Description of Artificial Sequence: Synthetic oligonucleotide
uguacccugugucucugau

SEQ ID NO: 101448 - RNA, 19 nt, Artificial Sequence
  Description of Artificial Sequence: Synthetic oligonucleotide
cuuaacagacaagugccca

SEQ ID NO: 101449 - RNA, 19 nt, Artificial Sequence
  Description of Artificial Sequence: Synthetic oligonucleotide
uccagcgccaagucaacau

SEQ ID NO: 101450 - RNA, 19 nt, Artificial Sequence
  Description of Artificial Sequence: Synthetic oligonucleotide
uaaggucuuaagccucauc

SEQ ID NO: 101451 - RNA, 19 nt, Artificial Sequence
  Description of Artificial Sequence: Synthetic oligonucleotide
uccccuguaugccgugucc

SEQ ID NO: 101452 - RNA, 19 nt, Artificial Sequence
  Description of Artificial Sequence: Synthetic oligonucleotide
agccucccagacccgagac

SEQ ID NO: 101453 - RNA, 19 nt, Artificial Sequence
  Description of Artificial Sequence: Synthetic oligonucleotide
gucaauacuugaauuccca

SEQ ID NO: 101454 - RNA, 19 nt, Artificial Sequence
  Description of Artificial Sequence: Synthetic oligonucleotide
ggaugugaaagcccagcgc

SEQ ID NO: 101455 - RNA, 19 nt, Artificial Sequence
  Description of Artificial Sequence: Synthetic oligonucleotide
acuacacuauuccuacauu

SEQ ID NO: 101456 - RNA, 19 nt, Artificial Sequence
  Description of Artificial Sequence: Synthetic oligonucleotide
ggcaaugcguauauaauga

SEQ ID NO: 101457 - RNA, 19 nt, Artificial Sequence
  Description of Artificial Sequence: Synthetic oligonucleotide
aggagcuaauugcuagacu

SEQ ID NO: 101458 - RNA, 19 nt, Artificial Sequence
  Description of Artificial Sequence: Synthetic oligonucleotide
caguguuagaaggacuuuc

SEQ ID NO: 101459 - RNA, 19 nt, Artificial Sequence
  Description of Artificial Sequence: Synthetic oligonucleotide
ccuauucauuucuuucucc

SEQ ID NO: 101460 - RNA, 19 nt, Artificial Sequence
  Description of Artificial Sequence: Synthetic oligonucleotide
cuaauugcuagacucacuu

SEQ ID NO: 101461 - RNA, 19 nt, Artificial Sequence
  Description of Artificial Sequence: Synthetic oligonucleotide
cuccgaagagcguucgcac

SEQ ID NO: 101462 - RNA, 19 nt, Artificial Sequence
  Description of Artificial Sequence: Synthetic oligonucleotide
auguuagaagucaucuccu

SEQ ID NO: 101463 - RNA, 19 nt, Artificial Sequence
  Description of Artificial Sequence: Synthetic oligonucleotide
cacugcuaugguccguccg

SEQ ID NO: 101464 - RNA, 19 nt, Artificial Sequence
  Description of Artificial Sequence: Synthetic oligonucleotide
acuagacccuucuugccuu

SEQ ID NO: 101465 - RNA, 19 nt, Artificial Sequence
  Description of Artificial Sequence: Synthetic oligonucleotide
guaugccguguccuuuggg

SEQ ID NO: 101466 - RNA, 19 nt, Artificial Sequence
  Description of Artificial Sequence: Synthetic oligonucleotide
auuuuaucguccacaccca

SEQ ID NO: 101467 - RNA, 19 nt, Artificial Sequence
  Description of Artificial Sequence: Synthetic oligonucleotide
gacuagacccuucuugccu

SEQ ID NO: 101468 - RNA, 19 nt, Artificial Sequence
  Description of Artificial Sequence: Synthetic oligonucleotide
cccuaauugacacuagcuc

SEQ ID NO: 101469 - RNA, 19 nt, Artificial Sequence
  Description of Artificial Sequence: Synthetic oligonucleotide
ggugcuguacaucuaugga

SEQ ID NO: 101470 - RNA, 19 nt, Artificial Sequence
  Description of Artificial Sequence: Synthetic oligonucleotide
ggcgaugaaguaauccucc

SEQ ID NO: 101471 - RNA, 19 nt, Artificial Sequence
  Description of Artificial Sequence: Synthetic oligonucleotide
gggacagaugguguuaacc

SEQ ID NO: 101472 - RNA, 19 nt, Artificial Sequence
  Description of Artificial Sequence: Synthetic oligonucleotide
aucaucccuuuagaucacg

SEQ ID NO: 101473 - RNA, 19 nt, Artificial Sequence
  Description of Artificial Sequence: Synthetic oligonucleotide
agcgccaagucaacauugg

SEQ ID NO: 101474 - RNA, 19 nt, Artificial Sequence
  Description of Artificial Sequence: Synthetic oligonucleotide
gguguauagccuuccaaaa

SEQ ID NO: 101475 - RNA, 19 nt, Artificial Sequence
  Description of Artificial Sequence: Synthetic oligonucleotide
uggucccaucguuuguagc

SEQ ID NO: 101476 - RNA, 19 nt, Artificial Sequence
  Description of Artificial Sequence: Synthetic oligonucleotide
uaucagggugggagcauuc

SEQ ID NO: 101477 - RNA, 19 nt, Artificial Sequence
  Description of Artificial Sequence: Synthetic oligonucleotide
caaucccgaaugcuggguc

SEQ ID NO: 101478 - RNA, 19 nt, Artificial Sequence
  Description of Artificial Sequence: Synthetic oligonucleotide
gguguuaaccacccacuca

SEQ ID NO: 101479 - RNA, 19 nt, Artificial Sequence
  Description of Artificial Sequence: Synthetic oligonucleotide
caggagcuaauugcuagac

SEQ ID NO: 101480 - RNA, 19 nt, Artificial Sequence
  Description of Artificial Sequence: Synthetic oligonucleotide
gacucacuugaauuaggcu

SEQ ID NO: 101481 - RNA, 19 nt, Artificial Sequence
  Description of Artificial Sequence: Synthetic oligonucleotide
cacauguaugacuuuacau

SEQ ID NO: 101482 - RNA, 19 nt, Artificial Sequence
  Description of Artificial Sequence: Synthetic oligonucleotide
gagguaccacacuuacauc

SEQ ID NO: 101483 - RNA, 19 nt, Artificial Sequence
  Description of Artificial Sequence: Synthetic oligonucleotide
gcuaugguccguccguuug

SEQ ID NO: 101484 - RNA, 19 nt, Artificial Sequence
  Description of Artificial Sequence: Synthetic oligonucleotide
cucacuugaauuaggcuau

SEQ ID NO: 101485 - RNA, 19 nt, Artificial Sequence
  Description of Artificial Sequence: Synthetic oligonucleotide
caaccagcugacgaaacca

SEQ ID NO: 101486 - RNA, 19 nt, Artificial Sequence
  Description of Artificial Sequence: Synthetic oligonucleotide
gcugacgaaaccaggcugc

SEQ ID NO: 101487 - RNA, 19 nt, Artificial Sequence
  Description of Artificial Sequence: Synthetic oligonucleotide
ucccaucguuuguagcugu

SEQ ID NO: 101488 - RNA, 19 nt, Artificial Sequence
  Description of Artificial Sequence: Synthetic oligonucleotide
cacuggggagguaccacac

SEQ ID NO: 101489 - RNA, 19 nt, Artificial Sequence
  Description of Artificial Sequence: Synthetic oligonucleotide
auugcuagacucacuugaa

SEQ ID NO: 101490 - RNA, 19 nt, Artificial Sequence
  Description of Artificial Sequence: Synthetic oligonucleotide
ccuaauugacacuagcucu

SEQ ID NO: 101491 - RNA, 19 nt, Artificial Sequence
  Description of Artificial Sequence: Synthetic oligonucleotide
uuauguuauuaaggucuua

SEQ ID NO: 101492 - RNA, 19 nt, Artificial Sequence
  Description of Artificial Sequence: Synthetic oligonucleotide
uccauacacuauggggcug

SEQ ID NO: 101493 - RNA, 19 nt, Artificial Sequence
  Description of Artificial Sequence: Synthetic oligonucleotide
ugacgaaaccaggcugccc

SEQ ID NO: 101494 - RNA, 19 nt, Artificial Sequence
  Description of Artificial Sequence: Synthetic oligonucleotide
ccuaagcugguacuucagc

SEQ ID NO: 101495 - RNA, 19 nt, Artificial Sequence
  Description of Artificial Sequence: Synthetic oligonucleotide
aggcuauuuccucccaaua

SEQ ID NO: 101496 - RNA, 19 nt, Artificial Sequence
  Description of Artificial Sequence: Synthetic oligonucleotide
gacuuuaaauugccuugcu

SEQ ID NO: 101497 - RNA, 19 nt, Artificial Sequence
  Description of Artificial Sequence: Synthetic oligonucleotide
ccuucuaguccuaguuuag

SEQ ID NO: 101498 - RNA, 19 nt, Artificial Sequence
  Description of Artificial Sequence: Synthetic oligonucleotide
gacaaugguccaaccaucu

SEQ ID NO: 101499 - RNA, 19 nt, Artificial Sequence
  Description of Artificial Sequence: Synthetic oligonucleotide
guaagggagcuuacucuac

SEQ ID NO: 101500 - RNA, 19 nt, Artificial Sequence
  Description of Artificial Sequence: Synthetic oligonucleotide
cacgggcacuuucaauccc

SEQ ID NO: 101501 - RNA, 19 nt, Artificial Sequence
  Description of Artificial Sequence: Synthetic oligonucleotide
aguccuaguuuagacuuuu

SEQ ID NO: 101502 - RNA, 19 nt, Artificial Sequence
  Description of Artificial Sequence: Synthetic oligonucleotide
ugacucaccuggggcaggc

SEQ ID NO: 101503 - RNA, 19 nt, Artificial Sequence
  Description of Artificial Sequence: Synthetic oligonucleotide
gguucaaggggcugaaaua

SEQ ID NO: 101504 - RNA, 19 nt, Artificial Sequence
  Description of Artificial Sequence: Synthetic oligonucleotide
cugacgaaaccaggcugcc

SEQ ID NO: 101505 - RNA, 19 nt, Artificial Sequence
  Description of Artificial Sequence: Synthetic oligonucleotide
uaugguccguccguuuguc

SEQ ID NO: 101506 - RNA, 19 nt, Artificial Sequence
  Description of Artificial Sequence: Synthetic oligonucleotide
gugagccuagcaaagggaa

SEQ ID NO: 101507 - RNA, 19 nt, Artificial Sequence
  Description of Artificial Sequence: Synthetic oligonucleotide
ccuaguuuagacuuuuccu

SEQ ID NO: 101508 - RNA, 19 nt, Artificial Sequence
  Description of Artificial Sequence: Synthetic oligonucleotide
ugcugcgcccgccaucauc

SEQ ID NO: 101509 - RNA, 19 nt, Artificial Sequence
  Description of Artificial Sequence: Synthetic oligonucleotide
cagacccgagacaagaccu

SEQ ID NO: 101510 - RNA, 19 nt, Artificial Sequence
  Description of Artificial Sequence: Synthetic oligonucleotide
caagaccuagaggguuugg

SEQ ID NO: 101511 - RNA, 19 nt, Artificial Sequence
  Description of Artificial Sequence: Synthetic oligonucleotide
agcuuacucuacaccagga

SEQ ID NO: 101512 - RNA, 19 nt, Artificial Sequence
  Description of Artificial Sequence: Synthetic oligonucleotide
gucccaucguuuguagcug

SEQ ID NO: 101513 - RNA, 19 nt, Artificial Sequence
  Description of Artificial Sequence: Synthetic oligonucleotide
acgaaaccaggcugccccu

SEQ ID NO: 101514 - RNA, 19 nt, Artificial Sequence
  Description of Artificial Sequence: Synthetic oligonucleotide
caacauuggcgaugaagua

SEQ ID NO: 101515 - RNA, 19 nt, Artificial Sequence
  Description of Artificial Sequence: Synthetic oligonucleotide
ccgagacaagaccuagagg

SEQ ID NO: 101516 - RNA, 19 nt, Artificial Sequence
  Description of Artificial Sequence: Synthetic oligonucleotide
gcaaugcguauauaaugaa

SEQ ID NO: 101517 - RNA, 19 nt, Artificial Sequence
  Description of Artificial Sequence: Synthetic oligonucleotide
cguccguuuguccaaaguc

SEQ ID NO: 101518 - RNA, 19 nt, Artificial Sequence
  Description of Artificial Sequence: Synthetic oligonucleotide
gccuucuaguccuaguuua

SEQ ID NO: 101519 - RNA, 19 nt, Artificial Sequence
  Description of Artificial Sequence: Synthetic oligonucleotide
uggugacuagacccuucuu

SEQ ID NO: 101520 - RNA, 19 nt, Artificial Sequence
  Description of Artificial Sequence: Synthetic oligonucleotide
ugcuaugguccguccguuu

SEQ ID NO: 101521 - RNA, 19 nt, Artificial Sequence
  Description of Artificial Sequence: Synthetic oligonucleotide
aagagcguucgcacgucuu

SEQ ID NO: 101522 - RNA, 19 nt, Artificial Sequence
  Description of Artificial Sequence: Synthetic oligonucleotide
cccaaaccauuuacugccc

SEQ ID NO: 101523 - RNA, 19 nt, Artificial Sequence
  Description of Artificial Sequence: Synthetic oligonucleotide
gguagccgugaccuugcac

SEQ ID NO: 101524 - RNA, 19 nt, Artificial Sequence
  Description of Artificial Sequence: Synthetic oligonucleotide
gcgccaagucaacauuggc

SEQ ID NO: 101525 - RNA, 19 nt, Artificial Sequence
  Description of Artificial Sequence: Synthetic oligonucleotide
gcgaucuguaaugcaggcc

SEQ ID NO: 101526 - RNA, 19 nt, Artificial Sequence
  Description of Artificial Sequence: Synthetic oligonucleotide
gcguucgcacgucuucugc

SEQ ID NO: 101527 - RNA, 19 nt, Artificial Sequence
  Description of Artificial Sequence: Synthetic oligonucleotide
caccacuuagucgaguccu

SEQ ID NO: 101528 - RNA, 19 nt, Artificial Sequence
  Description of Artificial Sequence: Synthetic oligonucleotide
gcuccgaagagcguucgca

SEQ ID NO: 101529 - RNA, 19 nt, Artificial Sequence
  Description of Artificial Sequence: Synthetic oligonucleotide
ucacuugaauuaggcuauu

SEQ ID NO: 101530 - RNA, 19 nt, Artificial Sequence
  Description of Artificial Sequence: Synthetic oligonucleotide
gcuaugggugcagaaacua

SEQ ID NO: 101531 - RNA, 19 nt, Artificial Sequence
  Description of Artificial Sequence: Synthetic oligonucleotide
caagugcccaaaccauuua

SEQ ID NO: 101532 - RNA, 19 nt, Artificial Sequence
  Description of Artificial Sequence: Synthetic oligonucleotide
auacacuauggggcuguuu

SEQ ID NO: 101533 - RNA, 19 nt, Artificial Sequence
  Description of Artificial Sequence: Synthetic oligonucleotide
cagcugacgaaaccaggcu

SEQ ID NO: 101534 - RNA, 19 nt, Artificial Sequence
  Description of Artificial Sequence: Synthetic oligonucleotide
gagcguucgcacgucuucu

SEQ ID NO: 101535 - RNA, 19 nt, Artificial Sequence
  Description of Artificial Sequence: Synthetic oligonucleotide
cagagccgcgcggauagca

SEQ ID NO: 101536 - RNA, 19 nt, Artificial Sequence
  Description of Artificial Sequence: Synthetic oligonucleotide
ggauccuagggcuuuucuu

SEQ ID NO: 101537 - RNA, 19 nt, Artificial Sequence
  Description of Artificial Sequence: Synthetic oligonucleotide
cuguuagaguggcuuugcu

SEQ ID NO: 101538 - RNA, 19 nt, Artificial Sequence
  Description of Artificial Sequence: Synthetic oligonucleotide
agacccgagacaagaccua

SEQ ID NO: 101539 - RNA, 19 nt, Artificial Sequence
  Description of Artificial Sequence: Synthetic oligonucleotide
agucaacauuggcgaugaa

SEQ ID NO: 101540 - RNA, 19 nt, Artificial Sequence
  Description of Artificial Sequence: Synthetic oligonucleotide
ccccuaauugacacuagcu

SEQ ID NO: 101541 - RNA, 19 nt, Artificial Sequence
  Description of Artificial Sequence: Synthetic oligonucleotide
gguggugacuagacccuuc

SEQ ID NO: 101542 - RNA, 19 nt, Artificial Sequence
  Description of Artificial Sequence: Synthetic oligonucleotide
gcaauaagaguugcuccgu

SEQ ID NO: 101543 - RNA, 19 nt, Artificial Sequence
  Description of Artificial Sequence: Synthetic oligonucleotide
gccguggggacacguucug

SEQ ID NO: 101544 - RNA, 19 nt, Artificial Sequence
  Description of Artificial Sequence: Synthetic oligonucleotide
cuguggaauucccauccuu

SEQ ID NO: 101545 - RNA, 19 nt, Artificial Sequence
  Description of Artificial Sequence: Synthetic oligonucleotide
ccaccuaagcugguacuuc

SEQ ID NO: 101546 - RNA, 19 nt, Artificial Sequence
  Description of Artificial Sequence: Synthetic oligonucleotide
ggcccuagcccacucccaa

SEQ ID NO: 101547 - RNA, 19 nt, Artificial Sequence
  Description of Artificial Sequence: Synthetic oligonucleotide
ccacacuuacaucuacucu

SEQ ID NO: 101548 - RNA, 19 nt, Artificial Sequence
  Description of Artificial Sequence: Synthetic oligonucleotide
cccaucguuuguagcuguc

SEQ ID NO: 101549 - RNA, 19 nt, Artificial Sequence
  Description of Artificial Sequence: Synthetic oligonucleotide
gcuaauugcuagacucacu

SEQ ID NO: 101550 - RNA, 19 nt, Artificial Sequence
  Description of Artificial Sequence: Synthetic oligonucleotide
guaucagggugggagcauu

SEQ ID NO: 101551 - RNA, 19 nt, Artificial Sequence
  Description of Artificial Sequence: Synthetic oligonucleotide
ccgccaucaucccuuuaga

SEQ ID NO: 101552 - RNA, 19 nt, Artificial Sequence
  Description of Artificial Sequence: Synthetic oligonucleotide
guacaucuauggagccccu

SEQ ID NO: 101553 - RNA, 19 nt, Artificial Sequence
  Description of Artificial Sequence: Synthetic oligonucleotide
ccguggggacacguucugc

SEQ ID NO: 101554 - RNA, 19 nt, Artificial Sequence
  Description of Artificial Sequence: Synthetic oligonucleotide
gccucccacuguggaauuc

SEQ ID NO: 101555 - RNA, 19 nt, Artificial Sequence
  Description of Artificial Sequence: Synthetic oligonucleotide
gggcgggccguggggacac

SEQ ID NO: 101556 - RNA, 19 nt, Artificial Sequence
  Description of Artificial Sequence: Synthetic oligonucleotide
cguucgcacgucuucugcu

SEQ ID NO: 101557 - RNA, 19 nt, Artificial Sequence
  Description of Artificial Sequence: Synthetic oligonucleotide
cgggcacuuucaaucccga

SEQ ID NO: 101558 - RNA, 19 nt, Artificial Sequence
  Description of Artificial Sequence: Synthetic oligonucleotide
caaggauccuagggcuuuu

SEQ ID NO: 101559 - RNA, 19 nt, Artificial Sequence
  Description of Artificial Sequence: Synthetic oligonucleotide
ccagcgccaagucaacauu

SEQ ID NO: 101560 - RNA, 19 nt, Artificial Sequence
  Description of Artificial Sequence: Synthetic oligonucleotide
ccguccguuuguccaaagu

SEQ ID NO: 101561 - RNA, 19 nt, Artificial Sequence
  Description of Artificial Sequence: Synthetic oligonucleotide
ccagagccgcgcggauagc

SEQ ID NO: 101562 - RNA, 19 nt, Artificial Sequence
  Description of Artificial Sequence: Synthetic oligonucleotide
ccucugucugagagauagu

SEQ ID NO: 101563 - RNA, 19 nt, Artificial Sequence
  Description of Artificial Sequence: Synthetic oligonucleotide
gcccgccaucaucccuuua

SEQ ID NO: 101564 - RNA, 19 nt, Artificial Sequence
  Description of Artificial Sequence: Synthetic oligonucleotide
cgggccguggggacacguu

SEQ ID NO: 101565 - RNA, 19 nt, Artificial Sequence
  Description of Artificial Sequence: Synthetic oligonucleotide
cccagccauucggccuucu

SEQ ID NO: 101566 - RNA, 19 nt, Artificial Sequence
  Description of Artificial Sequence: Synthetic oligonucleotide
cgcccgccaucaucccuuu

SEQ ID NO: 101567 - RNA, 19 nt, Artificial Sequence
  Description of Artificial Sequence: Synthetic oligonucleotide
uuauauacuacucaaagcc

SEQ ID NO: 101568 - RNA, 19 nt, Artificial Sequence
  Description of Artificial Sequence: Synthetic oligonucleotide
auuauaauaccauuugugg

SEQ ID NO: 101569 - RNA, 19 nt, Artificial Sequence
  Description of Artificial Sequence: Synthetic oligonucleotide
uaaacaagaagguucaccg

SEQ ID NO: 101570 - RNA, 19 nt, Artificial Sequence
  Description of Artificial Sequence: Synthetic oligonucleotide
cauauugccgauuagacgg

SEQ ID NO: 101571 - RNA, 19 nt, Artificial Sequence
  Description of Artificial Sequence: Synthetic oligonucleotide
ucaucacucacuaauaaag

SEQ ID NO: 101572 - RNA, 19 nt, Artificial Sequence
  Description of Artificial Sequence: Synthetic oligonucleotide
ugaucuuuuaaacuccacg

SEQ ID NO: 101573 - RNA, 19 nt, Artificial Sequence
  Description of Artificial Sequence: Synthetic oligonucleotide
aguuauauacuacucaaag

SEQ ID NO: 101574 - RNA, 19 nt, Artificial Sequence
  Description of Artificial Sequence: Synthetic oligonucleotide
uggacgucaauacacaccg

SEQ ID NO: 101575 - RNA, 19 nt, Artificial Sequence
  Description of Artificial Sequence: Synthetic oligonucleotide
aauacguaauaucagugcu

SEQ ID NO: 101576 - RNA, 19 nt, Artificial Sequence
  Description of Artificial Sequence: Synthetic oligonucleotide
agaauuaucccacguagac

SEQ ID NO: 101577 - RNA, 19 nt, Artificial Sequence
  Description of Artificial Sequence: Synthetic oligonucleotide
ucuaugagaagaaugcuca

SEQ ID NO: 101578 - RNA, 19 nt, Artificial Sequence
  Description of Artificial Sequence: Synthetic oligonucleotide
gauuugaagucauacacug

SEQ ID NO: 101579 - RNA, 19 nt, Artificial Sequence
  Description of Artificial Sequence: Synthetic oligonucleotide
caguuaaacaugaacacgg

SEQ ID NO: 101580 - RNA, 19 nt, Artificial Sequence
  Description of Artificial Sequence: Synthetic oligonucleotide
aauacaauuaacgaaguua

SEQ ID NO: 101581 - RNA, 19 nt, Artificial Sequence
  Description of Artificial Sequence: Synthetic oligonucleotide
aaacugauauguucugggg

SEQ ID NO: 101582 - RNA, 19 nt, Artificial Sequence
  Description of Artificial Sequence: Synthetic oligonucleotide
acuguuaaaaguuuacccu

SEQ ID NO: 101583 - RNA, 19 nt, Artificial Sequence
  Description of Artificial Sequence: Synthetic oligonucleotide
cuagcgaucgauuaucagc

SEQ ID NO: 101584 - RNA, 19 nt, Artificial Sequence
  Description of Artificial Sequence: Synthetic oligonucleotide
ucggcuuuaagguacaaca

SEQ ID NO: 101585 - RNA, 19 nt, Artificial Sequence
  Description of Artificial Sequence: Synthetic oligonucleotide
uaccuaugugguuacaugg

SEQ ID NO: 101586 - RNA, 19 nt, Artificial Sequence
  Description of Artificial Sequence: Synthetic oligonucleotide
uuucauuaagaauccuacg

SEQ ID NO: 101587 - RNA, 19 nt, Artificial Sequence
  Description of Artificial Sequence: Synthetic oligonucleotide
ugagguuaacacuaggaug

SEQ ID NO: 101588 - RNA, 19 nt, Artificial Sequence
  Description of Artificial Sequence: Synthetic oligonucleotide
ugaggcauaguagagagug

SEQ ID NO: 101589 - RNA, 19 nt, Artificial Sequence
  Description of Artificial Sequence: Synthetic oligonucleotide
aaguauucaaacugauaug

SEQ ID NO: 101590 - RNA, 19 nt, Artificial Sequence
  Description of Artificial Sequence: Synthetic oligonucleotide
agcauuauaauaccauuug

SEQ ID NO: 101591 - RNA, 19 nt, Artificial Sequence
  Description of Artificial Sequence: Synthetic oligonucleotide
ucguuauucucccugagcu

SEQ ID NO: 101592 - RNA, 19 nt, Artificial Sequence
  Description of Artificial Sequence: Synthetic oligonucleotide
caaacugauauguucuggg

SEQ ID NO: 101593 - RNA, 19 nt, Artificial Sequence
  Description of Artificial Sequence: Synthetic oligonucleotide
acaauuaacgaaguuauga

SEQ ID NO: 101594 - RNA, 19 nt, Artificial Sequence
  Description of Artificial Sequence: Synthetic oligonucleotide
ucaguuauauacuacucaa

SEQ ID NO: 101595 - RNA, 19 nt, Artificial Sequence
  Description of Artificial Sequence: Synthetic oligonucleotide
agguacaacaguuaaacau

SEQ ID NO: 101596 - RNA, 19 nt, Artificial Sequence
  Description of Artificial Sequence: Synthetic oligonucleotide
aacgaaguuaugaagucag

SEQ ID NO: 101597 - RNA, 19 nt, Artificial Sequence
  Description of Artificial Sequence: Synthetic oligonucleotide
aaagcauuaauaggggaug

SEQ ID NO: 101598 - RNA, 19 nt, Artificial Sequence
  Description of Artificial Sequence: Synthetic oligonucleotide
ucacucacuaauaaaggac

SEQ ID NO: 101599 - RNA, 19 nt, Artificial Sequence
  Description of Artificial Sequence: Synthetic oligonucleotide
ucauuaagaauccuacguc

SEQ ID NO: 101600 - RNA, 19 nt, Artificial Sequence
  Description of Artificial Sequence: Synthetic oligonucleotide
uccaccuacacgaagggga

SEQ ID NO: 101601 - RNA, 19 nt, Artificial Sequence
  Description of Artificial Sequence: Synthetic oligonucleotide
cuuugugcaaagaagcgac

SEQ ID NO: 101602 - RNA, 19 nt, Artificial Sequence
  Description of Artificial Sequence: Synthetic oligonucleotide
uagcgaucgauuaucagca

SEQ ID NO: 101603 - RNA, 19 nt, Artificial Sequence
  Description of Artificial Sequence: Synthetic oligonucleotide
aacucguuaguuugcaaca

SEQ ID NO: 101604 - RNA, 19 nt, Artificial Sequence
  Description of Artificial Sequence: Synthetic oligonucleotide
uccgacaugagcuuacagc

SEQ ID NO: 101605 - RNA, 19 nt, Artificial Sequence
  Description of Artificial Sequence: Synthetic oligonucleotide
uuugcgucuauaccuaugu

SEQ ID NO: 101606 - RNA, 19 nt, Artificial Sequence
  Description of Artificial Sequence: Synthetic oligonucleotide
agagcaauacguaauauca

SEQ ID NO: 101607 - RNA, 19 nt, Artificial Sequence
  Description of Artificial Sequence: Synthetic oligonucleotide
acaguucugcccuagagcu

SEQ ID NO: 101608 - RNA, 19 nt, Artificial Sequence
  Description of Artificial Sequence: Synthetic oligonucleotide
agugauugagaucgguccg

SEQ ID NO: 101609 - RNA, 19 nt, Artificial Sequence
  Description of Artificial Sequence: Synthetic oligonucleotide
acgaaggggagaauuaucc

SEQ ID NO: 101610 - RNA, 19 nt, Artificial Sequence
  Description of Artificial Sequence: Synthetic oligonucleotide
caagcuacagcuuccacug

SEQ ID NO: 101611 - RNA, 19 nt, Artificial Sequence
  Description of Artificial Sequence: Synthetic oligonucleotide
auugagaucgguccggcug

SEQ ID NO: 101612 - RNA, 19 nt, Artificial Sequence
  Description of Artificial Sequence: Synthetic oligonucleotide
uugccgauuagacggagag

SEQ ID NO: 101613 - RNA, 19 nt, Artificial Sequence
  Description of Artificial Sequence: Synthetic oligonucleotide
aaaaugguguaacucguua

SEQ ID NO: 101614 - RNA, 19 nt, Artificial Sequence
  Description of Artificial Sequence: Synthetic oligonucleotide
augaauacacaagugagcu

SEQ ID NO: 101615 - RNA, 19 nt, Artificial Sequence
  Description of Artificial Sequence: Synthetic oligonucleotide
uagauagauacccuuucac

SEQ ID NO: 101616 - RNA, 19 nt, Artificial Sequence
  Description of Artificial Sequence: Synthetic oligonucleotide
aacucagcgagaauaguag

SEQ ID NO: 101617 - RNA, 19 nt, Artificial Sequence
  Description of Artificial Sequence: Synthetic oligonucleotide
uaacucguuaguuugcaac

SEQ ID NO: 101618 - RNA, 19 nt, Artificial Sequence
  Description of Artificial Sequence: Synthetic oligonucleotide
aacaucacucagugcaaag

SEQ ID NO: 101619 - RNA, 19 nt, Artificial Sequence
  Description of Artificial Sequence: Synthetic oligonucleotide
gacaauuaauguugagcag

SEQ ID NO: 101620 - RNA, 19 nt, Artificial Sequence
  Description of Artificial Sequence: Synthetic oligonucleotide
uugagaucgguccggcugg

SEQ ID NO: 101621 - RNA, 19 nt, Artificial Sequence
  Description of Artificial Sequence: Synthetic oligonucleotide
ugaacagagcaauacguaa

SEQ ID NO: 101622 - RNA, 19 nt, Artificial Sequence
  Description of Artificial Sequence: Synthetic oligonucleotide
acauccuauuuguaaacag

SEQ ID NO: 101623 - RNA, 19 nt, Artificial Sequence
  Description of Artificial Sequence: Synthetic oligonucleotide
cacacgguuagcuguaugg

SEQ ID NO: 101624 - RNA, 19 nt, Artificial Sequence
  Description of Artificial Sequence: Synthetic oligonucleotide
uuugaacuguaacggacca

SEQ ID NO: 101625 - RNA, 19 nt, Artificial Sequence
  Description of Artificial Sequence: Synthetic oligonucleotide
aauguaaucagugggccau

SEQ ID NO: 101626 - RNA, 19 nt, Artificial Sequence
  Description of Artificial Sequence: Synthetic oligonucleotide
uuuuaaacuccacgauacc

SEQ ID NO: 101627 - RNA, 19 nt, Artificial Sequence
  Description of Artificial Sequence: Synthetic oligonucleotide
agaauccuacgucaguauc

SEQ ID NO: 101628 - RNA, 19 nt, Artificial Sequence
  Description of Artificial Sequence: Synthetic oligonucleotide
uuaacgaaguuaugaaguc

SEQ ID NO: 101629 - RNA, 19 nt, Artificial Sequence
  Description of Artificial Sequence: Synthetic oligonucleotide
uguagagcgaaaauucuuu

SEQ ID NO: 101630 - RNA, 19 nt, Artificial Sequence
  Description of Artificial Sequence: Synthetic oligonucleotide
aauccgaaggcuaaacaug

SEQ ID NO: 101631 - RNA, 19 nt, Artificial Sequence
  Description of Artificial Sequence: Synthetic oligonucleotide
uuaucccacguagacaagg

SEQ ID NO: 101632 - RNA, 19 nt, Artificial Sequence
  Description of Artificial Sequence: Synthetic oligonucleotide
aucacucacuaauaaagga

SEQ ID NO: 101633 - RNA, 19 nt, Artificial Sequence
  Description of Artificial Sequence: Synthetic oligonucleotide
ucuuugacuaagcaagcau

SEQ ID NO: 101634 - RNA, 19 nt, Artificial Sequence
  Description of Artificial Sequence: Synthetic oligonucleotide
aagcauuaauaggggaugg

SEQ ID NO: 101635 - RNA, 19 nt, Artificial Sequence
  Description of Artificial Sequence: Synthetic oligonucleotide
acaccgaaugcacugaaca

SEQ ID NO: 101636 - RNA, 19 nt, Artificial Sequence
  Description of Artificial Sequence: Synthetic oligonucleotide
auaguagagagugcucgcc

SEQ ID NO: 101637 - RNA, 19 nt, Artificial Sequence
  Description of Artificial Sequence: Synthetic oligonucleotide
aacuuagugcuccuuuccu

SEQ ID NO: 101638 - RNA, 19 nt, Artificial Sequence
  Description of Artificial Sequence: Synthetic oligonucleotide
aagucaugguuuauuaucu

SEQ ID NO: 101639 - RNA, 19 nt, Artificial Sequence
  Description of Artificial Sequence: Synthetic oligonucleotide
uucguuauucucccugagc

SEQ ID NO: 101640 - RNA, 19 nt, Artificial Sequence
  Description of Artificial Sequence: Synthetic oligonucleotide
cauuauaauauuggccugc

SEQ ID NO: 101641 - RNA, 19 nt, Artificial Sequence
  Description of Artificial Sequence: Synthetic oligonucleotide
acgucaguaucuuaacuug

SEQ ID NO: 101642 - RNA, 19 nt, Artificial Sequence
  Description of Artificial Sequence: Synthetic oligonucleotide
uaugagaagaaugcucaug

SEQ ID NO: 101643 - RNA, 19 nt, Artificial Sequence
  Description of Artificial Sequence: Synthetic oligonucleotide
aaacaagaagguucaccgu

SEQ ID NO: 101644 - RNA, 19 nt, Artificial Sequence
  Description of Artificial Sequence: Synthetic oligonucleotide
auacacaccgaaugcacug

SEQ ID NO: 101645 - RNA, 19 nt, Artificial Sequence
  Description of Artificial Sequence: Synthetic oligonucleotide
auaccuaugugguuacaug

SEQ ID NO: 101646 - RNA, 19 nt, Artificial Sequence
  Description of Artificial Sequence: Synthetic oligonucleotide
agaagaaugcucaugugca

SEQ ID NO: 101647 - RNA, 19 nt, Artificial Sequence
  Description of Artificial Sequence: Synthetic oligonucleotide
uacgucaguaucuuaacuu

SEQ ID NO: 101648 - RNA, 19 nt, Artificial Sequence
  Description of Artificial Sequence: Synthetic oligonucleotide
cuacucaaagccccaaaag

SEQ ID NO: 101649 - RNA, 19 nt, Artificial Sequence
  Description of Artificial Sequence: Synthetic oligonucleotide
uguauggcgcuauuuggga

SEQ ID NO: 101650 - RNA, 19 nt, Artificial Sequence
  Description of Artificial Sequence: Synthetic oligonucleotide
agagugcucgccuuuaaga

SEQ ID NO: 101651 - RNA, 19 nt, Artificial Sequence
  Description of Artificial Sequence: Synthetic oligonucleotide
gauagauacccuuucacau

SEQ ID NO: 101652 - RNA, 19 nt, Artificial Sequence
  Description of Artificial Sequence: Synthetic oligonucleotide
acgguuagcuguauggcgc

SEQ ID NO: 101653 - RNA, 19 nt, Artificial Sequence
  Description of Artificial Sequence: Synthetic oligonucleotide
agaaagcauuaauagggga

SEQ ID NO: 101654 - RNA, 19 nt, Artificial Sequence
  Description of Artificial Sequence: Synthetic oligonucleotide
uugauuuaggacaggggua

SEQ ID NO: 101655 - RNA, 19 nt, Artificial Sequence
  Description of Artificial Sequence: Synthetic oligonucleotide
augcugucaagucacuaag

SEQ ID NO: 101656 - RNA, 19 nt, Artificial Sequence
  Description of Artificial Sequence: Synthetic oligonucleotide
ugacuaagcaagcauuaua

SEQ ID NO: 101657 - RNA, 19 nt, Artificial Sequence
  Description of Artificial Sequence: Synthetic oligonucleotide
agagacaugagagccacug

SEQ ID NO: 101658 - RNA, 19 nt, Artificial Sequence
  Description of Artificial Sequence: Synthetic oligonucleotide
ucaaagcuaccuuugguuu

SEQ ID NO: 101659 - RNA, 19 nt, Artificial Sequence
  Description of Artificial Sequence: Synthetic oligonucleotide
uacguaauaucagugcuaa

SEQ ID NO: 101660 - RNA, 19 nt, Artificial Sequence
  Description of Artificial Sequence: Synthetic oligonucleotide
ucagcgagaauaguagugu

SEQ ID NO: 101661 - RNA, 19 nt, Artificial Sequence
  Description of Artificial Sequence: Synthetic oligonucleotide
uuccgaauggucccgcuga

SEQ ID NO: 101662 - RNA, 19 nt, Artificial Sequence
  Description of Artificial Sequence: Synthetic oligonucleotide
cucagcgagaauaguagug

SEQ ID NO: 101663 - RNA, 19 nt, Artificial Sequence
  Description of Artificial Sequence: Synthetic oligonucleotide
aaguuuacccuuguuuagu

SEQ ID NO: 101664 - RNA, 19 nt, Artificial Sequence
  Description of Artificial Sequence: Synthetic oligonucleotide
uuaauaggggaugggcugc

SEQ ID NO: 101665 - RNA, 19 nt, Artificial Sequence
  Description of Artificial Sequence: Synthetic oligonucleotide
guaugagguuaacacuagg

SEQ ID NO: 101666 - RNA, 19 nt, Artificial Sequence
  Description of Artificial Sequence: Synthetic oligonucleotide
ugaacacggucacaagaga

SEQ ID NO: 101667 - RNA, 19 nt, Artificial Sequence
  Description of Artificial Sequence: Synthetic oligonucleotide
cacucacuaauaaaggaca

SEQ ID NO: 101668 - RNA, 19 nt, Artificial Sequence
  Description of Artificial Sequence: Synthetic oligonucleotide
aagaauccuacgucaguau

SEQ ID NO: 101669 - RNA, 19 nt, Artificial Sequence
  Description of Artificial Sequence: Synthetic oligonucleotide
cagagcaauacguaauauc

SEQ ID NO: 101670 - RNA, 19 nt, Artificial Sequence
  Description of Artificial Sequence: Synthetic oligonucleotide
agaacauccuugaguaaac

SEQ ID NO: 101671 - RNA, 19 nt, Artificial Sequence
  Description of Artificial Sequence: Synthetic oligonucleotide
guacuguuaaaaguuuacc

SEQ ID NO: 101672 - RNA, 19 nt, Artificial Sequence
  Description of Artificial Sequence: Synthetic oligonucleotide
caauuaacgaaguuaugaa

SEQ ID NO: 101673 - RNA, 19 nt, Artificial Sequence
  Description of Artificial Sequence: Synthetic oligonucleotide
acaguuaguucccgacacg

SEQ ID NO: 101674 - RNA, 19 nt, Artificial Sequence
  Description of Artificial Sequence: Synthetic oligonucleotide
acuacucaaagccccaaaa

SEQ ID NO: 101675 - RNA, 19 nt, Artificial Sequence
  Description of Artificial Sequence: Synthetic oligonucleotide
agcgaaaauucuuuaguuu

SEQ ID NO: 101676 - RNA, 19 nt, Artificial Sequence
  Description of Artificial Sequence: Synthetic oligonucleotide
aacuccacgauaccacaau

SEQ ID NO: 101677 - RNA, 19 nt, Artificial Sequence
  Description of Artificial Sequence: Synthetic oligonucleotide
cacaguuaguucccgacac

SEQ ID NO: 101678 - RNA, 19 nt, Artificial Sequence
  Description of Artificial Sequence: Synthetic oligonucleotide
uaacgaaguuaugaaguca

SEQ ID NO: 101679 - RNA, 19 nt, Artificial Sequence
  Description of Artificial Sequence: Synthetic oligonucleotide
auuagacggagagaacauc

SEQ ID NO: 101680 - RNA, 19 nt, Artificial Sequence
  Description of Artificial Sequence: Synthetic oligonucleotide
ucucaaacuguagagcgaa

SEQ ID NO: 101681 - RNA, 19 nt, Artificial Sequence
  Description of Artificial Sequence: Synthetic oligonucleotide
uguaacucguuaguuugca

SEQ ID NO: 101682 - RNA, 19 nt, Artificial Sequence
  Description of Artificial Sequence: Synthetic oligonucleotide
guuacgguguccgacauga

SEQ ID NO: 101683 - RNA, 19 nt, Artificial Sequence
  Description of Artificial Sequence: Synthetic oligonucleotide
aucaucacucacuaauaaa

SEQ ID NO: 101684 - RNA, 19 nt, Artificial Sequence
  Description of Artificial Sequence: Synthetic oligonucleotide
aaacaacauggaaagccug

SEQ ID NO: 101685 - RNA, 19 nt, Artificial Sequence
  Description of Artificial Sequence: Synthetic oligonucleotide
caacuuagugcuccuuucc

SEQ ID NO: 101686 - RNA, 19 nt, Artificial Sequence
  Description of Artificial Sequence: Synthetic oligonucleotide
gacgucaauacacaccgaa

SEQ ID NO: 101687 - RNA, 19 nt, Artificial Sequence
  Description of Artificial Sequence: Synthetic oligonucleotide
uuagguuacgguguccgac

SEQ ID NO: 101688 - RNA, 19 nt, Artificial Sequence
  Description of Artificial Sequence: Synthetic oligonucleotide
caauaagguaggcaacaug

SEQ ID NO: 101689 - RNA, 19 nt, Artificial Sequence
  Description of Artificial Sequence: Synthetic oligonucleotide
acaagaagguucaccgugg

SEQ ID NO: 101690 - RNA, 19 nt, Artificial Sequence
  Description of Artificial Sequence: Synthetic oligonucleotide
uagguuacgguguccgaca

SEQ ID NO: 101691 - RNA, 19 nt, Artificial Sequence
  Description of Artificial Sequence: Synthetic oligonucleotide
cuugaacagagcaauacgu

SEQ ID NO: 101692 - RNA, 19 nt, Artificial Sequence
  Description of Artificial Sequence: Synthetic oligonucleotide
caccauuccagugauugag

SEQ ID NO: 101693 - RNA, 19 nt, Artificial Sequence
  Description of Artificial Sequence: Synthetic oligonucleotide
auucguuauucucccugag

SEQ ID NO: 101694 - RNA, 19 nt, Artificial Sequence
  Description of Artificial Sequence: Synthetic oligonucleotide
agucaugguuuauuaucug

SEQ ID NO: 101695 - RNA, 19 nt, Artificial Sequence
  Description of Artificial Sequence: Synthetic oligonucleotide
aaagucaccuagcgaucga

SEQ ID NO: 101696 - RNA, 19 nt, Artificial Sequence
  Description of Artificial Sequence: Synthetic oligonucleotide
ccacgauaccacaauaagg

SEQ ID NO: 101697 - RNA, 19 nt, Artificial Sequence
  Description of Artificial Sequence: Synthetic oligonucleotide
gagagugcucgccuuuaag

SEQ ID NO: 101698 - RNA, 19 nt, Artificial Sequence
  Description of Artificial Sequence: Synthetic oligonucleotide
ucugcccuagagcuccugc

SEQ ID NO: 101699 - RNA, 19 nt, Artificial Sequence
  Description of Artificial Sequence: Synthetic oligonucleotide
agcauuaauaggggauggg

SEQ ID NO: 101700 - RNA, 19 nt, Artificial Sequence
  Description of Artificial Sequence: Synthetic oligonucleotide
aggaauccgaaggcuaaac

SEQ ID NO: 101701 - RNA, 19 nt, Artificial Sequence
  Description of Artificial Sequence: Synthetic oligonucleotide
caguuaguucccgacacgc

SEQ ID NO: 101702 - RNA, 19 nt, Artificial Sequence
  Description of Artificial Sequence: Synthetic oligonucleotide
gugcagaaauagcuguucc

SEQ ID NO: 101703 - RNA, 19 nt, Artificial Sequence
  Description of Artificial Sequence: Synthetic oligonucleotide
ugugcagaaauagcuguuc

SEQ ID NO: 101704 - RNA, 19 nt, Artificial Sequence
  Description of Artificial Sequence: Synthetic oligonucleotide
agcgagaauaguaguguuc

SEQ ID NO: 101705 - RNA, 19 nt, Artificial Sequence
  Description of Artificial Sequence: Synthetic oligonucleotide
agacggagagaacaucacu

SEQ ID NO: 101706 - RNA, 19 nt, Artificial Sequence
  Description of Artificial Sequence: Synthetic oligonucleotide
uuaacacuaggaugcuguc

SEQ ID NO: 101707 - RNA, 19 nt, Artificial Sequence
  Description of Artificial Sequence: Synthetic oligonucleotide
guauggcgcuauuugggag

SEQ ID NO: 101708 - RNA, 19 nt, Artificial Sequence
  Description of Artificial Sequence: Synthetic oligonucleotide
gacaugagagccacugaug

SEQ ID NO: 101709 - RNA, 19 nt, Artificial Sequence
  Description of Artificial Sequence: Synthetic oligonucleotide
gaaggcuaaacaugaugaa

SEQ ID NO: 101710 - RNA, 19 nt, Artificial Sequence
  Description of Artificial Sequence: Synthetic oligonucleotide
ccauauugccgauuagacg

SEQ ID NO: 101711 - RNA, 19 nt, Artificial Sequence
  Description of Artificial Sequence: Synthetic oligonucleotide
uuaugaagucaguuauaua

SEQ ID NO: 101712 - RNA, 19 nt, Artificial Sequence
  Description of Artificial Sequence: Synthetic oligonucleotide
gagugcucgccuuuaagaa

SEQ ID NO: 101713 - RNA, 19 nt, Artificial Sequence
  Description of Artificial Sequence: Synthetic oligonucleotide
acagggguagaaaacagaa

SEQ ID NO: 101714 - RNA, 19 nt, Artificial Sequence
  Description of Artificial Sequence: Synthetic oligonucleotide
uccggcuggaggaaugagu

SEQ ID NO: 101715 - RNA, 19 nt, Artificial Sequence
  Description of Artificial Sequence: Synthetic oligonucleotide
aggcuaaacaugaugaaua

SEQ ID NO: 101716 - RNA, 19 nt, Artificial Sequence
  Description of Artificial Sequence: Synthetic oligonucleotide
aauccuacgucaguaucuu

SEQ ID NO: 101717 - RNA, 19 nt, Artificial Sequence
  Description of Artificial Sequence: Synthetic oligonucleotide
ucaccuagcgaucgauuau

SEQ ID NO: 101718 - RNA, 19 nt, Artificial Sequence
  Description of Artificial Sequence: Synthetic oligonucleotide
guuaacacuaggaugcugu

SEQ ID NO: 101719 - RNA, 19 nt, Artificial Sequence
  Description of Artificial Sequence: Synthetic oligonucleotide
gugauugagaucgguccgg

SEQ ID NO: 101720 - RNA, 19 nt, Artificial Sequence
  Description of Artificial Sequence: Synthetic oligonucleotide
gguuacauggacucuccac

SEQ ID NO: 101721 - RNA, 19 nt, Artificial Sequence
  Description of Artificial Sequence: Synthetic oligonucleotide
acucagcgagaauaguagu

SEQ ID NO: 101722 - RNA, 19 nt, Artificial Sequence
  Description of Artificial Sequence: Synthetic oligonucleotide
gaagcgacugaucuccucu

SEQ ID NO: 101723 - RNA, 19 nt, Artificial Sequence
  Description of Artificial Sequence: Synthetic oligonucleotide
uugcgucuauaccuaugug

SEQ ID NO: 101724 - RNA, 19 nt, Artificial Sequence
  Description of Artificial Sequence: Synthetic oligonucleotide
ggcuaaacaugaugaauac

SEQ ID NO: 101725 - RNA, 19 nt, Artificial Sequence
  Description of Artificial Sequence: Synthetic oligonucleotide
uugaacuguaacggaccag

SEQ ID NO: 101726 - RNA, 19 nt, Artificial Sequence
  Description of Artificial Sequence: Synthetic oligonucleotide
gagaauuaucccacguaga

SEQ ID NO: 101727 - RNA, 19 nt, Artificial Sequence
  Description of Artificial Sequence: Synthetic oligonucleotide
gagcccaacuuagugcucc

SEQ ID NO: 101728 - RNA, 19 nt, Artificial Sequence
  Description of Artificial Sequence: Synthetic oligonucleotide
aacaagccaauucguuauu

SEQ ID NO: 101729 - RNA, 19 nt, Artificial Sequence
  Description of Artificial Sequence: Synthetic oligonucleotide
gcaauacguaauaucagug

SEQ ID NO: 101730 - RNA, 19 nt, Artificial Sequence
  Description of Artificial Sequence: Synthetic oligonucleotide
auccgaaggcuaaacauga

SEQ ID NO: 101731 - RNA, 19 nt, Artificial Sequence
  Description of Artificial Sequence: Synthetic oligonucleotide
acacggucacaagagagca

SEQ ID NO: 101732 - RNA, 19 nt, Artificial Sequence
  Description of Artificial Sequence: Synthetic oligonucleotide
uccgaauggucccgcugag

SEQ ID NO: 101733 - RNA, 19 nt, Artificial Sequence
  Description of Artificial Sequence: Synthetic oligonucleotide
ugauugagaucgguccggc

SEQ ID NO: 101734 - RNA, 19 nt, Artificial Sequence
  Description of Artificial Sequence: Synthetic oligonucleotide
uguccggggaacugguuuc

SEQ ID NO: 101735 - RNA, 19 nt, Artificial Sequence
  Description of Artificial Sequence: Synthetic oligonucleotide
uauugccgauuagacggag

SEQ ID NO: 101736 - RNA, 19 nt, Artificial Sequence
  Description of Artificial Sequence: Synthetic oligonucleotide
agcaagcauuauaauacca

SEQ ID NO: 101737 - RNA, 19 nt, Artificial Sequence
  Description of Artificial Sequence: Synthetic oligonucleotide
cacgaaggggagaauuauc

SEQ ID NO: 101738 - RNA, 19 nt, Artificial Sequence
  Description of Artificial Sequence: Synthetic oligonucleotide
cauccuauuuguaaacagu

SEQ ID NO: 101739 - RNA, 19 nt, Artificial Sequence
  Description of Artificial Sequence: Synthetic oligonucleotide
uugcuuagguuacgguguc

SEQ ID NO: 101740 - RNA, 19 nt, Artificial Sequence
  Description of Artificial Sequence: Synthetic oligonucleotide
caucaucacucacuaauaa

SEQ ID NO: 101741 - RNA, 19 nt, Artificial Sequence
  Description of Artificial Sequence: Synthetic oligonucleotide
uacacaccgaaugcacuga

SEQ ID NO: 101742 - RNA, 19 nt, Artificial Sequence
  Description of Artificial Sequence: Synthetic oligonucleotide
aguuacugaucucggcuuu

SEQ ID NO: 101743 - RNA, 19 nt, Artificial Sequence
  Description of Artificial Sequence: Synthetic oligonucleotide
uguaaacaagaagguucac

SEQ ID NO: 101744 - RNA, 19 nt, Artificial Sequence
  Description of Artificial Sequence: Synthetic oligonucleotide
gucaccuagcgaucgauua

SEQ ID NO: 101745 - RNA, 19 nt, Artificial Sequence
  Description of Artificial Sequence: Synthetic oligonucleotide
uaguucccgacacgcccag

SEQ ID NO: 101746 - RNA, 19 nt, Artificial Sequence
  Description of Artificial Sequence: Synthetic oligonucleotide
gagcgaaaauucuuuaguu

SEQ ID NO: 101747 - RNA, 19 nt, Artificial Sequence
  Description of Artificial Sequence: Synthetic oligonucleotide
guauggacgucaauacaca

SEQ ID NO: 101748 - RNA, 19 nt, Artificial Sequence
  Description of Artificial Sequence: Synthetic oligonucleotide
gugcucgccuuuaagaaca

SEQ ID NO: 101749 - RNA, 19 nt, Artificial Sequence
  Description of Artificial Sequence: Synthetic oligonucleotide
gcuaccuuugguuuuggaa

SEQ ID NO: 101750 - RNA, 19 nt, Artificial Sequence
  Description of Artificial Sequence: Synthetic oligonucleotide
caguuauauacuacucaaa

SEQ ID NO: 101751 - RNA, 19 nt, Artificial Sequence
  Description of Artificial Sequence: Synthetic oligonucleotide
aagucaccuagcgaucgau

SEQ ID NO: 101752 - RNA, 19 nt, Artificial Sequence
  Description of Artificial Sequence: Synthetic oligonucleotide
uccagugauugagaucggu

SEQ ID NO: 101753 - RNA, 19 nt, Artificial Sequence
  Description of Artificial Sequence: Synthetic oligonucleotide
acgauaccacaauaaggua

SEQ ID NO: 101754 - RNA, 19 nt, Artificial Sequence
  Description of Artificial Sequence: Synthetic oligonucleotide
gguaugagguuaacacuag

SEQ ID NO: 101755 - RNA, 19 nt, Artificial Sequence
  Description of Artificial Sequence: Synthetic oligonucleotide
auguuccgaauggucccgc

SEQ ID NO: 101756 - RNA, 19 nt, Artificial Sequence
  Description of Artificial Sequence: Synthetic oligonucleotide
guuugcgucuauaccuaug

SEQ ID NO: 101757 - RNA, 19 nt, Artificial Sequence
  Description of Artificial Sequence: Synthetic oligonucleotide
uuagcuguauggcgcuauu

SEQ ID NO: 101758 - RNA, 19 nt, Artificial Sequence
  Description of Artificial Sequence: Synthetic oligonucleotide
ggaauccgaaggcuaaaca

SEQ ID NO: 101759 - RNA, 19 nt, Artificial Sequence
  Description of Artificial Sequence: Synthetic oligonucleotide
uuacgguguccgacaugag

SEQ ID NO: 101760 - RNA, 19 nt, Artificial Sequence
  Description of Artificial Sequence: Synthetic oligonucleotide
guguaacucguuaguuugc

SEQ ID NO: 101761 - RNA, 19 nt, Artificial Sequence
  Description of Artificial Sequence: Synthetic oligonucleotide
gccgauuagacggagagaa

SEQ ID NO: 101762 - RNA, 19 nt, Artificial Sequence
  Description of Artificial Sequence: Synthetic oligonucleotide
acagagcaauacguaauau

SEQ ID NO: 101763 - RNA, 19 nt, Artificial Sequence
  Description of Artificial Sequence: Synthetic oligonucleotide
aguuugcgucuauaccuau

SEQ ID NO: 101764 - RNA, 19 nt, Artificial Sequence
  Description of Artificial Sequence: Synthetic oligonucleotide
auacguaauaucagugcua

SEQ ID NO: 101765 - RNA, 19 nt, Artificial Sequence
  Description of Artificial Sequence: Synthetic oligonucleotide
cucggcuuuaagguacaac

SEQ ID NO: 101766 - RNA, 19 nt, Artificial Sequence
  Description of Artificial Sequence: Synthetic oligonucleotide
caccuagcgaucgauuauc

SEQ ID NO: 101767 - RNA, 19 nt, Artificial Sequence
  Description of Artificial Sequence: Synthetic oligonucleotide
aggaaugagugggaacagu

SEQ ID NO: 101768 - RNA, 19 nt, Artificial Sequence
  Description of Artificial Sequence: Synthetic oligonucleotide
cacggucacaagagagcag

SEQ ID NO: 101769 - RNA, 19 nt, Artificial Sequence
  Description of Artificial Sequence: Synthetic oligonucleotide
gaacagagcaauacguaau

SEQ ID NO: 101770 - RNA, 19 nt, Artificial Sequence
  Description of Artificial Sequence: Synthetic oligonucleotide
aagugccgugaaggucucc

SEQ ID NO: 101771 - RNA, 19 nt, Artificial Sequence
  Description of Artificial Sequence: Synthetic oligonucleotide
cagugcuaaaaguuggggu

SEQ ID NO: 101772 - RNA, 19 nt, Artificial Sequence
  Description of Artificial Sequence: Synthetic oligonucleotide
ccgaaggcuaaacaugaug

SEQ ID NO: 101773 - RNA, 19 nt, Artificial Sequence
  Description of Artificial Sequence: Synthetic oligonucleotide
acuggaauacagacacagu

SEQ ID NO: 101774 - RNA, 19 nt, Artificial Sequence
  Description of Artificial Sequence: Synthetic oligonucleotide
caaaacaagccaauucguu

SEQ ID NO: 101775 - RNA, 19 nt, Artificial Sequence
  Description of Artificial Sequence: Synthetic oligonucleotide
gcgugauuugaagucauac

SEQ ID NO: 101776 - RNA, 19 nt, Artificial Sequence
  Description of Artificial Sequence: Synthetic oligonucleotide
gauuagacggagagaacau

SEQ ID NO: 101777 - RNA, 19 nt, Artificial Sequence
  Description of Artificial Sequence: Synthetic oligonucleotide
ccuacgucaguaucuuaac

SEQ ID NO: 101778 - RNA, 19 nt, Artificial Sequence
  Description of Artificial Sequence: Synthetic oligonucleotide
gucaucccgggaaucugag

SEQ ID NO: 101779 - RNA, 19 nt, Artificial Sequence
  Description of Artificial Sequence: Synthetic oligonucleotide
guaacucguuaguuugcaa

SEQ ID NO: 101780 - RNA, 19 nt, Artificial Sequence
  Description of Artificial Sequence: Synthetic oligonucleotide
gaggcuugagaugggcaca

SEQ ID NO: 101781 - RNA, 19 nt, Artificial Sequence
  Description of Artificial Sequence: Synthetic oligonucleotide
ccaacuuagugcuccuuuc

SEQ ID NO: 101782 - RNA, 19 nt, Artificial Sequence
  Description of Artificial Sequence: Synthetic oligonucleotide
cuuagguuacgguguccga

SEQ ID NO: 101783 - RNA, 19 nt, Artificial Sequence
  Description of Artificial Sequence: Synthetic oligonucleotide
ugcuuagguuacggugucc

SEQ ID NO: 101784 - RNA, 19 nt, Artificial Sequence
  Description of Artificial Sequence: Synthetic oligonucleotide
ggaagugccgugaaggucu

SEQ ID NO: 101785 - RNA, 19 nt, Artificial Sequence
  Description of Artificial Sequence: Synthetic oligonucleotide
auauugccgauuagacgga

SEQ ID NO: 101786 - RNA, 19 nt, Artificial Sequence
  Description of Artificial Sequence: Synthetic oligonucleotide
ggaauaauguggggucccc

SEQ ID NO: 101787 - RNA, 19 nt, Artificial Sequence
  Description of Artificial Sequence: Synthetic oligonucleotide
gggaguguaaauagauaga

SEQ ID NO: 101788 - RNA, 19 nt, Artificial Sequence
  Description of Artificial Sequence: Synthetic oligonucleotide
acgucaauacacaccgaau

SEQ ID NO: 101789 - RNA, 19 nt, Artificial Sequence
  Description of Artificial Sequence: Synthetic oligonucleotide
agguuacgguguccgacau

SEQ ID NO: 101790 - RNA, 19 nt, Artificial Sequence
  Description of Artificial Sequence: Synthetic oligonucleotide
ccuagcgaucgauuaucag

SEQ ID NO: 101791 - RNA, 19 nt, Artificial Sequence
  Description of Artificial Sequence: Synthetic oligonucleotide
caguuugcgucuauaccua

SEQ ID NO: 101792 - RNA, 19 nt, Artificial Sequence
  Description of Artificial Sequence: Synthetic oligonucleotide
gggagaauuaucccacgua

SEQ ID NO: 101793 - RNA, 19 nt, Artificial Sequence
  Description of Artificial Sequence: Synthetic oligonucleotide
ccgacaugagcuuacagcu

SEQ ID NO: 101794 - RNA, 19 nt, Artificial Sequence
  Description of Artificial Sequence: Synthetic oligonucleotide
ggagcgugauuugaaguca

SEQ ID NO: 101795 - RNA, 19 nt, Artificial Sequence
  Description of Artificial Sequence: Synthetic oligonucleotide
gucaagucacuaagcuuca

SEQ ID NO: 101796 - RNA, 19 nt, Artificial Sequence
  Description of Artificial Sequence: Synthetic oligonucleotide
acguaauaucagugcuaaa

SEQ ID NO: 101797 - RNA, 19 nt, Artificial Sequence
  Description of Artificial Sequence: Synthetic oligonucleotide
cauuugcuuagguuacggu

SEQ ID NO: 101798 - RNA, 19 nt, Artificial Sequence
  Description of Artificial Sequence: Synthetic oligonucleotide
accuagcgaucgauuauca

SEQ ID NO: 101799 - RNA, 19 nt, Artificial Sequence
  Description of Artificial Sequence: Synthetic oligonucleotide
agcgaucgauuaucagcaa

SEQ ID NO: 101800 - RNA, 19 nt, Artificial Sequence
  Description of Artificial Sequence: Synthetic oligonucleotide
gauugagaucgguccggcu

SEQ ID NO: 101801 - RNA, 19 nt, Artificial Sequence
  Description of Artificial Sequence: Synthetic oligonucleotide
cgauuagacggagagaaca

SEQ ID NO: 101802 - RNA, 19 nt, Artificial Sequence
  Description of Artificial Sequence: Synthetic oligonucleotide
agcccaacuuagugcuccu

SEQ ID NO: 101803 - RNA, 19 nt, Artificial Sequence
  Description of Artificial Sequence: Synthetic oligonucleotide
caaugaaaugauggcauau

SEQ ID NO: 101804 - RNA, 19 nt, Artificial Sequence
  Description of Artificial Sequence: Synthetic oligonucleotide
cccuagagcuccugcagug

SEQ ID NO: 101805 - RNA, 19 nt, Artificial Sequence
  Description of Artificial Sequence: Synthetic oligonucleotide
gcaagcauuauaauaccau

SEQ ID NO: 101806 - RNA, 19 nt, Artificial Sequence
  Description of Artificial Sequence: Synthetic oligonucleotide
ugagaucgguccggcugga

SEQ ID NO: 101807 - RNA, 19 nt, Artificial Sequence
  Description of Artificial Sequence: Synthetic oligonucleotide
gcgaucgauuaucagcaaa

SEQ ID NO: 101808 - RNA, 19 nt, Artificial Sequence
  Description of Artificial Sequence: Synthetic oligonucleotide
gugccgugaaggucuccac

SEQ ID NO: 101809 - RNA, 19 nt, Artificial Sequence
  Description of Artificial Sequence: Synthetic oligonucleotide
cguuauucucccugagcug

SEQ ID NO: 101810 - RNA, 19 nt, Artificial Sequence
  Description of Artificial Sequence: Synthetic oligonucleotide
caccgugggaaccuccaaa

SEQ ID NO: 101811 - RNA, 19 nt, Artificial Sequence
  Description of Artificial Sequence: Synthetic oligonucleotide
cuaugagaagaaugcucau

SEQ ID NO: 101812 - RNA, 19 nt, Artificial Sequence
  Description of Artificial Sequence: Synthetic oligonucleotide
agucaccuagcgaucgauu

SEQ ID NO: 101813 - RNA, 19 nt, Artificial Sequence
  Description of Artificial Sequence: Synthetic oligonucleotide
gaagugccgugaaggucuc

SEQ ID NO: 101814 - RNA, 19 nt, Artificial Sequence
  Description of Artificial Sequence: Synthetic oligonucleotide
auccuacgucaguaucuua

SEQ ID NO: 101815 - RNA, 19 nt, Artificial Sequence
  Description of Artificial Sequence: Synthetic oligonucleotide
caccgaaugcacugaacau

SEQ ID NO: 101816 - RNA, 19 nt, Artificial Sequence
  Description of Artificial Sequence: Synthetic oligonucleotide
ccgauuagacggagagaac

SEQ ID NO: 101817 - RNA, 19 nt, Artificial Sequence
  Description of Artificial Sequence: Synthetic oligonucleotide
ucucggcuuuaagguacaa

SEQ ID NO: 101818 - RNA, 19 nt, Artificial Sequence
  Description of Artificial Sequence: Synthetic oligonucleotide
gcaccauuccagugauuga

SEQ ID NO: 101819 - RNA, 19 nt, Artificial Sequence
  Description of Artificial Sequence: Synthetic oligonucleotide
cuauaccuaugugguuaca

SEQ ID NO: 101820 - RNA, 19 nt, Artificial Sequence
  Description of Artificial Sequence: Synthetic oligonucleotide
uccacacgguuagcuguau

SEQ ID NO: 101821 - RNA, 19 nt, Artificial Sequence
  Description of Artificial Sequence: Synthetic oligonucleotide
guuagcuguauggcgcuau

SEQ ID NO: 101822 - RNA, 19 nt, Artificial Sequence
  Description of Artificial Sequence: Synthetic oligonucleotide
ggggagaauuaucccacgu

SEQ ID NO: 101823 - RNA, 19 nt, Artificial Sequence
  Description of Artificial Sequence: Synthetic oligonucleotide
ccacaguuaguucccgaca

SEQ ID NO: 101824 - RNA, 19 nt, Artificial Sequence
  Description of Artificial Sequence: Synthetic oligonucleotide
agcgguggccacaguuucu

SEQ ID NO: 101825 - RNA, 19 nt, Artificial Sequence
  Description of Artificial Sequence: Synthetic oligonucleotide
cacgcccagcaccauucca

SEQ ID NO: 101826 - RNA, 19 nt, Artificial Sequence
  Description of Artificial Sequence: Synthetic oligonucleotide
cacggcgguggcaucccca

SEQ ID NO: 101827 - RNA, 19 nt, Artificial Sequence
  Description of Artificial Sequence: Synthetic oligonucleotide
caaucugaggugugagguu

SEQ ID NO: 101828 - RNA, 19 nt, Artificial Sequence
  Description of Artificial Sequence: Synthetic oligonucleotide
gaggccgagacccggccuu

SEQ ID NO: 101829 - RNA, 19 nt, Artificial Sequence
  Description of Artificial Sequence: Synthetic oligonucleotide
cuggaaccugggguauauc

SEQ ID NO: 101830 - RNA, 19 nt, Artificial Sequence
  Description of Artificial Sequence: Synthetic oligonucleotide
gugcuaaaaguugggguuu

SEQ ID NO: 101831 - RNA, 19 nt, Artificial Sequence
  Description of Artificial Sequence: Synthetic oligonucleotide
acauuaucucagggugcuu

SEQ ID NO: 101832 - RNA, 19 nt, Artificial Sequence
  Description of Artificial Sequence: Synthetic oligonucleotide
agcgugauuugaagucaua

SEQ ID NO: 101833 - RNA, 19 nt, Artificial Sequence
  Description of Artificial Sequence: Synthetic oligonucleotide
aggcggcgagcccaacuua

SEQ ID NO: 101834 - RNA, 19 nt, Artificial Sequence
  Description of Artificial Sequence: Synthetic oligonucleotide
ccgaaugcacugaacauuu

SEQ ID NO: 101835 - RNA, 19 nt, Artificial Sequence
  Description of Artificial Sequence: Synthetic oligonucleotide
ucgguccggcuggaggaau

SEQ ID NO: 101836 - RNA, 19 nt, Artificial Sequence
  Description of Artificial Sequence: Synthetic oligonucleotide
ccgaauggucccgcugagg

SEQ ID NO: 101837 - RNA, 19 nt, Artificial Sequence
  Description of Artificial Sequence: Synthetic oligonucleotide
aucgguccggcuggaggaa

SEQ ID NO: 101838 - RNA, 19 nt, Artificial Sequence
  Description of Artificial Sequence: Synthetic oligonucleotide
cagcgagaauaguaguguu

SEQ ID NO: 101839 - RNA, 19 nt, Artificial Sequence
  Description of Artificial Sequence: Synthetic oligonucleotide
ccacacgguuagcuguaug

SEQ ID NO: 101840 - RNA, 19 nt, Artificial Sequence
  Description of Artificial Sequence: Synthetic oligonucleotide
cacgaggcuuguggaauaa

SEQ ID NO: 101841 - RNA, 19 nt, Artificial Sequence
  Description of Artificial Sequence: Synthetic oligonucleotide
gugcgcagaguugagccau

SEQ ID NO: 101842 - RNA, 19 nt, Artificial Sequence
  Description of Artificial Sequence: Synthetic oligonucleotide
uggcgcuauuugggagugu

SEQ ID NO: 101843 - RNA, 19 nt, Artificial Sequence
  Description of Artificial Sequence: Synthetic oligonucleotide
gguucaccgugggaaccuc

SEQ ID NO: 101844 - RNA, 19 nt, Artificial Sequence
  Description of Artificial Sequence: Synthetic oligonucleotide
ccagagggaagugccguga

SEQ ID NO: 101845 - RNA, 19 nt, Artificial Sequence
  Description of Artificial Sequence: Synthetic oligonucleotide
aggcaacaugaggcauagu

SEQ ID NO: 101846 - RNA, 19 nt, Artificial Sequence
  Description of Artificial Sequence: Synthetic oligonucleotide
cccaacuuagugcuccuuu

SEQ ID NO: 101847 - RNA, 19 nt, Artificial Sequence
  Description of Artificial Sequence: Synthetic oligonucleotide
aggcgggcugcaggucaca

SEQ ID NO: 101848 - RNA, 19 nt, Artificial Sequence
  Description of Artificial Sequence: Synthetic oligonucleotide
gcacggcgguggcaucccc

SEQ ID NO: 101849 - RNA, 19 nt, Artificial Sequence
  Description of Artificial Sequence: Synthetic oligonucleotide
cgagcccaacuuagugcuc

SEQ ID NO: 101850 - RNA, 19 nt, Artificial Sequence
  Description of Artificial Sequence: Synthetic oligonucleotide
ggaccccacgaggcuugug

SEQ ID NO: 101851 - RNA, 19 nt, Artificial Sequence
  Description of Artificial Sequence: Synthetic oligonucleotide
ggcccguccugggcagcag

SEQ ID NO: 101852 - RNA, 19 nt, Artificial Sequence
  Description of Artificial Sequence: Synthetic oligonucleotide
cccacgaggcuuguggaau

SEQ ID NO: 101853 - RNA, 19 nt, Artificial Sequence
  Description of Artificial Sequence: Synthetic oligonucleotide
gcggcgagcccaacuuagu

SEQ ID NO: 101854 - RNA, 19 nt, Artificial Sequence
  Description of Artificial Sequence: Synthetic oligonucleotide
gcccaacuuagugcuccuu

SEQ ID NO: 101855 - RNA, 19 nt, Artificial Sequence
  Description of Artificial Sequence: Synthetic oligonucleotide
cgacacgcccagcaccauu

SEQ ID NO: 101856 - RNA, 19 nt, Artificial Sequence
  Description of Artificial Sequence: Synthetic oligonucleotide
cauacaauaauccucagac

SEQ ID NO: 101857 - RNA, 19 nt, Artificial Sequence
  Description of Artificial Sequence: Synthetic oligonucleotide
uguauauagucuaucauca

SEQ ID NO: 101858 - RNA, 19 nt, Artificial Sequence
  Description of Artificial Sequence: Synthetic oligonucleotide
aaauuguuccuguugccgc

SEQ ID NO: 101859 - RNA, 19 nt, Artificial Sequence
  Description of Artificial Sequence: Synthetic oligonucleotide
aaagcguacgcacuuuccc

SEQ ID NO: 101860 - RNA, 19 nt, Artificial Sequence
  Description of Artificial Sequence: Synthetic oligonucleotide
uguaucacaaugcacuuca

SEQ ID NO: 101861 - RNA, 19 nt, Artificial Sequence
  Description of Artificial Sequence: Synthetic oligonucleotide
uagguaauuuuccagagcu

SEQ ID NO: 101862 - RNA, 19 nt, Artificial Sequence
  Description of Artificial Sequence: Synthetic oligonucleotide
caucguuuuacacacagcc

SEQ ID NO: 101863 - RNA, 19 nt, Artificial Sequence
  Description of Artificial Sequence: Synthetic oligonucleotide
ucacuuaagguuuauauau

SEQ ID NO: 101864 - RNA, 19 nt, Artificial Sequence
  Description of Artificial Sequence: Synthetic oligonucleotide
ucuagucuuaacaauccag

SEQ ID NO: 101865 - RNA, 19 nt, Artificial Sequence
  Description of Artificial Sequence: Synthetic oligonucleotide
acagcuuuaacaucgugag

SEQ ID NO: 101866 - RNA, 19 nt, Artificial Sequence
  Description of Artificial Sequence: Synthetic oligonucleotide
gaaccuucagauuaaaaca

SEQ ID NO: 101867 - RNA, 19 nt, Artificial Sequence
  Description of Artificial Sequence: Synthetic oligonucleotide
auacuaaggagucuguaag

SEQ ID NO: 101868 - RNA, 19 nt, Artificial Sequence
  Description of Artificial Sequence: Synthetic oligonucleotide
auugcaauccuacaguagu

SEQ ID NO: 101869 - RNA, 19 nt, Artificial Sequence
  Description of Artificial Sequence: Synthetic oligonucleotide
uucauauagagaaggcgcc

SEQ ID NO: 101870 - RNA, 19 nt, Artificial Sequence
  Description of Artificial Sequence: Synthetic oligonucleotide
agucuuaacaauccaggag

SEQ ID NO: 101871 - RNA, 19 nt, Artificial Sequence
  Description of Artificial Sequence: Synthetic oligonucleotide
uaugugaaggaaacaaaac

SEQ ID NO: 101872 - RNA, 19 nt, Artificial Sequence
  Description of Artificial Sequence: Synthetic oligonucleotide
uauauaaagcguacgcacu

SEQ ID NO: 101873 - RNA, 19 nt, Artificial Sequence
  Description of Artificial Sequence: Synthetic oligonucleotide
uaagugaaguuucaaucug

SEQ ID NO: 101874 - RNA, 19 nt, Artificial Sequence
  Description of Artificial Sequence: Synthetic oligonucleotide
aacauuaggcuuccaaaga

SEQ ID NO: 101875 - RNA, 19 nt, Artificial Sequence
  Description of Artificial Sequence: Synthetic oligonucleotide
aaucaacaaucuuugucug

SEQ ID NO: 101876 - RNA, 19 nt, Artificial Sequence
  Description of Artificial Sequence: Synthetic oligonucleotide
aguacuuucuagucuuaac

SEQ ID NO: 101877 - RNA, 19 nt, Artificial Sequence
  Description of Artificial Sequence: Synthetic oligonucleotide
agaacugacuuacguaacg

SEQ ID NO: 101878 - RNA, 19 nt, Artificial Sequence
  Description of Artificial Sequence: Synthetic oligonucleotide
uuaucauccgcugaggucu

SEQ ID NO: 101879 - RNA, 19 nt, Artificial Sequence
  Description of Artificial Sequence: Synthetic oligonucleotide
uuaagguuuauauaucaua

SEQ ID NO: 101880 - RNA, 19 nt, Artificial Sequence
  Description of Artificial Sequence: Synthetic oligonucleotide
agcuuuaacaucgugagca

SEQ ID NO: 101881 - RNA, 19 nt, Artificial Sequence
  Description of Artificial Sequence: Synthetic oligonucleotide
agaguuaugugaaggaaac

SEQ ID NO: 101882 - RNA, 19 nt, Artificial Sequence
  Description of Artificial Sequence: Synthetic oligonucleotide
aucaucguuuuacacacag

SEQ ID NO: 101883 - RNA, 19 nt, Artificial Sequence
  Description of Artificial Sequence: Synthetic oligonucleotide
uauauagagcaugugugag

SEQ ID NO: 101884 - RNA, 19 nt, Artificial Sequence
  Description of Artificial Sequence: Synthetic oligonucleotide
uguaugaugaggccuuaug

SEQ ID NO: 101885 - RNA, 19 nt, Artificial Sequence
  Description of Artificial Sequence: Synthetic oligonucleotide
cacguaacggcgcagagcc

SEQ ID NO: 101886 - RNA, 19 nt, Artificial Sequence
  Description of Artificial Sequence: Synthetic oligonucleotide
guaaucacggucuuccacc

SEQ ID NO: 101887 - RNA, 19 nt, Artificial Sequence
  Description of Artificial Sequence: Synthetic oligonucleotide
ucguuuuacacacagccau

SEQ ID NO: 101888 - RNA, 19 nt, Artificial Sequence
  Description of Artificial Sequence: Synthetic oligonucleotide
acuaacuauaggcuaguug

SEQ ID NO: 101889 - RNA, 19 nt, Artificial Sequence
  Description of Artificial Sequence: Synthetic oligonucleotide
cagggugucacacaugucc

SEQ ID NO: 101890 - RNA, 19 nt, Artificial Sequence
  Description of Artificial Sequence: Synthetic oligonucleotide
ugagcauuaacuucuguua

SEQ ID NO: 101891 - RNA, 19 nt, Artificial Sequence
  Description of Artificial Sequence: Synthetic oligonucleotide
cacguaaggaacuuuguac

SEQ ID NO: 101892 - RNA, 19 nt, Artificial Sequence
  Description of Artificial Sequence: Synthetic oligonucleotide
agguuggguucucauaacc

SEQ ID NO: 101893 - RNA, 19 nt, Artificial Sequence
  Description of Artificial Sequence: Synthetic oligonucleotide
auuaggcuuccaaagaaac

SEQ ID NO: 101894 - RNA, 19 nt, Artificial Sequence
  Description of Artificial Sequence: Synthetic oligonucleotide
uauagagcaugugugagac

SEQ ID NO: 101895 - RNA, 19 nt, Artificial Sequence
  Description of Artificial Sequence: Synthetic oligonucleotide
ucucuauaugcacugggcu

SEQ ID NO: 101896 - RNA, 19 nt, Artificial Sequence
  Description of Artificial Sequence: Synthetic oligonucleotide
cugauaacgaugacuguag

SEQ ID NO: 101897 - RNA, 19 nt, Artificial Sequence
  Description of Artificial Sequence: Synthetic oligonucleotide
auaauccucagacucaaaa

SEQ ID NO: 101898 - RNA, 19 nt, Artificial Sequence
  Description of Artificial Sequence: Synthetic oligonucleotide
ucacgguauucucugagug

SEQ ID NO: 101899 - RNA, 19 nt, Artificial Sequence
  Description of Artificial Sequence: Synthetic oligonucleotide
uaaagaacugacuuacgua

SEQ ID NO: 101900 - RNA, 19 nt, Artificial Sequence
  Description of Artificial Sequence: Synthetic oligonucleotide
guacuuucuagucuuaaca

SEQ ID NO: 101901 - RNA, 19 nt, Artificial Sequence
  Description of Artificial Sequence: Synthetic oligonucleotide
acugcgaugccgaauuucc

SEQ ID NO: 101902 - RNA, 19 nt, Artificial Sequence
  Description of Artificial Sequence: Synthetic oligonucleotide
uacguaacgggaauagccu

SEQ ID NO: 101903 - RNA, 19 nt, Artificial Sequence
  Description of Artificial Sequence: Synthetic oligonucleotide
auaaagcguacgcacuuuc

SEQ ID NO: 101904 - RNA, 19 nt, Artificial Sequence
  Description of Artificial Sequence: Synthetic oligonucleotide
uacuuucuagucuuaacaa

SEQ ID NO: 101905 - RNA, 19 nt, Artificial Sequence
  Description of Artificial Sequence: Synthetic oligonucleotide
gauaacgaugacuguagca

SEQ ID NO: 101906 - RNA, 19 nt, Artificial Sequence
  Description of Artificial Sequence: Synthetic oligonucleotide
cauaguagagucagaauca

SEQ ID NO: 101907 - RNA, 19 nt, Artificial Sequence
  Description of Artificial Sequence: Synthetic oligonucleotide
acgaauggugugcaggcgg

SEQ ID NO: 101908 - RNA, 19 nt, Artificial Sequence
  Description of Artificial Sequence: Synthetic oligonucleotide
uucacuuaagguuuauaua

SEQ ID NO: 101909 - RNA, 19 nt, Artificial Sequence
  Description of Artificial Sequence: Synthetic oligonucleotide
gaaauagcgccaucacugc

SEQ ID NO: 101910 - RNA, 19 nt, Artificial Sequence
  Description of Artificial Sequence: Synthetic oligonucleotide
uguccaaagaggagguggc

SEQ ID NO: 101911 - RNA, 19 nt, Artificial Sequence
  Description of Artificial Sequence: Synthetic oligonucleotide
uuauucucagcacgcacgu

SEQ ID NO: 101912 - RNA, 19 nt, Artificial Sequence
  Description of Artificial Sequence: Synthetic oligonucleotide
augacuagcaagccaauaa

SEQ ID NO: 101913 - RNA, 19 nt, Artificial Sequence
  Description of Artificial Sequence: Synthetic oligonucleotide
aauugcaauccuacaguag

SEQ ID NO: 101914 - RNA, 19 nt, Artificial Sequence
  Description of Artificial Sequence: Synthetic oligonucleotide
uaaagcguacgcacuuucc

SEQ ID NO: 101915 - RNA, 19 nt, Artificial Sequence
  Description of Artificial Sequence: Synthetic oligonucleotide
aagaacugacuuacguaac

SEQ ID NO: 101916 - RNA, 19 nt, Artificial Sequence
  Description of Artificial Sequence: Synthetic oligonucleotide
guuaccagaaccuucagau

SEQ ID NO: 101917 - RNA, 19 nt, Artificial Sequence
  Description of Artificial Sequence: Synthetic oligonucleotide
cucucuauaugcacugggc

SEQ ID NO: 101918 - RNA, 19 nt, Artificial Sequence
  Description of Artificial Sequence: Synthetic oligonucleotide
aacgggaauagccugugua

SEQ ID NO: 101919 - RNA, 19 nt, Artificial Sequence
  Description of Artificial Sequence: Synthetic oligonucleotide
cauauugccucuuccucag

SEQ ID NO: 101920 - RNA, 19 nt, Artificial Sequence
  Description of Artificial Sequence: Synthetic oligonucleotide
cagugaacaacaguggaag

SEQ ID NO: 101921 - RNA, 19 nt, Artificial Sequence
  Description of Artificial Sequence: Synthetic oligonucleotide
acuauaggcuaguugcugu

SEQ ID NO: 101922 - RNA, 19 nt, Artificial Sequence
  Description of Artificial Sequence: Synthetic oligonucleotide
aauagcgccaucacugcug

SEQ ID NO: 101923 - RNA, 19 nt, Artificial Sequence
  Description of Artificial Sequence: Synthetic oligonucleotide
uuuacccuguccauucgac

SEQ ID NO: 101924 - RNA, 19 nt, Artificial Sequence
  Description of Artificial Sequence: Synthetic oligonucleotide
agacaauacaauagaagug

SEQ ID NO: 101925 - RNA, 19 nt, Artificial Sequence
  Description of Artificial Sequence: Synthetic oligonucleotide
cagaucauacuaaggaguc

SEQ ID NO: 101926 - RNA, 19 nt, Artificial Sequence
  Description of Artificial Sequence: Synthetic oligonucleotide
acuaaggagucuguaagug

SEQ ID NO: 101927 - RNA, 19 nt, Artificial Sequence
  Description of Artificial Sequence: Synthetic oligonucleotide
caggcacaaaugcugaacc

SEQ ID NO: 101928 - RNA, 19 nt, Artificial Sequence
  Description of Artificial Sequence: Synthetic oligonucleotide
ucuuuacccuguccauucg

SEQ ID NO: 101929 - RNA, 19 nt, Artificial Sequence
  Description of Artificial Sequence: Synthetic oligonucleotide
auauagagcaugugugaga

SEQ ID NO: 101930 - RNA, 19 nt, Artificial Sequence
  Description of Artificial Sequence: Synthetic oligonucleotide
agacaugccuccuugacua

SEQ ID NO: 101931 - RNA, 19 nt, Artificial Sequence
  Description of Artificial Sequence: Synthetic oligonucleotide
ugauaacgaugacuguagc

SEQ ID NO: 101932 - RNA, 19 nt, Artificial Sequence
  Description of Artificial Sequence: Synthetic oligonucleotide
uacaauagaaguggcauuu

SEQ ID NO: 101933 - RNA, 19 nt, Artificial Sequence
  Description of Artificial Sequence: Synthetic oligonucleotide
uccuugucugaaauagcgc

SEQ ID NO: 101934 - RNA, 19 nt, Artificial Sequence
  Description of Artificial Sequence: Synthetic oligonucleotide
aagcguacgcacuuucccu

SEQ ID NO: 101935 - RNA, 19 nt, Artificial Sequence
  Description of Artificial Sequence: Synthetic oligonucleotide
aaucugugcauagugggaa

SEQ ID NO: 101936 - RNA, 19 nt, Artificial Sequence
  Description of Artificial Sequence: Synthetic oligonucleotide
ccauauauaaagcguacgc

SEQ ID NO: 101937 - RNA, 19 nt, Artificial Sequence
  Description of Artificial Sequence: Synthetic oligonucleotide
guccauucgacugcgaugc

SEQ ID NO: 101938 - RNA, 19 nt, Artificial Sequence
  Description of Artificial Sequence: Synthetic oligonucleotide
uggaaauugcaauccuaca

SEQ ID NO: 101939 - RNA, 19 nt, Artificial Sequence
  Description of Artificial Sequence: Synthetic oligonucleotide
auagcgccaucacugcugg

SEQ ID NO: 101940 - RNA, 19 nt, Artificial Sequence
  Description of Artificial Sequence: Synthetic oligonucleotide
gacagcuuuaacaucguga

SEQ ID NO: 101941 - RNA, 19 nt, Artificial Sequence
  Description of Artificial Sequence: Synthetic oligonucleotide
uauaggcuaguugcugugg

SEQ ID NO: 101942 - RNA, 19 nt, Artificial Sequence
  Description of Artificial Sequence: Synthetic oligonucleotide
aaauagcgccaucacugcu

SEQ ID NO: 101943 - RNA, 19 nt, Artificial Sequence
  Description of Artificial Sequence: Synthetic oligonucleotide
ucauuaucauccgcugagg

SEQ ID NO: 101944 - RNA, 19 nt, Artificial Sequence
  Description of Artificial Sequence: Synthetic oligonucleotide
aaugcgaugcggccguggu

SEQ ID NO: 101945 - RNA, 19 nt, Artificial Sequence
  Description of Artificial Sequence: Synthetic oligonucleotide
guaagugaaguuucaaucu

SEQ ID NO: 101946 - RNA, 19 nt, Artificial Sequence
  Description of Artificial Sequence: Synthetic oligonucleotide
uacuaaggagucuguaagu

SEQ ID NO: 101947 - RNA, 19 nt, Artificial Sequence
  Description of Artificial Sequence: Synthetic oligonucleotide
uaccaacgaggcaucacag

SEQ ID NO: 101948 - RNA, 19 nt, Artificial Sequence
  Description of Artificial Sequence: Synthetic oligonucleotide
uucucauaaccaugguucu

SEQ ID NO: 101949 - RNA, 19 nt, Artificial Sequence
  Description of Artificial Sequence: Synthetic oligonucleotide
uccuacaguaguacuuucu

SEQ ID NO: 101950 - RNA, 19 nt, Artificial Sequence
  Description of Artificial Sequence: Synthetic oligonucleotide
aggucgaaguaccaacgag

SEQ ID NO: 101951 - RNA, 19 nt, Artificial Sequence
  Description of Artificial Sequence: Synthetic oligonucleotide
auauaaagcguacgcacuu

SEQ ID NO: 101952 - RNA, 19 nt, Artificial Sequence
  Description of Artificial Sequence: Synthetic oligonucleotide
auagcuauauaaggucauc

SEQ ID NO: 101953 - RNA, 19 nt, Artificial Sequence
  Description of Artificial Sequence: Synthetic oligonucleotide
gguaaugacgaauggugug

SEQ ID NO: 101954 - RNA, 19 nt, Artificial Sequence
  Description of Artificial Sequence: Synthetic oligonucleotide
aggaaagcacaguggaucu

SEQ ID NO: 101955 - RNA, 19 nt, Artificial Sequence
  Description of Artificial Sequence: Synthetic oligonucleotide
uuuacccauuuaaaagaau

SEQ ID NO: 101956 - RNA, 19 nt, Artificial Sequence
  Description of Artificial Sequence: Synthetic oligonucleotide
caucaccaggcugauaacg

SEQ ID NO: 101957 - RNA, 19 nt, Artificial Sequence
  Description of Artificial Sequence: Synthetic oligonucleotide
gagcauugggucaaccucc

SEQ ID NO: 101958 - RNA, 19 nt, Artificial Sequence
  Description of Artificial Sequence: Synthetic oligonucleotide
aaucugcuucaguaggaaa

SEQ ID NO: 101959 - RNA, 19 nt, Artificial Sequence
  Description of Artificial Sequence: Synthetic oligonucleotide
caucaguuaucugcaauag

SEQ ID NO: 101960 - RNA, 19 nt, Artificial Sequence
  Description of Artificial Sequence: Synthetic oligonucleotide
cauagugggaagaggcaug

SEQ ID NO: 101961 - RNA, 19 nt, Artificial Sequence
  Description of Artificial Sequence: Synthetic oligonucleotide
cuguguauauagucuauca

SEQ ID NO: 101962 - RNA, 19 nt, Artificial Sequence
  Description of Artificial Sequence: Synthetic oligonucleotide
ucgacugcgaugccgaauu

SEQ ID NO: 101963 - RNA, 19 nt, Artificial Sequence
  Description of Artificial Sequence: Synthetic oligonucleotide
gucgaaguaccaacgaggc

SEQ ID NO: 101964 - RNA, 19 nt, Artificial Sequence
  Description of Artificial Sequence: Synthetic oligonucleotide
auggaacuggucuacccca

SEQ ID NO: 101965 - RNA, 19 nt, Artificial Sequence
  Description of Artificial Sequence: Synthetic oligonucleotide
uaaucacggucuuccacca

SEQ ID NO: 101966 - RNA, 19 nt, Artificial Sequence
  Description of Artificial Sequence: Synthetic oligonucleotide
cacuuaagguuuauauauc

SEQ ID NO: 101967 - RNA, 19 nt, Artificial Sequence
  Description of Artificial Sequence: Synthetic oligonucleotide
uugagccacguaaggaacu

SEQ ID NO: 101968 - RNA, 19 nt, Artificial Sequence
  Description of Artificial Sequence: Synthetic oligonucleotide
caauacaauagaaguggca

SEQ ID NO: 101969 - RNA, 19 nt, Artificial Sequence
  Description of Artificial Sequence: Synthetic oligonucleotide
guaccaacgaggcaucaca

SEQ ID NO: 101970 - RNA, 19 nt, Artificial Sequence
  Description of Artificial Sequence: Synthetic oligonucleotide
cugcagaaugcgaugcggc

SEQ ID NO: 101971 - RNA, 19 nt, Artificial Sequence
  Description of Artificial Sequence: Synthetic oligonucleotide
aguaccaacgaggcaucac

SEQ ID NO: 101972 - RNA, 19 nt, Artificial Sequence
  Description of Artificial Sequence: Synthetic oligonucleotide
cuaaagaacugacuuacgu

SEQ ID NO: 101973 - RNA, 19 nt, Artificial Sequence
  Description of Artificial Sequence: Synthetic oligonucleotide
cuauaggcuaguugcugug

SEQ ID NO: 101974 - RNA, 19 nt, Artificial Sequence
  Description of Artificial Sequence: Synthetic oligonucleotide
ccaacgaggcaucacagcc

SEQ ID NO: 101975 - RNA, 19 nt, Artificial Sequence
  Description of Artificial Sequence: Synthetic oligonucleotide
auacaauagaaguggcauu

SEQ ID NO: 101976 - RNA, 19 nt, Artificial Sequence
  Description of Artificial Sequence: Synthetic oligonucleotide
auaggcuaguugcugugga

SEQ ID NO: 101977 - RNA, 19 nt, Artificial Sequence
  Description of Artificial Sequence: Synthetic oligonucleotide
uuaacaucgugagcaauuu

SEQ ID NO: 101978 - RNA, 19 nt, Artificial Sequence
  Description of Artificial Sequence: Synthetic oligonucleotide
acguaacgggaauagccug

SEQ ID NO: 101979 - RNA, 19 nt, Artificial Sequence
  Description of Artificial Sequence: Synthetic oligonucleotide
uaacgaugacuguagcaau

SEQ ID NO: 101980 - RNA, 19 nt, Artificial Sequence
  Description of Artificial Sequence: Synthetic oligonucleotide
auauugccucuuccucagc

SEQ ID NO: 101981 - RNA, 19 nt, Artificial Sequence
  Description of Artificial Sequence: Synthetic oligonucleotide
acgggaauagccuguguau

SEQ ID NO: 101982 - RNA, 19 nt, Artificial Sequence
  Description of Artificial Sequence: Synthetic oligonucleotide
ucgaaguaccaacgaggca

SEQ ID NO: 101983 - RNA, 19 nt, Artificial Sequence
  Description of Artificial Sequence: Synthetic oligonucleotide
aaugacuagcaagccaaua

SEQ ID NO: 101984 - RNA, 19 nt, Artificial Sequence
  Description of Artificial Sequence: Synthetic oligonucleotide
guguuuauugaugugguua

SEQ ID NO: 101985 - RNA, 19 nt, Artificial Sequence
  Description of Artificial Sequence: Synthetic oligonucleotide
cagaguuaugugaaggaaa

SEQ ID NO: 101986 - RNA, 19 nt, Artificial Sequence
  Description of Artificial Sequence: Synthetic oligonucleotide
auauaaggucauccccuca

SEQ ID NO: 101987 - RNA, 19 nt, Artificial Sequence
  Description of Artificial Sequence: Synthetic oligonucleotide
auaaggucauccccucagu

SEQ ID NO: 101988 - RNA, 19 nt, Artificial Sequence
  Description of Artificial Sequence: Synthetic oligonucleotide
gcaggauguaugaugaggc

SEQ ID NO: 101989 - RNA, 19 nt, Artificial Sequence
  Description of Artificial Sequence: Synthetic oligonucleotide
ggccuuauggcaccacugg

SEQ ID NO: 101990 - RNA, 19 nt, Artificial Sequence
  Description of Artificial Sequence: Synthetic oligonucleotide
ucugugcauagugggaaga

SEQ ID NO: 101991 - RNA, 19 nt, Artificial Sequence
  Description of Artificial Sequence: Synthetic oligonucleotide
cuaaagcuuuaaccauagc

SEQ ID NO: 101992 - RNA, 19 nt, Artificial Sequence
  Description of Artificial Sequence: Synthetic oligonucleotide
cauucgacugcgaugccga

SEQ ID NO: 101993 - RNA, 19 nt, Artificial Sequence
  Description of Artificial Sequence: Synthetic oligonucleotide
cauuggagggagaugucca

SEQ ID NO: 101994 - RNA, 19 nt, Artificial Sequence
  Description of Artificial Sequence: Synthetic oligonucleotide
uauccgccggcguucauuc

SEQ ID NO: 101995 - RNA, 19 nt, Artificial Sequence
  Description of Artificial Sequence: Synthetic oligonucleotide
gucaucgccuccugggagc

SEQ ID NO: 101996 - RNA, 19 nt, Artificial Sequence
  Description of Artificial Sequence: Synthetic oligonucleotide
gccauauauaaagcguacg

SEQ ID NO: 101997 - RNA, 19 nt, Artificial Sequence
  Description of Artificial Sequence: Synthetic oligonucleotide
uggacauaguagagucaga

SEQ ID NO: 101998 - RNA, 19 nt, Artificial Sequence
  Description of Artificial Sequence: Synthetic oligonucleotide
agccuguguauauagucua

SEQ ID NO: 101999 - RNA, 19 nt, Artificial Sequence
  Description of Artificial Sequence: Synthetic oligonucleotide
ucauacuaaggagucugua

SEQ ID NO: 102000 - RNA, 19 nt, Artificial Sequence
  Description of Artificial Sequence: Synthetic oligonucleotide
uggaacuggucuaccccac

SEQ ID NO: 102001 - RNA, 19 nt, Artificial Sequence
  Description of Artificial Sequence: Synthetic oligonucleotide
uggagaggucgaaguacca

SEQ ID NO: 102002 - RNA, 19 nt, Artificial Sequence
  Description of Artificial Sequence: Synthetic oligonucleotide
cucuauaugcacugggcua

SEQ ID NO: 102003 - RNA, 19 nt, Artificial Sequence
  Description of Artificial Sequence: Synthetic oligonucleotide
gaaagcacaguggaucucu

SEQ ID NO: 102004 - RNA, 19 nt, Artificial Sequence
  Description of Artificial Sequence: Synthetic oligonucleotide
uaccuccuccuccuccucc

SEQ ID NO: 102005 - RNA, 19 nt, Artificial Sequence
  Description of Artificial Sequence: Synthetic oligonucleotide
auacuaacuauaggcuagu

SEQ ID NO: 102006 - RNA, 19 nt, Artificial Sequence
  Description of Artificial Sequence: Synthetic oligonucleotide
uagguuggguucucauaac

SEQ ID NO: 102007 - RNA, 19 nt, Artificial Sequence
  Description of Artificial Sequence: Synthetic oligonucleotide
gaaugcgaugcggccgugg

SEQ ID NO: 102008 - RNA, 19 nt, Artificial Sequence
  Description of Artificial Sequence: Synthetic oligonucleotide
ccuuauggcaccacuggug

SEQ ID NO: 102009 - RNA, 19 nt, Artificial Sequence
  Description of Artificial Sequence: Synthetic oligonucleotide
gagucuguaagugaaguuu

SEQ ID NO: 102010 - RNA, 19 nt, Artificial Sequence
  Description of Artificial Sequence: Synthetic oligonucleotide
cagcuuuaacaucgugagc

SEQ ID NO: 102011 - RNA, 19 nt, Artificial Sequence
  Description of Artificial Sequence: Synthetic oligonucleotide
acaucgugagcaauuuccu

SEQ ID NO: 102012 - RNA, 19 nt, Artificial Sequence
  Description of Artificial Sequence: Synthetic oligonucleotide
agauuccggcucuuccucu

SEQ ID NO: 102013 - RNA, 19 nt, Artificial Sequence
  Description of Artificial Sequence: Synthetic oligonucleotide
guaacgggaauagccugug

SEQ ID NO: 102014 - RNA, 19 nt, Artificial Sequence
  Description of Artificial Sequence: Synthetic oligonucleotide
gcaaugacuagcaagccaa

SEQ ID NO: 102015 - RNA, 19 nt, Artificial Sequence
  Description of Artificial Sequence: Synthetic oligonucleotide
gcagaaugcgaugcggccg

SEQ ID NO: 102016 - RNA, 19 nt, Artificial Sequence
  Description of Artificial Sequence: Synthetic oligonucleotide
aggugacgcucuucugggg

SEQ ID NO: 102017 - RNA, 19 nt, Artificial Sequence
  Description of Artificial Sequence: Synthetic oligonucleotide
ggcagcuagguaauuuucc

SEQ ID NO: 102018 - RNA, 19 nt, Artificial Sequence
  Description of Artificial Sequence: Synthetic oligonucleotide
cacgguauucucugaguga

SEQ ID NO: 102019 - RNA, 19 nt, Artificial Sequence
  Description of Artificial Sequence: Synthetic oligonucleotide
cucucucuauaugcacugg

SEQ ID NO: 102020 - RNA, 19 nt, Artificial Sequence
  Description of Artificial Sequence: Synthetic oligonucleotide
uaacgggaauagccugugu

SEQ ID NO: 102021 - RNA, 19 nt, Artificial Sequence
  Description of Artificial Sequence: Synthetic oligonucleotide
gaguuaugugaaggaaaca

SEQ ID NO: 102022 - RNA, 19 nt, Artificial Sequence
  Description of Artificial Sequence: Synthetic oligonucleotide
gaaguaccaacgaggcauc

SEQ ID NO: 102023 - RNA, 19 nt, Artificial Sequence
  Description of Artificial Sequence: Synthetic oligonucleotide
ggugucacacauguccuug

SEQ ID NO: 102024 - RNA, 19 nt, Artificial Sequence
  Description of Artificial Sequence: Synthetic oligonucleotide
agcguacgcacuuucccuu

SEQ ID NO: 102025 - RNA, 19 nt, Artificial Sequence
  Description of Artificial Sequence: Synthetic oligonucleotide
aacccacaacagguuacca

SEQ ID NO: 102026 - RNA, 19 nt, Artificial Sequence
  Description of Artificial Sequence: Synthetic oligonucleotide
cagcauuacagaguuaugu

SEQ ID NO: 102027 - RNA, 19 nt, Artificial Sequence
  Description of Artificial Sequence: Synthetic oligonucleotide
uccuccuccuccuccuccu

SEQ ID NO: 102028 - RNA, 19 nt, Artificial Sequence
  Description of Artificial Sequence: Synthetic oligonucleotide
aaucaucguuuuacacaca

SEQ ID NO: 102029 - RNA, 19 nt, Artificial Sequence
  Description of Artificial Sequence: Synthetic oligonucleotide
aaguaccaacgaggcauca

SEQ ID NO: 102030 - RNA, 19 nt, Artificial Sequence
  Description of Artificial Sequence: Synthetic oligonucleotide
cacucaggcacccagcacu

SEQ ID NO: 102031 - RNA, 19 nt, Artificial Sequence
  Description of Artificial Sequence: Synthetic oligonucleotide
cauuaucauccgcugaggu

SEQ ID NO: 102032 - RNA, 19 nt, Artificial Sequence
  Description of Artificial Sequence: Synthetic oligonucleotide
gcugauaacgaugacugua

SEQ ID NO: 102033 - RNA, 19 nt, Artificial Sequence
  Description of Artificial Sequence: Synthetic oligonucleotide
uccauucgacugcgaugcc

SEQ ID NO: 102034 - RNA, 19 nt, Artificial Sequence
  Description of Artificial Sequence: Synthetic oligonucleotide
gacaugccuccuugacuac

SEQ ID NO: 102035 - RNA, 19 nt, Artificial Sequence
  Description of Artificial Sequence: Synthetic oligonucleotide
cauagcuauauaaggucau

SEQ ID NO: 102036 - RNA, 19 nt, Artificial Sequence
  Description of Artificial Sequence: Synthetic oligonucleotide
gguuggguucucauaacca

SEQ ID NO: 102037 - RNA, 19 nt, Artificial Sequence
  Description of Artificial Sequence: Synthetic oligonucleotide
cuccuccuccuccuccucc

SEQ ID NO: 102038 - RNA, 19 nt, Artificial Sequence
  Description of Artificial Sequence: Synthetic oligonucleotide
accuccuccuccuccuccu

SEQ ID NO: 102039 - RNA, 19 nt, Artificial Sequence
  Description of Artificial Sequence: Synthetic oligonucleotide
ccauauugccucuuccuca

SEQ ID NO: 102040 - RNA, 19 nt, Artificial Sequence
  Description of Artificial Sequence: Synthetic oligonucleotide
gaacggcgggaucuccuca

SEQ ID NO: 102041 - RNA, 19 nt, Artificial Sequence
  Description of Artificial Sequence: Synthetic oligonucleotide
augcgaugcggccguggug

SEQ ID NO: 102042 - RNA, 19 nt, Artificial Sequence
  Description of Artificial Sequence: Synthetic oligonucleotide
aagcgggcgugcucauuau

SEQ ID NO: 102043 - RNA, 19 nt, Artificial Sequence
  Description of Artificial Sequence: Synthetic oligonucleotide
uucgacugcgaugccgaau

SEQ ID NO: 102044 - RNA, 19 nt, Artificial Sequence
  Description of Artificial Sequence: Synthetic oligonucleotide
gaggccuuauggcaccacu

SEQ ID NO: 102045 - RNA, 19 nt, Artificial Sequence
  Description of Artificial Sequence: Synthetic oligonucleotide
gaaggcgcccaugaauucu

SEQ ID NO: 102046 - RNA, 19 nt, Artificial Sequence
  Description of Artificial Sequence: Synthetic oligonucleotide
uacuaacuauaggcuaguu

SEQ ID NO: 102047 - RNA, 19 nt, Artificial Sequence
  Description of Artificial Sequence: Synthetic oligonucleotide
ccauucgacugcgaugccg

SEQ ID NO: 102048 - RNA, 19 nt, Artificial Sequence
  Description of Artificial Sequence: Synthetic oligonucleotide
gauuucaucugggcagccu

SEQ ID NO: 102049 - RNA, 19 nt, Artificial Sequence
  Description of Artificial Sequence: Synthetic oligonucleotide
cucuucuagcccacccgca

SEQ ID NO: 102050 - RNA, 19 nt, Artificial Sequence
  Description of Artificial Sequence: Synthetic oligonucleotide
uuguucaggugacgcucuu

SEQ ID NO: 102051 - RNA, 19 nt, Artificial Sequence
  Description of Artificial Sequence: Synthetic oligonucleotide
guaacggcgcagagccugc

SEQ ID NO: 102052 - RNA, 19 nt, Artificial Sequence
  Description of Artificial Sequence: Synthetic oligonucleotide
ccaaagguuaugagcauua

SEQ ID NO: 102053 - RNA, 19 nt, Artificial Sequence
  Description of Artificial Sequence: Synthetic oligonucleotide
uccuccuccuccuccucuu

SEQ ID NO: 102054 - RNA, 19 nt, Artificial Sequence
  Description of Artificial Sequence: Synthetic oligonucleotide
cucacgguauucucugagu

SEQ ID NO: 102055 - RNA, 19 nt, Artificial Sequence
  Description of Artificial Sequence: Synthetic oligonucleotide
caaagguuaugagcauuaa

SEQ ID NO: 102056 - RNA, 19 nt, Artificial Sequence
  Description of Artificial Sequence: Synthetic oligonucleotide
gaguagagugagguaccaa

SEQ ID NO: 102057 - RNA, 19 nt, Artificial Sequence
  Description of Artificial Sequence: Synthetic oligonucleotide
auguaugaugaggccuuau

SEQ ID NO: 102058 - RNA, 19 nt, Artificial Sequence
  Description of Artificial Sequence: Synthetic oligonucleotide
cugcgaugccgaauuucca

SEQ ID NO: 102059 - RNA, 19 nt, Artificial Sequence
  Description of Artificial Sequence: Synthetic oligonucleotide
cgccauauauaaagcguac

SEQ ID NO: 102060 - RNA, 19 nt, Artificial Sequence
  Description of Artificial Sequence: Synthetic oligonucleotide
gauguaugaugaggccuua

SEQ ID NO: 102061 - RNA, 19 nt, Artificial Sequence
  Description of Artificial Sequence: Synthetic oligonucleotide
auucgacugcgaugccgaa

SEQ ID NO: 102062 - RNA, 19 nt, Artificial Sequence
  Description of Artificial Sequence: Synthetic oligonucleotide
ggaacggcgggaucuccuc

SEQ ID NO: 102063 - RNA, 19 nt, Artificial Sequence
  Description of Artificial Sequence: Synthetic oligonucleotide
ggcggucuuuauucucagc

SEQ ID NO: 102064 - RNA, 19 nt, Artificial Sequence
  Description of Artificial Sequence: Synthetic oligonucleotide
gggaauagccuguguauau

SEQ ID NO: 102065 - RNA, 19 nt, Artificial Sequence
  Description of Artificial Sequence: Synthetic oligonucleotide
cagaaugcgaugcggccgu

SEQ ID NO: 102066 - RNA, 19 nt, Artificial Sequence
  Description of Artificial Sequence: Synthetic oligonucleotide
gcacguaacggcgcagagc

SEQ ID NO: 102067 - RNA, 19 nt, Artificial Sequence
  Description of Artificial Sequence: Synthetic oligonucleotide
gggcgugcucauuaucauc

SEQ ID NO: 102068 - RNA, 19 nt, Artificial Sequence
  Description of Artificial Sequence: Synthetic oligonucleotide
cguaacggcgcagagccug

SEQ ID NO: 102069 - RNA, 19 nt, Artificial Sequence
  Description of Artificial Sequence: Synthetic oligonucleotide
ggaguagagugagguacca

SEQ ID NO: 102070 - RNA, 19 nt, Artificial Sequence
  Description of Artificial Sequence: Synthetic oligonucleotide
ggaauagccuguguauaua

SEQ ID NO: 102071 - RNA, 19 nt, Artificial Sequence
  Description of Artificial Sequence: Synthetic oligonucleotide
gcguacgcacuuucccuug

SEQ ID NO: 102072 - RNA, 19 nt, Artificial Sequence
  Description of Artificial Sequence: Synthetic oligonucleotide
uaacggcgcagagccugca

SEQ ID NO: 102073 - RNA, 19 nt, Artificial Sequence
  Description of Artificial Sequence: Synthetic oligonucleotide
guggaacggcgggaucucc

SEQ ID NO: 102074 - RNA, 19 nt, Artificial Sequence
  Description of Artificial Sequence: Synthetic oligonucleotide
ccgccauauauaaagcgua

SEQ ID NO: 102075 - RNA, 19 nt, Artificial Sequence
  Description of Artificial Sequence: Synthetic oligonucleotide
cgaaguaccaacgaggcau

SEQ ID NO: 102076 - RNA, 19 nt, Artificial Sequence
  Description of Artificial Sequence: Synthetic oligonucleotide
agcuauccgccggcguuca

SEQ ID NO: 102077 - RNA, 19 nt, Artificial Sequence
  Description of Artificial Sequence: Synthetic oligonucleotide
ggauuucaucugggcagcc

SEQ ID NO: 102078 - RNA, 19 nt, Artificial Sequence
  Description of Artificial Sequence: Synthetic oligonucleotide
gccgccauauauaaagcgu

SEQ ID NO: 102079 - RNA, 19 nt, Artificial Sequence
  Description of Artificial Sequence: Synthetic oligonucleotide
cacgcacguaacggcgcag

SEQ ID NO: 102080 - RNA, 19 nt, Artificial Sequence
  Description of Artificial Sequence: Synthetic oligonucleotide
cagcaugccauagcuauau

SEQ ID NO: 102081 - RNA, 19 nt, Artificial Sequence
  Description of Artificial Sequence: Synthetic oligonucleotide
ggauguaugaugaggccuu

SEQ ID NO: 102082 - RNA, 19 nt, Artificial Sequence
  Description of Artificial Sequence: Synthetic oligonucleotide
agaaugcgaugcggccgug

SEQ ID NO: 102083 - RNA, 19 nt, Artificial Sequence
  Description of Artificial Sequence: Synthetic oligonucleotide
ccacguaaggaacuuugua

SEQ ID NO: 102084 - RNA, 19 nt, Artificial Sequence
  Description of Artificial Sequence: Synthetic oligonucleotide
cagacagcuuuaacaucgu

SEQ ID NO: 102085 - RNA, 19 nt, Artificial Sequence
  Description of Artificial Sequence: Synthetic oligonucleotide
caaugacuagcaagccaau

SEQ ID NO: 102086 - RNA, 19 nt, Artificial Sequence
  Description of Artificial Sequence: Synthetic oligonucleotide
gccuuauggcaccacuggu

SEQ ID NO: 102087 - RNA, 19 nt, Artificial Sequence
  Description of Artificial Sequence: Synthetic oligonucleotide
cguuuuacacacagccaua

SEQ ID NO: 102088 - RNA, 19 nt, Artificial Sequence
  Description of Artificial Sequence: Synthetic oligonucleotide
cagccaacacaugcuggua

SEQ ID NO: 102089 - RNA, 19 nt, Artificial Sequence
  Description of Artificial Sequence: Synthetic oligonucleotide
acguaacggcgcagagccu

SEQ ID NO: 102090 - RNA, 19 nt, Artificial Sequence
  Description of Artificial Sequence: Synthetic oligonucleotide
cguaacgggaauagccugu

SEQ ID NO: 102091 - RNA, 19 nt, Artificial Sequence
  Description of Artificial Sequence: Synthetic oligonucleotide
cuccuccuccuccuccucu

SEQ ID NO: 102092 - RNA, 19 nt, Artificial Sequence
  Description of Artificial Sequence: Synthetic oligonucleotide
ccccgucaucgccuccugg

SEQ ID NO: 102093 - RNA, 19 nt, Artificial Sequence
  Description of Artificial Sequence: Synthetic oligonucleotide
ggguucucauaaccauggu

SEQ ID NO: 102094 - RNA, 19 nt, Artificial Sequence
  Description of Artificial Sequence: Synthetic oligonucleotide
cuauccgccggcguucauu

SEQ ID NO: 102095 - RNA, 19 nt, Artificial Sequence
  Description of Artificial Sequence: Synthetic oligonucleotide
ccuccuccuccuccuccuc

SEQ ID NO: 102096 - RNA, 19 nt, Artificial Sequence
  Description of Artificial Sequence: Synthetic oligonucleotide
cacucgggccaaguggguu

SEQ ID NO: 102097 - RNA, 19 nt, Artificial Sequence
  Description of Artificial Sequence: Synthetic oligonucleotide
gccggcguucauucagcau

SEQ ID NO: 102098 - RNA, 19 nt, Artificial Sequence
  Description of Artificial Sequence: Synthetic oligonucleotide
gcaagccaauaagggcacu

SEQ ID NO: 102099 - RNA, 19 nt, Artificial Sequence
  Description of Artificial Sequence: Synthetic oligonucleotide
gcccggcagggccccguca

SEQ ID NO: 102100 - RNA, 19 nt, Artificial Sequence
  Description of Artificial Sequence: Synthetic oligonucleotide
cgccggcguucauucagca

SEQ ID NO: 102101 - RNA, 19 nt, Artificial Sequence
  Description of Artificial Sequence: Synthetic oligonucleotide
ccacucgggccaagugggu

SEQ ID NO: 102102 - RNA, 19 nt, Artificial Sequence
  Description of Artificial Sequence: Synthetic oligonucleotide
cgggcgugcucauuaucau

SEQ ID NO: 102103 - RNA, 19 nt, Artificial Sequence
  Description of Artificial Sequence: Synthetic oligonucleotide
gcuauccgccggcguucau

SEQ ID NO: 102104 - RNA, 19 nt, Artificial Sequence
  Description of Artificial Sequence: Synthetic oligonucleotide
cgacugcgaugccgaauuu

SEQ ID NO: 102105 - RNA, 19 nt, Artificial Sequence
  Description of Artificial Sequence: Synthetic oligonucleotide
aauauagaagaucaaaggc

SEQ ID NO: 102106 - RNA, 19 nt, Artificial Sequence
  Description of Artificial Sequence: Synthetic oligonucleotide
aacaacuagcuuuugugcc

SEQ ID NO: 102107 - RNA, 19 nt, Artificial Sequence
  Description of Artificial Sequence: Synthetic oligonucleotide
uguaaggaaucuaaggagg

SEQ ID NO: 102108 - RNA, 19 nt, Artificial Sequence
  Description of Artificial Sequence: Synthetic oligonucleotide
uuguaggucaugaaagucg

SEQ ID NO: 102109 - RNA, 19 nt, Artificial Sequence
  Description of Artificial Sequence: Synthetic oligonucleotide
agauucgucaaucucagag

SEQ ID NO: 102110 - RNA, 19 nt, Artificial Sequence
  Description of Artificial Sequence: Synthetic oligonucleotide
cacgauauaggucaggucc

SEQ ID NO: 102111 - RNA, 19 nt, Artificial Sequence
  Description of Artificial Sequence: Synthetic oligonucleotide
acuaguacuccauugugac

SEQ ID NO: 102112 - RNA, 19 nt, Artificial Sequence
  Description of Artificial Sequence: Synthetic oligonucleotide
agcaagagugucuuggggc

SEQ ID NO: 102113 - RNA, 19 nt, Artificial Sequence
  Description of Artificial Sequence: Synthetic oligonucleotide
aaaaugcaagaagugggcc

SEQ ID NO: 102114 - RNA, 19 nt, Artificial Sequence
  Description of Artificial Sequence: Synthetic oligonucleotide
guaauuagcagcaaagcgc

SEQ ID NO: 102115 - RNA, 19 nt, Artificial Sequence
  Description of Artificial Sequence: Synthetic oligonucleotide
uaggcaacaggaauuacgc

SEQ ID NO: 102116 - RNA, 19 nt, Artificial Sequence
  Description of Artificial Sequence: Synthetic oligonucleotide
augaaagucgcuguaacgg

SEQ ID NO: 102117 - RNA, 19 nt, Artificial Sequence
  Description of Artificial Sequence: Synthetic oligonucleotide
gaaaggacuguuguuauag

SEQ ID NO: 102118 - RNA, 19 nt, Artificial Sequence
  Description of Artificial Sequence: Synthetic oligonucleotide
ucuaccaagcuucuggagu

SEQ ID NO: 102119 - RNA, 19 nt, Artificial Sequence
  Description of Artificial Sequence: Synthetic oligonucleotide
aauauugcuggucccaaaa

SEQ ID NO: 102120 - RNA, 19 nt, Artificial Sequence
  Description of Artificial Sequence: Synthetic oligonucleotide
uguaggucaugaaagucgc

SEQ ID NO: 102121 - RNA, 19 nt, Artificial Sequence
  Description of Artificial Sequence: Synthetic oligonucleotide
aggguuuugacauugccca

SEQ ID NO: 102122 - RNA, 19 nt, Artificial Sequence
  Description of Artificial Sequence: Synthetic oligonucleotide
uccugaauauugcuggucc

SEQ ID NO: 102123 - RNA, 19 nt, Artificial Sequence
  Description of Artificial Sequence: Synthetic oligonucleotide
aucacggacaaacaacuag

SEQ ID NO: 102124 - RNA, 19 nt, Artificial Sequence
  Description of Artificial Sequence: Synthetic oligonucleotide
gagaguacaguuuguguag

SEQ ID NO: 102125 - RNA, 19 nt, Artificial Sequence
  Description of Artificial Sequence: Synthetic oligonucleotide
auauagaagaucaaaggca

SEQ ID NO: 102126 - RNA, 19 nt, Artificial Sequence
  Description of Artificial Sequence: Synthetic oligonucleotide
uaggguuuugacauugccc

SEQ ID NO: 102127 - RNA, 19 nt, Artificial Sequence
  Description of Artificial Sequence: Synthetic oligonucleotide
caggaauuacgcuuggugc

SEQ ID NO: 102128 - RNA, 19 nt, Artificial Sequence
  Description of Artificial Sequence: Synthetic oligonucleotide
agguuuaggguuuugacau

SEQ ID NO: 102129 - RNA, 19 nt, Artificial Sequence
  Description of Artificial Sequence: Synthetic oligonucleotide
acaaucacggacaaacaac

SEQ ID NO: 102130 - RNA, 19 nt, Artificial Sequence
  Description of Artificial Sequence: Synthetic oligonucleotide
ucacgagucaagcauguga

SEQ ID NO: 102131 - RNA, 19 nt, Artificial Sequence
  Description of Artificial Sequence: Synthetic oligonucleotide
agauuaaccagagaguaca

SEQ ID NO: 102132 - RNA, 19 nt, Artificial Sequence
  Description of Artificial Sequence: Synthetic oligonucleotide
cagaguaagggccuguggg

SEQ ID NO: 102133 - RNA, 19 nt, Artificial Sequence
  Description of Artificial Sequence: Synthetic oligonucleotide
uuaggguuuugacauugcc

SEQ ID NO: 102134 - RNA, 19 nt, Artificial Sequence
  Description of Artificial Sequence: Synthetic oligonucleotide
acaacuaguacuccauugu

SEQ ID NO: 102135 - RNA, 19 nt, Artificial Sequence
  Description of Artificial Sequence: Synthetic oligonucleotide
cuagacugcacauggcagg

SEQ ID NO: 102136 - RNA, 19 nt, Artificial Sequence
  Description of Artificial Sequence: Synthetic oligonucleotide
ucuaggaugugcccaaggu

SEQ ID NO: 102137 - RNA, 19 nt, Artificial Sequence
  Description of Artificial Sequence: Synthetic oligonucleotide
uccgugacagcauagaguu

SEQ ID NO: 102138 - RNA, 19 nt, Artificial Sequence
  Description of Artificial Sequence: Synthetic oligonucleotide
uuacgcuuggugcuggcag

SEQ ID NO: 102139 - RNA, 19 nt, Artificial Sequence
  Description of Artificial Sequence: Synthetic oligonucleotide
uccagauuaaccagagagu

SEQ ID NO: 102140 - RNA, 19 nt, Artificial Sequence
  Description of Artificial Sequence: Synthetic oligonucleotide
auacuuagaggguuguuga

SEQ ID NO: 102141 - RNA, 19 nt, Artificial Sequence
  Description of Artificial Sequence: Synthetic oligonucleotide
agcauuaggaggaugaacu

SEQ ID NO: 102142 - RNA, 19 nt, Artificial Sequence
  Description of Artificial Sequence: Synthetic oligonucleotide
cuuagcaucacaaugacuu

SEQ ID NO: 102143 - RNA, 19 nt, Artificial Sequence
  Description of Artificial Sequence: Synthetic oligonucleotide
uguagugguucagagaagu

SEQ ID NO: 102144 - RNA, 19 nt, Artificial Sequence
  Description of Artificial Sequence: Synthetic oligonucleotide
cuugacacggcuggaaugg

SEQ ID NO: 102145 - RNA, 19 nt, Artificial Sequence
  Description of Artificial Sequence: Synthetic oligonucleotide
uagguuguccacaacuagu

SEQ ID NO: 102146 - RNA, 19 nt, Artificial Sequence
  Description of Artificial Sequence: Synthetic oligonucleotide
gauucgucaaucucagaga

SEQ ID NO: 102147 - RNA, 19 nt, Artificial Sequence
  Description of Artificial Sequence: Synthetic oligonucleotide
ucguaauuagcagcaaagc

SEQ ID NO: 102148 - RNA, 19 nt, Artificial Sequence
  Description of Artificial Sequence: Synthetic oligonucleotide
cacgagucaagcaugugac

SEQ ID NO: 102149 - RNA, 19 nt, Artificial Sequence
  Description of Artificial Sequence: Synthetic oligonucleotide
auauugcuggucccaaaag

SEQ ID NO: 102150 - RNA, 19 nt, Artificial Sequence
  Description of Artificial Sequence: Synthetic oligonucleotide
uguagguuguccacaacua

SEQ ID NO: 102151 - RNA, 19 nt, Artificial Sequence
  Description of Artificial Sequence: Synthetic oligonucleotide
aacggugcuugauugucca

SEQ ID NO: 102152 - RNA, 19 nt, Artificial Sequence
  Description of Artificial Sequence: Synthetic oligonucleotide
ugaaagucgcuguaacggu

SEQ ID NO: 102153 - RNA, 19 nt, Artificial Sequence
  Description of Artificial Sequence: Synthetic oligonucleotide
agguacucuaucuuuggga

SEQ ID NO: 102154 - RNA, 19 nt, Artificial Sequence
  Description of Artificial Sequence: Synthetic oligonucleotide
acaacuagcuuuugugccu

SEQ ID NO: 102155 - RNA, 19 nt, Artificial Sequence
  Description of Artificial Sequence: Synthetic oligonucleotide
auccagccgguaucuaucc

SEQ ID NO: 102156 - RNA, 19 nt, Artificial Sequence
  Description of Artificial Sequence: Synthetic oligonucleotide
ugucagguagcugucacga

SEQ ID NO: 102157 - RNA, 19 nt, Artificial Sequence
  Description of Artificial Sequence: Synthetic oligonucleotide
aacuaguacuccauuguga

SEQ ID NO: 102158 - RNA, 19 nt, Artificial Sequence
  Description of Artificial Sequence: Synthetic oligonucleotide
agguguaugagguuguaua

SEQ ID NO: 102159 - RNA, 19 nt, Artificial Sequence
  Description of Artificial Sequence: Synthetic oligonucleotide
uucacagauucgucaaucu

SEQ ID NO: 102160 - RNA, 19 nt, Artificial Sequence
  Description of Artificial Sequence: Synthetic oligonucleotide
uuaucuccaccugaugaag

SEQ ID NO: 102161 - RNA, 19 nt, Artificial Sequence
  Description of Artificial Sequence: Synthetic oligonucleotide
guagguuguccacaacuag

SEQ ID NO: 102162 - RNA, 19 nt, Artificial Sequence
  Description of Artificial Sequence: Synthetic oligonucleotide
aguugcuccugaauauugc

SEQ ID NO: 102163 - RNA, 19 nt, Artificial Sequence
  Description of Artificial Sequence: Synthetic oligonucleotide
acgagucaagcaugugacc

SEQ ID NO: 102164 - RNA, 19 nt, Artificial Sequence
  Description of Artificial Sequence: Synthetic oligonucleotide
agcucccugccacaaaggg

SEQ ID NO: 102165 - RNA, 19 nt, Artificial Sequence
  Description of Artificial Sequence: Synthetic oligonucleotide
acgauauaggucagguccc

SEQ ID NO: 102166 - RNA, 19 nt, Artificial Sequence
  Description of Artificial Sequence: Synthetic oligonucleotide
auuguagcuaaaguuggcu

SEQ ID NO: 102167 - RNA, 19 nt, Artificial Sequence
  Description of Artificial Sequence: Synthetic oligonucleotide
guguaggccgcucagacuc

SEQ ID NO: 102168 - RNA, 19 nt, Artificial Sequence
  Description of Artificial Sequence: Synthetic oligonucleotide
gacuugaauauagaagauc

SEQ ID NO: 102169 - RNA, 19 nt, Artificial Sequence
  Description of Artificial Sequence: Synthetic oligonucleotide
cauuguagcuaaaguuggc

SEQ ID NO: 102170 - RNA, 19 nt, Artificial Sequence
  Description of Artificial Sequence: Synthetic oligonucleotide
uacuuagaggguuguugag

SEQ ID NO: 102171 - RNA, 19 nt, Artificial Sequence
  Description of Artificial Sequence: Synthetic oligonucleotide
ugguucagagaaguagcgg

SEQ ID NO: 102172 - RNA, 19 nt, Artificial Sequence
  Description of Artificial Sequence: Synthetic oligonucleotide
cuguaacggugcuugauug

SEQ ID NO: 102173 - RNA, 19 nt, Artificial Sequence
  Description of Artificial Sequence: Synthetic oligonucleotide
ugacuuaucuccaccugau

SEQ ID NO: 102174 - RNA, 19 nt, Artificial Sequence
  Description of Artificial Sequence: Synthetic oligonucleotide
uaacggugcuugauugucc

SEQ ID NO: 102175 - RNA, 19 nt, Artificial Sequence
  Description of Artificial Sequence: Synthetic oligonucleotide
agaguaagggccugugggu

SEQ ID NO: 102176 - RNA, 19 nt, Artificial Sequence
  Description of Artificial Sequence: Synthetic oligonucleotide
ggaacaaggacuuccuuca

SEQ ID NO: 102177 - RNA, 19 nt, Artificial Sequence
  Description of Artificial Sequence: Synthetic oligonucleotide
gagcacccgguccaaaucc

SEQ ID NO: 102178 - RNA, 19 nt, Artificial Sequence
  Description of Artificial Sequence: Synthetic oligonucleotide
caaaucccggacacggcgg

SEQ ID NO: 102179 - RNA, 19 nt, Artificial Sequence
  Description of Artificial Sequence: Synthetic oligonucleotide
caacuaguacuccauugug

SEQ ID NO: 102180 - RNA, 19 nt, Artificial Sequence
  Description of Artificial Sequence: Synthetic oligonucleotide
ugugacuaccuggaaggcc

SEQ ID NO: 102181 - RNA, 19 nt, Artificial Sequence
  Description of Artificial Sequence: Synthetic oligonucleotide
ugucacgagucaagcaugu

SEQ ID NO: 102182 - RNA, 19 nt, Artificial Sequence
  Description of Artificial Sequence: Synthetic oligonucleotide
gauuaaccagagaguacag

SEQ ID NO: 102183 - RNA, 19 nt, Artificial Sequence
  Description of Artificial Sequence: Synthetic oligonucleotide
ucugcgccacgauauaggu

SEQ ID NO: 102184 - RNA, 19 nt, Artificial Sequence
  Description of Artificial Sequence: Synthetic oligonucleotide
gguggcgugcacuagccgg

SEQ ID NO: 102185 - RNA, 19 nt, Artificial Sequence
  Description of Artificial Sequence: Synthetic oligonucleotide
uccccauaggacuuccucu

SEQ ID NO: 102186 - RNA, 19 nt, Artificial Sequence
  Description of Artificial Sequence: Synthetic oligonucleotide
agugucuuggggcgcagug

SEQ ID NO: 102187 - RNA, 19 nt, Artificial Sequence
  Description of Artificial Sequence: Synthetic oligonucleotide
acggcuggaauggaucagc

SEQ ID NO: 102188 - RNA, 19 nt, Artificial Sequence
  Description of Artificial Sequence: Synthetic oligonucleotide
ucaaggguugcgccuucag

SEQ ID NO: 102189 - RNA, 19 nt, Artificial Sequence
  Description of Artificial Sequence: Synthetic oligonucleotide
acuagacugcacauggcag

SEQ ID NO: 102190 - RNA, 19 nt, Artificial Sequence
  Description of Artificial Sequence: Synthetic oligonucleotide
guuuguguaggccgcucag

SEQ ID NO: 102191 - RNA, 19 nt, Artificial Sequence
  Description of Artificial Sequence: Synthetic oligonucleotide
cagguuuaggguuuugaca

SEQ ID NO: 102192 - RNA, 19 nt, Artificial Sequence
  Description of Artificial Sequence: Synthetic oligonucleotide
ugcgcuccagugaggagag

SEQ ID NO: 102193 - RNA, 19 nt, Artificial Sequence
  Description of Artificial Sequence: Synthetic oligonucleotide
gacggcacgggacacucug

SEQ ID NO: 102194 - RNA, 19 nt, Artificial Sequence
  Description of Artificial Sequence: Synthetic oligonucleotide
aauggguaguggauguagu

SEQ ID NO: 102195 - RNA, 19 nt, Artificial Sequence
  Description of Artificial Sequence: Synthetic oligonucleotide
gaauuacgcuuggugcugg

SEQ ID NO: 102196 - RNA, 19 nt, Artificial Sequence
  Description of Artificial Sequence: Synthetic oligonucleotide
guagcugucacgagucaag

SEQ ID NO: 102197 - RNA, 19 nt, Artificial Sequence
  Description of Artificial Sequence: Synthetic oligonucleotide
cacaaugacuuaucuccac

SEQ ID NO: 102198 - RNA, 19 nt, Artificial Sequence
  Description of Artificial Sequence: Synthetic oligonucleotide
caugcagcacgaaguacac

SEQ ID NO: 102199 - RNA, 19 nt, Artificial Sequence
  Description of Artificial Sequence: Synthetic oligonucleotide
agaaaauaggcaacaggaa

SEQ ID NO: 102200 - RNA, 19 nt, Artificial Sequence
  Description of Artificial Sequence: Synthetic oligonucleotide
gucuaggaugugcccaagg

SEQ ID NO: 102201 - RNA, 19 nt, Artificial Sequence
  Description of Artificial Sequence: Synthetic oligonucleotide
uuagcaucacaaugacuua

SEQ ID NO: 102202 - RNA, 19 nt, Artificial Sequence
  Description of Artificial Sequence: Synthetic oligonucleotide
gacugcacucaacacuuca

SEQ ID NO: 102203 - RNA, 19 nt, Artificial Sequence
  Description of Artificial Sequence: Synthetic oligonucleotide
uaggugaacuugacacggc

SEQ ID NO: 102204 - RNA, 19 nt, Artificial Sequence
  Description of Artificial Sequence: Synthetic oligonucleotide
aagcggacggcacgggaca

SEQ ID NO: 102205 - RNA, 19 nt, Artificial Sequence
  Description of Artificial Sequence: Synthetic oligonucleotide
ugagagccgggagucauca

SEQ ID NO: 102206 - RNA, 19 nt, Artificial Sequence
  Description of Artificial Sequence: Synthetic oligonucleotide
ugagcacccgguccaaauc

SEQ ID NO: 102207 - RNA, 19 nt, Artificial Sequence
  Description of Artificial Sequence: Synthetic oligonucleotide
caaucacggacaaacaacu

SEQ ID NO: 102208 - RNA, 19 nt, Artificial Sequence
  Description of Artificial Sequence: Synthetic oligonucleotide
gagucaucaaccuucuuuu

SEQ ID NO: 102209 - RNA, 19 nt, Artificial Sequence
  Description of Artificial Sequence: Synthetic oligonucleotide
cacagcgccauaacaccag

SEQ ID NO: 102210 - RNA, 19 nt, Artificial Sequence
  Description of Artificial Sequence: Synthetic oligonucleotide
ugguggggcaagcauacuu

SEQ ID NO: 102211 - RNA, 19 nt, Artificial Sequence
  Description of Artificial Sequence: Synthetic oligonucleotide
cacaaucacggacaaacaa

SEQ ID NO: 102212 - RNA, 19 nt, Artificial Sequence
  Description of Artificial Sequence: Synthetic oligonucleotide
uaagguacuuaaggcgaca

SEQ ID NO: 102213 - RNA, 19 nt, Artificial Sequence
  Description of Artificial Sequence: Synthetic oligonucleotide
cacgggacacucugguggg

SEQ ID NO: 102214 - RNA, 19 nt, Artificial Sequence
  Description of Artificial Sequence: Synthetic oligonucleotide
cauuaggaggaugaacuca

SEQ ID NO: 102215 - RNA, 19 nt, Artificial Sequence
  Description of Artificial Sequence: Synthetic oligonucleotide
uuuucucggcucucagcac

SEQ ID NO: 102216 - RNA, 19 nt, Artificial Sequence
  Description of Artificial Sequence: Synthetic oligonucleotide
ccagcuucguaauuagcag

SEQ ID NO: 102217 - RNA, 19 nt, Artificial Sequence
  Description of Artificial Sequence: Synthetic oligonucleotide
ugguggcgugcacuagccg

SEQ ID NO: 102218 - RNA, 19 nt, Artificial Sequence
  Description of Artificial Sequence: Synthetic oligonucleotide
ggcgacacaagggaagcgg

SEQ ID NO: 102219 - RNA, 19 nt, Artificial Sequence
  Description of Artificial Sequence: Synthetic oligonucleotide
aagguguaugagguuguau

SEQ ID NO: 102220 - RNA, 19 nt, Artificial Sequence
  Description of Artificial Sequence: Synthetic oligonucleotide
guaugagguuguauaggug

SEQ ID NO: 102221 - RNA, 19 nt, Artificial Sequence
  Description of Artificial Sequence: Synthetic oligonucleotide
augguaggcugccuaugcu

SEQ ID NO: 102222 - RNA, 19 nt, Artificial Sequence
  Description of Artificial Sequence: Synthetic oligonucleotide
gucgugacccugcauguca

SEQ ID NO: 102223 - RNA, 19 nt, Artificial Sequence
  Description of Artificial Sequence: Synthetic oligonucleotide
cuucguaauuagcagcaaa

SEQ ID NO: 102224 - RNA, 19 nt, Artificial Sequence
  Description of Artificial Sequence: Synthetic oligonucleotide
ugaacucaacacacauguu

SEQ ID NO: 102225 - RNA, 19 nt, Artificial Sequence
  Description of Artificial Sequence: Synthetic oligonucleotide
agcugucacgagucaagca

SEQ ID NO: 102226 - RNA, 19 nt, Artificial Sequence
  Description of Artificial Sequence: Synthetic oligonucleotide
gggagagcacuuuggugcg

SEQ ID NO: 102227 - RNA, 19 nt, Artificial Sequence
  Description of Artificial Sequence: Synthetic oligonucleotide
ugggucugacgcagggagc

SEQ ID NO: 102228 - RNA, 19 nt, Artificial Sequence
  Description of Artificial Sequence: Synthetic oligonucleotide
ggggcaagcauacuucuuc

SEQ ID NO: 102229 - RNA, 19 nt, Artificial Sequence
  Description of Artificial Sequence: Synthetic oligonucleotide
aggguugcgccuucaggcu

SEQ ID NO: 102230 - RNA, 19 nt, Artificial Sequence
  Description of Artificial Sequence: Synthetic oligonucleotide
gaaaggacguggagguuuc

SEQ ID NO: 102231 - RNA, 19 nt, Artificial Sequence
  Description of Artificial Sequence: Synthetic oligonucleotide
aggcaacaggaauuacgcu

SEQ ID NO: 102232 - RNA, 19 nt, Artificial Sequence
  Description of Artificial Sequence: Synthetic oligonucleotide
acaagggacugcacucaac

SEQ ID NO: 102233 - RNA, 19 nt, Artificial Sequence
  Description of Artificial Sequence: Synthetic oligonucleotide
uuagaggguuguugagcaa

SEQ ID NO: 102234 - RNA, 19 nt, Artificial Sequence
  Description of Artificial Sequence: Synthetic oligonucleotide
acggugcuugauuguccac

SEQ ID NO: 102235 - RNA, 19 nt, Artificial Sequence
  Description of Artificial Sequence: Synthetic oligonucleotide
ugugcgcuccagugaggag

SEQ ID NO: 102236 - RNA, 19 nt, Artificial Sequence
  Description of Artificial Sequence: Synthetic oligonucleotide
ucuucugcgccacgauaua

SEQ ID NO: 102237 - RNA, 19 nt, Artificial Sequence
  Description of Artificial Sequence: Synthetic oligonucleotide
cccggauuugcuuagcauc

SEQ ID NO: 102238 - RNA, 19 nt, Artificial Sequence
  Description of Artificial Sequence: Synthetic oligonucleotide
cagacucucuaggaaguug

SEQ ID NO: 102239 - RNA, 19 nt, Artificial Sequence
  Description of Artificial Sequence: Synthetic oligonucleotide
gacguggagguuuccaggu

SEQ ID NO: 102240 - RNA, 19 nt, Artificial Sequence
  Description of Artificial Sequence: Synthetic oligonucleotide
aaucacggacaaacaacua

SEQ ID NO: 102241 - RNA, 19 nt, Artificial Sequence
  Description of Artificial Sequence: Synthetic oligonucleotide
uguaggccgcucagacucu

SEQ ID NO: 102242 - RNA, 19 nt, Artificial Sequence
  Description of Artificial Sequence: Synthetic oligonucleotide
ggaauuacgcuuggugcug

SEQ ID NO: 102243 - RNA, 19 nt, Artificial Sequence
  Description of Artificial Sequence: Synthetic oligonucleotide
agguuguccacaacuagua

SEQ ID NO: 102244 - RNA, 19 nt, Artificial Sequence
  Description of Artificial Sequence: Synthetic oligonucleotide
gccgucaugcagcacgaag

SEQ ID NO: 102245 - RNA, 19 nt, Artificial Sequence
  Description of Artificial Sequence: Synthetic oligonucleotide
gcccaugaggucgugaccc

SEQ ID NO: 102246 - RNA, 19 nt, Artificial Sequence
  Description of Artificial Sequence: Synthetic oligonucleotide
ucgugacccugcaugucau

SEQ ID NO: 102247 - RNA, 19 nt, Artificial Sequence
  Description of Artificial Sequence: Synthetic oligonucleotide
ggcaacaggaauuacgcuu

SEQ ID NO: 102248 - RNA, 19 nt, Artificial Sequence
  Description of Artificial Sequence: Synthetic oligonucleotide
gcacuagccggugagcucc

SEQ ID NO: 102249 - RNA, 19 nt, Artificial Sequence
  Description of Artificial Sequence: Synthetic oligonucleotide
gagcccgucagccggaagu

SEQ ID NO: 102250 - RNA, 19 nt, Artificial Sequence
  Description of Artificial Sequence: Synthetic oligonucleotide
cagccgguaucuaucccuc

SEQ ID NO: 102251 - RNA, 19 nt, Artificial Sequence
  Description of Artificial Sequence: Synthetic oligonucleotide
cagagaguacaguuugugu

SEQ ID NO: 102252 - RNA, 19 nt, Artificial Sequence
  Description of Artificial Sequence: Synthetic oligonucleotide
gucaugcagcacgaaguac

SEQ ID NO: 102253 - RNA, 19 nt, Artificial Sequence
  Description of Artificial Sequence: Synthetic oligonucleotide
ggguuuugacauugcccag

SEQ ID NO: 102254 - RNA, 19 nt, Artificial Sequence
  Description of Artificial Sequence: Synthetic oligonucleotide
gugguggcgugcacuagcc

SEQ ID NO: 102255 - RNA, 19 nt, Artificial Sequence
  Description of Artificial Sequence: Synthetic oligonucleotide
gcugucacgagucaagcau

SEQ ID NO: 102256 - RNA, 19 nt, Artificial Sequence
  Description of Artificial Sequence: Synthetic oligonucleotide
aggccacucgcuccagaca

SEQ ID NO: 102257 - RNA, 19 nt, Artificial Sequence
  Description of Artificial Sequence: Synthetic oligonucleotide
caacaagggacugcacuca

SEQ ID NO: 102258 - RNA, 19 nt, Artificial Sequence
  Description of Artificial Sequence: Synthetic oligonucleotide
ggacuuccuucauagacgu

SEQ ID NO: 102259 - RNA, 19 nt, Artificial Sequence
  Description of Artificial Sequence: Synthetic oligonucleotide
ccagauuaaccagagagua

SEQ ID NO: 102260 - RNA, 19 nt, Artificial Sequence
  Description of Artificial Sequence: Synthetic oligonucleotide
ggcggaggccgucaugcag

SEQ ID NO: 102261 - RNA, 19 nt, Artificial Sequence
  Description of Artificial Sequence: Synthetic oligonucleotide
acugccgugccagcaguga

SEQ ID NO: 102262 - RNA, 19 nt, Artificial Sequence
  Description of Artificial Sequence: Synthetic oligonucleotide
aguagcggcggaggccguc

SEQ ID NO: 102263 - RNA, 19 nt, Artificial Sequence
  Description of Artificial Sequence: Synthetic oligonucleotide
agccggaaguacuggucaa

SEQ ID NO: 102264 - RNA, 19 nt, Artificial Sequence
  Description of Artificial Sequence: Synthetic oligonucleotide
gcgugcacuagccggugag

SEQ ID NO: 102265 - RNA, 19 nt, Artificial Sequence
  Description of Artificial Sequence: Synthetic oligonucleotide
gugugcgcuccagugagga

SEQ ID NO: 102266 - RNA, 19 nt, Artificial Sequence
  Description of Artificial Sequence: Synthetic oligonucleotide
gaggcucguucuccgaacu

SEQ ID NO: 102267 - RNA, 19 nt, Artificial Sequence
  Description of Artificial Sequence: Synthetic oligonucleotide
agcggacggcacgggacac

SEQ ID NO: 102268 - RNA, 19 nt, Artificial Sequence
  Description of Artificial Sequence: Synthetic oligonucleotide
ucgcuguaacggugcuuga

SEQ ID NO: 102269 - RNA, 19 nt, Artificial Sequence
  Description of Artificial Sequence: Synthetic oligonucleotide
ggccgcucagacucucuag

SEQ ID NO: 102270 - RNA, 19 nt, Artificial Sequence
  Description of Artificial Sequence: Synthetic oligonucleotide
gucacgagucaagcaugug

SEQ ID NO: 102271 - RNA, 19 nt, Artificial Sequence
  Description of Artificial Sequence: Synthetic oligonucleotide
gcgccauaacaccagcauc

SEQ ID NO: 102272 - RNA, 19 nt, Artificial Sequence
  Description of Artificial Sequence: Synthetic oligonucleotide
uuggugcgguagucaggga

SEQ ID NO: 102273 - RNA, 19 nt, Artificial Sequence
  Description of Artificial Sequence: Synthetic oligonucleotide
gggucugacgcagggagca

SEQ ID NO: 102274 - RNA, 19 nt, Artificial Sequence
  Description of Artificial Sequence: Synthetic oligonucleotide
guugggucugacgcaggga

SEQ ID NO: 102275 - RNA, 19 nt, Artificial Sequence
  Description of Artificial Sequence: Synthetic oligonucleotide
aucccggacacggcggcca

SEQ ID NO: 102276 - RNA, 19 nt, Artificial Sequence
  Description of Artificial Sequence: Synthetic oligonucleotide
acguggagguuuccagguu

SEQ ID NO: 102277 - RNA, 19 nt, Artificial Sequence
  Description of Artificial Sequence: Synthetic oligonucleotide
gcaugugaccacuugcgau

SEQ ID NO: 102278 - RNA, 19 nt, Artificial Sequence
  Description of Artificial Sequence: Synthetic oligonucleotide
gguccccuguaccggcucc

SEQ ID NO: 102279 - RNA, 19 nt, Artificial Sequence
  Description of Artificial Sequence: Synthetic oligonucleotide
guagugguucagagaagua

SEQ ID NO: 102280 - RNA, 19 nt, Artificial Sequence
  Description of Artificial Sequence: Synthetic oligonucleotide
uggcgugcacuagccggug

SEQ ID NO: 102281 - RNA, 19 nt, Artificial Sequence
  Description of Artificial Sequence: Synthetic oligonucleotide
agccccgggcucugguaga

SEQ ID NO: 102282 - RNA, 19 nt, Artificial Sequence
  Description of Artificial Sequence: Synthetic oligonucleotide
ggaugauacuuagaggguu

SEQ ID NO: 102283 - RNA, 19 nt, Artificial Sequence
  Description of Artificial Sequence: Synthetic oligonucleotide
gugcacuagccggugagcu

SEQ ID NO: 102284 - RNA, 19 nt, Artificial Sequence
  Description of Artificial Sequence: Synthetic oligonucleotide
guagcggcggaggccguca

SEQ ID NO: 102285 - RNA, 19 nt, Artificial Sequence
  Description of Artificial Sequence: Synthetic oligonucleotide
ggguugcgccuucaggcuc

SEQ ID NO: 102286 - RNA, 19 nt, Artificial Sequence
  Description of Artificial Sequence: Synthetic oligonucleotide
ccgucaugcagcacgaagu

SEQ ID NO: 102287 - RNA, 19 nt, Artificial Sequence
  Description of Artificial Sequence: Synthetic oligonucleotide
gguagucagggaugauacu

SEQ ID NO: 102288 - RNA, 19 nt, Artificial Sequence
  Description of Artificial Sequence: Synthetic oligonucleotide
ucccggacacggcggccau

SEQ ID NO: 102289 - RNA, 19 nt, Artificial Sequence
  Description of Artificial Sequence: Synthetic oligonucleotide
gggaugauacuuagagggu

SEQ ID NO: 102290 - RNA, 19 nt, Artificial Sequence
  Description of Artificial Sequence: Synthetic oligonucleotide
gcgacacaagggaagcgga

SEQ ID NO: 102291 - RNA, 19 nt, Artificial Sequence
  Description of Artificial Sequence: Synthetic oligonucleotide
cccgguccaaaucccggac

SEQ ID NO: 102292 - RNA, 19 nt, Artificial Sequence
  Description of Artificial Sequence: Synthetic oligonucleotide
guugcgccuucaggcuccc

SEQ ID NO: 102293 - RNA, 19 nt, Artificial Sequence
  Description of Artificial Sequence: Synthetic oligonucleotide
guaggucaugaaagucgcu

SEQ ID NO: 102294 - RNA, 19 nt, Artificial Sequence
  Description of Artificial Sequence: Synthetic oligonucleotide
gcuuagcaucacaaugacu

SEQ ID NO: 102295 - RNA, 19 nt, Artificial Sequence
  Description of Artificial Sequence: Synthetic oligonucleotide
cauagacguugcugagaau

SEQ ID NO: 102296 - RNA, 19 nt, Artificial Sequence
  Description of Artificial Sequence: Synthetic oligonucleotide
ggaguugcuccugaauauu

SEQ ID NO: 102297 - RNA, 19 nt, Artificial Sequence
  Description of Artificial Sequence: Synthetic oligonucleotide
cgugcacuagccggugagc

SEQ ID NO: 102298 - RNA, 19 nt, Artificial Sequence
  Description of Artificial Sequence: Synthetic oligonucleotide
ccgguccaaaucccggaca

SEQ ID NO: 102299 - RNA, 19 nt, Artificial Sequence
  Description of Artificial Sequence: Synthetic oligonucleotide
ggcgugcacuagccgguga

SEQ ID NO: 102300 - RNA, 19 nt, Artificial Sequence
  Description of Artificial Sequence: Synthetic oligonucleotide
ggacugcacucaacacuuc

SEQ ID NO: 102301 - RNA, 19 nt, Artificial Sequence
  Description of Artificial Sequence: Synthetic oligonucleotide
cuaucccucugugguggcu

SEQ ID NO: 102302 - RNA, 19 nt, Artificial Sequence
  Description of Artificial Sequence: Synthetic oligonucleotide
ccccggauuugcuuagcau

SEQ ID NO: 102303 - RNA, 19 nt, Artificial Sequence
  Description of Artificial Sequence: Synthetic oligonucleotide
cugguggggcaagcauacu

SEQ ID NO: 102304 - RNA, 19 nt, Artificial Sequence
  Description of Artificial Sequence: Synthetic oligonucleotide
gcgcuccagugaggagagc

SEQ ID NO: 102305 - RNA, 19 nt, Artificial Sequence
  Description of Artificial Sequence: Synthetic oligonucleotide
ggccgucaugcagcacgaa

SEQ ID NO: 102306 - RNA, 19 nt, Artificial Sequence
  Description of Artificial Sequence: Synthetic oligonucleotide
ggacggcacgggacacucu

SEQ ID NO: 102307 - RNA, 19 nt, Artificial Sequence
  Description of Artificial Sequence: Synthetic oligonucleotide
gcggacggcacgggacacu

SEQ ID NO: 102308 - RNA, 19 nt, Artificial Sequence
  Description of Artificial Sequence: Synthetic oligonucleotide
cgcuguaacggugcuugau

SEQ ID NO: 102309 - RNA, 19 nt, Artificial Sequence
  Description of Artificial Sequence: Synthetic oligonucleotide
cggacacggcggccaucau

SEQ ID NO: 102310 - RNA, 19 nt, Artificial Sequence
  Description of Artificial Sequence: Synthetic oligonucleotide
aauauuguacagcugauac

SEQ ID NO: 102311 - RNA, 19 nt, Artificial Sequence
  Description of Artificial Sequence: Synthetic oligonucleotide
cuuauuauagcucauacgg

SEQ ID NO: 102312 - RNA, 19 nt, Artificial Sequence
  Description of Artificial Sequence: Synthetic oligonucleotide
aauagcaucgcacagucac

SEQ ID NO: 102313 - RNA, 19 nt, Artificial Sequence
  Description of Artificial Sequence: Synthetic oligonucleotide
uuuugcaucacugaggucg

SEQ ID NO: 102314 - RNA, 19 nt, Artificial Sequence
  Description of Artificial Sequence: Synthetic oligonucleotide
aauauaaguagccaugacu

SEQ ID NO: 102315 - RNA, 19 nt, Artificial Sequence
  Description of Artificial Sequence: Synthetic oligonucleotide
uaauuuuacaguuuguaac

SEQ ID NO: 102316 - RNA, 19 nt, Artificial Sequence
  Description of Artificial Sequence: Synthetic oligonucleotide
uuaaagacgauuucugugc

SEQ ID NO: 102317 - RNA, 19 nt, Artificial Sequence
  Description of Artificial Sequence: Synthetic oligonucleotide
uauacuuaccuguacaugu

SEQ ID NO: 102318 - RNA, 19 nt, Artificial Sequence
  Description of Artificial Sequence: Synthetic oligonucleotide
aaggacgaguucuacacgg

SEQ ID NO: 102319 - RNA, 19 nt, Artificial Sequence
  Description of Artificial Sequence: Synthetic oligonucleotide
ucuuauuauagcucauacg

SEQ ID NO: 102320 - RNA, 19 nt, Artificial Sequence
  Description of Artificial Sequence: Synthetic oligonucleotide
ugguguacgagacagcggg

SEQ ID NO: 102321 - RNA, 19 nt, Artificial Sequence
  Description of Artificial Sequence: Synthetic oligonucleotide
aauauacuuaccuguacau

SEQ ID NO: 102322 - RNA, 19 nt, Artificial Sequence
  Description of Artificial Sequence: Synthetic oligonucleotide
cagauauucgcuugaagcg

SEQ ID NO: 102323 - RNA, 19 nt, Artificial Sequence
  Description of Artificial Sequence: Synthetic oligonucleotide
ucucgugcaaaacccaugg

SEQ ID NO: 102324 - RNA, 19 nt, Artificial Sequence
  Description of Artificial Sequence: Synthetic oligonucleotide
aaccacgcuuguuugacac

SEQ ID NO: 102325 - RNA, 19 nt, Artificial Sequence
  Description of Artificial Sequence: Synthetic oligonucleotide
uucaucucgugcaaaaccc

SEQ ID NO: 102326 - RNA, 19 nt, Artificial Sequence
  Description of Artificial Sequence: Synthetic oligonucleotide
acgugaaucgcagagaacg

SEQ ID NO: 102327 - RNA, 19 nt, Artificial Sequence
  Description of Artificial Sequence: Synthetic oligonucleotide
uguucuuaaaggcaauaga

SEQ ID NO: 102328 - RNA, 19 nt, Artificial Sequence
  Description of Artificial Sequence: Synthetic oligonucleotide
aaccuuauugcaucaagga

SEQ ID NO: 102329 - RNA, 19 nt, Artificial Sequence
  Description of Artificial Sequence: Synthetic oligonucleotide
uguauaaccuuauugcauc

SEQ ID NO: 102330 - RNA, 19 nt, Artificial Sequence
  Description of Artificial Sequence: Synthetic oligonucleotide
accaguuacaaaguggcgc

SEQ ID NO: 102331 - RNA, 19 nt, Artificial Sequence
  Description of Artificial Sequence: Synthetic oligonucleotide
uucuuauuauagcucauac

SEQ ID NO: 102332 - RNA, 19 nt, Artificial Sequence
  Description of Artificial Sequence: Synthetic oligonucleotide
accuuauugcaucaaggac

SEQ ID NO: 102333 - RNA, 19 nt, Artificial Sequence
  Description of Artificial Sequence: Synthetic oligonucleotide
aguucuacacgggagauuc

SEQ ID NO: 102334 - RNA, 19 nt, Artificial Sequence
  Description of Artificial Sequence: Synthetic oligonucleotide
ucaaggacgaguucuacac

SEQ ID NO: 102335 - RNA, 19 nt, Artificial Sequence
  Description of Artificial Sequence: Synthetic oligonucleotide
caccaguacauucaaaacc

SEQ ID NO: 102336 - RNA, 19 nt, Artificial Sequence
  Description of Artificial Sequence: Synthetic oligonucleotide
aaugcgagcacggcgacag

SEQ ID NO: 102337 - RNA, 19 nt, Artificial Sequence
  Description of Artificial Sequence: Synthetic oligonucleotide
ugacacaaguuuccgcugg

SEQ ID NO: 102338 - RNA, 19 nt, Artificial Sequence
  Description of Artificial Sequence: Synthetic oligonucleotide
uuauaagccgcacugcguc

SEQ ID NO: 102339 - RNA, 19 nt, Artificial Sequence
  Description of Artificial Sequence: Synthetic oligonucleotide
gacauuguuacuugggcca

SEQ ID NO: 102340 - RNA, 19 nt, Artificial Sequence
  Description of Artificial Sequence: Synthetic oligonucleotide
uacuuaccuguacaugugg

SEQ ID NO: 102341 - RNA, 19 nt, Artificial Sequence
  Description of Artificial Sequence: Synthetic oligonucleotide
agauauucgcuugaagcgg

SEQ ID NO: 102342 - RNA, 19 nt, Artificial Sequence
  Description of Artificial Sequence: Synthetic oligonucleotide
ccagauauucgcuugaagc

SEQ ID NO: 102343 - RNA, 19 nt, Artificial Sequence
  Description of Artificial Sequence: Synthetic oligonucleotide
uauugcaucaaggacgagu

SEQ ID NO: 102344 - RNA, 19 nt, Artificial Sequence
  Description of Artificial Sequence: Synthetic oligonucleotide
cuacacgggagauucacag

SEQ ID NO: 102345 - RNA, 19 nt, Artificial Sequence
  Description of Artificial Sequence: Synthetic oligonucleotide
auauaaguagccaugacuu

SEQ ID NO: 102346 - RNA, 19 nt, Artificial Sequence
  Description of Artificial Sequence: Synthetic oligonucleotide
gguauacagguuuuaaagc

SEQ ID NO: 102347 - RNA, 19 nt, Artificial Sequence
  Description of Artificial Sequence: Synthetic oligonucleotide
acuuacuaaggcaucauug

SEQ ID NO: 102348 - RNA, 19 nt, Artificial Sequence
  Description of Artificial Sequence: Synthetic oligonucleotide
cuuacuaaggcaucauuga

SEQ ID NO: 102349 - RNA, 19 nt, Artificial Sequence
  Description of Artificial Sequence: Synthetic oligonucleotide
gaacgcucccgguucaugg

SEQ ID NO: 102350 - RNA, 19 nt, Artificial Sequence
  Description of Artificial Sequence: Synthetic oligonucleotide
acugcgucgcucucggagc

SEQ ID NO: 102351 - RNA, 19 nt, Artificial Sequence
  Description of Artificial Sequence: Synthetic oligonucleotide
ugcuuauuauccccguuga

SEQ ID NO: 102352 - RNA, 19 nt, Artificial Sequence
  Description of Artificial Sequence: Synthetic oligonucleotide
guagcgcccaaucaaugcg

SEQ ID NO: 102353 - RNA, 19 nt, Artificial Sequence
  Description of Artificial Sequence: Synthetic oligonucleotide
gugguuuucuaccuagaag

SEQ ID NO: 102354 - RNA, 19 nt, Artificial Sequence
  Description of Artificial Sequence: Synthetic oligonucleotide
ggaagaaauuguuuagaag

SEQ ID NO: 102355 - RNA, 19 nt, Artificial Sequence
  Description of Artificial Sequence: Synthetic oligonucleotide
gaagcgacgcugcuucugg

SEQ ID NO: 102356 - RNA, 19 nt, Artificial Sequence
  Description of Artificial Sequence: Synthetic oligonucleotide
uuuugcacgggccucuuuc

SEQ ID NO: 102357 - RNA, 19 nt, Artificial Sequence
  Description of Artificial Sequence: Synthetic oligonucleotide
ugcgcuuuuaaucccggac

SEQ ID NO: 102358 - RNA, 19 nt, Artificial Sequence
  Description of Artificial Sequence: Synthetic oligonucleotide
uguaccgcagaugugggug

SEQ ID NO: 102359 - RNA, 19 nt, Artificial Sequence
  Description of Artificial Sequence: Synthetic oligonucleotide
acuaaguagagugucuucu

SEQ ID NO: 102360 - RNA, 19 nt, Artificial Sequence
  Description of Artificial Sequence: Synthetic oligonucleotide
uuauagcucauacggacuu

SEQ ID NO: 102361 - RNA, 19 nt, Artificial Sequence
  Description of Artificial Sequence: Synthetic oligonucleotide
agaauauaaguagccauga

SEQ ID NO: 102362 - RNA, 19 nt, Artificial Sequence
  Description of Artificial Sequence: Synthetic oligonucleotide
cacacguauguauuccucc

SEQ ID NO: 102363 - RNA, 19 nt, Artificial Sequence
  Description of Artificial Sequence: Synthetic oligonucleotide
auauuguacagcugauaca

SEQ ID NO: 102364 - RNA, 19 nt, Artificial Sequence
  Description of Artificial Sequence: Synthetic oligonucleotide
uauaagccgcacugcgucg

SEQ ID NO: 102365 - RNA, 19 nt, Artificial Sequence
  Description of Artificial Sequence: Synthetic oligonucleotide
uuuacgucgcauccgucac

SEQ ID NO: 102366 - RNA, 19 nt, Artificial Sequence
  Description of Artificial Sequence: Synthetic oligonucleotide
gaauauaaguagccaugac

SEQ ID NO: 102367 - RNA, 19 nt, Artificial Sequence
  Description of Artificial Sequence: Synthetic oligonucleotide
cagauucuuauuauagcuc

SEQ ID NO: 102368 - RNA, 19 nt, Artificial Sequence
  Description of Artificial Sequence: Synthetic oligonucleotide
aguuguaccaggccgguaa

SEQ ID NO: 102369 - RNA, 19 nt, Artificial Sequence
  Description of Artificial Sequence: Synthetic oligonucleotide
ucagugagagccgagguaa

SEQ ID NO: 102370 - RNA, 19 nt, Artificial Sequence
  Description of Artificial Sequence: Synthetic oligonucleotide
uguuccccaaccacgcuug

SEQ ID NO: 102371 - RNA, 19 nt, Artificial Sequence
  Description of Artificial Sequence: Synthetic oligonucleotide
caauauacuuaccuguaca

SEQ ID NO: 102372 - RNA, 19 nt, Artificial Sequence
  Description of Artificial Sequence: Synthetic oligonucleotide
aagcauugaccgcacauuu

SEQ ID NO: 102373 - RNA, 19 nt, Artificial Sequence
  Description of Artificial Sequence: Synthetic oligonucleotide
ugagaugcuccgcuggacu

SEQ ID NO: 102374 - RNA, 19 nt, Artificial Sequence
  Description of Artificial Sequence: Synthetic oligonucleotide
acguauguauuccuccuug

SEQ ID NO: 102375 - RNA, 19 nt, Artificial Sequence
  Description of Artificial Sequence: Synthetic oligonucleotide
agguaacuugcagacuucc

SEQ ID NO: 102376 - RNA, 19 nt, Artificial Sequence
  Description of Artificial Sequence: Synthetic oligonucleotide
acaaucgugcugcccaguc

SEQ ID NO: 102377 - RNA, 19 nt, Artificial Sequence
  Description of Artificial Sequence: Synthetic oligonucleotide
aaucccggacacaauuuuc

SEQ ID NO: 102378 - RNA, 19 nt, Artificial Sequence
  Description of Artificial Sequence: Synthetic oligonucleotide
cuucccuaaggcaagaaaa

SEQ ID NO: 102379 - RNA, 19 nt, Artificial Sequence
  Description of Artificial Sequence: Synthetic oligonucleotide
cugacccugaagcauagac

SEQ ID NO: 102380 - RNA, 19 nt, Artificial Sequence
  Description of Artificial Sequence: Synthetic oligonucleotide
ugugcgcuuuuaaucccgg

SEQ ID NO: 102381 - RNA, 19 nt, Artificial Sequence
  Description of Artificial Sequence: Synthetic oligonucleotide
aaauuuugcacgggccucu

SEQ ID NO: 102382 - RNA, 19 nt, Artificial Sequence
  Description of Artificial Sequence: Synthetic oligonucleotide
ugcguacgaacuuggaagu

SEQ ID NO: 102383 - RNA, 19 nt, Artificial Sequence
  Description of Artificial Sequence: Synthetic oligonucleotide
uucaaauucgggugguuuu

SEQ ID NO: 102384 - RNA, 19 nt, Artificial Sequence
  Description of Artificial Sequence: Synthetic oligonucleotide
uuaccagcggcuuuacguc

SEQ ID NO: 102385 - RNA, 19 nt, Artificial Sequence
  Description of Artificial Sequence: Synthetic oligonucleotide
ucugacuuacuaaggcauc

SEQ ID NO: 102386 - RNA, 19 nt, Artificial Sequence
  Description of Artificial Sequence: Synthetic oligonucleotide
aaagcauugaccgcacauu

SEQ ID NO: 102387 - RNA, 19 nt, Artificial Sequence
  Description of Artificial Sequence: Synthetic oligonucleotide
acuuggaucccugcguacg

SEQ ID NO: 102388 - RNA, 19 nt, Artificial Sequence
  Description of Artificial Sequence: Synthetic oligonucleotide
uuuugguguacgagacagc

SEQ ID NO: 102389 - RNA, 19 nt, Artificial Sequence
  Description of Artificial Sequence: Synthetic oligonucleotide
uuaaucccggacacaauuu

SEQ ID NO: 102390 - RNA, 19 nt, Artificial Sequence
  Description of Artificial Sequence: Synthetic oligonucleotide
aucaaggacgaguucuaca

SEQ ID NO: 102391 - RNA, 19 nt, Artificial Sequence
  Description of Artificial Sequence: Synthetic oligonucleotide
ugaccaacguucauccauc

SEQ ID NO: 102392 - RNA, 19 nt, Artificial Sequence
  Description of Artificial Sequence: Synthetic oligonucleotide
agcggcuuuacgucgcauc

SEQ ID NO: 102393 - RNA, 19 nt, Artificial Sequence
  Description of Artificial Sequence: Synthetic oligonucleotide
gacgaguucuacacgggag

SEQ ID NO: 102394 - RNA, 19 nt, Artificial Sequence
  Description of Artificial Sequence: Synthetic oligonucleotide
uuucuaccuagaagaauau

SEQ ID NO: 102395 - RNA, 19 nt, Artificial Sequence
  Description of Artificial Sequence: Synthetic oligonucleotide
acgaacuuggaagugauuu

SEQ ID NO: 102396 - RNA, 19 nt, Artificial Sequence
  Description of Artificial Sequence: Synthetic oligonucleotide
ccaguuacaaaguggcgcg

SEQ ID NO: 102397 - RNA, 19 nt, Artificial Sequence
  Description of Artificial Sequence: Synthetic oligonucleotide
auaagccgcacugcgucgc

SEQ ID NO: 102398 - RNA, 19 nt, Artificial Sequence
  Description of Artificial Sequence: Synthetic oligonucleotide
ucuacacgggagauucaca

SEQ ID NO: 102399 - RNA, 19 nt, Artificial Sequence
  Description of Artificial Sequence: Synthetic oligonucleotide
cuccacgugaaucgcagag

SEQ ID NO: 102400 - RNA, 19 nt, Artificial Sequence
  Description of Artificial Sequence: Synthetic oligonucleotide
uguggagaucuagacaggu

SEQ ID NO: 102401 - RNA, 19 nt, Artificial Sequence
  Description of Artificial Sequence: Synthetic oligonucleotide
cuuuacgucgcauccguca

SEQ ID NO: 102402 - RNA, 19 nt, Artificial Sequence
  Description of Artificial Sequence: Synthetic oligonucleotide
acgaguucuacacgggaga

SEQ ID NO: 102403 - RNA, 19 nt, Artificial Sequence
  Description of Artificial Sequence: Synthetic oligonucleotide
ccuaaauuuugcacgggcc

SEQ ID NO: 102404 - RNA, 19 nt, Artificial Sequence
  Description of Artificial Sequence: Synthetic oligonucleotide
uaccagcggcuuuacgucg

SEQ ID NO: 102405 - RNA, 19 nt, Artificial Sequence
  Description of Artificial Sequence: Synthetic oligonucleotide
auacggacuuuaauuuuac

SEQ ID NO: 102406 - RNA, 19 nt, Artificial Sequence
  Description of Artificial Sequence: Synthetic oligonucleotide
auagcaucgcacagucacc

SEQ ID NO: 102407 - RNA, 19 nt, Artificial Sequence
  Description of Artificial Sequence: Synthetic oligonucleotide
gaccaacguucauccaucg

SEQ ID NO: 102408 - RNA, 19 nt, Artificial Sequence
  Description of Artificial Sequence: Synthetic oligonucleotide
guagaagggaaugcgguac

SEQ ID NO: 102409 - RNA, 19 nt, Artificial Sequence
  Description of Artificial Sequence: Synthetic oligonucleotide
uaaucccggacacaauuuu

SEQ ID NO: 102410 - RNA, 19 nt, Artificial Sequence
  Description of Artificial Sequence: Synthetic oligonucleotide
uucuacacgggagauucac

SEQ ID NO: 102411 - RNA, 19 nt, Artificial Sequence
  Description of Artificial Sequence: Synthetic oligonucleotide
aucggucuuucauuauuug

SEQ ID NO: 102412 - RNA, 19 nt, Artificial Sequence
  Description of Artificial Sequence: Synthetic oligonucleotide
ugaggucuuuugguguacg

SEQ ID NO: 102413 - RNA, 19 nt, Artificial Sequence
  Description of Artificial Sequence: Synthetic oligonucleotide
caucgcacagucacccucc

SEQ ID NO: 102414 - RNA, 19 nt, Artificial Sequence
  Description of Artificial Sequence: Synthetic oligonucleotide
accaacguucauccaucgg

SEQ ID NO: 102415 - RNA, 19 nt, Artificial Sequence
  Description of Artificial Sequence: Synthetic oligonucleotide
uccccaaccacgcuuguuu

SEQ ID NO: 102416 - RNA, 19 nt, Artificial Sequence
  Description of Artificial Sequence: Synthetic oligonucleotide
acggcgacagccuguuuuc

SEQ ID NO: 102417 - RNA, 19 nt, Artificial Sequence
  Description of Artificial Sequence: Synthetic oligonucleotide
aucaaugcgagcacggcga

SEQ ID NO: 102418 - RNA, 19 nt, Artificial Sequence
  Description of Artificial Sequence: Synthetic oligonucleotide
gccguuauaagccgcacug

SEQ ID NO: 102419 - RNA, 19 nt, Artificial Sequence
  Description of Artificial Sequence: Synthetic oligonucleotide
aggucuuuugguguacgag

SEQ ID NO: 102420 - RNA, 19 nt, Artificial Sequence
  Description of Artificial Sequence: Synthetic oligonucleotide
aaguuuccgcuggacagug

SEQ ID NO: 102421 - RNA, 19 nt, Artificial Sequence
  Description of Artificial Sequence: Synthetic oligonucleotide
uuuuaaucccggacacaau

SEQ ID NO: 102422 - RNA, 19 nt, Artificial Sequence
  Description of Artificial Sequence: Synthetic oligonucleotide
ugugcgaacgcucccgguu

SEQ ID NO: 102423 - RNA, 19 nt, Artificial Sequence
  Description of Artificial Sequence: Synthetic oligonucleotide
uaggugccgacacuguaaa

SEQ ID NO: 102424 - RNA, 19 nt, Artificial Sequence
  Description of Artificial Sequence: Synthetic oligonucleotide
uucauucuuccguggggca

SEQ ID NO: 102425 - RNA, 19 nt, Artificial Sequence
  Description of Artificial Sequence: Synthetic oligonucleotide
gaucacggugaacaaugca

SEQ ID NO: 102426 - RNA, 19 nt, Artificial Sequence
  Description of Artificial Sequence: Synthetic oligonucleotide
ucacuuggaucccugcgua

SEQ ID NO: 102427 - RNA, 19 nt, Artificial Sequence
  Description of Artificial Sequence: Synthetic oligonucleotide
gauauucgcuugaagcgga

SEQ ID NO: 102428 - RNA, 19 nt, Artificial Sequence
  Description of Artificial Sequence: Synthetic oligonucleotide
acucgcguacuccaugacu

SEQ ID NO: 102429 - RNA, 19 nt, Artificial Sequence
  Description of Artificial Sequence: Synthetic oligonucleotide
uucgggugguuuucuaccu

SEQ ID NO: 102430 - RNA, 19 nt, Artificial Sequence
  Description of Artificial Sequence: Synthetic oligonucleotide
uacggacuuuaauuuuaca

SEQ ID NO: 102431 - RNA, 19 nt, Artificial Sequence
  Description of Artificial Sequence: Synthetic oligonucleotide
ggucuuuugguguacgaga

SEQ ID NO: 102432 - RNA, 19 nt, Artificial Sequence
  Description of Artificial Sequence: Synthetic oligonucleotide
cuaaauuuugcacgggccu

SEQ ID NO: 102433 - RNA, 19 nt, Artificial Sequence
  Description of Artificial Sequence: Synthetic oligonucleotide
ugcuccgcuggacuuucag

SEQ ID NO: 102434 - RNA, 19 nt, Artificial Sequence
  Description of Artificial Sequence: Synthetic oligonucleotide
gguagcgcccaaucaaugc

SEQ ID NO: 102435 - RNA, 19 nt, Artificial Sequence
  Description of Artificial Sequence: Synthetic oligonucleotide
uagcgcccaaucaaugcga

SEQ ID NO: 102436 - RNA, 19 nt, Artificial Sequence
  Description of Artificial Sequence: Synthetic oligonucleotide
caucguacuucuugccuug

SEQ ID NO: 102437 - RNA, 19 nt, Artificial Sequence
  Description of Artificial Sequence: Synthetic oligonucleotide
aacgccgcccuucccuaag

SEQ ID NO: 102438 - RNA, 19 nt, Artificial Sequence
  Description of Artificial Sequence: Synthetic oligonucleotide
uuacgucgcauccgucacc

SEQ ID NO: 102439 - RNA, 19 nt, Artificial Sequence
  Description of Artificial Sequence: Synthetic oligonucleotide
uuccgcuggacagugacuc

SEQ ID NO: 102440 - RNA, 19 nt, Artificial Sequence
  Description of Artificial Sequence: Synthetic oligonucleotide
gaucgcugacacaaguuuc

SEQ ID NO: 102441 - RNA, 19 nt, Artificial Sequence
  Description of Artificial Sequence: Synthetic oligonucleotide
ccaaucaaugcgagcacgg

SEQ ID NO: 102442 - RNA, 19 nt, Artificial Sequence
  Description of Artificial Sequence: Synthetic oligonucleotide
uagaagucuaggugccgac

SEQ ID NO: 102443 - RNA, 19 nt, Artificial Sequence
  Description of Artificial Sequence: Synthetic oligonucleotide
uauuauccccguugagguc

SEQ ID NO: 102444 - RNA, 19 nt, Artificial Sequence
  Description of Artificial Sequence: Synthetic oligonucleotide
acacacguauguauuccuc

SEQ ID NO: 102445 - RNA, 19 nt, Artificial Sequence
  Description of Artificial Sequence: Synthetic oligonucleotide
caugugcgaacgcucccgg

SEQ ID NO: 102446 - RNA, 19 nt, Artificial Sequence
  Description of Artificial Sequence: Synthetic oligonucleotide
cugucgggacccaccaggg

SEQ ID NO: 102447 - RNA, 19 nt, Artificial Sequence
  Description of Artificial Sequence: Synthetic oligonucleotide
ugccuaaauuuugcacggg

SEQ ID NO: 102448 - RNA, 19 nt, Artificial Sequence
  Description of Artificial Sequence: Synthetic oligonucleotide
ucgcucuuugaacccacaa

SEQ ID NO: 102449 - RNA, 19 nt, Artificial Sequence
  Description of Artificial Sequence: Synthetic oligonucleotide
aaaguucaugcuacaguuu

SEQ ID NO: 102450 - RNA, 19 nt, Artificial Sequence
  Description of Artificial Sequence: Synthetic oligonucleotide
ggugccgacacuguaaaca

SEQ ID NO: 102451 - RNA, 19 nt, Artificial Sequence
  Description of Artificial Sequence: Synthetic oligonucleotide
aggcaaaugaccaguuaca

SEQ ID NO: 102452 - RNA, 19 nt, Artificial Sequence
  Description of Artificial Sequence: Synthetic oligonucleotide
cucgcguacuccaugacua

SEQ ID NO: 102453 - RNA, 19 nt, Artificial Sequence
  Description of Artificial Sequence: Synthetic oligonucleotide
uccacgugaaucgcagaga

SEQ ID NO: 102454 - RNA, 19 nt, Artificial Sequence
  Description of Artificial Sequence: Synthetic oligonucleotide
gccgagguaacuugcagac

SEQ ID NO: 102455 - RNA, 19 nt, Artificial Sequence
  Description of Artificial Sequence: Synthetic oligonucleotide
gagagccgagguaacuugc

SEQ ID NO: 102456 - RNA, 19 nt, Artificial Sequence
  Description of Artificial Sequence: Synthetic oligonucleotide
guauuccuccuugccaugc

SEQ ID NO: 102457 - RNA, 19 nt, Artificial Sequence
  Description of Artificial Sequence: Synthetic oligonucleotide
uuauccccguugagguccc

SEQ ID NO: 102458 - RNA, 19 nt, Artificial Sequence
  Description of Artificial Sequence: Synthetic oligonucleotide
guaccgcagaugugggugc

SEQ ID NO: 102459 - RNA, 19 nt, Artificial Sequence
  Description of Artificial Sequence: Synthetic oligonucleotide
gcgcguuacaggcacaaug

SEQ ID NO: 102460 - RNA, 19 nt, Artificial Sequence
  Description of Artificial Sequence: Synthetic oligonucleotide
cuaggugccgacacuguaa

SEQ ID NO: 102461 - RNA, 19 nt, Artificial Sequence
  Description of Artificial Sequence: Synthetic oligonucleotide
ccugucgggacccaccagg

SEQ ID NO: 102462 - RNA, 19 nt, Artificial Sequence
  Description of Artificial Sequence: Synthetic oligonucleotide
uucgcucuuugaacccaca

SEQ ID NO: 102463 - RNA, 19 nt, Artificial Sequence
  Description of Artificial Sequence: Synthetic oligonucleotide
gacacaaguuuccgcugga

SEQ ID NO: 102464 - RNA, 19 nt, Artificial Sequence
  Description of Artificial Sequence: Synthetic oligonucleotide
cugacuuacuaaggcauca

SEQ ID NO: 102465 - RNA, 19 nt, Artificial Sequence
  Description of Artificial Sequence: Synthetic oligonucleotide
guguccaauuuuguucccc

SEQ ID NO: 102466 - RNA, 19 nt, Artificial Sequence
  Description of Artificial Sequence: Synthetic oligonucleotide
ucgagcucaggcucagaau

SEQ ID NO: 102467 - RNA, 19 nt, Artificial Sequence
  Description of Artificial Sequence: Synthetic oligonucleotide
aggugccgacacuguaaac

SEQ ID NO: 102468 - RNA, 19 nt, Artificial Sequence
  Description of Artificial Sequence: Synthetic oligonucleotide
cacauuacgcaucaccagu

SEQ ID NO: 102469 - RNA, 19 nt, Artificial Sequence
  Description of Artificial Sequence: Synthetic oligonucleotide
ugcuguguaccggucugug

SEQ ID NO: 102470 - RNA, 19 nt, Artificial Sequence
  Description of Artificial Sequence: Synthetic oligonucleotide
gcuuauuauccccguugag

SEQ ID NO: 102471 - RNA, 19 nt, Artificial Sequence
  Description of Artificial Sequence: Synthetic oligonucleotide
uucuaccuagaagaauaua

SEQ ID NO: 102472 - RNA, 19 nt, Artificial Sequence
  Description of Artificial Sequence: Synthetic oligonucleotide
ugacuuacuaaggcaucau

SEQ ID NO: 102473 - RNA, 19 nt, Artificial Sequence
  Description of Artificial Sequence: Synthetic oligonucleotide
aggacgaguucuacacggg

SEQ ID NO: 102474 - RNA, 19 nt, Artificial Sequence
  Description of Artificial Sequence: Synthetic oligonucleotide
gcggcuuuacgucgcaucc

SEQ ID NO: 102475 - RNA, 19 nt, Artificial Sequence
  Description of Artificial Sequence: Synthetic oligonucleotide
ugcgaacgcucccgguuca

SEQ ID NO: 102476 - RNA, 19 nt, Artificial Sequence
  Description of Artificial Sequence: Synthetic oligonucleotide
gucgagcucaggcucagaa

SEQ ID NO: 102477 - RNA, 19 nt, Artificial Sequence
  Description of Artificial Sequence: Synthetic oligonucleotide
auagcucauacggacuuua

SEQ ID NO: 102478 - RNA, 19 nt, Artificial Sequence
  Description of Artificial Sequence: Synthetic oligonucleotide
ccggcauggucacugaagc

SEQ ID NO: 102479 - RNA, 19 nt, Artificial Sequence
  Description of Artificial Sequence: Synthetic oligonucleotide
ggagggaccggcaugguca

SEQ ID NO: 102480 - RNA, 19 nt, Artificial Sequence
  Description of Artificial Sequence: Synthetic oligonucleotide
ggggcaacuaaguaaucaa

SEQ ID NO: 102481 - RNA, 19 nt, Artificial Sequence
  Description of Artificial Sequence: Synthetic oligonucleotide
cauugcacgaggcuguccu

SEQ ID NO: 102482 - RNA, 19 nt, Artificial Sequence
  Description of Artificial Sequence: Synthetic oligonucleotide
cacgugaaucgcagagaac

SEQ ID NO: 102483 - RNA, 19 nt, Artificial Sequence
  Description of Artificial Sequence: Synthetic oligonucleotide
aucucgugcaaaacccaug

SEQ ID NO: 102484 - RNA, 19 nt, Artificial Sequence
  Description of Artificial Sequence: Synthetic oligonucleotide
gaggaccacauuacgcauc

SEQ ID NO: 102485 - RNA, 19 nt, Artificial Sequence
  Description of Artificial Sequence: Synthetic oligonucleotide
ggcgggcucccacagaaug

SEQ ID NO: 102486 - RNA, 19 nt, Artificial Sequence
  Description of Artificial Sequence: Synthetic oligonucleotide
caucaaggacgaguucuac

SEQ ID NO: 102487 - RNA, 19 nt, Artificial Sequence
  Description of Artificial Sequence: Synthetic oligonucleotide
gcucauacggacuuuaauu

SEQ ID NO: 102488 - RNA, 19 nt, Artificial Sequence
  Description of Artificial Sequence: Synthetic oligonucleotide
uccugucgggacccaccag

SEQ ID NO: 102489 - RNA, 19 nt, Artificial Sequence
  Description of Artificial Sequence: Synthetic oligonucleotide
cauuguuacuugggccagc

SEQ ID NO: 102490 - RNA, 19 nt, Artificial Sequence
  Description of Artificial Sequence: Synthetic oligonucleotide
cuccgcuggacuuucaggu

SEQ ID NO: 102491 - RNA, 19 nt, Artificial Sequence
  Description of Artificial Sequence: Synthetic oligonucleotide
gaaacggguccugucugga

SEQ ID NO: 102492 - RNA, 19 nt, Artificial Sequence
  Description of Artificial Sequence: Synthetic oligonucleotide
uccaucggucuuucauuau

SEQ ID NO: 102493 - RNA, 19 nt, Artificial Sequence
  Description of Artificial Sequence: Synthetic oligonucleotide
acgaggcuguccugccuag

SEQ ID NO: 102494 - RNA, 19 nt, Artificial Sequence
  Description of Artificial Sequence: Synthetic oligonucleotide
uauagcucauacggacuuu

SEQ ID NO: 102495 - RNA, 19 nt, Artificial Sequence
  Description of Artificial Sequence: Synthetic oligonucleotide
acauuacgcaucaccagua

SEQ ID NO: 102496 - RNA, 19 nt, Artificial Sequence
  Description of Artificial Sequence: Synthetic oligonucleotide
uccgcuggacagugacuca

SEQ ID NO: 102497 - RNA, 19 nt, Artificial Sequence
  Description of Artificial Sequence: Synthetic oligonucleotide
ucgggugguuuucuaccua

SEQ ID NO: 102498 - RNA, 19 nt, Artificial Sequence
  Description of Artificial Sequence: Synthetic oligonucleotide
cacuuccggcccaucguac

SEQ ID NO: 102499 - RNA, 19 nt, Artificial Sequence
  Description of Artificial Sequence: Synthetic oligonucleotide
cguauguauuccuccuugc

SEQ ID NO: 102500 - RNA, 19 nt, Artificial Sequence
  Description of Artificial Sequence: Synthetic oligonucleotide
gugcgaacgcucccgguuc

SEQ ID NO: 102501 - RNA, 19 nt, Artificial Sequence
  Description of Artificial Sequence: Synthetic oligonucleotide
aauuuugcacgggccucuu

SEQ ID NO: 102502 - RNA, 19 nt, Artificial Sequence
  Description of Artificial Sequence: Synthetic oligonucleotide
acaacucuaugaacagaaa

SEQ ID NO: 102503 - RNA, 19 nt, Artificial Sequence
  Description of Artificial Sequence: Synthetic oligonucleotide
agcgcccaaucaaugcgag

SEQ ID NO: 102504 - RNA, 19 nt, Artificial Sequence
  Description of Artificial Sequence: Synthetic oligonucleotide
cccaaucaaugcgagcacg

SEQ ID NO: 102505 - RNA, 19 nt, Artificial Sequence
  Description of Artificial Sequence: Synthetic oligonucleotide
guuauaagccgcacugcgu

SEQ ID NO: 102506 - RNA, 19 nt, Artificial Sequence
  Description of Artificial Sequence: Synthetic oligonucleotide
ugcuauuguucaggucacu

SEQ ID NO: 102507 - RNA, 19 nt, Artificial Sequence
  Description of Artificial Sequence: Synthetic oligonucleotide
agagccgagguaacuugca

SEQ ID NO: 102508 - RNA, 19 nt, Artificial Sequence
  Description of Artificial Sequence: Synthetic oligonucleotide
acgccgcccuucccuaagg

SEQ ID NO: 102509 - RNA, 19 nt, Artificial Sequence
  Description of Artificial Sequence: Synthetic oligonucleotide
cugagaugcuccgcuggac

SEQ ID NO: 102510 - RNA, 19 nt, Artificial Sequence
  Description of Artificial Sequence: Synthetic oligonucleotide
accguuaccagcggcuuua

SEQ ID NO: 102511 - RNA, 19 nt, Artificial Sequence
  Description of Artificial Sequence: Synthetic oligonucleotide
ggacgaguucuacacggga

SEQ ID NO: 102512 - RNA, 19 nt, Artificial Sequence
  Description of Artificial Sequence: Synthetic oligonucleotide
ccaacguucauccaucggu

SEQ ID NO: 102513 - RNA, 19 nt, Artificial Sequence
  Description of Artificial Sequence: Synthetic oligonucleotide
augugcgaacgcucccggu

SEQ ID NO: 102514 - RNA, 19 nt, Artificial Sequence
  Description of Artificial Sequence: Synthetic oligonucleotide
gaagcggaccccauucagu

SEQ ID NO: 102515 - RNA, 19 nt, Artificial Sequence
  Description of Artificial Sequence: Synthetic oligonucleotide
gguguacgagacagcgggg

SEQ ID NO: 102516 - RNA, 19 nt, Artificial Sequence
  Description of Artificial Sequence: Synthetic oligonucleotide
cgcuuuuaaucccggacac

SEQ ID NO: 102517 - RNA, 19 nt, Artificial Sequence
  Description of Artificial Sequence: Synthetic oligonucleotide
aggacucgcucccgaaguu

SEQ ID NO: 102518 - RNA, 19 nt, Artificial Sequence
  Description of Artificial Sequence: Synthetic oligonucleotide
aaguggcgcguuacaggca

SEQ ID NO: 102519 - RNA, 19 nt, Artificial Sequence
  Description of Artificial Sequence: Synthetic oligonucleotide
ggcaauagaugucccagau

SEQ ID NO: 102520 - RNA, 19 nt, Artificial Sequence
  Description of Artificial Sequence: Synthetic oligonucleotide
gcgcucucugaguuguacc

SEQ ID NO: 102521 - RNA, 19 nt, Artificial Sequence
  Description of Artificial Sequence: Synthetic oligonucleotide
ggcaugugcgaacgcuccc

SEQ ID NO: 102522 - RNA, 19 nt, Artificial Sequence
  Description of Artificial Sequence: Synthetic oligonucleotide
ccaaccacgcuuguuugac

SEQ ID NO: 102523 - RNA, 19 nt, Artificial Sequence
  Description of Artificial Sequence: Synthetic oligonucleotide
cacacacguauguauuccu

SEQ ID NO: 102524 - RNA, 19 nt, Artificial Sequence
  Description of Artificial Sequence: Synthetic oligonucleotide
caucggucuuucauuauuu

SEQ ID NO: 102525 - RNA, 19 nt, Artificial Sequence
  Description of Artificial Sequence: Synthetic oligonucleotide
cacucgcguacuccaugac

SEQ ID NO: 102526 - RNA, 19 nt, Artificial Sequence
  Description of Artificial Sequence: Synthetic oligonucleotide
caaccacgcuuguuugaca

SEQ ID NO: 102527 - RNA, 19 nt, Artificial Sequence
  Description of Artificial Sequence: Synthetic oligonucleotide
cgcguuacaggcacaauga

SEQ ID NO: 102528 - RNA, 19 nt, Artificial Sequence
  Description of Artificial Sequence: Synthetic oligonucleotide
ggaucgcugacacaaguuu

SEQ ID NO: 102529 - RNA, 19 nt, Artificial Sequence
  Description of Artificial Sequence: Synthetic oligonucleotide
ggcccauaugcugacauua

SEQ ID NO: 102530 - RNA, 19 nt, Artificial Sequence
  Description of Artificial Sequence: Synthetic oligonucleotide
ccagguagcgcccaaucaa

SEQ ID NO: 102531 - RNA, 19 nt, Artificial Sequence
  Description of Artificial Sequence: Synthetic oligonucleotide
gagaugcuccgcuggacuu

SEQ ID NO: 102532 - RNA, 19 nt, Artificial Sequence
  Description of Artificial Sequence: Synthetic oligonucleotide
ggcagcguaaggcgggcuc

SEQ ID NO: 102533 - RNA, 19 nt, Artificial Sequence
  Description of Artificial Sequence: Synthetic oligonucleotide
ucgcauccgucaccaguuu

SEQ ID NO: 102534 - RNA, 19 nt, Artificial Sequence
  Description of Artificial Sequence: Synthetic oligonucleotide
caucucgugcaaaacccau

SEQ ID NO: 102535 - RNA, 19 nt, Artificial Sequence
  Description of Artificial Sequence: Synthetic oligonucleotide
cuuggccgggaucgcugac

SEQ ID NO: 102536 - RNA, 19 nt, Artificial Sequence
  Description of Artificial Sequence: Synthetic oligonucleotide
cgcaucaccaguacauuca

SEQ ID NO: 102537 - RNA, 19 nt, Artificial Sequence
  Description of Artificial Sequence: Synthetic oligonucleotide
gcccaucguacuucuugcc

SEQ ID NO: 102538 - RNA, 19 nt, Artificial Sequence
  Description of Artificial Sequence: Synthetic oligonucleotide
ccacgugaaucgcagagaa

SEQ ID NO: 102539 - RNA, 19 nt, Artificial Sequence
  Description of Artificial Sequence: Synthetic oligonucleotide
cagcguaaggcgggcuccc

SEQ ID NO: 102540 - RNA, 19 nt, Artificial Sequence
  Description of Artificial Sequence: Synthetic oligonucleotide
gcagcguaaggcgggcucc

SEQ ID NO: 102541 - RNA, 19 nt, Artificial Sequence
  Description of Artificial Sequence: Synthetic oligonucleotide
gugcgcuuuuaaucccgga

SEQ ID NO: 102542 - RNA, 19 nt, Artificial Sequence
  Description of Artificial Sequence: Synthetic oligonucleotide
gccuacaccggcagcuucc

SEQ ID NO: 102543 - RNA, 19 nt, Artificial Sequence
  Description of Artificial Sequence: Synthetic oligonucleotide
ccauucagugagagccgag

SEQ ID NO: 102544 - RNA, 19 nt, Artificial Sequence
  Description of Artificial Sequence: Synthetic oligonucleotide
ccaucgccuacaccggcag

SEQ ID NO: 102545 - RNA, 19 nt, Artificial Sequence
  Description of Artificial Sequence: Synthetic oligonucleotide
ccguuauaagccgcacugc

SEQ ID NO: 102546 - RNA, 19 nt, Artificial Sequence
  Description of Artificial Sequence: Synthetic oligonucleotide
gcccaaucaaugcgagcac

SEQ ID NO: 102547 - RNA, 19 nt, Artificial Sequence
  Description of Artificial Sequence: Synthetic oligonucleotide
cgcccaaucaaugcgagca

SEQ ID NO: 102548 - RNA, 19 nt, Artificial Sequence
  Description of Artificial Sequence: Synthetic oligonucleotide
agcacggcgacagccuguu

SEQ ID NO: 102549 - RNA, 19 nt, Artificial Sequence
  Description of Artificial Sequence: Synthetic oligonucleotide
ccguggggcaacuaaguaa

SEQ ID NO: 102550 - RNA, 19 nt, Artificial Sequence
  Description of Artificial Sequence: Synthetic oligonucleotide
ggcgcucucugaguuguac

SEQ ID NO: 102551 - RNA, 19 nt, Artificial Sequence
  Description of Artificial Sequence: Synthetic oligonucleotide
cacggcgacagccuguuuu

SEQ ID NO: 102552 - RNA, 19 nt, Artificial Sequence
  Description of Artificial Sequence: Synthetic oligonucleotide
acgucgcauccgucaccag

SEQ ID NO: 102553 - RNA, 19 nt, Artificial Sequence
  Description of Artificial Sequence: Synthetic oligonucleotide
gucgcauccgucaccaguu

SEQ ID NO: 102554 - RNA, 19 nt, Artificial Sequence
  Description of Artificial Sequence: Synthetic oligonucleotide
ggaauggagggaccggcau

SEQ ID NO: 102555 - RNA, 19 nt, Artificial Sequence
  Description of Artificial Sequence: Synthetic oligonucleotide
cguacgaacuuggaaguga

SEQ ID NO: 102556 - RNA, 19 nt, Artificial Sequence
  Description of Artificial Sequence: Synthetic oligonucleotide
gcguacgaacuuggaagug

SEQ ID NO: 102557 - RNA, 19 nt, Artificial Sequence
  Description of Artificial Sequence: Synthetic oligonucleotide
ggacucgcucccgaaguuc

SEQ ID NO: 102558 - RNA, 19 nt, Artificial Sequence
  Description of Artificial Sequence: Synthetic oligonucleotide
cccacucgcguacuccaug

SEQ ID NO: 102559 - RNA, 19 nt, Artificial Sequence
  Description of Artificial Sequence: Synthetic oligonucleotide
ccacucgcguacuccauga

SEQ ID NO: 102560 - RNA, 19 nt, Artificial Sequence
  Description of Artificial Sequence: Synthetic oligonucleotide
agcguaaggcgggcuccca

SEQ ID NO: 102561 - RNA, 19 nt, Artificial Sequence
  Description of Artificial Sequence: Synthetic oligonucleotide
ccgcccuucccuaaggcaa

SEQ ID NO: 102562 - RNA, 19 nt, Artificial Sequence
  Description of Artificial Sequence: Synthetic oligonucleotide
gcguaaggcgggcucccac

SEQ ID NO: 102563 - RNA, 19 nt, Artificial Sequence
  Description of Artificial Sequence: Synthetic oligonucleotide
cgugaaucgcagagaacga

SEQ ID NO: 102564 - RNA, 19 nt, Artificial Sequence
  Description of Artificial Sequence: Synthetic oligonucleotide
cguuaccagcggcuuuacg

SEQ ID NO: 102565 - RNA, 19 nt, Artificial Sequence
  Description of Artificial Sequence: Synthetic oligonucleotide
ucgccuacaccggcagcuu

SEQ ID NO: 102566 - RNA, 19 nt, Artificial Sequence
  Description of Artificial Sequence: Synthetic oligonucleotide
gcuuggccgggaucgcuga

SEQ ID NO: 102567 - RNA, 19 nt, Artificial Sequence
  Description of Artificial Sequence: Synthetic oligonucleotide
gaguucuacacgggagauu

SEQ ID NO: 102568 - RNA, 19 nt, Artificial Sequence
  Description of Artificial Sequence: Synthetic oligonucleotide
caggcgcucucugaguugu

SEQ ID NO: 102569 - RNA, 19 nt, Artificial Sequence
  Description of Artificial Sequence: Synthetic oligonucleotide
cgagguaacuugcagacuu

SEQ ID NO: 102570 - RNA, 19 nt, Artificial Sequence
  Description of Artificial Sequence: Synthetic oligonucleotide
uauccccguugaggucccc

SEQ ID NO: 102571 - RNA, 19 nt, Artificial Sequence
  Description of Artificial Sequence: Synthetic oligonucleotide
gaguuguaccaggccggua

SEQ ID NO: 102572 - RNA, 19 nt, Artificial Sequence
  Description of Artificial Sequence: Synthetic oligonucleotide
ggggccguuauaagccgca

SEQ ID NO: 102573 - RNA, 19 nt, Artificial Sequence
  Description of Artificial Sequence: Synthetic oligonucleotide
ggccguuauaagccgcacu

SEQ ID NO: 102574 - RNA, 19 nt, Artificial Sequence
  Description of Artificial Sequence: Synthetic oligonucleotide
gcuccacgugaaucgcaga

SEQ ID NO: 102575 - RNA, 19 nt, Artificial Sequence
  Description of Artificial Sequence: Synthetic oligonucleotide
ccgggaucgcugacacaag

SEQ ID NO: 102576 - RNA, 19 nt, Artificial Sequence
  Description of Artificial Sequence: Synthetic oligonucleotide
cccaucgccuacaccggca

SEQ ID NO: 102577 - RNA, 19 nt, Artificial Sequence
  Description of Artificial Sequence: Synthetic oligonucleotide
cgagcacggcgacagccug

SEQ ID NO: 102578 - RNA, 19 nt, Artificial Sequence
  Description of Artificial Sequence: Synthetic oligonucleotide
gcuuuacgucgcauccguc

SEQ ID NO: 102579 - RNA, 19 nt, Artificial Sequence
  Description of Artificial Sequence: Synthetic oligonucleotide
cuuccggcccaucguacuu

SEQ ID NO: 102580 - RNA, 19 nt, Artificial Sequence
  Description of Artificial Sequence: Synthetic oligonucleotide
gcguuacaggcacaaugau

SEQ ID NO: 102581 - RNA, 19 nt, Artificial Sequence
  Description of Artificial Sequence: Synthetic oligonucleotide
cccauucagugagagccga

SEQ ID NO: 102582 - RNA, 19 nt, Artificial Sequence
  Description of Artificial Sequence: Synthetic oligonucleotide
gggccguuauaagccgcac

SEQ ID NO: 102583 - RNA, 19 nt, Artificial Sequence
  Description of Artificial Sequence: Synthetic oligonucleotide
guuccccaaccacgcuugu

SEQ ID NO: 102584 - RNA, 19 nt, Artificial Sequence
  Description of Artificial Sequence: Synthetic oligonucleotide
gugcuguguaccggucugu

SEQ ID NO: 102585 - RNA, 19 nt, Artificial Sequence
  Description of Artificial Sequence: Synthetic oligonucleotide
gggaucgcugacacaaguu

SEQ ID NO: 102586 - RNA, 19 nt, Artificial Sequence
  Description of Artificial Sequence: Synthetic oligonucleotide
cacaaucgugcugcccagu

SEQ ID NO: 102587 - RNA, 19 nt, Artificial Sequence
  Description of Artificial Sequence: Synthetic oligonucleotide
cuuccagguagcgcccaau

SEQ ID NO: 102588 - RNA, 19 nt, Artificial Sequence
  Description of Artificial Sequence: Synthetic oligonucleotide
ccuacaccggcagcuucca

SEQ ID NO: 102589 - RNA, 19 nt, Artificial Sequence
  Description of Artificial Sequence: Synthetic oligonucleotide
ccggucugugguccuuuca

SEQ ID NO: 102590 - RNA, 19 nt, Artificial Sequence
  Description of Artificial Sequence: Synthetic oligonucleotide
cgaacgcucccgguucaug

SEQ ID NO: 102591 - RNA, 19 nt, Artificial Sequence
  Description of Artificial Sequence: Synthetic oligonucleotide
cccggaggacucgcucccg

SEQ ID NO: 102592 - RNA, 19 nt, Artificial Sequence
  Description of Artificial Sequence: Synthetic oligonucleotide
cgucgcauccgucaccagu

SEQ ID NO: 102593 - RNA, 19 nt, Artificial Sequence
  Description of Artificial Sequence: Synthetic oligonucleotide
ccguuaccagcggcuuuac

SEQ ID NO: 102594 - RNA, 19 nt, Artificial Sequence
  Description of Artificial Sequence: Synthetic oligonucleotide
gggcccauaugcugacauu

SEQ ID NO: 102595 - RNA, 19 nt, Artificial Sequence
  Description of Artificial Sequence: Synthetic oligonucleotide
ggccgugcugaggggccac

SEQ ID NO: 102596 - RNA, 19 nt, Artificial Sequence
  Description of Artificial Sequence: Synthetic oligonucleotide
ggucgagcucaggcucaga

SEQ ID NO: 102597 - RNA, 19 nt, Artificial Sequence
  Description of Artificial Sequence: Synthetic oligonucleotide
cgggaucgcugacacaagu

SEQ ID NO: 102598 - RNA, 19 nt, Artificial Sequence
  Description of Artificial Sequence: Synthetic oligonucleotide
gcacugcgucgcucucgga

SEQ ID NO: 102599 - RNA, 19 nt, Artificial Sequence
  Description of Artificial Sequence: Synthetic oligonucleotide
gggccgugcugaggggcca

SEQ ID NO: 102600 - RNA, 19 nt, Artificial Sequence
  Description of Artificial Sequence: Synthetic oligonucleotide
aggcgcucucugaguugua

SEQ ID NO: 102601 - RNA, 19 nt, Artificial Sequence
  Description of Artificial Sequence: Synthetic oligonucleotide
cacgggccucuuucucuuu

SEQ ID NO: 102602 - RNA, 19 nt, Artificial Sequence
  Description of Artificial Sequence: Synthetic oligonucleotide
cgaguucuacacgggagau

SEQ ID NO: 102603 - RNA, 19 nt, Artificial Sequence
  Description of Artificial Sequence: Synthetic oligonucleotide
ccgagguaacuugcagacu

SEQ ID NO: 102604 - RNA, 19 nt, Artificial Sequence
  Description of Artificial Sequence: Synthetic oligonucleotide
ggcgcguuacaggcacaau

SEQ ID NO: 102605 - RNA, 19 nt, Artificial Sequence
  Description of Artificial Sequence: Synthetic oligonucleotide
ccccacucgcguacuccau

SEQ ID NO: 102606 - RNA, 19 nt, Artificial Sequence
  Description of Artificial Sequence: Synthetic oligonucleotide
gcgaacgcucccgguucau

SEQ ID NO: 102607 - RNA, 19 nt, Artificial Sequence
  Description of Artificial Sequence: Synthetic oligonucleotide
cgccuucacuuggaucccu

SEQ ID NO: 102608 - RNA, 19 nt, Artificial Sequence
  Description of Artificial Sequence: Synthetic oligonucleotide
cggcgacagccuguuuucu

SEQ ID NO: 102609 - RNA, 19 nt, Artificial Sequence
  Description of Artificial Sequence: Synthetic oligonucleotide
ccggcccaucguacuucuu

SEQ ID NO: 102610 - RNA, 19 nt, Artificial Sequence
  Description of Artificial Sequence: Synthetic oligonucleotide
aaagguuagaaauuaggag

SEQ ID NO: 102611 - RNA, 19 nt, Artificial Sequence
  Description of Artificial Sequence: Synthetic oligonucleotide
aagaucaacaauugagcgc

SEQ ID NO: 102612 - RNA, 19 nt, Artificial Sequence
  Description of Artificial Sequence: Synthetic oligonucleotide
aaaaguauagauucuucag

SEQ ID NO: 102613 - RNA, 19 nt, Artificial Sequence
  Description of Artificial Sequence: Synthetic oligonucleotide
aaguauagauucuucaguc

SEQ ID NO: 102614 - RNA, 19 nt, Artificial Sequence
  Description of Artificial Sequence: Synthetic oligonucleotide
uauaguggcaccuaggcag

SEQ ID NO: 102615 - RNA, 19 nt, Artificial Sequence
  Description of Artificial Sequence: Synthetic oligonucleotide
ucuauuaaggaucauaaau

SEQ ID NO: 102616 - RNA, 19 nt, Artificial Sequence
  Description of Artificial Sequence: Synthetic oligonucleotide
aagagcaacuauuuccugc

SEQ ID NO: 102617 - RNA, 19 nt, Artificial Sequence
  Description of Artificial Sequence: Synthetic oligonucleotide
aaagacggaaucuaaggag

SEQ ID NO: 102618 - RNA, 19 nt, Artificial Sequence
  Description of Artificial Sequence: Synthetic oligonucleotide
ucuauggagacauagaaaa

SEQ ID NO: 102619 - RNA, 19 nt, Artificial Sequence
  Description of Artificial Sequence: Synthetic oligonucleotide
gaugacgaaguauugagag

SEQ ID NO: 102620 - RNA, 19 nt, Artificial Sequence
  Description of Artificial Sequence: Synthetic oligonucleotide
uuguguauaaugcaauuag

SEQ ID NO: 102621 - RNA, 19 nt, Artificial Sequence
  Description of Artificial Sequence: Synthetic oligonucleotide
uaauguacuauugauggcg

SEQ ID NO: 102622 - RNA, 19 nt, Artificial Sequence
  Description of Artificial Sequence: Synthetic oligonucleotide
aagucuuagacacuuuguc

SEQ ID NO: 102623 - RNA, 19 nt, Artificial Sequence
  Description of Artificial Sequence: Synthetic oligonucleotide
accuauaaaauucaccuag

SEQ ID NO: 102624 - RNA, 19 nt, Artificial Sequence
  Description of Artificial Sequence: Synthetic oligonucleotide
gaagcaucucaccagauag

SEQ ID NO: 102625 - RNA, 19 nt, Artificial Sequence
  Description of Artificial Sequence: Synthetic oligonucleotide
uccauuaugucuauggaga

SEQ ID NO: 102626 - RNA, 19 nt, Artificial Sequence
  Description of Artificial Sequence: Synthetic oligonucleotide
acucacauuacuuccacac

SEQ ID NO: 102627 - RNA, 19 nt, Artificial Sequence
  Description of Artificial Sequence: Synthetic oligonucleotide
uguaaauugaugcuggcau

SEQ ID NO: 102628 - RNA, 19 nt, Artificial Sequence
  Description of Artificial Sequence: Synthetic oligonucleotide
uauaaugcaauuagcauua

SEQ ID NO: 102629 - RNA, 19 nt, Artificial Sequence
  Description of Artificial Sequence: Synthetic oligonucleotide
acuagugaggccucagucc

SEQ ID NO: 102630 - RNA, 19 nt, Artificial Sequence
  Description of Artificial Sequence: Synthetic oligonucleotide
cuaacuauggcuucugcag

SEQ ID NO: 102631 - RNA, 19 nt, Artificial Sequence
  Description of Artificial Sequence: Synthetic oligonucleotide
uaagggauuuccaugacac

SEQ ID NO: 102632 - RNA, 19 nt, Artificial Sequence
  Description of Artificial Sequence: Synthetic oligonucleotide
ucagagaauaguaucuuca

SEQ ID NO: 102633 - RNA, 19 nt, Artificial Sequence
  Description of Artificial Sequence: Synthetic oligonucleotide
aacuagugaggccucaguc

SEQ ID NO: 102634 - RNA, 19 nt, Artificial Sequence
  Description of Artificial Sequence: Synthetic oligonucleotide
ugaaggguaauacaauaca

SEQ ID NO: 102635 - RNA, 19 nt, Artificial Sequence
  Description of Artificial Sequence: Synthetic oligonucleotide
uagaugacgaaguauugag

SEQ ID NO: 102636 - RNA, 19 nt, Artificial Sequence
  Description of Artificial Sequence: Synthetic oligonucleotide
caucucaccagauagaauc

SEQ ID NO: 102637 - RNA, 19 nt, Artificial Sequence
  Description of Artificial Sequence: Synthetic oligonucleotide
ugacgaaguauugagagag

SEQ ID NO: 102638 - RNA, 19 nt, Artificial Sequence
  Description of Artificial Sequence: Synthetic oligonucleotide
uauugagagagcacaauga

SEQ ID NO: 102639 - RNA, 19 nt, Artificial Sequence
  Description of Artificial Sequence: Synthetic oligonucleotide
ugacauuaccaaaaugacc

SEQ ID NO: 102640 - RNA, 19 nt, Artificial Sequence
  Description of Artificial Sequence: Synthetic oligonucleotide
agucauuuaaaguuugaca

SEQ ID NO: 102641 - RNA, 19 nt, Artificial Sequence
  Description of Artificial Sequence: Synthetic oligonucleotide
cuuuuggugacuaacuaug

SEQ ID NO: 102642 - RNA, 19 nt, Artificial Sequence
  Description of Artificial Sequence: Synthetic oligonucleotide
auguauagaaugauucucc

SEQ ID NO: 102643 - RNA, 19 nt, Artificial Sequence
  Description of Artificial Sequence: Synthetic oligonucleotide
aauguacuauugauggcgc

SEQ ID NO: 102644 - RNA, 19 nt, Artificial Sequence
  Description of Artificial Sequence: Synthetic oligonucleotide
uuuuggugacuaacuaugg

SEQ ID NO: 102645 - RNA, 19 nt, Artificial Sequence
  Description of Artificial Sequence: Synthetic oligonucleotide
aggaacauaguucagacuu

SEQ ID NO: 102646 - RNA, 19 nt, Artificial Sequence
  Description of Artificial Sequence: Synthetic oligonucleotide
uuaaaucccagguuuagaa

SEQ ID NO: 102647 - RNA, 19 nt, Artificial Sequence
  Description of Artificial Sequence: Synthetic oligonucleotide
uguauaaugcaauuagcau

SEQ ID NO: 102648 - RNA, 19 nt, Artificial Sequence
  Description of Artificial Sequence: Synthetic oligonucleotide
acugucucaagucacacca

SEQ ID NO: 102649 - RNA, 19 nt, Artificial Sequence
  Description of Artificial Sequence: Synthetic oligonucleotide
aacaauugagcgcucaaaa

SEQ ID NO: 102650 - RNA, 19 nt, Artificial Sequence
  Description of Artificial Sequence: Synthetic oligonucleotide
acaaucugcauuuaucaca

SEQ ID NO: 102651 - RNA, 19 nt, Artificial Sequence
  Description of Artificial Sequence: Synthetic oligonucleotide
aggauuuaaaggacgauac

SEQ ID NO: 102652 - RNA, 19 nt, Artificial Sequence
  Description of Artificial Sequence: Synthetic oligonucleotide
ucuagccauguauagaaug

SEQ ID NO: 102653 - RNA, 19 nt, Artificial Sequence
  Description of Artificial Sequence: Synthetic oligonucleotide
uaugucuauggagacauag

SEQ ID NO: 102654 - RNA, 19 nt, Artificial Sequence
  Description of Artificial Sequence: Synthetic oligonucleotide
uuuguggcuccacauaagc

SEQ ID NO: 102655 - RNA, 19 nt, Artificial Sequence
  Description of Artificial Sequence: Synthetic oligonucleotide
aaggcugaaacacuaacua

SEQ ID NO: 102656 - RNA, 19 nt, Artificial Sequence
  Description of Artificial Sequence: Synthetic oligonucleotide
aauuucugucaccgagacc

SEQ ID NO: 102657 - RNA, 19 nt, Artificial Sequence
  Description of Artificial Sequence: Synthetic oligonucleotide
aucuaaggagaaucaaaac

SEQ ID NO: 102658 - RNA, 19 nt, Artificial Sequence
  Description of Artificial Sequence: Synthetic oligonucleotide
caugguaacacuuagcaaa

SEQ ID NO: 102659 - RNA, 19 nt, Artificial Sequence
  Description of Artificial Sequence: Synthetic oligonucleotide
gacauuaccaaaaugaccu

SEQ ID NO: 102660 - RNA, 19 nt, Artificial Sequence
  Description of Artificial Sequence: Synthetic oligonucleotide
uuuagguaaaggacacucc

SEQ ID NO: 102661 - RNA, 19 nt, Artificial Sequence
  Description of Artificial Sequence: Synthetic oligonucleotide
agcacuuacuguuuacuuc

SEQ ID NO: 102662 - RNA, 19 nt, Artificial Sequence
  Description of Artificial Sequence: Synthetic oligonucleotide
uuggcuuguacuaagggau

SEQ ID NO: 102663 - RNA, 19 nt, Artificial Sequence
  Description of Artificial Sequence: Synthetic oligonucleotide
acuagguuuacccagguuu

SEQ ID NO: 102664 - RNA, 19 nt, Artificial Sequence
  Description of Artificial Sequence: Synthetic oligonucleotide
aacuaggagaggaacaaag

SEQ ID NO: 102665 - RNA, 19 nt, Artificial Sequence
  Description of Artificial Sequence: Synthetic oligonucleotide
uacuaagggauuuccauga

SEQ ID NO: 102666 - RNA, 19 nt, Artificial Sequence
  Description of Artificial Sequence: Synthetic oligonucleotide
agaucaacaauugagcgcu

SEQ ID NO: 102667 - RNA, 19 nt, Artificial Sequence
  Description of Artificial Sequence: Synthetic oligonucleotide
uauaaacccauagaauccc

SEQ ID NO: 102668 - RNA, 19 nt, Artificial Sequence
  Description of Artificial Sequence: Synthetic oligonucleotide
uguacuaagggauuuccau

SEQ ID NO: 102669 - RNA, 19 nt, Artificial Sequence
  Description of Artificial Sequence: Synthetic oligonucleotide
agggauuuccaugacaccg

SEQ ID NO: 102670 - RNA, 19 nt, Artificial Sequence
  Description of Artificial Sequence: Synthetic oligonucleotide
ucauuauagugacagcccu

SEQ ID NO: 102671 - RNA, 19 nt, Artificial Sequence
  Description of Artificial Sequence: Synthetic oligonucleotide
ugggauuaguauaauuuac

SEQ ID NO: 102672 - RNA, 19 nt, Artificial Sequence
  Description of Artificial Sequence: Synthetic oligonucleotide
aagcaaaccgaaggaauac

SEQ ID NO: 102673 - RNA, 19 nt, Artificial Sequence
  Description of Artificial Sequence: Synthetic oligonucleotide
aauagucuucucaggauag

SEQ ID NO: 102674 - RNA, 19 nt, Artificial Sequence
  Description of Artificial Sequence: Synthetic oligonucleotide
gaaguauugagagagcaca

SEQ ID NO: 102675 - RNA, 19 nt, Artificial Sequence
  Description of Artificial Sequence: Synthetic oligonucleotide
accgaaggaauacugaaca

SEQ ID NO: 102676 - RNA, 19 nt, Artificial Sequence
  Description of Artificial Sequence: Synthetic oligonucleotide
uguuugaaguccugggaag

SEQ ID NO: 102677 - RNA, 19 nt, Artificial Sequence
  Description of Artificial Sequence: Synthetic oligonucleotide
aguguaaagaucaacaauu

SEQ ID NO: 102678 - RNA, 19 nt, Artificial Sequence
  Description of Artificial Sequence: Synthetic oligonucleotide
gaaagacggaaucuaagga

SEQ ID NO: 102679 - RNA, 19 nt, Artificial Sequence
  Description of Artificial Sequence: Synthetic oligonucleotide
uucuucggcguuuaaauuc

SEQ ID NO: 102680 - RNA, 19 nt, Artificial Sequence
  Description of Artificial Sequence: Synthetic oligonucleotide
aauaucucuaauugacauu

SEQ ID NO: 102681 - RNA, 19 nt, Artificial Sequence
  Description of Artificial Sequence: Synthetic oligonucleotide
uuaauguacuauugauggc

SEQ ID NO: 102682 - RNA, 19 nt, Artificial Sequence
  Description of Artificial Sequence: Synthetic oligonucleotide
uaagcuuauagaagacucu

SEQ ID NO: 102683 - RNA, 19 nt, Artificial Sequence
  Description of Artificial Sequence: Synthetic oligonucleotide
acggaaucuaaggagaauc

SEQ ID NO: 102684 - RNA, 19 nt, Artificial Sequence
  Description of Artificial Sequence: Synthetic oligonucleotide
agguuagaaauuaggaggg

SEQ ID NO: 102685 - RNA, 19 nt, Artificial Sequence
  Description of Artificial Sequence: Synthetic oligonucleotide
aauugagcgcucaaaauaa

SEQ ID NO: 102686 - RNA, 19 nt, Artificial Sequence
  Description of Artificial Sequence: Synthetic oligonucleotide
ccaccuuugacaaagcacg

SEQ ID NO: 102687 - RNA, 19 nt, Artificial Sequence
  Description of Artificial Sequence: Synthetic oligonucleotide
uguacuauugauggcgccc

SEQ ID NO: 102688 - RNA, 19 nt, Artificial Sequence
  Description of Artificial Sequence: Synthetic oligonucleotide
ucggcguuuaaauucuuug

SEQ ID NO: 102689 - RNA, 19 nt, Artificial Sequence
  Description of Artificial Sequence: Synthetic oligonucleotide
uucaaguaaucccauuauc

SEQ ID NO: 102690 - RNA, 19 nt, Artificial Sequence
  Description of Artificial Sequence: Synthetic oligonucleotide
guaggcuuuagguaaagga

SEQ ID NO: 102691 - RNA, 19 nt, Artificial Sequence
  Description of Artificial Sequence: Synthetic oligonucleotide
ugguaagugacauuaccaa

SEQ ID NO: 102692 - RNA, 19 nt, Artificial Sequence
  Description of Artificial Sequence: Synthetic oligonucleotide
uguuaggucccaacuaggu

SEQ ID NO: 102693 - RNA, 19 nt, Artificial Sequence
  Description of Artificial Sequence: Synthetic oligonucleotide
cuagugaggccucaguccc

SEQ ID NO: 102694 - RNA, 19 nt, Artificial Sequence
  Description of Artificial Sequence: Synthetic oligonucleotide
acuaacuauggcuucugca

SEQ ID NO: 102695 - RNA, 19 nt, Artificial Sequence
  Description of Artificial Sequence: Synthetic oligonucleotide
agagcguucaucaucaagu

SEQ ID NO: 102696 - RNA, 19 nt, Artificial Sequence
  Description of Artificial Sequence: Synthetic oligonucleotide
gucuuagacacuuugucuc

SEQ ID NO: 102697 - RNA, 19 nt, Artificial Sequence
  Description of Artificial Sequence: Synthetic oligonucleotide
uuccaugacaccguguacc

SEQ ID NO: 102698 - RNA, 19 nt, Artificial Sequence
  Description of Artificial Sequence: Synthetic oligonucleotide
cuuuagguaaaggacacuc

SEQ ID NO: 102699 - RNA, 19 nt, Artificial Sequence
  Description of Artificial Sequence: Synthetic oligonucleotide
ugccgaguaagcuggaagc

SEQ ID NO: 102700 - RNA, 19 nt, Artificial Sequence
  Description of Artificial Sequence: Synthetic oligonucleotide
cugcaauaacgcuuuaaag

SEQ ID NO: 102701 - RNA, 19 nt, Artificial Sequence
  Description of Artificial Sequence: Synthetic oligonucleotide
acuaacuacagcauugaca

SEQ ID NO: 102702 - RNA, 19 nt, Artificial Sequence
  Description of Artificial Sequence: Synthetic oligonucleotide
ugacuugucaaguuucaaa

SEQ ID NO: 102703 - RNA, 19 nt, Artificial Sequence
  Description of Artificial Sequence: Synthetic oligonucleotide
aagacggaaucuaaggaga

SEQ ID NO: 102704 - RNA, 19 nt, Artificial Sequence
  Description of Artificial Sequence: Synthetic oligonucleotide
auguacuauugauggcgcc

SEQ ID NO: 102705 - RNA, 19 nt, Artificial Sequence
  Description of Artificial Sequence: Synthetic oligonucleotide
agucaucauaucuugccca

SEQ ID NO: 102706 - RNA, 19 nt, Artificial Sequence
  Description of Artificial Sequence: Synthetic oligonucleotide
auaaggggccaccuuugac

SEQ ID NO: 102707 - RNA, 19 nt, Artificial Sequence
  Description of Artificial Sequence: Synthetic oligonucleotide
gaggauugcauagauugug

SEQ ID NO: 102708 - RNA, 19 nt, Artificial Sequence
  Description of Artificial Sequence: Synthetic oligonucleotide
gaggggaacaaacuaguga

SEQ ID NO: 102709 - RNA, 19 nt, Artificial Sequence
  Description of Artificial Sequence: Synthetic oligonucleotide
ugauguuaggucccaacua

SEQ ID NO: 102710 - RNA, 19 nt, Artificial Sequence
  Description of Artificial Sequence: Synthetic oligonucleotide
cuauggagacauagaaaag

SEQ ID NO: 102711 - RNA, 19 nt, Artificial Sequence
  Description of Artificial Sequence: Synthetic oligonucleotide
uggacacuuacccaccuuc

SEQ ID NO: 102712 - RNA, 19 nt, Artificial Sequence
  Description of Artificial Sequence: Synthetic oligonucleotide
acuaagggauuuccaugac

SEQ ID NO: 102713 - RNA, 19 nt, Artificial Sequence
  Description of Artificial Sequence: Synthetic oligonucleotide
gauguucuugaaauguaac

SEQ ID NO: 102714 - RNA, 19 nt, Artificial Sequence
  Description of Artificial Sequence: Synthetic oligonucleotide
ucuuagacacuuugucucu

SEQ ID NO: 102715 - RNA, 19 nt, Artificial Sequence
  Description of Artificial Sequence: Synthetic oligonucleotide
uuguacuaagggauuucca

SEQ ID NO: 102716 - RNA, 19 nt, Artificial Sequence
  Description of Artificial Sequence: Synthetic oligonucleotide
uucagagaauaguaucuuc

SEQ ID NO: 102717 - RNA, 19 nt, Artificial Sequence
  Description of Artificial Sequence: Synthetic oligonucleotide
augguaacacuuagcaaac

SEQ ID NO: 102718 - RNA, 19 nt, Artificial Sequence
  Description of Artificial Sequence: Synthetic oligonucleotide
auaacagaaugaauagucu

SEQ ID NO: 102719 - RNA, 19 nt, Artificial Sequence
  Description of Artificial Sequence: Synthetic oligonucleotide
gaauagucuucucaggaua

SEQ ID NO: 102720 - RNA, 19 nt, Artificial Sequence
  Description of Artificial Sequence: Synthetic oligonucleotide
acaauugagcgcucaaaau

SEQ ID NO: 102721 - RNA, 19 nt, Artificial Sequence
  Description of Artificial Sequence: Synthetic oligonucleotide
acauuaccaaaaugaccuc

SEQ ID NO: 102722 - RNA, 19 nt, Artificial Sequence
  Description of Artificial Sequence: Synthetic oligonucleotide
auauaguggcaccuaggca

SEQ ID NO: 102723 - RNA, 19 nt, Artificial Sequence
  Description of Artificial Sequence: Synthetic oligonucleotide
agcguucaucaucaaguuc

SEQ ID NO: 102724 - RNA, 19 nt, Artificial Sequence
  Description of Artificial Sequence: Synthetic oligonucleotide
uggugacuaacuauggcuu

SEQ ID NO: 102725 - RNA, 19 nt, Artificial Sequence
  Description of Artificial Sequence: Synthetic oligonucleotide
auaacuaggagaggaacaa

SEQ ID NO: 102726 - RNA, 19 nt, Artificial Sequence
  Description of Artificial Sequence: Synthetic oligonucleotide
caugauucgggagauguuc

SEQ ID NO: 102727 - RNA, 19 nt, Artificial Sequence
  Description of Artificial Sequence: Synthetic oligonucleotide
uguaggcuuuagguaaagg

SEQ ID NO: 102728 - RNA, 19 nt, Artificial Sequence
  Description of Artificial Sequence: Synthetic oligonucleotide
gguggugacacuccugccg

SEQ ID NO: 102729 - RNA, 19 nt, Artificial Sequence
  Description of Artificial Sequence: Synthetic oligonucleotide
uuagcauuauaaacccaua

SEQ ID NO: 102730 - RNA, 19 nt, Artificial Sequence
  Description of Artificial Sequence: Synthetic oligonucleotide
gaacaaacuagugaggccu

SEQ ID NO: 102731 - RNA, 19 nt, Artificial Sequence
  Description of Artificial Sequence: Synthetic oligonucleotide
cacaaucugcauuuaucac

SEQ ID NO: 102732 - RNA, 19 nt, Artificial Sequence
  Description of Artificial Sequence: Synthetic oligonucleotide
cauuauagugacagcccug

SEQ ID NO: 102733 - RNA, 19 nt, Artificial Sequence
  Description of Artificial Sequence: Synthetic oligonucleotide
accgagaccagcccuaggu

SEQ ID NO: 102734 - RNA, 19 nt, Artificial Sequence
  Description of Artificial Sequence: Synthetic oligonucleotide
aagcuuauagaagacucuu

SEQ ID NO: 102735 - RNA, 19 nt, Artificial Sequence
  Description of Artificial Sequence: Synthetic oligonucleotide
aacaaacuagugaggccuc

SEQ ID NO: 102736 - RNA, 19 nt, Artificial Sequence
  Description of Artificial Sequence: Synthetic oligonucleotide
caauugagcgcucaaaaua

SEQ ID NO: 102737 - RNA, 19 nt, Artificial Sequence
  Description of Artificial Sequence: Synthetic oligonucleotide
guacuagcaaagucacugc

SEQ ID NO: 102738 - RNA, 19 nt, Artificial Sequence
  Description of Artificial Sequence: Synthetic oligonucleotide
acggcaacuaaacaucuua

SEQ ID NO: 102739 - RNA, 19 nt, Artificial Sequence
  Description of Artificial Sequence: Synthetic oligonucleotide
guuagaaauuaggagggga

SEQ ID NO: 102740 - RNA, 19 nt, Artificial Sequence
  Description of Artificial Sequence: Synthetic oligonucleotide
acgaaguauugagagagca

SEQ ID NO: 102741 - RNA, 19 nt, Artificial Sequence
  Description of Artificial Sequence: Synthetic oligonucleotide
cauggucuagauucuggug

SEQ ID NO: 102742 - RNA, 19 nt, Artificial Sequence
  Description of Artificial Sequence: Synthetic oligonucleotide
ggauuaguauaauuuacaa

SEQ ID NO: 102743 - RNA, 19 nt, Artificial Sequence
  Description of Artificial Sequence: Synthetic oligonucleotide
aaggcaguuccuaaacccu

SEQ ID NO: 102744 - RNA, 19 nt, Artificial Sequence
  Description of Artificial Sequence: Synthetic oligonucleotide
augacgaaguauugagaga

SEQ ID NO: 102745 - RNA, 19 nt, Artificial Sequence
  Description of Artificial Sequence: Synthetic oligonucleotide
uguggguuuaagagcacuu

SEQ ID NO: 102746 - RNA, 19 nt, Artificial Sequence
  Description of Artificial Sequence: Synthetic oligonucleotide
caugggauuaguauaauuu

SEQ ID NO: 102747 - RNA, 19 nt, Artificial Sequence
  Description of Artificial Sequence: Synthetic oligonucleotide
auuaggaggggaacaaacu

SEQ ID NO: 102748 - RNA, 19 nt, Artificial Sequence
  Description of Artificial Sequence: Synthetic oligonucleotide
gaaccucucucacuaguca

SEQ ID NO: 102749 - RNA, 19 nt, Artificial Sequence
  Description of Artificial Sequence: Synthetic oligonucleotide
uccaugacaccguguaccu

SEQ ID NO: 102750 - RNA, 19 nt, Artificial Sequence
  Description of Artificial Sequence: Synthetic oligonucleotide
uuauauauaguggcaccua

SEQ ID NO: 102751 - RNA, 19 nt, Artificial Sequence
  Description of Artificial Sequence: Synthetic oligonucleotide
gacacuuacccaccuucac

SEQ ID NO: 102752 - RNA, 19 nt, Artificial Sequence
  Description of Artificial Sequence: Synthetic oligonucleotide
auguaaauugaugcuggca

SEQ ID NO: 102753 - RNA, 19 nt, Artificial Sequence
  Description of Artificial Sequence: Synthetic oligonucleotide
ccuauaaaauucaccuagc

SEQ ID NO: 102754 - RNA, 19 nt, Artificial Sequence
  Description of Artificial Sequence: Synthetic oligonucleotide
guagaugacgaaguauuga

SEQ ID NO: 102755 - RNA, 19 nt, Artificial Sequence
  Description of Artificial Sequence: Synthetic oligonucleotide
acaccguguaccugggucu

SEQ ID NO: 102756 - RNA, 19 nt, Artificial Sequence
  Description of Artificial Sequence: Synthetic oligonucleotide
acaauucaggggcccaaca

SEQ ID NO: 102757 - RNA, 19 nt, Artificial Sequence
  Description of Artificial Sequence: Synthetic oligonucleotide
ugucaccgagaccagcccu

SEQ ID NO: 102758 - RNA, 19 nt, Artificial Sequence
  Description of Artificial Sequence: Synthetic oligonucleotide
uaauuugcacacagaugua

SEQ ID NO: 102759 - RNA, 19 nt, Artificial Sequence
  Description of Artificial Sequence: Synthetic oligonucleotide
agauagaaucacacaaaga

SEQ ID NO: 102760 - RNA, 19 nt, Artificial Sequence
  Description of Artificial Sequence: Synthetic oligonucleotide
ucauuaccucuugugcugc

SEQ ID NO: 102761 - RNA, 19 nt, Artificial Sequence
  Description of Artificial Sequence: Synthetic oligonucleotide
ggaguuguaggcuuuaggu

SEQ ID NO: 102762 - RNA, 19 nt, Artificial Sequence
  Description of Artificial Sequence: Synthetic oligonucleotide
cugccgaguaagcuggaag

SEQ ID NO: 102763 - RNA, 19 nt, Artificial Sequence
  Description of Artificial Sequence: Synthetic oligonucleotide
agagcacuuacuguuuacu

SEQ ID NO: 102764 - RNA, 19 nt, Artificial Sequence
  Description of Artificial Sequence: Synthetic oligonucleotide
cuuacagugguccacuccu

SEQ ID NO: 102765 - RNA, 19 nt, Artificial Sequence
  Description of Artificial Sequence: Synthetic oligonucleotide
gagcacaaugaaccaacuc

SEQ ID NO: 102766 - RNA, 19 nt, Artificial Sequence
  Description of Artificial Sequence: Synthetic oligonucleotide
acaugggauuaguauaauu

SEQ ID NO: 102767 - RNA, 19 nt, Artificial Sequence
  Description of Artificial Sequence: Synthetic oligonucleotide
auguuaggucccaacuagg

SEQ ID NO: 102768 - RNA, 19 nt, Artificial Sequence
  Description of Artificial Sequence: Synthetic oligonucleotide
ccacauacugcgcagcagg

SEQ ID NO: 102769 - RNA, 19 nt, Artificial Sequence
  Description of Artificial Sequence: Synthetic oligonucleotide
aggacuuuguguccuggaa

SEQ ID NO: 102770 - RNA, 19 nt, Artificial Sequence
  Description of Artificial Sequence: Synthetic oligonucleotide
cacagaucguggcuugaag

SEQ ID NO: 102771 - RNA, 19 nt, Artificial Sequence
  Description of Artificial Sequence: Synthetic oligonucleotide
aaucccagguuuagaaaau

SEQ ID NO: 102772 - RNA, 19 nt, Artificial Sequence
  Description of Artificial Sequence: Synthetic oligonucleotide
aacuagguuuacccagguu

SEQ ID NO: 102773 - RNA, 19 nt, Artificial Sequence
  Description of Artificial Sequence: Synthetic oligonucleotide
cccaacuagguuuacccag

SEQ ID NO: 102774 - RNA, 19 nt, Artificial Sequence
  Description of Artificial Sequence: Synthetic oligonucleotide
ugagcauggguggacacuu

SEQ ID NO: 102775 - RNA, 19 nt, Artificial Sequence
  Description of Artificial Sequence: Synthetic oligonucleotide
guggcaccuaggcagaguc

SEQ ID NO: 102776 - RNA, 19 nt, Artificial Sequence
  Description of Artificial Sequence: Synthetic oligonucleotide
auugagcgcucaaaauaag

SEQ ID NO: 102777 - RNA, 19 nt, Artificial Sequence
  Description of Artificial Sequence: Synthetic oligonucleotide
aggggcccaacauuugacu

SEQ ID NO: 102778 - RNA, 19 nt, Artificial Sequence
  Description of Artificial Sequence: Synthetic oligonucleotide
gguaacacuuagcaaacua

SEQ ID NO: 102779 - RNA, 19 nt, Artificial Sequence
  Description of Artificial Sequence: Synthetic oligonucleotide
caaagagguagaggauugc

SEQ ID NO: 102780 - RNA, 19 nt, Artificial Sequence
  Description of Artificial Sequence: Synthetic oligonucleotide
gggauuaguauaauuuaca

SEQ ID NO: 102781 - RNA, 19 nt, Artificial Sequence
  Description of Artificial Sequence: Synthetic oligonucleotide
gacgaaguauugagagagc

SEQ ID NO: 102782 - RNA, 19 nt, Artificial Sequence
  Description of Artificial Sequence: Synthetic oligonucleotide
aagcaucucaccagauaga

SEQ ID NO: 102783 - RNA, 19 nt, Artificial Sequence
  Description of Artificial Sequence: Synthetic oligonucleotide
ggccuauucauuauaguga

SEQ ID NO: 102784 - RNA, 19 nt, Artificial Sequence
  Description of Artificial Sequence: Synthetic oligonucleotide
aucaacaauugagcgcuca

SEQ ID NO: 102785 - RNA, 19 nt, Artificial Sequence
  Description of Artificial Sequence: Synthetic oligonucleotide
cacuccacucuugagccag

SEQ ID NO: 102786 - RNA, 19 nt, Artificial Sequence
  Description of Artificial Sequence: Synthetic oligonucleotide
agaugacgaaguauugaga

SEQ ID NO: 102787 - RNA, 19 nt, Artificial Sequence
  Description of Artificial Sequence: Synthetic oligonucleotide
cuuauauauaguggcaccu

SEQ ID NO: 102788 - RNA, 19 nt, Artificial Sequence
  Description of Artificial Sequence: Synthetic oligonucleotide
ggacgauacacagaucgug

SEQ ID NO: 102789 - RNA, 19 nt, Artificial Sequence
  Description of Artificial Sequence: Synthetic oligonucleotide
ggauuuaaaggacgauaca

SEQ ID NO: 102790 - RNA, 19 nt, Artificial Sequence
  Description of Artificial Sequence: Synthetic oligonucleotide
augucuauggagacauaga

SEQ ID NO: 102791 - RNA, 19 nt, Artificial Sequence
  Description of Artificial Sequence: Synthetic oligonucleotide
gacucacauuacuuccaca

SEQ ID NO: 102792 - RNA, 19 nt, Artificial Sequence
  Description of Artificial Sequence: Synthetic oligonucleotide
accggaauuccuccuuuaa

SEQ ID NO: 102793 - RNA, 19 nt, Artificial Sequence
  Description of Artificial Sequence: Synthetic oligonucleotide
guggugacacuccugccga

SEQ ID NO: 102794 - RNA, 19 nt, Artificial Sequence
  Description of Artificial Sequence: Synthetic oligonucleotide
uaacuaggagaggaacaaa

SEQ ID NO: 102795 - RNA, 19 nt, Artificial Sequence
  Description of Artificial Sequence: Synthetic oligonucleotide
ugcugcaauaacgcuuuaa

SEQ ID NO: 102796 - RNA, 19 nt, Artificial Sequence
  Description of Artificial Sequence: Synthetic oligonucleotide
auaaacccauagaauccca

SEQ ID NO: 102797 - RNA, 19 nt, Artificial Sequence
  Description of Artificial Sequence: Synthetic oligonucleotide
guacuauugauggcgccca

SEQ ID NO: 102798 - RNA, 19 nt, Artificial Sequence
  Description of Artificial Sequence: Synthetic oligonucleotide
gaacacugaccauuuuagu

SEQ ID NO: 102799 - RNA, 19 nt, Artificial Sequence
  Description of Artificial Sequence: Synthetic oligonucleotide
gguuuacccagguuucuuc

SEQ ID NO: 102800 - RNA, 19 nt, Artificial Sequence
  Description of Artificial Sequence: Synthetic oligonucleotide
gcagcaacggcaacuaaac

SEQ ID NO: 102801 - RNA, 19 nt, Artificial Sequence
  Description of Artificial Sequence: Synthetic oligonucleotide
caggggcccaacauuugac

SEQ ID NO: 102802 - RNA, 19 nt, Artificial Sequence
  Description of Artificial Sequence: Synthetic oligonucleotide
aucucaccagauagaauca

SEQ ID NO: 102803 - RNA, 19 nt, Artificial Sequence
  Description of Artificial Sequence: Synthetic oligonucleotide
uggcuuguacuaagggauu

SEQ ID NO: 102804 - RNA, 19 nt, Artificial Sequence
  Description of Artificial Sequence: Synthetic oligonucleotide
acaaaccuucuagccaugu

SEQ ID NO: 102805 - RNA, 19 nt, Artificial Sequence
  Description of Artificial Sequence: Synthetic oligonucleotide
gcuuacagugguccacucc

SEQ ID NO: 102806 - RNA, 19 nt, Artificial Sequence
  Description of Artificial Sequence: Synthetic oligonucleotide
ggcuuuagguaaaggacac

SEQ ID NO: 102807 - RNA, 19 nt, Artificial Sequence
  Description of Artificial Sequence: Synthetic oligonucleotide
cuagauucugguggguaca

SEQ ID NO: 102808 - RNA, 19 nt, Artificial Sequence
  Description of Artificial Sequence: Synthetic oligonucleotide
ugguaacacuuagcaaacu

SEQ ID NO: 102809 - RNA, 19 nt, Artificial Sequence
  Description of Artificial Sequence: Synthetic oligonucleotide
guggguacaacaguaaauu

SEQ ID NO: 102810 - RNA, 19 nt, Artificial Sequence
  Description of Artificial Sequence: Synthetic oligonucleotide
uggcaccuaggcagaguca

SEQ ID NO: 102811 - RNA, 19 nt, Artificial Sequence
  Description of Artificial Sequence: Synthetic oligonucleotide
guuccacacccuccaugcc

SEQ ID NO: 102812 - RNA, 19 nt, Artificial Sequence
  Description of Artificial Sequence: Synthetic oligonucleotide
cuagucacugaaaggccua

SEQ ID NO: 102813 - RNA, 19 nt, Artificial Sequence
  Description of Artificial Sequence: Synthetic oligonucleotide
aguccugauauaagcuuau

SEQ ID NO: 102814 - RNA, 19 nt, Artificial Sequence
  Description of Artificial Sequence: Synthetic oligonucleotide
auaguggcaccuaggcaga

SEQ ID NO: 102815 - RNA, 19 nt, Artificial Sequence
  Description of Artificial Sequence: Synthetic oligonucleotide
aggacgauacacagaucgu

SEQ ID NO: 102816 - RNA, 19 nt, Artificial Sequence
  Description of Artificial Sequence: Synthetic oligonucleotide
ccgaggagcccuuguagcc

SEQ ID NO: 102817 - RNA, 19 nt, Artificial Sequence
  Description of Artificial Sequence: Synthetic oligonucleotide
aacggcaacuaaacaucuu

SEQ ID NO: 102818 - RNA, 19 nt, Artificial Sequence
  Description of Artificial Sequence: Synthetic oligonucleotide
agacggaaucuaaggagaa

SEQ ID NO: 102819 - RNA, 19 nt, Artificial Sequence
  Description of Artificial Sequence: Synthetic oligonucleotide
caccuuugacaaagcacga

SEQ ID NO: 102820 - RNA, 19 nt, Artificial Sequence
  Description of Artificial Sequence: Synthetic oligonucleotide
caacaauugagcgcucaaa

SEQ ID NO: 102821 - RNA, 19 nt, Artificial Sequence
  Description of Artificial Sequence: Synthetic oligonucleotide
auaacgcuuuaaaguucug

SEQ ID NO: 102822 - RNA, 19 nt, Artificial Sequence
  Description of Artificial Sequence: Synthetic oligonucleotide
caguguaccgcucuggguu

SEQ ID NO: 102823 - RNA, 19 nt, Artificial Sequence
  Description of Artificial Sequence: Synthetic oligonucleotide
gcgcucaaaauaaggggcc

SEQ ID NO: 102824 - RNA, 19 nt, Artificial Sequence
  Description of Artificial Sequence: Synthetic oligonucleotide
gggaugaauugaaaaugga

SEQ ID NO: 102825 - RNA, 19 nt, Artificial Sequence
  Description of Artificial Sequence: Synthetic oligonucleotide
ccgaaggaauacugaacac

SEQ ID NO: 102826 - RNA, 19 nt, Artificial Sequence
  Description of Artificial Sequence: Synthetic oligonucleotide
ggguacaacaguaaauuau

SEQ ID NO: 102827 - RNA, 19 nt, Artificial Sequence
  Description of Artificial Sequence: Synthetic oligonucleotide
cccaacauuugacuuguca

SEQ ID NO: 102828 - RNA, 19 nt, Artificial Sequence
  Description of Artificial Sequence: Synthetic oligonucleotide
acaguccauuaugucuaug

SEQ ID NO: 102829 - RNA, 19 nt, Artificial Sequence
  Description of Artificial Sequence: Synthetic oligonucleotide
guuaggucccaacuagguu

SEQ ID NO: 102830 - RNA, 19 nt, Artificial Sequence
  Description of Artificial Sequence: Synthetic oligonucleotide
cugguguacacaggacauc

SEQ ID NO: 102831 - RNA, 19 nt, Artificial Sequence
  Description of Artificial Sequence: Synthetic oligonucleotide
ggaggggaacaaacuagug

SEQ ID NO: 102832 - RNA, 19 nt, Artificial Sequence
  Description of Artificial Sequence: Synthetic oligonucleotide
cacgaagcucaaucaagua

SEQ ID NO: 102833 - RNA, 19 nt, Artificial Sequence
  Description of Artificial Sequence: Synthetic oligonucleotide
ccaaggcagguccuuuuag

SEQ ID NO: 102834 - RNA, 19 nt, Artificial Sequence
  Description of Artificial Sequence: Synthetic oligonucleotide
agauaagauguggguuuaa

SEQ ID NO: 102835 - RNA, 19 nt, Artificial Sequence
  Description of Artificial Sequence: Synthetic oligonucleotide
auaaugcaauuagcauuau

SEQ ID NO: 102836 - RNA, 19 nt, Artificial Sequence
  Description of Artificial Sequence: Synthetic oligonucleotide
gagcguucaucaucaaguu

SEQ ID NO: 102837 - RNA, 19 nt, Artificial Sequence
  Description of Artificial Sequence: Synthetic oligonucleotide
gccgaguaagcuggaagcc

SEQ ID NO: 102838 - RNA, 19 nt, Artificial Sequence
  Description of Artificial Sequence: Synthetic oligonucleotide
ggucccaacuagguuuacc

SEQ ID NO: 102839 - RNA, 19 nt, Artificial Sequence
  Description of Artificial Sequence: Synthetic oligonucleotide
gccgaagcaucucaccaga

SEQ ID NO: 102840 - RNA, 19 nt, Artificial Sequence
  Description of Artificial Sequence: Synthetic oligonucleotide
agguuuacccagguuucuu

SEQ ID NO: 102841 - RNA, 19 nt, Artificial Sequence
  Description of Artificial Sequence: Synthetic oligonucleotide
caaaccuucuagccaugua

SEQ ID NO: 102842 - RNA, 19 nt, Artificial Sequence
  Description of Artificial Sequence: Synthetic oligonucleotide
cauuaccucuugugcugca

SEQ ID NO: 102843 - RNA, 19 nt, Artificial Sequence
  Description of Artificial Sequence: Synthetic oligonucleotide
cuaaacccugagucugcaa

SEQ ID NO: 102844 - RNA, 19 nt, Artificial Sequence
  Description of Artificial Sequence: Synthetic oligonucleotide
gcaccuguaaaugucauuu

SEQ ID NO: 102845 - RNA, 19 nt, Artificial Sequence
  Description of Artificial Sequence: Synthetic oligonucleotide
cacacaccaugaaguacaa

SEQ ID NO: 102846 - RNA, 19 nt, Artificial Sequence
  Description of Artificial Sequence: Synthetic oligonucleotide
uccugccgaguaagcugga

SEQ ID NO: 102847 - RNA, 19 nt, Artificial Sequence
  Description of Artificial Sequence: Synthetic oligonucleotide
gcuuguacuaagggauuuc

SEQ ID NO: 102848 - RNA, 19 nt, Artificial Sequence
  Description of Artificial Sequence: Synthetic oligonucleotide
ggacacuuacccaccuuca

SEQ ID NO: 102849 - RNA, 19 nt, Artificial Sequence
  Description of Artificial Sequence: Synthetic oligonucleotide
cugucucaagucacaccaa

SEQ ID NO: 102850 - RNA, 19 nt, Artificial Sequence
  Description of Artificial Sequence: Synthetic oligonucleotide
gacggaaucuaaggagaau

SEQ ID NO: 102851 - RNA, 19 nt, Artificial Sequence
  Description of Artificial Sequence: Synthetic oligonucleotide
ccuucuagccauguauaga

SEQ ID NO: 102852 - RNA, 19 nt, Artificial Sequence
  Description of Artificial Sequence: Synthetic oligonucleotide
ggguggacacuuacccacc

SEQ ID NO: 102853 - RNA, 19 nt, Artificial Sequence
  Description of Artificial Sequence: Synthetic oligonucleotide
gcacgaagcucaaucaagu

SEQ ID NO: 102854 - RNA, 19 nt, Artificial Sequence
  Description of Artificial Sequence: Synthetic oligonucleotide
caacuagguuuacccaggu

SEQ ID NO: 102855 - RNA, 19 nt, Artificial Sequence
  Description of Artificial Sequence: Synthetic oligonucleotide
guagaggauugcauagauu

SEQ ID NO: 102856 - RNA, 19 nt, Artificial Sequence
  Description of Artificial Sequence: Synthetic oligonucleotide
guccugauauaagcuuaua

SEQ ID NO: 102857 - RNA, 19 nt, Artificial Sequence
  Description of Artificial Sequence: Synthetic oligonucleotide
ggcccaacauuugacuugu

SEQ ID NO: 102858 - RNA, 19 nt, Artificial Sequence
  Description of Artificial Sequence: Synthetic oligonucleotide
caugccgaggagcccuugu

SEQ ID NO: 102859 - RNA, 19 nt, Artificial Sequence
  Description of Artificial Sequence: Synthetic oligonucleotide
gaguaagcuggaagccuuu

SEQ ID NO: 102860 - RNA, 19 nt, Artificial Sequence
  Description of Artificial Sequence: Synthetic oligonucleotide
guggacacuuacccaccuu

SEQ ID NO: 102861 - RNA, 19 nt, Artificial Sequence
  Description of Artificial Sequence: Synthetic oligonucleotide
gcuuuagguaaaggacacu

SEQ ID NO: 102862 - RNA, 19 nt, Artificial Sequence
  Description of Artificial Sequence: Synthetic oligonucleotide
ggcuuguacuaagggauuu

SEQ ID NO: 102863 - RNA, 19 nt, Artificial Sequence
  Description of Artificial Sequence: Synthetic oligonucleotide
ccacacccuccaugccgag

SEQ ID NO: 102864 - RNA, 19 nt, Artificial Sequence
  Description of Artificial Sequence: Synthetic oligonucleotide
cgcucaaaauaaggggcca

SEQ ID NO: 102865 - RNA, 19 nt, Artificial Sequence
  Description of Artificial Sequence: Synthetic oligonucleotide
ccgaguaagcuggaagccu

SEQ ID NO: 102866 - RNA, 19 nt, Artificial Sequence
  Description of Artificial Sequence: Synthetic oligonucleotide
ccgaagcaucucaccagau

SEQ ID NO: 102867 - RNA, 19 nt, Artificial Sequence
  Description of Artificial Sequence: Synthetic oligonucleotide
gcccaacauuugacuuguc

SEQ ID NO: 102868 - RNA, 19 nt, Artificial Sequence
  Description of Artificial Sequence: Synthetic oligonucleotide
aauguuuauaccuugaucc

SEQ ID NO: 102869 - RNA, 19 nt, Artificial Sequence
  Description of Artificial Sequence: Synthetic oligonucleotide
aauaauuugauacuuauag

SEQ ID NO: 102870 - RNA, 19 nt, Artificial Sequence
  Description of Artificial Sequence: Synthetic oligonucleotide
cauaagaucaaauaggucg

SEQ ID NO: 102871 - RNA, 19 nt, Artificial Sequence
  Description of Artificial Sequence: Synthetic oligonucleotide
aaugccguauuauagacac

SEQ ID NO: 102872 - RNA, 19 nt, Artificial Sequence
  Description of Artificial Sequence: Synthetic oligonucleotide
uuugauuuagccauaauca

SEQ ID NO: 102873 - RNA, 19 nt, Artificial Sequence
  Description of Artificial Sequence: Synthetic oligonucleotide
uuaauguagaaucacagca

SEQ ID NO: 102874 - RNA, 19 nt, Artificial Sequence
  Description of Artificial Sequence: Synthetic oligonucleotide
gaauuguucauacauaaag

SEQ ID NO: 102875 - RNA, 19 nt, Artificial Sequence
  Description of Artificial Sequence: Synthetic oligonucleotide
aauguagaaucacagcagg

SEQ ID NO: 102876 - RNA, 19 nt, Artificial Sequence
  Description of Artificial Sequence: Synthetic oligonucleotide
uuaaugaacguuuuaaugu

SEQ ID NO: 102877 - RNA, 19 nt, Artificial Sequence
  Description of Artificial Sequence: Synthetic oligonucleotide
uaacuuaagguuuuaaugc

SEQ ID NO: 102878 - RNA, 19 nt, Artificial Sequence
  Description of Artificial Sequence: Synthetic oligonucleotide
guaguaaaggaacagaccc

SEQ ID NO: 102879 - RNA, 19 nt, Artificial Sequence
  Description of Artificial Sequence: Synthetic oligonucleotide
auuuacucagcccugugcc

SEQ ID NO: 102880 - RNA, 19 nt, Artificial Sequence
  Description of Artificial Sequence: Synthetic oligonucleotide
ugugauauggauaugcuuc

SEQ ID NO: 102881 - RNA, 19 nt, Artificial Sequence
  Description of Artificial Sequence: Synthetic oligonucleotide
aauaaaucaguugauccuc

SEQ ID NO: 102882 - RNA, 19 nt, Artificial Sequence
  Description of Artificial Sequence: Synthetic oligonucleotide
ugcuguucggcacugaugg

SEQ ID NO: 102883 - RNA, 19 nt, Artificial Sequence
  Description of Artificial Sequence: Synthetic oligonucleotide
uaauauauaucgaacuucu

SEQ ID NO: 102884 - RNA, 19 nt, Artificial Sequence
  Description of Artificial Sequence: Synthetic oligonucleotide
aauaauauauaucgaacuu

SEQ ID NO: 102885 - RNA, 19 nt, Artificial Sequence
  Description of Artificial Sequence: Synthetic oligonucleotide
aaaugguaauuuuccaggg

SEQ ID NO: 102886 - RNA, 19 nt, Artificial Sequence
  Description of Artificial Sequence: Synthetic oligonucleotide
uaugacaaggcgauugagg

SEQ ID NO: 102887 - RNA, 19 nt, Artificial Sequence
  Description of Artificial Sequence: Synthetic oligonucleotide
aaccauauugcuaaugccg

SEQ ID NO: 102888 - RNA, 19 nt, Artificial Sequence
  Description of Artificial Sequence: Synthetic oligonucleotide
uauaucgaacuucuauugg

SEQ ID NO: 102889 - RNA, 19 nt, Artificial Sequence
  Description of Artificial Sequence: Synthetic oligonucleotide
augacaaggcgauugaggg

SEQ ID NO: 102890 - RNA, 19 nt, Artificial Sequence
  Description of Artificial Sequence: Synthetic oligonucleotide
aguuguaucaauugaauaa

SEQ ID NO: 102891 - RNA, 19 nt, Artificial Sequence
  Description of Artificial Sequence: Synthetic oligonucleotide
auaauauauaucgaacuuc

SEQ ID NO: 102892 - RNA, 19 nt, Artificial Sequence
  Description of Artificial Sequence: Synthetic oligonucleotide
aaaugauccugacugccuc

SEQ ID NO: 102893 - RNA, 19 nt, Artificial Sequence
  Description of Artificial Sequence: Synthetic oligonucleotide
uguuguugaaucauugugu

SEQ ID NO: 102894 - RNA, 19 nt, Artificial Sequence
  Description of Artificial Sequence: Synthetic oligonucleotide
ucugaauccgccaacgcug

SEQ ID NO: 102895 - RNA, 19 nt, Artificial Sequence
  Description of Artificial Sequence: Synthetic oligonucleotide
auaaucacauauguaugcc

SEQ ID NO: 102896 - RNA, 19 nt, Artificial Sequence
  Description of Artificial Sequence: Synthetic oligonucleotide
ugauuuagccauaaucaca

SEQ ID NO: 102897 - RNA, 19 nt, Artificial Sequence
  Description of Artificial Sequence: Synthetic oligonucleotide
auauaucgaacuucuauug

SEQ ID NO: 102898 - RNA, 19 nt, Artificial Sequence
  Description of Artificial Sequence: Synthetic oligonucleotide
ugcuaaugccguauuauag

SEQ ID NO: 102899 - RNA, 19 nt, Artificial Sequence
  Description of Artificial Sequence: Synthetic oligonucleotide
cuugcguugcuucugaacc

SEQ ID NO: 102900 - RNA, 19 nt, Artificial Sequence
  Description of Artificial Sequence: Synthetic oligonucleotide
uuagcauucgggaccaaag

SEQ ID NO: 102901 - RNA, 19 nt, Artificial Sequence
  Description of Artificial Sequence: Synthetic oligonucleotide
agcaacgacuuauaaacuc

SEQ ID NO: 102902 - RNA, 19 nt, Artificial Sequence
  Description of Artificial Sequence: Synthetic oligonucleotide
aauaggucggaagaguuug

SEQ ID NO: 102903 - RNA, 19 nt, Artificial Sequence
  Description of Artificial Sequence: Synthetic oligonucleotide
uauauaucgaacuucuauu

SEQ ID NO: 102904 - RNA, 19 nt, Artificial Sequence
  Description of Artificial Sequence: Synthetic oligonucleotide
agcccauaagaucaaauag

SEQ ID NO: 102905 - RNA, 19 nt, Artificial Sequence
  Description of Artificial Sequence: Synthetic oligonucleotide
ucgaacuucuauuggaacc

SEQ ID NO: 102906 - RNA, 19 nt, Artificial Sequence
  Description of Artificial Sequence: Synthetic oligonucleotide
acgggguaauuauagaagg

SEQ ID NO: 102907 - RNA, 19 nt, Artificial Sequence
  Description of Artificial Sequence: Synthetic oligonucleotide
uugagguugaaacauuuaa

SEQ ID NO: 102908 - RNA, 19 nt, Artificial Sequence
  Description of Artificial Sequence: Synthetic oligonucleotide
uuauagaaggagacacggg

SEQ ID NO: 102909 - RNA, 19 nt, Artificial Sequence
  Description of Artificial Sequence: Synthetic oligonucleotide
cauuguaucugaauccgcc

SEQ ID NO: 102910 - RNA, 19 nt, Artificial Sequence
  Description of Artificial Sequence: Synthetic oligonucleotide
uuuuggacggguuugcugu

SEQ ID NO: 102911 - RNA, 19 nt, Artificial Sequence
  Description of Artificial Sequence: Synthetic oligonucleotide
ugaguccuaacuuuuauau

SEQ ID NO: 102912 - RNA, 19 nt, Artificial Sequence
  Description of Artificial Sequence: Synthetic oligonucleotide
auauggauaugcuucguug

SEQ ID NO: 102913 - RNA, 19 nt, Artificial Sequence
  Description of Artificial Sequence: Synthetic oligonucleotide
gaugaguucuacugcaggc

SEQ ID NO: 102914 - RNA, 19 nt, Artificial Sequence
  Description of Artificial Sequence: Synthetic oligonucleotide
auaagaucaaauaggucgg

SEQ ID NO: 102915 - RNA, 19 nt, Artificial Sequence
  Description of Artificial Sequence: Synthetic oligonucleotide
gcagcaacgacuuauaaac

SEQ ID NO: 102916 - RNA, 19 nt, Artificial Sequence
  Description of Artificial Sequence: Synthetic oligonucleotide
ucgauugugcuuccgaucu

SEQ ID NO: 102917 - RNA, 19 nt, Artificial Sequence
  Description of Artificial Sequence: Synthetic oligonucleotide
aacauugcugaguccuaac

SEQ ID NO: 102918 - RNA, 19 nt, Artificial Sequence
  Description of Artificial Sequence: Synthetic oligonucleotide
cugcauaccagguaguaag

SEQ ID NO: 102919 - RNA, 19 nt, Artificial Sequence
  Description of Artificial Sequence: Synthetic oligonucleotide
uugauuuagccauaaucac

SEQ ID NO: 102920 - RNA, 19 nt, Artificial Sequence
  Description of Artificial Sequence: Synthetic oligonucleotide
cauaaaugugcucucuggc

SEQ ID NO: 102921 - RNA, 19 nt, Artificial Sequence
  Description of Artificial Sequence: Synthetic oligonucleotide
uguggguuauuuaauuaac

SEQ ID NO: 102922 - RNA, 19 nt, Artificial Sequence
  Description of Artificial Sequence: Synthetic oligonucleotide
auaucgaacuucuauugga

SEQ ID NO: 102923 - RNA, 19 nt, Artificial Sequence
  Description of Artificial Sequence: Synthetic oligonucleotide
aucagguuaccuuugauuu

SEQ ID NO: 102924 - RNA, 19 nt, Artificial Sequence
  Description of Artificial Sequence: Synthetic oligonucleotide
aucaccuauuugcagcuac

SEQ ID NO: 102925 - RNA, 19 nt, Artificial Sequence
  Description of Artificial Sequence: Synthetic oligonucleotide
uauggacugagagugguag

SEQ ID NO: 102926 - RNA, 19 nt, Artificial Sequence
  Description of Artificial Sequence: Synthetic oligonucleotide
uguaacaacucucuccgau

SEQ ID NO: 102927 - RNA, 19 nt, Artificial Sequence
  Description of Artificial Sequence: Synthetic oligonucleotide
gcuacaaggauaugcacgg

SEQ ID NO: 102928 - RNA, 19 nt, Artificial Sequence
  Description of Artificial Sequence: Synthetic oligonucleotide
acccaauuaugacaaggcg

SEQ ID NO: 102929 - RNA, 19 nt, Artificial Sequence
  Description of Artificial Sequence: Synthetic oligonucleotide
cuaaugccguauuauagac

SEQ ID NO: 102930 - RNA, 19 nt, Artificial Sequence
  Description of Artificial Sequence: Synthetic oligonucleotide
aaguuguaucaauugaaua

SEQ ID NO: 102931 - RNA, 19 nt, Artificial Sequence
  Description of Artificial Sequence: Synthetic oligonucleotide
uguguuaagcgacggcugc

SEQ ID NO: 102932 - RNA, 19 nt, Artificial Sequence
  Description of Artificial Sequence: Synthetic oligonucleotide
uuucauauauggacugaga

SEQ ID NO: 102933 - RNA, 19 nt, Artificial Sequence
  Description of Artificial Sequence: Synthetic oligonucleotide
cuuuauguggguuauuuaa

SEQ ID NO: 102934 - RNA, 19 nt, Artificial Sequence
  Description of Artificial Sequence: Synthetic oligonucleotide
uguugacuggcuauugcca

SEQ ID NO: 102935 - RNA, 19 nt, Artificial Sequence
  Description of Artificial Sequence: Synthetic oligonucleotide
uuucgucucuucucgaagc

SEQ ID NO: 102936 - RNA, 19 nt, Artificial Sequence
  Description of Artificial Sequence: Synthetic oligonucleotide
aacgagguccccugaugac

SEQ ID NO: 102937 - RNA, 19 nt, Artificial Sequence
  Description of Artificial Sequence: Synthetic oligonucleotide
auuguguuaagcgacggcu

SEQ ID NO: 102938 - RNA, 19 nt, Artificial Sequence
  Description of Artificial Sequence: Synthetic oligonucleotide
uaaucacauauguaugccu

SEQ ID NO: 102939 - RNA, 19 nt, Artificial Sequence
  Description of Artificial Sequence: Synthetic oligonucleotide
uucugucgaauguuuauac

SEQ ID NO: 102940 - RNA, 19 nt, Artificial Sequence
  Description of Artificial Sequence: Synthetic oligonucleotide
gacaaggcgauugagggac

SEQ ID NO: 102941 - RNA, 19 nt, Artificial Sequence
  Description of Artificial Sequence: Synthetic oligonucleotide
uggggagguaauaauuuga

SEQ ID NO: 102942 - RNA, 19 nt, Artificial Sequence
  Description of Artificial Sequence: Synthetic oligonucleotide
agacccaauuaugacaagg

SEQ ID NO: 102943 - RNA, 19 nt, Artificial Sequence
  Description of Artificial Sequence: Synthetic oligonucleotide
uccgauccauuucuuauga

SEQ ID NO: 102944 - RNA, 19 nt, Artificial Sequence
  Description of Artificial Sequence: Synthetic oligonucleotide
uaucgaacuucuauuggaa

SEQ ID NO: 102945 - RNA, 19 nt, Artificial Sequence
  Description of Artificial Sequence: Synthetic oligonucleotide
ucuaaacgugaacauugcu

SEQ ID NO: 102946 - RNA, 19 nt, Artificial Sequence
  Description of Artificial Sequence: Synthetic oligonucleotide
gauggugucgucgauugug

SEQ ID NO: 102947 - RNA, 19 nt, Artificial Sequence
  Description of Artificial Sequence: Synthetic oligonucleotide
uccaagaucaaugguuuug

SEQ ID NO: 102948 - RNA, 19 nt, Artificial Sequence
  Description of Artificial Sequence: Synthetic oligonucleotide
gaucgcaaaucauaaaugu

SEQ ID NO: 102949 - RNA, 19 nt, Artificial Sequence
  Description of Artificial Sequence: Synthetic oligonucleotide
uacaaggauaugcacggaa

SEQ ID NO: 102950 - RNA, 19 nt, Artificial Sequence
  Description of Artificial Sequence: Synthetic oligonucleotide
cuguugacuggcuauugcc

SEQ ID NO: 102951 - RNA, 19 nt, Artificial Sequence
  Description of Artificial Sequence: Synthetic oligonucleotide
uuaagcgacggcugcuggg

SEQ ID NO: 102952 - RNA, 19 nt, Artificial Sequence
  Description of Artificial Sequence: Synthetic oligonucleotide
gauaugcacggaaagcagc

SEQ ID NO: 102953 - RNA, 19 nt, Artificial Sequence
  Description of Artificial Sequence: Synthetic oligonucleotide
gguaauuauagaaggagac

SEQ ID NO: 102954 - RNA, 19 nt, Artificial Sequence
  Description of Artificial Sequence: Synthetic oligonucleotide
ucgaauguuuauaccuuga

SEQ ID NO: 102955 - RNA, 19 nt, Artificial Sequence
  Description of Artificial Sequence: Synthetic oligonucleotide
ugccguauuauagacacuc

SEQ ID NO: 102956 - RNA, 19 nt, Artificial Sequence
  Description of Artificial Sequence: Synthetic oligonucleotide
uuguguuaagcgacggcug

SEQ ID NO: 102957 - RNA, 19 nt, Artificial Sequence
  Description of Artificial Sequence: Synthetic oligonucleotide
uuauguggguuauuuaauu

SEQ ID NO: 102958 - RNA, 19 nt, Artificial Sequence
  Description of Artificial Sequence: Synthetic oligonucleotide
cauuuacucagcccugugc

SEQ ID NO: 102959 - RNA, 19 nt, Artificial Sequence
  Description of Artificial Sequence: Synthetic oligonucleotide
cuguguaaugugcugcugc

SEQ ID NO: 102960 - RNA, 19 nt, Artificial Sequence
  Description of Artificial Sequence: Synthetic oligonucleotide
uucguugucaccguuuccu

SEQ ID NO: 102961 - RNA, 19 nt, Artificial Sequence
  Description of Artificial Sequence: Synthetic oligonucleotide
gguaguaaguugucuaggc

SEQ ID NO: 102962 - RNA, 19 nt, Artificial Sequence
  Description of Artificial Sequence: Synthetic oligonucleotide
aucuaaacgugaacauugc

SEQ ID NO: 102963 - RNA, 19 nt, Artificial Sequence
  Description of Artificial Sequence: Synthetic oligonucleotide
cagguaguaaguugucuag

SEQ ID NO: 102964 - RNA, 19 nt, Artificial Sequence
  Description of Artificial Sequence: Synthetic oligonucleotide
uauauggacugagaguggu

SEQ ID NO: 102965 - RNA, 19 nt, Artificial Sequence
  Description of Artificial Sequence: Synthetic oligonucleotide
ccuaacuugucacugaaug

SEQ ID NO: 102966 - RNA, 19 nt, Artificial Sequence
  Description of Artificial Sequence: Synthetic oligonucleotide
ucggaagaguuugaggcag

SEQ ID NO: 102967 - RNA, 19 nt, Artificial Sequence
  Description of Artificial Sequence: Synthetic oligonucleotide
aaucacauauguaugccuu

SEQ ID NO: 102968 - RNA, 19 nt, Artificial Sequence
  Description of Artificial Sequence: Synthetic oligonucleotide
uaagcgacggcugcugggg

SEQ ID NO: 102969 - RNA, 19 nt, Artificial Sequence
  Description of Artificial Sequence: Synthetic oligonucleotide
ucauuguguuaagcgacgg

SEQ ID NO: 102970 - RNA, 19 nt, Artificial Sequence
  Description of Artificial Sequence: Synthetic oligonucleotide
ucaacgagguccccugaug

SEQ ID NO: 102971 - RNA, 19 nt, Artificial Sequence
  Description of Artificial Sequence: Synthetic oligonucleotide
acugcuacaggucuccuuu

SEQ ID NO: 102972 - RNA, 19 nt, Artificial Sequence
  Description of Artificial Sequence: Synthetic oligonucleotide
acauugcugaguccuaacu

SEQ ID NO: 102973 - RNA, 19 nt, Artificial Sequence
  Description of Artificial Sequence: Synthetic oligonucleotide
uuccggagaguccucccgg

SEQ ID NO: 102974 - RNA, 19 nt, Artificial Sequence
  Description of Artificial Sequence: Synthetic oligonucleotide
gagguaauaauuugauacu

SEQ ID NO: 102975 - RNA, 19 nt, Artificial Sequence
  Description of Artificial Sequence: Synthetic oligonucleotide
gagguugaaacauuuaauu

SEQ ID NO: 102976 - RNA, 19 nt, Artificial Sequence
  Description of Artificial Sequence: Synthetic oligonucleotide
accgaugaguucuacugca

SEQ ID NO: 102977 - RNA, 19 nt, Artificial Sequence
  Description of Artificial Sequence: Synthetic oligonucleotide
cugcacgggguaauuauag

SEQ ID NO: 102978 - RNA, 19 nt, Artificial Sequence
  Description of Artificial Sequence: Synthetic oligonucleotide
ggcuacaaggauaugcacg

SEQ ID NO: 102979 - RNA, 19 nt, Artificial Sequence
  Description of Artificial Sequence: Synthetic oligonucleotide
agcagcaacgacuuauaaa

SEQ ID NO: 102980 - RNA, 19 nt, Artificial Sequence
  Description of Artificial Sequence: Synthetic oligonucleotide
uauugcuaaugccguauua

SEQ ID NO: 102981 - RNA, 19 nt, Artificial Sequence
  Description of Artificial Sequence: Synthetic oligonucleotide
uuacucagcccugugccag

SEQ ID NO: 102982 - RNA, 19 nt, Artificial Sequence
  Description of Artificial Sequence: Synthetic oligonucleotide
aucauuguguuaagcgacg

SEQ ID NO: 102983 - RNA, 19 nt, Artificial Sequence
  Description of Artificial Sequence: Synthetic oligonucleotide
ugcccgucaucacaccggg

SEQ ID NO: 102984 - RNA, 19 nt, Artificial Sequence
  Description of Artificial Sequence: Synthetic oligonucleotide
ucaccuauuugcagcuaca

SEQ ID NO: 102985 - RNA, 19 nt, Artificial Sequence
  Description of Artificial Sequence: Synthetic oligonucleotide
ggaagcauguuugauggag

SEQ ID NO: 102986 - RNA, 19 nt, Artificial Sequence
  Description of Artificial Sequence: Synthetic oligonucleotide
caucgugccugucaagccc

SEQ ID NO: 102987 - RNA, 19 nt, Artificial Sequence
  Description of Artificial Sequence: Synthetic oligonucleotide
agguaguaaguugucuagg

SEQ ID NO: 102988 - RNA, 19 nt, Artificial Sequence
  Description of Artificial Sequence: Synthetic oligonucleotide
cauuguguuaagcgacggc

SEQ ID NO: 102989 - RNA, 19 nt, Artificial Sequence
  Description of Artificial Sequence: Synthetic oligonucleotide
ugcauaccagguaguaagu

SEQ ID NO: 102990 - RNA, 19 nt, Artificial Sequence
  Description of Artificial Sequence: Synthetic oligonucleotide
aucgcaaaucauaaaugug

SEQ ID NO: 102991 - RNA, 19 nt, Artificial Sequence
  Description of Artificial Sequence: Synthetic oligonucleotide
ugacuugaaugauggcuac

SEQ ID NO: 102992 - RNA, 19 nt, Artificial Sequence
  Description of Artificial Sequence: Synthetic oligonucleotide
uaguuuguggccggacagg

SEQ ID NO: 102993 - RNA, 19 nt, Artificial Sequence
  Description of Artificial Sequence: Synthetic oligonucleotide
uucugcacgggguaauuau

SEQ ID NO: 102994 - RNA, 19 nt, Artificial Sequence
  Description of Artificial Sequence: Synthetic oligonucleotide
guuaagcgacggcugcugg

SEQ ID NO: 102995 - RNA, 19 nt, Artificial Sequence
  Description of Artificial Sequence: Synthetic oligonucleotide
uugcuguucggcacugaug

SEQ ID NO: 102996 - RNA, 19 nt, Artificial Sequence
  Description of Artificial Sequence: Synthetic oligonucleotide
gagcccauaagaucaaaua

SEQ ID NO: 102997 - RNA, 19 nt, Artificial Sequence
  Description of Artificial Sequence: Synthetic oligonucleotide
ucgucgauugugcuuccga

SEQ ID NO: 102998 - RNA, 19 nt, Artificial Sequence
  Description of Artificial Sequence: Synthetic oligonucleotide
ugcgaagugcaaugaacaa

SEQ ID NO: 102999 - RNA, 19 nt, Artificial Sequence
  Description of Artificial Sequence: Synthetic oligonucleotide
uguuaagcgacggcugcug

SEQ ID NO: 103000 - RNA, 19 nt, Artificial Sequence
  Description of Artificial Sequence: Synthetic oligonucleotide
cuggcucaucacuggagcg

SEQ ID NO: 103001 - RNA, 19 nt, Artificial Sequence
  Description of Artificial Sequence: Synthetic oligonucleotide
ugcaccuuuccggagaguc

SEQ ID NO: 103002 - RNA, 19 nt, Artificial Sequence
  Description of Artificial Sequence: Synthetic oligonucleotide
ugacaaggcgauugaggga

SEQ ID NO: 103003 - RNA, 19 nt, Artificial Sequence
  Description of Artificial Sequence: Synthetic oligonucleotide
ggcaugcccauucccaucg

SEQ ID NO: 103004 - RNA, 19 nt, Artificial Sequence
  Description of Artificial Sequence: Synthetic oligonucleotide
caugauuuucaugugagcu

SEQ ID NO: 103005 - RNA, 19 nt, Artificial Sequence
  Description of Artificial Sequence: Synthetic oligonucleotide
caugggcaaaccgagcccc

SEQ ID NO: 103006 - RNA, 19 nt, Artificial Sequence
  Description of Artificial Sequence: Synthetic oligonucleotide
cugucgaauguuuauaccu

SEQ ID NO: 103007 - RNA, 19 nt, Artificial Sequence
  Description of Artificial Sequence: Synthetic oligonucleotide
aggguuaguuuguggccgg

SEQ ID NO: 103008 - RNA, 19 nt, Artificial Sequence
  Description of Artificial Sequence: Synthetic oligonucleotide
cuuccgaucuuaucgcuca

SEQ ID NO: 103009 - RNA, 19 nt, Artificial Sequence
  Description of Artificial Sequence: Synthetic oligonucleotide
gcuaaugccguauuauaga

SEQ ID NO: 103010 - RNA, 19 nt, Artificial Sequence
  Description of Artificial Sequence: Synthetic oligonucleotide
uuuagcauucgggaccaaa

SEQ ID NO: 103011 - RNA, 19 nt, Artificial Sequence
  Description of Artificial Sequence: Synthetic oligonucleotide
gaggcguguggguuggagc

SEQ ID NO: 103012 - RNA, 19 nt, Artificial Sequence
  Description of Artificial Sequence: Synthetic oligonucleotide
cuccgauccauuucuuaug

SEQ ID NO: 103013 - RNA, 19 nt, Artificial Sequence
  Description of Artificial Sequence: Synthetic oligonucleotide
auaugcacggaaagcagcu

SEQ ID NO: 103014 - RNA, 19 nt, Artificial Sequence
  Description of Artificial Sequence: Synthetic oligonucleotide
uugcguugcuucugaacca

SEQ ID NO: 103015 - RNA, 19 nt, Artificial Sequence
  Description of Artificial Sequence: Synthetic oligonucleotide
ucagguuaccuuugauuua

SEQ ID NO: 103016 - RNA, 19 nt, Artificial Sequence
  Description of Artificial Sequence: Synthetic oligonucleotide
ggaacagacccaauuauga

SEQ ID NO: 103017 - RNA, 19 nt, Artificial Sequence
  Description of Artificial Sequence: Synthetic oligonucleotide
ugcacgggguaauuauaga

SEQ ID NO: 103018 - RNA, 19 nt, Artificial Sequence
  Description of Artificial Sequence: Synthetic oligonucleotide
ugacugccucgucugaagu

SEQ ID NO: 103019 - RNA, 19 nt, Artificial Sequence
  Description of Artificial Sequence: Synthetic oligonucleotide
caccgaugaguucuacugc

SEQ ID NO: 103020 - RNA, 19 nt, Artificial Sequence
  Description of Artificial Sequence: Synthetic oligonucleotide
ugaacguuuuaauguuaua

SEQ ID NO: 103021 - RNA, 19 nt, Artificial Sequence
  Description of Artificial Sequence: Synthetic oligonucleotide
ucugcacgggguaauuaua

SEQ ID NO: 103022 - RNA, 19 nt, Artificial Sequence
  Description of Artificial Sequence: Synthetic oligonucleotide
aauauauaucgaacuucua

SEQ ID NO: 103023 - RNA, 19 nt, Artificial Sequence
  Description of Artificial Sequence: Synthetic oligonucleotide
augaacguuuuaauguuau

SEQ ID NO: 103024 - RNA, 19 nt, Artificial Sequence
  Description of Artificial Sequence: Synthetic oligonucleotide
cauacucugggaagacguc

SEQ ID NO: 103025 - RNA, 19 nt, Artificial Sequence
  Description of Artificial Sequence: Synthetic oligonucleotide
gugaacauugcugaguccu

SEQ ID NO: 103026 - RNA, 19 nt, Artificial Sequence
  Description of Artificial Sequence: Synthetic oligonucleotide
cuugccgugcucaucuaca

SEQ ID NO: 103027 - RNA, 19 nt, Artificial Sequence
  Description of Artificial Sequence: Synthetic oligonucleotide
aguuuguggccggacagga

SEQ ID NO: 103028 - RNA, 19 nt, Artificial Sequence
  Description of Artificial Sequence: Synthetic oligonucleotide
gacacgggcaaagucucac

SEQ ID NO: 103029 - RNA, 19 nt, Artificial Sequence
  Description of Artificial Sequence: Synthetic oligonucleotide
gucgauugugcuuccgauc

SEQ ID NO: 103030 - RNA, 19 nt, Artificial Sequence
  Description of Artificial Sequence: Synthetic oligonucleotide
gugucgucgauugugcuuc

SEQ ID NO: 103031 - RNA, 19 nt, Artificial Sequence
  Description of Artificial Sequence: Synthetic oligonucleotide
guuguugaaucauuguguu

SEQ ID NO: 103032 - RNA, 19 nt, Artificial Sequence
  Description of Artificial Sequence: Synthetic oligonucleotide
aguggggagguaauaauuu

SEQ ID NO: 103033 - RNA, 19 nt, Artificial Sequence
  Description of Artificial Sequence: Synthetic oligonucleotide
auauugcuaaugccguauu

SEQ ID NO: 103034 - RNA, 19 nt, Artificial Sequence
  Description of Artificial Sequence: Synthetic oligonucleotide
guagaggggaggguuuugc

SEQ ID NO: 103035 - RNA, 19 nt, Artificial Sequence
  Description of Artificial Sequence: Synthetic oligonucleotide
uuccgaucuuaucgcucag

SEQ ID NO: 103036 - RNA, 19 nt, Artificial Sequence
  Description of Artificial Sequence: Synthetic oligonucleotide
gcauguuugauggagaacu

SEQ ID NO: 103037 - RNA, 19 nt, Artificial Sequence
  Description of Artificial Sequence: Synthetic oligonucleotide
cagggaucgcaaaucauaa

SEQ ID NO: 103038 - RNA, 19 nt, Artificial Sequence
  Description of Artificial Sequence: Synthetic oligonucleotide
augcacggaaagcagcuuu

SEQ ID NO: 103039 - RNA, 19 nt, Artificial Sequence
  Description of Artificial Sequence: Synthetic oligonucleotide
ggauaugcacggaaagcag

SEQ ID NO: 103040 - RNA, 19 nt, Artificial Sequence
  Description of Artificial Sequence: Synthetic oligonucleotide
ugauauggauaugcuucgu

SEQ ID NO: 103041 - RNA, 19 nt, Artificial Sequence
  Description of Artificial Sequence: Synthetic oligonucleotide
uuguaacaacucucuccga

SEQ ID NO: 103042 - RNA, 19 nt, Artificial Sequence
  Description of Artificial Sequence: Synthetic oligonucleotide
acaucagguuaccuuugau

SEQ ID NO: 103043 - RNA, 19 nt, Artificial Sequence
  Description of Artificial Sequence: Synthetic oligonucleotide
ccccgaauaaaucaguuga

SEQ ID NO: 103044 - RNA, 19 nt, Artificial Sequence
  Description of Artificial Sequence: Synthetic oligonucleotide
caacgagguccccugauga

SEQ ID NO: 103045 - RNA, 19 nt, Artificial Sequence
  Description of Artificial Sequence: Synthetic oligonucleotide
aggcgauugagggacagaa

SEQ ID NO: 103046 - RNA, 19 nt, Artificial Sequence
  Description of Artificial Sequence: Synthetic oligonucleotide
ggguaauuauagaaggaga

SEQ ID NO: 103047 - RNA, 19 nt, Artificial Sequence
  Description of Artificial Sequence: Synthetic oligonucleotide
auggagaacugagguucac

SEQ ID NO: 103048 - RNA, 19 nt, Artificial Sequence
  Description of Artificial Sequence: Synthetic oligonucleotide
aggagaccccaacauacuu

SEQ ID NO: 103049 - RNA, 19 nt, Artificial Sequence
  Description of Artificial Sequence: Synthetic oligonucleotide
gcuauugacagcugugaaa

SEQ ID NO: 103050 - RNA, 19 nt, Artificial Sequence
  Description of Artificial Sequence: Synthetic oligonucleotide
uccuguugacuggcuauug

SEQ ID NO: 103051 - RNA, 19 nt, Artificial Sequence
  Description of Artificial Sequence: Synthetic oligonucleotide
auuuucaugugagcuuaau

SEQ ID NO: 103052 - RNA, 19 nt, Artificial Sequence
  Description of Artificial Sequence: Synthetic oligonucleotide
ggaaacaaaguuguaucaa

SEQ ID NO: 103053 - RNA, 19 nt, Artificial Sequence
  Description of Artificial Sequence: Synthetic oligonucleotide
gauggagaacugagguuca

SEQ ID NO: 103054 - RNA, 19 nt, Artificial Sequence
  Description of Artificial Sequence: Synthetic oligonucleotide
accuucgcugaagacugag

SEQ ID NO: 103055 - RNA, 19 nt, Artificial Sequence
  Description of Artificial Sequence: Synthetic oligonucleotide
ugauggugucgucgauugu

SEQ ID NO: 103056 - RNA, 19 nt, Artificial Sequence
  Description of Artificial Sequence: Synthetic oligonucleotide
gugcccgucaucacaccgg

SEQ ID NO: 103057 - RNA, 19 nt, Artificial Sequence
  Description of Artificial Sequence: Synthetic oligonucleotide
agggaucgcaaaucauaaa

SEQ ID NO: 103058 - RNA, 19 nt, Artificial Sequence
  Description of Artificial Sequence: Synthetic oligonucleotide
uccccguggaugacacccc

SEQ ID NO: 103059 - RNA, 19 nt, Artificial Sequence
  Description of Artificial Sequence: Synthetic oligonucleotide
ccauaagaucaaauagguc

SEQ ID NO: 103060 - RNA, 19 nt, Artificial Sequence
  Description of Artificial Sequence: Synthetic oligonucleotide
uuggacggguuugcugugc

SEQ ID NO: 103061 - RNA, 19 nt, Artificial Sequence
  Description of Artificial Sequence: Synthetic oligonucleotide
aaggcgauugagggacaga

SEQ ID NO: 103062 - RNA, 19 nt, Artificial Sequence
  Description of Artificial Sequence: Synthetic oligonucleotide
gcacgggguaauuauagaa

SEQ ID NO: 103063 - RNA, 19 nt, Artificial Sequence
  Description of Artificial Sequence: Synthetic oligonucleotide
caucagguuaccuuugauu

SEQ ID NO: 103064 - RNA, 19 nt, Artificial Sequence
  Description of Artificial Sequence: Synthetic oligonucleotide
caacgcugucugaggagac

SEQ ID NO: 103065 - RNA, 19 nt, Artificial Sequence
  Description of Artificial Sequence: Synthetic oligonucleotide
caaggcgauugagggacag

SEQ ID NO: 103066 - RNA, 19 nt, Artificial Sequence
  Description of Artificial Sequence: Synthetic oligonucleotide
ggaaccuuggcaaaaguau

SEQ ID NO: 103067 - RNA, 19 nt, Artificial Sequence
  Description of Artificial Sequence: Synthetic oligonucleotide
guugacuggcuauugccau

SEQ ID NO: 103068 - RNA, 19 nt, Artificial Sequence
  Description of Artificial Sequence: Synthetic oligonucleotide
auuuagccauaaucacaua

SEQ ID NO: 103069 - RNA, 19 nt, Artificial Sequence
  Description of Artificial Sequence: Synthetic oligonucleotide
gagcagcaacgacuuauaa

SEQ ID NO: 103070 - RNA, 19 nt, Artificial Sequence
  Description of Artificial Sequence: Synthetic oligonucleotide
gaauccgccaacgcugucu

SEQ ID NO: 103071 - RNA, 19 nt, Artificial Sequence
  Description of Artificial Sequence: Synthetic oligonucleotide
ugucgucgauugugcuucc

SEQ ID NO: 103072 - RNA, 19 nt, Artificial Sequence
  Description of Artificial Sequence: Synthetic oligonucleotide
cagcuauugacagcuguga

SEQ ID NO: 103073 - RNA, 19 nt, Artificial Sequence
  Description of Artificial Sequence: Synthetic oligonucleotide
uucgggaccaaagcauguu

SEQ ID NO: 103074 - RNA, 19 nt, Artificial Sequence
  Description of Artificial Sequence: Synthetic oligonucleotide
ucccaucgugccugucaag

SEQ ID NO: 103075 - RNA, 19 nt, Artificial Sequence
  Description of Artificial Sequence: Synthetic oligonucleotide
ccgaauaaaucaguugauc

SEQ ID NO: 103076 - RNA, 19 nt, Artificial Sequence
  Description of Artificial Sequence: Synthetic oligonucleotide
gcuucguugucaccguuuc

SEQ ID NO: 103077 - RNA, 19 nt, Artificial Sequence
  Description of Artificial Sequence: Synthetic oligonucleotide
auucgggaccaaagcaugu

SEQ ID NO: 103078 - RNA, 19 nt, Artificial Sequence
  Description of Artificial Sequence: Synthetic oligonucleotide
cauauugcuaaugccguau

SEQ ID NO: 103079 - RNA, 19 nt, Artificial Sequence
  Description of Artificial Sequence: Synthetic oligonucleotide
aucgugccugucaagccca

SEQ ID NO: 103080 - RNA, 19 nt, Artificial Sequence
  Description of Artificial Sequence: Synthetic oligonucleotide
agccauaaucacauaugua

SEQ ID NO: 103081 - RNA, 19 nt, Artificial Sequence
  Description of Artificial Sequence: Synthetic oligonucleotide
gugugauauggauaugcuu

SEQ ID NO: 103082 - RNA, 19 nt, Artificial Sequence
  Description of Artificial Sequence: Synthetic oligonucleotide
ugaauccgccaacgcuguc

SEQ ID NO: 103083 - RNA, 19 nt, Artificial Sequence
  Description of Artificial Sequence: Synthetic oligonucleotide
gauccgggcuggcuuuguc

SEQ ID NO: 103084 - RNA, 19 nt, Artificial Sequence
  Description of Artificial Sequence: Synthetic oligonucleotide
ccaucgugccugucaagcc

SEQ ID NO: 103085 - RNA, 19 nt, Artificial Sequence
  Description of Artificial Sequence: Synthetic oligonucleotide
ccuuugggagaucugccuc

SEQ ID NO: 103086 - RNA, 19 nt, Artificial Sequence
  Description of Artificial Sequence: Synthetic oligonucleotide
gucgucgauugugcuuccg

SEQ ID NO: 103087 - RNA, 19 nt, Artificial Sequence
  Description of Artificial Sequence: Synthetic oligonucleotide
ccggucuuuccuccgaaac

SEQ ID NO: 103088 - RNA, 19 nt, Artificial Sequence
  Description of Artificial Sequence: Synthetic oligonucleotide
gggagguaauaauuugaua

SEQ ID NO: 103089 - RNA, 19 nt, Artificial Sequence
  Description of Artificial Sequence: Synthetic oligonucleotide
ugggcaaaccgagccccac

SEQ ID NO: 103090 - RNA, 19 nt, Artificial Sequence
  Description of Artificial Sequence: Synthetic oligonucleotide
ccagggaucgcaaaucaua

SEQ ID NO: 103091 - RNA, 19 nt, Artificial Sequence
  Description of Artificial Sequence: Synthetic oligonucleotide
ugugcgcuugugccugguu

SEQ ID NO: 103092 - RNA, 19 nt, Artificial Sequence
  Description of Artificial Sequence: Synthetic oligonucleotide
ccgaugaguucuacugcag

SEQ ID NO: 103093 - RNA, 19 nt, Artificial Sequence
  Description of Artificial Sequence: Synthetic oligonucleotide
gcucacuacuggaagcaac

SEQ ID NO: 103094 - RNA, 19 nt, Artificial Sequence
  Description of Artificial Sequence: Synthetic oligonucleotide
ccguauuauagacacucaa

SEQ ID NO: 103095 - RNA, 19 nt, Artificial Sequence
  Description of Artificial Sequence: Synthetic oligonucleotide
gcucaucuacaaaugguaa

SEQ ID NO: 103096 - RNA, 19 nt, Artificial Sequence
  Description of Artificial Sequence: Synthetic oligonucleotide
cuguucggcacugauggcu

SEQ ID NO: 103097 - RNA, 19 nt, Artificial Sequence
  Description of Artificial Sequence: Synthetic oligonucleotide
gguuaguuuguggccggac

SEQ ID NO: 103098 - RNA, 19 nt, Artificial Sequence
  Description of Artificial Sequence: Synthetic oligonucleotide
ugacugcuacaggucuccu

SEQ ID NO: 103099 - RNA, 19 nt, Artificial Sequence
  Description of Artificial Sequence: Synthetic oligonucleotide
auauggacugagaguggua

SEQ ID NO: 103100 - RNA, 19 nt, Artificial Sequence
  Description of Artificial Sequence: Synthetic oligonucleotide
uccugugacaggggcucuc

SEQ ID NO: 103101 - RNA, 19 nt, Artificial Sequence
  Description of Artificial Sequence: Synthetic oligonucleotide
gaggagaccccaacauacu

SEQ ID NO: 103102 - RNA, 19 nt, Artificial Sequence
  Description of Artificial Sequence: Synthetic oligonucleotide
cugaauccgccaacgcugu

SEQ ID NO: 103103 - RNA, 19 nt, Artificial Sequence
  Description of Artificial Sequence: Synthetic oligonucleotide
cagcaacgacuuauaaacu

SEQ ID NO: 103104 - RNA, 19 nt, Artificial Sequence
  Description of Artificial Sequence: Synthetic oligonucleotide
ccgauccauuucuuaugag

SEQ ID NO: 103105 - RNA, 19 nt, Artificial Sequence
  Description of Artificial Sequence: Synthetic oligonucleotide
ccgggcauguucauaggca

SEQ ID NO: 103106 - RNA, 19 nt, Artificial Sequence
  Description of Artificial Sequence: Synthetic oligonucleotide
ugauccgggcuggcuuugu

SEQ ID NO: 103107 - RNA, 19 nt, Artificial Sequence
  Description of Artificial Sequence: Synthetic oligonucleotide
caccuuuccggagaguccu

SEQ ID NO: 103108 - RNA, 19 nt, Artificial Sequence
  Description of Artificial Sequence: Synthetic oligonucleotide
cuacaaggauaugcacgga

SEQ ID NO: 103109 - RNA, 19 nt, Artificial Sequence
  Description of Artificial Sequence: Synthetic oligonucleotide
ccgagccccacaguguuag

SEQ ID NO: 103110 - RNA, 19 nt, Artificial Sequence
  Description of Artificial Sequence: Synthetic oligonucleotide
gacugcuacaggucuccuu

SEQ ID NO: 103111 - RNA, 19 nt, Artificial Sequence
  Description of Artificial Sequence: Synthetic oligonucleotide
cccauuaguggcgcauggc

SEQ ID NO: 103112 - RNA, 19 nt, Artificial Sequence
  Description of Artificial Sequence: Synthetic oligonucleotide
uuuuagcauucgggaccaa

SEQ ID NO: 103113 - RNA, 19 nt, Artificial Sequence
  Description of Artificial Sequence: Synthetic oligonucleotide
cacauuuacucagcccugu

SEQ ID NO: 103114 - RNA, 19 nt, Artificial Sequence
  Description of Artificial Sequence: Synthetic oligonucleotide
gucaacgagguccccugau

SEQ ID NO: 103115 - RNA, 19 nt, Artificial Sequence
  Description of Artificial Sequence: Synthetic oligonucleotide
cuggaaccuuggcaaaagu

SEQ ID NO: 103116 - RNA, 19 nt, Artificial Sequence
  Description of Artificial Sequence: Synthetic oligonucleotide
ucgugccugucaagcccau

SEQ ID NO: 103117 - RNA, 19 nt, Artificial Sequence
  Description of Artificial Sequence: Synthetic oligonucleotide
ccgccaacgcugucugagg

SEQ ID NO: 103118 - RNA, 19 nt, Artificial Sequence
  Description of Artificial Sequence: Synthetic oligonucleotide
ggggagguaauaauuugau

SEQ ID NO: 103119 - RNA, 19 nt, Artificial Sequence
  Description of Artificial Sequence: Synthetic oligonucleotide
augccguauuauagacacu

SEQ ID NO: 103120 - RNA, 19 nt, Artificial Sequence
  Description of Artificial Sequence: Synthetic oligonucleotide
cgaucuuaucgcucagcuc

SEQ ID NO: 103121 - RNA, 19 nt, Artificial Sequence
  Description of Artificial Sequence: Synthetic oligonucleotide
cugauccgggcuggcuuug

SEQ ID NO: 103122 - RNA, 19 nt, Artificial Sequence
  Description of Artificial Sequence: Synthetic oligonucleotide
acaaggcgauugagggaca

SEQ ID NO: 103123 - RNA, 19 nt, Artificial Sequence
  Description of Artificial Sequence: Synthetic oligonucleotide
ccgacuucuggaccauauc

SEQ ID NO: 103124 - RNA, 19 nt, Artificial Sequence
  Description of Artificial Sequence: Synthetic oligonucleotide
ggugucgucgauugugcuu

SEQ ID NO: 103125 - RNA, 19 nt, Artificial Sequence
  Description of Artificial Sequence: Synthetic oligonucleotide
cgggguaauuauagaagga

SEQ ID NO: 103126 - RNA, 19 nt, Artificial Sequence
  Description of Artificial Sequence: Synthetic oligonucleotide
ggucaacgagguccccuga

SEQ ID NO: 103127 - RNA, 19 nt, Artificial Sequence
  Description of Artificial Sequence: Synthetic oligonucleotide
cagcugugaaaagaggguu

SEQ ID NO: 103128 - RNA, 19 nt, Artificial Sequence
  Description of Artificial Sequence: Synthetic oligonucleotide
ggccugugugauauggaua

SEQ ID NO: 103129 - RNA, 19 nt, Artificial Sequence
  Description of Artificial Sequence: Synthetic oligonucleotide
ggcugcauaccagguagua

SEQ ID NO: 103130 - RNA, 19 nt, Artificial Sequence
  Description of Artificial Sequence: Synthetic oligonucleotide
ccauauugcuaaugccgua

SEQ ID NO: 103131 - RNA, 19 nt, Artificial Sequence
  Description of Artificial Sequence: Synthetic oligonucleotide
ggcgauugagggacagaaa

SEQ ID NO: 103132 - RNA, 19 nt, Artificial Sequence
  Description of Artificial Sequence: Synthetic oligonucleotide
ggccuaaaguuggcuguga

SEQ ID NO: 103133 - RNA, 19 nt, Artificial Sequence
  Description of Artificial Sequence: Synthetic oligonucleotide
cccgaauaaaucaguugau

SEQ ID NO: 103134 - RNA, 19 nt, Artificial Sequence
  Description of Artificial Sequence: Synthetic oligonucleotide
caucaccuauuugcagcua

SEQ ID NO: 103135 - RNA, 19 nt, Artificial Sequence
  Description of Artificial Sequence: Synthetic oligonucleotide
ggguuaguuuguggccgga

SEQ ID NO: 103136 - RNA, 19 nt, Artificial Sequence
  Description of Artificial Sequence: Synthetic oligonucleotide
gcauaccagguaguaaguu

SEQ ID NO: 103137 - RNA, 19 nt, Artificial Sequence
  Description of Artificial Sequence: Synthetic oligonucleotide
cuccuguugacuggcuauu

SEQ ID NO: 103138 - RNA, 19 nt, Artificial Sequence
  Description of Artificial Sequence: Synthetic oligonucleotide
caccccauuaguggcgcau

SEQ ID NO: 103139 - RNA, 19 nt, Artificial Sequence
  Description of Artificial Sequence: Synthetic oligonucleotide
gccgacuucuggaccauau

SEQ ID NO: 103140 - RNA, 19 nt, Artificial Sequence
  Description of Artificial Sequence: Synthetic oligonucleotide
cgucgauugugcuuccgau

SEQ ID NO: 103141 - RNA, 19 nt, Artificial Sequence
  Description of Artificial Sequence: Synthetic oligonucleotide
cccggucuuuccuccgaaa

SEQ ID NO: 103142 - RNA, 19 nt, Artificial Sequence
  Description of Artificial Sequence: Synthetic oligonucleotide
gcaugcccauucccaucgu

SEQ ID NO: 103143 - RNA, 19 nt, Artificial Sequence
  Description of Artificial Sequence: Synthetic oligonucleotide
gcguguggguuggagcauu

SEQ ID NO: 103144 - RNA, 19 nt, Artificial Sequence
  Description of Artificial Sequence: Synthetic oligonucleotide
aaguuuaaagucuagguac

SEQ ID NO: 103145 - RNA, 19 nt, Artificial Sequence
  Description of Artificial Sequence: Synthetic oligonucleotide
ugcgaauucaauuaaaggg

SEQ ID NO: 103146 - RNA, 19 nt, Artificial Sequence
  Description of Artificial Sequence: Synthetic oligonucleotide
aauagugucuacccaaggc

SEQ ID NO: 103147 - RNA, 19 nt, Artificial Sequence
  Description of Artificial Sequence: Synthetic oligonucleotide
uaugcuuagacacauucgg

SEQ ID NO: 103148 - RNA, 19 nt, Artificial Sequence
  Description of Artificial Sequence: Synthetic oligonucleotide
acaacuaccggcuuagcgc

SEQ ID NO: 103149 - RNA, 19 nt, Artificial Sequence
  Description of Artificial Sequence: Synthetic oligonucleotide
uguaaugucuaugugaugc

SEQ ID NO: 103150 - RNA, 19 nt, Artificial Sequence
  Description of Artificial Sequence: Synthetic oligonucleotide
uuuaacauaaggaguaaca

SEQ ID NO: 103151 - RNA, 19 nt, Artificial Sequence
  Description of Artificial Sequence: Synthetic oligonucleotide
cuuuggacagcaaauagcg

SEQ ID NO: 103152 - RNA, 19 nt, Artificial Sequence
  Description of Artificial Sequence: Synthetic oligonucleotide
uuguagguaagucuggagg

SEQ ID NO: 103153 - RNA, 19 nt, Artificial Sequence
  Description of Artificial Sequence: Synthetic oligonucleotide
uaugugaugcauuauaaac

SEQ ID NO: 103154 - RNA, 19 nt, Artificial Sequence
  Description of Artificial Sequence: Synthetic oligonucleotide
uuugcgaauucaauuaaag

SEQ ID NO: 103155 - RNA, 19 nt, Artificial Sequence
  Description of Artificial Sequence: Synthetic oligonucleotide
ucuccuaugauccccagag

SEQ ID NO: 103156 - RNA, 19 nt, Artificial Sequence
  Description of Artificial Sequence: Synthetic oligonucleotide
aacacugauugaucuauac

SEQ ID NO: 103157 - RNA, 19 nt, Artificial Sequence
  Description of Artificial Sequence: Synthetic oligonucleotide
auagauuacuaccggaaac

SEQ ID NO: 103158 - RNA, 19 nt, Artificial Sequence
  Description of Artificial Sequence: Synthetic oligonucleotide
aacaacuaccggcuuagcg

SEQ ID NO: 103159 - RNA, 19 nt, Artificial Sequence
  Description of Artificial Sequence: Synthetic oligonucleotide
uauuagucagcuuauuagc

SEQ ID NO: 103160 - RNA, 19 nt, Artificial Sequence
  Description of Artificial Sequence: Synthetic oligonucleotide
aacugugcuacgcuugcgc

SEQ ID NO: 103161 - RNA, 19 nt, Artificial Sequence
  Description of Artificial Sequence: Synthetic oligonucleotide
gacgucaacacuuucauuc

SEQ ID NO: 103162 - RNA, 19 nt, Artificial Sequence
  Description of Artificial Sequence: Synthetic oligonucleotide
uuuccgucgucguugaucg

SEQ ID NO: 103163 - RNA, 19 nt, Artificial Sequence
  Description of Artificial Sequence: Synthetic oligonucleotide
uuaaagucuagguacugcc

SEQ ID NO: 103164 - RNA, 19 nt, Artificial Sequence
  Description of Artificial Sequence: Synthetic oligonucleotide
aauuugauggacuucgguu

SEQ ID NO: 103165 - RNA, 19 nt, Artificial Sequence
  Description of Artificial Sequence: Synthetic oligonucleotide
uggcaauuaaauauggaac

SEQ ID NO: 103166 - RNA, 19 nt, Artificial Sequence
  Description of Artificial Sequence: Synthetic oligonucleotide
aucuauacuaccuuuauuu

SEQ ID NO: 103167 - RNA, 19 nt, Artificial Sequence
  Description of Artificial Sequence: Synthetic oligonucleotide
aauuagccaugucacuucg

SEQ ID NO: 103168 - RNA, 19 nt, Artificial Sequence
  Description of Artificial Sequence: Synthetic oligonucleotide
guauucccaagcuuuaucg

SEQ ID NO: 103169 - RNA, 19 nt, Artificial Sequence
  Description of Artificial Sequence: Synthetic oligonucleotide
uccaugagaaguuuaaagu

SEQ ID NO: 103170 - RNA, 19 nt, Artificial Sequence
  Description of Artificial Sequence: Synthetic oligonucleotide
uugcgaauucaauuaaagg

SEQ ID NO: 103171 - RNA, 19 nt, Artificial Sequence
  Description of Artificial Sequence: Synthetic oligonucleotide
ugcaauagauuacuaccgg

SEQ ID NO: 103172 - RNA, 19 nt, Artificial Sequence
  Description of Artificial Sequence: Synthetic oligonucleotide
aauucaauuaaaggggcug

SEQ ID NO: 103173 - RNA, 19 nt, Artificial Sequence
  Description of Artificial Sequence: Synthetic oligonucleotide
uuuaccauagacuccuuga

SEQ ID NO: 103174 - RNA, 19 nt, Artificial Sequence
  Description of Artificial Sequence: Synthetic oligonucleotide
uacuaccggaaacagagag

SEQ ID NO: 103175 - RNA, 19 nt, Artificial Sequence
  Description of Artificial Sequence: Synthetic oligonucleotide
acaaauagcuuggaaauuc

SEQ ID NO: 103176 - RNA, 19 nt, Artificial Sequence
  Description of Artificial Sequence: Synthetic oligonucleotide
uuaauagugucuacccaag

SEQ ID NO: 103177 - RNA, 19 nt, Artificial Sequence
  Description of Artificial Sequence: Synthetic oligonucleotide
uuuuaaacgaggugaguca

SEQ ID NO: 103178 - RNA, 19 nt, Artificial Sequence
  Description of Artificial Sequence: Synthetic oligonucleotide
agcgccuuuguuuagaucu

SEQ ID NO: 103179 - RNA, 19 nt, Artificial Sequence
  Description of Artificial Sequence: Synthetic oligonucleotide
ugugaugcauuauaaacaa

SEQ ID NO: 103180 - RNA, 19 nt, Artificial Sequence
  Description of Artificial Sequence: Synthetic oligonucleotide
aagucugucccgugagucc

SEQ ID NO: 103181 - RNA, 19 nt, Artificial Sequence
  Description of Artificial Sequence: Synthetic oligonucleotide
ugauugaucuauacuaccu

SEQ ID NO: 103182 - RNA, 19 nt, Artificial Sequence
  Description of Artificial Sequence: Synthetic oligonucleotide
uuugcagaacaacuaccgg

SEQ ID NO: 103183 - RNA, 19 nt, Artificial Sequence
  Description of Artificial Sequence: Synthetic oligonucleotide
ccauaucagaauuugaugg

SEQ ID NO: 103184 - RNA, 19 nt, Artificial Sequence
  Description of Artificial Sequence: Synthetic oligonucleotide
uuagagucaaugcaaugac

SEQ ID NO: 103185 - RNA, 19 nt, Artificial Sequence
  Description of Artificial Sequence: Synthetic oligonucleotide
cugcaauagauuacuaccg

SEQ ID NO: 103186 - RNA, 19 nt, Artificial Sequence
  Description of Artificial Sequence: Synthetic oligonucleotide
gauggagcuacucaucccc

SEQ ID NO: 103187 - RNA, 19 nt, Artificial Sequence
  Description of Artificial Sequence: Synthetic oligonucleotide
auggcaauuaaauauggaa

SEQ ID NO: 103188 - RNA, 19 nt, Artificial Sequence
  Description of Artificial Sequence: Synthetic oligonucleotide
agucugaacaacuuuauua

SEQ ID NO: 103189 - RNA, 19 nt, Artificial Sequence
  Description of Artificial Sequence: Synthetic oligonucleotide
ucuauacuaccuuuauuug

SEQ ID NO: 103190 - RNA, 19 nt, Artificial Sequence
  Description of Artificial Sequence: Synthetic oligonucleotide
aguggcguacauuugacug

SEQ ID NO: 103191 - RNA, 19 nt, Artificial Sequence
  Description of Artificial Sequence: Synthetic oligonucleotide
uccauaucagaauuugaug

SEQ ID NO: 103192 - RNA, 19 nt, Artificial Sequence
  Description of Artificial Sequence: Synthetic oligonucleotide
acucguucuccuuaguagg

SEQ ID NO: 103193 - RNA, 19 nt, Artificial Sequence
  Description of Artificial Sequence: Synthetic oligonucleotide
uuucuuaguuuccugagua

SEQ ID NO: 103194 - RNA, 19 nt, Artificial Sequence
  Description of Artificial Sequence: Synthetic oligonucleotide
ugacucaccccuaucaucu

SEQ ID NO: 103195 - RNA, 19 nt, Artificial Sequence
  Description of Artificial Sequence: Synthetic oligonucleotide
uuagccaugucacuucgca

SEQ ID NO: 103196 - RNA, 19 nt, Artificial Sequence
  Description of Artificial Sequence: Synthetic oligonucleotide
uuuguuccgagcauucgug

SEQ ID NO: 103197 - RNA, 19 nt, Artificial Sequence
  Description of Artificial Sequence: Synthetic oligonucleotide
uuaacauaaggaguaacaa

SEQ ID NO: 103198 - RNA, 19 nt, Artificial Sequence
  Description of Artificial Sequence: Synthetic oligonucleotide
ugcagaacaacuaccggcu

SEQ ID NO: 103199 - RNA, 19 nt, Artificial Sequence
  Description of Artificial Sequence: Synthetic oligonucleotide
uuuaaacgaggugagucag

SEQ ID NO: 103200 - RNA, 19 nt, Artificial Sequence
  Description of Artificial Sequence: Synthetic oligonucleotide
aauuaaaggggcugaguuu

SEQ ID NO: 103201 - RNA, 19 nt, Artificial Sequence
  Description of Artificial Sequence: Synthetic oligonucleotide
gcaaauagcgaugacaucc

SEQ ID NO: 103202 - RNA, 19 nt, Artificial Sequence
  Description of Artificial Sequence: Synthetic oligonucleotide
uagauuacuaccggaaaca

SEQ ID NO: 103203 - RNA, 19 nt, Artificial Sequence
  Description of Artificial Sequence: Synthetic oligonucleotide
accccuaucaucugauuuc

SEQ ID NO: 103204 - RNA, 19 nt, Artificial Sequence
  Description of Artificial Sequence: Synthetic oligonucleotide
acaucaacagcucaaguuu

SEQ ID NO: 103205 - RNA, 19 nt, Artificial Sequence
  Description of Artificial Sequence: Synthetic oligonucleotide
ugguauggaaaacaggcua

SEQ ID NO: 103206 - RNA, 19 nt, Artificial Sequence
  Description of Artificial Sequence: Synthetic oligonucleotide
uuuugcgacuuucuuccag

SEQ ID NO: 103207 - RNA, 19 nt, Artificial Sequence
  Description of Artificial Sequence: Synthetic oligonucleotide
uuagagacucagaucgccc

SEQ ID NO: 103208 - RNA, 19 nt, Artificial Sequence
  Description of Artificial Sequence: Synthetic oligonucleotide
auaaacaacggcucuuccu

SEQ ID NO: 103209 - RNA, 19 nt, Artificial Sequence
  Description of Artificial Sequence: Synthetic oligonucleotide
uuagucagcuuauuagcac

SEQ ID NO: 103210 - RNA, 19 nt, Artificial Sequence
  Description of Artificial Sequence: Synthetic oligonucleotide
cuuaucagauaaaauauua

SEQ ID NO: 103211 - RNA, 19 nt, Artificial Sequence
  Description of Artificial Sequence: Synthetic oligonucleotide
cugauugaucuauacuacc

SEQ ID NO: 103212 - RNA, 19 nt, Artificial Sequence
  Description of Artificial Sequence: Synthetic oligonucleotide
gcgaauucaauuaaagggg

SEQ ID NO: 103213 - RNA, 19 nt, Artificial Sequence
  Description of Artificial Sequence: Synthetic oligonucleotide
uuucacacguucacaaagu

SEQ ID NO: 103214 - RNA, 19 nt, Artificial Sequence
  Description of Artificial Sequence: Synthetic oligonucleotide
aaaguggcguacauuugac

SEQ ID NO: 103215 - RNA, 19 nt, Artificial Sequence
  Description of Artificial Sequence: Synthetic oligonucleotide
uacuauuuggugauuuaaa

SEQ ID NO: 103216 - RNA, 19 nt, Artificial Sequence
  Description of Artificial Sequence: Synthetic oligonucleotide
aacgacugcaauagauuac

SEQ ID NO: 103217 - RNA, 19 nt, Artificial Sequence
  Description of Artificial Sequence: Synthetic oligonucleotide
uacuaucuacuuuacuucu

SEQ ID NO: 103218 - RNA, 19 nt, Artificial Sequence
  Description of Artificial Sequence: Synthetic oligonucleotide
ugacucuuuaauagugucu

SEQ ID NO: 103219 - RNA, 19 nt, Artificial Sequence
  Description of Artificial Sequence: Synthetic oligonucleotide
gaagucccguccuuggcgg

SEQ ID NO: 103220 - RNA, 19 nt, Artificial Sequence
  Description of Artificial Sequence: Synthetic oligonucleotide
uccccgaggaaacaucucc

SEQ ID NO: 103221 - RNA, 19 nt, Artificial Sequence
  Description of Artificial Sequence: Synthetic oligonucleotide
uccuuuaccauagacuccu

SEQ ID NO: 103222 - RNA, 19 nt, Artificial Sequence
  Description of Artificial Sequence: Synthetic oligonucleotide
cauaugaaugaauccagca

SEQ ID NO: 103223 - RNA, 19 nt, Artificial Sequence
  Description of Artificial Sequence: Synthetic oligonucleotide
uucgguuucgguagcgacc

SEQ ID NO: 103224 - RNA, 19 nt, Artificial Sequence
  Description of Artificial Sequence: Synthetic oligonucleotide
cuaccggaaacagagagug

SEQ ID NO: 103225 - RNA, 19 nt, Artificial Sequence
  Description of Artificial Sequence: Synthetic oligonucleotide
uaaagucuagguacugccu

SEQ ID NO: 103226 - RNA, 19 nt, Artificial Sequence
  Description of Artificial Sequence: Synthetic oligonucleotide
ugaucuauacuaccuuuau

SEQ ID NO: 103227 - RNA, 19 nt, Artificial Sequence
  Description of Artificial Sequence: Synthetic oligonucleotide
ggaucguaaagucugaaca

SEQ ID NO: 103228 - RNA, 19 nt, Artificial Sequence
  Description of Artificial Sequence: Synthetic oligonucleotide
uccgaauccacccgcuucc

SEQ ID NO: 103229 - RNA, 19 nt, Artificial Sequence
  Description of Artificial Sequence: Synthetic oligonucleotide
ucgaucuuuguacuuugga

SEQ ID NO: 103230 - RNA, 19 nt, Artificial Sequence
  Description of Artificial Sequence: Synthetic oligonucleotide
ucuagguacugccuuacua

SEQ ID NO: 103231 - RNA, 19 nt, Artificial Sequence
  Description of Artificial Sequence: Synthetic oligonucleotide
auaagaccuugguuuagag

SEQ ID NO: 103232 - RNA, 19 nt, Artificial Sequence
  Description of Artificial Sequence: Synthetic oligonucleotide
ucgguuucgguagcgaccg

SEQ ID NO: 103233 - RNA, 19 nt, Artificial Sequence
  Description of Artificial Sequence: Synthetic oligonucleotide
acgucuuagagacucagau

SEQ ID NO: 103234 - RNA, 19 nt, Artificial Sequence
  Description of Artificial Sequence: Synthetic oligonucleotide
ugaacgacugcaauagauu

SEQ ID NO: 103235 - RNA, 19 nt, Artificial Sequence
  Description of Artificial Sequence: Synthetic oligonucleotide
uagacuuggaugcuguaua

SEQ ID NO: 103236 - RNA, 19 nt, Artificial Sequence
  Description of Artificial Sequence: Synthetic oligonucleotide
auuuagugcaaaguggcgu

SEQ ID NO: 103237 - RNA, 19 nt, Artificial Sequence
  Description of Artificial Sequence: Synthetic oligonucleotide
ucugaacaacuuuauuagu

SEQ ID NO: 103238 - RNA, 19 nt, Artificial Sequence
  Description of Artificial Sequence: Synthetic oligonucleotide
cuauacuaccuuuauuuga

SEQ ID NO: 103239 - RNA, 19 nt, Artificial Sequence
  Description of Artificial Sequence: Synthetic oligonucleotide
uuuagugcaaaguggcgua

SEQ ID NO: 103240 - RNA, 19 nt, Artificial Sequence
  Description of Artificial Sequence: Synthetic oligonucleotide
auuucuacuagaagaucuc

SEQ ID NO: 103241 - RNA, 19 nt, Artificial Sequence
  Description of Artificial Sequence: Synthetic oligonucleotide
caacuaccggcuuagcgcc

SEQ ID NO: 103242 - RNA, 19 nt, Artificial Sequence
  Description of Artificial Sequence: Synthetic oligonucleotide
guucccacggaucauggug

SEQ ID NO: 103243 - RNA, 19 nt, Artificial Sequence
  Description of Artificial Sequence: Synthetic oligonucleotide
aucauauacuuuugcagau

SEQ ID NO: 103244 - RNA, 19 nt, Artificial Sequence
  Description of Artificial Sequence: Synthetic oligonucleotide
cuuagagacucagaucgcc

SEQ ID NO: 103245 - RNA, 19 nt, Artificial Sequence
  Description of Artificial Sequence: Synthetic oligonucleotide
uuauaaacaacggcucuuc

SEQ ID NO: 103246 - RNA, 19 nt, Artificial Sequence
  Description of Artificial Sequence: Synthetic oligonucleotide
uacuacucuugcaauuugu

SEQ ID NO: 103247 - RNA, 19 nt, Artificial Sequence
  Description of Artificial Sequence: Synthetic oligonucleotide
ugccuuacuaugcuccucu

SEQ ID NO: 103248 - RNA, 19 nt, Artificial Sequence
  Description of Artificial Sequence: Synthetic oligonucleotide
auuaaaggggcugaguuuu

SEQ ID NO: 103249 - RNA, 19 nt, Artificial Sequence
  Description of Artificial Sequence: Synthetic oligonucleotide
gagaguguaaugucuaugu

SEQ ID NO: 103250 - RNA, 19 nt, Artificial Sequence
  Description of Artificial Sequence: Synthetic oligonucleotide
agaguguaaugucuaugug

SEQ ID NO: 103251 - RNA, 19 nt, Artificial Sequence
  Description of Artificial Sequence: Synthetic oligonucleotide
uauuagcacucguuagagc

SEQ ID NO: 103252 - RNA, 19 nt, Artificial Sequence
  Description of Artificial Sequence: Synthetic oligonucleotide
agucugucccgugaguccc

SEQ ID NO: 103253 - RNA, 19 nt, Artificial Sequence
  Description of Artificial Sequence: Synthetic oligonucleotide
gaaauaagaaaggcgcguc

SEQ ID NO: 103254 - RNA, 19 nt, Artificial Sequence
  Description of Artificial Sequence: Synthetic oligonucleotide
auaagaaaggcgcgucugu

SEQ ID NO: 103255 - RNA, 19 nt, Artificial Sequence
  Description of Artificial Sequence: Synthetic oligonucleotide
aagagcauagucacuucug

SEQ ID NO: 103256 - RNA, 19 nt, Artificial Sequence
  Description of Artificial Sequence: Synthetic oligonucleotide
ucuuagagacucagaucgc

SEQ ID NO: 103257 - RNA, 19 nt, Artificial Sequence
  Description of Artificial Sequence: Synthetic oligonucleotide
uagagacucagaucgccca

SEQ ID NO: 103258 - RNA, 19 nt, Artificial Sequence
  Description of Artificial Sequence: Synthetic oligonucleotide
cuacuuuacuucuguuacc

SEQ ID NO: 103259 - RNA, 19 nt, Artificial Sequence
  Description of Artificial Sequence: Synthetic oligonucleotide
uccuccguuagcuuggaau

SEQ ID NO: 103260 - RNA, 19 nt, Artificial Sequence
  Description of Artificial Sequence: Synthetic oligonucleotide
caaugcaccagaccugccc

SEQ ID NO: 103261 - RNA, 19 nt, Artificial Sequence
  Description of Artificial Sequence: Synthetic oligonucleotide
agcuuauuagcacucguua

SEQ ID NO: 103262 - RNA, 19 nt, Artificial Sequence
  Description of Artificial Sequence: Synthetic oligonucleotide
aggagaguaaucuuccaua

SEQ ID NO: 103263 - RNA, 19 nt, Artificial Sequence
  Description of Artificial Sequence: Synthetic oligonucleotide
uuacccucuguccuuuugu

SEQ ID NO: 103264 - RNA, 19 nt, Artificial Sequence
  Description of Artificial Sequence: Synthetic oligonucleotide
gguaagacaucuucauacc

SEQ ID NO: 103265 - RNA, 19 nt, Artificial Sequence
  Description of Artificial Sequence: Synthetic oligonucleotide
gaacgacugcaauagauua

SEQ ID NO: 103266 - RNA, 19 nt, Artificial Sequence
  Description of Artificial Sequence: Synthetic oligonucleotide
cauuucuacuagaagaucu

SEQ ID NO: 103267 - RNA, 19 nt, Artificial Sequence
  Description of Artificial Sequence: Synthetic oligonucleotide
uuaaacgaggugagucaga

SEQ ID NO: 103268 - RNA, 19 nt, Artificial Sequence
  Description of Artificial Sequence: Synthetic oligonucleotide
agcaaauagcgaugacauc

SEQ ID NO: 103269 - RNA, 19 nt, Artificial Sequence
  Description of Artificial Sequence: Synthetic oligonucleotide
uuugauuuggauggcuuau

SEQ ID NO: 103270 - RNA, 19 nt, Artificial Sequence
  Description of Artificial Sequence: Synthetic oligonucleotide
caugacgucaacacuuuca

SEQ ID NO: 103271 - RNA, 19 nt, Artificial Sequence
  Description of Artificial Sequence: Synthetic oligonucleotide
uucccacggaucauggugu

SEQ ID NO: 103272 - RNA, 19 nt, Artificial Sequence
  Description of Artificial Sequence: Synthetic oligonucleotide
uuaugccguuuccuagagg

SEQ ID NO: 103273 - RNA, 19 nt, Artificial Sequence
  Description of Artificial Sequence: Synthetic oligonucleotide
uagacuccuugaacgacug

SEQ ID NO: 103274 - RNA, 19 nt, Artificial Sequence
  Description of Artificial Sequence: Synthetic oligonucleotide
ugugcuacgcuugcgcuug

SEQ ID NO: 103275 - RNA, 19 nt, Artificial Sequence
  Description of Artificial Sequence: Synthetic oligonucleotide
aaguggcguacauuugacu

SEQ ID NO: 103276 - RNA, 19 nt, Artificial Sequence
  Description of Artificial Sequence: Synthetic oligonucleotide
uucuguuuacuaucauggu

SEQ ID NO: 103277 - RNA, 19 nt, Artificial Sequence
  Description of Artificial Sequence: Synthetic oligonucleotide
uguacuacucuugcaauuu

SEQ ID NO: 103278 - RNA, 19 nt, Artificial Sequence
  Description of Artificial Sequence: Synthetic oligonucleotide
agacauuucaucacugagu

SEQ ID NO: 103279 - RNA, 19 nt, Artificial Sequence
  Description of Artificial Sequence: Synthetic oligonucleotide
uguuuacuaucauggucac

SEQ ID NO: 103280 - RNA, 19 nt, Artificial Sequence
  Description of Artificial Sequence: Synthetic oligonucleotide
gcucuuucugauuuuaaac

SEQ ID NO: 103281 - RNA, 19 nt, Artificial Sequence
  Description of Artificial Sequence: Synthetic oligonucleotide
uccguuagcuuggaauuag

SEQ ID NO: 103282 - RNA, 19 nt, Artificial Sequence
  Description of Artificial Sequence: Synthetic oligonucleotide
acuguaggagccugccauc

SEQ ID NO: 103283 - RNA, 19 nt, Artificial Sequence
  Description of Artificial Sequence: Synthetic oligonucleotide
aauccacccgcuuccgaga

SEQ ID NO: 103284 - RNA, 19 nt, Artificial Sequence
  Description of Artificial Sequence: Synthetic oligonucleotide
ugauggagcuacucauccc

SEQ ID NO: 103285 - RNA, 19 nt, Artificial Sequence
  Description of Artificial Sequence: Synthetic oligonucleotide
uuuuccgucgucguugauc

SEQ ID NO: 103286 - RNA, 19 nt, Artificial Sequence
  Description of Artificial Sequence: Synthetic oligonucleotide
uggaauuagccaugucacu

SEQ ID NO: 103287 - RNA, 19 nt, Artificial Sequence
  Description of Artificial Sequence: Synthetic oligonucleotide
cuuuaccauagacuccuug

SEQ ID NO: 103288 - RNA, 19 nt, Artificial Sequence
  Description of Artificial Sequence: Synthetic oligonucleotide
agcuacucauccccgagga

SEQ ID NO: 103289 - RNA, 19 nt, Artificial Sequence
  Description of Artificial Sequence: Synthetic oligonucleotide
guacauuugacugguugug

SEQ ID NO: 103290 - RNA, 19 nt, Artificial Sequence
  Description of Artificial Sequence: Synthetic oligonucleotide
ugucguucugacucacccc

SEQ ID NO: 103291 - RNA, 19 nt, Artificial Sequence
  Description of Artificial Sequence: Synthetic oligonucleotide
aacauuagacuuggaugcu

SEQ ID NO: 103292 - RNA, 19 nt, Artificial Sequence
  Description of Artificial Sequence: Synthetic oligonucleotide
uuguuccgagcauucgugc

SEQ ID NO: 103293 - RNA, 19 nt, Artificial Sequence
  Description of Artificial Sequence: Synthetic oligonucleotide
uuagacuuggaugcuguau

SEQ ID NO: 103294 - RNA, 19 nt, Artificial Sequence
  Description of Artificial Sequence: Synthetic oligonucleotide
ucuccuuaguaggggaugc

SEQ ID NO: 103295 - RNA, 19 nt, Artificial Sequence
  Description of Artificial Sequence: Synthetic oligonucleotide
guugaucgccuguuguacc

SEQ ID NO: 103296 - RNA, 19 nt, Artificial Sequence
  Description of Artificial Sequence: Synthetic oligonucleotide
uguuccgagcauucgugcu

SEQ ID NO: 103297 - RNA, 19 nt, Artificial Sequence
  Description of Artificial Sequence: Synthetic oligonucleotide
auuauaaacaacggcucuu

SEQ ID NO: 103298 - RNA, 19 nt, Artificial Sequence
  Description of Artificial Sequence: Synthetic oligonucleotide
auuugauauccuguuuaug

SEQ ID NO: 103299 - RNA, 19 nt, Artificial Sequence
  Description of Artificial Sequence: Synthetic oligonucleotide
uccuugaacgacugcaaua

SEQ ID NO: 103300 - RNA, 19 nt, Artificial Sequence
  Description of Artificial Sequence: Synthetic oligonucleotide
gguauggaaaacaggcuag

SEQ ID NO: 103301 - RNA, 19 nt, Artificial Sequence
  Description of Artificial Sequence: Synthetic oligonucleotide
gagucugagucggaauccg

SEQ ID NO: 103302 - RNA, 19 nt, Artificial Sequence
  Description of Artificial Sequence: Synthetic oligonucleotide
uuccgagcauucgugcugg

SEQ ID NO: 103303 - RNA, 19 nt, Artificial Sequence
  Description of Artificial Sequence: Synthetic oligonucleotide
ugauccccagagcuucucc

SEQ ID NO: 103304 - RNA, 19 nt, Artificial Sequence
  Description of Artificial Sequence: Synthetic oligonucleotide
cuaugauccccagagcuuc

SEQ ID NO: 103305 - RNA, 19 nt, Artificial Sequence
  Description of Artificial Sequence: Synthetic oligonucleotide
uuacuaugcuccucuucac

SEQ ID NO: 103306 - RNA, 19 nt, Artificial Sequence
  Description of Artificial Sequence: Synthetic oligonucleotide
cugagucggaauccgaauc

SEQ ID NO: 103307 - RNA, 19 nt, Artificial Sequence
  Description of Artificial Sequence: Synthetic oligonucleotide
ucugagucggaauccgaau

SEQ ID NO: 103308 - RNA, 19 nt, Artificial Sequence
  Description of Artificial Sequence: Synthetic oligonucleotide
augcuuagacacauucggg

SEQ ID NO: 103309 - RNA, 19 nt, Artificial Sequence
  Description of Artificial Sequence: Synthetic oligonucleotide
gucuucgaacccuugccug

SEQ ID NO: 103310 - RNA, 19 nt, Artificial Sequence
  Description of Artificial Sequence: Synthetic oligonucleotide
ucuuuuccgucgucguuga

SEQ ID NO: 103311 - RNA, 19 nt, Artificial Sequence
  Description of Artificial Sequence: Synthetic oligonucleotide
ugugcgcuuuauuacuauc

SEQ ID NO: 103312 - RNA, 19 nt, Artificial Sequence
  Description of Artificial Sequence: Synthetic oligonucleotide
gucacuucgcaggaagucc

SEQ ID NO: 103313 - RNA, 19 nt, Artificial Sequence
  Description of Artificial Sequence: Synthetic oligonucleotide
uucguauucccaagcuuua

SEQ ID NO: 103314 - RNA, 19 nt, Artificial Sequence
  Description of Artificial Sequence: Synthetic oligonucleotide
ccuugaacgacugcaauag

SEQ ID NO: 103315 - RNA, 19 nt, Artificial Sequence
  Description of Artificial Sequence: Synthetic oligonucleotide
caaauagcgaugacaucca

SEQ ID NO: 103316 - RNA, 19 nt, Artificial Sequence
  Description of Artificial Sequence: Synthetic oligonucleotide
guaaugucuaugugaugca

SEQ ID NO: 103317 - RNA, 19 nt, Artificial Sequence
  Description of Artificial Sequence: Synthetic oligonucleotide
uucuccuaugauccccaga

SEQ ID NO: 103318 - RNA, 19 nt, Artificial Sequence
  Description of Artificial Sequence: Synthetic oligonucleotide
uccgagacuuccgaggccu

SEQ ID NO: 103319 - RNA, 19 nt, Artificial Sequence
  Description of Artificial Sequence: Synthetic oligonucleotide
agucagcuuauuagcacuc

SEQ ID NO: 103320 - RNA, 19 nt, Artificial Sequence
  Description of Artificial Sequence: Synthetic oligonucleotide
gauuacuaccggaaacaga

SEQ ID NO: 103321 - RNA, 19 nt, Artificial Sequence
  Description of Artificial Sequence: Synthetic oligonucleotide
ugagguaaagcugcaugau

SEQ ID NO: 103322 - RNA, 19 nt, Artificial Sequence
  Description of Artificial Sequence: Synthetic oligonucleotide
auccacccgcuuccgagac

SEQ ID NO: 103323 - RNA, 19 nt, Artificial Sequence
  Description of Artificial Sequence: Synthetic oligonucleotide
auagacuccuugaacgacu

SEQ ID NO: 103324 - RNA, 19 nt, Artificial Sequence
  Description of Artificial Sequence: Synthetic oligonucleotide
aauuucguuuugaccuucu

SEQ ID NO: 103325 - RNA, 19 nt, Artificial Sequence
  Description of Artificial Sequence: Synthetic oligonucleotide
uguuuuacacgaggacugu

SEQ ID NO: 103326 - RNA, 19 nt, Artificial Sequence
  Description of Artificial Sequence: Synthetic oligonucleotide
cgaauucaauuaaaggggc

SEQ ID NO: 103327 - RNA, 19 nt, Artificial Sequence
  Description of Artificial Sequence: Synthetic oligonucleotide
cuacgcuugcgcuuguuca

SEQ ID NO: 103328 - RNA, 19 nt, Artificial Sequence
  Description of Artificial Sequence: Synthetic oligonucleotide
acauuagacuuggaugcug

SEQ ID NO: 103329 - RNA, 19 nt, Artificial Sequence
  Description of Artificial Sequence: Synthetic oligonucleotide
cauagacuccuugaacgac

SEQ ID NO: 103330 - RNA, 19 nt, Artificial Sequence
  Description of Artificial Sequence: Synthetic oligonucleotide
caucgcggcgcuuagccuc

SEQ ID NO: 103331 - RNA, 19 nt, Artificial Sequence
  Description of Artificial Sequence: Synthetic oligonucleotide
auggcuuauucuugauaga

SEQ ID NO: 103332 - RNA, 19 nt, Artificial Sequence
  Description of Artificial Sequence: Synthetic oligonucleotide
cccgaugucguucugacuc

SEQ ID NO: 103333 - RNA, 19 nt, Artificial Sequence
  Description of Artificial Sequence: Synthetic oligonucleotide
cuguuuaugcuuagacaca

SEQ ID NO: 103334 - RNA, 19 nt, Artificial Sequence
  Description of Artificial Sequence: Synthetic oligonucleotide
guuuacuaucauggucacg

SEQ ID NO: 103335 - RNA, 19 nt, Artificial Sequence
  Description of Artificial Sequence: Synthetic oligonucleotide
ucguugaucgccuguugua

SEQ ID NO: 103336 - RNA, 19 nt, Artificial Sequence
  Description of Artificial Sequence: Synthetic oligonucleotide
uccguagagucugaauuuc

SEQ ID NO: 103337 - RNA, 19 nt, Artificial Sequence
  Description of Artificial Sequence: Synthetic oligonucleotide
cacggaucaugguguagag

SEQ ID NO: 103338 - RNA, 19 nt, Artificial Sequence
  Description of Artificial Sequence: Synthetic oligonucleotide
uuagcgccuuuguuuagau

SEQ ID NO: 103339 - RNA, 19 nt, Artificial Sequence
  Description of Artificial Sequence: Synthetic oligonucleotide
aauccgaauccacccgcuu

SEQ ID NO: 103340 - RNA, 19 nt, Artificial Sequence
  Description of Artificial Sequence: Synthetic oligonucleotide
cauuugcgaauucaauuaa

SEQ ID NO: 103341 - RNA, 19 nt, Artificial Sequence
  Description of Artificial Sequence: Synthetic oligonucleotide
caacggcucuuccugaguc

SEQ ID NO: 103342 - RNA, 19 nt, Artificial Sequence
  Description of Artificial Sequence: Synthetic oligonucleotide
uuccgagacuuccgaggcc

SEQ ID NO: 103343 - RNA, 19 nt, Artificial Sequence
  Description of Artificial Sequence: Synthetic oligonucleotide
gcaauagauuacuaccgga

SEQ ID NO: 103344 - RNA, 19 nt, Artificial Sequence
  Description of Artificial Sequence: Synthetic oligonucleotide
uuagugcaaaguggcguac

SEQ ID NO: 103345 - RNA, 19 nt, Artificial Sequence
  Description of Artificial Sequence: Synthetic oligonucleotide
gaaaggcgcgucugugcug

SEQ ID NO: 103346 - RNA, 19 nt, Artificial Sequence
  Description of Artificial Sequence: Synthetic oligonucleotide
augguagacucaauuucug

SEQ ID NO: 103347 - RNA, 19 nt, Artificial Sequence
  Description of Artificial Sequence: Synthetic oligonucleotide
uuacuaucauggucacguc

SEQ ID NO: 103348 - RNA, 19 nt, Artificial Sequence
  Description of Artificial Sequence: Synthetic oligonucleotide
cuucguauucccaagcuuu

SEQ ID NO: 103349 - RNA, 19 nt, Artificial Sequence
  Description of Artificial Sequence: Synthetic oligonucleotide
auuugcgaauucaauuaaa

SEQ ID NO: 103350 - RNA, 19 nt, Artificial Sequence
  Description of Artificial Sequence: Synthetic oligonucleotide
uggcggcauacagggaucg

SEQ ID NO: 103351 - RNA, 19 nt, Artificial Sequence
  Description of Artificial Sequence: Synthetic oligonucleotide
agcgagguaauugcuuugu

SEQ ID NO: 103352 - RNA, 19 nt, Artificial Sequence
  Description of Artificial Sequence: Synthetic oligonucleotide
caccuccuccguuagcuug

SEQ ID NO: 103353 - RNA, 19 nt, Artificial Sequence
  Description of Artificial Sequence: Synthetic oligonucleotide
ucguuuugaccuucucaau

SEQ ID NO: 103354 - RNA, 19 nt, Artificial Sequence
  Description of Artificial Sequence: Synthetic oligonucleotide
gacuucgguuucgguagcg

SEQ ID NO: 103355 - RNA, 19 nt, Artificial Sequence
  Description of Artificial Sequence: Synthetic oligonucleotide
gucgaucuuuguacuuugg

SEQ ID NO: 103356 - RNA, 19 nt, Artificial Sequence
  Description of Artificial Sequence: Synthetic oligonucleotide
acuaccggaaacagagagu

SEQ ID NO: 103357 - RNA, 19 nt, Artificial Sequence
  Description of Artificial Sequence: Synthetic oligonucleotide
gggaucguaaagucugaac

SEQ ID NO: 103358 - RNA, 19 nt, Artificial Sequence
  Description of Artificial Sequence: Synthetic oligonucleotide
gaugucguucugacucacc

SEQ ID NO: 103359 - RNA, 19 nt, Artificial Sequence
  Description of Artificial Sequence: Synthetic oligonucleotide
agagacucagaucgcccau

SEQ ID NO: 103360 - RNA, 19 nt, Artificial Sequence
  Description of Artificial Sequence: Synthetic oligonucleotide
acaacggcucuuccugagu

SEQ ID NO: 103361 - RNA, 19 nt, Artificial Sequence
  Description of Artificial Sequence: Synthetic oligonucleotide
ggucgaucuuuguacuuug

SEQ ID NO: 103362 - RNA, 19 nt, Artificial Sequence
  Description of Artificial Sequence: Synthetic oligonucleotide
ggucacgucuuagagacuc

SEQ ID NO: 103363 - RNA, 19 nt, Artificial Sequence
  Description of Artificial Sequence: Synthetic oligonucleotide
aaacgaggugagucagauu

SEQ ID NO: 103364 - RNA, 19 nt, Artificial Sequence
  Description of Artificial Sequence: Synthetic oligonucleotide
cuccuaugauccccagagc

SEQ ID NO: 103365 - RNA, 19 nt, Artificial Sequence
  Description of Artificial Sequence: Synthetic oligonucleotide
gaauucaauuaaaggggcu

SEQ ID NO: 103366 - RNA, 19 nt, Artificial Sequence
  Description of Artificial Sequence: Synthetic oligonucleotide
auuagacuuggaugcugua

SEQ ID NO: 103367 - RNA, 19 nt, Artificial Sequence
  Description of Artificial Sequence: Synthetic oligonucleotide
cauuagacuuggaugcugu

SEQ ID NO: 103368 - RNA, 19 nt, Artificial Sequence
  Description of Artificial Sequence: Synthetic oligonucleotide
uagcgaccgccacccagag

SEQ ID NO: 103369 - RNA, 19 nt, Artificial Sequence
  Description of Artificial Sequence: Synthetic oligonucleotide
gaucuauacuaccuuuauu

SEQ ID NO: 103370 - RNA, 19 nt, Artificial Sequence
  Description of Artificial Sequence: Synthetic oligonucleotide
gccaucgcggcgcuuagcc

SEQ ID NO: 103371 - RNA, 19 nt, Artificial Sequence
  Description of Artificial Sequence: Synthetic oligonucleotide
uugauuuggauggcuuauu

SEQ ID NO: 103372 - RNA, 19 nt, Artificial Sequence
  Description of Artificial Sequence: Synthetic oligonucleotide
uccuuaguaggggaugcuu

SEQ ID NO: 103373 - RNA, 19 nt, Artificial Sequence
  Description of Artificial Sequence: Synthetic oligonucleotide
uagcgaugacauccaugac

SEQ ID NO: 103374 - RNA, 19 nt, Artificial Sequence
  Description of Artificial Sequence: Synthetic oligonucleotide
gucacgcucuucguauucc

SEQ ID NO: 103375 - RNA, 19 nt, Artificial Sequence
  Description of Artificial Sequence: Synthetic oligonucleotide
gacucaccccuaucaucug

SEQ ID NO: 103376 - RNA, 19 nt, Artificial Sequence
  Description of Artificial Sequence: Synthetic oligonucleotide
ccguagagucugaauuucg

SEQ ID NO: 103377 - RNA, 19 nt, Artificial Sequence
  Description of Artificial Sequence: Synthetic oligonucleotide
gcgcuuuauuacuaucuac

SEQ ID NO: 103378 - RNA, 19 nt, Artificial Sequence
  Description of Artificial Sequence: Synthetic oligonucleotide
aucgcggcgcuuagccucc

SEQ ID NO: 103379 - RNA, 19 nt, Artificial Sequence
  Description of Artificial Sequence: Synthetic oligonucleotide
cagcgagguaauugcuuug

SEQ ID NO: 103380 - RNA, 19 nt, Artificial Sequence
  Description of Artificial Sequence: Synthetic oligonucleotide
ugucuaugugaugcauuau

SEQ ID NO: 103381 - RNA, 19 nt, Artificial Sequence
  Description of Artificial Sequence: Synthetic oligonucleotide
gguuucgguagcgaccgcc

SEQ ID NO: 103382 - RNA, 19 nt, Artificial Sequence
  Description of Artificial Sequence: Synthetic oligonucleotide
gccaacuccguagagucug

SEQ ID NO: 103383 - RNA, 19 nt, Artificial Sequence
  Description of Artificial Sequence: Synthetic oligonucleotide
cagaucgcccaucaggucu

SEQ ID NO: 103384 - RNA, 19 nt, Artificial Sequence
  Description of Artificial Sequence: Synthetic oligonucleotide
guacugccuuacuaugcuc

SEQ ID NO: 103385 - RNA, 19 nt, Artificial Sequence
  Description of Artificial Sequence: Synthetic oligonucleotide
uggacucguucuccuuagu

SEQ ID NO: 103386 - RNA, 19 nt, Artificial Sequence
  Description of Artificial Sequence: Synthetic oligonucleotide
cuuagcgccuuuguuuaga

SEQ ID NO: 103387 - RNA, 19 nt, Artificial Sequence
  Description of Artificial Sequence: Synthetic oligonucleotide
caagagcauagucacuucu

SEQ ID NO: 103388 - RNA, 19 nt, Artificial Sequence
  Description of Artificial Sequence: Synthetic oligonucleotide
cgagguaauugcuuuguuc

SEQ ID NO: 103389 - RNA, 19 nt, Artificial Sequence
  Description of Artificial Sequence: Synthetic oligonucleotide
ucguauucccaagcuuuau

SEQ ID NO: 103390 - RNA, 19 nt, Artificial Sequence
  Description of Artificial Sequence: Synthetic oligonucleotide
ggaaauaagaaaggcgcgu

SEQ ID NO: 103391 - RNA, 19 nt, Artificial Sequence
  Description of Artificial Sequence: Synthetic oligonucleotide
cuucgaacccuugccugac

SEQ ID NO: 103392 - RNA, 19 nt, Artificial Sequence
  Description of Artificial Sequence: Synthetic oligonucleotide
guguuucguaaaauacauc

SEQ ID NO: 103393 - RNA, 19 nt, Artificial Sequence
  Description of Artificial Sequence: Synthetic oligonucleotide
cuugaacgacugcaauaga

SEQ ID NO: 103394 - RNA, 19 nt, Artificial Sequence
  Description of Artificial Sequence: Synthetic oligonucleotide
guagcgaccgccacccaga

SEQ ID NO: 103395 - RNA, 19 nt, Artificial Sequence
  Description of Artificial Sequence: Synthetic oligonucleotide
guuucgguagcgaccgcca

SEQ ID NO: 103396 - RNA, 19 nt, Artificial Sequence
  Description of Artificial Sequence: Synthetic oligonucleotide
cacgucuuagagacucaga

SEQ ID NO: 103397 - RNA, 19 nt, Artificial Sequence
  Description of Artificial Sequence: Synthetic oligonucleotide
gaacaacuaccggcuuagc

SEQ ID NO: 103398 - RNA, 19 nt, Artificial Sequence
  Description of Artificial Sequence: Synthetic oligonucleotide
gugcgcuuuauuacuaucu

SEQ ID NO: 103399 - RNA, 19 nt, Artificial Sequence
  Description of Artificial Sequence: Synthetic oligonucleotide
ggcuuagcgccuuuguuua

SEQ ID NO: 103400 - RNA, 19 nt, Artificial Sequence
  Description of Artificial Sequence: Synthetic oligonucleotide
cacuguaggagccugccau

SEQ ID NO: 103401 - RNA, 19 nt, Artificial Sequence
  Description of Artificial Sequence: Synthetic oligonucleotide
uagcgccuuuguuuagauc

SEQ ID NO: 103402 - RNA, 19 nt, Artificial Sequence
  Description of Artificial Sequence: Synthetic oligonucleotide
cuuaguaggggaugcuuuu

SEQ ID NO: 103403 - RNA, 19 nt, Artificial Sequence
  Description of Artificial Sequence: Synthetic oligonucleotide
ccuaucaucugauuucugu

SEQ ID NO: 103404 - RNA, 19 nt, Artificial Sequence
  Description of Artificial Sequence: Synthetic oligonucleotide
cuagauugucugcuaugua

SEQ ID NO: 103405 - RNA, 19 nt, Artificial Sequence
  Description of Artificial Sequence: Synthetic oligonucleotide
cagugugcgcuuuauuacu

SEQ ID NO: 103406 - RNA, 19 nt, Artificial Sequence
  Description of Artificial Sequence: Synthetic oligonucleotide
ucgucguugaucgccuguu

SEQ ID NO: 103407 - RNA, 19 nt, Artificial Sequence
  Description of Artificial Sequence: Synthetic oligonucleotide
cccgugaguccccugauuc

SEQ ID NO: 103408 - RNA, 19 nt, Artificial Sequence
  Description of Artificial Sequence: Synthetic oligonucleotide
ccuuauugucagugugcgc

SEQ ID NO: 103409 - RNA, 19 nt, Artificial Sequence
  Description of Artificial Sequence: Synthetic oligonucleotide
ccccgaggaaacaucuccc

SEQ ID NO: 103410 - RNA, 19 nt, Artificial Sequence
  Description of Artificial Sequence: Synthetic oligonucleotide
acgaggugagucagauuug

SEQ ID NO: 103411 - RNA, 19 nt, Artificial Sequence
  Description of Artificial Sequence: Synthetic oligonucleotide
auccccgaggaaacaucuc

SEQ ID NO: 103412 - RNA, 19 nt, Artificial Sequence
  Description of Artificial Sequence: Synthetic oligonucleotide
ccuuacuaugcuccucuuc

SEQ ID NO: 103413 - RNA, 19 nt, Artificial Sequence
  Description of Artificial Sequence: Synthetic oligonucleotide
gcuagauugucugcuaugu

SEQ ID NO: 103414 - RNA, 19 nt, Artificial Sequence
  Description of Artificial Sequence: Synthetic oligonucleotide
ucguucugacucaccccua

SEQ ID NO: 103415 - RNA, 19 nt, Artificial Sequence
  Description of Artificial Sequence: Synthetic oligonucleotide
cagggaucguaaagucuga

SEQ ID NO: 103416 - RNA, 19 nt, Artificial Sequence
  Description of Artificial Sequence: Synthetic oligonucleotide
gcaaaguggcguacauuug

SEQ ID NO: 103417 - RNA, 19 nt, Artificial Sequence
  Description of Artificial Sequence: Synthetic oligonucleotide
aaccccugacaggaucuuu

SEQ ID NO: 103418 - RNA, 19 nt, Artificial Sequence
  Description of Artificial Sequence: Synthetic oligonucleotide
ggcgcuuagccuccgucca

SEQ ID NO: 103419 - RNA, 19 nt, Artificial Sequence
  Description of Artificial Sequence: Synthetic oligonucleotide
caaccucacuaaggcuggg

SEQ ID NO: 103420 - RNA, 19 nt, Artificial Sequence
  Description of Artificial Sequence: Synthetic oligonucleotide
ggacucaucuugucugaaa

SEQ ID NO: 103421 - RNA, 19 nt, Artificial Sequence
  Description of Artificial Sequence: Synthetic oligonucleotide
ucccacggaucauggugua

SEQ ID NO: 103422 - RNA, 19 nt, Artificial Sequence
  Description of Artificial Sequence: Synthetic oligonucleotide
aggcgcgucugugcuggcg

SEQ ID NO: 103423 - RNA, 19 nt, Artificial Sequence
  Description of Artificial Sequence: Synthetic oligonucleotide
gaauccgaauccacccgcu

SEQ ID NO: 103424 - RNA, 19 nt, Artificial Sequence
  Description of Artificial Sequence: Synthetic oligonucleotide
aacuaccggcuuagcgccu

SEQ ID NO: 103425 - RNA, 19 nt, Artificial Sequence
  Description of Artificial Sequence: Synthetic oligonucleotide
uccgagcauucgugcuggc

SEQ ID NO: 103426 - RNA, 19 nt, Artificial Sequence
  Description of Artificial Sequence: Synthetic oligonucleotide
uaccggcuuagcgccuuug

SEQ ID NO: 103427 - RNA, 19 nt, Artificial Sequence
  Description of Artificial Sequence: Synthetic oligonucleotide
ggucuucgaacccuugccu

SEQ ID NO: 103428 - RNA, 19 nt, Artificial Sequence
  Description of Artificial Sequence: Synthetic oligonucleotide
uuccgucgucguugaucgc

SEQ ID NO: 103429 - RNA, 19 nt, Artificial Sequence
  Description of Artificial Sequence: Synthetic oligonucleotide
cagcuuauuagcacucguu

SEQ ID NO: 103430 - RNA, 19 nt, Artificial Sequence
  Description of Artificial Sequence: Synthetic oligonucleotide
cacucguuagagcaauuuu

SEQ ID NO: 103431 - RNA, 19 nt, Artificial Sequence
  Description of Artificial Sequence: Synthetic oligonucleotide
agguaagucuggagguuuu

SEQ ID NO: 103432 - RNA, 19 nt, Artificial Sequence
  Description of Artificial Sequence: Synthetic oligonucleotide
cguugaucgccuguuguac

SEQ ID NO: 103433 - RNA, 19 nt, Artificial Sequence
  Description of Artificial Sequence: Synthetic oligonucleotide
agaucgcccaucaggucuu

SEQ ID NO: 103434 - RNA, 19 nt, Artificial Sequence
  Description of Artificial Sequence: Synthetic oligonucleotide
caucaggucuuugcuuuaa

SEQ ID NO: 103435 - RNA, 19 nt, Artificial Sequence
  Description of Artificial Sequence: Synthetic oligonucleotide
ggcuuauucuugauagacu

SEQ ID NO: 103436 - RNA, 19 nt, Artificial Sequence
  Description of Artificial Sequence: Synthetic oligonucleotide
gucgucguugaucgccugu

SEQ ID NO: 103437 - RNA, 19 nt, Artificial Sequence
  Description of Artificial Sequence: Synthetic oligonucleotide
ccacggaucaugguguaga

SEQ ID NO: 103438 - RNA, 19 nt, Artificial Sequence
  Description of Artificial Sequence: Synthetic oligonucleotide
gugugcgcuuuauuacuau

SEQ ID NO: 103439 - RNA, 19 nt, Artificial Sequence
  Description of Artificial Sequence: Synthetic oligonucleotide
cccgaggaaacaucuccca

SEQ ID NO: 103440 - RNA, 19 nt, Artificial Sequence
  Description of Artificial Sequence: Synthetic oligonucleotide
gucuagguacugccuuacu

SEQ ID NO: 103441 - RNA, 19 nt, Artificial Sequence
  Description of Artificial Sequence: Synthetic oligonucleotide
cuccguuagcuuggaauua

SEQ ID NO: 103442 - RNA, 19 nt, Artificial Sequence
  Description of Artificial Sequence: Synthetic oligonucleotide
cuuggaaauucagccuuau

SEQ ID NO: 103443 - RNA, 19 nt, Artificial Sequence
  Description of Artificial Sequence: Synthetic oligonucleotide
cggcgcuuagccuccgucc

SEQ ID NO: 103444 - RNA, 19 nt, Artificial Sequence
  Description of Artificial Sequence: Synthetic oligonucleotide
gcgcuuagccuccguccag

SEQ ID NO: 103445 - RNA, 19 nt, Artificial Sequence
  Description of Artificial Sequence: Synthetic oligonucleotide
cuugcaauuuguggucgau

SEQ ID NO: 103446 - RNA, 19 nt, Artificial Sequence
  Description of Artificial Sequence: Synthetic oligonucleotide
ccaucagauuuaaugcuau

SEQ ID NO: 103447 - RNA, 19 nt, Artificial Sequence
  Description of Artificial Sequence: Synthetic oligonucleotide
ccaugacgucaacacuuuc

SEQ ID NO: 103448 - RNA, 19 nt, Artificial Sequence
  Description of Artificial Sequence: Synthetic oligonucleotide
ccugucacgcucuucguau

SEQ ID NO: 103449 - RNA, 19 nt, Artificial Sequence
  Description of Artificial Sequence: Synthetic oligonucleotide
ccuuaguaggggaugcuuu

SEQ ID NO: 103450 - RNA, 19 nt, Artificial Sequence
  Description of Artificial Sequence: Synthetic oligonucleotide
cugugcuacgcuugcgcuu

SEQ ID NO: 103451 - RNA, 19 nt, Artificial Sequence
  Description of Artificial Sequence: Synthetic oligonucleotide
ccgugaguccccugauuca

SEQ ID NO: 103452 - RNA, 19 nt, Artificial Sequence
  Description of Artificial Sequence: Synthetic oligonucleotide
cgcuuccgagacuuccgag

SEQ ID NO: 103453 - RNA, 19 nt, Artificial Sequence
  Description of Artificial Sequence: Synthetic oligonucleotide
cccugauucaugccugugu

SEQ ID NO: 103454 - RNA, 19 nt, Artificial Sequence
  Description of Artificial Sequence: Synthetic oligonucleotide
cgucguugaucgccuguug

SEQ ID NO: 103455 - RNA, 19 nt, Artificial Sequence
  Description of Artificial Sequence: Synthetic oligonucleotide
gcacucguuagagcaauuu

SEQ ID NO: 103456 - RNA, 19 nt, Artificial Sequence
  Description of Artificial Sequence: Synthetic oligonucleotide
gcagaacaacuaccggcuu

SEQ ID NO: 103457 - RNA, 19 nt, Artificial Sequence
  Description of Artificial Sequence: Synthetic oligonucleotide
ggccaucgcggcgcuuagc

SEQ ID NO: 103458 - RNA, 19 nt, Artificial Sequence
  Description of Artificial Sequence: Synthetic oligonucleotide
ccgaggaaacaucucccau

SEQ ID NO: 103459 - RNA, 19 nt, Artificial Sequence
  Description of Artificial Sequence: Synthetic oligonucleotide
gcgagguaauugcuuuguu

SEQ ID NO: 103460 - RNA, 19 nt, Artificial Sequence
  Description of Artificial Sequence: Synthetic oligonucleotide
cggcuuagcgccuuuguuu

SEQ ID NO: 103461 - RNA, 19 nt, Artificial Sequence
  Description of Artificial Sequence: Synthetic oligonucleotide
cgucgucguugaucgccug

SEQ ID NO: 103462 - RNA, 19 nt, Artificial Sequence
  Description of Artificial Sequence: Synthetic oligonucleotide
cgaauccacccgcuuccga

SEQ ID NO: 103463 - RNA, 19 nt, Artificial Sequence
  Description of Artificial Sequence: Synthetic oligonucleotide
cgacugcaauagauuacua

SEQ ID NO: 103464 - RNA, 19 nt, Artificial Sequence
  Description of Artificial Sequence: Synthetic oligonucleotide
cuuuuccgucgucguugau

SEQ ID NO: 103465 - RNA, 19 nt, Artificial Sequence
  Description of Artificial Sequence: Synthetic oligonucleotide
ccgucgucguugaucgccu

SEQ ID NO: 103466 - RNA, 19 nt, Artificial Sequence
  Description of Artificial Sequence: Synthetic oligonucleotide
ccguccuuggcggcauaca

SEQ ID NO: 103467 - RNA, 19 nt, Artificial Sequence
  Description of Artificial Sequence: Synthetic oligonucleotide
gugcuacgcuugcgcuugu

SEQ ID NO: 103468 - RNA, 19 nt, Artificial Sequence
  Description of Artificial Sequence: Synthetic oligonucleotide
gccuuacuaugcuccucuu

SEQ ID NO: 103469 - RNA, 19 nt, Artificial Sequence
  Description of Artificial Sequence: Synthetic oligonucleotide
cgugaguccccugauucau

SEQ ID NO: 103470 - RNA, 19 nt, Artificial Sequence
  Description of Artificial Sequence: Synthetic oligonucleotide
cggccaucgcggcgcuuag

SEQ ID NO: 103471 - RNA, 19 nt, Artificial Sequence
  Description of Artificial Sequence: Synthetic oligonucleotide
ggcggcauacagggaucgu

SEQ ID NO: 103472 - RNA, 19 nt, Artificial Sequence
  Description of Artificial Sequence: Synthetic oligonucleotide
cuaccggcuuagcgccuuu

SEQ ID NO: 103473 - RNA, 19 nt, Artificial Sequence
  Description of Artificial Sequence: Synthetic oligonucleotide
cgguuucgguagcgaccgc

SEQ ID NO: 103474 - RNA, 19 nt, Artificial Sequence
  Description of Artificial Sequence: Synthetic oligonucleotide
gcgcgucugugcuggcggu

SEQ ID NO: 103475 - RNA, 19 nt, Artificial Sequence
  Description of Artificial Sequence: Synthetic oligonucleotide
ggcgguucccacggaucau

SEQ ID NO: 103476 - RNA, 19 nt, Artificial Sequence
  Description of Artificial Sequence: Synthetic oligonucleotide
ccccgaugucguucugacu

SEQ ID NO: 103477 - RNA, 19 nt, Artificial Sequence
  Description of Artificial Sequence: Synthetic oligonucleotide
cgguagcgaccgccaccca

SEQ ID NO: 103478 - RNA, 19 nt, Artificial Sequence
  Description of Artificial Sequence: Synthetic oligonucleotide
aucacaaacaaacucgccc

SEQ ID NO: 103479 - RNA, 19 nt, Artificial Sequence
  Description of Artificial Sequence: Synthetic oligonucleotide
uuuacuaugagugauucac

SEQ ID NO: 103480 - RNA, 19 nt, Artificial Sequence
  Description of Artificial Sequence: Synthetic oligonucleotide
gauagugacagugaaguag

SEQ ID NO: 103481 - RNA, 19 nt, Artificial Sequence
  Description of Artificial Sequence: Synthetic oligonucleotide
gaaagcucgcacucgaacg

SEQ ID NO: 103482 - RNA, 19 nt, Artificial Sequence
  Description of Artificial Sequence: Synthetic oligonucleotide
caucucaaccaauacaggg

SEQ ID NO: 103483 - RNA, 19 nt, Artificial Sequence
  Description of Artificial Sequence: Synthetic oligonucleotide
aaccaagucgcccuggaug

SEQ ID NO: 103484 - RNA, 19 nt, Artificial Sequence
  Description of Artificial Sequence: Synthetic oligonucleotide
uccaacaccgcccucgcgg

SEQ ID NO: 103485 - RNA, 19 nt, Artificial Sequence
  Description of Artificial Sequence: Synthetic oligonucleotide
uugacucuaagcagaguag

SEQ ID NO: 103486 - RNA, 19 nt, Artificial Sequence
  Description of Artificial Sequence: Synthetic oligonucleotide
  modified_base (2)..(2): a, c, u, g, unknown or other
gnacaauagucacugggac

SEQ ID NO: 103487 - RNA, 19 nt, Artificial Sequence
  Description of Artificial Sequence: Synthetic oligonucleotide
agugguacgggaguugccc

SEQ ID NO: 103488 - RNA, 19 nt, Artificial Sequence
  Description of Artificial Sequence: Synthetic oligonucleotide
ucgagccaaagacugggcg

SEQ ID NO: 103489 - RNA, 19 nt, Artificial Sequence
  Description of Artificial Sequence: Synthetic oligonucleotide
aaagcucgcacucgaacgu

SEQ ID NO: 103490 - RNA, 19 nt, Artificial Sequence
  Description of Artificial Sequence: Synthetic oligonucleotide
cuaugagugauucacucuc

SEQ ID NO: 103491 - RNA, 19 nt, Artificial Sequence
  Description of Artificial Sequence: Synthetic oligonucleotide
ccauuaaggaaccaagucg

SEQ ID NO: 103492 - RNA, 19 nt, Artificial Sequence
  Description of Artificial Sequence: Synthetic oligonucleotide
agcacuacccguucagagg

SEQ ID NO: 103493 - RNA, 19 nt, Artificial Sequence
  Description of Artificial Sequence: Synthetic oligonucleotide
ugacacauuugacucuaag

SEQ ID NO: 103494 - RNA, 19 nt, Artificial Sequence
  Description of Artificial Sequence: Synthetic oligonucleotide
gauagcgagagcugcggag

SEQ ID NO: 103495 - RNA, 19 nt, Artificial Sequence
  Description of Artificial Sequence: Synthetic oligonucleotide
gaaguaggcacguucguuc

SEQ ID NO: 103496 - RNA, 19 nt, Artificial Sequence
  Description of Artificial Sequence: Synthetic oligonucleotide
agugaaguaggcacguucg

SEQ ID NO: 103497 - RNA, 19 nt, Artificial Sequence
  Description of Artificial Sequence: Synthetic oligonucleotide
cacaauucgaccccucccg

SEQ ID NO: 103498 - RNA, 19 nt, Artificial Sequence
  Description of Artificial Sequence: Synthetic oligonucleotide
acugcaaauccagggaucg

SEQ ID NO: 103499 - RNA, 19 nt, Artificial Sequence
  Description of Artificial Sequence: Synthetic oligonucleotide
uaugcgguaccgcagggcu

SEQ ID NO: 103500 - RNA, 19 nt, Artificial Sequence
  Description of Artificial Sequence: Synthetic oligonucleotide
uacuaugagugauucacuc

SEQ ID NO: 103501 - RNA, 19 nt, Artificial Sequence
  Description of Artificial Sequence: Synthetic oligonucleotide
uuggauagcgagagcugcg

SEQ ID NO: 103502 - RNA, 19 nt, Artificial Sequence
  Description of Artificial Sequence: Synthetic oligonucleotide
uccccuggcaccucuacgg

SEQ ID NO: 103503 - RNA, 19 nt, Artificial Sequence
  Description of Artificial Sequence: Synthetic oligonucleotide
uacacgauccaugaggaaa

SEQ ID NO: 103504 - RNA, 19 nt, Artificial Sequence
  Description of Artificial Sequence: Synthetic oligonucleotide
acgcacugaaacucgcccc

SEQ ID NO: 103505 - RNA, 19 nt, Artificial Sequence
  Description of Artificial Sequence: Synthetic oligonucleotide
uccagcguaccucagccca

SEQ ID NO: 103506 - RNA, 19 nt, Artificial Sequence
  Description of Artificial Sequence: Synthetic oligonucleotide
ugcgacgcacugaaacucg

SEQ ID NO: 103507 - RNA, 19 nt, Artificial Sequence
  Description of Artificial Sequence: Synthetic oligonucleotide
ugaggaaacaucugugaua

SEQ ID NO: 103508 - RNA, 19 nt, Artificial Sequence
  Description of Artificial Sequence: Synthetic oligonucleotide
gacgcacugaaacucgccc

SEQ ID NO: 103509 - RNA, 19 nt, Artificial Sequence
  Description of Artificial Sequence: Synthetic oligonucleotide
ugcucuaugcgguaccgca

SEQ ID NO: 103510 - RNA, 19 nt, Artificial Sequence
  Description of Artificial Sequence: Synthetic oligonucleotide
ucuuggauagcgagagcug

SEQ ID NO: 103511 - RNA, 19 nt, Artificial Sequence
  Description of Artificial Sequence: Synthetic oligonucleotide
uuacuaugagugauucacu

SEQ ID NO: 103512 - RNA, 19 nt, Artificial Sequence
  Description of Artificial Sequence: Synthetic oligonucleotide
cauacaacgucagccaaag

SEQ ID NO: 103513 - RNA, 19 nt, Artificial Sequence
  Description of Artificial Sequence: Synthetic oligonucleotide
cucguaaccagcgaacagc

SEQ ID NO: 103514 - RNA, 19 nt, Artificial Sequence
  Description of Artificial Sequence: Synthetic oligonucleotide
cacuucgcagcguagcucc

SEQ ID NO: 103515 - RNA, 19 nt, Artificial Sequence
  Description of Artificial Sequence: Synthetic oligonucleotide
ucguaaccagcgaacagcu

SEQ ID NO: 103516 - RNA, 19 nt, Artificial Sequence
  Description of Artificial Sequence: Synthetic oligonucleotide
agccagaaccgucuucucg

SEQ ID NO: 103517 - RNA, 19 nt, Artificial Sequence
  Description of Artificial Sequence: Synthetic oligonucleotide
uguuccccauuaaggaacc

SEQ ID NO: 103518 - RNA, 19 nt, Artificial Sequence
  Description of Artificial Sequence: Synthetic oligonucleotide
aauucgaccccucccgcaa

SEQ ID NO: 103519 - RNA, 19 nt, Artificial Sequence
  Description of Artificial Sequence: Synthetic oligonucleotide
cuuggauagcgagagcugc

SEQ ID NO: 103520 - RNA, 19 nt, Artificial Sequence
  Description of Artificial Sequence: Synthetic oligonucleotide
ugggguacacgauccauga

SEQ ID NO: 103521 - RNA, 19 nt, Artificial Sequence
  Description of Artificial Sequence: Synthetic oligonucleotide
uucucgggcgcuaacggac

SEQ ID NO: 103522 - RNA, 19 nt, Artificial Sequence
  Description of Artificial Sequence: Synthetic oligonucleotide
acauuugacucuaagcaga

SEQ ID NO: 103523 - RNA, 19 nt, Artificial Sequence
  Description of Artificial Sequence: Synthetic oligonucleotide
cacuucuagguccuguggc

SEQ ID NO: 103524 - RNA, 19 nt, Artificial Sequence
  Description of Artificial Sequence: Synthetic oligonucleotide
ggaaaguccacucuugaga

SEQ ID NO: 103525 - RNA, 19 nt, Artificial Sequence
  Description of Artificial Sequence: Synthetic oligonucleotide
caugugaccagaacugcuc

SEQ ID NO: 103526 - RNA, 19 nt, Artificial Sequence
  Description of Artificial Sequence: Synthetic oligonucleotide
acgcacucggaagugaugg

SEQ ID NO: 103527 - RNA, 19 nt, Artificial Sequence
  Description of Artificial Sequence: Synthetic oligonucleotide
accaagucgcccuggauga

SEQ ID NO: 103528 - RNA, 19 nt, Artificial Sequence
  Description of Artificial Sequence: Synthetic oligonucleotide
agugcacucgaacguggcg

SEQ ID NO: 103529 - RNA, 19 nt, Artificial Sequence
  Description of Artificial Sequence: Synthetic oligonucleotide
agaguagugguacgggagu

SEQ ID NO: 103530 - RNA, 19 nt, Artificial Sequence
  Description of Artificial Sequence: Synthetic oligonucleotide
uccagucgagccaaagacu

SEQ ID NO: 103531 - RNA, 19 nt, Artificial Sequence
  Description of Artificial Sequence: Synthetic oligonucleotide
ucucgggucucacacacau

SEQ ID NO: 103532 - RNA, 19 nt, Artificial Sequence
  Description of Artificial Sequence: Synthetic oligonucleotide
gaaucggacaccucuaccu

SEQ ID NO: 103533 - RNA, 19 nt, Artificial Sequence
  Description of Artificial Sequence: Synthetic oligonucleotide
uuuucgcccauccaccuuu

SEQ ID NO: 103534 - RNA, 19 nt, Artificial Sequence
  Description of Artificial Sequence: Synthetic oligonucleotide
uacucuugagcuguucccc

SEQ ID NO: 103535 - RNA, 19 nt, Artificial Sequence
  Description of Artificial Sequence: Synthetic oligonucleotide
aagucgcccuggaugaugg

SEQ ID NO: 103536 - RNA, 19 nt, Artificial Sequence
  Description of Artificial Sequence: Synthetic oligonucleotide
agacaccucgcgcucgcgc

SEQ ID NO: 103537 - RNA, 19 nt, Artificial Sequence
  Description of Artificial Sequence: Synthetic oligonucleotide
  modified_base (4)..(4): a, c, u, g, unknown or other
ccgnacaauagucacuggg

SEQ ID NO: 103538 - RNA, 19 nt, Artificial Sequence
  Description of Artificial Sequence: Synthetic oligonucleotide
ugacucuaagcagaguagu

SEQ ID NO: 103539 - RNA, 19 nt, Artificial Sequence
  Description of Artificial Sequence: Synthetic oligonucleotide
ucuucucgcgaggugggcg

SEQ ID NO: 103540 - RNA, 19 nt, Artificial Sequence
  Description of Artificial Sequence: Synthetic oligonucleotide
ucgaacgucgcugugucac

SEQ ID NO: 103541 - RNA, 19 nt, Artificial Sequence
  Description of Artificial Sequence: Synthetic oligonucleotide
ccgagcagcacaucgaagg

SEQ ID NO: 103542 - RNA, 19 nt, Artificial Sequence
  Description of Artificial Sequence: Synthetic oligonucleotide
ucucccauacaacgucagc

SEQ ID NO: 103543 - RNA, 19 nt, Artificial Sequence
  Description of Artificial Sequence: Synthetic oligonucleotide
aaggugauuuccccagcau

SEQ ID NO: 103544 - RNA, 19 nt, Artificial Sequence
  Description of Artificial Sequence: Synthetic oligonucleotide
ggcgcuaacggacuggagc

SEQ ID NO: 103545 - RNA, 19 nt, Artificial Sequence
  Description of Artificial Sequence: Synthetic oligonucleotide
uccuucucgggcgcuaacg

SEQ ID NO: 103546 - RNA, 19 nt, Artificial Sequence
  Description of Artificial Sequence: Synthetic oligonucleotide
uguuuucgcccauccaccu

SEQ ID NO: 103547 - RNA, 19 nt, Artificial Sequence
  Description of Artificial Sequence: Synthetic oligonucleotide
uucaccgguguccucggcu

SEQ ID NO: 103548 - RNA, 19 nt, Artificial Sequence
  Description of Artificial Sequence: Synthetic oligonucleotide
accgggcuaucuuggauag

SEQ ID NO: 103549 - RNA, 19 nt, Artificial Sequence
  Description of Artificial Sequence: Synthetic oligonucleotide
cuucucgcgaggugggcgg

SEQ ID NO: 103550 - RNA, 19 nt, Artificial Sequence
  Description of Artificial Sequence: Synthetic oligonucleotide
ucaggcaggaucagccggu

SEQ ID NO: 103551 - RNA, 19 nt, Artificial Sequence
  Description of Artificial Sequence: Synthetic oligonucleotide
aacgucagccaaagucugg

SEQ ID NO: 103552 - RNA, 19 nt, Artificial Sequence
  Description of Artificial Sequence: Synthetic oligonucleotide
gcaaccaacacacguggcc

SEQ ID NO: 103553 - RNA, 19 nt, Artificial Sequence
  Description of Artificial Sequence: Synthetic oligonucleotide
cagcacuacccguucagag

SEQ ID NO: 103554 - RNA, 19 nt, Artificial Sequence
  Description of Artificial Sequence: Synthetic oligonucleotide
ucccggacacaauucgacc

SEQ ID NO: 103555 - RNA, 19 nt, Artificial Sequence
  Description of Artificial Sequence: Synthetic oligonucleotide
aggucggacaucauggaug

SEQ ID NO: 103556 - RNA, 19 nt, Artificial Sequence
  Description of Artificial Sequence: Synthetic oligonucleotide
uuccugucggaugcggacg

SEQ ID NO: 103557 - RNA, 19 nt, Artificial Sequence
  Description of Artificial Sequence: Synthetic oligonucleotide
aagccgacucaucaucaau

SEQ ID NO: 103558 - RNA, 19 nt, Artificial Sequence
  Description of Artificial Sequence: Synthetic oligonucleotide
cuaggcguauggcuguuac

SEQ ID NO: 103559 - RNA, 19 nt, Artificial Sequence
  Description of Artificial Sequence: Synthetic oligonucleotide
ucgaacguggcgcuaucuc

SEQ ID NO: 103560 - RNA, 19 nt, Artificial Sequence
  Description of Artificial Sequence: Synthetic oligonucleotide
cucucacagccguagguac

SEQ ID NO: 103561 - RNA, 19 nt, Artificial Sequence
  Description of Artificial Sequence: Synthetic oligonucleotide
ucucgggucaccccuggaa

SEQ ID NO: 103562 - RNA, 19 nt, Artificial Sequence
  Description of Artificial Sequence: Synthetic oligonucleotide
aaguacucgccggaguccu

SEQ ID NO: 103563 - RNA, 19 nt, Artificial Sequence
  Description of Artificial Sequence: Synthetic oligonucleotide
accaacacacguggccucc

SEQ ID NO: 103564 - RNA, 19 nt, Artificial Sequence
  Description of Artificial Sequence: Synthetic oligonucleotide
ucgcccauccaccuuuacu

SEQ ID NO: 103565 - RNA, 19 nt, Artificial Sequence
  Description of Artificial Sequence: Synthetic oligonucleotide
cuggucgcuaaguaggaca

SEQ ID NO: 103566 - RNA, 19 nt, Artificial Sequence
  Description of Artificial Sequence: Synthetic oligonucleotide
cugggguacacgauccaug

SEQ ID NO: 103567 - RNA, 19 nt, Artificial Sequence
  Description of Artificial Sequence: Synthetic oligonucleotide
uccugucggaugcggacgc

SEQ ID NO: 103568 - RNA, 19 nt, Artificial Sequence
  Description of Artificial Sequence: Synthetic oligonucleotide
aggcacguucguucccugc

SEQ ID NO: 103569 - RNA, 19 nt, Artificial Sequence
  Description of Artificial Sequence: Synthetic oligonucleotide
guagugguacgggaguugc

SEQ ID NO: 103570 - RNA, 19 nt, Artificial Sequence
  Description of Artificial Sequence: Synthetic oligonucleotide
gcuucccggacacaauucg

SEQ ID NO: 103571 - RNA, 19 nt, Artificial Sequence
  Description of Artificial Sequence: Synthetic oligonucleotide
cucgggucaccccuggaag

SEQ ID NO: 103572 - RNA, 19 nt, Artificial Sequence
  Description of Artificial Sequence: Synthetic oligonucleotide
ugucggaugcggacgcggc

SEQ ID NO: 103573 - RNA, 19 nt, Artificial Sequence
  Description of Artificial Sequence: Synthetic oligonucleotide
gucaggcgagagucgaggg

SEQ ID NO: 103574 - RNA, 19 nt, Artificial Sequence
  Description of Artificial Sequence: Synthetic oligonucleotide
aggcuccccaccucguaac

SEQ ID NO: 103575 - RNA, 19 nt, Artificial Sequence
  Description of Artificial Sequence: Synthetic oligonucleotide
gaucagccgguguuuucgc

SEQ ID NO: 103576 - RNA, 19 nt, Artificial Sequence
  Description of Artificial Sequence: Synthetic oligonucleotide
ccagucgagccaaagacug

SEQ ID NO: 103577 - RNA, 19 nt, Artificial Sequence
  Description of Artificial Sequence: Synthetic oligonucleotide
uugcuucccggacacaauu

SEQ ID NO: 103578 - RNA, 19 nt, Artificial Sequence
  Description of Artificial Sequence: Synthetic oligonucleotide
agcugcggagucuugcaca

SEQ ID NO: 103579 - RNA, 19 nt, Artificial Sequence
  Description of Artificial Sequence: Synthetic oligonucleotide
aagcucgcacucgaacguc

SEQ ID NO: 103580 - RNA, 19 nt, Artificial Sequence
  Description of Artificial Sequence: Synthetic oligonucleotide
ggcuaaaggugauuucccc

SEQ ID NO: 103581 - RNA, 19 nt, Artificial Sequence
  Description of Artificial Sequence: Synthetic oligonucleotide
acguucguucccugcgacg

SEQ ID NO: 103582 - RNA, 19 nt, Artificial Sequence
  Description of Artificial Sequence: Synthetic oligonucleotide
ggcacguucguucccugcg

SEQ ID NO: 103583 - RNA, 19 nt, Artificial Sequence
  Description of Artificial Sequence: Synthetic oligonucleotide
gucgcuaaguaggacacca

SEQ ID NO: 103584 - RNA, 19 nt, Artificial Sequence
  Description of Artificial Sequence: Synthetic oligonucleotide
cguaccucagcccagggcc

SEQ ID NO: 103585 - RNA, 19 nt, Artificial Sequence
  Description of Artificial Sequence: Synthetic oligonucleotide
acuucaccgguguccucgg

SEQ ID NO: 103586 - RNA, 19 nt, Artificial Sequence
  Description of Artificial Sequence: Synthetic oligonucleotide
aggaucagccgguguuuuc

SEQ ID NO: 103587 - RNA, 19 nt, Artificial Sequence
  Description of Artificial Sequence: Synthetic oligonucleotide
cuccccaccucguaaccag

SEQ ID NO: 103588 - RNA, 19 nt, Artificial Sequence
  Description of Artificial Sequence: Synthetic oligonucleotide
gugacacuuuguccugggg

SEQ ID NO: 103589 - RNA, 19 nt, Artificial Sequence
  Description of Artificial Sequence: Synthetic oligonucleotide
acgcucuaggcguauggcu

SEQ ID NO: 103590 - RNA, 19 nt, Artificial Sequence
  Description of Artificial Sequence: Synthetic oligonucleotide
gguucgaucaugguggcuc

SEQ ID NO: 103591 - RNA, 19 nt, Artificial Sequence
  Description of Artificial Sequence: Synthetic oligonucleotide
acaucgaaggguguccgca

SEQ ID NO: 103592 - RNA, 19 nt, Artificial Sequence
  Description of Artificial Sequence: Synthetic oligonucleotide
gcucacggagcacagacac

SEQ ID NO: 103593 - RNA, 19 nt, Artificial Sequence
  Description of Artificial Sequence: Synthetic oligonucleotide
ugaaguaggcacguucguu

SEQ ID NO: 103594 - RNA, 19 nt, Artificial Sequence
  Description of Artificial Sequence: Synthetic oligonucleotide
gugaaucggacaccucuac

SEQ ID NO: 103595 - RNA, 19 nt, Artificial Sequence
  Description of Artificial Sequence: Synthetic oligonucleotide
ugacgcacucggaagugau

SEQ ID NO: 103596 - RNA, 19 nt, Artificial Sequence
  Description of Artificial Sequence: Synthetic oligonucleotide
ucgcacucgaacgucgcug

SEQ ID NO: 103597 - RNA, 19 nt, Artificial Sequence
  Description of Artificial Sequence: Synthetic oligonucleotide
caccucguaaccagcgaac

SEQ ID NO: 103598 - RNA, 19 nt, Artificial Sequence
  Description of Artificial Sequence: Synthetic oligonucleotide
cagucgagccaaagacugg

SEQ ID NO: 103599 - RNA, 19 nt, Artificial Sequence
  Description of Artificial Sequence: Synthetic oligonucleotide
ugcuucccggacacaauuc

SEQ ID NO: 103600 - RNA, 19 nt, Artificial Sequence
  Description of Artificial Sequence: Synthetic oligonucleotide
caucgcucgggacaguuca

SEQ ID NO: 103601 - RNA, 19 nt, Artificial Sequence
  Description of Artificial Sequence: Synthetic oligonucleotide
agacugggcgggucccgcc

SEQ ID NO: 103602 - RNA, 19 nt, Artificial Sequence
  Description of Artificial Sequence: Synthetic oligonucleotide
uucucucacugagagccga

SEQ ID NO: 103603 - RNA, 19 nt, Artificial Sequence
  Description of Artificial Sequence: Synthetic oligonucleotide
agucgcccucggcagguac

SEQ ID NO: 103604 - RNA, 19 nt, Artificial Sequence
  Description of Artificial Sequence: Synthetic oligonucleotide
ggccugacaccauagucgc

SEQ ID NO: 103605 - RNA, 19 nt, Artificial Sequence
  Description of Artificial Sequence: Synthetic oligonucleotide
acuacccguucagagguug

SEQ ID NO: 103606 - RNA, 19 nt, Artificial Sequence
  Description of Artificial Sequence: Synthetic oligonucleotide
caaguacucgccggagucc

SEQ ID NO: 103607 - RNA, 19 nt, Artificial Sequence
  Description of Artificial Sequence: Synthetic oligonucleotide
caaucuucagacccaaccu

SEQ ID NO: 103608 - RNA, 19 nt, Artificial Sequence
  Description of Artificial Sequence: Synthetic oligonucleotide
ccuuguaccacugcacagg

SEQ ID NO: 103609 - RNA, 19 nt, Artificial Sequence
  Description of Artificial Sequence: Synthetic oligonucleotide
ucaccgguguccucggcuc

SEQ ID NO: 103610 - RNA, 19 nt, Artificial Sequence
  Description of Artificial Sequence: Synthetic oligonucleotide
cacaacgcagcuguagguc

SEQ ID NO: 103611 - RNA, 19 nt, Artificial Sequence
  Description of Artificial Sequence: Synthetic oligonucleotide
uggagucggagccgcgggc

SEQ ID NO: 103612 - RNA, 19 nt, Artificial Sequence
  Description of Artificial Sequence: Synthetic oligonucleotide
gacaccucgcgcucgcgca

SEQ ID NO: 103613 - RNA, 19 nt, Artificial Sequence
  Description of Artificial Sequence: Synthetic oligonucleotide
accucuacggcuccagcuu

SEQ ID NO: 103614 - RNA, 19 nt, Artificial Sequence
  Description of Artificial Sequence: Synthetic oligonucleotide
cuucucccauacaacguca

SEQ ID NO: 103615 - RNA, 19 nt, Artificial Sequence
  Description of Artificial Sequence: Synthetic oligonucleotide
cccggacacaauucgaccc

SEQ ID NO: 103616 - RNA, 19 nt, Artificial Sequence
  Description of Artificial Sequence: Synthetic oligonucleotide
ugagaccccuucaguucug

SEQ ID NO: 103617 - RNA, 19 nt, Artificial Sequence
  Description of Artificial Sequence: Synthetic oligonucleotide
cacagugcacucgaacgug

SEQ ID NO: 103618 - RNA, 19 nt, Artificial Sequence
  Description of Artificial Sequence: Synthetic oligonucleotide
gacagugaaggaagccgac

SEQ ID NO: 103619 - RNA, 19 nt, Artificial Sequence
  Description of Artificial Sequence: Synthetic oligonucleotide
acucgaacguggcgcuauc

SEQ ID NO: 103620 - RNA, 19 nt, Artificial Sequence
  Description of Artificial Sequence: Synthetic oligonucleotide
cagugaaucggacaccucu

SEQ ID NO: 103621 - RNA, 19 nt, Artificial Sequence
  Description of Artificial Sequence: Synthetic oligonucleotide
ucggucuaccucacagguc

SEQ ID NO: 103622 - RNA, 19 nt, Artificial Sequence
  Description of Artificial Sequence: Synthetic oligonucleotide
ggucaggcgagagucgagg

SEQ ID NO: 103623 - RNA, 19 nt, Artificial Sequence
  Description of Artificial Sequence: Synthetic oligonucleotide
cuaugcgguaccgcagggc

SEQ ID NO: 103624 - RNA, 19 nt, Artificial Sequence
  Description of Artificial Sequence: Synthetic oligonucleotide
uacccguucagagguugug

SEQ ID NO: 103625 - RNA, 19 nt, Artificial Sequence
  Description of Artificial Sequence: Synthetic oligonucleotide
agcguaccucagcccaggg

SEQ ID NO: 103626 - RNA, 19 nt, Artificial Sequence
  Description of Artificial Sequence: Synthetic oligonucleotide
accucguaaccagcgaaca

SEQ ID NO: 103627 - RNA, 19 nt, Artificial Sequence
  Description of Artificial Sequence: Synthetic oligonucleotide
ccgcaaacugcaaauccag

SEQ ID NO: 103628 - RNA, 19 nt, Artificial Sequence
  Description of Artificial Sequence: Synthetic oligonucleotide
cuaacggacuggagcucac

SEQ ID NO: 103629 - RNA, 19 nt, Artificial Sequence
  Description of Artificial Sequence: Synthetic oligonucleotide
caugacgcacucggaagug

SEQ ID NO: 103630 - RNA, 19 nt, Artificial Sequence
  Description of Artificial Sequence: Synthetic oligonucleotide
cacgcucuaggcguauggc

SEQ ID NO: 103631 - RNA, 19 nt, Artificial Sequence
  Description of Artificial Sequence: Synthetic oligonucleotide
agcucgcacucgaacgucg

SEQ ID NO: 103632 - RNA, 19 nt, Artificial Sequence
  Description of Artificial Sequence: Synthetic oligonucleotide
uucguucccugcgacgcac

SEQ ID NO: 103633 - RNA, 19 nt, Artificial Sequence
  Description of Artificial Sequence: Synthetic oligonucleotide
cgggcuaucuuggauagcg

SEQ ID NO: 103634 - RNA, 19 nt, Artificial Sequence
  Description of Artificial Sequence: Synthetic oligonucleotide
ccgcaaccaacacacgugg

SEQ ID NO: 103635 - RNA, 19 nt, Artificial Sequence
  Description of Artificial Sequence: Synthetic oligonucleotide
  modified_base (3)..(3): a, c, u, g, unknown or other
cgnacaauagucacuggga

SEQ ID NO: 103636 - RNA, 19 nt, Artificial Sequence
  Description of Artificial Sequence: Synthetic oligonucleotide
uguccgcaguaaagggccu

SEQ ID NO: 103637 - RNA, 19 nt, Artificial Sequence
  Description of Artificial Sequence: Synthetic oligonucleotide
gcguccgaggaauugcagc

SEQ ID NO: 103638 - RNA, 19 nt, Artificial Sequence
  Description of Artificial Sequence: Synthetic oligonucleotide
gcccucggcagguacacag

SEQ ID NO: 103639 - RNA, 19 nt, Artificial Sequence
  Description of Artificial Sequence: Synthetic oligonucleotide
cugcgacgcacugaaacuc

SEQ ID NO: 103640 - RNA, 19 nt, Artificial Sequence
  Description of Artificial Sequence: Synthetic oligonucleotide
gagccgcgggcucggagag

SEQ ID NO: 103641 - RNA, 19 nt, Artificial Sequence
  Description of Artificial Sequence: Synthetic oligonucleotide
cuucccggacacaauucga

SEQ ID NO: 103642 - RNA, 19 nt, Artificial Sequence
  Description of Artificial Sequence: Synthetic oligonucleotide
ccuucucgggcgcuaacgg

SEQ ID NO: 103643 - RNA, 19 nt, Artificial Sequence
  Description of Artificial Sequence: Synthetic oligonucleotide
aacguggcgcuaucuccuu

SEQ ID NO: 103644 - RNA, 19 nt, Artificial Sequence
  Description of Artificial Sequence: Synthetic oligonucleotide
ucgcuaaguaggacaccau

SEQ ID NO: 103645 - RNA, 19 nt, Artificial Sequence
  Description of Artificial Sequence: Synthetic oligonucleotide
acguggcgcuaucuccuuc

SEQ ID NO: 103646 - RNA, 19 nt, Artificial Sequence
  Description of Artificial Sequence: Synthetic oligonucleotide
ccuuuacuaugagugauuc

SEQ ID NO: 103647 - RNA, 19 nt, Artificial Sequence
  Description of Artificial Sequence: Synthetic oligonucleotide
caagucgcccuggaugaug

SEQ ID NO: 103648 - RNA, 19 nt, Artificial Sequence
  Description of Artificial Sequence: Synthetic oligonucleotide
cgaacguggcgcuaucucc

SEQ ID NO: 103649 - RNA, 19 nt, Artificial Sequence
  Description of Artificial Sequence: Synthetic oligonucleotide
cacguucguucccugcgac

SEQ ID NO: 103650 - RNA, 19 nt, Artificial Sequence
  Description of Artificial Sequence: Synthetic oligonucleotide
gacgcacucggaagugaug

SEQ ID NO: 103651 - RNA, 19 nt, Artificial Sequence
  Description of Artificial Sequence: Synthetic oligonucleotide
uaagcgcuucagcccggga

SEQ ID NO: 103652 - RNA, 19 nt, Artificial Sequence
  Description of Artificial Sequence: Synthetic oligonucleotide
auacaacgucagccaaagu

SEQ ID NO: 103653 - RNA, 19 nt, Artificial Sequence
  Description of Artificial Sequence: Synthetic oligonucleotide
ucgcucgggacaguucaca

SEQ ID NO: 103654 - RNA, 19 nt, Artificial Sequence
  Description of Artificial Sequence: Synthetic oligonucleotide
agugaaucggacaccucua

SEQ ID NO: 103655 - RNA, 19 nt, Artificial Sequence
  Description of Artificial Sequence: Synthetic oligonucleotide
caauucgaccccucccgca

SEQ ID NO: 103656 - RNA, 19 nt, Artificial Sequence
  Description of Artificial Sequence: Synthetic oligonucleotide
aacgucgcugugucaccuu

SEQ ID NO: 103657 - RNA, 19 nt, Artificial Sequence
  Description of Artificial Sequence: Synthetic oligonucleotide
cccgcaaccaacacacgug

SEQ ID NO: 103658 - RNA, 19 nt, Artificial Sequence
  Description of Artificial Sequence: Synthetic oligonucleotide
agacuucaccgguguccuc

SEQ ID NO: 103659 - RNA, 19 nt, Artificial Sequence
  Description of Artificial Sequence: Synthetic oligonucleotide
cuucucgggcgcuaacgga

SEQ ID NO: 103660 - RNA, 19 nt, Artificial Sequence
  Description of Artificial Sequence: Synthetic oligonucleotide
ccaucuuugguccagcgua

SEQ ID NO: 103661 - RNA, 19 nt, Artificial Sequence
  Description of Artificial Sequence: Synthetic oligonucleotide
  modified_base (6)..(6): a, c, u, g, unknown or other
ccccgnacaauagucacug

SEQ ID NO: 103662 - RNA, 19 nt, Artificial Sequence
  Description of Artificial Sequence: Synthetic oligonucleotide
caccucuaccuccagccca

SEQ ID NO: 103663 - RNA, 19 nt, Artificial Sequence
  Description of Artificial Sequence: Synthetic oligonucleotide
uccucucggucuaccucac

SEQ ID NO: 103664 - RNA, 19 nt, Artificial Sequence
  Description of Artificial Sequence: Synthetic oligonucleotide
uaggcacguucguucccug

SEQ ID NO: 103665 - RNA, 19 nt, Artificial Sequence
  Description of Artificial Sequence: Synthetic oligonucleotide
ugccgcucuaggcgguaga

SEQ ID NO: 103666 - RNA, 19 nt, Artificial Sequence
  Description of Artificial Sequence: Synthetic oligonucleotide
cagcaugacgcacucggaa

SEQ ID NO: 103667 - RNA, 19 nt, Artificial Sequence
  Description of Artificial Sequence: Synthetic oligonucleotide
cagcguagcuccacauguc

SEQ ID NO: 103668 - RNA, 19 nt, Artificial Sequence
  Description of Artificial Sequence: Synthetic oligonucleotide
uucucgggucaccccugga

SEQ ID NO: 103669 - RNA, 19 nt, Artificial Sequence
  Description of Artificial Sequence: Synthetic oligonucleotide
caccacacgcucuaggcgu

SEQ ID NO: 103670 - RNA, 19 nt, Artificial Sequence
  Description of Artificial Sequence: Synthetic oligonucleotide
gaacguggcgcuaucuccu

SEQ ID NO: 103671 - RNA, 19 nt, Artificial Sequence
  Description of Artificial Sequence: Synthetic oligonucleotide
gcuaucuuggauagcgaga

SEQ ID NO: 103672 - RNA, 19 nt, Artificial Sequence
  Description of Artificial Sequence: Synthetic oligonucleotide
guccagcguaccucagccc

SEQ ID NO: 103673 - RNA, 19 nt, Artificial Sequence
  Description of Artificial Sequence: Synthetic oligonucleotide
uagguacccuggucgcuaa

SEQ ID NO: 103674 - RNA, 19 nt, Artificial Sequence
  Description of Artificial Sequence: Synthetic oligonucleotide
uucgcccauccaccuuuac

SEQ ID NO: 103675 - RNA, 19 nt, Artificial Sequence
  Description of Artificial Sequence: Synthetic oligonucleotide
ccggacacaauucgacccc

SEQ ID NO: 103676 - RNA, 19 nt, Artificial Sequence
  Description of Artificial Sequence: Synthetic oligonucleotide
gugguacgggaguugccca

SEQ ID NO: 103677 - RNA, 19 nt, Artificial Sequence
  Description of Artificial Sequence: Synthetic oligonucleotide
augacgcacucggaaguga

SEQ ID NO: 103678 - RNA, 19 nt, Artificial Sequence
  Description of Artificial Sequence: Synthetic oligonucleotide
ucucgcgaggugggcggcg

SEQ ID NO: 103679 - RNA, 19 nt, Artificial Sequence
  Description of Artificial Sequence: Synthetic oligonucleotide
guacccuggucgcuaagua

SEQ ID NO: 103680 - RNA, 19 nt, Artificial Sequence
  Description of Artificial Sequence: Synthetic oligonucleotide
aucgcucgggacaguucac

SEQ ID NO: 103681 - RNA, 19 nt, Artificial Sequence
  Description of Artificial Sequence: Synthetic oligonucleotide
uuucgcccauccaccuuua

SEQ ID NO: 103682 - RNA, 19 nt, Artificial Sequence
  Description of Artificial Sequence: Synthetic oligonucleotide
caccgggcuaucuuggaua

SEQ ID NO: 103683 - RNA, 19 nt, Artificial Sequence
  Description of Artificial Sequence: Synthetic oligonucleotide
caccgguguccucggcucg

SEQ ID NO: 103684 - RNA, 19 nt, Artificial Sequence
  Description of Artificial Sequence: Synthetic oligonucleotide
ccucguaaccagcgaacag

SEQ ID NO: 103685 - RNA, 19 nt, Artificial Sequence
  Description of Artificial Sequence: Synthetic oligonucleotide
ucguucccugcgacgcacu

SEQ ID NO: 103686 - RNA, 19 nt, Artificial Sequence
  Description of Artificial Sequence: Synthetic oligonucleotide
gcacuacccguucagaggu

SEQ ID NO: 103687 - RNA, 19 nt, Artificial Sequence
  Description of Artificial Sequence: Synthetic oligonucleotide
agcguccgaggaauugcag

SEQ ID NO: 103688 - RNA, 19 nt, Artificial Sequence
  Description of Artificial Sequence: Synthetic oligonucleotide
auccuuguaccagguugcu

SEQ ID NO: 103689 - RNA, 19 nt, Artificial Sequence
  Description of Artificial Sequence: Synthetic oligonucleotide
cugcucuaugcgguaccgc

SEQ ID NO: 103690 - RNA, 19 nt, Artificial Sequence
  Description of Artificial Sequence: Synthetic oligonucleotide
ucgcagcguagcuccacau

SEQ ID NO: 103691 - RNA, 19 nt, Artificial Sequence
  Description of Artificial Sequence: Synthetic oligonucleotide
cucgggaggcuuccagguc

SEQ ID NO: 103692 - RNA, 19 nt, Artificial Sequence
  Description of Artificial Sequence: Synthetic oligonucleotide
agcgggccguucccacaac

SEQ ID NO: 103693 - RNA, 19 nt, Artificial Sequence
  Description of Artificial Sequence: Synthetic oligonucleotide
caaccaacacacguggccu

SEQ ID NO: 103694 - RNA, 19 nt, Artificial Sequence
  Description of Artificial Sequence: Synthetic oligonucleotide
cguucguucccugcgacgc

SEQ ID NO: 103695 - RNA, 19 nt, Artificial Sequence
  Description of Artificial Sequence: Synthetic oligonucleotide
cagcguccgaggaauugca

SEQ ID NO: 103696 - RNA, 19 nt, Artificial Sequence
  Description of Artificial Sequence: Synthetic oligonucleotide
gagcgggccguucccacaa

SEQ ID NO: 103697 - RNA, 19 nt, Artificial Sequence
  Description of Artificial Sequence: Synthetic oligonucleotide
gcgcuaucuccuucucggg

SEQ ID NO: 103698 - RNA, 19 nt, Artificial Sequence
  Description of Artificial Sequence: Synthetic oligonucleotide
gccgcaaacugcaaaucca

SEQ ID NO: 103699 - RNA, 19 nt, Artificial Sequence
  Description of Artificial Sequence: Synthetic oligonucleotide
ccagcguccgaggaauugc

SEQ ID NO: 103700 - RNA, 19 nt, Artificial Sequence
  Description of Artificial Sequence: Synthetic oligonucleotide
cuucaccgguguccucggc

SEQ ID NO: 103701 - RNA, 19 nt, Artificial Sequence
  Description of Artificial Sequence: Synthetic oligonucleotide
agcgagagcugcggagucu

SEQ ID NO: 103702 - RNA, 19 nt, Artificial Sequence
  Description of Artificial Sequence: Synthetic oligonucleotide
ccgguguuuucgcccaucc

SEQ ID NO: 103703 - RNA, 19 nt, Artificial Sequence
  Description of Artificial Sequence: Synthetic oligonucleotide
ggagccgcgggcucggaga

SEQ ID NO: 103704 - RNA, 19 nt, Artificial Sequence
  Description of Artificial Sequence: Synthetic oligonucleotide
ggagccgcaaacugcaaau

SEQ ID NO: 103705 - RNA, 19 nt, Artificial Sequence
  Description of Artificial Sequence: Synthetic oligonucleotide
ccguagguacccuggucgc

SEQ ID NO: 103706 - RNA, 19 nt, Artificial Sequence
  Description of Artificial Sequence: Synthetic oligonucleotide
gcuaacggacuggagcuca

SEQ ID NO: 103707 - RNA, 19 nt, Artificial Sequence
  Description of Artificial Sequence: Synthetic oligonucleotide
gcgggccguucccacaacg

SEQ ID NO: 103708 - RNA, 19 nt, Artificial Sequence
  Description of Artificial Sequence: Synthetic oligonucleotide
guucguucccugcgacgca

SEQ ID NO: 103709 - RNA, 19 nt, Artificial Sequence
  Description of Artificial Sequence: Synthetic oligonucleotide
aucguggcuccaggaaccu

SEQ ID NO: 103710 - RNA, 19 nt, Artificial Sequence
  Description of Artificial Sequence: Synthetic oligonucleotide
cucgggcgcuaacggacug

SEQ ID NO: 103711 - RNA, 19 nt, Artificial Sequence
  Description of Artificial Sequence: Synthetic oligonucleotide
gcguaccucagcccagggc

SEQ ID NO: 103712 - RNA, 19 nt, Artificial Sequence
  Description of Artificial Sequence: Synthetic oligonucleotide
ucuaggcguauggcuguua

SEQ ID NO: 103713 - RNA, 19 nt, Artificial Sequence
  Description of Artificial Sequence: Synthetic oligonucleotide
ggccacuucgcagcguagc

SEQ ID NO: 103714 - RNA, 19 nt, Artificial Sequence
  Description of Artificial Sequence: Synthetic oligonucleotide
uucucgcgaggugggcggc

SEQ ID NO: 103715 - RNA, 19 nt, Artificial Sequence
  Description of Artificial Sequence: Synthetic oligonucleotide
ggauagcgagagcugcgga

SEQ ID NO: 103716 - RNA, 19 nt, Artificial Sequence
  Description of Artificial Sequence: Synthetic oligonucleotide
gcgcuaacggacuggagcu

SEQ ID NO: 103717 - RNA, 19 nt, Artificial Sequence
  Description of Artificial Sequence: Synthetic oligonucleotide
  modified_base (5)..(5): a, c, u, g, unknown or other
cccgnacaauagucacugg

SEQ ID NO: 103718 - RNA, 19 nt, Artificial Sequence
  Description of Artificial Sequence: Synthetic oligonucleotide
gaacgucgcugugucaccu

SEQ ID NO: 103719 - RNA, 19 nt, Artificial Sequence
  Description of Artificial Sequence: Synthetic oligonucleotide
ccgacucaucaucaauuuc

SEQ ID NO: 103720 - RNA, 19 nt, Artificial Sequence
  Description of Artificial Sequence: Synthetic oligonucleotide
cacaaguacucgccggagu

SEQ ID NO: 103721 - RNA, 19 nt, Artificial Sequence
  Description of Artificial Sequence: Synthetic oligonucleotide
uacucgccggaguccucaa

SEQ ID NO: 103722 - RNA, 19 nt, Artificial Sequence
  Description of Artificial Sequence: Synthetic oligonucleotide
gguaagcgcuucagcccgg

SEQ ID NO: 103723 - RNA, 19 nt, Artificial Sequence
  Description of Artificial Sequence: Synthetic oligonucleotide
cacucggaagugauggcau

SEQ ID NO: 103724 - RNA, 19 nt, Artificial Sequence
  Description of Artificial Sequence: Synthetic oligonucleotide
cacccacucggcccgucuc

SEQ ID NO: 103725 - RNA, 19 nt, Artificial Sequence
  Description of Artificial Sequence: Synthetic oligonucleotide
caccuuuacuaugagugau

SEQ ID NO: 103726 - RNA, 19 nt, Artificial Sequence
  Description of Artificial Sequence: Synthetic oligonucleotide
gcaugacgcacucggaagu

SEQ ID NO: 103727 - RNA, 19 nt, Artificial Sequence
  Description of Artificial Sequence: Synthetic oligonucleotide
gccgcgggcucggagagag

SEQ ID NO: 103728 - RNA, 19 nt, Artificial Sequence
  Description of Artificial Sequence: Synthetic oligonucleotide
agggccggcacagcucaca

SEQ ID NO: 103729 - RNA, 19 nt, Artificial Sequence
  Description of Artificial Sequence: Synthetic oligonucleotide
uacuugcuucccggacaca

SEQ ID NO: 103730 - RNA, 19 nt, Artificial Sequence
  Description of Artificial Sequence: Synthetic oligonucleotide
ccagcguaccucagcccag

SEQ ID NO: 103731 - RNA, 19 nt, Artificial Sequence
  Description of Artificial Sequence: Synthetic oligonucleotide
ggucgcuaaguaggacacc

SEQ ID NO: 103732 - RNA, 19 nt, Artificial Sequence
  Description of Artificial Sequence: Synthetic oligonucleotide
cagcuugcaggaugagucu

SEQ ID NO: 103733 - RNA, 19 nt, Artificial Sequence
  Description of Artificial Sequence: Synthetic oligonucleotide
ccagcguccgguggucucg

SEQ ID NO: 103734 - RNA, 19 nt, Artificial Sequence
  Description of Artificial Sequence: Synthetic oligonucleotide
cagcguccgguggucucgg

SEQ ID NO: 103735 - RNA, 19 nt, Artificial Sequence
  Description of Artificial Sequence: Synthetic oligonucleotide
cgagagucgaggggaagag

SEQ ID NO: 103736 - RNA, 19 nt, Artificial Sequence
  Description of Artificial Sequence: Synthetic oligonucleotide
gaugugcaccgggcuaucu

SEQ ID NO: 103737 - RNA, 19 nt, Artificial Sequence
  Description of Artificial Sequence: Synthetic oligonucleotide
guccgcaguaaagggccuc

SEQ ID NO: 103738 - RNA, 19 nt, Artificial Sequence
  Description of Artificial Sequence: Synthetic oligonucleotide
cgacgcacugaaacucgcc

SEQ ID NO: 103739 - RNA, 19 nt, Artificial Sequence
  Description of Artificial Sequence: Synthetic oligonucleotide
gaguagugguacgggaguu

SEQ ID NO: 103740 - RNA, 19 nt, Artificial Sequence
  Description of Artificial Sequence: Synthetic oligonucleotide
gacgcggccuccgggucuc

SEQ ID NO: 103741 - RNA, 19 nt, Artificial Sequence
  Description of Artificial Sequence: Synthetic oligonucleotide
gcacguucguucccugcga

SEQ ID NO: 103742 - RNA, 19 nt, Artificial Sequence
  Description of Artificial Sequence: Synthetic oligonucleotide
cgaacgucgcugugucacc

SEQ ID NO: 103743 - RNA, 19 nt, Artificial Sequence
  Description of Artificial Sequence: Synthetic oligonucleotide
ccgcacaucgcucgggaca

SEQ ID NO: 103744 - RNA, 19 nt, Artificial Sequence
  Description of Artificial Sequence: Synthetic oligonucleotide
gcggcggauggugucuucc

SEQ ID NO: 103745 - RNA, 19 nt, Artificial Sequence
  Description of Artificial Sequence: Synthetic oligonucleotide
gggcaugcaugugaccaga

SEQ ID NO: 103746 - RNA, 19 nt, Artificial Sequence
  Description of Artificial Sequence: Synthetic oligonucleotide
guuccccauuaaggaacca

SEQ ID NO: 103747 - RNA, 19 nt, Artificial Sequence
  Description of Artificial Sequence: Synthetic oligonucleotide
ggggccacuucgcagcgua

SEQ ID NO: 103748 - RNA, 19 nt, Artificial Sequence
  Description of Artificial Sequence: Synthetic oligonucleotide
ggcguauggcuguuacaua

SEQ ID NO: 103749 - RNA, 19 nt, Artificial Sequence
  Description of Artificial Sequence: Synthetic oligonucleotide
gcgacgcacugaaacucgc

SEQ ID NO: 103750 - RNA, 19 nt, Artificial Sequence
  Description of Artificial Sequence: Synthetic oligonucleotide
cuacccguucagagguugu

SEQ ID NO: 103751 - RNA, 19 nt, Artificial Sequence
  Description of Artificial Sequence: Synthetic oligonucleotide
ucccagcguccgaggaauu

SEQ ID NO: 103752 - RNA, 19 nt, Artificial Sequence
  Description of Artificial Sequence: Synthetic oligonucleotide
ggucccgccuggaagcaga

SEQ ID NO: 103753 - RNA, 19 nt, Artificial Sequence
  Description of Artificial Sequence: Synthetic oligonucleotide
gucaggcgcgcaggcccgg

SEQ ID NO: 103754 - RNA, 19 nt, Artificial Sequence
  Description of Artificial Sequence: Synthetic oligonucleotide
acuucgcagcguagcucca

SEQ ID NO: 103755 - RNA, 19 nt, Artificial Sequence
  Description of Artificial Sequence: Synthetic oligonucleotide
gcucgcacucgaacgucgc

SEQ ID NO: 103756 - RNA, 19 nt, Artificial Sequence
  Description of Artificial Sequence: Synthetic oligonucleotide
gcucuaggcguauggcugu

SEQ ID NO: 103757 - RNA, 19 nt, Artificial Sequence
  Description of Artificial Sequence: Synthetic oligonucleotide
ggagcgggccguucccaca

SEQ ID NO: 103758 - RNA, 19 nt, Artificial Sequence
  Description of Artificial Sequence: Synthetic oligonucleotide
gucccagcguccgaggaau

SEQ ID NO: 103759 - RNA, 19 nt, Artificial Sequence
  Description of Artificial Sequence: Synthetic oligonucleotide
ccccuggcaccucuacggc

SEQ ID NO: 103760 - RNA, 19 nt, Artificial Sequence
  Description of Artificial Sequence: Synthetic oligonucleotide
ggcccgucucuaccucaag

SEQ ID NO: 103761 - RNA, 19 nt, Artificial Sequence
  Description of Artificial Sequence: Synthetic oligonucleotide
cugcugggugcacaauccu

SEQ ID NO: 103762 - RNA, 19 nt, Artificial Sequence
  Description of Artificial Sequence: Synthetic oligonucleotide
gccacuucgcagcguagcu

SEQ ID NO: 103763 - RNA, 19 nt, Artificial Sequence
  Description of Artificial Sequence: Synthetic oligonucleotide
gcgcuucagcccgggaucc

SEQ ID NO: 103764 - RNA, 19 nt, Artificial Sequence
  Description of Artificial Sequence: Synthetic oligonucleotide
ccuuccugucggaugcgga

SEQ ID NO: 103765 - RNA, 19 nt, Artificial Sequence
  Description of Artificial Sequence: Synthetic oligonucleotide
ccuggucgcuaaguaggac

SEQ ID NO: 103766 - RNA, 19 nt, Artificial Sequence
  Description of Artificial Sequence: Synthetic oligonucleotide
ggacacaauucgaccccuc

SEQ ID NO: 103767 - RNA, 19 nt, Artificial Sequence
  Description of Artificial Sequence: Synthetic oligonucleotide
agcguccgguggucucggu

SEQ ID NO: 103768 - RNA, 19 nt, Artificial Sequence
  Description of Artificial Sequence: Synthetic oligonucleotide
gcguccgguggucucgguc

SEQ ID NO: 103769 - RNA, 19 nt, Artificial Sequence
  Description of Artificial Sequence: Synthetic oligonucleotide
ccacuucgcagcguagcuc

SEQ ID NO: 103770 - RNA, 19 nt, Artificial Sequence
  Description of Artificial Sequence: Synthetic oligonucleotide
cucgcacucgaacgucgcu

SEQ ID NO: 103771 - RNA, 19 nt, Artificial Sequence
  Description of Artificial Sequence: Synthetic oligonucleotide
gggcuaucuuggauagcga

SEQ ID NO: 103772 - RNA, 19 nt, Artificial Sequence
  Description of Artificial Sequence: Synthetic oligonucleotide
aggcgagagucgaggggaa

SEQ ID NO: 103773 - RNA, 19 nt, Artificial Sequence
  Description of Artificial Sequence: Synthetic oligonucleotide
gcccgcacaucgcucggga

SEQ ID NO: 103774 - RNA, 19 nt, Artificial Sequence
  Description of Artificial Sequence: Synthetic oligonucleotide
cccuggucgcuaaguagga

SEQ ID NO: 103775 - RNA, 19 nt, Artificial Sequence
  Description of Artificial Sequence: Synthetic oligonucleotide
gcuccccaccucguaacca

SEQ ID NO: 103776 - RNA, 19 nt, Artificial Sequence
  Description of Artificial Sequence: Synthetic oligonucleotide
cucgaacguggcgcuaucu

SEQ ID NO: 103777 - RNA, 19 nt, Artificial Sequence
  Description of Artificial Sequence: Synthetic oligonucleotide
cagggccggcacagcucac

SEQ ID NO: 103778 - RNA, 19 nt, Artificial Sequence
  Description of Artificial Sequence: Synthetic oligonucleotide
ccugucggaugcggacgcg

SEQ ID NO: 103779 - RNA, 19 nt, Artificial Sequence
  Description of Artificial Sequence: Synthetic oligonucleotide
ggaugcggacgcggccucc

SEQ ID NO: 103780 - RNA, 19 nt, Artificial Sequence
  Description of Artificial Sequence: Synthetic oligonucleotide
gcgggcucggagagagugc

SEQ ID NO: 103781 - RNA, 19 nt, Artificial Sequence
  Description of Artificial Sequence: Synthetic oligonucleotide
cccggagcgggccguuccc

SEQ ID NO: 103782 - RNA, 19 nt, Artificial Sequence
  Description of Artificial Sequence: Synthetic oligonucleotide
cacucgaacguggcgcuau

SEQ ID NO: 103783 - RNA, 19 nt, Artificial Sequence
  Description of Artificial Sequence: Synthetic oligonucleotide
cccagcguccgguggucuc

SEQ ID NO: 103784 - RNA, 19 nt, Artificial Sequence
  Description of Artificial Sequence: Synthetic oligonucleotide
cccaccucguaaccagcga

SEQ ID NO: 103785 - RNA, 19 nt, Artificial Sequence
  Description of Artificial Sequence: Synthetic oligonucleotide
uagucgcccucggcaggua

SEQ ID NO: 103786 - RNA, 19 nt, Artificial Sequence
  Description of Artificial Sequence: Synthetic oligonucleotide
gcaccgggcuaucuuggau

SEQ ID NO: 103787 - RNA, 19 nt, Artificial Sequence
  Description of Artificial Sequence: Synthetic oligonucleotide
cccaggcuaaaggugauuu

SEQ ID NO: 103788 - RNA, 19 nt, Artificial Sequence
  Description of Artificial Sequence: Synthetic oligonucleotide
ccgcaguaaagggccucac

SEQ ID NO: 103789 - RNA, 19 nt, Artificial Sequence
  Description of Artificial Sequence: Synthetic oligonucleotide
cguggcgcuaucuccuucu

SEQ ID NO: 103790 - RNA, 19 nt, Artificial Sequence
  Description of Artificial Sequence: Synthetic oligonucleotide
ccgggcuaucuuggauagc

SEQ ID NO: 103791 - RNA, 19 nt, Artificial Sequence
  Description of Artificial Sequence: Synthetic oligonucleotide
gcgcuccgagagccuggag

SEQ ID NO: 103792 - RNA, 19 nt, Artificial Sequence
  Description of Artificial Sequence: Synthetic oligonucleotide
cgcacucgaacgucgcugu

SEQ ID NO: 103793 - RNA, 19 nt, Artificial Sequence
  Description of Artificial Sequence: Synthetic oligonucleotide
cgcuaacggacuggagcuc

SEQ ID NO: 103794 - RNA, 19 nt, Artificial Sequence
  Description of Artificial Sequence: Synthetic oligonucleotide
gggcgggucccgccuggaa

SEQ ID NO: 103795 - RNA, 19 nt, Artificial Sequence
  Description of Artificial Sequence: Synthetic oligonucleotide
cucuaggcguauggcuguu

SEQ ID NO: 103796 - RNA, 19 nt, Artificial Sequence
  Description of Artificial Sequence: Synthetic oligonucleotide
ccucuacggcuccagcuuu

SEQ ID NO: 103797 - RNA, 19 nt, Artificial Sequence
  Description of Artificial Sequence: Synthetic oligonucleotide
cgcgcacugucaggcgcgc

SEQ ID NO: 103798 - RNA, 19 nt, Artificial Sequence
  Description of Artificial Sequence: Synthetic oligonucleotide
gcgcacugucaggcgcgca

SEQ ID NO: 103799 - RNA, 19 nt, Artificial Sequence
  Description of Artificial Sequence: Synthetic oligonucleotide
cggacacaauucgaccccu

SEQ ID NO: 103800 - RNA, 19 nt, Artificial Sequence
  Description of Artificial Sequence: Synthetic oligonucleotide
ccguggcugcgcaucucau

SEQ ID NO: 103801 - RNA, 19 nt, Artificial Sequence
  Description of Artificial Sequence: Synthetic oligonucleotide
cgcuucagcccgggauccu

SEQ ID NO: 103802 - RNA, 19 nt, Artificial Sequence
  Description of Artificial Sequence: Synthetic oligonucleotide
ccgcgggcucggagagagu

SEQ ID NO: 103803 - RNA, 19 nt, Artificial Sequence
  Description of Artificial Sequence: Synthetic oligonucleotide
  modified_base (15)..(15): a, c, u, g, unknown or other
gaagcgguaauuuanaagc

SEQ ID NO: 103804 - RNA, 19 nt, Artificial Sequence
  Description of Artificial Sequence: Synthetic oligonucleotide
aagucaaucuugcuggacc

SEQ ID NO: 103805 - RNA, 19 nt, Artificial Sequence
  Description of Artificial Sequence: Synthetic oligonucleotide
acuaacauaaccucuuggg

SEQ ID NO: 103806 - RNA, 19 nt, Artificial Sequence
  Description of Artificial Sequence: Synthetic oligonucleotide
  modified_base (5)..(5): a, c, u, g, unknown or other
uuuanaagcggcuucuccc

SEQ ID NO: 103807 - RNA, 19 nt, Artificial Sequence
  Description of Artificial Sequence: Synthetic oligonucleotide
  modified_base (6)..(6): a, c, u, g, unknown or other
auuuanaagcggcuucucc

SEQ ID NO: 103808 - RNA, 19 nt, Artificial Sequence
  Description of Artificial Sequence: Synthetic oligonucleotide
aacaugaacgcuccucccc

SEQ ID NO: 103809 - RNA, 19 nt, Artificial Sequence
  Description of Artificial Sequence: Synthetic oligonucleotide
aaucaggauacacguagac

SEQ ID NO: 103810 - RNA, 19 nt, Artificial Sequence
  Description of Artificial Sequence: Synthetic oligonucleotide
aaucgauccacaccugugg

SEQ ID NO: 103811 - RNA, 19 nt, Artificial Sequence
  Description of Artificial Sequence: Synthetic oligonucleotide
uuagggauuggaaagauua

SEQ ID NO: 103812 - RNA, 19 nt, Artificial Sequence
  Description of Artificial Sequence: Synthetic oligonucleotide
agaauuugaugccuucgcc

SEQ ID NO: 103813 - RNA, 19 nt, Artificial Sequence
  Description of Artificial Sequence: Synthetic oligonucleotide
agagcuuauacacugcaag

SEQ ID NO: 103814 - RNA, 19 nt, Artificial Sequence
  Description of Artificial Sequence: Synthetic oligonucleotide
acaucuaacaggcagggca

SEQ ID NO: 103815 - RNA, 19 nt, Artificial Sequence
  Description of Artificial Sequence: Synthetic oligonucleotide
aagaugaaacauccagcac

SEQ ID NO: 103816 - RNA, 19 nt, Artificial Sequence
  Description of Artificial Sequence: Synthetic oligonucleotide
aaacaugaacgcuccuccc

SEQ ID NO: 103817 - RNA, 19 nt, Artificial Sequence
  Description of Artificial Sequence: Synthetic oligonucleotide
ugcaagacaggucacacac

SEQ ID NO: 103818 - RNA, 19 nt, Artificial Sequence
  Description of Artificial Sequence: Synthetic oligonucleotide
auguuuauuguuguguuac

SEQ ID NO: 103819 - RNA, 19 nt, Artificial Sequence
  Description of Artificial Sequence: Synthetic oligonucleotide
uggauucucacgcggaacg

SEQ ID NO: 103820 - RNA, 19 nt, Artificial Sequence
  Description of Artificial Sequence: Synthetic oligonucleotide
  modified_base (5)..(5): a, c, u, g, unknown or other
uuuunuuugugugugugug

SEQ ID NO: 103821 - RNA, 19 nt, Artificial Sequence
  Description of Artificial Sequence: Synthetic oligonucleotide
uuuuguagcagagguacgg

SEQ ID NO: 103822 - RNA, 19 nt, Artificial Sequence
  Description of Artificial Sequence: Synthetic oligonucleotide
uacuugacaagagagaaga

SEQ ID NO: 103823 - RNA, 19 nt, Artificial Sequence
  Description of Artificial Sequence: Synthetic oligonucleotide
aauugcccaaucaggauac

SEQ ID NO: 103824 - RNA, 19 nt, Artificial Sequence
  Description of Artificial Sequence: Synthetic oligonucleotide
aaaauacugauggcucgcc

SEQ ID NO: 103825 - RNA, 19 nt, Artificial Sequence
  Description of Artificial Sequence: Synthetic oligonucleotide
uaacauaaccucuuggguc

SEQ ID NO: 103826 - RNA, 19 nt, Artificial Sequence
  Description of Artificial Sequence: Synthetic oligonucleotide
uagaauuugaugccuucgc

SEQ ID NO: 103827 - RNA, 19 nt, Artificial Sequence
  Description of Artificial Sequence: Synthetic oligonucleotide
ugcccauuuagacugguug

SEQ ID NO: 103828 - RNA, 19 nt, Artificial Sequence
  Description of Artificial Sequence: Synthetic oligonucleotide
  modified_base (14)..(14): a, c, u, g, unknown or other
aagcgguaauuuanaagcg

SEQ ID NO: 103829 - RNA, 19 nt, Artificial Sequence
  Description of Artificial Sequence: Synthetic oligonucleotide
ugauuauaaacuccucuaa

SEQ ID NO: 103830 - RNA, 19 nt, Artificial Sequence
  Description of Artificial Sequence: Synthetic oligonucleotide
  modified_base (7)..(7): a, c, u, g, unknown or other
aauuuanaagcggcuucuc

SEQ ID NO: 103831 - RNA, 19 nt, Artificial Sequence
  Description of Artificial Sequence: Synthetic oligonucleotide
gacuaacauaaccucuugg

SEQ ID NO: 103832 - RNA, 19 nt, Artificial Sequence
  Description of Artificial Sequence: Synthetic oligonucleotide
uauuguuguguuacaaggu

SEQ ID NO: 103833 - RNA, 19 nt, Artificial Sequence
  Description of Artificial Sequence: Synthetic oligonucleotide
ugaccaaggggauacacac

SEQ ID NO: 103834 - RNA, 19 nt, Artificial Sequence
  Description of Artificial Sequence: Synthetic oligonucleotide
aggaccuuacaucaugguc

SEQ ID NO: 103835 - RNA, 19 nt, Artificial Sequence
  Description of Artificial Sequence: Synthetic oligonucleotide
auagccaaucgauccacac

SEQ ID NO: 103836 - RNA, 19 nt, Artificial Sequence
  Description of Artificial Sequence: Synthetic oligonucleotide
uggcaaacgggaaaguggc

SEQ ID NO: 103837 - RNA, 19 nt, Artificial Sequence
  Description of Artificial Sequence: Synthetic oligonucleotide
  modified_base (3)..(3): a, c, u, g, unknown or other
uunuuugugugugugugug

SEQ ID NO: 103838 - RNA, 19 nt, Artificial Sequence
  Description of Artificial Sequence: Synthetic oligonucleotide
  modified_base (4)..(4): a, c, u, g, unknown or other
uuanaagcggcuucucccu

SEQ ID NO: 103839 - RNA, 19 nt, Artificial Sequence
  Description of Artificial Sequence: Synthetic oligonucleotide
agccaaucgauccacaccu

SEQ ID NO: 103840 - RNA, 19 nt, Artificial Sequence
  Description of Artificial Sequence: Synthetic oligonucleotide
ucaggguacagguagaauu

SEQ ID NO: 103841 - RNA, 19 nt, Artificial Sequence
  Description of Artificial Sequence: Synthetic oligonucleotide
aaggggauacacaccaugg

SEQ ID NO: 103842 - RNA, 19 nt, Artificial Sequence
  Description of Artificial Sequence: Synthetic oligonucleotide
  modified_base (16)..(16): a, c, u, g, unknown or other
ggaagcgguaauuuanaag

SEQ ID NO: 103843 - RNA, 19 nt, Artificial Sequence
  Description of Artificial Sequence: Synthetic oligonucleotide
ucgucauuaaacaccaaua

SEQ ID NO: 103844 - RNA, 19 nt, Artificial Sequence
  Description of Artificial Sequence: Synthetic oligonucleotide
  modified_base (8)..(8): a, c, u, g, unknown or other
uaauuuanaagcggcuucu

SEQ ID NO: 103845 - RNA, 19 nt, Artificial Sequence
  Description of Artificial Sequence: Synthetic oligonucleotide
auuuagacugguugccuag

SEQ ID NO: 103846 - RNA, 19 nt, Artificial Sequence
  Description of Artificial Sequence: Synthetic oligonucleotide
  modified_base (9)..(9): a, c, u, g, unknown or other
guaauuuanaagcggcuuc

SEQ ID NO: 103847 - RNA, 19 nt, Artificial Sequence
  Description of Artificial Sequence: Synthetic oligonucleotide
ucaugacgaggcuugugcg

SEQ ID NO: 103848 - RNA, 19 nt, Artificial Sequence
  Description of Artificial Sequence: Synthetic oligonucleotide
agauggauuuaaaauauca

SEQ ID NO: 103849 - RNA, 19 nt, Artificial Sequence
  Description of Artificial Sequence: Synthetic oligonucleotide
  modified_base (4)..(4): a, c, u, g, unknown or other
uuunuuugugugugugugu

SEQ ID NO: 103850 - RNA, 19 nt, Artificial Sequence
  Description of Artificial Sequence: Synthetic oligonucleotide
guauuggauucucacgcgg

SEQ ID NO: 103851 - RNA, 19 nt, Artificial Sequence
  Description of Artificial Sequence: Synthetic oligonucleotide
uguuguguuacaaggugau

SEQ ID NO: 103852 - RNA, 19 nt, Artificial Sequence
  Description of Artificial Sequence: Synthetic oligonucleotide
gcuaaauacagagucacag

SEQ ID NO: 103853 - RNA, 19 nt, Artificial Sequence
  Description of Artificial Sequence: Synthetic oligonucleotide
gagugcgccguucaugacg

SEQ ID NO: 103854 - RNA, 19 nt, Artificial Sequence
  Description of Artificial Sequence: Synthetic oligonucleotide
uauuggauucucacgcgga

SEQ ID NO: 103855 - RNA, 19 nt, Artificial Sequence
  Description of Artificial Sequence: Synthetic oligonucleotide
agcccaauugcccaaucag

SEQ ID NO: 103856 - RNA, 19 nt, Artificial Sequence
  Description of Artificial Sequence: Synthetic oligonucleotide
uguguugugugugugugug

SEQ ID NO: 103857 - RNA, 19 nt, Artificial Sequence
  Description of Artificial Sequence: Synthetic oligonucleotide
aagauggauuuaaaauauc

SEQ ID NO: 103858 - RNA, 19 nt, Artificial Sequence
  Description of Artificial Sequence: Synthetic oligonucleotide
ugacuggguuucaugagug

SEQ ID NO: 103859 - RNA, 19 nt, Artificial Sequence
  Description of Artificial Sequence: Synthetic oligonucleotide
auggcaaacgggaaagugg

SEQ ID NO: 103860 - RNA, 19 nt, Artificial Sequence
  Description of Artificial Sequence: Synthetic oligonucleotide
cugccaacccaaaauacug

SEQ ID NO: 103861 - RNA, 19 nt, Artificial Sequence
  Description of Artificial Sequence: Synthetic oligonucleotide
uagccaaucgauccacacc

SEQ ID NO: 103862 - RNA, 19 nt, Artificial Sequence
  Description of Artificial Sequence: Synthetic oligonucleotide
aaaugcaggggugucguca

SEQ ID NO: 103863 - RNA, 19 nt, Artificial Sequence
  Description of Artificial Sequence: Synthetic oligonucleotide
aaacgccaaacguugccca

SEQ ID NO: 103864 - RNA, 19 nt, Artificial Sequence
  Description of Artificial Sequence: Synthetic oligonucleotide
uguugugugugugugugug

SEQ ID NO: 103865 - RNA, 19 nt, Artificial Sequence
  Description of Artificial Sequence: Synthetic oligonucleotide
uguguguguguguugugug

SEQ ID NO: 103866 - RNA, 19 nt, Artificial Sequence
  Description of Artificial Sequence: Synthetic oligonucleotide
aggggauacacaccauggg

SEQ ID NO: 103867 - RNA, 19 nt, Artificial Sequence
  Description of Artificial Sequence: Synthetic oligonucleotide
guugccuagagcauugccc

SEQ ID NO: 103868 - RNA, 19 nt, Artificial Sequence
  Description of Artificial Sequence: Synthetic oligonucleotide
caggcacgaccauagaugc

SEQ ID NO: 103869 - RNA, 19 nt, Artificial Sequence
  Description of Artificial Sequence: Synthetic oligonucleotide
aucgauccacaccuguggg

SEQ ID NO: 103870 - RNA, 19 nt, Artificial Sequence
  Description of Artificial Sequence: Synthetic oligonucleotide
  modified_base (13)..(13): a, c, u, g, unknown or other
agcgguaauuuanaagcgg

SEQ ID NO: 103871 - RNA, 19 nt, Artificial Sequence
  Description of Artificial Sequence: Synthetic oligonucleotide
agagacucucauuccuacg

SEQ ID NO: 103872 - RNA, 19 nt, Artificial Sequence
  Description of Artificial Sequence: Synthetic oligonucleotide
uguguguugugugugugug

SEQ ID NO: 103873 - RNA, 19 nt, Artificial Sequence
  Description of Artificial Sequence: Synthetic oligonucleotide
caugacgaggcuugugcgg

SEQ ID NO: 103874 - RNA, 19 nt, Artificial Sequence
  Description of Artificial Sequence: Synthetic oligonucleotide
  modified_base (2)..(2): a, c, u, g, unknown or other
anaagcggcuucucccuga

SEQ ID NO: 103875 - RNA, 19 nt, Artificial Sequence
  Description of Artificial Sequence: Synthetic oligonucleotide
ugguuuuagacuugaugaa

SEQ ID NO: 103876 - RNA, 19 nt, Artificial Sequence
  Description of Artificial Sequence: Synthetic oligonucleotide
gacucucauuccuacgcag

SEQ ID NO: 103877 - RNA, 19 nt, Artificial Sequence
  Description of Artificial Sequence: Synthetic oligonucleotide
ccaaucaggauacacguag

SEQ ID NO: 103878 - RNA, 19 nt, Artificial Sequence
  Description of Artificial Sequence: Synthetic oligonucleotide
guacgggaaacgccaaacg

SEQ ID NO: 103879 - RNA, 19 nt, Artificial Sequence
  Description of Artificial Sequence: Synthetic oligonucleotide
aaaguggcggugaaguaga

SEQ ID NO: 103880 - RNA, 19 nt, Artificial Sequence
  Description of Artificial Sequence: Synthetic oligonucleotide
gugauuauaaacuccucua

SEQ ID NO: 103881 - RNA, 19 nt, Artificial Sequence
  Description of Artificial Sequence: Synthetic oligonucleotide
gaaacgccaaacguugccc

SEQ ID NO: 103882 - RNA, 19 nt, Artificial Sequence
  Description of Artificial Sequence: Synthetic oligonucleotide
aguacauugcgcucccaga

SEQ ID NO: 103883 - RNA, 19 nt, Artificial Sequence
  Description of Artificial Sequence: Synthetic oligonucleotide
caucuaacaggcagggcac

SEQ ID NO: 103884 - RNA, 19 nt, Artificial Sequence
  Description of Artificial Sequence: Synthetic oligonucleotide
uuugucugccaacccaaaa

SEQ ID NO: 103885 - RNA, 19 nt, Artificial Sequence
  Description of Artificial Sequence: Synthetic oligonucleotide
caaacguugcccaaaccca

SEQ ID NO: 103886 - RNA, 19 nt, Artificial Sequence
  Description of Artificial Sequence: Synthetic oligonucleotide
agcgcaaggucccauuuca

SEQ ID NO: 103887 - RNA, 19 nt, Artificial Sequence
  Description of Artificial Sequence: Synthetic oligonucleotide
aaacaccaauacacagagc

SEQ ID NO: 103888 - RNA, 19 nt, Artificial Sequence
  Description of Artificial Sequence: Synthetic oligonucleotide
gaugacgugacuggguuuc

SEQ ID NO: 103889 - RNA, 19 nt, Artificial Sequence
  Description of Artificial Sequence: Synthetic oligonucleotide
acgugacuggguuucauga

SEQ ID NO: 103890 - RNA, 19 nt, Artificial Sequence
  Description of Artificial Sequence: Synthetic oligonucleotide
ugccaacccaaaauacuga

SEQ ID NO: 103891 - RNA, 19 nt, Artificial Sequence
  Description of Artificial Sequence: Synthetic oligonucleotide
ucgaacacccuuccauaug

SEQ ID NO: 103892 - RNA, 19 nt, Artificial Sequence
  Description of Artificial Sequence: Synthetic oligonucleotide
  modified_base (3)..(3): a, c, u, g, unknown or other
uanaagcggcuucucccug

SEQ ID NO: 103893 - RNA, 19 nt, Artificial Sequence
  Description of Artificial Sequence: Synthetic oligonucleotide
aaugcaggggugucgucau

SEQ ID NO: 103894 - RNA, 19 nt, Artificial Sequence
  Description of Artificial Sequence: Synthetic oligonucleotide
ugcaaugugguguguucca

SEQ ID NO: 103895 - RNA, 19 nt, Artificial Sequence
  Description of Artificial Sequence: Synthetic oligonucleotide
gguauuggauucucacgcg

SEQ ID NO: 103896 - RNA, 19 nt, Artificial Sequence
  Description of Artificial Sequence: Synthetic oligonucleotide
uguguguguguugugugug

SEQ ID NO: 103897 - RNA, 19 nt, Artificial Sequence
  Description of Artificial Sequence: Synthetic oligonucleotide
gguucgucgauuccggaag

SEQ ID NO: 103898 - RNA, 19 nt, Artificial Sequence
  Description of Artificial Sequence: Synthetic oligonucleotide
uugugugugugugugugug

SEQ ID NO: 103899 - RNA, 19 nt, Artificial Sequence
  Description of Artificial Sequence: Synthetic oligonucleotide
gauggcucgccagaguagc

SEQ ID NO: 103900 - RNA, 19 nt, Artificial Sequence
  Description of Artificial Sequence: Synthetic oligonucleotide
uggaaagcggcgccuguug

SEQ ID NO: 103901 - RNA, 19 nt, Artificial Sequence
  Description of Artificial Sequence: Synthetic oligonucleotide
gaggcgcuaagggagaccc

SEQ ID NO: 103902 - RNA, 19 nt, Artificial Sequence
  Description of Artificial Sequence: Synthetic oligonucleotide
accugucuuggaaagcggc

SEQ ID NO: 103903 - RNA, 19 nt, Artificial Sequence
  Description of Artificial Sequence: Synthetic oligonucleotide
acaugaacgcuccuccccu

SEQ ID NO: 103904 - RNA, 19 nt, Artificial Sequence
  Description of Artificial Sequence: Synthetic oligonucleotide
gugugugugugugugugcg

SEQ ID NO: 103905 - RNA, 19 nt, Artificial Sequence
  Description of Artificial Sequence: Synthetic oligonucleotide
uagggauuggaaagauuaa

SEQ ID NO: 103906 - RNA, 19 nt, Artificial Sequence
  Description of Artificial Sequence: Synthetic oligonucleotide
ugcgucuuuggucuagaau

SEQ ID NO: 103907 - RNA, 19 nt, Artificial Sequence
  Description of Artificial Sequence: Synthetic oligonucleotide
gacgugacuggguuucaug

SEQ ID NO: 103908 - RNA, 19 nt, Artificial Sequence
  Description of Artificial Sequence: Synthetic oligonucleotide
uucucacgcggaacggucc

SEQ ID NO: 103909 - RNA, 19 nt, Artificial Sequence
  Description of Artificial Sequence: Synthetic oligonucleotide
  modified_base (2)..(2): a, c, u, g, unknown or other
unuuugugugugugugugu

SEQ ID NO: 103910 - RNA, 19 nt, Artificial Sequence
  Description of Artificial Sequence: Synthetic oligonucleotide
aacggucccuccguccggc

SEQ ID NO: 103911 - RNA, 19 nt, Artificial Sequence
  Description of Artificial Sequence: Synthetic oligonucleotide
gugugugugugugugcgcg

SEQ ID NO: 103912 - RNA, 19 nt, Artificial Sequence
  Description of Artificial Sequence: Synthetic oligonucleotide
cauaaggacaggggucucg

SEQ ID NO: 103913 - RNA, 19 nt, Artificial Sequence
  Description of Artificial Sequence: Synthetic oligonucleotide
ugugugugugugugugugc

SEQ ID NO: 103914 - RNA, 19 nt, Artificial Sequence
  Description of Artificial Sequence: Synthetic oligonucleotide
aucaggauacacguagacu

SEQ ID NO: 103915 - RNA, 19 nt, Artificial Sequence
  Description of Artificial Sequence: Synthetic oligonucleotide
gcaaacgggaaaguggcgg

SEQ ID NO: 103916 - RNA, 19 nt, Artificial Sequence
  Description of Artificial Sequence: Synthetic oligonucleotide
acucucauuccuacgcagg

SEQ ID NO: 103917 - RNA, 19 nt, Artificial Sequence
  Description of Artificial Sequence: Synthetic oligonucleotide
ugcgccguucaugacgagg

SEQ ID NO: 103918 - RNA, 19 nt, Artificial Sequence
  Description of Artificial Sequence: Synthetic oligonucleotide
cauggcaaacgggaaagug

SEQ ID NO: 103919 - RNA, 19 nt, Artificial Sequence
  Description of Artificial Sequence: Synthetic oligonucleotide
cagaguagcaugccuggug

SEQ ID NO: 103920 - RNA, 19 nt, Artificial Sequence
  Description of Artificial Sequence: Synthetic oligonucleotide
ucucacgcggaacgguccc

SEQ ID NO: 103921 - RNA, 19 nt, Artificial Sequence
  Description of Artificial Sequence: Synthetic oligonucleotide
auuggauucucacgcggaa

SEQ ID NO: 103922 - RNA, 19 nt, Artificial Sequence
  Description of Artificial Sequence: Synthetic oligonucleotide
uuugugugugugugugugu

SEQ ID NO: 103923 - RNA, 19 nt, Artificial Sequence
  Description of Artificial Sequence: Synthetic oligonucleotide
gucuagaauuugaucuggg

SEQ ID NO: 103924 - RNA, 19 nt, Artificial Sequence
  Description of Artificial Sequence: Synthetic oligonucleotide
uguguguguguguguguug

SEQ ID NO: 103925 - RNA, 19 nt, Artificial Sequence
  Description of Artificial Sequence: Synthetic oligonucleotide
ggaacggucccuccguccg

SEQ ID NO: 103926 - RNA, 19 nt, Artificial Sequence
  Description of Artificial Sequence: Synthetic oligonucleotide
uguguguguugugugugug

SEQ ID NO: 103927 - RNA, 19 nt, Artificial Sequence
  Description of Artificial Sequence: Synthetic oligonucleotide
uuuagacugguugccuaga

SEQ ID NO: 103928 - RNA, 19 nt, Artificial Sequence
  Description of Artificial Sequence: Synthetic oligonucleotide
auuugacauuguaccuugc

SEQ ID NO: 103929 - RNA, 19 nt, Artificial Sequence
  Description of Artificial Sequence: Synthetic oligonucleotide
auucucacgcggaacgguc

SEQ ID NO: 103930 - RNA, 19 nt, Artificial Sequence
  Description of Artificial Sequence: Synthetic oligonucleotide
gaucgaacacccuuccaua

SEQ ID NO: 103931 - RNA, 19 nt, Artificial Sequence
  Description of Artificial Sequence: Synthetic oligonucleotide
guacauugcgcucccagaa

SEQ ID NO: 103932 - RNA, 19 nt, Artificial Sequence
  Description of Artificial Sequence: Synthetic oligonucleotide
uguuagggauuggaaagau

SEQ ID NO: 103933 - RNA, 19 nt, Artificial Sequence
  Description of Artificial Sequence: Synthetic oligonucleotide
ggaaacgccaaacguugcc

SEQ ID NO: 103934 - RNA, 19 nt, Artificial Sequence
  Description of Artificial Sequence: Synthetic oligonucleotide
uggguggcuaagcccgcgg

SEQ ID NO: 103935 - RNA, 19 nt, Artificial Sequence
  Description of Artificial Sequence: Synthetic oligonucleotide
aacgggaaaguggcgguga

SEQ ID NO: 103936 - RNA, 19 nt, Artificial Sequence
  Description of Artificial Sequence: Synthetic oligonucleotide
aaacgggaaaguggcggug

SEQ ID NO: 103937 - RNA, 19 nt, Artificial Sequence
  Description of Artificial Sequence: Synthetic oligonucleotide
ugguucgucgauuccggaa

SEQ ID NO: 103938 - RNA, 19 nt, Artificial Sequence
  Description of Artificial Sequence: Synthetic oligonucleotide
ugugugugugugugugcgc

SEQ ID NO: 103939 - RNA, 19 nt, Artificial Sequence
  Description of Artificial Sequence: Synthetic oligonucleotide
  modified_base (12)..(12): a, c, u, g, unknown or other
gcgguaauuuanaagcggc

SEQ ID NO: 103940 - RNA, 19 nt, Artificial Sequence
  Description of Artificial Sequence: Synthetic oligonucleotide
acgaugacgugacuggguu

SEQ ID NO: 103941 - RNA, 19 nt, Artificial Sequence
  Description of Artificial Sequence: Synthetic oligonucleotide
aguagacaaccuugccugu

SEQ ID NO: 103942 - RNA, 19 nt, Artificial Sequence
  Description of Artificial Sequence: Synthetic oligonucleotide
  modified_base (17)..(17): a, c, u, g, unknown or other
aggaagcgguaauuuanaa

SEQ ID NO: 103943 - RNA, 19 nt, Artificial Sequence
  Description of Artificial Sequence: Synthetic oligonucleotide
ggcacgaccauagaugcug

SEQ ID NO: 103944 - RNA, 19 nt, Artificial Sequence
  Description of Artificial Sequence: Synthetic oligonucleotide
ggaaggguagacaggcacg

SEQ ID NO: 103945 - RNA, 19 nt, Artificial Sequence
  Description of Artificial Sequence: Synthetic oligonucleotide
ugugugugugugugugugu

SEQ ID NO: 103946 - RNA, 19 nt, Artificial Sequence
  Description of Artificial Sequence: Synthetic oligonucleotide
gaaagcggcgccuguugca

SEQ ID NO: 103947 - RNA, 19 nt, Artificial Sequence
  Description of Artificial Sequence: Synthetic oligonucleotide
cugaguacauugcgcuccc

SEQ ID NO: 103948 - RNA, 19 nt, Artificial Sequence
  Description of Artificial Sequence: Synthetic oligonucleotide
uguguguguguguguugug

SEQ ID NO: 103949 - RNA, 19 nt, Artificial Sequence
  Description of Artificial Sequence: Synthetic oligonucleotide
cauugccccguccauccag

SEQ ID NO: 103950 - RNA, 19 nt, Artificial Sequence
  Description of Artificial Sequence: Synthetic oligonucleotide
caauugcccaaucaggaua

SEQ ID NO: 103951 - RNA, 19 nt, Artificial Sequence
  Description of Artificial Sequence: Synthetic oligonucleotide
gcccauuuagacugguugc

SEQ ID NO: 103952 - RNA, 19 nt, Artificial Sequence
  Description of Artificial Sequence: Synthetic oligonucleotide
ucgucgauuccggaagaca

SEQ ID NO: 103953 - RNA, 19 nt, Artificial Sequence
  Description of Artificial Sequence: Synthetic oligonucleotide
uuggauucucacgcggaac

SEQ ID NO: 103954 - RNA, 19 nt, Artificial Sequence
  Description of Artificial Sequence: Synthetic oligonucleotide
acaugccagaacaugccug

SEQ ID NO: 103955 - RNA, 19 nt, Artificial Sequence
  Description of Artificial Sequence: Synthetic oligonucleotide
aaagcggcgccuguugcau

SEQ ID NO: 103956 - RNA, 19 nt, Artificial Sequence
  Description of Artificial Sequence: Synthetic oligonucleotide
gugugugugugugugugug

SEQ ID NO: 103957 - RNA, 19 nt, Artificial Sequence
  Description of Artificial Sequence: Synthetic oligonucleotide
ggggauacacaccauggga

SEQ ID NO: 103958 - RNA, 19 nt, Artificial Sequence
  Description of Artificial Sequence: Synthetic oligonucleotide
ugcgggaguggaagggugu

SEQ ID NO: 103959 - RNA, 19 nt, Artificial Sequence
  Description of Artificial Sequence: Synthetic oligonucleotide
uugcccaaucaggauacac

SEQ ID NO: 103960 - RNA, 19 nt, Artificial Sequence
  Description of Artificial Sequence: Synthetic oligonucleotide
gucgucauuaaacaccaau

SEQ ID NO: 103961 - RNA, 19 nt, Artificial Sequence
  Description of Artificial Sequence: Synthetic oligonucleotide
ccugucuuggaaagcggcg

SEQ ID NO: 103962 - RNA, 19 nt, Artificial Sequence
  Description of Artificial Sequence: Synthetic oligonucleotide
gaauuugaucugggaauga

SEQ ID NO: 103963 - RNA, 19 nt, Artificial Sequence
  Description of Artificial Sequence: Synthetic oligonucleotide
augaccaaggggauacaca

SEQ ID NO: 103964 - RNA, 19 nt, Artificial Sequence
  Description of Artificial Sequence: Synthetic oligonucleotide
ggucccauuucagagcgcc

SEQ ID NO: 103965 - RNA, 19 nt, Artificial Sequence
  Description of Artificial Sequence: Synthetic oligonucleotide
gguggcuaagcccgcggcg

SEQ ID NO: 103966 - RNA, 19 nt, Artificial Sequence
  Description of Artificial Sequence: Synthetic oligonucleotide
guagacaaccuugccugug

SEQ ID NO: 103967 - RNA, 19 nt, Artificial Sequence
  Description of Artificial Sequence: Synthetic oligonucleotide
gaacggucccuccguccgg

SEQ ID NO: 103968 - RNA, 19 nt, Artificial Sequence
  Description of Artificial Sequence: Synthetic oligonucleotide
gcgaucgcggcguuggcgg

SEQ ID NO: 103969 - RNA, 19 nt, Artificial Sequence
  Description of Artificial Sequence: Synthetic oligonucleotide
  modified_base (18)..(18): a, c, u, g, unknown or other
gaggaagcgguaauuuana

SEQ ID NO: 103970 - RNA, 19 nt, Artificial Sequence
  Description of Artificial Sequence: Synthetic oligonucleotide
cacccuuccauaugcagaa

SEQ ID NO: 103971 - RNA, 19 nt, Artificial Sequence
  Description of Artificial Sequence: Synthetic oligonucleotide
caaucaggauacacguaga

SEQ ID NO: 103972 - RNA, 19 nt, Artificial Sequence
  Description of Artificial Sequence: Synthetic oligonucleotide
ggacuaacauaaccucuug

SEQ ID NO: 103973 - RNA, 19 nt, Artificial Sequence
  Description of Artificial Sequence: Synthetic oligonucleotide
uuguaggucagggguacau

SEQ ID NO: 103974 - RNA, 19 nt, Artificial Sequence
  Description of Artificial Sequence: Synthetic oligonucleotide
gggcacgagagcucgacug

SEQ ID NO: 103975 - RNA, 19 nt, Artificial Sequence
  Description of Artificial Sequence: Synthetic oligonucleotide
acgcggaacggucccuccg

SEQ ID NO: 103976 - RNA, 19 nt, Artificial Sequence
  Description of Artificial Sequence: Synthetic oligonucleotide
uugcgcucccagaacucga

SEQ ID NO: 103977 - RNA, 19 nt, Artificial Sequence
  Description of Artificial Sequence: Synthetic oligonucleotide
agugcgccguucaugacga

SEQ ID NO: 103978 - RNA, 19 nt, Artificial Sequence
  Description of Artificial Sequence: Synthetic oligonucleotide
cauuuagacugguugccua

SEQ ID NO: 103979 - RNA, 19 nt, Artificial Sequence
  Description of Artificial Sequence: Synthetic oligonucleotide
ugugugugugugugcgcgu

SEQ ID NO: 103980 - RNA, 19 nt, Artificial Sequence
  Description of Artificial Sequence: Synthetic oligonucleotide
acaggggucucgggauugc

SEQ ID NO: 103981 - RNA, 19 nt, Artificial Sequence
  Description of Artificial Sequence: Synthetic oligonucleotide
gcgucuuuggucuagaauu

SEQ ID NO: 103982 - RNA, 19 nt, Artificial Sequence
  Description of Artificial Sequence: Synthetic oligonucleotide
caacccuccuaaagaaaca

SEQ ID NO: 103983 - RNA, 19 nt, Artificial Sequence
  Description of Artificial Sequence: Synthetic oligonucleotide
agcucuacuucaaaauguu

SEQ ID NO: 103984 - RNA, 19 nt, Artificial Sequence
  Description of Artificial Sequence: Synthetic oligonucleotide
ggggucucgggauugcgug

SEQ ID NO: 103985 - RNA, 19 nt, Artificial Sequence
  Description of Artificial Sequence: Synthetic oligonucleotide
ggcgcuaagggagacccag

SEQ ID NO: 103986 - RNA, 19 nt, Artificial Sequence
  Description of Artificial Sequence: Synthetic oligonucleotide
aggccgugugccugggcuc

SEQ ID NO: 103987 - RNA, 19 nt, Artificial Sequence
  Description of Artificial Sequence: Synthetic oligonucleotide
  modified_base (10)..(10): a, c, u, g, unknown or other
gguaauuuanaagcggcuu

SEQ ID NO: 103988 - RNA, 19 nt, Artificial Sequence
  Description of Artificial Sequence: Synthetic oligonucleotide
agagcgcaaggucccauuu

SEQ ID NO: 103989 - RNA, 19 nt, Artificial Sequence
  Description of Artificial Sequence: Synthetic oligonucleotide
cauuccuacgcaggguguc

SEQ ID NO: 103990 - RNA, 19 nt, Artificial Sequence
  Description of Artificial Sequence: Synthetic oligonucleotide
aggccgauagccaaucgau

SEQ ID NO: 103991 - RNA, 19 nt, Artificial Sequence
  Description of Artificial Sequence: Synthetic oligonucleotide
cccaauugcccaaucagga

SEQ ID NO: 103992 - RNA, 19 nt, Artificial Sequence
  Description of Artificial Sequence: Synthetic oligonucleotide
acgggaaacgccaaacguu

SEQ ID NO: 103993 - RNA, 19 nt, Artificial Sequence
  Description of Artificial Sequence: Synthetic oligonucleotide
ugggcacgagagcucgacu

SEQ ID NO: 103994 - RNA, 19 nt, Artificial Sequence
  Description of Artificial Sequence: Synthetic oligonucleotide
cauuagggcuaggggcugg

SEQ ID NO: 103995 - RNA, 19 nt, Artificial Sequence
  Description of Artificial Sequence: Synthetic oligonucleotide
uucgucgauuccggaagac

SEQ ID NO: 103996 - RNA, 19 nt, Artificial Sequence
  Description of Artificial Sequence: Synthetic oligonucleotide
ggcacgagagcucgacugc

SEQ ID NO: 103997 - RNA, 19 nt, Artificial Sequence
  Description of Artificial Sequence: Synthetic oligonucleotide
ccguucaugacgaggcuug

SEQ ID NO: 103998 - RNA, 19 nt, Artificial Sequence
  Description of Artificial Sequence: Synthetic oligonucleotide
gcgucuuggagagaggaac

SEQ ID NO: 103999 - RNA, 19 nt, Artificial Sequence
  Description of Artificial Sequence: Synthetic oligonucleotide
ucucgggauugcgugggac

SEQ ID NO: 104000 - RNA, 19 nt, Artificial Sequence
  Description of Artificial Sequence: Synthetic oligonucleotide
ggauucucacgcggaacgg

SEQ ID NO: 104001 - RNA, 19 nt, Artificial Sequence
  Description of Artificial Sequence: Synthetic oligonucleotide
caggccgauagccaaucga

SEQ ID NO: 104002 - RNA, 19 nt, Artificial Sequence
  Description of Artificial Sequence: Synthetic oligonucleotide
ugugugugugugcgcguuu

SEQ ID NO: 104003 - RNA, 19 nt, Artificial Sequence
  Description of Artificial Sequence: Synthetic oligonucleotide
cgggaaacgccaaacguug

SEQ ID NO: 104004 - RNA, 19 nt, Artificial Sequence
  Description of Artificial Sequence: Synthetic oligonucleotide
guucgucgauuccggaaga

SEQ ID NO: 104005 - RNA, 19 nt, Artificial Sequence
  Description of Artificial Sequence: Synthetic oligonucleotide
ggaucgaacacccuuccau

SEQ ID NO: 104006 - RNA, 19 nt, Artificial Sequence
  Description of Artificial Sequence: Synthetic oligonucleotide
uucagagcgccugguucgu

SEQ ID NO: 104007 - RNA, 19 nt, Artificial Sequence
  Description of Artificial Sequence: Synthetic oligonucleotide
agguacgggaaacgccaaa

SEQ ID NO: 104008 - RNA, 19 nt, Artificial Sequence
  Description of Artificial Sequence: Synthetic oligonucleotide
ucuccacgaugacgugacu

SEQ ID NO: 104009 - RNA, 19 nt, Artificial Sequence
  Description of Artificial Sequence: Synthetic oligonucleotide
auaaccucuuggguccaaa

SEQ ID NO: 104010 - RNA, 19 nt, Artificial Sequence
  Description of Artificial Sequence: Synthetic oligonucleotide
gauucucacgcggaacggu

SEQ ID NO: 104011 - RNA, 19 nt, Artificial Sequence
  Description of Artificial Sequence: Synthetic oligonucleotide
caaaugcaggggugucguc

SEQ ID NO: 104012 - RNA, 19 nt, Artificial Sequence
  Description of Artificial Sequence: Synthetic oligonucleotide
cacgcggaacggucccucc

SEQ ID NO: 104013 - RNA, 19 nt, Artificial Sequence
  Description of Artificial Sequence: Synthetic oligonucleotide
gcgccguucaugacgaggc

SEQ ID NO: 104014 - RNA, 19 nt, Artificial Sequence
  Description of Artificial Sequence: Synthetic oligonucleotide
cagcccaauugcccaauca

SEQ ID NO: 104015 - RNA, 19 nt, Artificial Sequence
  Description of Artificial Sequence: Synthetic oligonucleotide
guagacaggcacgaccaua

SEQ ID NO: 104016 - RNA, 19 nt, Artificial Sequence
  Description of Artificial Sequence: Synthetic oligonucleotide
guguguguguguugugugu

SEQ ID NO: 104017 - RNA, 19 nt, Artificial Sequence
  Description of Artificial Sequence: Synthetic oligonucleotide
ggcaaacgggaaaguggcg

SEQ ID NO: 104018 - RNA, 19 nt, Artificial Sequence
  Description of Artificial Sequence: Synthetic oligonucleotide
guccaaggcggcgugaugu

SEQ ID NO: 104019 - RNA, 19 nt, Artificial Sequence
  Description of Artificial Sequence: Synthetic oligonucleotide
ggguuucaugagugcgccg

SEQ ID NO: 104020 - RNA, 19 nt, Artificial Sequence
  Description of Artificial Sequence: Synthetic oligonucleotide
guguguguguguguguugu

SEQ ID NO: 104021 - RNA, 19 nt, Artificial Sequence
  Description of Artificial Sequence: Synthetic oligonucleotide
acugcgucuuuggucuaga

SEQ ID NO: 104022 - RNA, 19 nt, Artificial Sequence
  Description of Artificial Sequence: Synthetic oligonucleotide
acgggaaaguggcggugaa

SEQ ID NO: 104023 - RNA, 19 nt, Artificial Sequence
  Description of Artificial Sequence: Synthetic oligonucleotide
ccuccuaaagaaacaugga

SEQ ID NO: 104024 - RNA, 19 nt, Artificial Sequence
  Description of Artificial Sequence: Synthetic oligonucleotide
aggaggcaaaacccacguu

SEQ ID NO: 104025 - RNA, 19 nt, Artificial Sequence
  Description of Artificial Sequence: Synthetic oligonucleotide
ugaguacauugcgcuccca

SEQ ID NO: 104026 - RNA, 19 nt, Artificial Sequence
  Description of Artificial Sequence: Synthetic oligonucleotide
auuugucugccaacccaaa

SEQ ID NO: 104027 - RNA, 19 nt, Artificial Sequence
  Description of Artificial Sequence: Synthetic oligonucleotide
cgugacuggguuucaugag

SEQ ID NO: 104028 - RNA, 19 nt, Artificial Sequence
  Description of Artificial Sequence: Synthetic oligonucleotide
ugacgugacuggguuucau

SEQ ID NO: 104029 - RNA, 19 nt, Artificial Sequence
  Description of Artificial Sequence: Synthetic oligonucleotide
guugugugugugugugugu

SEQ ID NO: 104030 - RNA, 19 nt, Artificial Sequence
  Description of Artificial Sequence: Synthetic oligonucleotide
ggcgaucgcggcguuggcg

SEQ ID NO: 104031 - RNA, 19 nt, Artificial Sequence
  Description of Artificial Sequence: Synthetic oligonucleotide
acauaaccucuugggucca

SEQ ID NO: 104032 - RNA, 19 nt, Artificial Sequence
  Description of Artificial Sequence: Synthetic oligonucleotide
ucacgcggaacggucccuc

SEQ ID NO: 104033 - RNA, 19 nt, Artificial Sequence
  Description of Artificial Sequence: Synthetic oligonucleotide
guguguguguguguugugu

SEQ ID NO: 104034 - RNA, 19 nt, Artificial Sequence
  Description of Artificial Sequence: Synthetic oligonucleotide
gugcgggaguggaagggug

SEQ ID NO: 104035 - RNA, 19 nt, Artificial Sequence
  Description of Artificial Sequence: Synthetic oligonucleotide
ccaugguagugacacccug

SEQ ID NO: 104036 - RNA, 19 nt, Artificial Sequence
  Description of Artificial Sequence: Synthetic oligonucleotide
cuacgcaggguguccucca

SEQ ID NO: 104037 - RNA, 19 nt, Artificial Sequence
  Description of Artificial Sequence: Synthetic oligonucleotide
guguguguugugugugugu

SEQ ID NO: 104038 - RNA, 19 nt, Artificial Sequence
  Description of Artificial Sequence: Synthetic oligonucleotide
uggguccguccaaggcggc

SEQ ID NO: 104039 - RNA, 19 nt, Artificial Sequence
  Description of Artificial Sequence: Synthetic oligonucleotide
gucacgagcucuacuucaa

SEQ ID NO: 104040 - RNA, 19 nt, Artificial Sequence
  Description of Artificial Sequence: Synthetic oligonucleotide
acccacguucucagcuuuc

SEQ ID NO: 104041 - RNA, 19 nt, Artificial Sequence
  Description of Artificial Sequence: Synthetic oligonucleotide
guguguguguugugugugu

SEQ ID NO: 104042 - RNA, 19 nt, Artificial Sequence
  Description of Artificial Sequence: Synthetic oligonucleotide
ccggaagacaggcugagua

SEQ ID NO: 104043 - RNA, 19 nt, Artificial Sequence
  Description of Artificial Sequence: Synthetic oligonucleotide
cacgaugacgugacugggu

SEQ ID NO: 104044 - RNA, 19 nt, Artificial Sequence
  Description of Artificial Sequence: Synthetic oligonucleotide
gccuguaaugacaccacaa

SEQ ID NO: 104045 - RNA, 19 nt, Artificial Sequence
  Description of Artificial Sequence: Synthetic oligonucleotide
cugguucgucgauuccgga

SEQ ID NO: 104046 - RNA, 19 nt, Artificial Sequence
  Description of Artificial Sequence: Synthetic oligonucleotide
guguguugugugugugugu

SEQ ID NO: 104047 - RNA, 19 nt, Artificial Sequence
  Description of Artificial Sequence: Synthetic oligonucleotide
ccguccauccagaggagca

SEQ ID NO: 104048 - RNA, 19 nt, Artificial Sequence
  Description of Artificial Sequence: Synthetic oligonucleotide
caggccgugugccugggcu

SEQ ID NO: 104049 - RNA, 19 nt, Artificial Sequence
  Description of Artificial Sequence: Synthetic oligonucleotide
ggggacuaacauaaccucu

SEQ ID NO: 104050 - RNA, 19 nt, Artificial Sequence
  Description of Artificial Sequence: Synthetic oligonucleotide
acccaacuacugggagguc

SEQ ID NO: 104051 - RNA, 19 nt, Artificial Sequence
  Description of Artificial Sequence: Synthetic oligonucleotide
ucagagcgccugguucguc

SEQ ID NO: 104052 - RNA, 19 nt, Artificial Sequence
  Description of Artificial Sequence: Synthetic oligonucleotide
guuagggauuggaaagauu

SEQ ID NO: 104053 - RNA, 19 nt, Artificial Sequence
  Description of Artificial Sequence: Synthetic oligonucleotide
auggcucgccagaguagca

SEQ ID NO: 104054 - RNA, 19 nt, Artificial Sequence
  Description of Artificial Sequence: Synthetic oligonucleotide
ccaggccgauagccaaucg

SEQ ID NO: 104055 - RNA, 19 nt, Artificial Sequence
  Description of Artificial Sequence: Synthetic oligonucleotide
gggacuaacauaaccucuu

SEQ ID NO: 104056 - RNA, 19 nt, Artificial Sequence
  Description of Artificial Sequence: Synthetic oligonucleotide
ggcggauggcccgggacug

SEQ ID NO: 104057 - RNA, 19 nt, Artificial Sequence
  Description of Artificial Sequence: Synthetic oligonucleotide
guguugugugugugugugu

SEQ ID NO: 104058 - RNA, 19 nt, Artificial Sequence
  Description of Artificial Sequence: Synthetic oligonucleotide
ggaggcgcuaagggagacc

SEQ ID NO: 104059 - RNA, 19 nt, Artificial Sequence
  Description of Artificial Sequence: Synthetic oligonucleotide
ggccgauagccaaucgauc

SEQ ID NO: 104060 - RNA, 19 nt, Artificial Sequence
  Description of Artificial Sequence: Synthetic oligonucleotide
ggguccguccaaggcggcg

SEQ ID NO: 104061 - RNA, 19 nt, Artificial Sequence
  Description of Artificial Sequence: Synthetic oligonucleotide
cagagucacgagcucuacu

SEQ ID NO: 104062 - RNA, 19 nt, Artificial Sequence
  Description of Artificial Sequence: Synthetic oligonucleotide
guguguguguguguguguu

SEQ ID NO: 104063 - RNA, 19 nt, Artificial Sequence
  Description of Artificial Sequence: Synthetic oligonucleotide
cgcaaggucccauuucaga

SEQ ID NO: 104064 - RNA, 19 nt, Artificial Sequence
  Description of Artificial Sequence: Synthetic oligonucleotide
aggcacgaccauagaugcu

SEQ ID NO: 104065 - RNA, 19 nt, Artificial Sequence
  Description of Artificial Sequence: Synthetic oligonucleotide
ccagagacucucauuccua

SEQ ID NO: 104066 - RNA, 19 nt, Artificial Sequence
  Description of Artificial Sequence: Synthetic oligonucleotide
gcgcaaggucccauuucag

SEQ ID NO: 104067 - RNA, 19 nt, Artificial Sequence
  Description of Artificial Sequence: Synthetic oligonucleotide
gucucgggauugcguggga

SEQ ID NO: 104068 - RNA, 19 nt, Artificial Sequence
  Description of Artificial Sequence: Synthetic oligonucleotide
aggauccuucaaacaugaa

SEQ ID NO: 104069 - RNA, 19 nt, Artificial Sequence
  Description of Artificial Sequence: Synthetic oligonucleotide
cggaacggucccuccgucc

SEQ ID NO: 104070 - RNA, 19 nt, Artificial Sequence
  Description of Artificial Sequence: Synthetic oligonucleotide
gcaggggugucgucauuaa

SEQ ID NO: 104071 - RNA, 19 nt, Artificial Sequence
  Description of Artificial Sequence: Synthetic oligonucleotide
  modified_base (11)..(11): a, c, u, g, unknown or other
cgguaauuuanaagcggcu

SEQ ID NO: 104072 - RNA, 19 nt, Artificial Sequence
  Description of Artificial Sequence: Synthetic oligonucleotide
gugcgccguucaugacgag

SEQ ID NO: 104073 - RNA, 19 nt, Artificial Sequence
  Description of Artificial Sequence: Synthetic oligonucleotide
gcggcggauggcccgggac

SEQ ID NO: 104074 - RNA, 19 nt, Artificial Sequence
  Description of Artificial Sequence: Synthetic oligonucleotide
ccaauugcccaaucaggau

SEQ ID NO: 104075 - RNA, 19 nt, Artificial Sequence
  Description of Artificial Sequence: Synthetic oligonucleotide
cccaaucaggauacacgua

SEQ ID NO: 104076 - RNA, 19 nt, Artificial Sequence
  Description of Artificial Sequence: Synthetic oligonucleotide
aggcgcuaagggagaccca

SEQ ID NO: 104077 - RNA, 19 nt, Artificial Sequence
  Description of Artificial Sequence: Synthetic oligonucleotide
gcggauggcccgggacugg

SEQ ID NO: 104078 - RNA, 19 nt, Artificial Sequence
  Description of Artificial Sequence: Synthetic oligonucleotide
ggcgcggaggaagcgguaa

SEQ ID NO: 104079 - RNA, 19 nt, Artificial Sequence
  Description of Artificial Sequence: Synthetic oligonucleotide
gcggaacggucccuccguc

SEQ ID NO: 104080 - RNA, 19 nt, Artificial Sequence
  Description of Artificial Sequence: Synthetic oligonucleotide
caugaacgcuccuccccuu

SEQ ID NO: 104081 - RNA, 19 nt, Artificial Sequence
  Description of Artificial Sequence: Synthetic oligonucleotide
gguagacaggcacgaccau

SEQ ID NO: 104082 - RNA, 19 nt, Artificial Sequence
  Description of Artificial Sequence: Synthetic oligonucleotide
gugugugugugugcgcguu

SEQ ID NO: 104083 - RNA, 19 nt, Artificial Sequence
  Description of Artificial Sequence: Synthetic oligonucleotide
ccccguccauccagaggag

SEQ ID NO: 104084 - RNA, 19 nt, Artificial Sequence
  Description of Artificial Sequence: Synthetic oligonucleotide
ccaaggcggcgugauguca

SEQ ID NO: 104085 - RNA, 19 nt, Artificial Sequence
  Description of Artificial Sequence: Synthetic oligonucleotide
cgccugguucgucgauucc

SEQ ID NO: 104086 - RNA, 19 nt, Artificial Sequence
  Description of Artificial Sequence: Synthetic oligonucleotide
gcauggcaaacgggaaagu

SEQ ID NO: 104087 - RNA, 19 nt, Artificial Sequence
  Description of Artificial Sequence: Synthetic oligonucleotide
cucacgcggaacggucccu

SEQ ID NO: 104088 - RNA, 19 nt, Artificial Sequence
  Description of Artificial Sequence: Synthetic oligonucleotide
ggccgugugccugggcucu

SEQ ID NO: 104089 - RNA, 19 nt, Artificial Sequence
  Description of Artificial Sequence: Synthetic oligonucleotide
gcugggcacgagagcucga

SEQ ID NO: 104090 - RNA, 19 nt, Artificial Sequence
  Description of Artificial Sequence: Synthetic oligonucleotide
gcgcggaggaagcgguaau

SEQ ID NO: 104091 - RNA, 19 nt, Artificial Sequence
  Description of Artificial Sequence: Synthetic oligonucleotide
ccgugugccugggcucuuc

SEQ ID NO: 104092 - RNA, 19 nt, Artificial Sequence
  Description of Artificial Sequence: Synthetic oligonucleotide
cgcggaacggucccuccgu

SEQ ID NO: 104093 - RNA, 19 nt, Artificial Sequence
  Description of Artificial Sequence: Synthetic oligonucleotide
cgaugacgugacuggguuu

SEQ ID NO: 104094 - RNA, 19 nt, Artificial Sequence
  Description of Artificial Sequence: Synthetic oligonucleotide
ccgcggcggauggcccggg

SEQ ID NO: 104095 - RNA, 19 nt, Artificial Sequence
  Description of Artificial Sequence: Synthetic oligonucleotide
cgccguucaugacgaggcu

SEQ ID NO: 104096 - RNA, 19 nt, Artificial Sequence
  Description of Artificial Sequence: Synthetic oligonucleotide
cgcggaggaagcgguaauu

SEQ ID NO: 104097 - RNA, 19 nt, Artificial Sequence
  Description of Artificial Sequence: Synthetic oligonucleotide
gccgugugccugggcucuu

SEQ ID NO: 104098 - RNA, 19 nt, Artificial Sequence
  Description of Artificial Sequence: Synthetic oligonucleotide
  modified_base (1)..(1): a, c, u, g, unknown or other
naagcggcuucucccugac

SEQ ID NO: 104099 - RNA, 19 nt, Artificial Sequence
  Description of Artificial Sequence: Synthetic oligonucleotide
  modified_base (1)..(1): a, c, u, g, unknown or other
nuuugugugugugugugug

SEQ ID NO: 104100 - RNA, 19 nt, Artificial Sequence
  Description of Artificial Sequence: Synthetic oligonucleotide
aauauaaccaucccaacag

SEQ ID NO: 104101 - RNA, 19 nt, Artificial Sequence
  Description of Artificial Sequence: Synthetic oligonucleotide
auuaauagaacaugagugc

SEQ ID NO: 104102 - RNA, 19 nt, Artificial Sequence
  Description of Artificial Sequence: Synthetic oligonucleotide
aagauaauuaccugccacc

SEQ ID NO: 104103 - RNA, 19 nt, Artificial Sequence
  Description of Artificial Sequence: Synthetic oligonucleotide
uuuacugucuuaaauaaug

SEQ ID NO: 104104 - RNA, 19 nt, Artificial Sequence
  Description of Artificial Sequence: Synthetic oligonucleotide
auaucgacaacccuaagac

SEQ ID NO: 104105 - RNA, 19 nt, Artificial Sequence
  Description of Artificial Sequence: Synthetic oligonucleotide
aauaacacauuauaguaga

SEQ ID NO: 104106 - RNA, 19 nt, Artificial Sequence
  Description of Artificial Sequence: Synthetic oligonucleotide
augacaacaagauaauuac

SEQ ID NO: 104107 - RNA, 19 nt, Artificial Sequence
  Description of Artificial Sequence: Synthetic oligonucleotide
cauuaauagaacaugagug

SEQ ID NO: 104108 - RNA, 19 nt, Artificial Sequence
  Description of Artificial Sequence: Synthetic oligonucleotide
gauaauguugaagaaaagg

SEQ ID NO: 104109 - RNA, 19 nt, Artificial Sequence
  Description of Artificial Sequence: Synthetic oligonucleotide
auuauggcuaccuggaagc

SEQ ID NO: 104110 - RNA, 19 nt, Artificial Sequence
  Description of Artificial Sequence: Synthetic oligonucleotide
uuuaaggacaacauaaggu

SEQ ID NO: 104111 - RNA, 19 nt, Artificial Sequence
  Description of Artificial Sequence: Synthetic oligonucleotide
uuuagcauugcuaggaaag

SEQ ID NO: 104112 - RNA, 19 nt, Artificial Sequence
  Description of Artificial Sequence: Synthetic oligonucleotide
ugaaacauugaucacuugc

SEQ ID NO: 104113 - RNA, 19 nt, Artificial Sequence
  Description of Artificial Sequence: Synthetic oligonucleotide
auuaccugccaccagaugg

SEQ ID NO: 104114 - RNA, 19 nt, Artificial Sequence
  Description of Artificial Sequence: Synthetic oligonucleotide
cuucugauuaacuugacag

SEQ ID NO: 104115 - RNA, 19 nt, Artificial Sequence
  Description of Artificial Sequence: Synthetic oligonucleotide
aauagguggcucuauuuac

SEQ ID NO: 104116 - RNA, 19 nt, Artificial Sequence
  Description of Artificial Sequence: Synthetic oligonucleotide
uuguuuaccaccuugccag

SEQ ID NO: 104117 - RNA, 19 nt, Artificial Sequence
  Description of Artificial Sequence: Synthetic oligonucleotide
aaaauaugcuugcuaacag

SEQ ID NO: 104118 - RNA, 19 nt, Artificial Sequence
  Description of Artificial Sequence: Synthetic oligonucleotide
aauauauaaccugucuuac

SEQ ID NO: 104119 - RNA, 19 nt, Artificial Sequence
  Description of Artificial Sequence: Synthetic oligonucleotide
uuauauacuguucuaauau

SEQ ID NO: 104120 - RNA, 19 nt, Artificial Sequence
  Description of Artificial Sequence: Synthetic oligonucleotide
ucaauuacaguauagcuuc

SEQ ID NO: 104121 - RNA, 19 nt, Artificial Sequence
  Description of Artificial Sequence: Synthetic oligonucleotide
auuagcguacuauuaaaac

SEQ ID NO: 104122 - RNA, 19 nt, Artificial Sequence
  Description of Artificial Sequence: Synthetic oligonucleotide
aguaauaaauuauaucuga

SEQ ID NO: 104123 - RNA, 19 nt, Artificial Sequence
  Description of Artificial Sequence: Synthetic oligonucleotide
cacauuauaguagacaugg

SEQ ID NO: 104124 - RNA, 19 nt, Artificial Sequence
  Description of Artificial Sequence: Synthetic oligonucleotide
ugaaauuacaacuuagcaa

SEQ ID NO: 104125 - RNA, 19 nt, Artificial Sequence
  Description of Artificial Sequence: Synthetic oligonucleotide
ugagaauccaaucaaagua

SEQ ID NO: 104126 - RNA, 19 nt, Artificial Sequence
  Description of Artificial Sequence: Synthetic oligonucleotide
aauaucgacaacccuaaga

SEQ ID NO: 104127 - RNA, 19 nt, Artificial Sequence
  Description of Artificial Sequence: Synthetic oligonucleotide
uccauaaauaauuacuugu

SEQ ID NO: 104128 - RNA, 19 nt, Artificial Sequence
  Description of Artificial Sequence: Synthetic oligonucleotide
ugaauaacacauuauagua

SEQ ID NO: 104129 - RNA, 19 nt, Artificial Sequence
  Description of Artificial Sequence: Synthetic oligonucleotide
cuuuucagguguaauaugc

SEQ ID NO: 104130 - RNA, 19 nt, Artificial Sequence
  Description of Artificial Sequence: Synthetic oligonucleotide
caaauauuggucuuguaac

SEQ ID NO: 104131 - RNA, 19 nt, Artificial Sequence
  Description of Artificial Sequence: Synthetic oligonucleotide
aaaauagguauugauccuc

SEQ ID NO: 104132 - RNA, 19 nt, Artificial Sequence
  Description of Artificial Sequence: Synthetic oligonucleotide
uauauuacuuaucugugaa

SEQ ID NO: 104133 - RNA, 19 nt, Artificial Sequence
  Description of Artificial Sequence: Synthetic oligonucleotide
aauaccguaauaaugaguu

SEQ ID NO: 104134 - RNA, 19 nt, Artificial Sequence
  Description of Artificial Sequence: Synthetic oligonucleotide
uuuuguaauaccguaauaa

SEQ ID NO: 104135 - RNA, 19 nt, Artificial Sequence
  Description of Artificial Sequence: Synthetic oligonucleotide
uuagcguacuauuaaaacu

SEQ ID NO: 104136 - RNA, 19 nt, Artificial Sequence
  Description of Artificial Sequence: Synthetic oligonucleotide
uuaauauauaaccugucuu

SEQ ID NO: 104137 - RNA, 19 nt, Artificial Sequence
  Description of Artificial Sequence: Synthetic oligonucleotide
aacgcuagauuccauucuc

SEQ ID NO: 104138 - RNA, 19 nt, Artificial Sequence
  Description of Artificial Sequence: Synthetic oligonucleotide
uuacuuacccuacugugag

SEQ ID NO: 104139 - RNA, 19 nt, Artificial Sequence
  Description of Artificial Sequence: Synthetic oligonucleotide
auauuggucuuguaacagc

SEQ ID NO: 104140 - RNA, 19 nt, Artificial Sequence
  Description of Artificial Sequence: Synthetic oligonucleotide
uaugcuugcuaacaguggc

SEQ ID NO: 104141 - RNA, 19 nt, Artificial Sequence
  Description of Artificial Sequence: Synthetic oligonucleotide
agccaauaaacucuggauc

SEQ ID NO: 104142 - RNA, 19 nt, Artificial Sequence
  Description of Artificial Sequence: Synthetic oligonucleotide
uauuacuuaucugugaacu

SEQ ID NO: 104143 - RNA, 19 nt, Artificial Sequence
  Description of Artificial Sequence: Synthetic oligonucleotide
aaacgaaagcccuguuccc

SEQ ID NO: 104144 - RNA, 19 nt, Artificial Sequence
  Description of Artificial Sequence: Synthetic oligonucleotide
uuuacuuacccuacuguga

SEQ ID NO: 104145 - RNA, 19 nt, Artificial Sequence
  Description of Artificial Sequence: Synthetic oligonucleotide
aauaugcuugcuaacagug

SEQ ID NO: 104146 - RNA, 19 nt, Artificial Sequence
  Description of Artificial Sequence: Synthetic oligonucleotide
ugacauuuaagcugcuagg

SEQ ID NO: 104147 - RNA, 19 nt, Artificial Sequence
  Description of Artificial Sequence: Synthetic oligonucleotide
uacaacuuagcaaacuacu

SEQ ID NO: 104148 - RNA, 19 nt, Artificial Sequence
  Description of Artificial Sequence: Synthetic oligonucleotide
ugagcugaauuuaagcuac

SEQ ID NO: 104149 - RNA, 19 nt, Artificial Sequence
  Description of Artificial Sequence: Synthetic oligonucleotide
uaucuaaacuucauaauua

SEQ ID NO: 104150 - RNA, 19 nt, Artificial Sequence
  Description of Artificial Sequence: Synthetic oligonucleotide
uaacuaaguagacagacuu

SEQ ID NO: 104151 - RNA, 19 nt, Artificial Sequence
  Description of Artificial Sequence: Synthetic oligonucleotide
auuuacuuacccuacugug

SEQ ID NO: 104152 - RNA, 19 nt, Artificial Sequence
  Description of Artificial Sequence: Synthetic oligonucleotide
ucugauuaacuugacagug

SEQ ID NO: 104153 - RNA, 19 nt, Artificial Sequence
  Description of Artificial Sequence: Synthetic oligonucleotide
aaguaauaaauuauaucug

SEQ ID NO: 104154 - RNA, 19 nt, Artificial Sequence
  Description of Artificial Sequence: Synthetic oligonucleotide
auuaacuugacagugaaua

SEQ ID NO: 104155 - RNA, 19 nt, Artificial Sequence
  Description of Artificial Sequence: Synthetic oligonucleotide
cauauggauguacaguacg

SEQ ID NO: 104156 - RNA, 19 nt, Artificial Sequence
  Description of Artificial Sequence: Synthetic oligonucleotide
uguaagauagugcaaugau

SEQ ID NO: 104157 - RNA, 19 nt, Artificial Sequence
  Description of Artificial Sequence: Synthetic oligonucleotide
agcucaagcuggcugaagc

SEQ ID NO: 104158 - RNA, 19 nt, Artificial Sequence
  Description of Artificial Sequence: Synthetic oligonucleotide
acuacuugauaccuguaag

SEQ ID NO: 104159 - RNA, 19 nt, Artificial Sequence
  Description of Artificial Sequence: Synthetic oligonucleotide
aaaacuccuagucucugca

SEQ ID NO: 104160 - RNA, 19 nt, Artificial Sequence
  Description of Artificial Sequence: Synthetic oligonucleotide
ugauccucgagucuguaca

SEQ ID NO: 104161 - RNA, 19 nt, Artificial Sequence
  Description of Artificial Sequence: Synthetic oligonucleotide
auaauuaccugccaccaga

SEQ ID NO: 104162 - RNA, 19 nt, Artificial Sequence
  Description of Artificial Sequence: Synthetic oligonucleotide
agaaacuuggaacaacgcu

SEQ ID NO: 104163 - RNA, 19 nt, Artificial Sequence
  Description of Artificial Sequence: Synthetic oligonucleotide
uguuucuacaaaguuagcu

SEQ ID NO: 104164 - RNA, 19 nt, Artificial Sequence
  Description of Artificial Sequence: Synthetic oligonucleotide
auauuacuuaucugugaac

SEQ ID NO: 104165 - RNA, 19 nt, Artificial Sequence
  Description of Artificial Sequence: Synthetic oligonucleotide
uuaauagaacaugagugca

SEQ ID NO: 104166 - RNA, 19 nt, Artificial Sequence
  Description of Artificial Sequence: Synthetic oligonucleotide
uauuggucuuguaacagcu

SEQ ID NO: 104167 - RNA, 19 nt, Artificial Sequence
  Description of Artificial Sequence: Synthetic oligonucleotide
uacaguauagcuucaaauu

SEQ ID NO: 104168 - RNA, 19 nt, Artificial Sequence
  Description of Artificial Sequence: Synthetic oligonucleotide
caaucuaggagcaucaaca

SEQ ID NO: 104169 - RNA, 19 nt, Artificial Sequence
  Description of Artificial Sequence: Synthetic oligonucleotide
uguaagagacauucuauaa

SEQ ID NO: 104170 - RNA, 19 nt, Artificial Sequence
  Description of Artificial Sequence: Synthetic oligonucleotide
uguuuuguaauaccguaau

SEQ ID NO: 104171 - RNA, 19 nt, Artificial Sequence
  Description of Artificial Sequence: Synthetic oligonucleotide
uucuaauaucuaaacuuca

SEQ ID NO: 104172 - RNA, 19 nt, Artificial Sequence
  Description of Artificial Sequence: Synthetic oligonucleotide
uaccguaauaaugaguugc

SEQ ID NO: 104173 - RNA, 19 nt, Artificial Sequence
  Description of Artificial Sequence: Synthetic oligonucleotide
uggauugugcccaguaucc

SEQ ID NO: 104174 - RNA, 19 nt, Artificial Sequence
  Description of Artificial Sequence: Synthetic oligonucleotide
caauccauacaguugcugc

SEQ ID NO: 104175 - RNA, 19 nt, Artificial Sequence
  Description of Artificial Sequence: Synthetic oligonucleotide
gucucaaugaguaacuaag

SEQ ID NO: 104176 - RNA, 19 nt, Artificial Sequence
  Description of Artificial Sequence: Synthetic oligonucleotide
acaacgcuagauuccauuc

SEQ ID NO: 104177 - RNA, 19 nt, Artificial Sequence
  Description of Artificial Sequence: Synthetic oligonucleotide
ucuaucuagacaauccaua

SEQ ID NO: 104178 - RNA, 19 nt, Artificial Sequence
  Description of Artificial Sequence: Synthetic oligonucleotide
uuacugucuuaaauaauga

SEQ ID NO: 104179 - RNA, 19 nt, Artificial Sequence
  Description of Artificial Sequence: Synthetic oligonucleotide
auagguauugauccucgag

SEQ ID NO: 104180 - RNA, 19 nt, Artificial Sequence
  Description of Artificial Sequence: Synthetic oligonucleotide
auagugcaaugauacuacc

SEQ ID NO: 104181 - RNA, 19 nt, Artificial Sequence
  Description of Artificial Sequence: Synthetic oligonucleotide
aacauaagguacuacuauu

SEQ ID NO: 104182 - RNA, 19 nt, Artificial Sequence
  Description of Artificial Sequence: Synthetic oligonucleotide
uuauaucugaacuuuucua

SEQ ID NO: 104183 - RNA, 19 nt, Artificial Sequence
  Description of Artificial Sequence: Synthetic oligonucleotide
acaacaagauaauuaccug

SEQ ID NO: 104184 - RNA, 19 nt, Artificial Sequence
  Description of Artificial Sequence: Synthetic oligonucleotide
ugacaacaagauaauuacc

SEQ ID NO: 104185 - RNA, 19 nt, Artificial Sequence
  Description of Artificial Sequence: Synthetic oligonucleotide
aauuacuugugaaucaaaa

SEQ ID NO: 104186 - RNA, 19 nt, Artificial Sequence
  Description of Artificial Sequence: Synthetic oligonucleotide
uggaacaacgcuagauucc

SEQ ID NO: 104187 - RNA, 19 nt, Artificial Sequence
  Description of Artificial Sequence: Synthetic oligonucleotide
agguacuacuauuagaaaa

SEQ ID NO: 104188 - RNA, 19 nt, Artificial Sequence
  Description of Artificial Sequence: Synthetic oligonucleotide
aucugaacuuuucuaugac

SEQ ID NO: 104189 - RNA, 19 nt, Artificial Sequence
  Description of Artificial Sequence: Synthetic oligonucleotide
gauagugcaaugauacuac

SEQ ID NO: 104190 - RNA, 19 nt, Artificial Sequence
  Description of Artificial Sequence: Synthetic oligonucleotide
auuacuugugaaucaaaau

SEQ ID NO: 104191 - RNA, 19 nt, Artificial Sequence
  Description of Artificial Sequence: Synthetic oligonucleotide
uaauaccguaauaaugagu

SEQ ID NO: 104192 - RNA, 19 nt, Artificial Sequence
  Description of Artificial Sequence: Synthetic oligonucleotide
auuauaagucccaaucgag

SEQ ID NO: 104193 - RNA, 19 nt, Artificial Sequence
  Description of Artificial Sequence: Synthetic oligonucleotide
uguuguaagauagugcaau

SEQ ID NO: 104194 - RNA, 19 nt, Artificial Sequence
  Description of Artificial Sequence: Synthetic oligonucleotide
gagaauccaaucaaaguac

SEQ ID NO: 104195 - RNA, 19 nt, Artificial Sequence
  Description of Artificial Sequence: Synthetic oligonucleotide
agugcaaugauacuaccuu

SEQ ID NO: 104196 - RNA, 19 nt, Artificial Sequence
  Description of Artificial Sequence: Synthetic oligonucleotide
acaguauagcuucaaauua

SEQ ID NO: 104197 - RNA, 19 nt, Artificial Sequence
  Description of Artificial Sequence: Synthetic oligonucleotide
cucugugaccagaaaauag

SEQ ID NO: 104198 - RNA, 19 nt, Artificial Sequence
  Description of Artificial Sequence: Synthetic oligonucleotide
aguaucgcacaccagcucu

SEQ ID NO: 104199 - RNA, 19 nt, Artificial Sequence
  Description of Artificial Sequence: Synthetic oligonucleotide
augcccguuccauacaaac

SEQ ID NO: 104200 - RNA, 19 nt, Artificial Sequence
  Description of Artificial Sequence: Synthetic oligonucleotide
aauuaaaguugguccuuga

SEQ ID NO: 104201 - RNA, 19 nt, Artificial Sequence
  Description of Artificial Sequence: Synthetic oligonucleotide
uuggaacaacgcuagauuc

SEQ ID NO: 104202 - RNA, 19 nt, Artificial Sequence
  Description of Artificial Sequence: Synthetic oligonucleotide
gacaauuaguucuugcaaa

SEQ ID NO: 104203 - RNA, 19 nt, Artificial Sequence
  Description of Artificial Sequence: Synthetic oligonucleotide
uccaaugcuugcaacuccc

SEQ ID NO: 104204 - RNA, 19 nt, Artificial Sequence
  Description of Artificial Sequence: Synthetic oligonucleotide
uucugauuaacuugacagu

SEQ ID NO: 104205 - RNA, 19 nt, Artificial Sequence
  Description of Artificial Sequence: Synthetic oligonucleotide
acggcgagccaauaaacuc

SEQ ID NO: 104206 - RNA, 19 nt, Artificial Sequence
  Description of Artificial Sequence: Synthetic oligonucleotide
ucaagacgugguuuuagca

SEQ ID NO: 104207 - RNA, 19 nt, Artificial Sequence
  Description of Artificial Sequence: Synthetic oligonucleotide
accagauuaauuaugacuu

SEQ ID NO: 104208 - RNA, 19 nt, Artificial Sequence
  Description of Artificial Sequence: Synthetic oligonucleotide
guagacacucggucaaugg

SEQ ID NO: 104209 - RNA, 19 nt, Artificial Sequence
  Description of Artificial Sequence: Synthetic oligonucleotide
uuacuuaucugugaacuuc

SEQ ID NO: 104210 - RNA, 19 nt, Artificial Sequence
  Description of Artificial Sequence: Synthetic oligonucleotide
aguaucccaaauauugguc

SEQ ID NO: 104211 - RNA, 19 nt, Artificial Sequence
  Description of Artificial Sequence: Synthetic oligonucleotide
auauauaaccugucuuaca

SEQ ID NO: 104212 - RNA, 19 nt, Artificial Sequence
  Description of Artificial Sequence: Synthetic oligonucleotide
aagacgugguuuuagcauu

SEQ ID NO: 104213 - RNA, 19 nt, Artificial Sequence
  Description of Artificial Sequence: Synthetic oligonucleotide
cauuauaagucccaaucga

SEQ ID NO: 104214 - RNA, 19 nt, Artificial Sequence
  Description of Artificial Sequence: Synthetic oligonucleotide
agcuacauuucaauuacag

SEQ ID NO: 104215 - RNA, 19 nt, Artificial Sequence
  Description of Artificial Sequence: Synthetic oligonucleotide
aaucuagcacaagacccuc

SEQ ID NO: 104216 - RNA, 19 nt, Artificial Sequence
  Description of Artificial Sequence: Synthetic oligonucleotide
ugcccaguaucccaaauau

SEQ ID NO: 104217 - RNA, 19 nt, Artificial Sequence
  Description of Artificial Sequence: Synthetic oligonucleotide
uuguaagauagugcaauga

SEQ ID NO: 104218 - RNA, 19 nt, Artificial Sequence
  Description of Artificial Sequence: Synthetic oligonucleotide
aauaagucuauggaaucuu

SEQ ID NO: 104219 - RNA, 19 nt, Artificial Sequence
  Description of Artificial Sequence: Synthetic oligonucleotide
aauagguauugauccucga

SEQ ID NO: 104220 - RNA, 19 nt, Artificial Sequence
  Description of Artificial Sequence: Synthetic oligonucleotide
uagacacucggucaauggu

SEQ ID NO: 104221 - RNA, 19 nt, Artificial Sequence
  Description of Artificial Sequence: Synthetic oligonucleotide
acugauuuuaagcuacauu

SEQ ID NO: 104222 - RNA, 19 nt, Artificial Sequence
  Description of Artificial Sequence: Synthetic oligonucleotide
uguacaguacgugaauuaa

SEQ ID NO: 104223 - RNA, 19 nt, Artificial Sequence
  Description of Artificial Sequence: Synthetic oligonucleotide
auaggauuagcguacuauu

SEQ ID NO: 104224 - RNA, 19 nt, Artificial Sequence
  Description of Artificial Sequence: Synthetic oligonucleotide
auacaaaccgucugaucug

SEQ ID NO: 104225 - RNA, 19 nt, Artificial Sequence
  Description of Artificial Sequence: Synthetic oligonucleotide
aggauuagcguacuauuaa

SEQ ID NO: 104226 - RNA, 19 nt, Artificial Sequence
  Description of Artificial Sequence: Synthetic oligonucleotide
cucaagacgugguuuuagc

SEQ ID NO: 104227 - RNA, 19 nt, Artificial Sequence
  Description of Artificial Sequence: Synthetic oligonucleotide
aucgacaacccuaagacau

SEQ ID NO: 104228 - RNA, 19 nt, Artificial Sequence
  Description of Artificial Sequence: Synthetic oligonucleotide
ugcggaaaacuccuuccug

SEQ ID NO: 104229 - RNA, 19 nt, Artificial Sequence
  Description of Artificial Sequence: Synthetic oligonucleotide
uggcucuauuuacuuaccc

SEQ ID NO: 104230 - RNA, 19 nt, Artificial Sequence
  Description of Artificial Sequence: Synthetic oligonucleotide
agaacggcgagccaauaaa

SEQ ID NO: 104231 - RNA, 19 nt, Artificial Sequence
  Description of Artificial Sequence: Synthetic oligonucleotide
agauagugcaaugauacua

SEQ ID NO: 104232 - RNA, 19 nt, Artificial Sequence
  Description of Artificial Sequence: Synthetic oligonucleotide
aagagacucauuucuugua

SEQ ID NO: 104233 - RNA, 19 nt, Artificial Sequence
  Description of Artificial Sequence: Synthetic oligonucleotide
guuguuuuguaauaccgua

SEQ ID NO: 104234 - RNA, 19 nt, Artificial Sequence
  Description of Artificial Sequence: Synthetic oligonucleotide
ccauuauaagucccaaucg

SEQ ID NO: 104235 - RNA, 19 nt, Artificial Sequence
  Description of Artificial Sequence: Synthetic oligonucleotide
aagguacuacuauuagaaa

SEQ ID NO: 104236 - RNA, 19 nt, Artificial Sequence
  Description of Artificial Sequence: Synthetic oligonucleotide
agauaauuaccugccacca

SEQ ID NO: 104237 - RNA, 19 nt, Artificial Sequence
  Description of Artificial Sequence: Synthetic oligonucleotide
ucccacaugcaaaacuccu

SEQ ID NO: 104238 - RNA, 19 nt, Artificial Sequence
  Description of Artificial Sequence: Synthetic oligonucleotide
uaucgacaacccuaagaca

SEQ ID NO: 104239 - RNA, 19 nt, Artificial Sequence
  Description of Artificial Sequence: Synthetic oligonucleotide
guuugaucugcgguugugg

SEQ ID NO: 104240 - RNA, 19 nt, Artificial Sequence
  Description of Artificial Sequence: Synthetic oligonucleotide
ugcgguugugguuuuguac

SEQ ID NO: 104241 - RNA, 19 nt, Artificial Sequence
  Description of Artificial Sequence: Synthetic oligonucleotide
aacccuugugguucaccag

SEQ ID NO: 104242 - RNA, 19 nt, Artificial Sequence
  Description of Artificial Sequence: Synthetic oligonucleotide
uugucuacuuuguuugauc

SEQ ID NO: 104243 - RNA, 19 nt, Artificial Sequence
  Description of Artificial Sequence: Synthetic oligonucleotide
cauccauuacucaagacgu

SEQ ID NO: 104244 - RNA, 19 nt, Artificial Sequence
  Description of Artificial Sequence: Synthetic oligonucleotide
gucugaucugcccuuuucc

SEQ ID NO: 104245 - RNA, 19 nt, Artificial Sequence
  Description of Artificial Sequence: Synthetic oligonucleotide
ccaaaucuagcacaagacc

SEQ ID NO: 104246 - RNA, 19 nt, Artificial Sequence
  Description of Artificial Sequence: Synthetic oligonucleotide
gcuacuccaagugugaacc

SEQ ID NO: 104247 - RNA, 19 nt, Artificial Sequence
  Description of Artificial Sequence: Synthetic oligonucleotide
aagacccucuaugaggccu

SEQ ID NO: 104248 - RNA, 19 nt, Artificial Sequence
  Description of Artificial Sequence: Synthetic oligonucleotide
agaauagguggcucuauuu

SEQ ID NO: 104249 - RNA, 19 nt, Artificial Sequence
  Description of Artificial Sequence: Synthetic oligonucleotide
agucccuuggaacacuuaa

SEQ ID NO: 104250 - RNA, 19 nt, Artificial Sequence
  Description of Artificial Sequence: Synthetic oligonucleotide
agcaaacuacuugauaccu

SEQ ID NO: 104251 - RNA, 19 nt, Artificial Sequence
  Description of Artificial Sequence: Synthetic oligonucleotide
cucuuacauaguaucgcac

SEQ ID NO: 104252 - RNA, 19 nt, Artificial Sequence
  Description of Artificial Sequence: Synthetic oligonucleotide
cuaacccacugacaauuag

SEQ ID NO: 104253 - RNA, 19 nt, Artificial Sequence
  Description of Artificial Sequence: Synthetic oligonucleotide
uccucgagucuguacaaac

SEQ ID NO: 104254 - RNA, 19 nt, Artificial Sequence
  Description of Artificial Sequence: Synthetic oligonucleotide
gauuugguguuagcuguag

SEQ ID NO: 104255 - RNA, 19 nt, Artificial Sequence
  Description of Artificial Sequence: Synthetic oligonucleotide
accgauggaccucuggcug

SEQ ID NO: 104256 - RNA, 19 nt, Artificial Sequence
  Description of Artificial Sequence: Synthetic oligonucleotide
ugguaaugacaacaagaua

SEQ ID NO: 104257 - RNA, 19 nt, Artificial Sequence
  Description of Artificial Sequence: Synthetic oligonucleotide
acacuuauugacagccaac

SEQ ID NO: 104258 - RNA, 19 nt, Artificial Sequence
  Description of Artificial Sequence: Synthetic oligonucleotide
ugcuugcuaacaguggcug

SEQ ID NO: 104259 - RNA, 19 nt, Artificial Sequence
  Description of Artificial Sequence: Synthetic oligonucleotide
auaccguaauaaugaguug

SEQ ID NO: 104260 - RNA, 19 nt, Artificial Sequence
  Description of Artificial Sequence: Synthetic oligonucleotide
ucgagucuguacaaacgaa

SEQ ID NO: 104261 - RNA, 19 nt, Artificial Sequence
  Description of Artificial Sequence: Synthetic oligonucleotide
guugcagccauccauuaua

SEQ ID NO: 104262 - RNA, 19 nt, Artificial Sequence
  Description of Artificial Sequence: Synthetic oligonucleotide
uuuguucuaucuagacaau

SEQ ID NO: 104263 - RNA, 19 nt, Artificial Sequence
  Description of Artificial Sequence: Synthetic oligonucleotide
ucccaaucgaguucuuuuc

SEQ ID NO: 104264 - RNA, 19 nt, Artificial Sequence
  Description of Artificial Sequence: Synthetic oligonucleotide
aagcugcuagggcacuaag

SEQ ID NO: 104265 - RNA, 19 nt, Artificial Sequence
  Description of Artificial Sequence: Synthetic oligonucleotide
aacggcgagccaauaaacu

SEQ ID NO: 104266 - RNA, 19 nt, Artificial Sequence
  Description of Artificial Sequence: Synthetic oligonucleotide
acuuggaacaacgcuagau

SEQ ID NO: 104267 - RNA, 19 nt, Artificial Sequence
  Description of Artificial Sequence: Synthetic oligonucleotide
guaucccaaauauuggucu

SEQ ID NO: 104268 - RNA, 19 nt, Artificial Sequence
  Description of Artificial Sequence: Synthetic oligonucleotide
uccagauugcaugauuaaa

SEQ ID NO: 104269 - RNA, 19 nt, Artificial Sequence
  Description of Artificial Sequence: Synthetic oligonucleotide
auauggauguacaguacgu

SEQ ID NO: 104270 - RNA, 19 nt, Artificial Sequence
  Description of Artificial Sequence: Synthetic oligonucleotide
guaauaucgacaacccuaa

SEQ ID NO: 104271 - RNA, 19 nt, Artificial Sequence
  Description of Artificial Sequence: Synthetic oligonucleotide
acuuauugacagccaacaa

SEQ ID NO: 104272 - RNA, 19 nt, Artificial Sequence
  Description of Artificial Sequence: Synthetic oligonucleotide
cucaaugaguaacuaagua

SEQ ID NO: 104273 - RNA, 19 nt, Artificial Sequence
  Description of Artificial Sequence: Synthetic oligonucleotide
cugauuaacuugacaguga

SEQ ID NO: 104274 - RNA, 19 nt, Artificial Sequence
  Description of Artificial Sequence: Synthetic oligonucleotide
cucgagucuguacaaacga

SEQ ID NO: 104275 - RNA, 19 nt, Artificial Sequence
  Description of Artificial Sequence: Synthetic oligonucleotide
uguuugaucugcgguugug

SEQ ID NO: 104276 - RNA, 19 nt, Artificial Sequence
  Description of Artificial Sequence: Synthetic oligonucleotide
acaacauaagguacuacua

SEQ ID NO: 104277 - RNA, 19 nt, Artificial Sequence
  Description of Artificial Sequence: Synthetic oligonucleotide
acauuauaguagacauggg

SEQ ID NO: 104278 - RNA, 19 nt, Artificial Sequence
  Description of Artificial Sequence: Synthetic oligonucleotide
uguuuaccaccuugccagc

SEQ ID NO: 104279 - RNA, 19 nt, Artificial Sequence
  Description of Artificial Sequence: Synthetic oligonucleotide
uaucccaaauauuggucuu

SEQ ID NO: 104280 - RNA, 19 nt, Artificial Sequence
  Description of Artificial Sequence: Synthetic oligonucleotide
accuuauauacuguucuaa

SEQ ID NO: 104281 - RNA, 19 nt, Artificial Sequence
  Description of Artificial Sequence: Synthetic oligonucleotide
uaccuuauauacuguucua

SEQ ID NO: 104282 - RNA, 19 nt, Artificial Sequence
  Description of Artificial Sequence: Synthetic oligonucleotide
acuuacccuacugugaguu

SEQ ID NO: 104283 - RNA, 19 nt, Artificial Sequence
  Description of Artificial Sequence: Synthetic oligonucleotide
ucgacaacccuaagacauc

SEQ ID NO: 104284 - RNA, 19 nt, Artificial Sequence
  Description of Artificial Sequence: Synthetic oligonucleotide
caaucgaguucuuuuccca

SEQ ID NO: 104285 - RNA, 19 nt, Artificial Sequence
  Description of Artificial Sequence: Synthetic oligonucleotide
cauccauaugauuugucua

SEQ ID NO: 104286 - RNA, 19 nt, Artificial Sequence
  Description of Artificial Sequence: Synthetic oligonucleotide
gagccaauaaacucuggau

SEQ ID NO: 104287 - RNA, 19 nt, Artificial Sequence
  Description of Artificial Sequence: Synthetic oligonucleotide
ucccaaauauuggucuugu

SEQ ID NO: 104288 - RNA, 19 nt, Artificial Sequence
  Description of Artificial Sequence: Synthetic oligonucleotide
uuacccuacugugaguuuu

SEQ ID NO: 104289 - RNA, 19 nt, Artificial Sequence
  Description of Artificial Sequence: Synthetic oligonucleotide
gaacggcgagccaauaaac

SEQ ID NO: 104290 - RNA, 19 nt, Artificial Sequence
  Description of Artificial Sequence: Synthetic oligonucleotide
gaagcguaguuuucagucu

SEQ ID NO: 104291 - RNA, 19 nt, Artificial Sequence
  Description of Artificial Sequence: Synthetic oligonucleotide
agauuaauuaugacuuguu

SEQ ID NO: 104292 - RNA, 19 nt, Artificial Sequence
  Description of Artificial Sequence: Synthetic oligonucleotide
cagccuaacccacugacaa

SEQ ID NO: 104293 - RNA, 19 nt, Artificial Sequence
  Description of Artificial Sequence: Synthetic oligonucleotide
ucucugugaccagaaaaua

SEQ ID NO: 104294 - RNA, 19 nt, Artificial Sequence
  Description of Artificial Sequence: Synthetic oligonucleotide
ccaaucgaguucuuuuccc

SEQ ID NO: 104295 - RNA, 19 nt, Artificial Sequence
  Description of Artificial Sequence: Synthetic oligonucleotide
ccucgagucuguacaaacg

SEQ ID NO: 104296 - RNA, 19 nt, Artificial Sequence
  Description of Artificial Sequence: Synthetic oligonucleotide
agaugagaauccaaucaaa

SEQ ID NO: 104297 - RNA, 19 nt, Artificial Sequence
  Description of Artificial Sequence: Synthetic oligonucleotide
cuggaagagcaaaccgaug

SEQ ID NO: 104298 - RNA, 19 nt, Artificial Sequence
  Description of Artificial Sequence: Synthetic oligonucleotide
ugcaugucucaaugaguaa

SEQ ID NO: 104299 - RNA, 19 nt, Artificial Sequence
  Description of Artificial Sequence: Synthetic oligonucleotide
gccauuguaaagaauaaua

SEQ ID NO: 104300 - RNA, 19 nt, Artificial Sequence
  Description of Artificial Sequence: Synthetic oligonucleotide
acauacgccaggguuucug

SEQ ID NO: 104301 - RNA, 19 nt, Artificial Sequence
  Description of Artificial Sequence: Synthetic oligonucleotide
agcaaaccgauggaccucu

SEQ ID NO: 104302 - RNA, 19 nt, Artificial Sequence
  Description of Artificial Sequence: Synthetic oligonucleotide
gagaacggcgagccaauaa

SEQ ID NO: 104303 - RNA, 19 nt, Artificial Sequence
  Description of Artificial Sequence: Synthetic oligonucleotide
acgugguuuuagcauugcu

SEQ ID NO: 104304 - RNA, 19 nt, Artificial Sequence
  Description of Artificial Sequence: Synthetic oligonucleotide
acucggucaauggugagua

SEQ ID NO: 104305 - RNA, 19 nt, Artificial Sequence
  Description of Artificial Sequence: Synthetic oligonucleotide
acaaaccgucugaucugcc

SEQ ID NO: 104306 - RNA, 19 nt, Artificial Sequence
  Description of Artificial Sequence: Synthetic oligonucleotide
guugcuacuccaaguguga

SEQ ID NO: 104307 - RNA, 19 nt, Artificial Sequence
  Description of Artificial Sequence: Synthetic oligonucleotide
ggauuagcguacuauuaaa

SEQ ID NO: 104308 - RNA, 19 nt, Artificial Sequence
  Description of Artificial Sequence: Synthetic oligonucleotide
gauccucgagucuguacaa

SEQ ID NO: 104309 - RNA, 19 nt, Artificial Sequence
  Description of Artificial Sequence: Synthetic oligonucleotide
aaccgucugaucugcccuu

SEQ ID NO: 104310 - RNA, 19 nt, Artificial Sequence
  Description of Artificial Sequence: Synthetic oligonucleotide
ggaacaacgcuagauucca

SEQ ID NO: 104311 - RNA, 19 nt, Artificial Sequence
  Description of Artificial Sequence: Synthetic oligonucleotide
uacuuacccuacugugagu

SEQ ID NO: 104312 - RNA, 19 nt, Artificial Sequence
  Description of Artificial Sequence: Synthetic oligonucleotide
gauggauugugcccaguau

SEQ ID NO: 104313 - RNA, 19 nt, Artificial Sequence
  Description of Artificial Sequence: Synthetic oligonucleotide
caagacgugguuuuagcau

SEQ ID NO: 104314 - RNA, 19 nt, Artificial Sequence
  Description of Artificial Sequence: Synthetic oligonucleotide
guagugcacgaucuguucu

SEQ ID NO: 104315 - RNA, 19 nt, Artificial Sequence
  Description of Artificial Sequence: Synthetic oligonucleotide
aagagaacggcgagccaau

SEQ ID NO: 104316 - RNA, 19 nt, Artificial Sequence
  Description of Artificial Sequence: Synthetic oligonucleotide
gcuugcaacuccccagaag

SEQ ID NO: 104317 - RNA, 19 nt, Artificial Sequence
  Description of Artificial Sequence: Synthetic oligonucleotide
ccaaucuaggagcaucaac

SEQ ID NO: 104318 - RNA, 19 nt, Artificial Sequence
  Description of Artificial Sequence: Synthetic oligonucleotide
guagacagacuuuacuauu

SEQ ID NO: 104319 - RNA, 19 nt, Artificial Sequence
  Description of Artificial Sequence: Synthetic oligonucleotide
cuuggaacaacgcuagauu

SEQ ID NO: 104320 - RNA, 19 nt, Artificial Sequence
  Description of Artificial Sequence: Synthetic oligonucleotide
gugcaaugauacuaccuua

SEQ ID NO: 104321 - RNA, 19 nt, Artificial Sequence
  Description of Artificial Sequence: Synthetic oligonucleotide
caagacccucuaugaggcc

SEQ ID NO: 104322 - RNA, 19 nt, Artificial Sequence
  Description of Artificial Sequence: Synthetic oligonucleotide
aggacauacgccaggguuu

SEQ ID NO: 104323 - RNA, 19 nt, Artificial Sequence
  Description of Artificial Sequence: Synthetic oligonucleotide
guauuucuauuuacuaccu

SEQ ID NO: 104324 - RNA, 19 nt, Artificial Sequence
  Description of Artificial Sequence: Synthetic oligonucleotide
guaacuaaguagacagacu

SEQ ID NO: 104325 - RNA, 19 nt, Artificial Sequence
  Description of Artificial Sequence: Synthetic oligonucleotide
cccaaucgaguucuuuucc

SEQ ID NO: 104326 - RNA, 19 nt, Artificial Sequence
  Description of Artificial Sequence: Synthetic oligonucleotide
cccucuuacauaguaucgc

SEQ ID NO: 104327 - RNA, 19 nt, Artificial Sequence
  Description of Artificial Sequence: Synthetic oligonucleotide
guacaguacgugaauuaaa

SEQ ID NO: 104328 - RNA, 19 nt, Artificial Sequence
  Description of Artificial Sequence: Synthetic oligonucleotide
agagaucaagucaguaaua

SEQ ID NO: 104329 - RNA, 19 nt, Artificial Sequence
  Description of Artificial Sequence: Synthetic oligonucleotide
ugaucacuugcagccuaac

SEQ ID NO: 104330 - RNA, 19 nt, Artificial Sequence
  Description of Artificial Sequence: Synthetic oligonucleotide
agaguaccaugcauggaaa

SEQ ID NO: 104331 - RNA, 19 nt, Artificial Sequence
  Description of Artificial Sequence: Synthetic oligonucleotide
gcuacauuucaauuacagu

SEQ ID NO: 104332 - RNA, 19 nt, Artificial Sequence
  Description of Artificial Sequence: Synthetic oligonucleotide
auccauuacucaagacgug

SEQ ID NO: 104333 - RNA, 19 nt, Artificial Sequence
  Description of Artificial Sequence: Synthetic oligonucleotide
gauguacaguacgugaauu

SEQ ID NO: 104334 - RNA, 19 nt, Artificial Sequence
  Description of Artificial Sequence: Synthetic oligonucleotide
guggcucuauuuacuuacc

SEQ ID NO: 104335 - RNA, 19 nt, Artificial Sequence
  Description of Artificial Sequence: Synthetic oligonucleotide
cuccagauugcaugauuaa

SEQ ID NO: 104336 - RNA, 19 nt, Artificial Sequence
  Description of Artificial Sequence: Synthetic oligonucleotide
ggcucuauuuacuuacccu

SEQ ID NO: 104337 - RNA, 19 nt, Artificial Sequence
  Description of Artificial Sequence: Synthetic oligonucleotide
augcuugcuaacaguggcu

SEQ ID NO: 104338 - RNA, 19 nt, Artificial Sequence
  Description of Artificial Sequence: Synthetic oligonucleotide
guaucgcacaccagcucug

SEQ ID NO: 104339 - RNA, 19 nt, Artificial Sequence
  Description of Artificial Sequence: Synthetic oligonucleotide
uuaagcugcuagggcacua

SEQ ID NO: 104340 - RNA, 19 nt, Artificial Sequence
  Description of Artificial Sequence: Synthetic oligonucleotide
agacacuuauugacagcca

SEQ ID NO: 104341 - RNA, 19 nt, Artificial Sequence
  Description of Artificial Sequence: Synthetic oligonucleotide
gacaacccuaagacaucac

SEQ ID NO: 104342 - RNA, 19 nt, Artificial Sequence
  Description of Artificial Sequence: Synthetic oligonucleotide
agcccuguuccccuuugua

SEQ ID NO: 104343 - RNA, 19 nt, Artificial Sequence
  Description of Artificial Sequence: Synthetic oligonucleotide
agcguacuauuaaaacuuu

SEQ ID NO: 104344 - RNA, 19 nt, Artificial Sequence
  Description of Artificial Sequence: Synthetic oligonucleotide
gugcccaguaucccaaaua

SEQ ID NO: 104345 - RNA, 19 nt, Artificial Sequence
  Description of Artificial Sequence: Synthetic oligonucleotide
cauccauuauaagucccaa

SEQ ID NO: 104346 - RNA, 19 nt, Artificial Sequence
  Description of Artificial Sequence: Synthetic oligonucleotide
ggauugugcccaguauccc

SEQ ID NO: 104347 - RNA, 19 nt, Artificial Sequence
  Description of Artificial Sequence: Synthetic oligonucleotide
cugcucguaggccgccgcc

SEQ ID NO: 104348 - RNA, 19 nt, Artificial Sequence
  Description of Artificial Sequence: Synthetic oligonucleotide
cucggucaauggugaguac

SEQ ID NO: 104349 - RNA, 19 nt, Artificial Sequence
  Description of Artificial Sequence: Synthetic oligonucleotide
cacugacaauuaguucuug

SEQ ID NO: 104350 - RNA, 19 nt, Artificial Sequence
  Description of Artificial Sequence: Synthetic oligonucleotide
agcguaguuuucagucugu

SEQ ID NO: 104351 - RNA, 19 nt, Artificial Sequence
  Description of Artificial Sequence: Synthetic oligonucleotide
acuugcagccuaacccacu

SEQ ID NO: 104352 - RNA, 19 nt, Artificial Sequence
  Description of Artificial Sequence: Synthetic oligonucleotide
caacgcuagauuccauucu

SEQ ID NO: 104353 - RNA, 19 nt, Artificial Sequence
  Description of Artificial Sequence: Synthetic oligonucleotide
gacugauuuuaagcuacau

SEQ ID NO: 104354 - RNA, 19 nt, Artificial Sequence
  Description of Artificial Sequence: Synthetic oligonucleotide
ccguaauaaugaguugcag

SEQ ID NO: 104355 - RNA, 19 nt, Artificial Sequence
  Description of Artificial Sequence: Synthetic oligonucleotide
agucccaaucgaguucuuu

SEQ ID NO: 104356 - RNA, 19 nt, Artificial Sequence
  Description of Artificial Sequence: Synthetic oligonucleotide
cauuacucaagacgugguu

SEQ ID NO: 104357 - RNA, 19 nt, Artificial Sequence
  Description of Artificial Sequence: Synthetic oligonucleotide
ggacaacauaagguacuac

SEQ ID NO: 104358 - RNA, 19 nt, Artificial Sequence
  Description of Artificial Sequence: Synthetic oligonucleotide
gauggaccucuggcugagc

SEQ ID NO: 104359 - RNA, 19 nt, Artificial Sequence
  Description of Artificial Sequence: Synthetic oligonucleotide
ccuuauauacuguucuaau

SEQ ID NO: 104360 - RNA, 19 nt, Artificial Sequence
  Description of Artificial Sequence: Synthetic oligonucleotide
cugcggaaaacuccuuccu

SEQ ID NO: 104361 - RNA, 19 nt, Artificial Sequence
  Description of Artificial Sequence: Synthetic oligonucleotide
caguugcuacuccaagugu

SEQ ID NO: 104362 - RNA, 19 nt, Artificial Sequence
  Description of Artificial Sequence: Synthetic oligonucleotide
cagaauagguggcucuauu

SEQ ID NO: 104363 - RNA, 19 nt, Artificial Sequence
  Description of Artificial Sequence: Synthetic oligonucleotide
agagaacggcgagccaaua

SEQ ID NO: 104364 - RNA, 19 nt, Artificial Sequence
  Description of Artificial Sequence: Synthetic oligonucleotide
cuagggcacuaagcagcuc

SEQ ID NO: 104365 - RNA, 19 nt, Artificial Sequence
  Description of Artificial Sequence: Synthetic oligonucleotide
cacucggucaauggugagu

SEQ ID NO: 104366 - RNA, 19 nt, Artificial Sequence
  Description of Artificial Sequence: Synthetic oligonucleotide
cuuacccuacugugaguuu

SEQ ID NO: 104367 - RNA, 19 nt, Artificial Sequence
  Description of Artificial Sequence: Synthetic oligonucleotide
accgucugaucugcccuuu

SEQ ID NO: 104368 - RNA, 19 nt, Artificial Sequence
  Description of Artificial Sequence: Synthetic oligonucleotide
gaacaacgcuagauuccau

SEQ ID NO: 104369 - RNA, 19 nt, Artificial Sequence
  Description of Artificial Sequence: Synthetic oligonucleotide
ccgauggaccucuggcuga

SEQ ID NO: 104370 - RNA, 19 nt, Artificial Sequence
  Description of Artificial Sequence: Synthetic oligonucleotide
ccuaacccacugacaauua

SEQ ID NO: 104371 - RNA, 19 nt, Artificial Sequence
  Description of Artificial Sequence: Synthetic oligonucleotide
cgacaacccuaagacauca

SEQ ID NO: 104372 - RNA, 19 nt, Artificial Sequence
  Description of Artificial Sequence: Synthetic oligonucleotide
gaucugcgguugugguuuu

SEQ ID NO: 104373 - RNA, 19 nt, Artificial Sequence
  Description of Artificial Sequence: Synthetic oligonucleotide
gacauacgccaggguuucu

SEQ ID NO: 104374 - RNA, 19 nt, Artificial Sequence
  Description of Artificial Sequence: Synthetic oligonucleotide
cccguuccauacaaaccgu

SEQ ID NO: 104375 - RNA, 19 nt, Artificial Sequence
  Description of Artificial Sequence: Synthetic oligonucleotide
cagauggauugugcccagu

SEQ ID NO: 104376 - RNA, 19 nt, Artificial Sequence
  Description of Artificial Sequence: Synthetic oligonucleotide
ccaagccgcuuuccacaaa

SEQ ID NO: 104377 - RNA, 19 nt, Artificial Sequence
  Description of Artificial Sequence: Synthetic oligonucleotide
gcguggccuucagaaucaa

SEQ ID NO: 104378 - RNA, 19 nt, Artificial Sequence
  Description of Artificial Sequence: Synthetic oligonucleotide
ccgucugaucugcccuuuu

SEQ ID NO: 104379 - RNA, 19 nt, Artificial Sequence
  Description of Artificial Sequence: Synthetic oligonucleotide
ucgagugucaccuugauca

SEQ ID NO: 104380 - RNA, 19 nt, Artificial Sequence
  Description of Artificial Sequence: Synthetic oligonucleotide
uaaacuuaggcgcaggucu

SEQ ID NO: 104381 - RNA, 19 nt, Artificial Sequence
  Description of Artificial Sequence: Synthetic oligonucleotide
uguagaaaaggguucugcg

SEQ ID NO: 104382 - RNA, 19 nt, Artificial Sequence
  Description of Artificial Sequence: Synthetic oligonucleotide
aaaagugcauuggugggcc

SEQ ID NO: 104383 - RNA, 19 nt, Artificial Sequence
  Description of Artificial Sequence: Synthetic oligonucleotide
uuuccuugaacguuuagca

SEQ ID NO: 104384 - RNA, 19 nt, Artificial Sequence
  Description of Artificial Sequence: Synthetic oligonucleotide
ucuaucaagguuuccaugu

SEQ ID NO: 104385 - RNA, 19 nt, Artificial Sequence
  Description of Artificial Sequence: Synthetic oligonucleotide
ugaaaagugcauugguggg

SEQ ID NO: 104386 - RNA, 19 nt, Artificial Sequence
  Description of Artificial Sequence: Synthetic oligonucleotide
ucgucgucaacucugcugg

SEQ ID NO: 104387 - RNA, 19 nt, Artificial Sequence
  Description of Artificial Sequence: Synthetic oligonucleotide
uuuauuaaccgugaggcgu

SEQ ID NO: 104388 - RNA, 19 nt, Artificial Sequence
  Description of Artificial Sequence: Synthetic oligonucleotide
ucucaguggacugugaccg

SEQ ID NO: 104389 - RNA, 19 nt, Artificial Sequence
  Description of Artificial Sequence: Synthetic oligonucleotide
cugcauaugaucaccagcc

SEQ ID NO: 104390 - RNA, 19 nt, Artificial Sequence
  Description of Artificial Sequence: Synthetic oligonucleotide
uaaaguuagaaaaguggcu

SEQ ID NO: 104391 - RNA, 19 nt, Artificial Sequence
  Description of Artificial Sequence: Synthetic oligonucleotide
uccuugaacguuuagcacc

SEQ ID NO: 104392 - RNA, 19 nt, Artificial Sequence
  Description of Artificial Sequence: Synthetic oligonucleotide
ucuguauguguagaaaagg

SEQ ID NO: 104393 - RNA, 19 nt, Artificial Sequence
  Description of Artificial Sequence: Synthetic oligonucleotide
cagauggcaacgaaaaggg

SEQ ID NO: 104394 - RNA, 19 nt, Artificial Sequence
  Description of Artificial Sequence: Synthetic oligonucleotide
aacgugaguggguagaagu

SEQ ID NO: 104395 - RNA, 19 nt, Artificial Sequence
  Description of Artificial Sequence: Synthetic oligonucleotide
ucuacguucacaucagaga

SEQ ID NO: 104396 - RNA, 19 nt, Artificial Sequence
  Description of Artificial Sequence: Synthetic oligonucleotide
uuuuaguugcuaaggcuag

SEQ ID NO: 104397 - RNA, 19 nt, Artificial Sequence
  Description of Artificial Sequence: Synthetic oligonucleotide
aaagccuggcccuauuaag

SEQ ID NO: 104398 - RNA, 19 nt, Artificial Sequence
  Description of Artificial Sequence: Synthetic oligonucleotide
agcuagaugaaauucuucu

SEQ ID NO: 104399 - RNA, 19 nt, Artificial Sequence
  Description of Artificial Sequence: Synthetic oligonucleotide
uagaaaaggguucugcggu

SEQ ID NO: 104400 - RNA, 19 nt, Artificial Sequence
  Description of Artificial Sequence: Synthetic oligonucleotide
uguuauaaaaggcggugcu

SEQ ID NO: 104401 - RNA, 19 nt, Artificial Sequence
  Description of Artificial Sequence: Synthetic oligonucleotide
guagaaaaggguucugcgg

SEQ ID NO: 104402 - RNA, 19 nt, Artificial Sequence
  Description of Artificial Sequence: Synthetic oligonucleotide
agcaccguguaguugaagg

SEQ ID NO: 104403 - RNA, 19 nt, Artificial Sequence
  Description of Artificial Sequence: Synthetic oligonucleotide
uagaaaaguggcuacugug

SEQ ID NO: 104404 - RNA, 19 nt, Artificial Sequence
  Description of Artificial Sequence: Synthetic oligonucleotide
ugugauggcucucagugga

SEQ ID NO: 104405 - RNA, 19 nt, Artificial Sequence
  Description of Artificial Sequence: Synthetic oligonucleotide
uugaccaauggcauguuga

SEQ ID NO: 104406 - RNA, 19 nt, Artificial Sequence
  Description of Artificial Sequence: Synthetic oligonucleotide
caugcuaccggccacuucc

SEQ ID NO: 104407 - RNA, 19 nt, Artificial Sequence
  Description of Artificial Sequence: Synthetic oligonucleotide
uauccgaaacaccugguca

SEQ ID NO: 104408 - RNA, 19 nt, Artificial Sequence
  Description of Artificial Sequence: Synthetic oligonucleotide
uguauugcaaaagucuuga

SEQ ID NO: 104409 - RNA, 19 nt, Artificial Sequence
  Description of Artificial Sequence: Synthetic oligonucleotide
ucauuaaaguuagaaaagu

SEQ ID NO: 104410 - RNA, 19 nt, Artificial Sequence
  Description of Artificial Sequence: Synthetic oligonucleotide
guagagucgaucaaguaag

SEQ ID NO: 104411 - RNA, 19 nt, Artificial Sequence
  Description of Artificial Sequence: Synthetic oligonucleotide
uuaaccgugaggcguaucu

SEQ ID NO: 104412 - RNA, 19 nt, Artificial Sequence
  Description of Artificial Sequence: Synthetic oligonucleotide
caaaguauauuccucgcug

SEQ ID NO: 104413 - RNA, 19 nt, Artificial Sequence
  Description of Artificial Sequence: Synthetic oligonucleotide
aacccuacugauaaacagg

SEQ ID NO: 104414 - RNA, 19 nt, Artificial Sequence
  Description of Artificial Sequence: Synthetic oligonucleotide
cuugaucacgaugagacag

SEQ ID NO: 104415 - RNA, 19 nt, Artificial Sequence
  Description of Artificial Sequence: Synthetic oligonucleotide
gacaucgcaggcuugcucc

SEQ ID NO: 104416 - RNA, 19 nt, Artificial Sequence
  Description of Artificial Sequence: Synthetic oligonucleotide
auuguuauaaaaggcggug

SEQ ID NO: 104417 - RNA, 19 nt, Artificial Sequence
  Description of Artificial Sequence: Synthetic oligonucleotide
aacuggacaccuccgagcu

SEQ ID NO: 104418 - RNA, 19 nt, Artificial Sequence
  Description of Artificial Sequence: Synthetic oligonucleotide
cuuuauuaaccgugaggcg

SEQ ID NO: 104419 - RNA, 19 nt, Artificial Sequence
  Description of Artificial Sequence: Synthetic oligonucleotide
gaaagguggaaugugcgcc

SEQ ID NO: 104420 - RNA, 19 nt, Artificial Sequence
  Description of Artificial Sequence: Synthetic oligonucleotide
aucaagguuuccauguagc

SEQ ID NO: 104421 - RNA, 19 nt, Artificial Sequence
  Description of Artificial Sequence: Synthetic oligonucleotide
uuacccucauagaaaagcu

SEQ ID NO: 104422 - RNA, 19 nt, Artificial Sequence
  Description of Artificial Sequence: Synthetic oligonucleotide
gguauaguugaugauagcc

SEQ ID NO: 104423 - RNA, 19 nt, Artificial Sequence
  Description of Artificial Sequence: Synthetic oligonucleotide
acguauccgaaacaccugg

SEQ ID NO: 104424 - RNA, 19 nt, Artificial Sequence
  Description of Artificial Sequence: Synthetic oligonucleotide
uuggguggcgcuaucaacu

SEQ ID NO: 104425 - RNA, 19 nt, Artificial Sequence
  Description of Artificial Sequence: Synthetic oligonucleotide
aggaacugaacacuccaag

SEQ ID NO: 104426 - RNA, 19 nt, Artificial Sequence
  Description of Artificial Sequence: Synthetic oligonucleotide
guauauuccucgcugcuug

SEQ ID NO: 104427 - RNA, 19 nt, Artificial Sequence
  Description of Artificial Sequence: Synthetic oligonucleotide
gaaugugcgccugagauca

SEQ ID NO: 104428 - RNA, 19 nt, Artificial Sequence
  Description of Artificial Sequence: Synthetic oligonucleotide
uuaggcgcaggucuagcag

SEQ ID NO: 104429 - RNA, 19 nt, Artificial Sequence
  Description of Artificial Sequence: Synthetic oligonucleotide
ggcgcuaucaacucucugg

SEQ ID NO: 104430 - RNA, 19 nt, Artificial Sequence
  Description of Artificial Sequence: Synthetic oligonucleotide
aaaaggacugagcugcaua

SEQ ID NO: 104431 - RNA, 19 nt, Artificial Sequence
  Description of Artificial Sequence: Synthetic oligonucleotide
cuaugcauucgcuaagcac

SEQ ID NO: 104432 - RNA, 19 nt, Artificial Sequence
  Description of Artificial Sequence: Synthetic oligonucleotide
uauucaaugugaccaccac

SEQ ID NO: 104433 - RNA, 19 nt, Artificial Sequence
  Description of Artificial Sequence: Synthetic oligonucleotide
acuguggucggugagcaac

SEQ ID NO: 104434 - RNA, 19 nt, Artificial Sequence
  Description of Artificial Sequence: Synthetic oligonucleotide
auccgaaacaccuggucag

SEQ ID NO: 104435 - RNA, 19 nt, Artificial Sequence
  Description of Artificial Sequence: Synthetic oligonucleotide
cucggcaggguaaugcucg

SEQ ID NO: 104436 - RNA, 19 nt, Artificial Sequence
  Description of Artificial Sequence: Synthetic oligonucleotide
auucgcuaagcacuuucuc

SEQ ID NO: 104437 - RNA, 19 nt, Artificial Sequence
  Description of Artificial Sequence: Synthetic oligonucleotide
aaagugcauuggugggccc

SEQ ID NO: 104438 - RNA, 19 nt, Artificial Sequence
  Description of Artificial Sequence: Synthetic oligonucleotide
aaugcucguagagucgauc

SEQ ID NO: 104439 - RNA, 19 nt, Artificial Sequence
  Description of Artificial Sequence: Synthetic oligonucleotide
uugaucacgaugagacagc

SEQ ID NO: 104440 - RNA, 19 nt, Artificial Sequence
  Description of Artificial Sequence: Synthetic oligonucleotide
agguauaguugaugauagc

SEQ ID NO: 104441 - RNA, 19 nt, Artificial Sequence
  Description of Artificial Sequence: Synthetic oligonucleotide
guuuagcacccuuucuacg

SEQ ID NO: 104442 - RNA, 19 nt, Artificial Sequence
  Description of Artificial Sequence: Synthetic oligonucleotide
uagagucgaucaaguaagg

SEQ ID NO: 104443 - RNA, 19 nt, Artificial Sequence
  Description of Artificial Sequence: Synthetic oligonucleotide
ucaacauuucgcagaggcu

SEQ ID NO: 104444 - RNA, 19 nt, Artificial Sequence
  Description of Artificial Sequence: Synthetic oligonucleotide
gaaaaggguucugcggugg

SEQ ID NO: 104445 - RNA, 19 nt, Artificial Sequence
  Description of Artificial Sequence: Synthetic oligonucleotide
uuauuaaccgugaggcgua

SEQ ID NO: 104446 - RNA, 19 nt, Artificial Sequence
  Description of Artificial Sequence: Synthetic oligonucleotide
cuguauugcaaaagucuug

SEQ ID NO: 104447 - RNA, 19 nt, Artificial Sequence
  Description of Artificial Sequence: Synthetic oligonucleotide
accaauacugccaucgucu

SEQ ID NO: 104448 - RNA, 19 nt, Artificial Sequence
  Description of Artificial Sequence: Synthetic oligonucleotide
acaccuggucagcauacgg

SEQ ID NO: 104449 - RNA, 19 nt, Artificial Sequence
  Description of Artificial Sequence: Synthetic oligonucleotide
ucgggagccagguauuuca

SEQ ID NO: 104450 - RNA, 19 nt, Artificial Sequence
  Description of Artificial Sequence: Synthetic oligonucleotide
uccauugcacggaauguuc

SEQ ID NO: 104451 - RNA, 19 nt, Artificial Sequence
  Description of Artificial Sequence: Synthetic oligonucleotide
gauucuguugcaaguuagc

SEQ ID NO: 104452 - RNA, 19 nt, Artificial Sequence
  Description of Artificial Sequence: Synthetic oligonucleotide
uccgacaugggaacucggc

SEQ ID NO: 104453 - RNA, 19 nt, Artificial Sequence
  Description of Artificial Sequence: Synthetic oligonucleotide
uaaaaggcggugcuauuuu

SEQ ID NO: 104454 - RNA, 19 nt, Artificial Sequence
  Description of Artificial Sequence: Synthetic oligonucleotide
gauccgacaugggaacucg

SEQ ID NO: 104455 - RNA, 19 nt, Artificial Sequence
  Description of Artificial Sequence: Synthetic oligonucleotide
gaacguuuagcacccuuuc

SEQ ID NO: 104456 - RNA, 19 nt, Artificial Sequence
  Description of Artificial Sequence: Synthetic oligonucleotide
ucaugggagcgguaguucu

SEQ ID NO: 104457 - RNA, 19 nt, Artificial Sequence
  Description of Artificial Sequence: Synthetic oligonucleotide
accuuuuacacaaaguaua

SEQ ID NO: 104458 - RNA, 19 nt, Artificial Sequence
  Description of Artificial Sequence: Synthetic oligonucleotide
uggucucacacuccauggc

SEQ ID NO: 104459 - RNA, 19 nt, Artificial Sequence
  Description of Artificial Sequence: Synthetic oligonucleotide
cucgaacucccuccuaugc

SEQ ID NO: 104460 - RNA, 19 nt, Artificial Sequence
  Description of Artificial Sequence: Synthetic oligonucleotide
uguuggccgacucugcgau

SEQ ID NO: 104461 - RNA, 19 nt, Artificial Sequence
  Description of Artificial Sequence: Synthetic oligonucleotide
ugggaaugugcugaaguac

SEQ ID NO: 104462 - RNA, 19 nt, Artificial Sequence
  Description of Artificial Sequence: Synthetic oligonucleotide
gucgucgucaacucugcug

SEQ ID NO: 104463 - RNA, 19 nt, Artificial Sequence
  Description of Artificial Sequence: Synthetic oligonucleotide
ugaccaauggcauguugau

SEQ ID NO: 104464 - RNA, 19 nt, Artificial Sequence
  Description of Artificial Sequence: Synthetic oligonucleotide
aaccgugaggcguaucuuu

SEQ ID NO: 104465 - RNA, 19 nt, Artificial Sequence
  Description of Artificial Sequence: Synthetic oligonucleotide
acggugaccgacaagucag

SEQ ID NO: 104466 - RNA, 19 nt, Artificial Sequence
  Description of Artificial Sequence: Synthetic oligonucleotide
agcacguauccgaaacacc

SEQ ID NO: 104467 - RNA, 19 nt, Artificial Sequence
  Description of Artificial Sequence: Synthetic oligonucleotide
agugagagcgcggucaaca

SEQ ID NO: 104468 - RNA, 19 nt, Artificial Sequence
  Description of Artificial Sequence: Synthetic oligonucleotide
caacuuuauuaaccgugag

SEQ ID NO: 104469 - RNA, 19 nt, Artificial Sequence
  Description of Artificial Sequence: Synthetic oligonucleotide
aacguugucucugcgucgu

SEQ ID NO: 104470 - RNA, 19 nt, Artificial Sequence
  Description of Artificial Sequence: Synthetic oligonucleotide
aaacgugaguggguagaag

SEQ ID NO: 104471 - RNA, 19 nt, Artificial Sequence
  Description of Artificial Sequence: Synthetic oligonucleotide
auaggcgcggugcucgcuc

SEQ ID NO: 104472 - RNA, 19 nt, Artificial Sequence
  Description of Artificial Sequence: Synthetic oligonucleotide
guguagaaaaggguucugc

SEQ ID NO: 104473 - RNA, 19 nt, Artificial Sequence
  Description of Artificial Sequence: Synthetic oligonucleotide
uacccucauagaaaagcuc

SEQ ID NO: 104474 - RNA, 19 nt, Artificial Sequence
  Description of Artificial Sequence: Synthetic oligonucleotide
gacggugaccgacaaguca

SEQ ID NO: 104475 - RNA, 19 nt, Artificial Sequence
  Description of Artificial Sequence: Synthetic oligonucleotide
ugugcgccugagaucaaac

SEQ ID NO: 104476 - RNA, 19 nt, Artificial Sequence
  Description of Artificial Sequence: Synthetic oligonucleotide
ggggagacgggacugcugg

SEQ ID NO: 104477 - RNA, 19 nt, Artificial Sequence
  Description of Artificial Sequence: Synthetic oligonucleotide
ucuuggguggcgcuaucaa

SEQ ID NO: 104478 - RNA, 19 nt, Artificial Sequence
  Description of Artificial Sequence: Synthetic oligonucleotide
cauugcacggaauguucug

SEQ ID NO: 104479 - RNA, 19 nt, Artificial Sequence
  Description of Artificial Sequence: Synthetic oligonucleotide
guucucgagugucaccuug

SEQ ID NO: 104480 - RNA, 19 nt, Artificial Sequence
  Description of Artificial Sequence: Synthetic oligonucleotide
cuuggguggcgcuaucaac

SEQ ID NO: 104481 - RNA, 19 nt, Artificial Sequence
  Description of Artificial Sequence: Synthetic oligonucleotide
aggcguaucuuuucugcca

SEQ ID NO: 104482 - RNA, 19 nt, Artificial Sequence
  Description of Artificial Sequence: Synthetic oligonucleotide
guauccgaaacaccugguc

SEQ ID NO: 104483 - RNA, 19 nt, Artificial Sequence
  Description of Artificial Sequence: Synthetic oligonucleotide
ggcgucaccacaccaauac

SEQ ID NO: 104484 - RNA, 19 nt, Artificial Sequence
  Description of Artificial Sequence: Synthetic oligonucleotide
aacuuaggcgcaggucuag

SEQ ID NO: 104485 - RNA, 19 nt, Artificial Sequence
  Description of Artificial Sequence: Synthetic oligonucleotide
uguguagaaaaggguucug

SEQ ID NO: 104486 - RNA, 19 nt, Artificial Sequence
  Description of Artificial Sequence: Synthetic oligonucleotide
gcgcuaucaacucucuggg

SEQ ID NO: 104487 - RNA, 19 nt, Artificial Sequence
  Description of Artificial Sequence: Synthetic oligonucleotide
uauauuccucgcugcuugu

SEQ ID NO: 104488 - RNA, 19 nt, Artificial Sequence
  Description of Artificial Sequence: Synthetic oligonucleotide
acuuaggcgcaggucuagc

SEQ ID NO: 104489 - RNA, 19 nt, Artificial Sequence
  Description of Artificial Sequence: Synthetic oligonucleotide
ugaucacgaugagacagcu

SEQ ID NO: 104490 - RNA, 19 nt, Artificial Sequence
  Description of Artificial Sequence: Synthetic oligonucleotide
accacucgauguuucagaa

SEQ ID NO: 104491 - RNA, 19 nt, Artificial Sequence
  Description of Artificial Sequence: Synthetic oligonucleotide
agauaggcgcggugcucgc

SEQ ID NO: 104492 - RNA, 19 nt, Artificial Sequence
  Description of Artificial Sequence: Synthetic oligonucleotide
ccuugaacguuuagcaccc

SEQ ID NO: 104493 - RNA, 19 nt, Artificial Sequence
  Description of Artificial Sequence: Synthetic oligonucleotide
uugcacggaauguucuggu

SEQ ID NO: 104494 - RNA, 19 nt, Artificial Sequence
  Description of Artificial Sequence: Synthetic oligonucleotide
uauaaaaggcggugcuauu

SEQ ID NO: 104495 - RNA, 19 nt, Artificial Sequence
  Description of Artificial Sequence: Synthetic oligonucleotide
uugaacguuuagcacccuu

SEQ ID NO: 104496 - RNA, 19 nt, Artificial Sequence
  Description of Artificial Sequence: Synthetic oligonucleotide
ugagugagagcgcggucaa

SEQ ID NO: 104497 - RNA, 19 nt, Artificial Sequence
  Description of Artificial Sequence: Synthetic oligonucleotide
guaguugaaggaacuggac

SEQ ID NO: 104498 - RNA, 19 nt, Artificial Sequence
  Description of Artificial Sequence: Synthetic oligonucleotide
gagcgcggucaacauuucg

SEQ ID NO: 104499 - RNA, 19 nt, Artificial Sequence
  Description of Artificial Sequence: Synthetic oligonucleotide
acgugaguggguagaaguc

SEQ ID NO: 104500 - RNA, 19 nt, Artificial Sequence
  Description of Artificial Sequence: Synthetic oligonucleotide
guaaugcucguagagucga

SEQ ID NO: 104501 - RNA, 19 nt, Artificial Sequence
  Description of Artificial Sequence: Synthetic oligonucleotide
gugcuaagaaauagaacuc

SEQ ID NO: 104502 - RNA, 19 nt, Artificial Sequence
  Description of Artificial Sequence: Synthetic oligonucleotide
cacguauccgaaacaccug

SEQ ID NO: 104503 - RNA, 19 nt, Artificial Sequence
  Description of Artificial Sequence: Synthetic oligonucleotide
cuccuaugcauucgcuaag

SEQ ID NO: 104504 - RNA, 19 nt, Artificial Sequence
  Description of Artificial Sequence: Synthetic oligonucleotide
agacgggacugcugguggg

SEQ ID NO: 104505 - RNA, 19 nt, Artificial Sequence
  Description of Artificial Sequence: Synthetic oligonucleotide
ugcucguagagucgaucaa

SEQ ID NO: 104506 - RNA, 19 nt, Artificial Sequence
  Description of Artificial Sequence: Synthetic oligonucleotide
agagucgaucaaguaagga

SEQ ID NO: 104507 - RNA, 19 nt, Artificial Sequence
  Description of Artificial Sequence: Synthetic oligonucleotide
acggaauguucugguaggg

SEQ ID NO: 104508 - RNA, 19 nt, Artificial Sequence
  Description of Artificial Sequence: Synthetic oligonucleotide
cugcgaucugcuuguuggg

SEQ ID NO: 104509 - RNA, 19 nt, Artificial Sequence
  Description of Artificial Sequence: Synthetic oligonucleotide
accucgaacucccuccuau

SEQ ID NO: 104510 - RNA, 19 nt, Artificial Sequence
  Description of Artificial Sequence: Synthetic oligonucleotide
agucugaacuugucuguau

SEQ ID NO: 104511 - RNA, 19 nt, Artificial Sequence
  Description of Artificial Sequence: Synthetic oligonucleotide
gucgaucaaguaaggaaac

SEQ ID NO: 104512 - RNA, 19 nt, Artificial Sequence
  Description of Artificial Sequence: Synthetic oligonucleotide
cagcacguauccgaaacac

SEQ ID NO: 104513 - RNA, 19 nt, Artificial Sequence
  Description of Artificial Sequence: Synthetic oligonucleotide
gggacugagugagagcgcg

SEQ ID NO: 104514 - RNA, 19 nt, Artificial Sequence
  Description of Artificial Sequence: Synthetic oligonucleotide
agagcuacgccuccaugua

SEQ ID NO: 104515 - RNA, 19 nt, Artificial Sequence
  Description of Artificial Sequence: Synthetic oligonucleotide
gucuucacccagcgagacg

SEQ ID NO: 104516 - RNA, 19 nt, Artificial Sequence
  Description of Artificial Sequence: Synthetic oligonucleotide
uggcgaguuuccacucugc

SEQ ID NO: 104517 - RNA, 19 nt, Artificial Sequence
  Description of Artificial Sequence: Synthetic oligonucleotide
uguacgcacugugcuaaga

SEQ ID NO: 104518 - RNA, 19 nt, Artificial Sequence
  Description of Artificial Sequence: Synthetic oligonucleotide
auaugaucaccagccaaaa

SEQ ID NO: 104519 - RNA, 19 nt, Artificial Sequence
  Description of Artificial Sequence: Synthetic oligonucleotide
uggcccuauuaagugauuc

SEQ ID NO: 104520 - RNA, 19 nt, Artificial Sequence
  Description of Artificial Sequence: Synthetic oligonucleotide
gcuaucaacucucugggcu

SEQ ID NO: 104521 - RNA, 19 nt, Artificial Sequence
  Description of Artificial Sequence: Synthetic oligonucleotide
ggaccauguacgcacugug

SEQ ID NO: 104522 - RNA, 19 nt, Artificial Sequence
  Description of Artificial Sequence: Synthetic oligonucleotide
ucguagagucgaucaagua

SEQ ID NO: 104523 - RNA, 19 nt, Artificial Sequence
  Description of Artificial Sequence: Synthetic oligonucleotide
gcugaaguacacugggcac

SEQ ID NO: 104524 - RNA, 19 nt, Artificial Sequence
  Description of Artificial Sequence: Synthetic oligonucleotide
guaugggaugcugcccugg

SEQ ID NO: 104525 - RNA, 19 nt, Artificial Sequence
  Description of Artificial Sequence: Synthetic oligonucleotide
acgcacugugcuaagaaau

SEQ ID NO: 104526 - RNA, 19 nt, Artificial Sequence
  Description of Artificial Sequence: Synthetic oligonucleotide
cuuaggcgcaggucuagca

SEQ ID NO: 104527 - RNA, 19 nt, Artificial Sequence
  Description of Artificial Sequence: Synthetic oligonucleotide
ugagagcgcggucaacauu

SEQ ID NO: 104528 - RNA, 19 nt, Artificial Sequence
  Description of Artificial Sequence: Synthetic oligonucleotide
ucaguggacugugaccguc

SEQ ID NO: 104529 - RNA, 19 nt, Artificial Sequence
  Description of Artificial Sequence: Synthetic oligonucleotide
agcauacggcgucaccaca

SEQ ID NO: 104530 - RNA, 19 nt, Artificial Sequence
  Description of Artificial Sequence: Synthetic oligonucleotide
gcgaguuuccacucugccc

SEQ ID NO: 104531 - RNA, 19 nt, Artificial Sequence
  Description of Artificial Sequence: Synthetic oligonucleotide
gagcuacgccuccauguac

SEQ ID NO: 104532 - RNA, 19 nt, Artificial Sequence
  Description of Artificial Sequence: Synthetic oligonucleotide
cuugaaaccuggagaacgu

SEQ ID NO: 104533 - RNA, 19 nt, Artificial Sequence
  Description of Artificial Sequence: Synthetic oligonucleotide
ugcacggaauguucuggua

SEQ ID NO: 104534 - RNA, 19 nt, Artificial Sequence
  Description of Artificial Sequence: Synthetic oligonucleotide
gccaaccauuacaagaccc

SEQ ID NO: 104535 - RNA, 19 nt, Artificial Sequence
  Description of Artificial Sequence: Synthetic oligonucleotide
auacggcgucaccacacca

SEQ ID NO: 104536 - RNA, 19 nt, Artificial Sequence
  Description of Artificial Sequence: Synthetic oligonucleotide
aaacuuaggcgcaggucua

SEQ ID NO: 104537 - RNA, 19 nt, Artificial Sequence
  Description of Artificial Sequence: Synthetic oligonucleotide
auuaaccgugaggcguauc

SEQ ID NO: 104538 - RNA, 19 nt, Artificial Sequence
  Description of Artificial Sequence: Synthetic oligonucleotide
cugccuugaggagugcuug

SEQ ID NO: 104539 - RNA, 19 nt, Artificial Sequence
  Description of Artificial Sequence: Synthetic oligonucleotide
auguacgcacugugcuaag

SEQ ID NO: 104540 - RNA, 19 nt, Artificial Sequence
  Description of Artificial Sequence: Synthetic oligonucleotide
uggcgcuaucaacucucug

SEQ ID NO: 104541 - RNA, 19 nt, Artificial Sequence
  Description of Artificial Sequence: Synthetic oligonucleotide
uggguggcgcuaucaacuc

SEQ ID NO: 104542 - RNA, 19 nt, Artificial Sequence
  Description of Artificial Sequence: Synthetic oligonucleotide
uacaagggccgaccagguc

SEQ ID NO: 104543 - RNA, 19 nt, Artificial Sequence
  Description of Artificial Sequence: Synthetic oligonucleotide
ggcguaucuuuucugccac

SEQ ID NO: 104544 - RNA, 19 nt, Artificial Sequence
  Description of Artificial Sequence: Synthetic oligonucleotide
aucgcaggcuugcucccug

SEQ ID NO: 104545 - RNA, 19 nt, Artificial Sequence
  Description of Artificial Sequence: Synthetic oligonucleotide
ggcgaguuuccacucugcc

SEQ ID NO: 104546 - RNA, 19 nt, Artificial Sequence
  Description of Artificial Sequence: Synthetic oligonucleotide
gcucguagagucgaucaag

SEQ ID NO: 104547 - RNA, 19 nt, Artificial Sequence
  Description of Artificial Sequence: Synthetic oligonucleotide
uaaugcucguagagucgau

SEQ ID NO: 104548 - RNA, 19 nt, Artificial Sequence
  Description of Artificial Sequence: Synthetic oligonucleotide
gcggucaacauuucgcaga

SEQ ID NO: 104549 - RNA, 19 nt, Artificial Sequence
  Description of Artificial Sequence: Synthetic oligonucleotide
agggaggacauuacuugcu

SEQ ID NO: 104550 - RNA, 19 nt, Artificial Sequence
  Description of Artificial Sequence: Synthetic oligonucleotide
ucccuccuaugcauucgcu

SEQ ID NO: 104551 - RNA, 19 nt, Artificial Sequence
  Description of Artificial Sequence: Synthetic oligonucleotide
agcccggggucacuugaag

SEQ ID NO: 104552 - RNA, 19 nt, Artificial Sequence
  Description of Artificial Sequence: Synthetic oligonucleotide
ggaaugugcgccugagauc

SEQ ID NO: 104553 - RNA, 19 nt, Artificial Sequence
  Description of Artificial Sequence: Synthetic oligonucleotide
cagagcuacgccuccaugu

SEQ ID NO: 104554 - RNA, 19 nt, Artificial Sequence
  Description of Artificial Sequence: Synthetic oligonucleotide
gcauucgcuaagcacuuuc

SEQ ID NO: 104555 - RNA, 19 nt, Artificial Sequence
  Description of Artificial Sequence: Synthetic oligonucleotide
ggcauaauggucucacacu

SEQ ID NO: 104556 - RNA, 19 nt, Artificial Sequence
  Description of Artificial Sequence: Synthetic oligonucleotide
ggaggauccgacaugggaa

SEQ ID NO: 104557 - RNA, 19 nt, Artificial Sequence
  Description of Artificial Sequence: Synthetic oligonucleotide
gagagcgcggucaacauuu

SEQ ID NO: 104558 - RNA, 19 nt, Artificial Sequence
  Description of Artificial Sequence: Synthetic oligonucleotide
cucguagagucgaucaagu

SEQ ID NO: 104559 - RNA, 19 nt, Artificial Sequence
  Description of Artificial Sequence: Synthetic oligonucleotide
cguuuagcacccuuucuac

SEQ ID NO: 104560 - RNA, 19 nt, Artificial Sequence
  Description of Artificial Sequence: Synthetic oligonucleotide
uugaaaccuggagaacguu

SEQ ID NO: 104561 - RNA, 19 nt, Artificial Sequence
  Description of Artificial Sequence: Synthetic oligonucleotide
cucaugggagcgguaguuc

SEQ ID NO: 104562 - RNA, 19 nt, Artificial Sequence
  Description of Artificial Sequence: Synthetic oligonucleotide
accgacaagucagggugug

SEQ ID NO: 104563 - RNA, 19 nt, Artificial Sequence
  Description of Artificial Sequence: Synthetic oligonucleotide
cuaucaagguuuccaugua

SEQ ID NO: 104564 - RNA, 19 nt, Artificial Sequence
  Description of Artificial Sequence: Synthetic oligonucleotide
agacggugaccgacaaguc

SEQ ID NO: 104565 - RNA, 19 nt, Artificial Sequence
  Description of Artificial Sequence: Synthetic oligonucleotide
cguagagucgaucaaguaa

SEQ ID NO: 104566 - RNA, 19 nt, Artificial Sequence
  Description of Artificial Sequence: Synthetic oligonucleotide
ugggccccgcugaaaugca

SEQ ID NO: 104567 - RNA, 19 nt, Artificial Sequence
  Description of Artificial Sequence: Synthetic oligonucleotide
gucuugaaaccuggagaac

SEQ ID NO: 104568 - RNA, 19 nt, Artificial Sequence
  Description of Artificial Sequence: Synthetic oligonucleotide
agcuaguucucgaguguca

SEQ ID NO: 104569 - RNA, 19 nt, Artificial Sequence
  Description of Artificial Sequence: Synthetic oligonucleotide
cauucgcuaagcacuuucu

SEQ ID NO: 104570 - RNA, 19 nt, Artificial Sequence
  Description of Artificial Sequence: Synthetic oligonucleotide
guagccgugccugcugcug

SEQ ID NO: 104571 - RNA, 19 nt, Artificial Sequence
  Description of Artificial Sequence: Synthetic oligonucleotide
ggaugcacaacugggugga

SEQ ID NO: 104572 - RNA, 19 nt, Artificial Sequence
  Description of Artificial Sequence: Synthetic oligonucleotide
ugccaucgucuaacuuccc

SEQ ID NO: 104573 - RNA, 19 nt, Artificial Sequence
  Description of Artificial Sequence: Synthetic oligonucleotide
gcuaguucucgagugucac

SEQ ID NO: 104574 - RNA, 19 nt, Artificial Sequence
  Description of Artificial Sequence: Synthetic oligonucleotide
uauuaaccgugaggcguau

SEQ ID NO: 104575 - RNA, 19 nt, Artificial Sequence
  Description of Artificial Sequence: Synthetic oligonucleotide
cuguuggccgacucugcga

SEQ ID NO: 104576 - RNA, 19 nt, Artificial Sequence
  Description of Artificial Sequence: Synthetic oligonucleotide
cuaccggccacuuccuucu

SEQ ID NO: 104577 - RNA, 19 nt, Artificial Sequence
  Description of Artificial Sequence: Synthetic oligonucleotide
acucgauguuucagaacgu

SEQ ID NO: 104578 - RNA, 19 nt, Artificial Sequence
  Description of Artificial Sequence: Synthetic oligonucleotide
ucggcaggguaaugcucgu

SEQ ID NO: 104579 - RNA, 19 nt, Artificial Sequence
  Description of Artificial Sequence: Synthetic oligonucleotide
uaaccgugaggcguaucuu

SEQ ID NO: 104580 - RNA, 19 nt, Artificial Sequence
  Description of Artificial Sequence: Synthetic oligonucleotide
gcacguauccgaaacaccu

SEQ ID NO: 104581 - RNA, 19 nt, Artificial Sequence
  Description of Artificial Sequence: Synthetic oligonucleotide
acauuucgcagaggcugca

SEQ ID NO: 104582 - RNA, 19 nt, Artificial Sequence
  Description of Artificial Sequence: Synthetic oligonucleotide
auccgacaugggaacucgg

SEQ ID NO: 104583 - RNA, 19 nt, Artificial Sequence
  Description of Artificial Sequence: Synthetic oligonucleotide
caguggacugugaccguca

SEQ ID NO: 104584 - RNA, 19 nt, Artificial Sequence
  Description of Artificial Sequence: Synthetic oligonucleotide
agcgagacggugaccgaca

SEQ ID NO: 104585 - RNA, 19 nt, Artificial Sequence
  Description of Artificial Sequence: Synthetic oligonucleotide
auaggacaucgcaggcuug

SEQ ID NO: 104586 - RNA, 19 nt, Artificial Sequence
  Description of Artificial Sequence: Synthetic oligonucleotide
aggauccgacaugggaacu

SEQ ID NO: 104587 - RNA, 19 nt, Artificial Sequence
  Description of Artificial Sequence: Synthetic oligonucleotide
agagcgcggucaacauuuc

SEQ ID NO: 104588 - RNA, 19 nt, Artificial Sequence
  Description of Artificial Sequence: Synthetic oligonucleotide
gcauacggcgucaccacac

SEQ ID NO: 104589 - RNA, 19 nt, Artificial Sequence
  Description of Artificial Sequence: Synthetic oligonucleotide
gaugcacaacuggguggac

SEQ ID NO: 104590 - RNA, 19 nt, Artificial Sequence
  Description of Artificial Sequence: Synthetic oligonucleotide
cucugcgucgucgucaacu

SEQ ID NO: 104591 - RNA, 19 nt, Artificial Sequence
  Description of Artificial Sequence: Synthetic oligonucleotide
gcuaaggcuagaggcauaa

SEQ ID NO: 104592 - RNA, 19 nt, Artificial Sequence
  Description of Artificial Sequence: Synthetic oligonucleotide
gacagcgggucgcugcccu

SEQ ID NO: 104593 - RNA, 19 nt, Artificial Sequence
  Description of Artificial Sequence: Synthetic oligonucleotide
guauugcaaaagucuugau

SEQ ID NO: 104594 - RNA, 19 nt, Artificial Sequence
  Description of Artificial Sequence: Synthetic oligonucleotide
ggauccgacaugggaacuc

SEQ ID NO: 104595 - RNA, 19 nt, Artificial Sequence
  Description of Artificial Sequence: Synthetic oligonucleotide
gcggaaaugccaaccauua

SEQ ID NO: 104596 - RNA, 19 nt, Artificial Sequence
  Description of Artificial Sequence: Synthetic oligonucleotide
ugcuaccggccacuuccuu

SEQ ID NO: 104597 - RNA, 19 nt, Artificial Sequence
  Description of Artificial Sequence: Synthetic oligonucleotide
ggaaagccuggcccuauua

SEQ ID NO: 104598 - RNA, 19 nt, Artificial Sequence
  Description of Artificial Sequence: Synthetic oligonucleotide
cacgaugagacagcucucu

SEQ ID NO: 104599 - RNA, 19 nt, Artificial Sequence
  Description of Artificial Sequence: Synthetic oligonucleotide
cguugucucugcgucgucg

SEQ ID NO: 104600 - RNA, 19 nt, Artificial Sequence
  Description of Artificial Sequence: Synthetic oligonucleotide
ggacugagugagagcgcgg

SEQ ID NO: 104601 - RNA, 19 nt, Artificial Sequence
  Description of Artificial Sequence: Synthetic oligonucleotide
cacugugcgagaugacagu

SEQ ID NO: 104602 - RNA, 19 nt, Artificial Sequence
  Description of Artificial Sequence: Synthetic oligonucleotide
ccucgaacucccuccuaug

SEQ ID NO: 104603 - RNA, 19 nt, Artificial Sequence
  Description of Artificial Sequence: Synthetic oligonucleotide
gggccgaccagguccucug

SEQ ID NO: 104604 - RNA, 19 nt, Artificial Sequence
  Description of Artificial Sequence: Synthetic oligonucleotide
gcgggcggaaaugccaacc

SEQ ID NO: 104605 - RNA, 19 nt, Artificial Sequence
  Description of Artificial Sequence: Synthetic oligonucleotide
ccuaugcauucgcuaagca

SEQ ID NO: 104606 - RNA, 19 nt, Artificial Sequence
  Description of Artificial Sequence: Synthetic oligonucleotide
gcgagaugacaguggguga

SEQ ID NO: 104607 - RNA, 19 nt, Artificial Sequence
  Description of Artificial Sequence: Synthetic oligonucleotide
ggacaccuccgagcugucg

SEQ ID NO: 104608 - RNA, 19 nt, Artificial Sequence
  Description of Artificial Sequence: Synthetic oligonucleotide
guuggccgacucugcgauc

SEQ ID NO: 104609 - RNA, 19 nt, Artificial Sequence
  Description of Artificial Sequence: Synthetic oligonucleotide
ugcauucgcuaagcacuuu

SEQ ID NO: 104610 - RNA, 19 nt, Artificial Sequence
  Description of Artificial Sequence: Synthetic oligonucleotide
aagggccgaccagguccuc

SEQ ID NO: 104611 - RNA, 19 nt, Artificial Sequence
  Description of Artificial Sequence: Synthetic oligonucleotide
gguggcgggcggaaaugcc

SEQ ID NO: 104612 - RNA, 19 nt, Artificial Sequence
  Description of Artificial Sequence: Synthetic oligonucleotide
ccggggucacuugaaguag

SEQ ID NO: 104613 - RNA, 19 nt, Artificial Sequence
  Description of Artificial Sequence: Synthetic oligonucleotide
agggccgaccagguccucu

SEQ ID NO: 104614 - RNA, 19 nt, Artificial Sequence
  Description of Artificial Sequence: Synthetic oligonucleotide
cuguggucggugagcaacu

SEQ ID NO: 104615 - RNA, 19 nt, Artificial Sequence
  Description of Artificial Sequence: Synthetic oligonucleotide
ccuugaucacgaugagaca

SEQ ID NO: 104616 - RNA, 19 nt, Artificial Sequence
  Description of Artificial Sequence: Synthetic oligonucleotide
caagggccgaccagguccu

SEQ ID NO: 104617 - RNA, 19 nt, Artificial Sequence
  Description of Artificial Sequence: Synthetic oligonucleotide
ggaacucggcaggguaaug

SEQ ID NO: 104618 - RNA, 19 nt, Artificial Sequence
  Description of Artificial Sequence: Synthetic oligonucleotide
cgcuccagugcuguagccg

SEQ ID NO: 104619 - RNA, 19 nt, Artificial Sequence
  Description of Artificial Sequence: Synthetic oligonucleotide
cgcggucaacauuucgcag

SEQ ID NO: 104620 - RNA, 19 nt, Artificial Sequence
  Description of Artificial Sequence: Synthetic oligonucleotide
cgcuaucaacucucugggc

SEQ ID NO: 104621 - RNA, 19 nt, Artificial Sequence
  Description of Artificial Sequence: Synthetic oligonucleotide
augcuaccggccacuuccu

SEQ ID NO: 104622 - RNA, 19 nt, Artificial Sequence
  Description of Artificial Sequence: Synthetic oligonucleotide
gccccgcugaaaugcagga

SEQ ID NO: 104623 - RNA, 19 nt, Artificial Sequence
  Description of Artificial Sequence: Synthetic oligonucleotide
cccggggucacuugaagua

SEQ ID NO: 104624 - RNA, 19 nt, Artificial Sequence
  Description of Artificial Sequence: Synthetic oligonucleotide
ggggugggaacuggccgag

SEQ ID NO: 104625 - RNA, 19 nt, Artificial Sequence
  Description of Artificial Sequence: Synthetic oligonucleotide
guacaagggccgaccaggu

SEQ ID NO: 104626 - RNA, 19 nt, Artificial Sequence
  Description of Artificial Sequence: Synthetic oligonucleotide
ccgugaggcguaucuuuuc

SEQ ID NO: 104627 - RNA, 19 nt, Artificial Sequence
  Description of Artificial Sequence: Synthetic oligonucleotide
gcgucgucgucaacucugc

SEQ ID NO: 104628 - RNA, 19 nt, Artificial Sequence
  Description of Artificial Sequence: Synthetic oligonucleotide
agcgggucgcugcccuuuu

SEQ ID NO: 104629 - RNA, 19 nt, Artificial Sequence
  Description of Artificial Sequence: Synthetic oligonucleotide
gauaggcgcggugcucgcu

SEQ ID NO: 104630 - RNA, 19 nt, Artificial Sequence
  Description of Artificial Sequence: Synthetic oligonucleotide
caaaaggacugagcugcau

SEQ ID NO: 104631 - RNA, 19 nt, Artificial Sequence
  Description of Artificial Sequence: Synthetic oligonucleotide
ggcaauccuggggagcucu

SEQ ID NO: 104632 - RNA, 19 nt, Artificial Sequence
  Description of Artificial Sequence: Synthetic oligonucleotide
gagcccggggucacuugaa

SEQ ID NO: 104633 - RNA, 19 nt, Artificial Sequence
  Description of Artificial Sequence: Synthetic oligonucleotide
ggcgggcggaaaugccaac

SEQ ID NO: 104634 - RNA, 19 nt, Artificial Sequence
  Description of Artificial Sequence: Synthetic oligonucleotide
ccccgcugaaaugcaggag

SEQ ID NO: 104635 - RNA, 19 nt, Artificial Sequence
  Description of Artificial Sequence: Synthetic oligonucleotide
gcgagacggugaccgacaa

SEQ ID NO: 104636 - RNA, 19 nt, Artificial Sequence
  Description of Artificial Sequence: Synthetic oligonucleotide
ccaugcuaccggccacuuc

SEQ ID NO: 104637 - RNA, 19 nt, Artificial Sequence
  Description of Artificial Sequence: Synthetic oligonucleotide
ccgaaacaccuggucagca

SEQ ID NO: 104638 - RNA, 19 nt, Artificial Sequence
  Description of Artificial Sequence: Synthetic oligonucleotide
cgucgucaacucugcuggc

SEQ ID NO: 104639 - RNA, 19 nt, Artificial Sequence
  Description of Artificial Sequence: Synthetic oligonucleotide
guggcgcuaucaacucucu

SEQ ID NO: 104640 - RNA, 19 nt, Artificial Sequence
  Description of Artificial Sequence: Synthetic oligonucleotide
gcccggggucacuugaagu

SEQ ID NO: 104641 - RNA, 19 nt, Artificial Sequence
  Description of Artificial Sequence: Synthetic oligonucleotide
gcgucaccacaccaauacu

SEQ ID NO: 104642 - RNA, 19 nt, Artificial Sequence
  Description of Artificial Sequence: Synthetic oligonucleotide
gugcgagaugacagugggu

SEQ ID NO: 104643 - RNA, 19 nt, Artificial Sequence
  Description of Artificial Sequence: Synthetic oligonucleotide
cugcgucgucgucaacucu

SEQ ID NO: 104644 - RNA, 19 nt, Artificial Sequence
  Description of Artificial Sequence: Synthetic oligonucleotide
ccuggagaacguugucucu

SEQ ID NO: 104645 - RNA, 19 nt, Artificial Sequence
  Description of Artificial Sequence: Synthetic oligonucleotide
gcgggucgcugcccuuuug

SEQ ID NO: 104646 - RNA, 19 nt, Artificial Sequence
  Description of Artificial Sequence: Synthetic oligonucleotide
cuugaacguuuagcacccu

SEQ ID NO: 104647 - RNA, 19 nt, Artificial Sequence
  Description of Artificial Sequence: Synthetic oligonucleotide
cuaaggcuagaggcauaau

SEQ ID NO: 104648 - RNA, 19 nt, Artificial Sequence
  Description of Artificial Sequence: Synthetic oligonucleotide
caucgcaggcuugcucccu

SEQ ID NO: 104649 - RNA, 19 nt, Artificial Sequence
  Description of Artificial Sequence: Synthetic oligonucleotide
ccaccucaacccuacugau

SEQ ID NO: 104650 - RNA, 19 nt, Artificial Sequence
  Description of Artificial Sequence: Synthetic oligonucleotide
caucgggagccagguauuu

SEQ ID NO: 104651 - RNA, 19 nt, Artificial Sequence
  Description of Artificial Sequence: Synthetic oligonucleotide
ggucggugagcaacugcau

SEQ ID NO: 104652 - RNA, 19 nt, Artificial Sequence
  Description of Artificial Sequence: Synthetic oligonucleotide
gggaaagccuggcccuauu

SEQ ID NO: 104653 - RNA, 19 nt, Artificial Sequence
  Description of Artificial Sequence: Synthetic oligonucleotide
cccgcagcgcacuggcaua

SEQ ID NO: 104654 - RNA, 19 nt, Artificial Sequence
  Description of Artificial Sequence: Synthetic oligonucleotide
ccaucgggagccagguauu

SEQ ID NO: 104655 - RNA, 19 nt, Artificial Sequence
  Description of Artificial Sequence: Synthetic oligonucleotide
cugccaccucaacccuacu

SEQ ID NO: 104656 - RNA, 19 nt, Artificial Sequence
  Description of Artificial Sequence: Synthetic oligonucleotide
cagcgggucgcugcccuuu

SEQ ID NO: 104657 - RNA, 19 nt, Artificial Sequence
  Description of Artificial Sequence: Synthetic oligonucleotide
gcgcggugcucgcuccagu

SEQ ID NO: 104658 - RNA, 19 nt, Artificial Sequence
  Description of Artificial Sequence: Synthetic oligonucleotide
acgacuaguauuuagaaac

SEQ ID NO: 104659 - RNA, 19 nt, Artificial Sequence
  Description of Artificial Sequence: Synthetic oligonucleotide
aacuugucgccucagaugc

SEQ ID NO: 104660 - RNA, 19 nt, Artificial Sequence
  Description of Artificial Sequence: Synthetic oligonucleotide
aaaacagugacuuauccca

SEQ ID NO: 104661 - RNA, 19 nt, Artificial Sequence
  Description of Artificial Sequence: Synthetic oligonucleotide
aauauaguaucuaucuugc

SEQ ID NO: 104662 - RNA, 19 nt, Artificial Sequence
  Description of Artificial Sequence: Synthetic oligonucleotide
uauucaagcguguaaagcg

SEQ ID NO: 104663 - RNA, 19 nt, Artificial Sequence
  Description of Artificial Sequence: Synthetic oligonucleotide
uucgauaaagcauucgcgg

SEQ ID NO: 104664 - RNA, 19 nt, Artificial Sequence
  Description of Artificial Sequence: Synthetic oligonucleotide
aaugcgaaugcuuccaaag

SEQ ID NO: 104665 - RNA, 19 nt, Artificial Sequence
  Description of Artificial Sequence: Synthetic oligonucleotide
uccuauaugcacuuuagag

SEQ ID NO: 104666 - RNA, 19 nt, Artificial Sequence
  Description of Artificial Sequence: Synthetic oligonucleotide
uccacguuaguacaguugg

SEQ ID NO: 104667 - RNA, 19 nt, Artificial Sequence
  Description of Artificial Sequence: Synthetic oligonucleotide
uuuaagaaaguaaugcgaa

SEQ ID NO: 104668 - RNA, 19 nt, Artificial Sequence
  Description of Artificial Sequence: Synthetic oligonucleotide
aacuugaagagguuacuuc

SEQ ID NO: 104669 - RNA, 19 nt, Artificial Sequence
  Description of Artificial Sequence: Synthetic oligonucleotide
aaggugaaaagguuauagg

SEQ ID NO: 104670 - RNA, 19 nt, Artificial Sequence
  Description of Artificial Sequence: Synthetic oligonucleotide
aaaguaaugcgaaugcuuc

SEQ ID NO: 104671 - RNA, 19 nt, Artificial Sequence
  Description of Artificial Sequence: Synthetic oligonucleotide
aaauuuuggccagaugccc

SEQ ID NO: 104672 - RNA, 19 nt, Artificial Sequence
  Description of Artificial Sequence: Synthetic oligonucleotide
aaaggaaggaaggauuucg

SEQ ID NO: 104673 - RNA, 19 nt, Artificial Sequence
  Description of Artificial Sequence: Synthetic oligonucleotide
auaaccuguauguccagcc

SEQ ID NO: 104674 - RNA, 19 nt, Artificial Sequence
  Description of Artificial Sequence: Synthetic oligonucleotide
ucuaagaguaaacccaccc

SEQ ID NO: 104675 - RNA, 19 nt, Artificial Sequence
  Description of Artificial Sequence: Synthetic oligonucleotide
cuuuagagcauuucuacag

SEQ ID NO: 104676 - RNA, 19 nt, Artificial Sequence
  Description of Artificial Sequence: Synthetic oligonucleotide
uuuacgagcaucucuaauc

SEQ ID NO: 104677 - RNA, 19 nt, Artificial Sequence
  Description of Artificial Sequence: Synthetic oligonucleotide
cuauaugcacuuuagagca

SEQ ID NO: 104678 - RNA, 19 nt, Artificial Sequence
  Description of Artificial Sequence: Synthetic oligonucleotide
acaauuacagauaaagucu

SEQ ID NO: 104679 - RNA, 19 nt, Artificial Sequence
  Description of Artificial Sequence: Synthetic oligonucleotide
aaaacuugucgccucagau

SEQ ID NO: 104680 - RNA, 19 nt, Artificial Sequence
  Description of Artificial Sequence: Synthetic oligonucleotide
acgacucacacgcacauuc

SEQ ID NO: 104681 - RNA, 19 nt, Artificial Sequence
  Description of Artificial Sequence: Synthetic oligonucleotide
agaacuaguaaagaggcgu

SEQ ID NO: 104682 - RNA, 19 nt, Artificial Sequence
  Description of Artificial Sequence: Synthetic oligonucleotide
uuacgagcaucucuaaucu

SEQ ID NO: 104683 - RNA, 19 nt, Artificial Sequence
  Description of Artificial Sequence: Synthetic oligonucleotide
aauaccaugggcucugguu

SEQ ID NO: 104684 - RNA, 19 nt, Artificial Sequence
  Description of Artificial Sequence: Synthetic oligonucleotide
ucccguaaaggucugccgg

SEQ ID NO: 104685 - RNA, 19 nt, Artificial Sequence
  Description of Artificial Sequence: Synthetic oligonucleotide
aaacgacuaguauuuagaa

SEQ ID NO: 104686 - RNA, 19 nt, Artificial Sequence
  Description of Artificial Sequence: Synthetic oligonucleotide
acauguaagucuaucucgc

SEQ ID NO: 104687 - RNA, 19 nt, Artificial Sequence
  Description of Artificial Sequence: Synthetic oligonucleotide
aauaacaguacaguuuaau

SEQ ID NO: 104688 - RNA, 19 nt, Artificial Sequence
  Description of Artificial Sequence: Synthetic oligonucleotide
uuaucccacuauucaagcg

SEQ ID NO: 104689 - RNA, 19 nt, Artificial Sequence
  Description of Artificial Sequence: Synthetic oligonucleotide
uguuuguacgaaacaguca

SEQ ID NO: 104690 - RNA, 19 nt, Artificial Sequence
  Description of Artificial Sequence: Synthetic oligonucleotide
aggagcgagagacaggcuc

SEQ ID NO: 104691 - RNA, 19 nt, Artificial Sequence
  Description of Artificial Sequence: Synthetic oligonucleotide
aucugcaagguguaaaacu

SEQ ID NO: 104692 - RNA, 19 nt, Artificial Sequence
  Description of Artificial Sequence: Synthetic oligonucleotide
aagucuaucucgccccguc

SEQ ID NO: 104693 - RNA, 19 nt, Artificial Sequence
  Description of Artificial Sequence: Synthetic oligonucleotide
cagcucacgacucacacgc

SEQ ID NO: 104694 - RNA, 19 nt, Artificial Sequence
  Description of Artificial Sequence: Synthetic oligonucleotide
ucgauaaagcauucgcggc

SEQ ID NO: 104695 - RNA, 19 nt, Artificial Sequence
  Description of Artificial Sequence: Synthetic oligonucleotide
uuauagggugcagagagcu

SEQ ID NO: 104696 - RNA, 19 nt, Artificial Sequence
  Description of Artificial Sequence: Synthetic oligonucleotide
ccuauaugcacuuuagagc

SEQ ID NO: 104697 - RNA, 19 nt, Artificial Sequence
  Description of Artificial Sequence: Synthetic oligonucleotide
cacuuuagagcauuucuac

SEQ ID NO: 104698 - RNA, 19 nt, Artificial Sequence
  Description of Artificial Sequence: Synthetic oligonucleotide
auuuaacuuagaaagucug

SEQ ID NO: 104699 - RNA, 19 nt, Artificial Sequence
  Description of Artificial Sequence: Synthetic oligonucleotide
auucaagcguguaaagcgc

SEQ ID NO: 104700 - RNA, 19 nt, Artificial Sequence
  Description of Artificial Sequence: Synthetic oligonucleotide
aggaaacugaugugauccc

SEQ ID NO: 104701 - RNA, 19 nt, Artificial Sequence
  Description of Artificial Sequence: Synthetic oligonucleotide
ucuaucucgccccgucugg

SEQ ID NO: 104702 - RNA, 19 nt, Artificial Sequence
  Description of Artificial Sequence: Synthetic oligonucleotide
ugucacgggacuacaaacu

SEQ ID NO: 104703 - RNA, 19 nt, Artificial Sequence
  Description of Artificial Sequence: Synthetic oligonucleotide
agauccuucucugaauggg

SEQ ID NO: 104704 - RNA, 19 nt, Artificial Sequence
  Description of Artificial Sequence: Synthetic oligonucleotide
ugcuuuacgagcaucucua

SEQ ID NO: 104705 - RNA, 19 nt, Artificial Sequence
  Description of Artificial Sequence: Synthetic oligonucleotide
acguagcaucgucugaacc

SEQ ID NO: 104706 - RNA, 19 nt, Artificial Sequence
  Description of Artificial Sequence: Synthetic oligonucleotide
acgagcaucucuaaucugg

SEQ ID NO: 104707 - RNA, 19 nt, Artificial Sequence
  Description of Artificial Sequence: Synthetic oligonucleotide
gaucacugacaaaucagag

SEQ ID NO: 104708 - RNA, 19 nt, Artificial Sequence
  Description of Artificial Sequence: Synthetic oligonucleotide
aaacagugacuuaucccac

SEQ ID NO: 104709 - RNA, 19 nt, Artificial Sequence
  Description of Artificial Sequence: Synthetic oligonucleotide
caaacgacuaguauuuaga

SEQ ID NO: 104710 - RNA, 19 nt, Artificial Sequence
  Description of Artificial Sequence: Synthetic oligonucleotide
uuaagaaaguaaugcgaau

SEQ ID NO: 104711 - RNA, 19 nt, Artificial Sequence
  Description of Artificial Sequence: Synthetic oligonucleotide
uaaaacuugucgccucaga

SEQ ID NO: 104712 - RNA, 19 nt, Artificial Sequence
  Description of Artificial Sequence: Synthetic oligonucleotide
guucuuaaguugcucggcc

SEQ ID NO: 104713 - RNA, 19 nt, Artificial Sequence
  Description of Artificial Sequence: Synthetic oligonucleotide
uaggucaugagcucuuggu

SEQ ID NO: 104714 - RNA, 19 nt, Artificial Sequence
  Description of Artificial Sequence: Synthetic oligonucleotide
ucgugucccguaaaggucu

SEQ ID NO: 104715 - RNA, 19 nt, Artificial Sequence
  Description of Artificial Sequence: Synthetic oligonucleotide
uguacgaaacagucaucug

SEQ ID NO: 104716 - RNA, 19 nt, Artificial Sequence
  Description of Artificial Sequence: Synthetic oligonucleotide
agucgucguacccagcaag

SEQ ID NO: 104717 - RNA, 19 nt, Artificial Sequence
  Description of Artificial Sequence: Synthetic oligonucleotide
aguuggauaggguaugcua

SEQ ID NO: 104718 - RNA, 19 nt, Artificial Sequence
  Description of Artificial Sequence: Synthetic oligonucleotide
aggacggcuagugucacgg

SEQ ID NO: 104719 - RNA, 19 nt, Artificial Sequence
  Description of Artificial Sequence: Synthetic oligonucleotide
aaaggcuguuccacggagg

SEQ ID NO: 104720 - RNA, 19 nt, Artificial Sequence
  Description of Artificial Sequence: Synthetic oligonucleotide
uucccacacauguaagucu

SEQ ID NO: 104721 - RNA, 19 nt, Artificial Sequence
  Description of Artificial Sequence: Synthetic oligonucleotide
aguaaugcgaaugcuucca

SEQ ID NO: 104722 - RNA, 19 nt, Artificial Sequence
  Description of Artificial Sequence: Synthetic oligonucleotide
acguaauucccagaaggag

SEQ ID NO: 104723 - RNA, 19 nt, Artificial Sequence
  Description of Artificial Sequence: Synthetic oligonucleotide
agaaaacggaauggcaaag

SEQ ID NO: 104724 - RNA, 19 nt, Artificial Sequence
  Description of Artificial Sequence: Synthetic oligonucleotide
gacucacacgcacauuccc

SEQ ID NO: 104725 - RNA, 19 nt, Artificial Sequence
  Description of Artificial Sequence: Synthetic oligonucleotide
aaagaacaucuaaggacug

SEQ ID NO: 104726 - RNA, 19 nt, Artificial Sequence
  Description of Artificial Sequence: Synthetic oligonucleotide
uuucccacacauguaaguc

SEQ ID NO: 104727 - RNA, 19 nt, Artificial Sequence
  Description of Artificial Sequence: Synthetic oligonucleotide
cauggcuugagaugauaac

SEQ ID NO: 104728 - RNA, 19 nt, Artificial Sequence
  Description of Artificial Sequence: Synthetic oligonucleotide
cguuaguacaguuggauag

SEQ ID NO: 104729 - RNA, 19 nt, Artificial Sequence
  Description of Artificial Sequence: Synthetic oligonucleotide
cagagaauaccaugggcuc

SEQ ID NO: 104730 - RNA, 19 nt, Artificial Sequence
  Description of Artificial Sequence: Synthetic oligonucleotide
aagaucugcaagguguaaa

SEQ ID NO: 104731 - RNA, 19 nt, Artificial Sequence
  Description of Artificial Sequence: Synthetic oligonucleotide
cauaaauuuuggccagaug

SEQ ID NO: 104732 - RNA, 19 nt, Artificial Sequence
  Description of Artificial Sequence: Synthetic oligonucleotide
guaagucuaucucgccccg

SEQ ID NO: 104733 - RNA, 19 nt, Artificial Sequence
  Description of Artificial Sequence: Synthetic oligonucleotide
aggaaugcacaauuuguuu

SEQ ID NO: 104734 - RNA, 19 nt, Artificial Sequence
  Description of Artificial Sequence: Synthetic oligonucleotide
cuaagaguaaacccaccca

SEQ ID NO: 104735 - RNA, 19 nt, Artificial Sequence
  Description of Artificial Sequence: Synthetic oligonucleotide
uuccacuaugcuguguuug

SEQ ID NO: 104736 - RNA, 19 nt, Artificial Sequence
  Description of Artificial Sequence: Synthetic oligonucleotide
ugcugaacauggcuugaga

SEQ ID NO: 104737 - RNA, 19 nt, Artificial Sequence
  Description of Artificial Sequence: Synthetic oligonucleotide
auauaguaucuaucuugca

SEQ ID NO: 104738 - RNA, 19 nt, Artificial Sequence
  Description of Artificial Sequence: Synthetic oligonucleotide
agacucgugucccguaaag

SEQ ID NO: 104739 - RNA, 19 nt, Artificial Sequence
  Description of Artificial Sequence: Synthetic oligonucleotide
caacuggcuauccaagcac

SEQ ID NO: 104740 - RNA, 19 nt, Artificial Sequence
  Description of Artificial Sequence: Synthetic oligonucleotide
gacucgugucccguaaagg

SEQ ID NO: 104741 - RNA, 19 nt, Artificial Sequence
  Description of Artificial Sequence: Synthetic oligonucleotide
aggccuaccgcagucacag

SEQ ID NO: 104742 - RNA, 19 nt, Artificial Sequence
  Description of Artificial Sequence: Synthetic oligonucleotide
uuuguacgaaacagucauc

SEQ ID NO: 104743 - RNA, 19 nt, Artificial Sequence
  Description of Artificial Sequence: Synthetic oligonucleotide
gauaaagcauucgcggcca

SEQ ID NO: 104744 - RNA, 19 nt, Artificial Sequence
  Description of Artificial Sequence: Synthetic oligonucleotide
guaggucaugagcucuugg

SEQ ID NO: 104745 - RNA, 19 nt, Artificial Sequence
  Description of Artificial Sequence: Synthetic oligonucleotide
ugacuauuugauugucauc

SEQ ID NO: 104746 - RNA, 19 nt, Artificial Sequence
  Description of Artificial Sequence: Synthetic oligonucleotide
uguccaaacgcugcugcug

SEQ ID NO: 104747 - RNA, 19 nt, Artificial Sequence
  Description of Artificial Sequence: Synthetic oligonucleotide
uuggauaggguaugcuauc

SEQ ID NO: 104748 - RNA, 19 nt, Artificial Sequence
  Description of Artificial Sequence: Synthetic oligonucleotide
uaaagcgcuugcugcuucc

SEQ ID NO: 104749 - RNA, 19 nt, Artificial Sequence
  Description of Artificial Sequence: Synthetic oligonucleotide
uaaugcgaaugcuuccaaa

SEQ ID NO: 104750 - RNA, 19 nt, Artificial Sequence
  Description of Artificial Sequence: Synthetic oligonucleotide
guaugcuaucgcugugacg

SEQ ID NO: 104751 - RNA, 19 nt, Artificial Sequence
  Description of Artificial Sequence: Synthetic oligonucleotide
cuuaaguugcucggccucc

SEQ ID NO: 104752 - RNA, 19 nt, Artificial Sequence
  Description of Artificial Sequence: Synthetic oligonucleotide
cagauguuauccaggccac

SEQ ID NO: 104753 - RNA, 19 nt, Artificial Sequence
  Description of Artificial Sequence: Synthetic oligonucleotide
auaggguaugcuaucgcug

SEQ ID NO: 104754 - RNA, 19 nt, Artificial Sequence
  Description of Artificial Sequence: Synthetic oligonucleotide
gguuucagcaauaagugaa

SEQ ID NO: 104755 - RNA, 19 nt, Artificial Sequence
  Description of Artificial Sequence: Synthetic oligonucleotide
gaaggagcauaugcacagg

SEQ ID NO: 104756 - RNA, 19 nt, Artificial Sequence
  Description of Artificial Sequence: Synthetic oligonucleotide
ugugacgcuucaggguugg

SEQ ID NO: 104757 - RNA, 19 nt, Artificial Sequence
  Description of Artificial Sequence: Synthetic oligonucleotide
agaggcgugucugucucac

SEQ ID NO: 104758 - RNA, 19 nt, Artificial Sequence
  Description of Artificial Sequence: Synthetic oligonucleotide
aauggccccggaaggaaug

SEQ ID NO: 104759 - RNA, 19 nt, Artificial Sequence
  Description of Artificial Sequence: Synthetic oligonucleotide
cucgugucccguaaagguc

SEQ ID NO: 104760 - RNA, 19 nt, Artificial Sequence
  Description of Artificial Sequence: Synthetic oligonucleotide
gucccguaaaggucugccg

SEQ ID NO: 104761 - RNA, 19 nt, Artificial Sequence
  Description of Artificial Sequence: Synthetic oligonucleotide
gacaagaagccuugagucu

SEQ ID NO: 104762 - RNA, 19 nt, Artificial Sequence
  Description of Artificial Sequence: Synthetic oligonucleotide
ugcccuuuugaaguucuga

SEQ ID NO: 104763 - RNA, 19 nt, Artificial Sequence
  Description of Artificial Sequence: Synthetic oligonucleotide
uacgagcaucucuaaucug

SEQ ID NO: 104764 - RNA, 19 nt, Artificial Sequence
  Description of Artificial Sequence: Synthetic oligonucleotide
gaucugcaagguguaaaac

SEQ ID NO: 104765 - RNA, 19 nt, Artificial Sequence
  Description of Artificial Sequence: Synthetic oligonucleotide
ugcacguagcaucgucuga

SEQ ID NO: 104766 - RNA, 19 nt, Artificial Sequence
  Description of Artificial Sequence: Synthetic oligonucleotide
gcgauucuaagaguaaacc

SEQ ID NO: 104767 - RNA, 19 nt, Artificial Sequence
  Description of Artificial Sequence: Synthetic oligonucleotide
uacugcuaugaggagugca

SEQ ID NO: 104768 - RNA, 19 nt, Artificial Sequence
  Description of Artificial Sequence: Synthetic oligonucleotide
uauagggugcagagagcuc

SEQ ID NO: 104769 - RNA, 19 nt, Artificial Sequence
  Description of Artificial Sequence: Synthetic oligonucleotide
ugucgccucagaugcaaaa

SEQ ID NO: 104770 - RNA, 19 nt, Artificial Sequence
  Description of Artificial Sequence: Synthetic oligonucleotide
gucgucguacccagcaagg

SEQ ID NO: 104771 - RNA, 19 nt, Artificial Sequence
  Description of Artificial Sequence: Synthetic oligonucleotide
ugauaaccacgaagaucug

SEQ ID NO: 104772 - RNA, 19 nt, Artificial Sequence
  Description of Artificial Sequence: Synthetic oligonucleotide
gaguccuauaugcacuuua

SEQ ID NO: 104773 - RNA, 19 nt, Artificial Sequence
  Description of Artificial Sequence: Synthetic oligonucleotide
acgcuucaggguuggaaug

SEQ ID NO: 104774 - RNA, 19 nt, Artificial Sequence
  Description of Artificial Sequence: Synthetic oligonucleotide
gacggcuagugucacggga

SEQ ID NO: 104775 - RNA, 19 nt, Artificial Sequence
  Description of Artificial Sequence: Synthetic oligonucleotide
gaguaaacccacccaauau

SEQ ID NO: 104776 - RNA, 19 nt, Artificial Sequence
  Description of Artificial Sequence: Synthetic oligonucleotide
agaguugcaucugcgcaug

SEQ ID NO: 104777 - RNA, 19 nt, Artificial Sequence
  Description of Artificial Sequence: Synthetic oligonucleotide
ugguucgcaucugaauucu

SEQ ID NO: 104778 - RNA, 19 nt, Artificial Sequence
  Description of Artificial Sequence: Synthetic oligonucleotide
guaaaacuugucgccucag

SEQ ID NO: 104779 - RNA, 19 nt, Artificial Sequence
  Description of Artificial Sequence: Synthetic oligonucleotide
gcuacaaacgacuaguauu

SEQ ID NO: 104780 - RNA, 19 nt, Artificial Sequence
  Description of Artificial Sequence: Synthetic oligonucleotide
gucgccucagaugcaaaag

SEQ ID NO: 104781 - RNA, 19 nt, Artificial Sequence
  Description of Artificial Sequence: Synthetic oligonucleotide
cacuauucaagcguguaaa

SEQ ID NO: 104782 - RNA, 19 nt, Artificial Sequence
  Description of Artificial Sequence: Synthetic oligonucleotide
aagucgucguacccagcaa

SEQ ID NO: 104783 - RNA, 19 nt, Artificial Sequence
  Description of Artificial Sequence: Synthetic oligonucleotide
aggcuggucggguccgcgc

SEQ ID NO: 104784 - RNA, 19 nt, Artificial Sequence
  Description of Artificial Sequence: Synthetic oligonucleotide
uaaaggucugccggcacau

SEQ ID NO: 104785 - RNA, 19 nt, Artificial Sequence
  Description of Artificial Sequence: Synthetic oligonucleotide
gguuacaacuugaagaggu

SEQ ID NO: 104786 - RNA, 19 nt, Artificial Sequence
  Description of Artificial Sequence: Synthetic oligonucleotide
aaauaacaguacaguuuaa

SEQ ID NO: 104787 - RNA, 19 nt, Artificial Sequence
  Description of Artificial Sequence: Synthetic oligonucleotide
ggaggacaagucaggaggg

SEQ ID NO: 104788 - RNA, 19 nt, Artificial Sequence
  Description of Artificial Sequence: Synthetic oligonucleotide
agucuaucucgccccgucu

SEQ ID NO: 104789 - RNA, 19 nt, Artificial Sequence
  Description of Artificial Sequence: Synthetic oligonucleotide
ggauaggguaugcuaucgc

SEQ ID NO: 104790 - RNA, 19 nt, Artificial Sequence
  Description of Artificial Sequence: Synthetic oligonucleotide
guccacguuaguacaguug

SEQ ID NO: 104791 - RNA, 19 nt, Artificial Sequence
  Description of Artificial Sequence: Synthetic oligonucleotide
cgauaaagcauucgcggcc

SEQ ID NO: 104792 - RNA, 19 nt, Artificial Sequence
  Description of Artificial Sequence: Synthetic oligonucleotide
aagaggcgugucugucuca

SEQ ID NO: 104793 - RNA, 19 nt, Artificial Sequence
  Description of Artificial Sequence: Synthetic oligonucleotide
augcgauucuaagaguaaa

SEQ ID NO: 104794 - RNA, 19 nt, Artificial Sequence
  Description of Artificial Sequence: Synthetic oligonucleotide
uggucgacccggucgucgc

SEQ ID NO: 104795 - RNA, 19 nt, Artificial Sequence
  Description of Artificial Sequence: Synthetic oligonucleotide
cuaguaaagaggcgugucu

SEQ ID NO: 104796 - RNA, 19 nt, Artificial Sequence
  Description of Artificial Sequence: Synthetic oligonucleotide
gguaugcuaucgcugugac

SEQ ID NO: 104797 - RNA, 19 nt, Artificial Sequence
  Description of Artificial Sequence: Synthetic oligonucleotide
gccggcacaucccuucucg

SEQ ID NO: 104798 - RNA, 19 nt, Artificial Sequence
  Description of Artificial Sequence: Synthetic oligonucleotide
ucccacuauucaagcgugu

SEQ ID NO: 104799 - RNA, 19 nt, Artificial Sequence
  Description of Artificial Sequence: Synthetic oligonucleotide
ucagacgccuccagccauc

SEQ ID NO: 104800 - RNA, 19 nt, Artificial Sequence
  Description of Artificial Sequence: Synthetic oligonucleotide
aggguaugcuaucgcugug

SEQ ID NO: 104801 - RNA, 19 nt, Artificial Sequence
  Description of Artificial Sequence: Synthetic oligonucleotide
guuggauaggguaugcuau

SEQ ID NO: 104802 - RNA, 19 nt, Artificial Sequence
  Description of Artificial Sequence: Synthetic oligonucleotide
uguaaagcgcuugcugcuu

SEQ ID NO: 104803 - RNA, 19 nt, Artificial Sequence
  Description of Artificial Sequence: Synthetic oligonucleotide
cacguagcaucgucugaac

SEQ ID NO: 104804 - RNA, 19 nt, Artificial Sequence
  Description of Artificial Sequence: Synthetic oligonucleotide
ucgucguacccagcaagga

SEQ ID NO: 104805 - RNA, 19 nt, Artificial Sequence
  Description of Artificial Sequence: Synthetic oligonucleotide
cuggucgacccggucgucg

SEQ ID NO: 104806 - RNA, 19 nt, Artificial Sequence
  Description of Artificial Sequence: Synthetic oligonucleotide
cuaucucgccccgucuggc

SEQ ID NO: 104807 - RNA, 19 nt, Artificial Sequence
  Description of Artificial Sequence: Synthetic oligonucleotide
uguggguguccacguuagu

SEQ ID NO: 104808 - RNA, 19 nt, Artificial Sequence
  Description of Artificial Sequence: Synthetic oligonucleotide
cacccaacuggcuauccaa

SEQ ID NO: 104809 - RNA, 19 nt, Artificial Sequence
  Description of Artificial Sequence: Synthetic oligonucleotide
acaauggccccggaaggaa

SEQ ID NO: 104810 - RNA, 19 nt, Artificial Sequence
  Description of Artificial Sequence: Synthetic oligonucleotide
uaagucuaucucgccccgu

SEQ ID NO: 104811 - RNA, 19 nt, Artificial Sequence
  Description of Artificial Sequence: Synthetic oligonucleotide
caaacacccaacuggcuau

SEQ ID NO: 104812 - RNA, 19 nt, Artificial Sequence
  Description of Artificial Sequence: Synthetic oligonucleotide
cugugacgcuucaggguug

SEQ ID NO: 104813 - RNA, 19 nt, Artificial Sequence
  Description of Artificial Sequence: Synthetic oligonucleotide
cuggugacuauuugauugu

SEQ ID NO: 104814 - RNA, 19 nt, Artificial Sequence
  Description of Artificial Sequence: Synthetic oligonucleotide
acccaauauggcaaacaau

SEQ ID NO: 104815 - RNA, 19 nt, Artificial Sequence
  Description of Artificial Sequence: Synthetic oligonucleotide
ggcuggucggguccgcgcg

SEQ ID NO: 104816 - RNA, 19 nt, Artificial Sequence
  Description of Artificial Sequence: Synthetic oligonucleotide
uugucgccucagaugcaaa

SEQ ID NO: 104817 - RNA, 19 nt, Artificial Sequence
  Description of Artificial Sequence: Synthetic oligonucleotide
ucgccguccgccccucaga

SEQ ID NO: 104818 - RNA, 19 nt, Artificial Sequence
  Description of Artificial Sequence: Synthetic oligonucleotide
auaaagcauucgcggccau

SEQ ID NO: 104819 - RNA, 19 nt, Artificial Sequence
  Description of Artificial Sequence: Synthetic oligonucleotide
cccguaaaggucugccggc

SEQ ID NO: 104820 - RNA, 19 nt, Artificial Sequence
  Description of Artificial Sequence: Synthetic oligonucleotide
agggcacauguggugucuc

SEQ ID NO: 104821 - RNA, 19 nt, Artificial Sequence
  Description of Artificial Sequence: Synthetic oligonucleotide
gcuagugucacgggacuac

SEQ ID NO: 104822 - RNA, 19 nt, Artificial Sequence
  Description of Artificial Sequence: Synthetic oligonucleotide
acggguuuucagauuguaa

SEQ ID NO: 104823 - RNA, 19 nt, Artificial Sequence
  Description of Artificial Sequence: Synthetic oligonucleotide
augcuaucgcugugacgcu

SEQ ID NO: 104824 - RNA, 19 nt, Artificial Sequence
  Description of Artificial Sequence: Synthetic oligonucleotide
cuugucgccucagaugcaa

SEQ ID NO: 104825 - RNA, 19 nt, Artificial Sequence
  Description of Artificial Sequence: Synthetic oligonucleotide
cggguuuucagauuguaaa

SEQ ID NO: 104826 - RNA, 19 nt, Artificial Sequence
  Description of Artificial Sequence: Synthetic oligonucleotide
uggucggguccgcgcggcg

SEQ ID NO: 104827 - RNA, 19 nt, Artificial Sequence
  Description of Artificial Sequence: Synthetic oligonucleotide
gucgccguccgccccucag

SEQ ID NO: 104828 - RNA, 19 nt, Artificial Sequence
  Description of Artificial Sequence: Synthetic oligonucleotide
cauucgcggccaucacaac

SEQ ID NO: 104829 - RNA, 19 nt, Artificial Sequence
  Description of Artificial Sequence: Synthetic oligonucleotide
ggguuuucagauuguaaau

SEQ ID NO: 104830 - RNA, 19 nt, Artificial Sequence
  Description of Artificial Sequence: Synthetic oligonucleotide
ccaacuggcuauccaagca

SEQ ID NO: 104831 - RNA, 19 nt, Artificial Sequence
  Description of Artificial Sequence: Synthetic oligonucleotide
cuagugucacgggacuaca

SEQ ID NO: 104832 - RNA, 19 nt, Artificial Sequence
  Description of Artificial Sequence: Synthetic oligonucleotide
cuacugcuaugaggagugc

SEQ ID NO: 104833 - RNA, 19 nt, Artificial Sequence
  Description of Artificial Sequence: Synthetic oligonucleotide
gucacgggacuacaaacuu

SEQ ID NO: 104834 - RNA, 19 nt, Artificial Sequence
  Description of Artificial Sequence: Synthetic oligonucleotide
uaauucccagaaggagcau

SEQ ID NO: 104835 - RNA, 19 nt, Artificial Sequence
  Description of Artificial Sequence: Synthetic oligonucleotide
cugcuacaaacgacuagua

SEQ ID NO: 104836 - RNA, 19 nt, Artificial Sequence
  Description of Artificial Sequence: Synthetic oligonucleotide
gucggguccgcgcggcggc

SEQ ID NO: 104837 - RNA, 19 nt, Artificial Sequence
  Description of Artificial Sequence: Synthetic oligonucleotide
cgucguacccagcaaggag

SEQ ID NO: 104838 - RNA, 19 nt, Artificial Sequence
  Description of Artificial Sequence: Synthetic oligonucleotide
cacguuaguacaguuggau

SEQ ID NO: 104839 - RNA, 19 nt, Artificial Sequence
  Description of Artificial Sequence: Synthetic oligonucleotide
ugcuaucgcugugacgcuu

SEQ ID NO: 104840 - RNA, 19 nt, Artificial Sequence
  Description of Artificial Sequence: Synthetic oligonucleotide
cuacagcaugcgauucuaa

SEQ ID NO: 104841 - RNA, 19 nt, Artificial Sequence
  Description of Artificial Sequence: Synthetic oligonucleotide
ggauuucgauaaagcauuc

SEQ ID NO: 104842 - RNA, 19 nt, Artificial Sequence
  Description of Artificial Sequence: Synthetic oligonucleotide
cacuacugcuaugaggagu

SEQ ID NO: 104843 - RNA, 19 nt, Artificial Sequence
  Description of Artificial Sequence: Synthetic oligonucleotide
accugcuacuggccuuagu

SEQ ID NO: 104844 - RNA, 19 nt, Artificial Sequence
  Description of Artificial Sequence: Synthetic oligonucleotide
ugccggcacaucccuucuc

SEQ ID NO: 104845 - RNA, 19 nt, Artificial Sequence
  Description of Artificial Sequence: Synthetic oligonucleotide
gucgacccggucgucgcgc

SEQ ID NO: 104846 - RNA, 19 nt, Artificial Sequence
  Description of Artificial Sequence: Synthetic oligonucleotide
ggacggcuagugucacggg

SEQ ID NO: 104847 - RNA, 19 nt, Artificial Sequence
  Description of Artificial Sequence: Synthetic oligonucleotide
accgccgccgccgccgccg

SEQ ID NO: 104848 - RNA, 19 nt, Artificial Sequence
  Description of Artificial Sequence: Synthetic oligonucleotide
ggacugaguccuauaugca

SEQ ID NO: 104849 - RNA, 19 nt, Artificial Sequence
  Description of Artificial Sequence: Synthetic oligonucleotide
ccggucgucgcgcucgcgg

SEQ ID NO: 104850 - RNA, 19 nt, Artificial Sequence
  Description of Artificial Sequence: Synthetic oligonucleotide
cuaucgcugugacgcuuca

SEQ ID NO: 104851 - RNA, 19 nt, Artificial Sequence
  Description of Artificial Sequence: Synthetic oligonucleotide
augugaucccacagauaau

SEQ ID NO: 104852 - RNA, 19 nt, Artificial Sequence
  Description of Artificial Sequence: Synthetic oligonucleotide
agcgagagacaggcucaug

SEQ ID NO: 104853 - RNA, 19 nt, Artificial Sequence
  Description of Artificial Sequence: Synthetic oligonucleotide
cgacucacacgcacauucc

SEQ ID NO: 104854 - RNA, 19 nt, Artificial Sequence
  Description of Artificial Sequence: Synthetic oligonucleotide
gaaccggcagcaggacaga

SEQ ID NO: 104855 - RNA, 19 nt, Artificial Sequence
  Description of Artificial Sequence: Synthetic oligonucleotide
caggcaccucucuggagaa

SEQ ID NO: 104856 - RNA, 19 nt, Artificial Sequence
  Description of Artificial Sequence: Synthetic oligonucleotide
cuggucggguccgcgcggc

SEQ ID NO: 104857 - RNA, 19 nt, Artificial Sequence
  Description of Artificial Sequence: Synthetic oligonucleotide
gcuggucggguccgcgcgg

SEQ ID NO: 104858 - RNA, 19 nt, Artificial Sequence
  Description of Artificial Sequence: Synthetic oligonucleotide
ccaaacgcugcugcugaac

SEQ ID NO: 104859 - RNA, 19 nt, Artificial Sequence
  Description of Artificial Sequence: Synthetic oligonucleotide
cuggaucaauguugguggu

SEQ ID NO: 104860 - RNA, 19 nt, Artificial Sequence
  Description of Artificial Sequence: Synthetic oligonucleotide
ccacuauucaagcguguaa

SEQ ID NO: 104861 - RNA, 19 nt, Artificial Sequence
  Description of Artificial Sequence: Synthetic oligonucleotide
ccggcacaucccuucucgg

SEQ ID NO: 104862 - RNA, 19 nt, Artificial Sequence
  Description of Artificial Sequence: Synthetic oligonucleotide
caggccuaccgcagucaca

SEQ ID NO: 104863 - RNA, 19 nt, Artificial Sequence
  Description of Artificial Sequence: Synthetic oligonucleotide
acuugucgccucagaugca

SEQ ID NO: 104864 - RNA, 19 nt, Artificial Sequence
  Description of Artificial Sequence: Synthetic oligonucleotide
ggucgucgcgcucgcggcc

SEQ ID NO: 104865 - RNA, 19 nt, Artificial Sequence
  Description of Artificial Sequence: Synthetic oligonucleotide
cagacucgugucccguaaa

SEQ ID NO: 104866 - RNA, 19 nt, Artificial Sequence
  Description of Artificial Sequence: Synthetic oligonucleotide
gccaucacaacaugugcuu

SEQ ID NO: 104867 - RNA, 19 nt, Artificial Sequence
  Description of Artificial Sequence: Synthetic oligonucleotide
cacggguuuucagauugua

SEQ ID NO: 104868 - RNA, 19 nt, Artificial Sequence
  Description of Artificial Sequence: Synthetic oligonucleotide
acgggacuacaaacuuccu

SEQ ID NO: 104869 - RNA, 19 nt, Artificial Sequence
  Description of Artificial Sequence: Synthetic oligonucleotide
guccugcuacaaacgacua

SEQ ID NO: 104870 - RNA, 19 nt, Artificial Sequence
  Description of Artificial Sequence: Synthetic oligonucleotide
ccacgccgccgccuggucg

SEQ ID NO: 104871 - RNA, 19 nt, Artificial Sequence
  Description of Artificial Sequence: Synthetic oligonucleotide
caauggccccggaaggaau

SEQ ID NO: 104872 - RNA, 19 nt, Artificial Sequence
  Description of Artificial Sequence: Synthetic oligonucleotide
ggguuggaauggucuucca

SEQ ID NO: 104873 - RNA, 19 nt, Artificial Sequence
  Description of Artificial Sequence: Synthetic oligonucleotide
ggaugggcgcggcggcccc

SEQ ID NO: 104874 - RNA, 19 nt, Artificial Sequence
  Description of Artificial Sequence: Synthetic oligonucleotide
gucaaacagccugcacgua

SEQ ID NO: 104875 - RNA, 19 nt, Artificial Sequence
  Description of Artificial Sequence: Synthetic oligonucleotide
cccagcuaaaacaccugcu

SEQ ID NO: 104876 - RNA, 19 nt, Artificial Sequence
  Description of Artificial Sequence: Synthetic oligonucleotide
caguuggauaggguaugcu

SEQ ID NO: 104877 - RNA, 19 nt, Artificial Sequence
  Description of Artificial Sequence: Synthetic oligonucleotide
cucgccccgucuggcgccc

SEQ ID NO: 104878 - RNA, 19 nt, Artificial Sequence
  Description of Artificial Sequence: Synthetic oligonucleotide
ggucugccggcacaucccu

SEQ ID NO: 104879 - RNA, 19 nt, Artificial Sequence
  Description of Artificial Sequence: Synthetic oligonucleotide
caccugcuacuggccuuag

SEQ ID NO: 104880 - RNA, 19 nt, Artificial Sequence
  Description of Artificial Sequence: Synthetic oligonucleotide
caaagccgccaugguuaca

SEQ ID NO: 104881 - RNA, 19 nt, Artificial Sequence
  Description of Artificial Sequence: Synthetic oligonucleotide
gagcgagagacaggcucau

SEQ ID NO: 104882 - RNA, 19 nt, Artificial Sequence
  Description of Artificial Sequence: Synthetic oligonucleotide
cggucgucgcgcucgcggc

SEQ ID NO: 104883 - RNA, 19 nt, Artificial Sequence
  Description of Artificial Sequence: Synthetic oligonucleotide
ccccggaaggaaugcacaa

SEQ ID NO: 104884 - RNA, 19 nt, Artificial Sequence
  Description of Artificial Sequence: Synthetic oligonucleotide
cccacuauucaagcgugua

SEQ ID NO: 104885 - RNA, 19 nt, Artificial Sequence
  Description of Artificial Sequence: Synthetic oligonucleotide
cccacccaauauggcaaac

SEQ ID NO: 104886 - RNA, 19 nt, Artificial Sequence
  Description of Artificial Sequence: Synthetic oligonucleotide
ccguaaaggucugccggca

SEQ ID NO: 104887 - RNA, 19 nt, Artificial Sequence
  Description of Artificial Sequence: Synthetic oligonucleotide
ggcgugucugucucacaau

SEQ ID NO: 104888 - RNA, 19 nt, Artificial Sequence
  Description of Artificial Sequence: Synthetic oligonucleotide
ggcuagugucacgggacua

SEQ ID NO: 104889 - RNA, 19 nt, Artificial Sequence
  Description of Artificial Sequence: Synthetic oligonucleotide
cggcacaucccuucucgga

SEQ ID NO: 104890 - RNA, 19 nt, Artificial Sequence
  Description of Artificial Sequence: Synthetic oligonucleotide
caggagcgagagacaggcu

SEQ ID NO: 104891 - RNA, 19 nt, Artificial Sequence
  Description of Artificial Sequence: Synthetic oligonucleotide
gccccgucuggcgcccacg

SEQ ID NO: 104892 - RNA, 19 nt, Artificial Sequence
  Description of Artificial Sequence: Synthetic oligonucleotide
cgccguccgccccucagac

SEQ ID NO: 104893 - RNA, 19 nt, Artificial Sequence
  Description of Artificial Sequence: Synthetic oligonucleotide
caccgccgccgccgccgcc

SEQ ID NO: 104894 - RNA, 19 nt, Artificial Sequence
  Description of Artificial Sequence: Synthetic oligonucleotide
ucgccccgucuggcgccca

SEQ ID NO: 104895 - RNA, 19 nt, Artificial Sequence
  Description of Artificial Sequence: Synthetic oligonucleotide
ccacgguauccaccugcua

SEQ ID NO: 104896 - RNA, 19 nt, Artificial Sequence
  Description of Artificial Sequence: Synthetic oligonucleotide
ccgcgcggcggcuguucca

SEQ ID NO: 104897 - RNA, 19 nt, Artificial Sequence
  Description of Artificial Sequence: Synthetic oligonucleotide
cgccccgucuggcgcccac

SEQ ID NO: 104898 - RNA, 19 nt, Artificial Sequence
  Description of Artificial Sequence: Synthetic oligonucleotide
gcgcggcggcuguuccagu

SEQ ID NO: 104899 - RNA, 19 nt, Artificial Sequence
  Description of Artificial Sequence: Synthetic oligonucleotide
gguccgcgcggcggcuguu

SEQ ID NO: 104900 - RNA, 19 nt, Artificial Sequence
  Description of Artificial Sequence: Synthetic oligonucleotide
cgccgccgccgccgccguc

SEQ ID NO: 104901 - RNA, 19 nt, Artificial Sequence
  Description of Artificial Sequence: Synthetic oligonucleotide
ccgccgccgccgccgccgu

SEQ ID NO: 104902 - RNA, 19 nt, Artificial Sequence
  Description of Artificial Sequence: Synthetic oligonucleotide
aauaaguacacucacuacc

SEQ ID NO: 104903 - RNA, 19 nt, Artificial Sequence
  Description of Artificial Sequence: Synthetic oligonucleotide
aaacauuaaccccaaggcc

SEQ ID NO: 104904 - RNA, 19 nt, Artificial Sequence
  Description of Artificial Sequence: Synthetic oligonucleotide
acuauaaacguuuugauga

SEQ ID NO: 104905 - RNA, 19 nt, Artificial Sequence
  Description of Artificial Sequence: Synthetic oligonucleotide
agucaugguaauuuuaugc

SEQ ID NO: 104906 - RNA, 19 nt, Artificial Sequence
  Description of Artificial Sequence: Synthetic oligonucleotide
ucaaguguaacgaaguucc

SEQ ID NO: 104907 - RNA, 19 nt, Artificial Sequence
  Description of Artificial Sequence: Synthetic oligonucleotide
uugaaguuaaccaaaugag

SEQ ID NO: 104908 - RNA, 19 nt, Artificial Sequence
  Description of Artificial Sequence: Synthetic oligonucleotide
uguuauuacauacacacaa

SEQ ID NO: 104909 - RNA, 19 nt, Artificial Sequence
  Description of Artificial Sequence: Synthetic oligonucleotide
augucuuaggucuucaccc

SEQ ID NO: 104910 - RNA, 19 nt, Artificial Sequence
  Description of Artificial Sequence: Synthetic oligonucleotide
uuaaauuuagccacaacuc

SEQ ID NO: 104911 - RNA, 19 nt, Artificial Sequence
  Description of Artificial Sequence: Synthetic oligonucleotide
acuaaaagcucacuuuagc

SEQ ID NO: 104912 - RNA, 19 nt, Artificial Sequence
  Description of Artificial Sequence: Synthetic oligonucleotide
uccuauguagagauaaccg

SEQ ID NO: 104913 - RNA, 19 nt, Artificial Sequence
  Description of Artificial Sequence: Synthetic oligonucleotide
cuagugucuagucagaugc

SEQ ID NO: 104914 - RNA, 19 nt, Artificial Sequence
  Description of Artificial Sequence: Synthetic oligonucleotide
uuaagaauguacugcaacc

SEQ ID NO: 104915 - RNA, 19 nt, Artificial Sequence
  Description of Artificial Sequence: Synthetic oligonucleotide
cugauuaauggacaaaagg

SEQ ID NO: 104916 - RNA, 19 nt, Artificial Sequence
  Description of Artificial Sequence: Synthetic oligonucleotide
ucaggucugaugauuagcg

SEQ ID NO: 104917 - RNA, 19 nt, Artificial Sequence
  Description of Artificial Sequence: Synthetic oligonucleotide
uacuauguguucaaaagca

SEQ ID NO: 104918 - RNA, 19 nt, Artificial Sequence
  Description of Artificial Sequence: Synthetic oligonucleotide
cucugauuaaaguagauuc

SEQ ID NO: 104919 - RNA, 19 nt, Artificial Sequence
  Description of Artificial Sequence: Synthetic oligonucleotide
agaucgucuaaacauuggc

SEQ ID NO: 104920 - RNA, 19 nt, Artificial Sequence
  Description of Artificial Sequence: Synthetic oligonucleotide
aauucaagaggucucuugu

SEQ ID NO: 104921 - RNA, 19 nt, Artificial Sequence
  Description of Artificial Sequence: Synthetic oligonucleotide
agaauguaguuccaucccc

SEQ ID NO: 104922 - RNA, 19 nt, Artificial Sequence
  Description of Artificial Sequence: Synthetic oligonucleotide
acuaucgcugaccacagac

SEQ ID NO: 104923 - RNA, 19 nt, Artificial Sequence
  Description of Artificial Sequence: Synthetic oligonucleotide
aaaaucuugaggugcauau

SEQ ID NO: 104924 - RNA, 19 nt, Artificial Sequence
  Description of Artificial Sequence: Synthetic oligonucleotide
aguaagaaccauaauuccc

SEQ ID NO: 104925 - RNA, 19 nt, Artificial Sequence
  Description of Artificial Sequence: Synthetic oligonucleotide
uuaguaauuauguugggua

SEQ ID NO: 104926 - RNA, 19 nt, Artificial Sequence
  Description of Artificial Sequence: Synthetic oligonucleotide
ucucuaacaaguaucuggc

SEQ ID NO: 104927 - RNA, 19 nt, Artificial Sequence
  Description of Artificial Sequence: Synthetic oligonucleotide
acugcaacccauaaaauac

SEQ ID NO: 104928 - RNA, 19 nt, Artificial Sequence
  Description of Artificial Sequence: Synthetic oligonucleotide
ugaggugcauauuagagcu

SEQ ID NO: 104929 - RNA, 19 nt, Artificial Sequence
  Description of Artificial Sequence: Synthetic oligonucleotide
aauuaauaaaugaugccca

SEQ ID NO: 104930 - RNA, 19 nt, Artificial Sequence
  Description of Artificial Sequence: Synthetic oligonucleotide
ucuaaauuaccagaggucu

SEQ ID NO: 104931 - RNA, 19 nt, Artificial Sequence
  Description of Artificial Sequence: Synthetic oligonucleotide
uuacuaucuauuagcaaag

SEQ ID NO: 104932 - RNA, 19 nt, Artificial Sequence
  Description of Artificial Sequence: Synthetic oligonucleotide
agagcuacaggcuauucuc

SEQ ID NO: 104933 - RNA, 19 nt, Artificial Sequence
  Description of Artificial Sequence: Synthetic oligonucleotide
ucgaguaagaaccauaauu

SEQ ID NO: 104934 - RNA, 19 nt, Artificial Sequence
  Description of Artificial Sequence: Synthetic oligonucleotide
acuaucuauuagcaaaggg

SEQ ID NO: 104935 - RNA, 19 nt, Artificial Sequence
  Description of Artificial Sequence: Synthetic oligonucleotide
auuaccagaggucucuaac

SEQ ID NO: 104936 - RNA, 19 nt, Artificial Sequence
  Description of Artificial Sequence: Synthetic oligonucleotide
auaaguacacucacuaccc

SEQ ID NO: 104937 - RNA, 19 nt, Artificial Sequence
  Description of Artificial Sequence: Synthetic oligonucleotide
ugcauauuagagcuacagg

SEQ ID NO: 104938 - RNA, 19 nt, Artificial Sequence
  Description of Artificial Sequence: Synthetic oligonucleotide
uacuuuaccuuuuaaguac

SEQ ID NO: 104939 - RNA, 19 nt, Artificial Sequence
  Description of Artificial Sequence: Synthetic oligonucleotide
aauauuaguuacugagggu

SEQ ID NO: 104940 - RNA, 19 nt, Artificial Sequence
  Description of Artificial Sequence: Synthetic oligonucleotide
gcauauuagagcuacaggc

SEQ ID NO: 104941 - RNA, 19 nt, Artificial Sequence
  Description of Artificial Sequence: Synthetic oligonucleotide
uauuagagcaauucccgcc

SEQ ID NO: 104942 - RNA, 19 nt, Artificial Sequence
  Description of Artificial Sequence: Synthetic oligonucleotide
aauugacuuaacauacaac

SEQ ID NO: 104943 - RNA, 19 nt, Artificial Sequence
  Description of Artificial Sequence: Synthetic oligonucleotide
caauauagaaugacuaaug

SEQ ID NO: 104944 - RNA, 19 nt, Artificial Sequence
  Description of Artificial Sequence: Synthetic oligonucleotide
agguuaguaauuauguugg

SEQ ID NO: 104945 - RNA, 19 nt, Artificial Sequence
  Description of Artificial Sequence: Synthetic oligonucleotide
uguagcaaagcuccgccag

SEQ ID NO: 104946 - RNA, 19 nt, Artificial Sequence
  Description of Artificial Sequence: Synthetic oligonucleotide
uggacaaaaggcaauguaa

SEQ ID NO: 104947 - RNA, 19 nt, Artificial Sequence
  Description of Artificial Sequence: Synthetic oligonucleotide
auaacuaucgcugaccaca

SEQ ID NO: 104948 - RNA, 19 nt, Artificial Sequence
  Description of Artificial Sequence: Synthetic oligonucleotide
uaagucacuauaaacguuu

SEQ ID NO: 104949 - RNA, 19 nt, Artificial Sequence
  Description of Artificial Sequence: Synthetic oligonucleotide
aaucuugaggugcauauua

SEQ ID NO: 104950 - RNA, 19 nt, Artificial Sequence
  Description of Artificial Sequence: Synthetic oligonucleotide
uucacggcauucaaaguag

SEQ ID NO: 104951 - RNA, 19 nt, Artificial Sequence
  Description of Artificial Sequence: Synthetic oligonucleotide
gaguaagaaccauaauucc

SEQ ID NO: 104952 - RNA, 19 nt, Artificial Sequence
  Description of Artificial Sequence: Synthetic oligonucleotide
aguguaacgaaguucccug

SEQ ID NO: 104953 - RNA, 19 nt, Artificial Sequence
  Description of Artificial Sequence: Synthetic oligonucleotide
ugacuaaugcauauucuac

SEQ ID NO: 104954 - RNA, 19 nt, Artificial Sequence
  Description of Artificial Sequence: Synthetic oligonucleotide
uuugaugacggauauuuua

SEQ ID NO: 104955 - RNA, 19 nt, Artificial Sequence
  Description of Artificial Sequence: Synthetic oligonucleotide
uuucacggcauucaaagua

SEQ ID NO: 104956 - RNA, 19 nt, Artificial Sequence
  Description of Artificial Sequence: Synthetic oligonucleotide
ucuuaaagugcaaacgcau

SEQ ID NO: 104957 - RNA, 19 nt, Artificial Sequence
  Description of Artificial Sequence: Synthetic oligonucleotide
gaucgucuaaacauuggcg

SEQ ID NO: 104958 - RNA, 19 nt, Artificial Sequence
  Description of Artificial Sequence: Synthetic oligonucleotide
ugucuagucagaugcaaug

SEQ ID NO: 104959 - RNA, 19 nt, Artificial Sequence
  Description of Artificial Sequence: Synthetic oligonucleotide
ugagcagaugcuccuaugc

SEQ ID NO: 104960 - RNA, 19 nt, Artificial Sequence
  Description of Artificial Sequence: Synthetic oligonucleotide
aacuguacaaugccuagaa

SEQ ID NO: 104961 - RNA, 19 nt, Artificial Sequence
  Description of Artificial Sequence: Synthetic oligonucleotide
aucgucuaaacauuggcga

SEQ ID NO: 104962 - RNA, 19 nt, Artificial Sequence
  Description of Artificial Sequence: Synthetic oligonucleotide
uugaggugcauauuagagc

SEQ ID NO: 104963 - RNA, 19 nt, Artificial Sequence
  Description of Artificial Sequence: Synthetic oligonucleotide
uugaugacggauauuuuaa

SEQ ID NO: 104964 - RNA, 19 nt, Artificial Sequence
  Description of Artificial Sequence: Synthetic oligonucleotide
cuaaugaggugccacgucc

SEQ ID NO: 104965 - RNA, 19 nt, Artificial Sequence
  Description of Artificial Sequence: Synthetic oligonucleotide
uagugaacaacuagugucu

SEQ ID NO: 104966 - RNA, 19 nt, Artificial Sequence
  Description of Artificial Sequence: Synthetic oligonucleotide
ugcacguauguauacacac

SEQ ID NO: 104967 - RNA, 19 nt, Artificial Sequence
  Description of Artificial Sequence: Synthetic oligonucleotide
auuagcggagccucuguac

SEQ ID NO: 104968 - RNA, 19 nt, Artificial Sequence
  Description of Artificial Sequence: Synthetic oligonucleotide
aguuuaagugaguucuaag

SEQ ID NO: 104969 - RNA, 19 nt, Artificial Sequence
  Description of Artificial Sequence: Synthetic oligonucleotide
uuauuagagcaauucccgc

SEQ ID NO: 104970 - RNA, 19 nt, Artificial Sequence
  Description of Artificial Sequence: Synthetic oligonucleotide
aaccaggccgccuaaugag

SEQ ID NO: 104971 - RNA, 19 nt, Artificial Sequence
  Description of Artificial Sequence: Synthetic oligonucleotide
uuuguacacuucuuuggcc

SEQ ID NO: 104972 - RNA, 19 nt, Artificial Sequence
  Description of Artificial Sequence: Synthetic oligonucleotide
uuguacacuucuuuggccu

SEQ ID NO: 104973 - RNA, 19 nt, Artificial Sequence
  Description of Artificial Sequence: Synthetic oligonucleotide
cacuauaaacguuuugaug

SEQ ID NO: 104974 - RNA, 19 nt, Artificial Sequence
  Description of Artificial Sequence: Synthetic oligonucleotide
aguggaagcagaaauucuc

SEQ ID NO: 104975 - RNA, 19 nt, Artificial Sequence
  Description of Artificial Sequence: Synthetic oligonucleotide
uccuaauuugagaucgucu

SEQ ID NO: 104976 - RNA, 19 nt, Artificial Sequence
  Description of Artificial Sequence: Synthetic oligonucleotide
ugauuaaaguagauucuuc

SEQ ID NO: 104977 - RNA, 19 nt, Artificial Sequence
  Description of Artificial Sequence: Synthetic oligonucleotide
auuagagcaauucccgcca

SEQ ID NO: 104978 - RNA, 19 nt, Artificial Sequence
  Description of Artificial Sequence: Synthetic oligonucleotide
agaacuguacaaugccuag

SEQ ID NO: 104979 - RNA, 19 nt, Artificial Sequence
  Description of Artificial Sequence: Synthetic oligonucleotide
cugaaugacucucagauaa

SEQ ID NO: 104980 - RNA, 19 nt, Artificial Sequence
  Description of Artificial Sequence: Synthetic oligonucleotide
ucuauuagcaaagggcacu

SEQ ID NO: 104981 - RNA, 19 nt, Artificial Sequence
  Description of Artificial Sequence: Synthetic oligonucleotide
aucuaaauuaccagagguc

SEQ ID NO: 104982 - RNA, 19 nt, Artificial Sequence
  Description of Artificial Sequence: Synthetic oligonucleotide
ugcaacccauaaaauacug

SEQ ID NO: 104983 - RNA, 19 nt, Artificial Sequence
  Description of Artificial Sequence: Synthetic oligonucleotide
uuaccagaggucucuaaca

SEQ ID NO: 104984 - RNA, 19 nt, Artificial Sequence
  Description of Artificial Sequence: Synthetic oligonucleotide
aguacauauuagaauugac

SEQ ID NO: 104985 - RNA, 19 nt, Artificial Sequence
  Description of Artificial Sequence: Synthetic oligonucleotide
aaugacuaaugcauauucu

SEQ ID NO: 104986 - RNA, 19 nt, Artificial Sequence
  Description of Artificial Sequence: Synthetic oligonucleotide
ugagaacuguguuacuaug

SEQ ID NO: 104987 - RNA, 19 nt, Artificial Sequence
  Description of Artificial Sequence: Synthetic oligonucleotide
caagguauagaacuguaca

SEQ ID NO: 104988 - RNA, 19 nt, Artificial Sequence
  Description of Artificial Sequence: Synthetic oligonucleotide
aaguguuuccuaauuugag

SEQ ID NO: 104989 - RNA, 19 nt, Artificial Sequence
  Description of Artificial Sequence: Synthetic oligonucleotide
gucaugguaauuuuaugca

SEQ ID NO: 104990 - RNA, 19 nt, Artificial Sequence
  Description of Artificial Sequence: Synthetic oligonucleotide
acauagugcacguauguau

SEQ ID NO: 104991 - RNA, 19 nt, Artificial Sequence
  Description of Artificial Sequence: Synthetic oligonucleotide
uuugcugauuaauggacaa

SEQ ID NO: 104992 - RNA, 19 nt, Artificial Sequence
  Description of Artificial Sequence: Synthetic oligonucleotide
uugauauccacuccaucuc

SEQ ID NO: 104993 - RNA, 19 nt, Artificial Sequence
  Description of Artificial Sequence: Synthetic oligonucleotide
augccuagaacauucgagu

SEQ ID NO: 104994 - RNA, 19 nt, Artificial Sequence
  Description of Artificial Sequence: Synthetic oligonucleotide
gucacuauaaacguuuuga

SEQ ID NO: 104995 - RNA, 19 nt, Artificial Sequence
  Description of Artificial Sequence: Synthetic oligonucleotide
auuaaucuuguacaugguu

SEQ ID NO: 104996 - RNA, 19 nt, Artificial Sequence
  Description of Artificial Sequence: Synthetic oligonucleotide
augacuaaugcauauucua

SEQ ID NO: 104997 - RNA, 19 nt, Artificial Sequence
  Description of Artificial Sequence: Synthetic oligonucleotide
guaagaaccauaauuccca

SEQ ID NO: 104998 - RNA, 19 nt, Artificial Sequence
  Description of Artificial Sequence: Synthetic oligonucleotide
aggugcauauuagagcuac

SEQ ID NO: 104999 - RNA, 19 nt, Artificial Sequence
  Description of Artificial Sequence: Synthetic oligonucleotide
ugaaugacucucagauaag

SEQ ID NO: 105000 - RNA, 19 nt, Artificial Sequence
  Description of Artificial Sequence: Synthetic oligonucleotide
guuuaagugaguucuaagu

SEQ ID NO: 105001 - RNA, 19 nt, Artificial Sequence
  Description of Artificial Sequence: Synthetic oligonucleotide
ugaccuuuuguugggauca

SEQ ID NO: 105002 - RNA, 19 nt, Artificial Sequence
  Description of Artificial Sequence: Synthetic oligonucleotide
uagagcuacaggcuauucu

SEQ ID NO: 105003 - RNA, 19 nt, Artificial Sequence
  Description of Artificial Sequence: Synthetic oligonucleotide
cuauaaacguuuugaugac

SEQ ID NO: 105004 - RNA, 19 nt, Artificial Sequence
  Description of Artificial Sequence: Synthetic oligonucleotide
uuaugugaucuguaguuau

SEQ ID NO: 105005 - RNA, 19 nt, Artificial Sequence
  Description of Artificial Sequence: Synthetic oligonucleotide
uguaacgaaguucccugcu

SEQ ID NO: 105006 - RNA, 19 nt, Artificial Sequence
  Description of Artificial Sequence: Synthetic oligonucleotide
accaucuaaauuaccagag

SEQ ID NO: 105007 - RNA, 19 nt, Artificial Sequence
  Description of Artificial Sequence: Synthetic oligonucleotide
aggucugaugauuagcgga

SEQ ID NO: 105008 - RNA, 19 nt, Artificial Sequence
  Description of Artificial Sequence: Synthetic oligonucleotide
ucacuauaaacguuuugau

SEQ ID NO: 105009 - RNA, 19 nt, Artificial Sequence
  Description of Artificial Sequence: Synthetic oligonucleotide
gaccaucuaaauuaccaga

SEQ ID NO: 105010 - RNA, 19 nt, Artificial Sequence
  Description of Artificial Sequence: Synthetic oligonucleotide
uuagcggagccucuguacu

SEQ ID NO: 105011 - RNA, 19 nt, Artificial Sequence
  Description of Artificial Sequence: Synthetic oligonucleotide
aaacguuuugaugacggau

SEQ ID NO: 105012 - RNA, 19 nt, Artificial Sequence
  Description of Artificial Sequence: Synthetic oligonucleotide
aauauaggguacaaauaaa

SEQ ID NO: 105013 - RNA, 19 nt, Artificial Sequence
  Description of Artificial Sequence: Synthetic oligonucleotide
caucaauauagaaugacua

SEQ ID NO: 105014 - RNA, 19 nt, Artificial Sequence
  Description of Artificial Sequence: Synthetic oligonucleotide
ccaacaaauaaucuggcug

SEQ ID NO: 105015 - RNA, 19 nt, Artificial Sequence
  Description of Artificial Sequence: Synthetic oligonucleotide
acuguacaaugccuagaac

SEQ ID NO: 105016 - RNA, 19 nt, Artificial Sequence
  Description of Artificial Sequence: Synthetic oligonucleotide
uaacuaucgcugaccacag

SEQ ID NO: 105017 - RNA, 19 nt, Artificial Sequence
  Description of Artificial Sequence: Synthetic oligonucleotide
uauuaagaauguacugcaa

SEQ ID NO: 105018 - RNA, 19 nt, Artificial Sequence
  Description of Artificial Sequence: Synthetic oligonucleotide
ucauaccaacuacagaaua

SEQ ID NO: 105019 - RNA, 19 nt, Artificial Sequence
  Description of Artificial Sequence: Synthetic oligonucleotide
aucuuacacaaucucauuu

SEQ ID NO: 105020 - RNA, 19 nt, Artificial Sequence
  Description of Artificial Sequence: Synthetic oligonucleotide
agagcaauucccgccaccg

SEQ ID NO: 105021 - RNA, 19 nt, Artificial Sequence
  Description of Artificial Sequence: Synthetic oligonucleotide
aaguguaacgaaguucccu

SEQ ID NO: 105022 - RNA, 19 nt, Artificial Sequence
  Description of Artificial Sequence: Synthetic oligonucleotide
accaaaugagcagaugcuc

SEQ ID NO: 105023 - RNA, 19 nt, Artificial Sequence
  Description of Artificial Sequence: Synthetic oligonucleotide
ucucagauaagguggcagu

SEQ ID NO: 105024 - RNA, 19 nt, Artificial Sequence
  Description of Artificial Sequence: Synthetic oligonucleotide
uacuaucuauuagcaaagg

SEQ ID NO: 105025 - RNA, 19 nt, Artificial Sequence
  Description of Artificial Sequence: Synthetic oligonucleotide
auauaggguacaaauaaaa

SEQ ID NO: 105026 - RNA, 19 nt, Artificial Sequence
  Description of Artificial Sequence: Synthetic oligonucleotide
aggcuagugaguuuucugu

SEQ ID NO: 105027 - RNA, 19 nt, Artificial Sequence
  Description of Artificial Sequence: Synthetic oligonucleotide
ucgauauucagcugugcau

SEQ ID NO: 105028 - RNA, 19 nt, Artificial Sequence
  Description of Artificial Sequence: Synthetic oligonucleotide
aguaauuauguuggguaug

SEQ ID NO: 105029 - RNA, 19 nt, Artificial Sequence
  Description of Artificial Sequence: Synthetic oligonucleotide
ggaucuagcaguaagucac

SEQ ID NO: 105030 - RNA, 19 nt, Artificial Sequence
  Description of Artificial Sequence: Synthetic oligonucleotide
acuaaucaguuucuaguau

SEQ ID NO: 105031 - RNA, 19 nt, Artificial Sequence
  Description of Artificial Sequence: Synthetic oligonucleotide
uugaugaagaguacauauu

SEQ ID NO: 105032 - RNA, 19 nt, Artificial Sequence
  Description of Artificial Sequence: Synthetic oligonucleotide
acuagugucuagucagaug

SEQ ID NO: 105033 - RNA, 19 nt, Artificial Sequence
  Description of Artificial Sequence: Synthetic oligonucleotide
aguucuaaguuaugguaaa

SEQ ID NO: 105034 - RNA, 19 nt, Artificial Sequence
  Description of Artificial Sequence: Synthetic oligonucleotide
cacuaaaagcucacuuuag

SEQ ID NO: 105035 - RNA, 19 nt, Artificial Sequence
  Description of Artificial Sequence: Synthetic oligonucleotide
uucuaaguuaugguaaaua

SEQ ID NO: 105036 - RNA, 19 nt, Artificial Sequence
  Description of Artificial Sequence: Synthetic oligonucleotide
ugccgcuggaacagaauag

SEQ ID NO: 105037 - RNA, 19 nt, Artificial Sequence
  Description of Artificial Sequence: Synthetic oligonucleotide
aggaucuagcaguaaguca

SEQ ID NO: 105038 - RNA, 19 nt, Artificial Sequence
  Description of Artificial Sequence: Synthetic oligonucleotide
gucuagucagaugcaaugg

SEQ ID NO: 105039 - RNA, 19 nt, Artificial Sequence
  Description of Artificial Sequence: Synthetic oligonucleotide
gugcauauuagagcuacag

SEQ ID NO: 105040 - RNA, 19 nt, Artificial Sequence
  Description of Artificial Sequence: Synthetic oligonucleotide
uagcaguaagucacuauaa

SEQ ID NO: 105041 - RNA, 19 nt, Artificial Sequence
  Description of Artificial Sequence: Synthetic oligonucleotide
cuaaauuaccagaggucuc

SEQ ID NO: 105042 - RNA, 19 nt, Artificial Sequence
  Description of Artificial Sequence: Synthetic oligonucleotide
gagaucgucuaaacauugg

SEQ ID NO: 105043 - RNA, 19 nt, Artificial Sequence
  Description of Artificial Sequence: Synthetic oligonucleotide
uucaagaaaagggcuacuc

SEQ ID NO: 105044 - RNA, 19 nt, Artificial Sequence
  Description of Artificial Sequence: Synthetic oligonucleotide
auuucacuaacagaacuaa

SEQ ID NO: 105045 - RNA, 19 nt, Artificial Sequence
  Description of Artificial Sequence: Synthetic oligonucleotide
uguuuccuaauuugagauc

SEQ ID NO: 105046 - RNA, 19 nt, Artificial Sequence
  Description of Artificial Sequence: Synthetic oligonucleotide
aauuaccagaggucucuaa

SEQ ID NO: 105047 - RNA, 19 nt, Artificial Sequence
  Description of Artificial Sequence: Synthetic oligonucleotide
uuuaugugaucuguaguua

SEQ ID NO: 105048 - RNA, 19 nt, Artificial Sequence
  Description of Artificial Sequence: Synthetic oligonucleotide
ucacuuuagcauuaaucuu

SEQ ID NO: 105049 - RNA, 19 nt, Artificial Sequence
  Description of Artificial Sequence: Synthetic oligonucleotide
agucacuauaaacguuuug

SEQ ID NO: 105050 - RNA, 19 nt, Artificial Sequence
  Description of Artificial Sequence: Synthetic oligonucleotide
auauucuauaguggaagca

SEQ ID NO: 105051 - RNA, 19 nt, Artificial Sequence
  Description of Artificial Sequence: Synthetic oligonucleotide
ugucgagcggauuuccaga

SEQ ID NO: 105052 - RNA, 19 nt, Artificial Sequence
  Description of Artificial Sequence: Synthetic oligonucleotide
aguuacuaucuauuagcaa

SEQ ID NO: 105053 - RNA, 19 nt, Artificial Sequence
  Description of Artificial Sequence: Synthetic oligonucleotide
aacguuuugaugacggaua

SEQ ID NO: 105054 - RNA, 19 nt, Artificial Sequence
  Description of Artificial Sequence: Synthetic oligonucleotide
guccuauguagagauaacc

SEQ ID NO: 105055 - RNA, 19 nt, Artificial Sequence
  Description of Artificial Sequence: Synthetic oligonucleotide
ugagguuaguaauuauguu

SEQ ID NO: 105056 - RNA, 19 nt, Artificial Sequence
  Description of Artificial Sequence: Synthetic oligonucleotide
uuuucacggcauucaaagu

SEQ ID NO: 105057 - RNA, 19 nt, Artificial Sequence
  Description of Artificial Sequence: Synthetic oligonucleotide
agaauagucucaauccagu

SEQ ID NO: 105058 - RNA, 19 nt, Artificial Sequence
  Description of Artificial Sequence: Synthetic oligonucleotide
uguccuauguagagauaac

SEQ ID NO: 105059 - RNA, 19 nt, Artificial Sequence
  Description of Artificial Sequence: Synthetic oligonucleotide
ugaugacggauauuuuaaa

SEQ ID NO: 105060 - RNA, 19 nt, Artificial Sequence
  Description of Artificial Sequence: Synthetic oligonucleotide
aauucccgccaccguaucu

SEQ ID NO: 105061 - RNA, 19 nt, Artificial Sequence
  Description of Artificial Sequence: Synthetic oligonucleotide
cauauauucuauaguggaa

SEQ ID NO: 105062 - RNA, 19 nt, Artificial Sequence
  Description of Artificial Sequence: Synthetic oligonucleotide
caucuaaauuaccagaggu

SEQ ID NO: 105063 - RNA, 19 nt, Artificial Sequence
  Description of Artificial Sequence: Synthetic oligonucleotide
ugcucgauauucagcugug

SEQ ID NO: 105064 - RNA, 19 nt, Artificial Sequence
  Description of Artificial Sequence: Synthetic oligonucleotide
accagaggucucuaacaag

SEQ ID NO: 105065 - RNA, 19 nt, Artificial Sequence
  Description of Artificial Sequence: Synthetic oligonucleotide
cuagcaguaagucacuaua

SEQ ID NO: 105066 - RNA, 19 nt, Artificial Sequence
  Description of Artificial Sequence: Synthetic oligonucleotide
gguuauaaguguuuccuaa

SEQ ID NO: 105067 - RNA, 19 nt, Artificial Sequence
  Description of Artificial Sequence: Synthetic oligonucleotide
uuugaccuuuuguugggau

SEQ ID NO: 105068 - RNA, 19 nt, Artificial Sequence
  Description of Artificial Sequence: Synthetic oligonucleotide
uugaccuuuuguugggauc

SEQ ID NO: 105069 - RNA, 19 nt, Artificial Sequence
  Description of Artificial Sequence: Synthetic oligonucleotide
cagacuguuaaaucacuga

SEQ ID NO: 105070 - RNA, 19 nt, Artificial Sequence
  Description of Artificial Sequence: Synthetic oligonucleotide
auucgaguaagaaccauaa

SEQ ID NO: 105071 - RNA, 19 nt, Artificial Sequence
  Description of Artificial Sequence: Synthetic oligonucleotide
gguuaguaauuauguuggg

SEQ ID NO: 105072 - RNA, 19 nt, Artificial Sequence
  Description of Artificial Sequence: Synthetic oligonucleotide
gugucgagcggauuuccag

SEQ ID NO: 105073 - RNA, 19 nt, Artificial Sequence
  Description of Artificial Sequence: Synthetic oligonucleotide
ucagauaagguggcaguaa

SEQ ID NO: 105074 - RNA, 19 nt, Artificial Sequence
  Description of Artificial Sequence: Synthetic oligonucleotide
caagaggucucuuguuaac

SEQ ID NO: 105075 - RNA, 19 nt, Artificial Sequence
  Description of Artificial Sequence: Synthetic oligonucleotide
uuuccuaauuugagaucgu

SEQ ID NO: 105076 - RNA, 19 nt, Artificial Sequence
  Description of Artificial Sequence: Synthetic oligonucleotide
ccucuguacuucuugauac

SEQ ID NO: 105077 - RNA, 19 nt, Artificial Sequence
  Description of Artificial Sequence: Synthetic oligonucleotide
ugauuagcggagccucugu

SEQ ID NO: 105078 - RNA, 19 nt, Artificial Sequence
  Description of Artificial Sequence: Synthetic oligonucleotide
gucgagcggauuuccagag

SEQ ID NO: 105079 - RNA, 19 nt, Artificial Sequence
  Description of Artificial Sequence: Synthetic oligonucleotide
uacuccagaccaucuaaau

SEQ ID NO: 105080 - RNA, 19 nt, Artificial Sequence
  Description of Artificial Sequence: Synthetic oligonucleotide
aggccgccuaaugaggugc

SEQ ID NO: 105081 - RNA, 19 nt, Artificial Sequence
  Description of Artificial Sequence: Synthetic oligonucleotide
uaucuuacacaaucucauu

SEQ ID NO: 105082 - RNA, 19 nt, Artificial Sequence
  Description of Artificial Sequence: Synthetic oligonucleotide
aggcuauucucugacauau

SEQ ID NO: 105083 - RNA, 19 nt, Artificial Sequence
  Description of Artificial Sequence: Synthetic oligonucleotide
caauacaaugaccaaggua

SEQ ID NO: 105084 - RNA, 19 nt, Artificial Sequence
  Description of Artificial Sequence: Synthetic oligonucleotide
uucgaguaagaaccauaau

SEQ ID NO: 105085 - RNA, 19 nt, Artificial Sequence
  Description of Artificial Sequence: Synthetic oligonucleotide
cauaacuaucgcugaccac

SEQ ID NO: 105086 - RNA, 19 nt, Artificial Sequence
  Description of Artificial Sequence: Synthetic oligonucleotide
uuagagcaauucccgccac

SEQ ID NO: 105087 - RNA, 19 nt, Artificial Sequence
  Description of Artificial Sequence: Synthetic oligonucleotide
acguuuugaugacggauau

SEQ ID NO: 105088 - RNA, 19 nt, Artificial Sequence
  Description of Artificial Sequence: Synthetic oligonucleotide
agcaauucccgccaccgua

SEQ ID NO: 105089 - RNA, 19 nt, Artificial Sequence
  Description of Artificial Sequence: Synthetic oligonucleotide
cauagugcacguauguaua

SEQ ID NO: 105090 - RNA, 19 nt, Artificial Sequence
  Description of Artificial Sequence: Synthetic oligonucleotide
uuaugguacugugcucugc

SEQ ID NO: 105091 - RNA, 19 nt, Artificial Sequence
  Description of Artificial Sequence: Synthetic oligonucleotide
guguaacgaaguucccugc

SEQ ID NO: 105092 - RNA, 19 nt, Artificial Sequence
  Description of Artificial Sequence: Synthetic oligonucleotide
cuaauuugagaucgucuaa

SEQ ID NO: 105093 - RNA, 19 nt, Artificial Sequence
  Description of Artificial Sequence: Synthetic oligonucleotide
agaauugacuuaacauaca

SEQ ID NO: 105094 - RNA, 19 nt, Artificial Sequence
  Description of Artificial Sequence: Synthetic oligonucleotide
ggucugaugauuagcggag

SEQ ID NO: 105095 - RNA, 19 nt, Artificial Sequence
  Description of Artificial Sequence: Synthetic oligonucleotide
uuccuaauuugagaucguc

SEQ ID NO: 105096 - RNA, 19 nt, Artificial Sequence
  Description of Artificial Sequence: Synthetic oligonucleotide
ccaucuaaauuaccagagg

SEQ ID NO: 105097 - RNA, 19 nt, Artificial Sequence
  Description of Artificial Sequence: Synthetic oligonucleotide
uacaggcuauucucugaca

SEQ ID NO: 105098 - RNA, 19 nt, Artificial Sequence
  Description of Artificial Sequence: Synthetic oligonucleotide
guguccuauguagagauaa

SEQ ID NO: 105099 - RNA, 19 nt, Artificial Sequence
  Description of Artificial Sequence: Synthetic oligonucleotide
cuuagagcauaggcuagug

SEQ ID NO: 105100 - RNA, 19 nt, Artificial Sequence
  Description of Artificial Sequence: Synthetic oligonucleotide
guuaguaauuauguugggu

SEQ ID NO: 105101 - RNA, 19 nt, Artificial Sequence
  Description of Artificial Sequence: Synthetic oligonucleotide
gaauugguggccacuguaa

SEQ ID NO: 105102 - RNA, 19 nt, Artificial Sequence
  Description of Artificial Sequence: Synthetic oligonucleotide
accguaucuguuccuuuga

SEQ ID NO: 105103 - RNA, 19 nt, Artificial Sequence
  Description of Artificial Sequence: Synthetic oligonucleotide
uggucacuacuuuaccuuu

SEQ ID NO: 105104 - RNA, 19 nt, Artificial Sequence
  Description of Artificial Sequence: Synthetic oligonucleotide
cauucgaguaagaaccaua

SEQ ID NO: 105105 - RNA, 19 nt, Artificial Sequence
  Description of Artificial Sequence: Synthetic oligonucleotide
cuuuaaauauaggguacaa

SEQ ID NO: 105106 - RNA, 19 nt, Artificial Sequence
  Description of Artificial Sequence: Synthetic oligonucleotide
ggcuagugaguuuucugug

SEQ ID NO: 105107 - RNA, 19 nt, Artificial Sequence
  Description of Artificial Sequence: Synthetic oligonucleotide
ucccugaaugacucucaga

SEQ ID NO: 105108 - RNA, 19 nt, Artificial Sequence
  Description of Artificial Sequence: Synthetic oligonucleotide
agagcauaggcuagugagu

SEQ ID NO: 105109 - RNA, 19 nt, Artificial Sequence
  Description of Artificial Sequence: Synthetic oligonucleotide
augauuagcggagccucug

SEQ ID NO: 105110 - RNA, 19 nt, Artificial Sequence
  Description of Artificial Sequence: Synthetic oligonucleotide
agagauaaccggcccuuuu

SEQ ID NO: 105111 - RNA, 19 nt, Artificial Sequence
  Description of Artificial Sequence: Synthetic oligonucleotide
aacuaucgcugaccacaga

SEQ ID NO: 105112 - RNA, 19 nt, Artificial Sequence
  Description of Artificial Sequence: Synthetic oligonucleotide
gggcacuauguccauaaac

SEQ ID NO: 105113 - RNA, 19 nt, Artificial Sequence
  Description of Artificial Sequence: Synthetic oligonucleotide
aaagcuccgccagaaccaa

SEQ ID NO: 105114 - RNA, 19 nt, Artificial Sequence
  Description of Artificial Sequence: Synthetic oligonucleotide
gacggauauuuuaaauuua

SEQ ID NO: 105115 - RNA, 19 nt, Artificial Sequence
  Description of Artificial Sequence: Synthetic oligonucleotide
uagucucaauccaguuggu

SEQ ID NO: 105116 - RNA, 19 nt, Artificial Sequence
  Description of Artificial Sequence: Synthetic oligonucleotide
gauuagcggagccucugua

SEQ ID NO: 105117 - RNA, 19 nt, Artificial Sequence
  Description of Artificial Sequence: Synthetic oligonucleotide
caaccaggccgccuaauga

SEQ ID NO: 105118 - RNA, 19 nt, Artificial Sequence
  Description of Artificial Sequence: Synthetic oligonucleotide
caaugccuagaacauucga

SEQ ID NO: 105119 - RNA, 19 nt, Artificial Sequence
  Description of Artificial Sequence: Synthetic oligonucleotide
aacaaguaucuggccaaua

SEQ ID NO: 105120 - RNA, 19 nt, Artificial Sequence
  Description of Artificial Sequence: Synthetic oligonucleotide
aaauuaccagaggucucua

SEQ ID NO: 105121 - RNA, 19 nt, Artificial Sequence
  Description of Artificial Sequence: Synthetic oligonucleotide
ucgagcggauuuccagagu

SEQ ID NO: 105122 - RNA, 19 nt, Artificial Sequence
  Description of Artificial Sequence: Synthetic oligonucleotide
cacucacuacccacuccag

SEQ ID NO: 105123 - RNA, 19 nt, Artificial Sequence
  Description of Artificial Sequence: Synthetic oligonucleotide
cccaucaauauagaaugac

SEQ ID NO: 105124 - RNA, 19 nt, Artificial Sequence
  Description of Artificial Sequence: Synthetic oligonucleotide
caaacgcauguuccuuuuc

SEQ ID NO: 105125 - RNA, 19 nt, Artificial Sequence
  Description of Artificial Sequence: Synthetic oligonucleotide
aagucacuauaaacguuuu

SEQ ID NO: 105126 - RNA, 19 nt, Artificial Sequence
  Description of Artificial Sequence: Synthetic oligonucleotide
acauuaaccccaaggccau

SEQ ID NO: 105127 - RNA, 19 nt, Artificial Sequence
  Description of Artificial Sequence: Synthetic oligonucleotide
gucacuacuuuaccuuuua

SEQ ID NO: 105128 - RNA, 19 nt, Artificial Sequence
  Description of Artificial Sequence: Synthetic oligonucleotide
cacguccugcucgauauuc

SEQ ID NO: 105129 - RNA, 19 nt, Artificial Sequence
  Description of Artificial Sequence: Synthetic oligonucleotide
gucugaugauuagcggagc

SEQ ID NO: 105130 - RNA, 19 nt, Artificial Sequence
  Description of Artificial Sequence: Synthetic oligonucleotide
ccccaagcuguuaugguac

SEQ ID NO: 105131 - RNA, 19 nt, Artificial Sequence
  Description of Artificial Sequence: Synthetic oligonucleotide
cuaguuuaagugaguucua

SEQ ID NO: 105132 - RNA, 19 nt, Artificial Sequence
  Description of Artificial Sequence: Synthetic oligonucleotide
cagugucgagcggauuucc

SEQ ID NO: 105133 - RNA, 19 nt, Artificial Sequence
  Description of Artificial Sequence: Synthetic oligonucleotide
gaguucucaguaacaggaa

SEQ ID NO: 105134 - RNA, 19 nt, Artificial Sequence
  Description of Artificial Sequence: Synthetic oligonucleotide
agugaacaacuagugucua

SEQ ID NO: 105135 - RNA, 19 nt, Artificial Sequence
  Description of Artificial Sequence: Synthetic oligonucleotide
cuguagcaaagcuccgcca

SEQ ID NO: 105136 - RNA, 19 nt, Artificial Sequence
  Description of Artificial Sequence: Synthetic oligonucleotide
gccuagaacauucgaguaa

SEQ ID NO: 105137 - RNA, 19 nt, Artificial Sequence
  Description of Artificial Sequence: Synthetic oligonucleotide
gcauguuccuuuucuuaga

SEQ ID NO: 105138 - RNA, 19 nt, Artificial Sequence
  Description of Artificial Sequence: Synthetic oligonucleotide
agcagucaugguaauuuua

SEQ ID NO: 105139 - RNA, 19 nt, Artificial Sequence
  Description of Artificial Sequence: Synthetic oligonucleotide
agggcacuaaaagcucacu

SEQ ID NO: 105140 - RNA, 19 nt, Artificial Sequence
  Description of Artificial Sequence: Synthetic oligonucleotide
caggccgccuaaugaggug

SEQ ID NO: 105141 - RNA, 19 nt, Artificial Sequence
  Description of Artificial Sequence: Synthetic oligonucleotide
acauacaacuugggagaaa

SEQ ID NO: 105142 - RNA, 19 nt, Artificial Sequence
  Description of Artificial Sequence: Synthetic oligonucleotide
cgagcggauuuccagaguc

SEQ ID NO: 105143 - RNA, 19 nt, Artificial Sequence
  Description of Artificial Sequence: Synthetic oligonucleotide
caaguaucuggccaauauu

SEQ ID NO: 105144 - RNA, 19 nt, Artificial Sequence
  Description of Artificial Sequence: Synthetic oligonucleotide
aucuagcaguaagucacua

SEQ ID NO: 105145 - RNA, 19 nt, Artificial Sequence
  Description of Artificial Sequence: Synthetic oligonucleotide
cuguuccuuugaaguuaac

SEQ ID NO: 105146 - RNA, 19 nt, Artificial Sequence
  Description of Artificial Sequence: Synthetic oligonucleotide
ccauaauucccaucaauau

SEQ ID NO: 105147 - RNA, 19 nt, Artificial Sequence
  Description of Artificial Sequence: Synthetic oligonucleotide
cgccuaaugaggugccacg

SEQ ID NO: 105148 - RNA, 19 nt, Artificial Sequence
  Description of Artificial Sequence: Synthetic oligonucleotide
agggcacuauguccauaaa

SEQ ID NO: 105149 - RNA, 19 nt, Artificial Sequence
  Description of Artificial Sequence: Synthetic oligonucleotide
uagagauaaccggcccuuu

SEQ ID NO: 105150 - RNA, 19 nt, Artificial Sequence
  Description of Artificial Sequence: Synthetic oligonucleotide
guaagucacuauaaacguu

SEQ ID NO: 105151 - RNA, 19 nt, Artificial Sequence
  Description of Artificial Sequence: Synthetic oligonucleotide
gcggauuuccagagucagg

SEQ ID NO: 105152 - RNA, 19 nt, Artificial Sequence
  Description of Artificial Sequence: Synthetic oligonucleotide
ggauuucacuauaaaaguu

SEQ ID NO: 105153 - RNA, 19 nt, Artificial Sequence
  Description of Artificial Sequence: Synthetic oligonucleotide
guacugcaacccauaaaau

SEQ ID NO: 105154 - RNA, 19 nt, Artificial Sequence
  Description of Artificial Sequence: Synthetic oligonucleotide
gaggugcauauuagagcua

SEQ ID NO: 105155 - RNA, 19 nt, Artificial Sequence
  Description of Artificial Sequence: Synthetic oligonucleotide
ggugcauauuagagcuaca

SEQ ID NO: 105156 - RNA, 19 nt, Artificial Sequence
  Description of Artificial Sequence: Synthetic oligonucleotide
ccuugcuaguuuucucuaa

SEQ ID NO: 105157 - RNA, 19 nt, Artificial Sequence
  Description of Artificial Sequence: Synthetic oligonucleotide
ccuuccuuacuuuggaguu

SEQ ID NO: 105158 - RNA, 19 nt, Artificial Sequence
  Description of Artificial Sequence: Synthetic oligonucleotide
ccgccuaaugaggugccac

SEQ ID NO: 105159 - RNA, 19 nt, Artificial Sequence
  Description of Artificial Sequence: Synthetic oligonucleotide
gcaaacgcauguuccuuuu

SEQ ID NO: 105160 - RNA, 19 nt, Artificial Sequence
  Description of Artificial Sequence: Synthetic oligonucleotide
gugcaaacgcauguuccuu

SEQ ID NO: 105161 - RNA, 19 nt, Artificial Sequence
  Description of Artificial Sequence: Synthetic oligonucleotide
ccguaucuguuccuuugaa

SEQ ID NO: 105162 - RNA, 19 nt, Artificial Sequence
  Description of Artificial Sequence: Synthetic oligonucleotide
gcaauucccgccaccguau

SEQ ID NO: 105163 - RNA, 19 nt, Artificial Sequence
  Description of Artificial Sequence: Synthetic oligonucleotide
ggcaucucacuuguacaau

SEQ ID NO: 105164 - RNA, 19 nt, Artificial Sequence
  Description of Artificial Sequence: Synthetic oligonucleotide
ggucaacaccagauugagu

SEQ ID NO: 105165 - RNA, 19 nt, Artificial Sequence
  Description of Artificial Sequence: Synthetic oligonucleotide
ccaggccgccuaaugaggu

SEQ ID NO: 105166 - RNA, 19 nt, Artificial Sequence
  Description of Artificial Sequence: Synthetic oligonucleotide
ggucacuacuuuaccuuuu

SEQ ID NO: 105167 - RNA, 19 nt, Artificial Sequence
  Description of Artificial Sequence: Synthetic oligonucleotide
gccgccuaaugaggugcca

SEQ ID NO: 105168 - RNA, 19 nt, Artificial Sequence
  Description of Artificial Sequence: Synthetic oligonucleotide
cauuaaccccaaggccauu

SEQ ID NO: 105169 - RNA, 19 nt, Artificial Sequence
  Description of Artificial Sequence: Synthetic oligonucleotide
cguuuugaugacggauauu

SEQ ID NO: 105170 - RNA, 19 nt, Artificial Sequence
  Description of Artificial Sequence: Synthetic oligonucleotide
aacauagcgaugcacauac

SEQ ID NO: 105171 - RNA, 19 nt, Artificial Sequence
  Description of Artificial Sequence: Synthetic oligonucleotide
aauacuuacaauuuauagu

SEQ ID NO: 105172 - RNA, 19 nt, Artificial Sequence
  Description of Artificial Sequence: Synthetic oligonucleotide
uauuauagaaaggaaaggg

SEQ ID NO: 105173 - RNA, 19 nt, Artificial Sequence
  Description of Artificial Sequence: Synthetic oligonucleotide
aaacaucggaaguaaauac

SEQ ID NO: 105174 - RNA, 19 nt, Artificial Sequence
  Description of Artificial Sequence: Synthetic oligonucleotide
ucuuucaccaguaaucggg

SEQ ID NO: 105175 - RNA, 19 nt, Artificial Sequence
  Description of Artificial Sequence: Synthetic oligonucleotide
acuaaaucuauauuuaaug

SEQ ID NO: 105176 - RNA, 19 nt, Artificial Sequence
  Description of Artificial Sequence: Synthetic oligonucleotide
uuuucgucuaauaacagca

SEQ ID NO: 105177 - RNA, 19 nt, Artificial Sequence
  Description of Artificial Sequence: Synthetic oligonucleotide
uguguauuuauuaugcugu

SEQ ID NO: 105178 - RNA, 19 nt, Artificial Sequence
  Description of Artificial Sequence: Synthetic oligonucleotide
aacguugcauuacugaauc

SEQ ID NO: 105179 - RNA, 19 nt, Artificial Sequence
  Description of Artificial Sequence: Synthetic oligonucleotide
auaguuauggaaguuacac

SEQ ID NO: 105180 - RNA, 19 nt, Artificial Sequence
  Description of Artificial Sequence: Synthetic oligonucleotide
aaaucuauauuuaaugucu

SEQ ID NO: 105181 - RNA, 19 nt, Artificial Sequence
  Description of Artificial Sequence: Synthetic oligonucleotide
aauaauucccaauuucaga

SEQ ID NO: 105182 - RNA, 19 nt, Artificial Sequence
  Description of Artificial Sequence: Synthetic oligonucleotide
uuauggaaguuacacagag

SEQ ID NO: 105183 - RNA, 19 nt, Artificial Sequence
  Description of Artificial Sequence: Synthetic oligonucleotide
gauugauucacagagggag

SEQ ID NO: 105184 - RNA, 19 nt, Artificial Sequence
  Description of Artificial Sequence: Synthetic oligonucleotide
ugauagcuaauuuagacgu

SEQ ID NO: 105185 - RNA, 19 nt, Artificial Sequence
  Description of Artificial Sequence: Synthetic oligonucleotide
uuaccauaggauuaugcgg

SEQ ID NO: 105186 - RNA, 19 nt, Artificial Sequence
  Description of Artificial Sequence: Synthetic oligonucleotide
uuagacgucuuaauuuugg

SEQ ID NO: 105187 - RNA, 19 nt, Artificial Sequence
  Description of Artificial Sequence: Synthetic oligonucleotide
aguacacaacaauugcucc

SEQ ID NO: 105188 - RNA, 19 nt, Artificial Sequence
  Description of Artificial Sequence: Synthetic oligonucleotide
uccuauugcaaaauuucgg

SEQ ID NO: 105189 - RNA, 19 nt, Artificial Sequence
  Description of Artificial Sequence: Synthetic oligonucleotide
uguccaaacacucaaacua

SEQ ID NO: 105190 - RNA, 19 nt, Artificial Sequence
  Description of Artificial Sequence: Synthetic oligonucleotide
uguagcaguucuuaaaaug

SEQ ID NO: 105191 - RNA, 19 nt, Artificial Sequence
  Description of Artificial Sequence: Synthetic oligonucleotide
agagaaaccagaucaugac

SEQ ID NO: 105192 - RNA, 19 nt, Artificial Sequence
  Description of Artificial Sequence: Synthetic oligonucleotide
ucucuuucagauugaaacg

SEQ ID NO: 105193 - RNA, 19 nt, Artificial Sequence
  Description of Artificial Sequence: Synthetic oligonucleotide
aagacaauguugccucgcc

SEQ ID NO: 105194 - RNA, 19 nt, Artificial Sequence
  Description of Artificial Sequence: Synthetic oligonucleotide
aacuuacaaguccacacag

SEQ ID NO: 105195 - RNA, 19 nt, Artificial Sequence
  Description of Artificial Sequence: Synthetic oligonucleotide
agugcuagacuauauucac

SEQ ID NO: 105196 - RNA, 19 nt, Artificial Sequence
  Description of Artificial Sequence: Synthetic oligonucleotide
agauuguaaagccaaacca

SEQ ID NO: 105197 - RNA, 19 nt, Artificial Sequence
  Description of Artificial Sequence: Synthetic oligonucleotide
cugauagcuaauuuagacg

SEQ ID NO: 105198 - RNA, 19 nt, Artificial Sequence
  Description of Artificial Sequence: Synthetic oligonucleotide
aauguaucacuguaacucu

SEQ ID NO: 105199 - RNA, 19 nt, Artificial Sequence
  Description of Artificial Sequence: Synthetic oligonucleotide
gacgucuuaauuuugguuc

SEQ ID NO: 105200 - RNA, 19 nt, Artificial Sequence
  Description of Artificial Sequence: Synthetic oligonucleotide
ucucaaauuaucauaguua

SEQ ID NO: 105201 - RNA, 19 nt, Artificial Sequence
  Description of Artificial Sequence: Synthetic oligonucleotide
auaauucccaauuucagaa

SEQ ID NO: 105202 - RNA, 19 nt, Artificial Sequence
  Description of Artificial Sequence: Synthetic oligonucleotide
aaaauuucggucuccacuu

SEQ ID NO: 105203 - RNA, 19 nt, Artificial Sequence
  Description of Artificial Sequence: Synthetic oligonucleotide
cagauugauucacagaggg

SEQ ID NO: 105204 - RNA, 19 nt, Artificial Sequence
  Description of Artificial Sequence: Synthetic oligonucleotide
cucggcauuauuuaacucc

SEQ ID NO: 105205 - RNA, 19 nt, Artificial Sequence
  Description of Artificial Sequence: Synthetic oligonucleotide
agacagauagcuaaacacc

SEQ ID NO: 105206 - RNA, 19 nt, Artificial Sequence
  Description of Artificial Sequence: Synthetic oligonucleotide
auacgcagcaaacagaaga

SEQ ID NO: 105207 - RNA, 19 nt, Artificial Sequence
  Description of Artificial Sequence: Synthetic oligonucleotide
uauaacagcccaucgaggu

SEQ ID NO: 105208 - RNA, 19 nt, Artificial Sequence
  Description of Artificial Sequence: Synthetic oligonucleotide
uauugcucacauuaugaag

SEQ ID NO: 105209 - RNA, 19 nt, Artificial Sequence
  Description of Artificial Sequence: Synthetic oligonucleotide
agugaauucccuuaacacu

SEQ ID NO: 105210 - RNA, 19 nt, Artificial Sequence
  Description of Artificial Sequence: Synthetic oligonucleotide
acacauauguuuuggucac

SEQ ID NO: 105211 - RNA, 19 nt, Artificial Sequence
  Description of Artificial Sequence: Synthetic oligonucleotide
caauagaaugccuuugccc

SEQ ID NO: 105212 - RNA, 19 nt, Artificial Sequence
  Description of Artificial Sequence: Synthetic oligonucleotide
ugcuagacuauauucacac

SEQ ID NO: 105213 - RNA, 19 nt, Artificial Sequence
  Description of Artificial Sequence: Synthetic oligonucleotide
aggacuauuauagaaagga

SEQ ID NO: 105214 - RNA, 19 nt, Artificial Sequence
  Description of Artificial Sequence: Synthetic oligonucleotide
uaccauaggauuaugcggu

SEQ ID NO: 105215 - RNA, 19 nt, Artificial Sequence
  Description of Artificial Sequence: Synthetic oligonucleotide
aggauuaugcgguuuauca

SEQ ID NO: 105216 - RNA, 19 nt, Artificial Sequence
  Description of Artificial Sequence: Synthetic oligonucleotide
uuauaacagcccaucgagg

SEQ ID NO: 105217 - RNA, 19 nt, Artificial Sequence
  Description of Artificial Sequence: Synthetic oligonucleotide
uaacucugguaacugaaag

SEQ ID NO: 105218 - RNA, 19 nt, Artificial Sequence
  Description of Artificial Sequence: Synthetic oligonucleotide
gauuaugcgguuuaucauc

SEQ ID NO: 105219 - RNA, 19 nt, Artificial Sequence
  Description of Artificial Sequence: Synthetic oligonucleotide
uuucccaacauagcgaugc

SEQ ID NO: 105220 - RNA, 19 nt, Artificial Sequence
  Description of Artificial Sequence: Synthetic oligonucleotide
ugaaacguugcauuacuga

SEQ ID NO: 105221 - RNA, 19 nt, Artificial Sequence
  Description of Artificial Sequence: Synthetic oligonucleotide
cacucaaccauguuagugc

SEQ ID NO: 105222 - RNA, 19 nt, Artificial Sequence
  Description of Artificial Sequence: Synthetic oligonucleotide
acagauacaccccacaaau

SEQ ID NO: 105223 - RNA, 19 nt, Artificial Sequence
  Description of Artificial Sequence: Synthetic oligonucleotide
ucuuaagacugauagcuaa

SEQ ID NO: 105224 - RNA, 19 nt, Artificial Sequence
  Description of Artificial Sequence: Synthetic oligonucleotide
cacauagucgaacuucucg

SEQ ID NO: 105225 - RNA, 19 nt, Artificial Sequence
  Description of Artificial Sequence: Synthetic oligonucleotide
ucuagauugauggcuaagc

SEQ ID NO: 105226 - RNA, 19 nt, Artificial Sequence
  Description of Artificial Sequence: Synthetic oligonucleotide
uaaucgggcagaaaccgcc

SEQ ID NO: 105227 - RNA, 19 nt, Artificial Sequence
  Description of Artificial Sequence: Synthetic oligonucleotide
aguaaucgggcagaaaccg

SEQ ID NO: 105228 - RNA, 19 nt, Artificial Sequence
  Description of Artificial Sequence: Synthetic oligonucleotide
cuagcauugguaacuauuc

SEQ ID NO: 105229 - RNA, 19 nt, Artificial Sequence
  Description of Artificial Sequence: Synthetic oligonucleotide
agauugauggcuaagcucu

SEQ ID NO: 105230 - RNA, 19 nt, Artificial Sequence
  Description of Artificial Sequence: Synthetic oligonucleotide
uucagauugaaacguugca

SEQ ID NO: 105231 - RNA, 19 nt, Artificial Sequence
  Description of Artificial Sequence: Synthetic oligonucleotide
aaaggaacuuacaagucca

SEQ ID NO: 105232 - RNA, 19 nt, Artificial Sequence
  Description of Artificial Sequence: Synthetic oligonucleotide
gacaauguugccucgccgc

SEQ ID NO: 105233 - RNA, 19 nt, Artificial Sequence
  Description of Artificial Sequence: Synthetic oligonucleotide
ucaacaugacccucugcgg

SEQ ID NO: 105234 - RNA, 19 nt, Artificial Sequence
  Description of Artificial Sequence: Synthetic oligonucleotide
auagaaaggaaaggguuuc

SEQ ID NO: 105235 - RNA, 19 nt, Artificial Sequence
  Description of Artificial Sequence: Synthetic oligonucleotide
uguacaacgcacgagguaa

SEQ ID NO: 105236 - RNA, 19 nt, Artificial Sequence
  Description of Artificial Sequence: Synthetic oligonucleotide
aagagacagauagcuaaac

SEQ ID NO: 105237 - RNA, 19 nt, Artificial Sequence
  Description of Artificial Sequence: Synthetic oligonucleotide
auugaaacguugcauuacu

SEQ ID NO: 105238 - RNA, 19 nt, Artificial Sequence
  Description of Artificial Sequence: Synthetic oligonucleotide
accgccauuagccaacguc

SEQ ID NO: 105239 - RNA, 19 nt, Artificial Sequence
  Description of Artificial Sequence: Synthetic oligonucleotide
gaugagcauaucaucaccc

SEQ ID NO: 105240 - RNA, 19 nt, Artificial Sequence
  Description of Artificial Sequence: Synthetic oligonucleotide
uuuagacgucuuaauuuug

SEQ ID NO: 105241 - RNA, 19 nt, Artificial Sequence
  Description of Artificial Sequence: Synthetic oligonucleotide
agaagugaauucccuuaac

SEQ ID NO: 105242 - RNA, 19 nt, Artificial Sequence
  Description of Artificial Sequence: Synthetic oligonucleotide
uagcgaugcacauacucag

SEQ ID NO: 105243 - RNA, 19 nt, Artificial Sequence
  Description of Artificial Sequence: Synthetic oligonucleotide
uacauucauagcuuuggac

SEQ ID NO: 105244 - RNA, 19 nt, Artificial Sequence
  Description of Artificial Sequence: Synthetic oligonucleotide
ucuccgaggaucaaguuuu

SEQ ID NO: 105245 - RNA, 19 nt, Artificial Sequence
  Description of Artificial Sequence: Synthetic oligonucleotide
agugucucaaauuaucaua

SEQ ID NO: 105246 - RNA, 19 nt, Artificial Sequence
  Description of Artificial Sequence: Synthetic oligonucleotide
uacagaaugugugugugug

SEQ ID NO: 105247 - RNA, 19 nt, Artificial Sequence
  Description of Artificial Sequence: Synthetic oligonucleotide
aaagcucaacucauaaaug

SEQ ID NO: 105248 - RNA, 19 nt, Artificial Sequence
  Description of Artificial Sequence: Synthetic oligonucleotide
ucggcauuauuuaacuccu

SEQ ID NO: 105249 - RNA, 19 nt, Artificial Sequence
  Description of Artificial Sequence: Synthetic oligonucleotide
agaccauuauaacagccca

SEQ ID NO: 105250 - RNA, 19 nt, Artificial Sequence
  Description of Artificial Sequence: Synthetic oligonucleotide
cuccuugcuuaauuaaggg

SEQ ID NO: 105251 - RNA, 19 nt, Artificial Sequence
  Description of Artificial Sequence: Synthetic oligonucleotide
agcaacacuaccugaccuc

SEQ ID NO: 105252 - RNA, 19 nt, Artificial Sequence
  Description of Artificial Sequence: Synthetic oligonucleotide
uuuacugauggcagcagua

SEQ ID NO: 105253 - RNA, 19 nt, Artificial Sequence
  Description of Artificial Sequence: Synthetic oligonucleotide
ucccugauaaaaucuaauc

SEQ ID NO: 105254 - RNA, 19 nt, Artificial Sequence
  Description of Artificial Sequence: Synthetic oligonucleotide
cacacauauguuuugguca

SEQ ID NO: 105255 - RNA, 19 nt, Artificial Sequence
  Description of Artificial Sequence: Synthetic oligonucleotide
aagugcuagacuauauuca

SEQ ID NO: 105256 - RNA, 19 nt, Artificial Sequence
  Description of Artificial Sequence: Synthetic oligonucleotide
agagacagauagcuaaaca

SEQ ID NO: 105257 - RNA, 19 nt, Artificial Sequence
  Description of Artificial Sequence: Synthetic oligonucleotide
uuacaaguccacacagucu

SEQ ID NO: 105258 - RNA, 19 nt, Artificial Sequence
  Description of Artificial Sequence: Synthetic oligonucleotide
aaggacuauuauagaaagg

SEQ ID NO: 105259 - RNA, 19 nt, Artificial Sequence
  Description of Artificial Sequence: Synthetic oligonucleotide
ucuuucccaacauagcgau

SEQ ID NO: 105260 - RNA, 19 nt, Artificial Sequence
  Description of Artificial Sequence: Synthetic oligonucleotide
auagcuaauuuagacgucu

SEQ ID NO: 105261 - RNA, 19 nt, Artificial Sequence
  Description of Artificial Sequence: Synthetic oligonucleotide
acagucauuaacaccauga

SEQ ID NO: 105262 - RNA, 19 nt, Artificial Sequence
  Description of Artificial Sequence: Synthetic oligonucleotide
uucucggcauuauuuaacu

SEQ ID NO: 105263 - RNA, 19 nt, Artificial Sequence
  Description of Artificial Sequence: Synthetic oligonucleotide
cuaagcucuaucucugaug

SEQ ID NO: 105264 - RNA, 19 nt, Artificial Sequence
  Description of Artificial Sequence: Synthetic oligonucleotide
cuuucaccaguaaucgggc

SEQ ID NO: 105265 - RNA, 19 nt, Artificial Sequence
  Description of Artificial Sequence: Synthetic oligonucleotide
ggaacuuacaaguccacac

SEQ ID NO: 105266 - RNA, 19 nt, Artificial Sequence
  Description of Artificial Sequence: Synthetic oligonucleotide
cacgagguaacuauugcuc

SEQ ID NO: 105267 - RNA, 19 nt, Artificial Sequence
  Description of Artificial Sequence: Synthetic oligonucleotide
agcuaaggggaagagacag

SEQ ID NO: 105268 - RNA, 19 nt, Artificial Sequence
  Description of Artificial Sequence: Synthetic oligonucleotide
acucaggguauuucgaacu

SEQ ID NO: 105269 - RNA, 19 nt, Artificial Sequence
  Description of Artificial Sequence: Synthetic oligonucleotide
cuauugcaaaauuucgguc

SEQ ID NO: 105270 - RNA, 19 nt, Artificial Sequence
  Description of Artificial Sequence: Synthetic oligonucleotide
auccuauugcaaaauuucg

SEQ ID NO: 105271 - RNA, 19 nt, Artificial Sequence
  Description of Artificial Sequence: Synthetic oligonucleotide
acuauugcucacauuauga

SEQ ID NO: 105272 - RNA, 19 nt, Artificial Sequence
  Description of Artificial Sequence: Synthetic oligonucleotide
gaaugugugugugugugug

SEQ ID NO: 105273 - RNA, 19 nt, Artificial Sequence
  Description of Artificial Sequence: Synthetic oligonucleotide
aaaacagcgcugaucucag

SEQ ID NO: 105274 - RNA, 19 nt, Artificial Sequence
  Description of Artificial Sequence: Synthetic oligonucleotide
ucagauugaaacguugcau

SEQ ID NO: 105275 - RNA, 19 nt, Artificial Sequence
  Description of Artificial Sequence: Synthetic oligonucleotide
agaaugccuuugcccaucc

SEQ ID NO: 105276 - RNA, 19 nt, Artificial Sequence
  Description of Artificial Sequence: Synthetic oligonucleotide
uuuacucuuaagacugaua

SEQ ID NO: 105277 - RNA, 19 nt, Artificial Sequence
  Description of Artificial Sequence: Synthetic oligonucleotide
uagugcauaugguugucca

SEQ ID NO: 105278 - RNA, 19 nt, Artificial Sequence
  Description of Artificial Sequence: Synthetic oligonucleotide
gaaucuuaauccacuuggc

SEQ ID NO: 105279 - RNA, 19 nt, Artificial Sequence
  Description of Artificial Sequence: Synthetic oligonucleotide
guaacagcccauucaagca

SEQ ID NO: 105280 - RNA, 19 nt, Artificial Sequence
  Description of Artificial Sequence: Synthetic oligonucleotide
ggccuaaggacuauuauag

SEQ ID NO: 105281 - RNA, 19 nt, Artificial Sequence
  Description of Artificial Sequence: Synthetic oligonucleotide
aaugugugugugugugugu

SEQ ID NO: 105282 - RNA, 19 nt, Artificial Sequence
  Description of Artificial Sequence: Synthetic oligonucleotide
uagugggcaccuuuaagcu

SEQ ID NO: 105283 - RNA, 19 nt, Artificial Sequence
  Description of Artificial Sequence: Synthetic oligonucleotide
ugugugugugugugugugg

SEQ ID NO: 105284 - RNA, 19 nt, Artificial Sequence
  Description of Artificial Sequence: Synthetic oligonucleotide
augaagaguuaguagcuau

SEQ ID NO: 105285 - RNA, 19 nt, Artificial Sequence
  Description of Artificial Sequence: Synthetic oligonucleotide
uggaguguaucaccagaca

SEQ ID NO: 105286 - RNA, 19 nt, Artificial Sequence
  Description of Artificial Sequence: Synthetic oligonucleotide
uauacgcagcaaacagaag

SEQ ID NO: 105287 - RNA, 19 nt, Artificial Sequence
  Description of Artificial Sequence: Synthetic oligonucleotide
acauauucauuaccagcca

SEQ ID NO: 105288 - RNA, 19 nt, Artificial Sequence
  Description of Artificial Sequence: Synthetic oligonucleotide
aaacaacagauucccugau

SEQ ID NO: 105289 - RNA, 19 nt, Artificial Sequence
  Description of Artificial Sequence: Synthetic oligonucleotide
ugagguguguacuggacuu

SEQ ID NO: 105290 - RNA, 19 nt, Artificial Sequence
  Description of Artificial Sequence: Synthetic oligonucleotide
accgacauggaaggcaaac

SEQ ID NO: 105291 - RNA, 19 nt, Artificial Sequence
  Description of Artificial Sequence: Synthetic oligonucleotide
uaaagggcuugugucaaca

SEQ ID NO: 105292 - RNA, 19 nt, Artificial Sequence
  Description of Artificial Sequence: Synthetic oligonucleotide
uggccuaaggacuauuaua

SEQ ID NO: 105293 - RNA, 19 nt, Artificial Sequence
  Description of Artificial Sequence: Synthetic oligonucleotide
acucaaccauguuagugca

SEQ ID NO: 105294 - RNA, 19 nt, Artificial Sequence
  Description of Artificial Sequence: Synthetic oligonucleotide
agauugaaacguugcauua

SEQ ID NO: 105295 - RNA, 19 nt, Artificial Sequence
  Description of Artificial Sequence: Synthetic oligonucleotide
uggacaguuugacuuuccu

SEQ ID NO: 105296 - RNA, 19 nt, Artificial Sequence
  Description of Artificial Sequence: Synthetic oligonucleotide
acgucuuaauuuugguuca

SEQ ID NO: 105297 - RNA, 19 nt, Artificial Sequence
  Description of Artificial Sequence: Synthetic oligonucleotide
aaccauguuagugcauaug

SEQ ID NO: 105298 - RNA, 19 nt, Artificial Sequence
  Description of Artificial Sequence: Synthetic oligonucleotide
ugcggcagcuacauggagu

SEQ ID NO: 105299 - RNA, 19 nt, Artificial Sequence
  Description of Artificial Sequence: Synthetic oligonucleotide
auuguaaagccaaaccaaa

SEQ ID NO: 105300 - RNA, 19 nt, Artificial Sequence
  Description of Artificial Sequence: Synthetic oligonucleotide
gugcagcuaaagcauagug

SEQ ID NO: 105301 - RNA, 19 nt, Artificial Sequence
  Description of Artificial Sequence: Synthetic oligonucleotide
uuagugcauaugguugucc

SEQ ID NO: 105302 - RNA, 19 nt, Artificial Sequence
  Description of Artificial Sequence: Synthetic oligonucleotide
agcaucgaccccuguggac

SEQ ID NO: 105303 - RNA, 19 nt, Artificial Sequence
  Description of Artificial Sequence: Synthetic oligonucleotide
ucuuucagauugaaacguu

SEQ ID NO: 105304 - RNA, 19 nt, Artificial Sequence
  Description of Artificial Sequence: Synthetic oligonucleotide
aaacguugcauuacugaau

SEQ ID NO: 105305 - RNA, 19 nt, Artificial Sequence
  Description of Artificial Sequence: Synthetic oligonucleotide
guauacgcagcaaacagaa

SEQ ID NO: 105306 - RNA, 19 nt, Artificial Sequence
  Description of Artificial Sequence: Synthetic oligonucleotide
ccaccguacagacagauac

SEQ ID NO: 105307 - RNA, 19 nt, Artificial Sequence
  Description of Artificial Sequence: Synthetic oligonucleotide
cagaaugugugugugugug

SEQ ID NO: 105308 - RNA, 19 nt, Artificial Sequence
  Description of Artificial Sequence: Synthetic oligonucleotide
ucaauggagcauagcugga

SEQ ID NO: 105309 - RNA, 19 nt, Artificial Sequence
  Description of Artificial Sequence: Synthetic oligonucleotide
uuaccgacuuuacccuuug

SEQ ID NO: 105310 - RNA, 19 nt, Artificial Sequence
  Description of Artificial Sequence: Synthetic oligonucleotide
auuaugcgguuuaucaucu

SEQ ID NO: 105311 - RNA, 19 nt, Artificial Sequence
  Description of Artificial Sequence: Synthetic oligonucleotide
uuagccaacgucgcagcca

SEQ ID NO: 105312 - RNA, 19 nt, Artificial Sequence
  Description of Artificial Sequence: Synthetic oligonucleotide
aguauacgcagcaaacaga

SEQ ID NO: 105313 - RNA, 19 nt, Artificial Sequence
  Description of Artificial Sequence: Synthetic oligonucleotide
uaguuuguugaaucuuaau

SEQ ID NO: 105314 - RNA, 19 nt, Artificial Sequence
  Description of Artificial Sequence: Synthetic oligonucleotide
uguguguguguguggccag

SEQ ID NO: 105315 - RNA, 19 nt, Artificial Sequence
  Description of Artificial Sequence: Synthetic oligonucleotide
cauacucaguucccaaauc

SEQ ID NO: 105316 - RNA, 19 nt, Artificial Sequence
  Description of Artificial Sequence: Synthetic oligonucleotide
uuucaccaguaaucgggca

SEQ ID NO: 105317 - RNA, 19 nt, Artificial Sequence
  Description of Artificial Sequence: Synthetic oligonucleotide
ccgccauuagccaacgucg

SEQ ID NO: 105318 - RNA, 19 nt, Artificial Sequence
  Description of Artificial Sequence: Synthetic oligonucleotide
agcauagcuggaaauaaaa

SEQ ID NO: 105319 - RNA, 19 nt, Artificial Sequence
  Description of Artificial Sequence: Synthetic oligonucleotide
uagucgaacuucucggcau

SEQ ID NO: 105320 - RNA, 19 nt, Artificial Sequence
  Description of Artificial Sequence: Synthetic oligonucleotide
aaaccuccggagggcagac

SEQ ID NO: 105321 - RNA, 19 nt, Artificial Sequence
  Description of Artificial Sequence: Synthetic oligonucleotide
aaaccgccauuagccaacg

SEQ ID NO: 105322 - RNA, 19 nt, Artificial Sequence
  Description of Artificial Sequence: Synthetic oligonucleotide
uguguguguguguguggcc

SEQ ID NO: 105323 - RNA, 19 nt, Artificial Sequence
  Description of Artificial Sequence: Synthetic oligonucleotide
agaaugugugugugugugu

SEQ ID NO: 105324 - RNA, 19 nt, Artificial Sequence
  Description of Artificial Sequence: Synthetic oligonucleotide
acagaaugugugugugugu

SEQ ID NO: 105325 - RNA, 19 nt, Artificial Sequence
  Description of Artificial Sequence: Synthetic oligonucleotide
cuugcuuaauuaagggaaa

SEQ ID NO: 105326 - RNA, 19 nt, Artificial Sequence
  Description of Artificial Sequence: Synthetic oligonucleotide
cucuuucccaacauagcga

SEQ ID NO: 105327 - RNA, 19 nt, Artificial Sequence
  Description of Artificial Sequence: Synthetic oligonucleotide
augugugugugugugugug

SEQ ID NO: 105328 - RNA, 19 nt, Artificial Sequence
  Description of Artificial Sequence: Synthetic oligonucleotide
cuaugaagaguuaguagcu

SEQ ID NO: 105329 - RNA, 19 nt, Artificial Sequence
  Description of Artificial Sequence: Synthetic oligonucleotide
cacugcagaccauuauaac

SEQ ID NO: 105330 - RNA, 19 nt, Artificial Sequence
  Description of Artificial Sequence: Synthetic oligonucleotide
ucauuguuaucagccaaua

SEQ ID NO: 105331 - RNA, 19 nt, Artificial Sequence
  Description of Artificial Sequence: Synthetic oligonucleotide
uggagcauagcuggaaaua

SEQ ID NO: 105332 - RNA, 19 nt, Artificial Sequence
  Description of Artificial Sequence: Synthetic oligonucleotide
agugguagugggcaccuuu

SEQ ID NO: 105333 - RNA, 19 nt, Artificial Sequence
  Description of Artificial Sequence: Synthetic oligonucleotide
auugauucacagagggagu

SEQ ID NO: 105334 - RNA, 19 nt, Artificial Sequence
  Description of Artificial Sequence: Synthetic oligonucleotide
cccugauaaaaucuaauca

SEQ ID NO: 105335 - RNA, 19 nt, Artificial Sequence
  Description of Artificial Sequence: Synthetic oligonucleotide
guauuucgaacugcuucag

SEQ ID NO: 105336 - RNA, 19 nt, Artificial Sequence
  Description of Artificial Sequence: Synthetic oligonucleotide
gauagcuaauuuagacguc

SEQ ID NO: 105337 - RNA, 19 nt, Artificial Sequence
  Description of Artificial Sequence: Synthetic oligonucleotide
gagguaacuauugcucaca

SEQ ID NO: 105338 - RNA, 19 nt, Artificial Sequence
  Description of Artificial Sequence: Synthetic oligonucleotide
ugugcagcuaaagcauagu

SEQ ID NO: 105339 - RNA, 19 nt, Artificial Sequence
  Description of Artificial Sequence: Synthetic oligonucleotide
ugugugugugugugugugu

SEQ ID NO: 105340 - RNA, 19 nt, Artificial Sequence
  Description of Artificial Sequence: Synthetic oligonucleotide
ucucggcauuauuuaacuc

SEQ ID NO: 105341 - RNA, 19 nt, Artificial Sequence
  Description of Artificial Sequence: Synthetic oligonucleotide
guguguguguguguguggc

SEQ ID NO: 105342 - RNA, 19 nt, Artificial Sequence
  Description of Artificial Sequence: Synthetic oligonucleotide
ccuaaggacuauuauagaa

SEQ ID NO: 105343 - RNA, 19 nt, Artificial Sequence
  Description of Artificial Sequence: Synthetic oligonucleotide
agguaacuauugcucacau

SEQ ID NO: 105344 - RNA, 19 nt, Artificial Sequence
  Description of Artificial Sequence: Synthetic oligonucleotide
uauuaccgacuuuacccuu

SEQ ID NO: 105345 - RNA, 19 nt, Artificial Sequence
  Description of Artificial Sequence: Synthetic oligonucleotide
cuaguaucccaaccauguc

SEQ ID NO: 105346 - RNA, 19 nt, Artificial Sequence
  Description of Artificial Sequence: Synthetic oligonucleotide
auaacagcccaucgagguu

SEQ ID NO: 105347 - RNA, 19 nt, Artificial Sequence
  Description of Artificial Sequence: Synthetic oligonucleotide
aucaaugugugagguaaaa

SEQ ID NO: 105348 - RNA, 19 nt, Artificial Sequence
  Description of Artificial Sequence: Synthetic oligonucleotide
ggacugaguacucuuucac

SEQ ID NO: 105349 - RNA, 19 nt, Artificial Sequence
  Description of Artificial Sequence: Synthetic oligonucleotide
uaggauuaugcgguuuauc

SEQ ID NO: 105350 - RNA, 19 nt, Artificial Sequence
  Description of Artificial Sequence: Synthetic oligonucleotide
acacaagauuguaaagcca

SEQ ID NO: 105351 - RNA, 19 nt, Artificial Sequence
  Description of Artificial Sequence: Synthetic oligonucleotide
uugcaaaauuucggucucc

SEQ ID NO: 105352 - RNA, 19 nt, Artificial Sequence
  Description of Artificial Sequence: Synthetic oligonucleotide
gugugugugugugugugug

SEQ ID NO: 105353 - RNA, 19 nt, Artificial Sequence
  Description of Artificial Sequence: Synthetic oligonucleotide
uguguguguguggccaggc

SEQ ID NO: 105354 - RNA, 19 nt, Artificial Sequence
  Description of Artificial Sequence: Synthetic oligonucleotide
uucccaacauagcgaugca

SEQ ID NO: 105355 - RNA, 19 nt, Artificial Sequence
  Description of Artificial Sequence: Synthetic oligonucleotide
acacugcagaccauuauaa

SEQ ID NO: 105356 - RNA, 19 nt, Artificial Sequence
  Description of Artificial Sequence: Synthetic oligonucleotide
ugguagugggcaccuuuaa

SEQ ID NO: 105357 - RNA, 19 nt, Artificial Sequence
  Description of Artificial Sequence: Synthetic oligonucleotide
guggaguguaucaccagac

SEQ ID NO: 105358 - RNA, 19 nt, Artificial Sequence
  Description of Artificial Sequence: Synthetic oligonucleotide
cuagauugauggcuaagcu

SEQ ID NO: 105359 - RNA, 19 nt, Artificial Sequence
  Description of Artificial Sequence: Synthetic oligonucleotide
uguugccucgccgccgccg

SEQ ID NO: 105360 - RNA, 19 nt, Artificial Sequence
  Description of Artificial Sequence: Synthetic oligonucleotide
ccgacuuuacccuuugauc

SEQ ID NO: 105361 - RNA, 19 nt, Artificial Sequence
  Description of Artificial Sequence: Synthetic oligonucleotide
acuguacaaaacagcgcug

SEQ ID NO: 105362 - RNA, 19 nt, Artificial Sequence
  Description of Artificial Sequence: Synthetic oligonucleotide
caauguugccucgccgccg

SEQ ID NO: 105363 - RNA, 19 nt, Artificial Sequence
  Description of Artificial Sequence: Synthetic oligonucleotide
ugauucacagagggaguuc

SEQ ID NO: 105364 - RNA, 19 nt, Artificial Sequence
  Description of Artificial Sequence: Synthetic oligonucleotide
agauugauucacagaggga

SEQ ID NO: 105365 - RNA, 19 nt, Artificial Sequence
  Description of Artificial Sequence: Synthetic oligonucleotide
uacaacgcacgagguaacu

SEQ ID NO: 105366 - RNA, 19 nt, Artificial Sequence
  Description of Artificial Sequence: Synthetic oligonucleotide
gacccucugcggcagcuac

SEQ ID NO: 105367 - RNA, 19 nt, Artificial Sequence
  Description of Artificial Sequence: Synthetic oligonucleotide
cagauugaaacguugcauu

SEQ ID NO: 105368 - RNA, 19 nt, Artificial Sequence
  Description of Artificial Sequence: Synthetic oligonucleotide
cuaccugaccucauuuaaa

SEQ ID NO: 105369 - RNA, 19 nt, Artificial Sequence
  Description of Artificial Sequence: Synthetic oligonucleotide
ucccaacauagcgaugcac

SEQ ID NO: 105370 - RNA, 19 nt, Artificial Sequence
  Description of Artificial Sequence: Synthetic oligonucleotide
agcgcugaucucagaaaag

SEQ ID NO: 105371 - RNA, 19 nt, Artificial Sequence
  Description of Artificial Sequence: Synthetic oligonucleotide
cagaagugaauucccuuaa

SEQ ID NO: 105372 - RNA, 19 nt, Artificial Sequence
  Description of Artificial Sequence: Synthetic oligonucleotide
caucgaccccuguggacag

SEQ ID NO: 105373 - RNA, 19 nt, Artificial Sequence
  Description of Artificial Sequence: Synthetic oligonucleotide
cuuuggugucuccaauaga

SEQ ID NO: 105374 - RNA, 19 nt, Artificial Sequence
  Description of Artificial Sequence: Synthetic oligonucleotide
cccaacauagcgaugcaca

SEQ ID NO: 105375 - RNA, 19 nt, Artificial Sequence
  Description of Artificial Sequence: Synthetic oligonucleotide
guguguacuggacuuggua

SEQ ID NO: 105376 - RNA, 19 nt, Artificial Sequence
  Description of Artificial Sequence: Synthetic oligonucleotide
guguguguguguguggcca

SEQ ID NO: 105377 - RNA, 19 nt, Artificial Sequence
  Description of Artificial Sequence: Synthetic oligonucleotide
cauagcaugccagcacuca

SEQ ID NO: 105378 - RNA, 19 nt, Artificial Sequence
  Description of Artificial Sequence: Synthetic oligonucleotide
ccuauugcaaaauuucggu

SEQ ID NO: 105379 - RNA, 19 nt, Artificial Sequence
  Description of Artificial Sequence: Synthetic oligonucleotide
guacuggacuugguauucc

SEQ ID NO: 105380 - RNA, 19 nt, Artificial Sequence
  Description of Artificial Sequence: Synthetic oligonucleotide
cuuaagacugauagcuaau

SEQ ID NO: 105381 - RNA, 19 nt, Artificial Sequence
  Description of Artificial Sequence: Synthetic oligonucleotide
guuagugcauaugguuguc

SEQ ID NO: 105382 - RNA, 19 nt, Artificial Sequence
  Description of Artificial Sequence: Synthetic oligonucleotide
ucccagcuaaggggaagag

SEQ ID NO: 105383 - RNA, 19 nt, Artificial Sequence
  Description of Artificial Sequence: Synthetic oligonucleotide
acgcacgagguaacuauug

SEQ ID NO: 105384 - RNA, 19 nt, Artificial Sequence
  Description of Artificial Sequence: Synthetic oligonucleotide
aacgcacgagguaacuauu

SEQ ID NO: 105385 - RNA, 19 nt, Artificial Sequence
  Description of Artificial Sequence: Synthetic oligonucleotide
caggguauuucgaacugcu

SEQ ID NO: 105386 - RNA, 19 nt, Artificial Sequence
  Description of Artificial Sequence: Synthetic oligonucleotide
ggaguguaucaccagacau

SEQ ID NO: 105387 - RNA, 19 nt, Artificial Sequence
  Description of Artificial Sequence: Synthetic oligonucleotide
auuaccgacuuuacccuuu

SEQ ID NO: 105388 - RNA, 19 nt, Artificial Sequence
  Description of Artificial Sequence: Synthetic oligonucleotide
caccguacagacagauaca

SEQ ID NO: 105389 - RNA, 19 nt, Artificial Sequence
  Description of Artificial Sequence: Synthetic oligonucleotide
guguguguguguggccagg

SEQ ID NO: 105390 - RNA, 19 nt, Artificial Sequence
  Description of Artificial Sequence: Synthetic oligonucleotide
ggguguuagaacagggaca

SEQ ID NO: 105391 - RNA, 19 nt, Artificial Sequence
  Description of Artificial Sequence: Synthetic oligonucleotide
auccaccguacagacagau

SEQ ID NO: 105392 - RNA, 19 nt, Artificial Sequence
  Description of Artificial Sequence: Synthetic oligonucleotide
gugcuagacuauauucaca

SEQ ID NO: 105393 - RNA, 19 nt, Artificial Sequence
  Description of Artificial Sequence: Synthetic oligonucleotide
guguaucaccagacauggg

SEQ ID NO: 105394 - RNA, 19 nt, Artificial Sequence
  Description of Artificial Sequence: Synthetic oligonucleotide
caacgcacgagguaacuau

SEQ ID NO: 105395 - RNA, 19 nt, Artificial Sequence
  Description of Artificial Sequence: Synthetic oligonucleotide
ggaaacaucggaaguaaau

SEQ ID NO: 105396 - RNA, 19 nt, Artificial Sequence
  Description of Artificial Sequence: Synthetic oligonucleotide
gugcgcacaugaaggaaac

SEQ ID NO: 105397 - RNA, 19 nt, Artificial Sequence
  Description of Artificial Sequence: Synthetic oligonucleotide
ugcgcacaugaaggaaacu

SEQ ID NO: 105398 - RNA, 19 nt, Artificial Sequence
  Description of Artificial Sequence: Synthetic oligonucleotide
gcuagacuauauucacaca

SEQ ID NO: 105399 - RNA, 19 nt, Artificial Sequence
  Description of Artificial Sequence: Synthetic oligonucleotide
uaacagcaucgaccccugu

SEQ ID NO: 105400 - RNA, 19 nt, Artificial Sequence
  Description of Artificial Sequence: Synthetic oligonucleotide
ggucuuuucgucccugaua

SEQ ID NO: 105401 - RNA, 19 nt, Artificial Sequence
  Description of Artificial Sequence: Synthetic oligonucleotide
acaacgcacgagguaacua

SEQ ID NO: 105402 - RNA, 19 nt, Artificial Sequence
  Description of Artificial Sequence: Synthetic oligonucleotide
cacuaccugaccucauuua

SEQ ID NO: 105403 - RNA, 19 nt, Artificial Sequence
  Description of Artificial Sequence: Synthetic oligonucleotide
uggcguauuucagggguuu

SEQ ID NO: 105404 - RNA, 19 nt, Artificial Sequence
  Description of Artificial Sequence: Synthetic oligonucleotide
ggauuaugcgguuuaucau

SEQ ID NO: 105405 - RNA, 19 nt, Artificial Sequence
  Description of Artificial Sequence: Synthetic oligonucleotide
guacaacgcacgagguaac

SEQ ID NO: 105406 - RNA, 19 nt, Artificial Sequence
  Description of Artificial Sequence: Synthetic oligonucleotide
ccaucgagguucuugugga

SEQ ID NO: 105407 - RNA, 19 nt, Artificial Sequence
  Description of Artificial Sequence: Synthetic oligonucleotide
gcaucgaccccuguggaca

SEQ ID NO: 105408 - RNA, 19 nt, Artificial Sequence
  Description of Artificial Sequence: Synthetic oligonucleotide
accaaacaacagauucccu

SEQ ID NO: 105409 - RNA, 19 nt, Artificial Sequence
  Description of Artificial Sequence: Synthetic oligonucleotide
gaagggagguuguuuuauu

SEQ ID NO: 105410 - RNA, 19 nt, Artificial Sequence
  Description of Artificial Sequence: Synthetic oligonucleotide
ggccagauugauucacaga

SEQ ID NO: 105411 - RNA, 19 nt, Artificial Sequence
  Description of Artificial Sequence: Synthetic oligonucleotide
gcaacacuaccugaccuca

SEQ ID NO: 105412 - RNA, 19 nt, Artificial Sequence
  Description of Artificial Sequence: Synthetic oligonucleotide
gggcuugugucaacaagac

SEQ ID NO: 105413 - RNA, 19 nt, Artificial Sequence
  Description of Artificial Sequence: Synthetic oligonucleotide
guuugacuuuccuucccau

SEQ ID NO: 105414 - RNA, 19 nt, Artificial Sequence
  Description of Artificial Sequence: Synthetic oligonucleotide
gccuaaggacuauuauaga

SEQ ID NO: 105415 - RNA, 19 nt, Artificial Sequence
  Description of Artificial Sequence: Synthetic oligonucleotide
ccugauaagacagcaggaa

SEQ ID NO: 105416 - RNA, 19 nt, Artificial Sequence
  Description of Artificial Sequence: Synthetic oligonucleotide
gauugauggcuaagcucua

SEQ ID NO: 105417 - RNA, 19 nt, Artificial Sequence
  Description of Artificial Sequence: Synthetic oligonucleotide
caacauagcgaugcacaua

SEQ ID NO: 105418 - RNA, 19 nt, Artificial Sequence
  Description of Artificial Sequence: Synthetic oligonucleotide
cacauuaugaagggagguu

SEQ ID NO: 105419 - RNA, 19 nt, Artificial Sequence
  Description of Artificial Sequence: Synthetic oligonucleotide
acgucgcagccaucacacu

SEQ ID NO: 105420 - RNA, 19 nt, Artificial Sequence
  Description of Artificial Sequence: Synthetic oligonucleotide
gugguagugggcaccuuua

SEQ ID NO: 105421 - RNA, 19 nt, Artificial Sequence
  Description of Artificial Sequence: Synthetic oligonucleotide
gagucguagucccgcugcu

SEQ ID NO: 105422 - RNA, 19 nt, Artificial Sequence
  Description of Artificial Sequence: Synthetic oligonucleotide
cuggccuaaggacuauuau

SEQ ID NO: 105423 - RNA, 19 nt, Artificial Sequence
  Description of Artificial Sequence: Synthetic oligonucleotide
gcuagcauugguaacuauu

SEQ ID NO: 105424 - RNA, 19 nt, Artificial Sequence
  Description of Artificial Sequence: Synthetic oligonucleotide
aggguauuucgaacugcuu

SEQ ID NO: 105425 - RNA, 19 nt, Artificial Sequence
  Description of Artificial Sequence: Synthetic oligonucleotide
cagacacgucuccaguaua

SEQ ID NO: 105426 - RNA, 19 nt, Artificial Sequence
  Description of Artificial Sequence: Synthetic oligonucleotide
ggacaguuugacuuuccuu

SEQ ID NO: 105427 - RNA, 19 nt, Artificial Sequence
  Description of Artificial Sequence: Synthetic oligonucleotide
cugugcgcacaugaaggaa

SEQ ID NO: 105428 - RNA, 19 nt, Artificial Sequence
  Description of Artificial Sequence: Synthetic oligonucleotide
auggcguauuucagggguu

SEQ ID NO: 105429 - RNA, 19 nt, Artificial Sequence
  Description of Artificial Sequence: Synthetic oligonucleotide
caaccauguuagugcauau

SEQ ID NO: 105430 - RNA, 19 nt, Artificial Sequence
  Description of Artificial Sequence: Synthetic oligonucleotide
ccauguuagugcauauggu

SEQ ID NO: 105431 - RNA, 19 nt, Artificial Sequence
  Description of Artificial Sequence: Synthetic oligonucleotide
gcagacacgucuccaguau

SEQ ID NO: 105432 - RNA, 19 nt, Artificial Sequence
  Description of Artificial Sequence: Synthetic oligonucleotide
gcgaugcacauacucaguu

SEQ ID NO: 105433 - RNA, 19 nt, Artificial Sequence
  Description of Artificial Sequence: Synthetic oligonucleotide
agacuggccuaaggacuau

SEQ ID NO: 105434 - RNA, 19 nt, Artificial Sequence
  Description of Artificial Sequence: Synthetic oligonucleotide
ccaacauagcgaugcacau

SEQ ID NO: 105435 - RNA, 19 nt, Artificial Sequence
  Description of Artificial Sequence: Synthetic oligonucleotide
aucgaccccuguggacaga

SEQ ID NO: 105436 - RNA, 19 nt, Artificial Sequence
  Description of Artificial Sequence: Synthetic oligonucleotide
gggcaccuuuaagcucaac

SEQ ID NO: 105437 - RNA, 19 nt, Artificial Sequence
  Description of Artificial Sequence: Synthetic oligonucleotide
ggcguauuucagggguuuu

SEQ ID NO: 105438 - RNA, 19 nt, Artificial Sequence
  Description of Artificial Sequence: Synthetic oligonucleotide
cgucuuaauuuugguucau

SEQ ID NO: 105439 - RNA, 19 nt, Artificial Sequence
  Description of Artificial Sequence: Synthetic oligonucleotide
aaaucgagaauauucacag

SEQ ID NO: 105440 - RNA, 19 nt, Artificial Sequence
  Description of Artificial Sequence: Synthetic oligonucleotide
ucauauguguugaagagcc

SEQ ID NO: 105441 - RNA, 19 nt, Artificial Sequence
  Description of Artificial Sequence: Synthetic oligonucleotide
acgggauaaaaucucaugc

SEQ ID NO: 105442 - RNA, 19 nt, Artificial Sequence
  Description of Artificial Sequence: Synthetic oligonucleotide
aaagccaugugacagcauc

SEQ ID NO: 105443 - RNA, 19 nt, Artificial Sequence
  Description of Artificial Sequence: Synthetic oligonucleotide
uucaaguugacgaaggcug

SEQ ID NO: 105444 - RNA, 19 nt, Artificial Sequence
  Description of Artificial Sequence: Synthetic oligonucleotide
uaauuaacaaugcugugca

SEQ ID NO: 105445 - RNA, 19 nt, Artificial Sequence
  Description of Artificial Sequence: Synthetic oligonucleotide
aacgcuguaauuaacaaug

SEQ ID NO: 105446 - RNA, 19 nt, Artificial Sequence
  Description of Artificial Sequence: Synthetic oligonucleotide
augcccaaaagcuugauuc

SEQ ID NO: 105447 - RNA, 19 nt, Artificial Sequence
  Description of Artificial Sequence: Synthetic oligonucleotide
gaagggaggguuuaaaagc

SEQ ID NO: 105448 - RNA, 19 nt, Artificial Sequence
  Description of Artificial Sequence: Synthetic oligonucleotide
agaugaagggguuacuucg

SEQ ID NO: 105449 - RNA, 19 nt, Artificial Sequence
  Description of Artificial Sequence: Synthetic oligonucleotide
gaagcauagauuugagccg

SEQ ID NO: 105450 - RNA, 19 nt, Artificial Sequence
  Description of Artificial Sequence: Synthetic oligonucleotide
uauuauugcuaacagugcu

SEQ ID NO: 105451 - RNA, 19 nt, Artificial Sequence
  Description of Artificial Sequence: Synthetic oligonucleotide
cuccgauucaaguauaucc

SEQ ID NO: 105452 - RNA, 19 nt, Artificial Sequence
  Description of Artificial Sequence: Synthetic oligonucleotide
  modified_base (7)..(7): a, c, u, g, unknown or other
aaaaggnugaacaucacua

SEQ ID NO: 105453 - RNA, 19 nt, Artificial Sequence
  Description of Artificial Sequence: Synthetic oligonucleotide
ugcuaaaguauucagugcu

SEQ ID NO: 105454 - RNA, 19 nt, Artificial Sequence
  Description of Artificial Sequence: Synthetic oligonucleotide
gaacauaggguguucauug

SEQ ID NO: 105455 - RNA, 19 nt, Artificial Sequence
  Description of Artificial Sequence: Synthetic oligonucleotide
aguugacgaaggcugaacc

SEQ ID NO: 105456 - RNA, 19 nt, Artificial Sequence
  Description of Artificial Sequence: Synthetic oligonucleotide
auuguggguucuuacaagg

SEQ ID NO: 105457 - RNA, 19 nt, Artificial Sequence
  Description of Artificial Sequence: Synthetic oligonucleotide
aaguauuguggguucuuac

SEQ ID NO: 105458 - RNA, 19 nt, Artificial Sequence
  Description of Artificial Sequence: Synthetic oligonucleotide
aaucucguccucuccacac

SEQ ID NO: 105459 - RNA, 19 nt, Artificial Sequence
  Description of Artificial Sequence: Synthetic oligonucleotide
aaucgagaauauucacagc

SEQ ID NO: 105460 - RNA, 19 nt, Artificial Sequence
  Description of Artificial Sequence: Synthetic oligonucleotide
aauguagccugcuaaagua

SEQ ID NO: 105461 - RNA, 19 nt, Artificial Sequence
  Description of Artificial Sequence: Synthetic oligonucleotide
gcauauaaaguauuguggg

SEQ ID NO: 105462 - RNA, 19 nt, Artificial Sequence
  Description of Artificial Sequence: Synthetic oligonucleotide
uuuugaaaagugugggaag

SEQ ID NO: 105463 - RNA, 19 nt, Artificial Sequence
  Description of Artificial Sequence: Synthetic oligonucleotide
uuauugcuaacagugcugg

SEQ ID NO: 105464 - RNA, 19 nt, Artificial Sequence
  Description of Artificial Sequence: Synthetic oligonucleotide
uccauuaacaugucaggcc

SEQ ID NO: 105465 - RNA, 19 nt, Artificial Sequence
  Description of Artificial Sequence: Synthetic oligonucleotide
cacgguuugcgcaacaugg

SEQ ID NO: 105466 - RNA, 19 nt, Artificial Sequence
  Description of Artificial Sequence: Synthetic oligonucleotide
cuaugagggauucauagug

SEQ ID NO: 105467 - RNA, 19 nt, Artificial Sequence
  Description of Artificial Sequence: Synthetic oligonucleotide
uuuucuccgauucaaguau

SEQ ID NO: 105468 - RNA, 19 nt, Artificial Sequence
  Description of Artificial Sequence: Synthetic oligonucleotide
uuaacugaguuggucauag

SEQ ID NO: 105469 - RNA, 19 nt, Artificial Sequence
  Description of Artificial Sequence: Synthetic oligonucleotide
aagguucuuaaugugaacu

SEQ ID NO: 105470 - RNA, 19 nt, Artificial Sequence
  Description of Artificial Sequence: Synthetic oligonucleotide
acuucucggguuaacaucc

SEQ ID NO: 105471 - RNA, 19 nt, Artificial Sequence
  Description of Artificial Sequence: Synthetic oligonucleotide
ugucucguauaucuggaag

SEQ ID NO: 105472 - RNA, 19 nt, Artificial Sequence
  Description of Artificial Sequence: Synthetic oligonucleotide
aagcauagauuugagccgg

SEQ ID NO: 105473 - RNA, 19 nt, Artificial Sequence
  Description of Artificial Sequence: Synthetic oligonucleotide
uggaggaacaagcaugucu

SEQ ID NO: 105474 - RNA, 19 nt, Artificial Sequence
  Description of Artificial Sequence: Synthetic oligonucleotide
uagaaggaaagcccaaucu

SEQ ID NO: 105475 - RNA, 19 nt, Artificial Sequence
  Description of Artificial Sequence: Synthetic oligonucleotide
  modified_base (6)..(6): a, c, u, g, unknown or other
aaaggnugaacaucacuaa

SEQ ID NO: 105476 - RNA, 19 nt, Artificial Sequence
  Description of Artificial Sequence: Synthetic oligonucleotide
gacaacaugcuccaggauc

SEQ ID NO: 105477 - RNA, 19 nt, Artificial Sequence
  Description of Artificial Sequence: Synthetic oligonucleotide
  modified_base (2)..(2): a, c, u, g, unknown or other
gnugaacaucacuaauucc

SEQ ID NO: 105478 - RNA, 19 nt, Artificial Sequence
  Description of Artificial Sequence: Synthetic oligonucleotide
auuggauuuccacugggug

SEQ ID NO: 105479 - RNA, 19 nt, Artificial Sequence
  Description of Artificial Sequence: Synthetic oligonucleotide
uggaucacgggauaaaauc

SEQ ID NO: 105480 - RNA, 19 nt, Artificial Sequence
  Description of Artificial Sequence: Synthetic oligonucleotide
aacuaaacgcuguaauuaa

SEQ ID NO: 105481 - RNA, 19 nt, Artificial Sequence
  Description of Artificial Sequence: Synthetic oligonucleotide
uauucgagcacgguuugcg

SEQ ID NO: 105482 - RNA, 19 nt, Artificial Sequence
  Description of Artificial Sequence: Synthetic oligonucleotide
aagccaugcacccaucgug

SEQ ID NO: 105483 - RNA, 19 nt, Artificial Sequence
  Description of Artificial Sequence: Synthetic oligonucleotide
uguaauuaacaaugcugug

SEQ ID NO: 105484 - RNA, 19 nt, Artificial Sequence
  Description of Artificial Sequence: Synthetic oligonucleotide
aucucuaccacaauucuag

SEQ ID NO: 105485 - RNA, 19 nt, Artificial Sequence
  Description of Artificial Sequence: Synthetic oligonucleotide
auucgagaggaguuguuuc

SEQ ID NO: 105486 - RNA, 19 nt, Artificial Sequence
  Description of Artificial Sequence: Synthetic oligonucleotide
ugcucuuaucucuagguac

SEQ ID NO: 105487 - RNA, 19 nt, Artificial Sequence
  Description of Artificial Sequence: Synthetic oligonucleotide
aaaguauucagugcugcga

SEQ ID NO: 105488 - RNA, 19 nt, Artificial Sequence
  Description of Artificial Sequence: Synthetic oligonucleotide
ugaacaucacuaauucccu

SEQ ID NO: 105489 - RNA, 19 nt, Artificial Sequence
  Description of Artificial Sequence: Synthetic oligonucleotide
ucgcucguaauucuuaaac

SEQ ID NO: 105490 - RNA, 19 nt, Artificial Sequence
  Description of Artificial Sequence: Synthetic oligonucleotide
cuaccacaauucuagacag

SEQ ID NO: 105491 - RNA, 19 nt, Artificial Sequence
  Description of Artificial Sequence: Synthetic oligonucleotide
uucuaugucggaaggccag

SEQ ID NO: 105492 - RNA, 19 nt, Artificial Sequence
  Description of Artificial Sequence: Synthetic oligonucleotide
ucguaauucuuaaacuggu

SEQ ID NO: 105493 - RNA, 19 nt, Artificial Sequence
  Description of Artificial Sequence: Synthetic oligonucleotide
aguauuguggguucuuaca

SEQ ID NO: 105494 - RNA, 19 nt, Artificial Sequence
  Description of Artificial Sequence: Synthetic oligonucleotide
  modified_base (5)..(5): a, c, u, g, unknown or other
aaggnugaacaucacuaau

SEQ ID NO: 105495 - RNA, 19 nt, Artificial Sequence
  Description of Artificial Sequence: Synthetic oligonucleotide
aucaucucuaccacaauuc

SEQ ID NO: 105496 - RNA, 19 nt, Artificial Sequence
  Description of Artificial Sequence: Synthetic oligonucleotide
uaguucgucucaaaacccc

SEQ ID NO: 105497 - RNA, 19 nt, Artificial Sequence
  Description of Artificial Sequence: Synthetic oligonucleotide
cuggagagaguccagcucc

SEQ ID NO: 105498 - RNA, 19 nt, Artificial Sequence
  Description of Artificial Sequence: Synthetic oligonucleotide
uccaaucgagacauggugu

SEQ ID NO: 105499 - RNA, 19 nt, Artificial Sequence
  Description of Artificial Sequence: Synthetic oligonucleotide
uaugagggauucauagugu

SEQ ID NO: 105500 - RNA, 19 nt, Artificial Sequence
  Description of Artificial Sequence: Synthetic oligonucleotide
caugguguuccaucgaaac

SEQ ID NO: 105501 - RNA, 19 nt, Artificial Sequence
  Description of Artificial Sequence: Synthetic oligonucleotide
cuaguucgucucaaaaccc

SEQ ID NO: 105502 - RNA, 19 nt, Artificial Sequence
  Description of Artificial Sequence: Synthetic oligonucleotide
uauuguucaaguugacgaa

SEQ ID NO: 105503 - RNA, 19 nt, Artificial Sequence
  Description of Artificial Sequence: Synthetic oligonucleotide
cuaaacgcuguaauuaaca

SEQ ID NO: 105504 - RNA, 19 nt, Artificial Sequence
  Description of Artificial Sequence: Synthetic oligonucleotide
ucucggguuaacauccuca

SEQ ID NO: 105505 - RNA, 19 nt, Artificial Sequence
  Description of Artificial Sequence: Synthetic oligonucleotide
aaagguuauucgagcacgg

SEQ ID NO: 105506 - RNA, 19 nt, Artificial Sequence
  Description of Artificial Sequence: Synthetic oligonucleotide
uuugcugaauaucccuucu

SEQ ID NO: 105507 - RNA, 19 nt, Artificial Sequence
  Description of Artificial Sequence: Synthetic oligonucleotide
aacuuggauaucagcaguc

SEQ ID NO: 105508 - RNA, 19 nt, Artificial Sequence
  Description of Artificial Sequence: Synthetic oligonucleotide
cauagauuugagccggaag

SEQ ID NO: 105509 - RNA, 19 nt, Artificial Sequence
  Description of Artificial Sequence: Synthetic oligonucleotide
uccagcauugguuugguuu

SEQ ID NO: 105510 - RNA, 19 nt, Artificial Sequence
  Description of Artificial Sequence: Synthetic oligonucleotide
cauagaugcacgaagauau

SEQ ID NO: 105511 - RNA, 19 nt, Artificial Sequence
  Description of Artificial Sequence: Synthetic oligonucleotide
uggcuauaaagcaugucaa

SEQ ID NO: 105512 - RNA, 19 nt, Artificial Sequence
  Description of Artificial Sequence: Synthetic oligonucleotide
ucaauguagccugcuaaag

SEQ ID NO: 105513 - RNA, 19 nt, Artificial Sequence
  Description of Artificial Sequence: Synthetic oligonucleotide
auucgagcacgguuugcgc

SEQ ID NO: 105514 - RNA, 19 nt, Artificial Sequence
  Description of Artificial Sequence: Synthetic oligonucleotide
gcaguuuacaguuuucagc

SEQ ID NO: 105515 - RNA, 19 nt, Artificial Sequence
  Description of Artificial Sequence: Synthetic oligonucleotide
uaggaguagcucauucgag

SEQ ID NO: 105516 - RNA, 19 nt, Artificial Sequence
  Description of Artificial Sequence: Synthetic oligonucleotide
agcaaauuguccagaaguc

SEQ ID NO: 105517 - RNA, 19 nt, Artificial Sequence
  Description of Artificial Sequence: Synthetic oligonucleotide
ucucguauaucuggaaggc

SEQ ID NO: 105518 - RNA, 19 nt, Artificial Sequence
  Description of Artificial Sequence: Synthetic oligonucleotide
aucgaaacuugacaacaug

SEQ ID NO: 105519 - RNA, 19 nt, Artificial Sequence
  Description of Artificial Sequence: Synthetic oligonucleotide
aaaugucugacgauggcaa

SEQ ID NO: 105520 - RNA, 19 nt, Artificial Sequence
  Description of Artificial Sequence: Synthetic oligonucleotide
aauccuaauauugcuguuu

SEQ ID NO: 105521 - RNA, 19 nt, Artificial Sequence
  Description of Artificial Sequence: Synthetic oligonucleotide
gaacuaaacgcuguaauua

SEQ ID NO: 105522 - RNA, 19 nt, Artificial Sequence
  Description of Artificial Sequence: Synthetic oligonucleotide
gagaugagacguuugaagu

SEQ ID NO: 105523 - RNA, 19 nt, Artificial Sequence
  Description of Artificial Sequence: Synthetic oligonucleotide
  modified_base (3)..(3): a, c, u, g, unknown or other
ggnugaacaucacuaauuc

SEQ ID NO: 105524 - RNA, 19 nt, Artificial Sequence
  Description of Artificial Sequence: Synthetic oligonucleotide
auuauugcuaacagugcug

SEQ ID NO: 105525 - RNA, 19 nt, Artificial Sequence
  Description of Artificial Sequence: Synthetic oligonucleotide
ugacgaaggcugaaccaag

SEQ ID NO: 105526 - RNA, 19 nt, Artificial Sequence
  Description of Artificial Sequence: Synthetic oligonucleotide
uugaagggaggguuuaaaa

SEQ ID NO: 105527 - RNA, 19 nt, Artificial Sequence
  Description of Artificial Sequence: Synthetic oligonucleotide
cugcuaaaguauucagugc

SEQ ID NO: 105528 - RNA, 19 nt, Artificial Sequence
  Description of Artificial Sequence: Synthetic oligonucleotide
cucuaccacaauucuagac

SEQ ID NO: 105529 - RNA, 19 nt, Artificial Sequence
  Description of Artificial Sequence: Synthetic oligonucleotide
  modified_base (12)..(12): a, c, u, g, unknown or other
aucgcaaaaggnugaacau

SEQ ID NO: 105530 - RNA, 19 nt, Artificial Sequence
  Description of Artificial Sequence: Synthetic oligonucleotide
acuaaacgcuguaauuaac

SEQ ID NO: 105531 - RNA, 19 nt, Artificial Sequence
  Description of Artificial Sequence: Synthetic oligonucleotide
uuacucggcaguuugcuuu

SEQ ID NO: 105532 - RNA, 19 nt, Artificial Sequence
  Description of Artificial Sequence: Synthetic oligonucleotide
aggaacaagcaugucuccg

SEQ ID NO: 105533 - RNA, 19 nt, Artificial Sequence
  Description of Artificial Sequence: Synthetic oligonucleotide
uucagugcugcgaugcuua

SEQ ID NO: 105534 - RNA, 19 nt, Artificial Sequence
  Description of Artificial Sequence: Synthetic oligonucleotide
ucuuaaacugguugcuaau

SEQ ID NO: 105535 - RNA, 19 nt, Artificial Sequence
  Description of Artificial Sequence: Synthetic oligonucleotide
agagccguaagaaaacuga

SEQ ID NO: 105536 - RNA, 19 nt, Artificial Sequence
  Description of Artificial Sequence: Synthetic oligonucleotide
cacgggauaaaaucucaug

SEQ ID NO: 105537 - RNA, 19 nt, Artificial Sequence
  Description of Artificial Sequence: Synthetic oligonucleotide
ugguguuccaucgaaacuu

SEQ ID NO: 105538 - RNA, 19 nt, Artificial Sequence
  Description of Artificial Sequence: Synthetic oligonucleotide
cucuagcauuucuugagac

SEQ ID NO: 105539 - RNA, 19 nt, Artificial Sequence
  Description of Artificial Sequence: Synthetic oligonucleotide
auaggguguucauugacuu

SEQ ID NO: 105540 - RNA, 19 nt, Artificial Sequence
  Description of Artificial Sequence: Synthetic oligonucleotide
cuuggauaucagcagucug

SEQ ID NO: 105541 - RNA, 19 nt, Artificial Sequence
  Description of Artificial Sequence: Synthetic oligonucleotide
augcuuacucggcaguuug

SEQ ID NO: 105542 - RNA, 19 nt, Artificial Sequence
  Description of Artificial Sequence: Synthetic oligonucleotide
cauauguguugaagagccg

SEQ ID NO: 105543 - RNA, 19 nt, Artificial Sequence
  Description of Artificial Sequence: Synthetic oligonucleotide
uucgagcacgguuugcgca

SEQ ID NO: 105544 - RNA, 19 nt, Artificial Sequence
  Description of Artificial Sequence: Synthetic oligonucleotide
aagagccguaagaaaacug

SEQ ID NO: 105545 - RNA, 19 nt, Artificial Sequence
  Description of Artificial Sequence: Synthetic oligonucleotide
aaugucugacgauggcaau

SEQ ID NO: 105546 - RNA, 19 nt, Artificial Sequence
  Description of Artificial Sequence: Synthetic oligonucleotide
aguuggucauagaugcacg

SEQ ID NO: 105547 - RNA, 19 nt, Artificial Sequence
  Description of Artificial Sequence: Synthetic oligonucleotide
ucucccaaggguuucccaa

SEQ ID NO: 105548 - RNA, 19 nt, Artificial Sequence
  Description of Artificial Sequence: Synthetic oligonucleotide
acacgaagcauagauuuga

SEQ ID NO: 105549 - RNA, 19 nt, Artificial Sequence
  Description of Artificial Sequence: Synthetic oligonucleotide
agagagaauauaaugcaua

SEQ ID NO: 105550 - RNA, 19 nt, Artificial Sequence
  Description of Artificial Sequence: Synthetic oligonucleotide
uguagccugcuaaaguauu

SEQ ID NO: 105551 - RNA, 19 nt, Artificial Sequence
  Description of Artificial Sequence: Synthetic oligonucleotide
ugacuucucggguuaacau

SEQ ID NO: 105552 - RNA, 19 nt, Artificial Sequence
  Description of Artificial Sequence: Synthetic oligonucleotide
agccuuacuuucuccaaca

SEQ ID NO: 105553 - RNA, 19 nt, Artificial Sequence
  Description of Artificial Sequence: Synthetic oligonucleotide
aaaggucacuacauccucu

SEQ ID NO: 105554 - RNA, 19 nt, Artificial Sequence
  Description of Artificial Sequence: Synthetic oligonucleotide
augguguuccaucgaaacu

SEQ ID NO: 105555 - RNA, 19 nt, Artificial Sequence
  Description of Artificial Sequence: Synthetic oligonucleotide
gguaauccuaauauugcug

SEQ ID NO: 105556 - RNA, 19 nt, Artificial Sequence
  Description of Artificial Sequence: Synthetic oligonucleotide
caagaucaggguagucccg

SEQ ID NO: 105557 - RNA, 19 nt, Artificial Sequence
  Description of Artificial Sequence: Synthetic oligonucleotide
ugguugcuaaugagaacca

SEQ ID NO: 105558 - RNA, 19 nt, Artificial Sequence
  Description of Artificial Sequence: Synthetic oligonucleotide
uuucggaacuguucuccca

SEQ ID NO: 105559 - RNA, 19 nt, Artificial Sequence
  Description of Artificial Sequence: Synthetic oligonucleotide
guugacgaaggcugaacca

SEQ ID NO: 105560 - RNA, 19 nt, Artificial Sequence
  Description of Artificial Sequence: Synthetic oligonucleotide
ucggguuaacauccucacc

SEQ ID NO: 105561 - RNA, 19 nt, Artificial Sequence
  Description of Artificial Sequence: Synthetic oligonucleotide
uuacugcucuuaucucuag

SEQ ID NO: 105562 - RNA, 19 nt, Artificial Sequence
  Description of Artificial Sequence: Synthetic oligonucleotide
acgcuguaauuaacaaugc

SEQ ID NO: 105563 - RNA, 19 nt, Artificial Sequence
  Description of Artificial Sequence: Synthetic oligonucleotide
cacgaagcauagauuugag

SEQ ID NO: 105564 - RNA, 19 nt, Artificial Sequence
  Description of Artificial Sequence: Synthetic oligonucleotide
agguuauucgagcacgguu

SEQ ID NO: 105565 - RNA, 19 nt, Artificial Sequence
  Description of Artificial Sequence: Synthetic oligonucleotide
acacagauagggcacuuuu

SEQ ID NO: 105566 - RNA, 19 nt, Artificial Sequence
  Description of Artificial Sequence: Synthetic oligonucleotide
gacaugguguuccaucgaa

SEQ ID NO: 105567 - RNA, 19 nt, Artificial Sequence
  Description of Artificial Sequence: Synthetic oligonucleotide
agauuugagccggaaguca

SEQ ID NO: 105568 - RNA, 19 nt, Artificial Sequence
  Description of Artificial Sequence: Synthetic oligonucleotide
ugcuuacucggcaguuugc

SEQ ID NO: 105569 - RNA, 19 nt, Artificial Sequence
  Description of Artificial Sequence: Synthetic oligonucleotide
uugaaaagugugggaaggu

SEQ ID NO: 105570 - RNA, 19 nt, Artificial Sequence
  Description of Artificial Sequence: Synthetic oligonucleotide
cucguuugaucaucucuac

SEQ ID NO: 105571 - RNA, 19 nt, Artificial Sequence
  Description of Artificial Sequence: Synthetic oligonucleotide
aguaacagaugaaaacuua

SEQ ID NO: 105572 - RNA, 19 nt, Artificial Sequence
  Description of Artificial Sequence: Synthetic oligonucleotide
cacagauagggcacuuuuc

SEQ ID NO: 105573 - RNA, 19 nt, Artificial Sequence
  Description of Artificial Sequence: Synthetic oligonucleotide
ucacaaaacuugagggcuu

SEQ ID NO: 105574 - RNA, 19 nt, Artificial Sequence
  Description of Artificial Sequence: Synthetic oligonucleotide
aagguuauucgagcacggu

SEQ ID NO: 105575 - RNA, 19 nt, Artificial Sequence
  Description of Artificial Sequence: Synthetic oligonucleotide
ucuaugucggaaggccagc

SEQ ID NO: 105576 - RNA, 19 nt, Artificial Sequence
  Description of Artificial Sequence: Synthetic oligonucleotide
auuugagccggaagucagg

SEQ ID NO: 105577 - RNA, 19 nt, Artificial Sequence
  Description of Artificial Sequence: Synthetic oligonucleotide
uauugcuaacagugcugga

SEQ ID NO: 105578 - RNA, 19 nt, Artificial Sequence
  Description of Artificial Sequence: Synthetic oligonucleotide
gacacccagucaauguagc

SEQ ID NO: 105579 - RNA, 19 nt, Artificial Sequence
  Description of Artificial Sequence: Synthetic oligonucleotide
uuacggaagauuggauuuc

SEQ ID NO: 105580 - RNA, 19 nt, Artificial Sequence
  Description of Artificial Sequence: Synthetic oligonucleotide
acguuugaagugguccuuc

SEQ ID NO: 105581 - RNA, 19 nt, Artificial Sequence
  Description of Artificial Sequence: Synthetic oligonucleotide
gauggaggaacaagcaugu

SEQ ID NO: 105582 - RNA, 19 nt, Artificial Sequence
  Description of Artificial Sequence: Synthetic oligonucleotide
gccguaagaaaacugaacu

SEQ ID NO: 105583 - RNA, 19 nt, Artificial Sequence
  Description of Artificial Sequence: Synthetic oligonucleotide
augacuucucggguuaaca

SEQ ID NO: 105584 - RNA, 19 nt, Artificial Sequence
  Description of Artificial Sequence: Synthetic oligonucleotide
cauuucucguuugaucauc

SEQ ID NO: 105585 - RNA, 19 nt, Artificial Sequence
  Description of Artificial Sequence: Synthetic oligonucleotide
cucguauaucuggaaggcc

SEQ ID NO: 105586 - RNA, 19 nt, Artificial Sequence
  Description of Artificial Sequence: Synthetic oligonucleotide
  modified_base (14)..(14): a, c, u, g, unknown or other
caaucgcaaaaggnugaac

SEQ ID NO: 105587 - RNA, 19 nt, Artificial Sequence
  Description of Artificial Sequence: Synthetic oligonucleotide
ugagcacucugcacauuuc

SEQ ID NO: 105588 - RNA, 19 nt, Artificial Sequence
  Description of Artificial Sequence: Synthetic oligonucleotide
ucagaucggcuccaacaua

SEQ ID NO: 105589 - RNA, 19 nt, Artificial Sequence
  Description of Artificial Sequence: Synthetic oligonucleotide
uguucucccaaggguuucc

SEQ ID NO: 105590 - RNA, 19 nt, Artificial Sequence
  Description of Artificial Sequence: Synthetic oligonucleotide
ucgagcacgguuugcgcaa

SEQ ID NO: 105591 - RNA, 19 nt, Artificial Sequence
  Description of Artificial Sequence: Synthetic oligonucleotide
cuccgcacguuccucacug

SEQ ID NO: 105592 - RNA, 19 nt, Artificial Sequence
  Description of Artificial Sequence: Synthetic oligonucleotide
uuggucauagaugcacgaa

SEQ ID NO: 105593 - RNA, 19 nt, Artificial Sequence
  Description of Artificial Sequence: Synthetic oligonucleotide
cuucuaugucggaaggcca

SEQ ID NO: 105594 - RNA, 19 nt, Artificial Sequence
  Description of Artificial Sequence: Synthetic oligonucleotide
uuauucgagcacgguuugc

SEQ ID NO: 105595 - RNA, 19 nt, Artificial Sequence
  Description of Artificial Sequence: Synthetic oligonucleotide
agugucucguauaucugga

SEQ ID NO: 105596 - RNA, 19 nt, Artificial Sequence
  Description of Artificial Sequence: Synthetic oligonucleotide
gguuaggaguagcucauuc

SEQ ID NO: 105597 - RNA, 19 nt, Artificial Sequence
  Description of Artificial Sequence: Synthetic oligonucleotide
acgauggcaaucuguguua

SEQ ID NO: 105598 - RNA, 19 nt, Artificial Sequence
  Description of Artificial Sequence: Synthetic oligonucleotide
gcucuuaucucuagguacc

SEQ ID NO: 105599 - RNA, 19 nt, Artificial Sequence
  Description of Artificial Sequence: Synthetic oligonucleotide
gggauaaaaucucaugccu

SEQ ID NO: 105600 - RNA, 19 nt, Artificial Sequence
  Description of Artificial Sequence: Synthetic oligonucleotide
agccgguagcgcugggugg

SEQ ID NO: 105601 - RNA, 19 nt, Artificial Sequence
  Description of Artificial Sequence: Synthetic oligonucleotide
uucucggguuaacauccuc

SEQ ID NO: 105602 - RNA, 19 nt, Artificial Sequence
  Description of Artificial Sequence: Synthetic oligonucleotide
  modified_base (8)..(8): a, c, u, g, unknown or other
caaaaggnugaacaucacu

SEQ ID NO: 105603 - RNA, 19 nt, Artificial Sequence
  Description of Artificial Sequence: Synthetic oligonucleotide
gguucuuaaugugaacuuc

SEQ ID NO: 105604 - RNA, 19 nt, Artificial Sequence
  Description of Artificial Sequence: Synthetic oligonucleotide
  modified_base (18)..(18): a, c, u, g, unknown or other
cugccaaucgcaaaaggnu

SEQ ID NO: 105605 - RNA, 19 nt, Artificial Sequence
  Description of Artificial Sequence: Synthetic oligonucleotide
augaccgucacggcuuuca

SEQ ID NO: 105606 - RNA, 19 nt, Artificial Sequence
  Description of Artificial Sequence: Synthetic oligonucleotide
acguuccucacugcacgac

SEQ ID NO: 105607 - RNA, 19 nt, Artificial Sequence
  Description of Artificial Sequence: Synthetic oligonucleotide
ugaccgucacggcuuucac

SEQ ID NO: 105608 - RNA, 19 nt, Artificial Sequence
  Description of Artificial Sequence: Synthetic oligonucleotide
ggucauagaugcacgaaga

SEQ ID NO: 105609 - RNA, 19 nt, Artificial Sequence
  Description of Artificial Sequence: Synthetic oligonucleotide
ugccaaagaaacgcugcau

SEQ ID NO: 105610 - RNA, 19 nt, Artificial Sequence
  Description of Artificial Sequence: Synthetic oligonucleotide
aucgagacaugguguucca

SEQ ID NO: 105611 - RNA, 19 nt, Artificial Sequence
  Description of Artificial Sequence: Synthetic oligonucleotide
aucaugaccgucacggcuu

SEQ ID NO: 105612 - RNA, 19 nt, Artificial Sequence
  Description of Artificial Sequence: Synthetic oligonucleotide
uacucggcaguuugcuuua

SEQ ID NO: 105613 - RNA, 19 nt, Artificial Sequence
  Description of Artificial Sequence: Synthetic oligonucleotide
cccaaucuuaacugaguug

SEQ ID NO: 105614 - RNA, 19 nt, Artificial Sequence
  Description of Artificial Sequence: Synthetic oligonucleotide
ggccauuucucguuugauc

SEQ ID NO: 105615 - RNA, 19 nt, Artificial Sequence
  Description of Artificial Sequence: Synthetic oligonucleotide
agcucauucgagaggaguu

SEQ ID NO: 105616 - RNA, 19 nt, Artificial Sequence
  Description of Artificial Sequence: Synthetic oligonucleotide
uggguagcaagguccucua

SEQ ID NO: 105617 - RNA, 19 nt, Artificial Sequence
  Description of Artificial Sequence: Synthetic oligonucleotide
aguuggggagugucugaaa

SEQ ID NO: 105618 - RNA, 19 nt, Artificial Sequence
  Description of Artificial Sequence: Synthetic oligonucleotide
agggaacuaaacgcuguaa

SEQ ID NO: 105619 - RNA, 19 nt, Artificial Sequence
  Description of Artificial Sequence: Synthetic oligonucleotide
ucccuaggauaugguaaca

SEQ ID NO: 105620 - RNA, 19 nt, Artificial Sequence
  Description of Artificial Sequence: Synthetic oligonucleotide
  modified_base (16)..(16): a, c, u, g, unknown or other
gccaaucgcaaaaggnuga

SEQ ID NO: 105621 - RNA, 19 nt, Artificial Sequence
  Description of Artificial Sequence: Synthetic oligonucleotide
auguagccugcuaaaguau

SEQ ID NO: 105622 - RNA, 19 nt, Artificial Sequence
  Description of Artificial Sequence: Synthetic oligonucleotide
gguuugcgcaacauggauc

SEQ ID NO: 105623 - RNA, 19 nt, Artificial Sequence
  Description of Artificial Sequence: Synthetic oligonucleotide
ugguccuuccggcguuugu

SEQ ID NO: 105624 - RNA, 19 nt, Artificial Sequence
  Description of Artificial Sequence: Synthetic oligonucleotide
cggaagauuggauuuccac

SEQ ID NO: 105625 - RNA, 19 nt, Artificial Sequence
  Description of Artificial Sequence: Synthetic oligonucleotide
ggaacuaaacgcuguaauu

SEQ ID NO: 105626 - RNA, 19 nt, Artificial Sequence
  Description of Artificial Sequence: Synthetic oligonucleotide
ucaugaccgucacggcuuu

SEQ ID NO: 105627 - RNA, 19 nt, Artificial Sequence
  Description of Artificial Sequence: Synthetic oligonucleotide
gggguuacggaagauugga

SEQ ID NO: 105628 - RNA, 19 nt, Artificial Sequence
  Description of Artificial Sequence: Synthetic oligonucleotide
gccaugugacagcaucugc

SEQ ID NO: 105629 - RNA, 19 nt, Artificial Sequence
  Description of Artificial Sequence: Synthetic oligonucleotide
uccgcacguuccucacugc

SEQ ID NO: 105630 - RNA, 19 nt, Artificial Sequence
  Description of Artificial Sequence: Synthetic oligonucleotide
aagcaugucuccgcacguu

SEQ ID NO: 105631 - RNA, 19 nt, Artificial Sequence
  Description of Artificial Sequence: Synthetic oligonucleotide
ccaucgaaacuugacaaca

SEQ ID NO: 105632 - RNA, 19 nt, Artificial Sequence
  Description of Artificial Sequence: Synthetic oligonucleotide
gcucauucgagaggaguug

SEQ ID NO: 105633 - RNA, 19 nt, Artificial Sequence
  Description of Artificial Sequence: Synthetic oligonucleotide
ggaucacgggauaaaaucu

SEQ ID NO: 105634 - RNA, 19 nt, Artificial Sequence
  Description of Artificial Sequence: Synthetic oligonucleotide
gggaacuaaacgcuguaau

SEQ ID NO: 105635 - RNA, 19 nt, Artificial Sequence
  Description of Artificial Sequence: Synthetic oligonucleotide
gccucaagccacaugggac

SEQ ID NO: 105636 - RNA, 19 nt, Artificial Sequence
  Description of Artificial Sequence: Synthetic oligonucleotide
acgguuugcgcaacaugga

SEQ ID NO: 105637 - RNA, 19 nt, Artificial Sequence
  Description of Artificial Sequence: Synthetic oligonucleotide
cuccccaggucauaugugu

SEQ ID NO: 105638 - RNA, 19 nt, Artificial Sequence
  Description of Artificial Sequence: Synthetic oligonucleotide
cccuaggauaugguaacag

SEQ ID NO: 105639 - RNA, 19 nt, Artificial Sequence
  Description of Artificial Sequence: Synthetic oligonucleotide
augagacguuugaaguggu

SEQ ID NO: 105640 - RNA, 19 nt, Artificial Sequence
  Description of Artificial Sequence: Synthetic oligonucleotide
gucgcucguaauucuuaaa

SEQ ID NO: 105641 - RNA, 19 nt, Artificial Sequence
  Description of Artificial Sequence: Synthetic oligonucleotide
caucgaaacuugacaacau

SEQ ID NO: 105642 - RNA, 19 nt, Artificial Sequence
  Description of Artificial Sequence: Synthetic oligonucleotide
auagaugcacgaagauauu

SEQ ID NO: 105643 - RNA, 19 nt, Artificial Sequence
  Description of Artificial Sequence: Synthetic oligonucleotide
cugucgcucguaauucuua

SEQ ID NO: 105644 - RNA, 19 nt, Artificial Sequence
  Description of Artificial Sequence: Synthetic oligonucleotide
gcaaauuguccagaagucu

SEQ ID NO: 105645 - RNA, 19 nt, Artificial Sequence
  Description of Artificial Sequence: Synthetic oligonucleotide
cuuagaaggaaagcccaau

SEQ ID NO: 105646 - RNA, 19 nt, Artificial Sequence
  Description of Artificial Sequence: Synthetic oligonucleotide
cuggaucacgggauaaaau

SEQ ID NO: 105647 - RNA, 19 nt, Artificial Sequence
  Description of Artificial Sequence: Synthetic oligonucleotide
ccacagaugaagggguuac

SEQ ID NO: 105648 - RNA, 19 nt, Artificial Sequence
  Description of Artificial Sequence: Synthetic oligonucleotide
ucgagacaugguguuccau

SEQ ID NO: 105649 - RNA, 19 nt, Artificial Sequence
  Description of Artificial Sequence: Synthetic oligonucleotide
acggaagauuggauuucca

SEQ ID NO: 105650 - RNA, 19 nt, Artificial Sequence
  Description of Artificial Sequence: Synthetic oligonucleotide
cuguucucccaaggguuuc

SEQ ID NO: 105651 - RNA, 19 nt, Artificial Sequence
  Description of Artificial Sequence: Synthetic oligonucleotide
cuuaacugaguuggucaua

SEQ ID NO: 105652 - RNA, 19 nt, Artificial Sequence
  Description of Artificial Sequence: Synthetic oligonucleotide
  modified_base (9)..(9): a, c, u, g, unknown or other
gcaaaaggnugaacaucac

SEQ ID NO: 105653 - RNA, 19 nt, Artificial Sequence
  Description of Artificial Sequence: Synthetic oligonucleotide
cuccaacauaggcaaugaa

SEQ ID NO: 105654 - RNA, 19 nt, Artificial Sequence
  Description of Artificial Sequence: Synthetic oligonucleotide
caaguugacgaaggcugaa

SEQ ID NO: 105655 - RNA, 19 nt, Artificial Sequence
  Description of Artificial Sequence: Synthetic oligonucleotide
gagcuaugagggauucaua

SEQ ID NO: 105656 - RNA, 19 nt, Artificial Sequence
  Description of Artificial Sequence: Synthetic oligonucleotide
gagcacgguuugcgcaaca

SEQ ID NO: 105657 - RNA, 19 nt, Artificial Sequence
  Description of Artificial Sequence: Synthetic oligonucleotide
agcauagauuugagccgga

SEQ ID NO: 105658 - RNA, 19 nt, Artificial Sequence
  Description of Artificial Sequence: Synthetic oligonucleotide
uggggcgcagugucucgua

SEQ ID NO: 105659 - RNA, 19 nt, Artificial Sequence
  Description of Artificial Sequence: Synthetic oligonucleotide
ccucuacaguguagaaauc

SEQ ID NO: 105660 - RNA, 19 nt, Artificial Sequence
  Description of Artificial Sequence: Synthetic oligonucleotide
cuuacucggcaguuugcuu

SEQ ID NO: 105661 - RNA, 19 nt, Artificial Sequence
  Description of Artificial Sequence: Synthetic oligonucleotide
ggguagcaagguccucuac

SEQ ID NO: 105662 - RNA, 19 nt, Artificial Sequence
  Description of Artificial Sequence: Synthetic oligonucleotide
gcgagcagggucccagaca

SEQ ID NO: 105663 - RNA, 19 nt, Artificial Sequence
  Description of Artificial Sequence: Synthetic oligonucleotide
ggcgcagugucucguauau

SEQ ID NO: 105664 - RNA, 19 nt, Artificial Sequence
  Description of Artificial Sequence: Synthetic oligonucleotide
caagagaggcugagguaau

SEQ ID NO: 105665 - RNA, 19 nt, Artificial Sequence
  Description of Artificial Sequence: Synthetic oligonucleotide
cuaugucggaaggccagcu

SEQ ID NO: 105666 - RNA, 19 nt, Artificial Sequence
  Description of Artificial Sequence: Synthetic oligonucleotide
gacacagauagggcacuuu

SEQ ID NO: 105667 - RNA, 19 nt, Artificial Sequence
  Description of Artificial Sequence: Synthetic oligonucleotide
cucccaaggguuucccaau

SEQ ID NO: 105668 - RNA, 19 nt, Artificial Sequence
  Description of Artificial Sequence: Synthetic oligonucleotide
gccugcuaaaguauucagu

SEQ ID NO: 105669 - RNA, 19 nt, Artificial Sequence
  Description of Artificial Sequence: Synthetic oligonucleotide
ccgcaaucucguccucucc

SEQ ID NO: 105670 - RNA, 19 nt, Artificial Sequence
  Description of Artificial Sequence: Synthetic oligonucleotide
cuucucggguuaacauccu

SEQ ID NO: 105671 - RNA, 19 nt, Artificial Sequence
  Description of Artificial Sequence: Synthetic oligonucleotide
ccaaucgagacaugguguu

SEQ ID NO: 105672 - RNA, 19 nt, Artificial Sequence
  Description of Artificial Sequence: Synthetic oligonucleotide
caugaccgucacggcuuuc

SEQ ID NO: 105673 - RNA, 19 nt, Artificial Sequence
  Description of Artificial Sequence: Synthetic oligonucleotide
  modified_base (15)..(15): a, c, u, g, unknown or other
ccaaucgcaaaaggnugaa

SEQ ID NO: 105674 - RNA, 19 nt, Artificial Sequence
  Description of Artificial Sequence: Synthetic oligonucleotide
gcgaugcuuacucggcagu

SEQ ID NO: 105675 - RNA, 19 nt, Artificial Sequence
  Description of Artificial Sequence: Synthetic oligonucleotide
ccgcacguuccucacugca

SEQ ID NO: 105676 - RNA, 19 nt, Artificial Sequence
  Description of Artificial Sequence: Synthetic oligonucleotide
caggguuguccuccgcaau

SEQ ID NO: 105677 - RNA, 19 nt, Artificial Sequence
  Description of Artificial Sequence: Synthetic oligonucleotide
gggagcuaugagggauuca

SEQ ID NO: 105678 - RNA, 19 nt, Artificial Sequence
  Description of Artificial Sequence: Synthetic oligonucleotide
gcagggguuacggaagauu

SEQ ID NO: 105679 - RNA, 19 nt, Artificial Sequence
  Description of Artificial Sequence: Synthetic oligonucleotide
gcgcaacauggauccucca

SEQ ID NO: 105680 - RNA, 19 nt, Artificial Sequence
  Description of Artificial Sequence: Synthetic oligonucleotide
gccucauguggagguaugu

SEQ ID NO: 105681 - RNA, 19 nt, Artificial Sequence
  Description of Artificial Sequence: Synthetic oligonucleotide
cuggggcgcagugucucgu

SEQ ID NO: 105682 - RNA, 19 nt, Artificial Sequence
  Description of Artificial Sequence: Synthetic oligonucleotide
gcgcagugucucguauauc

SEQ ID NO: 105683 - RNA, 19 nt, Artificial Sequence
  Description of Artificial Sequence: Synthetic oligonucleotide
ggggcgcagugucucguau

SEQ ID NO: 105684 - RNA, 19 nt, Artificial Sequence
  Description of Artificial Sequence: Synthetic oligonucleotide
cgagcacgguuugcgcaac

SEQ ID NO: 105685 - RNA, 19 nt, Artificial Sequence
  Description of Artificial Sequence: Synthetic oligonucleotide
cgguuugcgcaacauggau

SEQ ID NO: 105686 - RNA, 19 nt, Artificial Sequence
  Description of Artificial Sequence: Synthetic oligonucleotide
ggguuaggaguagcucauu

SEQ ID NO: 105687 - RNA, 19 nt, Artificial Sequence
  Description of Artificial Sequence: Synthetic oligonucleotide
aacaacuuagcaucuaugc

SEQ ID NO: 105688 - RNA, 19 nt, Artificial Sequence
  Description of Artificial Sequence: Synthetic oligonucleotide
aaugguccaauaaagaccc

SEQ ID NO: 105689 - RNA, 19 nt, Artificial Sequence
  Description of Artificial Sequence: Synthetic oligonucleotide
uaaauaacgagcaacuuca

SEQ ID NO: 105690 - RNA, 19 nt, Artificial Sequence
  Description of Artificial Sequence: Synthetic oligonucleotide
auaaugguccaauaaagac

SEQ ID NO: 105691 - RNA, 19 nt, Artificial Sequence
  Description of Artificial Sequence: Synthetic oligonucleotide
augaauaacugauugcgcc

SEQ ID NO: 105692 - RNA, 19 nt, Artificial Sequence
  Description of Artificial Sequence: Synthetic oligonucleotide
aaguagugagauuaucagc

SEQ ID NO: 105693 - RNA, 19 nt, Artificial Sequence
  Description of Artificial Sequence: Synthetic oligonucleotide
ucauaucuauaccugaggg

SEQ ID NO: 105694 - RNA, 19 nt, Artificial Sequence
  Description of Artificial Sequence: Synthetic oligonucleotide
aaggauagugauuguagac

SEQ ID NO: 105695 - RNA, 19 nt, Artificial Sequence
  Description of Artificial Sequence: Synthetic oligonucleotide
  modified_base (7)..(7): a, c, u, g, unknown or other
ucuuucngaucauagcugg

SEQ ID NO: 105696 - RNA, 19 nt, Artificial Sequence
  Description of Artificial Sequence: Synthetic oligonucleotide
ugcuauacacauuaucucg

SEQ ID NO: 105697 - RNA, 19 nt, Artificial Sequence
  Description of Artificial Sequence: Synthetic oligonucleotide
aauuuaaucucgccugggg

SEQ ID NO: 105698 - RNA, 19 nt, Artificial Sequence
  Description of Artificial Sequence: Synthetic oligonucleotide
uaaugguccaauaaagacc

SEQ ID NO: 105699 - RNA, 19 nt, Artificial Sequence
  Description of Artificial Sequence: Synthetic oligonucleotide
gagucaaguaaauugagug

SEQ ID NO: 105700 - RNA, 19 nt, Artificial Sequence
  Description of Artificial Sequence: Synthetic oligonucleotide
aguguuguacuucaucagc

SEQ ID NO: 105701 - RNA, 19 nt, Artificial Sequence
  Description of Artificial Sequence: Synthetic oligonucleotide
aauggcaauacuucuauaa

SEQ ID NO: 105702 - RNA, 19 nt, Artificial Sequence
  Description of Artificial Sequence: Synthetic oligonucleotide
aguagcauccaauugcagg

SEQ ID NO: 105703 - RNA, 19 nt, Artificial Sequence
  Description of Artificial Sequence: Synthetic oligonucleotide
ugaaccauaaaaguaagga

SEQ ID NO: 105704 - RNA, 19 nt, Artificial Sequence
  Description of Artificial Sequence: Synthetic oligonucleotide
aaacuaaguugguaacagc

SEQ ID NO: 105705 - RNA, 19 nt, Artificial Sequence
  Description of Artificial Sequence: Synthetic oligonucleotide
gaaggaacaagucauuggc

SEQ ID NO: 105706 - RNA, 19 nt, Artificial Sequence
  Description of Artificial Sequence: Synthetic oligonucleotide
aggacauuaagucacaagu

SEQ ID NO: 105707 - RNA, 19 nt, Artificial Sequence
  Description of Artificial Sequence: Synthetic oligonucleotide
gagaauuuaaucucgccug

SEQ ID NO: 105708 - RNA, 19 nt, Artificial Sequence
  Description of Artificial Sequence: Synthetic oligonucleotide
uauuuagugcuccaucuag

SEQ ID NO: 105709 - RNA, 19 nt, Artificial Sequence
  Description of Artificial Sequence: Synthetic oligonucleotide
uaugaagcaaccuuugagu

SEQ ID NO: 105710 - RNA, 19 nt, Artificial Sequence
  Description of Artificial Sequence: Synthetic oligonucleotide
ugccauauaguucacugag

SEQ ID NO: 105711 - RNA, 19 nt, Artificial Sequence
  Description of Artificial Sequence: Synthetic oligonucleotide
auaugaagcaaccuuugag

SEQ ID NO: 105712 - RNA, 19 nt, Artificial Sequence
  Description of Artificial Sequence: Synthetic oligonucleotide
agcauagccgucuaggcgg

SEQ ID NO: 105713 - RNA, 19 nt, Artificial Sequence
  Description of Artificial Sequence: Synthetic oligonucleotide
agcaauacaggcugcaggg

SEQ ID NO: 105714 - RNA, 19 nt, Artificial Sequence
  Description of Artificial Sequence: Synthetic oligonucleotide
uuuccgauaugccaggccc

SEQ ID NO: 105715 - RNA, 19 nt, Artificial Sequence
  Description of Artificial Sequence: Synthetic oligonucleotide
agagauaggucauggugcc

SEQ ID NO: 105716 - RNA, 19 nt, Artificial Sequence
  Description of Artificial Sequence: Synthetic oligonucleotide
aaguccuaccgucagaugu

SEQ ID NO: 105717 - RNA, 19 nt, Artificial Sequence
  Description of Artificial Sequence: Synthetic oligonucleotide
auggacagagaauuuaauc

SEQ ID NO: 105718 - RNA, 19 nt, Artificial Sequence
  Description of Artificial Sequence: Synthetic oligonucleotide
agagaauuuaaucucgccu

SEQ ID NO: 105719 - RNA, 19 nt, Artificial Sequence
  Description of Artificial Sequence: Synthetic oligonucleotide
aacugauugcgccaccuuc

SEQ ID NO: 105720 - RNA, 19 nt, Artificial Sequence
  Description of Artificial Sequence: Synthetic oligonucleotide
uagugagggccucauaugg

SEQ ID NO: 105721 - RNA, 19 nt, Artificial Sequence
  Description of Artificial Sequence: Synthetic oligonucleotide
cauaaaaguaaggauagug

SEQ ID NO: 105722 - RNA, 19 nt, Artificial Sequence
  Description of Artificial Sequence: Synthetic oligonucleotide
aaaauccaacaacuuagca

SEQ ID NO: 105723 - RNA, 19 nt, Artificial Sequence
  Description of Artificial Sequence: Synthetic oligonucleotide
aaggacauuaagucacaag

SEQ ID NO: 105724 - RNA, 19 nt, Artificial Sequence
  Description of Artificial Sequence: Synthetic oligonucleotide
agaauuuaaucucgccugg

SEQ ID NO: 105725 - RNA, 19 nt, Artificial Sequence
  Description of Artificial Sequence: Synthetic oligonucleotide
aauaaagacccaccacuca

SEQ ID NO: 105726 - RNA, 19 nt, Artificial Sequence
  Description of Artificial Sequence: Synthetic oligonucleotide
augcuauacacauuaucuc

SEQ ID NO: 105727 - RNA, 19 nt, Artificial Sequence
  Description of Artificial Sequence: Synthetic oligonucleotide
gacuauacuugacugcucc

SEQ ID NO: 105728 - RNA, 19 nt, Artificial Sequence
  Description of Artificial Sequence: Synthetic oligonucleotide
  modified_base (3)..(3): a, c, u, g, unknown or other
ucngaucauagcuggcugg

SEQ ID NO: 105729 - RNA, 19 nt, Artificial Sequence
  Description of Artificial Sequence: Synthetic oligonucleotide
accaaggacauuaagucac

SEQ ID NO: 105730 - RNA, 19 nt, Artificial Sequence
  Description of Artificial Sequence: Synthetic oligonucleotide
aaccugguuaucuugugga

SEQ ID NO: 105731 - RNA, 19 nt, Artificial Sequence
  Description of Artificial Sequence: Synthetic oligonucleotide
uucucauauacauggcaag

SEQ ID NO: 105732 - RNA, 19 nt, Artificial Sequence
  Description of Artificial Sequence: Synthetic oligonucleotide
aguuccaugcaaaccaacc

SEQ ID NO: 105733 - RNA, 19 nt, Artificial Sequence
  Description of Artificial Sequence: Synthetic oligonucleotide
auacacugaaguagcaucc

SEQ ID NO: 105734 - RNA, 19 nt, Artificial Sequence
  Description of Artificial Sequence: Synthetic oligonucleotide
cacgauucagaacagacuc

SEQ ID NO: 105735 - RNA, 19 nt, Artificial Sequence
  Description of Artificial Sequence: Synthetic oligonucleotide
ucugacuauacuugacugc

SEQ ID NO: 105736 - RNA, 19 nt, Artificial Sequence
  Description of Artificial Sequence: Synthetic oligonucleotide
caacaugguaucaucugcg

SEQ ID NO: 105737 - RNA, 19 nt, Artificial Sequence
  Description of Artificial Sequence: Synthetic oligonucleotide
agucaaguaaauugaguga

SEQ ID NO: 105738 - RNA, 19 nt, Artificial Sequence
  Description of Artificial Sequence: Synthetic oligonucleotide
ugugaaaccagugacugaa

SEQ ID NO: 105739 - RNA, 19 nt, Artificial Sequence
  Description of Artificial Sequence: Synthetic oligonucleotide
  modified_base (4)..(4): a, c, u, g, unknown or other
uucngaucauagcuggcug

SEQ ID NO: 105740 - RNA, 19 nt, Artificial Sequence
  Description of Artificial Sequence: Synthetic oligonucleotide
uuuaaucucgccugggguc

SEQ ID NO: 105741 - RNA, 19 nt, Artificial Sequence
  Description of Artificial Sequence: Synthetic oligonucleotide
cugagcaucgaagagagug

SEQ ID NO: 105742 - RNA, 19 nt, Artificial Sequence
  Description of Artificial Sequence: Synthetic oligonucleotide
uaaauugagugaagggcga

SEQ ID NO: 105743 - RNA, 19 nt, Artificial Sequence
  Description of Artificial Sequence: Synthetic oligonucleotide
cuuaguacucugacuauac

SEQ ID NO: 105744 - RNA, 19 nt, Artificial Sequence
  Description of Artificial Sequence: Synthetic oligonucleotide
uauuaauaccugcucccca

SEQ ID NO: 105745 - RNA, 19 nt, Artificial Sequence
  Description of Artificial Sequence: Synthetic oligonucleotide
auuuaaucucgccuggggu

SEQ ID NO: 105746 - RNA, 19 nt, Artificial Sequence
  Description of Artificial Sequence: Synthetic oligonucleotide
aguacucugacuauacuug

SEQ ID NO: 105747 - RNA, 19 nt, Artificial Sequence
  Description of Artificial Sequence: Synthetic oligonucleotide
acaacuuagcaucuaugcu

SEQ ID NO: 105748 - RNA, 19 nt, Artificial Sequence
  Description of Artificial Sequence: Synthetic oligonucleotide
gauggaaauagcaggacuc

SEQ ID NO: 105749 - RNA, 19 nt, Artificial Sequence
  Description of Artificial Sequence: Synthetic oligonucleotide
cacucaauaugaagcaacc

SEQ ID NO: 105750 - RNA, 19 nt, Artificial Sequence
  Description of Artificial Sequence: Synthetic oligonucleotide
gagcauagccgucuaggcg

SEQ ID NO: 105751 - RNA, 19 nt, Artificial Sequence
  Description of Artificial Sequence: Synthetic oligonucleotide
ugucuguugaccacacaca

SEQ ID NO: 105752 - RNA, 19 nt, Artificial Sequence
  Description of Artificial Sequence: Synthetic oligonucleotide
uuuagugcuccaucuaguc

SEQ ID NO: 105753 - RNA, 19 nt, Artificial Sequence
  Description of Artificial Sequence: Synthetic oligonucleotide
gggugagucaaguaaauug

SEQ ID NO: 105754 - RNA, 19 nt, Artificial Sequence
  Description of Artificial Sequence: Synthetic oligonucleotide
  modified_base (5)..(5): a, c, u, g, unknown or other
uuucngaucauagcuggcu

SEQ ID NO: 105755 - RNA, 19 nt, Artificial Sequence
  Description of Artificial Sequence: Synthetic oligonucleotide
guaaggauugaaauguuca

SEQ ID NO: 105756 - RNA, 19 nt, Artificial Sequence
  Description of Artificial Sequence: Synthetic oligonucleotide
acaucauaucuauaccuga

SEQ ID NO: 105757 - RNA, 19 nt, Artificial Sequence
  Description of Artificial Sequence: Synthetic oligonucleotide
uuuuccgauaugccaggcc

SEQ ID NO: 105758 - RNA, 19 nt, Artificial Sequence
  Description of Artificial Sequence: Synthetic oligonucleotide
gauauggaguccugaagca

SEQ ID NO: 105759 - RNA, 19 nt, Artificial Sequence
  Description of Artificial Sequence: Synthetic oligonucleotide
uuagugagggccucauaug

SEQ ID NO: 105760 - RNA, 19 nt, Artificial Sequence
  Description of Artificial Sequence: Synthetic oligonucleotide
cucggaaccgaucuagccc

SEQ ID NO: 105761 - RNA, 19 nt, Artificial Sequence
  Description of Artificial Sequence: Synthetic oligonucleotide
cauuaucucggacccaggc

SEQ ID NO: 105762 - RNA, 19 nt, Artificial Sequence
  Description of Artificial Sequence: Synthetic oligonucleotide
caggacucacauuugaauc

SEQ ID NO: 105763 - RNA, 19 nt, Artificial Sequence
  Description of Artificial Sequence: Synthetic oligonucleotide
ucucucucgugguugaaga

SEQ ID NO: 105764 - RNA, 19 nt, Artificial Sequence
  Description of Artificial Sequence: Synthetic oligonucleotide
acauucuguacaugcagcu

SEQ ID NO: 105765 - RNA, 19 nt, Artificial Sequence
  Description of Artificial Sequence: Synthetic oligonucleotide
gaauuuaaucucgccuggg

SEQ ID NO: 105766 - RNA, 19 nt, Artificial Sequence
  Description of Artificial Sequence: Synthetic oligonucleotide
aaauccaaccgguacucua

SEQ ID NO: 105767 - RNA, 19 nt, Artificial Sequence
  Description of Artificial Sequence: Synthetic oligonucleotide
auuaucucggacccaggca

SEQ ID NO: 105768 - RNA, 19 nt, Artificial Sequence
  Description of Artificial Sequence: Synthetic oligonucleotide
agaaagcccagaaauaaga

SEQ ID NO: 105769 - RNA, 19 nt, Artificial Sequence
  Description of Artificial Sequence: Synthetic oligonucleotide
uuaguacucugacuauacu

SEQ ID NO: 105770 - RNA, 19 nt, Artificial Sequence
  Description of Artificial Sequence: Synthetic oligonucleotide
caaccgguacucuauuuag

SEQ ID NO: 105771 - RNA, 19 nt, Artificial Sequence
  Description of Artificial Sequence: Synthetic oligonucleotide
ucuaggcuguggaugauau

SEQ ID NO: 105772 - RNA, 19 nt, Artificial Sequence
  Description of Artificial Sequence: Synthetic oligonucleotide
acucgcauucaauucugag

SEQ ID NO: 105773 - RNA, 19 nt, Artificial Sequence
  Description of Artificial Sequence: Synthetic oligonucleotide
cuccaucuagucuucuccg

SEQ ID NO: 105774 - RNA, 19 nt, Artificial Sequence
  Description of Artificial Sequence: Synthetic oligonucleotide
uaucggaucagaccccagu

SEQ ID NO: 105775 - RNA, 19 nt, Artificial Sequence
  Description of Artificial Sequence: Synthetic oligonucleotide
uccaauugcaggugucccc

SEQ ID NO: 105776 - RNA, 19 nt, Artificial Sequence
  Description of Artificial Sequence: Synthetic oligonucleotide
ugccauaacuuguaugauc

SEQ ID NO: 105777 - RNA, 19 nt, Artificial Sequence
  Description of Artificial Sequence: Synthetic oligonucleotide
cucauggauggaaauagca

SEQ ID NO: 105778 - RNA, 19 nt, Artificial Sequence
  Description of Artificial Sequence: Synthetic oligonucleotide
gcauguagaguauaucagc

SEQ ID NO: 105779 - RNA, 19 nt, Artificial Sequence
  Description of Artificial Sequence: Synthetic oligonucleotide
aucggaucagaccccagug

SEQ ID NO: 105780 - RNA, 19 nt, Artificial Sequence
  Description of Artificial Sequence: Synthetic oligonucleotide
uucgaagucggaacauuuc

SEQ ID NO: 105781 - RNA, 19 nt, Artificial Sequence
  Description of Artificial Sequence: Synthetic oligonucleotide
aauugcagguguccccacu

SEQ ID NO: 105782 - RNA, 19 nt, Artificial Sequence
  Description of Artificial Sequence: Synthetic oligonucleotide
uuaaucucgccugggguca

SEQ ID NO: 105783 - RNA, 19 nt, Artificial Sequence
  Description of Artificial Sequence: Synthetic oligonucleotide
auugcgccaccuucacacc

SEQ ID NO: 105784 - RNA, 19 nt, Artificial Sequence
  Description of Artificial Sequence: Synthetic oligonucleotide
gacgacuaucuuuacaugu

SEQ ID NO: 105785 - RNA, 19 nt, Artificial Sequence
  Description of Artificial Sequence: Synthetic oligonucleotide
cauaucuauaccugaggga

SEQ ID NO: 105786 - RNA, 19 nt, Artificial Sequence
  Description of Artificial Sequence: Synthetic oligonucleotide
ccucauaugguagaggugc

SEQ ID NO: 105787 - RNA, 19 nt, Artificial Sequence
  Description of Artificial Sequence: Synthetic oligonucleotide
acagccuacgaaauuccac

SEQ ID NO: 105788 - RNA, 19 nt, Artificial Sequence
  Description of Artificial Sequence: Synthetic oligonucleotide
acagcauguagaguauauc

SEQ ID NO: 105789 - RNA, 19 nt, Artificial Sequence
  Description of Artificial Sequence: Synthetic oligonucleotide
gguggucuaaauaacgagc

SEQ ID NO: 105790 - RNA, 19 nt, Artificial Sequence
  Description of Artificial Sequence: Synthetic oligonucleotide
acgauucagaacagacucc

SEQ ID NO: 105791 - RNA, 19 nt, Artificial Sequence
  Description of Artificial Sequence: Synthetic oligonucleotide
cucuauuuagugcuccauc

SEQ ID NO: 105792 - RNA, 19 nt, Artificial Sequence
  Description of Artificial Sequence: Synthetic oligonucleotide
aucuauaccugagggauga

SEQ ID NO: 105793 - RNA, 19 nt, Artificial Sequence
  Description of Artificial Sequence: Synthetic oligonucleotide
ucuguugaccacacacagu

SEQ ID NO: 105794 - RNA, 19 nt, Artificial Sequence
  Description of Artificial Sequence: Synthetic oligonucleotide
  modified_base (6)..(6): a, c, u, g, unknown or other
cuuucngaucauagcuggc

SEQ ID NO: 105795 - RNA, 19 nt, Artificial Sequence
  Description of Artificial Sequence: Synthetic oligonucleotide
uccaucuagucuucuccgc

SEQ ID NO: 105796 - RNA, 19 nt, Artificial Sequence
  Description of Artificial Sequence: Synthetic oligonucleotide
caguguuguacuucaucag

SEQ ID NO: 105797 - RNA, 19 nt, Artificial Sequence
  Description of Artificial Sequence: Synthetic oligonucleotide
uccccaauaggaguuagaa

SEQ ID NO: 105798 - RNA, 19 nt, Artificial Sequence
  Description of Artificial Sequence: Synthetic oligonucleotide
cuaguuuaggauggggaac

SEQ ID NO: 105799 - RNA, 19 nt, Artificial Sequence
  Description of Artificial Sequence: Synthetic oligonucleotide
gggacgaacgcuucguucc

SEQ ID NO: 105800 - RNA, 19 nt, Artificial Sequence
  Description of Artificial Sequence: Synthetic oligonucleotide
gaggcuauccuuaguacuc

SEQ ID NO: 105801 - RNA, 19 nt, Artificial Sequence
  Description of Artificial Sequence: Synthetic oligonucleotide
ugggugcgcugucauacag

SEQ ID NO: 105802 - RNA, 19 nt, Artificial Sequence
  Description of Artificial Sequence: Synthetic oligonucleotide
gauuguagacugguugaac

SEQ ID NO: 105803 - RNA, 19 nt, Artificial Sequence
  Description of Artificial Sequence: Synthetic oligonucleotide
guagggaaggauccauuac

SEQ ID NO: 105804 - RNA, 19 nt, Artificial Sequence
  Description of Artificial Sequence: Synthetic oligonucleotide
uggaggcuauccuuaguac

SEQ ID NO: 105805 - RNA, 19 nt, Artificial Sequence
  Description of Artificial Sequence: Synthetic oligonucleotide
ucuaaauaacgagcaacuu

SEQ ID NO: 105806 - RNA, 19 nt, Artificial Sequence
  Description of Artificial Sequence: Synthetic oligonucleotide
aauucgaagucggaacauu

SEQ ID NO: 105807 - RNA, 19 nt, Artificial Sequence
  Description of Artificial Sequence: Synthetic oligonucleotide
cuucaaccagaaguuggcg

SEQ ID NO: 105808 - RNA, 19 nt, Artificial Sequence
  Description of Artificial Sequence: Synthetic oligonucleotide
aguaaggauagugauugua

SEQ ID NO: 105809 - RNA, 19 nt, Artificial Sequence
  Description of Artificial Sequence: Synthetic oligonucleotide
uggucuaaauaacgagcaa

SEQ ID NO: 105810 - RNA, 19 nt, Artificial Sequence
  Description of Artificial Sequence: Synthetic oligonucleotide
uggaugauauggaguccug

SEQ ID NO: 105811 - RNA, 19 nt, Artificial Sequence
  Description of Artificial Sequence: Synthetic oligonucleotide
acuauacuugacugcucca

SEQ ID NO: 105812 - RNA, 19 nt, Artificial Sequence
  Description of Artificial Sequence: Synthetic oligonucleotide
aaccgaucuagcccucccu

SEQ ID NO: 105813 - RNA, 19 nt, Artificial Sequence
  Description of Artificial Sequence: Synthetic oligonucleotide
uacgaaauuccaccugcuu

SEQ ID NO: 105814 - RNA, 19 nt, Artificial Sequence
  Description of Artificial Sequence: Synthetic oligonucleotide
gaacucgcauucaauucug

SEQ ID NO: 105815 - RNA, 19 nt, Artificial Sequence
  Description of Artificial Sequence: Synthetic oligonucleotide
acuuguaugaucagaccaa

SEQ ID NO: 105816 - RNA, 19 nt, Artificial Sequence
  Description of Artificial Sequence: Synthetic oligonucleotide
cuuguaagcuugaggucuc

SEQ ID NO: 105817 - RNA, 19 nt, Artificial Sequence
  Description of Artificial Sequence: Synthetic oligonucleotide
auaacugauugcgccaccu

SEQ ID NO: 105818 - RNA, 19 nt, Artificial Sequence
  Description of Artificial Sequence: Synthetic oligonucleotide
auacuugacugcuccaguu

SEQ ID NO: 105819 - RNA, 19 nt, Artificial Sequence
  Description of Artificial Sequence: Synthetic oligonucleotide
ugcgccgaggguuuucugu

SEQ ID NO: 105820 - RNA, 19 nt, Artificial Sequence
  Description of Artificial Sequence: Synthetic oligonucleotide
uuccgauaugccaggccca

SEQ ID NO: 105821 - RNA, 19 nt, Artificial Sequence
  Description of Artificial Sequence: Synthetic oligonucleotide
gaaccgaucuagcccuccc

SEQ ID NO: 105822 - RNA, 19 nt, Artificial Sequence
  Description of Artificial Sequence: Synthetic oligonucleotide
gcaucgaagagagugggcc

SEQ ID NO: 105823 - RNA, 19 nt, Artificial Sequence
  Description of Artificial Sequence: Synthetic oligonucleotide
cuauacacauuaucucgga

SEQ ID NO: 105824 - RNA, 19 nt, Artificial Sequence
  Description of Artificial Sequence: Synthetic oligonucleotide
cauuugugcuaggaagagc

SEQ ID NO: 105825 - RNA, 19 nt, Artificial Sequence
  Description of Artificial Sequence: Synthetic oligonucleotide
caccagccgagcauagccg

SEQ ID NO: 105826 - RNA, 19 nt, Artificial Sequence
  Description of Artificial Sequence: Synthetic oligonucleotide
aggauugacuggcaguguu

SEQ ID NO: 105827 - RNA, 19 nt, Artificial Sequence
  Description of Artificial Sequence: Synthetic oligonucleotide
ccaaccaagacagugacca

SEQ ID NO: 105828 - RNA, 19 nt, Artificial Sequence
  Description of Artificial Sequence: Synthetic oligonucleotide
ugggacgaacgcuucguuc

SEQ ID NO: 105829 - RNA, 19 nt, Artificial Sequence
  Description of Artificial Sequence: Synthetic oligonucleotide
uuccaacugaacucgcauu

SEQ ID NO: 105830 - RNA, 19 nt, Artificial Sequence
  Description of Artificial Sequence: Synthetic oligonucleotide
aggcugagguacacgauuc

SEQ ID NO: 105831 - RNA, 19 nt, Artificial Sequence
  Description of Artificial Sequence: Synthetic oligonucleotide
gaaguccuaccgucagaug

SEQ ID NO: 105832 - RNA, 19 nt, Artificial Sequence
  Description of Artificial Sequence: Synthetic oligonucleotide
caccaaggacauuaaguca

SEQ ID NO: 105833 - RNA, 19 nt, Artificial Sequence
  Description of Artificial Sequence: Synthetic oligonucleotide
accaaccaagacagugacc

SEQ ID NO: 105834 - RNA, 19 nt, Artificial Sequence
  Description of Artificial Sequence: Synthetic oligonucleotide
ugauugcgccaccuucaca

SEQ ID NO: 105835 - RNA, 19 nt, Artificial Sequence
  Description of Artificial Sequence: Synthetic oligonucleotide
uccuuaguacucugacuau

SEQ ID NO: 105836 - RNA, 19 nt, Artificial Sequence
  Description of Artificial Sequence: Synthetic oligonucleotide
cgucagauguuucugguag

SEQ ID NO: 105837 - RNA, 19 nt, Artificial Sequence
  Description of Artificial Sequence: Synthetic oligonucleotide
ugagaugccuugguugguc

SEQ ID NO: 105838 - RNA, 19 nt, Artificial Sequence
  Description of Artificial Sequence: Synthetic oligonucleotide
aaccgguacucuauuuagu

SEQ ID NO: 105839 - RNA, 19 nt, Artificial Sequence
  Description of Artificial Sequence: Synthetic oligonucleotide
aucaucugcgccgaggguu

SEQ ID NO: 105840 - RNA, 19 nt, Artificial Sequence
  Description of Artificial Sequence: Synthetic oligonucleotide
gcuucguuccacuccaaac

SEQ ID NO: 105841 - RNA, 19 nt, Artificial Sequence
  Description of Artificial Sequence: Synthetic oligonucleotide
gcuaguuuaggauggggaa

SEQ ID NO: 105842 - RNA, 19 nt, Artificial Sequence
  Description of Artificial Sequence: Synthetic oligonucleotide
accagccgagcauagccgu

SEQ ID NO: 105843 - RNA, 19 nt, Artificial Sequence
  Description of Artificial Sequence: Synthetic oligonucleotide
ucagugggacgaacgcuuc

SEQ ID NO: 105844 - RNA, 19 nt, Artificial Sequence
  Description of Artificial Sequence: Synthetic oligonucleotide
gacggugacaucauaucua

SEQ ID NO: 105845 - RNA, 19 nt, Artificial Sequence
  Description of Artificial Sequence: Synthetic oligonucleotide
ggaguggucaguugcuaac

SEQ ID NO: 105846 - RNA, 19 nt, Artificial Sequence
  Description of Artificial Sequence: Synthetic oligonucleotide
acagcgccaaucucaugga

SEQ ID NO: 105847 - RNA, 19 nt, Artificial Sequence
  Description of Artificial Sequence: Synthetic oligonucleotide
agcucggaaccgaucuagc

SEQ ID NO: 105848 - RNA, 19 nt, Artificial Sequence
  Description of Artificial Sequence: Synthetic oligonucleotide
acguucccauaucccaaag

SEQ ID NO: 105849 - RNA, 19 nt, Artificial Sequence
  Description of Artificial Sequence: Synthetic oligonucleotide
aaauaacgagcaacuucau

SEQ ID NO: 105850 - RNA, 19 nt, Artificial Sequence
  Description of Artificial Sequence: Synthetic oligonucleotide
cuaccgucagauguuucug

SEQ ID NO: 105851 - RNA, 19 nt, Artificial Sequence
  Description of Artificial Sequence: Synthetic oligonucleotide
uaacugauugcgccaccuu

SEQ ID NO: 105852 - RNA, 19 nt, Artificial Sequence
  Description of Artificial Sequence: Synthetic oligonucleotide
agugggacgaacgcuucgu

SEQ ID NO: 105853 - RNA, 19 nt, Artificial Sequence
  Description of Artificial Sequence: Synthetic oligonucleotide
cugauugcgccaccuucac

SEQ ID NO: 105854 - RNA, 19 nt, Artificial Sequence
  Description of Artificial Sequence: Synthetic oligonucleotide
cgaauuucaccaacuuugc

SEQ ID NO: 105855 - RNA, 19 nt, Artificial Sequence
  Description of Artificial Sequence: Synthetic oligonucleotide
cugcaugauuccaguucgc

SEQ ID NO: 105856 - RNA, 19 nt, Artificial Sequence
  Description of Artificial Sequence: Synthetic oligonucleotide
ccaauaaagacccaccacu

SEQ ID NO: 105857 - RNA, 19 nt, Artificial Sequence
  Description of Artificial Sequence: Synthetic oligonucleotide
cugacuauacuugacugcu

SEQ ID NO: 105858 - RNA, 19 nt, Artificial Sequence
  Description of Artificial Sequence: Synthetic oligonucleotide
cagugggacgaacgcuucg

SEQ ID NO: 105859 - RNA, 19 nt, Artificial Sequence
  Description of Artificial Sequence: Synthetic oligonucleotide
ccaucuagucuucuccgcc

SEQ ID NO: 105860 - RNA, 19 nt, Artificial Sequence
  Description of Artificial Sequence: Synthetic oligonucleotide
auucgaagucggaacauuu

SEQ ID NO: 105861 - RNA, 19 nt, Artificial Sequence
  Description of Artificial Sequence: Synthetic oligonucleotide
caucgaagagagugggcca

SEQ ID NO: 105862 - RNA, 19 nt, Artificial Sequence
  Description of Artificial Sequence: Synthetic oligonucleotide
auggcaagauauaccauua

SEQ ID NO: 105863 - RNA, 19 nt, Artificial Sequence
  Description of Artificial Sequence: Synthetic oligonucleotide
augaucugaugcuggcuuu

SEQ ID NO: 105864 - RNA, 19 nt, Artificial Sequence
  Description of Artificial Sequence: Synthetic oligonucleotide
  modified_base (18)..(18): a, c, u, g, unknown or other
ggacccaggcaucuuucng

SEQ ID NO: 105865 - RNA, 19 nt, Artificial Sequence
  Description of Artificial Sequence: Synthetic oligonucleotide
cuaggcuguggaugauaug

SEQ ID NO: 105866 - RNA, 19 nt, Artificial Sequence
  Description of Artificial Sequence: Synthetic oligonucleotide
uggaagcaauccuguuacu

SEQ ID NO: 105867 - RNA, 19 nt, Artificial Sequence
  Description of Artificial Sequence: Synthetic oligonucleotide
ggucauggugccaaaucug

SEQ ID NO: 105868 - RNA, 19 nt, Artificial Sequence
  Description of Artificial Sequence: Synthetic oligonucleotide
gcucggaaccgaucuagcc

SEQ ID NO: 105869 - RNA, 19 nt, Artificial Sequence
  Description of Artificial Sequence: Synthetic oligonucleotide
uccaaccgguacucuauuu

SEQ ID NO: 105870 - RNA, 19 nt, Artificial Sequence
  Description of Artificial Sequence: Synthetic oligonucleotide
ccgguacucuauuuagugc

SEQ ID NO: 105871 - RNA, 19 nt, Artificial Sequence
  Description of Artificial Sequence: Synthetic oligonucleotide
accgaucuagcccucccuu

SEQ ID NO: 105872 - RNA, 19 nt, Artificial Sequence
  Description of Artificial Sequence: Synthetic oligonucleotide
cagagauguaucggaucag

SEQ ID NO: 105873 - RNA, 19 nt, Artificial Sequence
  Description of Artificial Sequence: Synthetic oligonucleotide
uugccauaacuuguaugau

SEQ ID NO: 105874 - RNA, 19 nt, Artificial Sequence
  Description of Artificial Sequence: Synthetic oligonucleotide
augguaucaucugcgccga

SEQ ID NO: 105875 - RNA, 19 nt, Artificial Sequence
  Description of Artificial Sequence: Synthetic oligonucleotide
gcaugauuccaguucgcuc

SEQ ID NO: 105876 - RNA, 19 nt, Artificial Sequence
  Description of Artificial Sequence: Synthetic oligonucleotide
aggacaugaauaacugauu

SEQ ID NO: 105877 - RNA, 19 nt, Artificial Sequence
  Description of Artificial Sequence: Synthetic oligonucleotide
gugagggccucauauggua

SEQ ID NO: 105878 - RNA, 19 nt, Artificial Sequence
  Description of Artificial Sequence: Synthetic oligonucleotide
gaccccagugucgaauuuc

SEQ ID NO: 105879 - RNA, 19 nt, Artificial Sequence
  Description of Artificial Sequence: Synthetic oligonucleotide
cagucauuugugcuaggaa

SEQ ID NO: 105880 - RNA, 19 nt, Artificial Sequence
  Description of Artificial Sequence: Synthetic oligonucleotide
ggauggaaauagcaggacu

SEQ ID NO: 105881 - RNA, 19 nt, Artificial Sequence
  Description of Artificial Sequence: Synthetic oligonucleotide
gguacacgauucagaacag

SEQ ID NO: 105882 - RNA, 19 nt, Artificial Sequence
  Description of Artificial Sequence: Synthetic oligonucleotide
ggaauggcaauacuucuau

SEQ ID NO: 105883 - RNA, 19 nt, Artificial Sequence
  Description of Artificial Sequence: Synthetic oligonucleotide
  modified_base (2)..(2): a, c, u, g, unknown or other
cngaucauagcuggcugga

SEQ ID NO: 105884 - RNA, 19 nt, Artificial Sequence
  Description of Artificial Sequence: Synthetic oligonucleotide
ccaauucgaagucggaaca

SEQ ID NO: 105885 - RNA, 19 nt, Artificial Sequence
  Description of Artificial Sequence: Synthetic oligonucleotide
uccuaccgucagauguuuc

SEQ ID NO: 105886 - RNA, 19 nt, Artificial Sequence
  Description of Artificial Sequence: Synthetic oligonucleotide
guacuucuacacgaacaga

SEQ ID NO: 105887 - RNA, 19 nt, Artificial Sequence
  Description of Artificial Sequence: Synthetic oligonucleotide
ugcaccagccgagcauagc

SEQ ID NO: 105888 - RNA, 19 nt, Artificial Sequence
  Description of Artificial Sequence: Synthetic oligonucleotide
ggaggcuauccuuaguacu

SEQ ID NO: 105889 - RNA, 19 nt, Artificial Sequence
  Description of Artificial Sequence: Synthetic oligonucleotide
accccagugucgaauuuca

SEQ ID NO: 105890 - RNA, 19 nt, Artificial Sequence
  Description of Artificial Sequence: Synthetic oligonucleotide
aguuggcgguacucaggcu

SEQ ID NO: 105891 - RNA, 19 nt, Artificial Sequence
  Description of Artificial Sequence: Synthetic oligonucleotide
gccuacgaaauuccaccug

SEQ ID NO: 105892 - RNA, 19 nt, Artificial Sequence
  Description of Artificial Sequence: Synthetic oligonucleotide
caggcccuuucauugaaua

SEQ ID NO: 105893 - RNA, 19 nt, Artificial Sequence
  Description of Artificial Sequence: Synthetic oligonucleotide
caguugcuaacauuucagu

SEQ ID NO: 105894 - RNA, 19 nt, Artificial Sequence
  Description of Artificial Sequence: Synthetic oligonucleotide
cgagcauagccgucuaggc

SEQ ID NO: 105895 - RNA, 19 nt, Artificial Sequence
  Description of Artificial Sequence: Synthetic oligonucleotide
aguccuaccgucagauguu

SEQ ID NO: 105896 - RNA, 19 nt, Artificial Sequence
  Description of Artificial Sequence: Synthetic oligonucleotide
ggcuauccuuaguacucug

SEQ ID NO: 105897 - RNA, 19 nt, Artificial Sequence
  Description of Artificial Sequence: Synthetic oligonucleotide
ggacggugacaucauaucu

SEQ ID NO: 105898 - RNA, 19 nt, Artificial Sequence
  Description of Artificial Sequence: Synthetic oligonucleotide
ccacuagucugacucucag

SEQ ID NO: 105899 - RNA, 19 nt, Artificial Sequence
  Description of Artificial Sequence: Synthetic oligonucleotide
cucauauacauggcaagau

SEQ ID NO: 105900 - RNA, 19 nt, Artificial Sequence
  Description of Artificial Sequence: Synthetic oligonucleotide
auccaaccgguacucuauu

SEQ ID NO: 105901 - RNA, 19 nt, Artificial Sequence
  Description of Artificial Sequence: Synthetic oligonucleotide
cccagagauguaucggauc

SEQ ID NO: 105902 - RNA, 19 nt, Artificial Sequence
  Description of Artificial Sequence: Synthetic oligonucleotide
cuacgaaauuccaccugcu

SEQ ID NO: 105903 - RNA, 19 nt, Artificial Sequence
  Description of Artificial Sequence: Synthetic oligonucleotide
gauuccaguucgcucuguu

SEQ ID NO: 105904 - RNA, 19 nt, Artificial Sequence
  Description of Artificial Sequence: Synthetic oligonucleotide
guaucggaucagaccccag

SEQ ID NO: 105905 - RNA, 19 nt, Artificial Sequence
  Description of Artificial Sequence: Synthetic oligonucleotide
cuuguaugaucagaccaau

SEQ ID NO: 105906 - RNA, 19 nt, Artificial Sequence
  Description of Artificial Sequence: Synthetic oligonucleotide
ggucaguugcuaacauuuc

SEQ ID NO: 105907 - RNA, 19 nt, Artificial Sequence
  Description of Artificial Sequence: Synthetic oligonucleotide
gcgguacucaggcugaggu

SEQ ID NO: 105908 - RNA, 19 nt, Artificial Sequence
  Description of Artificial Sequence: Synthetic oligonucleotide
gggaguggucaguugcuaa

SEQ ID NO: 105909 - RNA, 19 nt, Artificial Sequence
  Description of Artificial Sequence: Synthetic oligonucleotide
ggaaccgaucuagcccucc

SEQ ID NO: 105910 - RNA, 19 nt, Artificial Sequence
  Description of Artificial Sequence: Synthetic oligonucleotide
ugcuccccaauaggaguua

SEQ ID NO: 105911 - RNA, 19 nt, Artificial Sequence
  Description of Artificial Sequence: Synthetic oligonucleotide
ccugguuaucuuguggaga

SEQ ID NO: 105912 - RNA, 19 nt, Artificial Sequence
  Description of Artificial Sequence: Synthetic oligonucleotide
cugggugcgcugucauaca

SEQ ID NO: 105913 - RNA, 19 nt, Artificial Sequence
  Description of Artificial Sequence: Synthetic oligonucleotide
ccuaccgucagauguuucu

SEQ ID NO: 105914 - RNA, 19 nt, Artificial Sequence
  Description of Artificial Sequence: Synthetic oligonucleotide
ccaaccgguacucuauuua

SEQ ID NO: 105915 - RNA, 19 nt, Artificial Sequence
  Description of Artificial Sequence: Synthetic oligonucleotide
ccaaggacauuaagucaca

SEQ ID NO: 105916 - RNA, 19 nt, Artificial Sequence
  Description of Artificial Sequence: Synthetic oligonucleotide
ggcgguacucaggcugagg

SEQ ID NO: 105917 - RNA, 19 nt, Artificial Sequence
  Description of Artificial Sequence: Synthetic oligonucleotide
cgguacucuauuuagugcu

SEQ ID NO: 105918 - RNA, 19 nt, Artificial Sequence
  Description of Artificial Sequence: Synthetic oligonucleotide
ccuugacgacuaucuuuac

SEQ ID NO: 105919 - RNA, 19 nt, Artificial Sequence
  Description of Artificial Sequence: Synthetic oligonucleotide
gccgagcauagccgucuag

SEQ ID NO: 105920 - RNA, 19 nt, Artificial Sequence
  Description of Artificial Sequence: Synthetic oligonucleotide
cugcgccgaggguuuucug

SEQ ID NO: 105921 - RNA, 19 nt, Artificial Sequence
  Description of Artificial Sequence: Synthetic oligonucleotide
caauucgaagucggaacau

SEQ ID NO: 105922 - RNA, 19 nt, Artificial Sequence
  Description of Artificial Sequence: Synthetic oligonucleotide
ccccaauaggaguuagaaa

SEQ ID NO: 105923 - RNA, 19 nt, Artificial Sequence
  Description of Artificial Sequence: Synthetic oligonucleotide
cugcuccccaauaggaguu

SEQ ID NO: 105924 - RNA, 19 nt, Artificial Sequence
  Description of Artificial Sequence: Synthetic oligonucleotide
caaccagaaguuggcggua

SEQ ID NO: 105925 - RNA, 19 nt, Artificial Sequence
  Description of Artificial Sequence: Synthetic oligonucleotide
ccuuaguacucugacuaua

SEQ ID NO: 105926 - RNA, 19 nt, Artificial Sequence
  Description of Artificial Sequence: Synthetic oligonucleotide
caguagggaaggauccauu

SEQ ID NO: 105927 - RNA, 19 nt, Artificial Sequence
  Description of Artificial Sequence: Synthetic oligonucleotide
gggugcgcugucauacaga

SEQ ID NO: 105928 - RNA, 19 nt, Artificial Sequence
  Description of Artificial Sequence: Synthetic oligonucleotide
ccccagugucgaauuucac

SEQ ID NO: 105929 - RNA, 19 nt, Artificial Sequence
  Description of Artificial Sequence: Synthetic oligonucleotide
gugggacgaacgcuucguu

SEQ ID NO: 105930 - RNA, 19 nt, Artificial Sequence
  Description of Artificial Sequence: Synthetic oligonucleotide
ccgggcugaguucucauau

SEQ ID NO: 105931 - RNA, 19 nt, Artificial Sequence
  Description of Artificial Sequence: Synthetic oligonucleotide
guccuaccgucagauguuu

SEQ ID NO: 105932 - RNA, 19 nt, Artificial Sequence
  Description of Artificial Sequence: Synthetic oligonucleotide
cagcgccaaucucauggau

SEQ ID NO: 105933 - RNA, 19 nt, Artificial Sequence
  Description of Artificial Sequence: Synthetic oligonucleotide
ggggugagucaaguaaauu

SEQ ID NO: 105934 - RNA, 19 nt, Artificial Sequence
  Description of Artificial Sequence: Synthetic oligonucleotide
gcgccgaggguuuucuguu

SEQ ID NO: 105935 - RNA, 19 nt, Artificial Sequence
  Description of Artificial Sequence: Synthetic oligonucleotide
cguucccauaucccaaagu

SEQ ID NO: 105936 - RNA, 19 nt, Artificial Sequence
  Description of Artificial Sequence: Synthetic oligonucleotide
caucuaggcuguggaugau

SEQ ID NO: 105937 - RNA, 19 nt, Artificial Sequence
  Description of Artificial Sequence: Synthetic oligonucleotide
cggaaccgaucuagcccuc

SEQ ID NO: 105938 - RNA, 19 nt, Artificial Sequence
  Description of Artificial Sequence: Synthetic oligonucleotide
caucugcgccgaggguuuu

SEQ ID NO: 105939 - RNA, 19 nt, Artificial Sequence
  Description of Artificial Sequence: Synthetic oligonucleotide
aauucggagaucuuuauag

SEQ ID NO: 105940 - RNA, 19 nt, Artificial Sequence
  Description of Artificial Sequence: Synthetic oligonucleotide
aaugacucgaugcucgccc

SEQ ID NO: 105941 - RNA, 19 nt, Artificial Sequence
  Description of Artificial Sequence: Synthetic oligonucleotide
gaucuuuauagucugggcg

SEQ ID NO: 105942 - RNA, 19 nt, Artificial Sequence
  Description of Artificial Sequence: Synthetic oligonucleotide
aaucaauguagagugggcc

SEQ ID NO: 105943 - RNA, 19 nt, Artificial Sequence
  Description of Artificial Sequence: Synthetic oligonucleotide
aauuucuugcccugcaguc

SEQ ID NO: 105944 - RNA, 19 nt, Artificial Sequence
  Description of Artificial Sequence: Synthetic oligonucleotide
ucaacuacaucccagacuu

SEQ ID NO: 105945 - RNA, 19 nt, Artificial Sequence
  Description of Artificial Sequence: Synthetic oligonucleotide
agaacauaauugaaggucc

SEQ ID NO: 105946 - RNA, 19 nt, Artificial Sequence
  Description of Artificial Sequence: Synthetic oligonucleotide
uugcccaacacgcacaccg

SEQ ID NO: 105947 - RNA, 19 nt, Artificial Sequence
  Description of Artificial Sequence: Synthetic oligonucleotide
ucaauaucuaguugguuug

SEQ ID NO: 105948 - RNA, 19 nt, Artificial Sequence
  Description of Artificial Sequence: Synthetic oligonucleotide
ugagucauucuucagucug

SEQ ID NO: 105949 - RNA, 19 nt, Artificial Sequence
  Description of Artificial Sequence: Synthetic oligonucleotide
ucuaugagagccaucagua

SEQ ID NO: 105950 - RNA, 19 nt, Artificial Sequence
  Description of Artificial Sequence: Synthetic oligonucleotide
aacgccgagaacaucuucc

SEQ ID NO: 105951 - RNA, 19 nt, Artificial Sequence
  Description of Artificial Sequence: Synthetic oligonucleotide
uucuucaacgccgagaaca

SEQ ID NO: 105952 - RNA, 19 nt, Artificial Sequence
  Description of Artificial Sequence: Synthetic oligonucleotide
uucaacgccgagaacaucu

SEQ ID NO: 105953 - RNA, 19 nt, Artificial Sequence
  Description of Artificial Sequence: Synthetic oligonucleotide
gaggguauggcucgggugg

SEQ ID NO: 105954 - RNA, 19 nt, Artificial Sequence
  Description of Artificial Sequence: Synthetic oligonucleotide
ugguuuguaguuccagugg

SEQ ID NO: 105955 - RNA, 19 nt, Artificial Sequence
  Description of Artificial Sequence: Synthetic oligonucleotide
gaagcuucgaucaaggcca

SEQ ID NO: 105956 - RNA, 19 nt, Artificial Sequence
  Description of Artificial Sequence: Synthetic oligonucleotide
caugacuaccccauuacag

SEQ ID NO: 105957 - RNA, 19 nt, Artificial Sequence
  Description of Artificial Sequence: Synthetic oligonucleotide
uugucucaggcucugagca

SEQ ID NO: 105958 - RNA, 19 nt, Artificial Sequence
  Description of Artificial Sequence: Synthetic oligonucleotide
uaaaauucggagaucuuua

SEQ ID NO: 105959 - RNA, 19 nt, Artificial Sequence
  Description of Artificial Sequence: Synthetic oligonucleotide
auuggguucccuccuacgg

SEQ ID NO: 105960 - RNA, 19 nt, Artificial Sequence
  Description of Artificial Sequence: Synthetic oligonucleotide
agugucuuaagaaggugcc

SEQ ID NO: 105961 - RNA, 19 nt, Artificial Sequence
  Description of Artificial Sequence: Synthetic oligonucleotide
agucacguacaucaucugg

SEQ ID NO: 105962 - RNA, 19 nt, Artificial Sequence
  Description of Artificial Sequence: Synthetic oligonucleotide
uucuuuuguagaugugagg

SEQ ID NO: 105963 - RNA, 19 nt, Artificial Sequence
  Description of Artificial Sequence: Synthetic oligonucleotide
agaccaucggaccaugagg

SEQ ID NO: 105964 - RNA, 19 nt, Artificial Sequence
  Description of Artificial Sequence: Synthetic oligonucleotide
uccguuuugucucaggcuc

SEQ ID NO: 105965 - RNA, 19 nt, Artificial Sequence
  Description of Artificial Sequence: Synthetic oligonucleotide
uuaagaaggugcccucuag

SEQ ID NO: 105966 - RNA, 19 nt, Artificial Sequence
  Description of Artificial Sequence: Synthetic oligonucleotide
auaguccccaccuccaggg

SEQ ID NO: 105967 - RNA, 19 nt, Artificial Sequence
  Description of Artificial Sequence: Synthetic oligonucleotide
auaggaggaaccuggaggu

SEQ ID NO: 105968 - RNA, 19 nt, Artificial Sequence
  Description of Artificial Sequence: Synthetic oligonucleotide
aagcuguuagugccucucc

SEQ ID NO: 105969 - RNA, 19 nt, Artificial Sequence
  Description of Artificial Sequence: Synthetic oligonucleotide
uuuuguagaugugaggccu

SEQ ID NO: 105970 - RNA, 19 nt, Artificial Sequence
  Description of Artificial Sequence: Synthetic oligonucleotide
gacugauguucuuacuggg

SEQ ID NO: 105971 - RNA, 19 nt, Artificial Sequence
  Description of Artificial Sequence: Synthetic oligonucleotide
agcgaagcgccucuguagc

SEQ ID NO: 105972 - RNA, 19 nt, Artificial Sequence
  Description of Artificial Sequence: Synthetic oligonucleotide
ucugagucauucuucaguc

SEQ ID NO: 105973 - RNA, 19 nt, Artificial Sequence
  Description of Artificial Sequence: Synthetic oligonucleotide
agaaacaccggggacuggc

SEQ ID NO: 105974 - RNA, 19 nt, Artificial Sequence
  Description of Artificial Sequence: Synthetic oligonucleotide
aacuuaugcagguacuuua

SEQ ID NO: 105975 - RNA, 19 nt, Artificial Sequence
  Description of Artificial Sequence: Synthetic oligonucleotide
gaccaucggaccaugaggg

SEQ ID NO: 105976 - RNA, 19 nt, Artificial Sequence
  Description of Artificial Sequence: Synthetic oligonucleotide
caugagggcagacacaaug

SEQ ID NO: 105977 - RNA, 19 nt, Artificial Sequence
  Description of Artificial Sequence: Synthetic oligonucleotide
auuacaguucuuguacacg

SEQ ID NO: 105978 - RNA, 19 nt, Artificial Sequence
  Description of Artificial Sequence: Synthetic oligonucleotide
aaaauucggagaucuuuau

SEQ ID NO: 105979 - RNA, 19 nt, Artificial Sequence
  Description of Artificial Sequence: Synthetic oligonucleotide
aacuacaucccagacuuca

SEQ ID NO: 105980 - RNA, 19 nt, Artificial Sequence
  Description of Artificial Sequence: Synthetic oligonucleotide
gcuuaugcuagguugaggc

SEQ ID NO: 105981 - RNA, 19 nt, Artificial Sequence
  Description of Artificial Sequence: Synthetic oligonucleotide
acgguaguugcccaacacg

SEQ ID NO: 105982 - RNA, 19 nt, Artificial Sequence
  Description of Artificial Sequence: Synthetic oligonucleotide
uggacauuugagaagccaa

SEQ ID NO: 105983 - RNA, 19 nt, Artificial Sequence
  Description of Artificial Sequence: Synthetic oligonucleotide
uuauagucugggcggagug

SEQ ID NO: 105984 - RNA, 19 nt, Artificial Sequence
  Description of Artificial Sequence: Synthetic oligonucleotide
agcuguuagugccucuccc

SEQ ID NO: 105985 - RNA, 19 nt, Artificial Sequence
  Description of Artificial Sequence: Synthetic oligonucleotide
cuuuuguagaugugaggcc

SEQ ID NO: 105986 - RNA, 19 nt, Artificial Sequence
  Description of Artificial Sequence: Synthetic oligonucleotide
aaugccuacagcuccucau

SEQ ID NO: 105987 - RNA, 19 nt, Artificial Sequence
  Description of Artificial Sequence: Synthetic oligonucleotide
gggaagaaggcccacaacc

SEQ ID NO: 105988 - RNA, 19 nt, Artificial Sequence
  Description of Artificial Sequence: Synthetic oligonucleotide
agcggcaagcuguuagugc

SEQ ID NO: 105989 - RNA, 19 nt, Artificial Sequence
  Description of Artificial Sequence: Synthetic oligonucleotide
auaucuaguugguuugucu

SEQ ID NO: 105990 - RNA, 19 nt, Artificial Sequence
  Description of Artificial Sequence: Synthetic oligonucleotide
uuugucucaggcucugagc

SEQ ID NO: 105991 - RNA, 19 nt, Artificial Sequence
  Description of Artificial Sequence: Synthetic oligonucleotide
augacuaccccauuacagu

SEQ ID NO: 105992 - RNA, 19 nt, Artificial Sequence
  Description of Artificial Sequence: Synthetic oligonucleotide
uguacucuuccacaauuuc

SEQ ID NO: 105993 - RNA, 19 nt, Artificial Sequence
  Description of Artificial Sequence: Synthetic oligonucleotide
ggaagcuucgaucaaggcc

SEQ ID NO: 105994 - RNA, 19 nt, Artificial Sequence
  Description of Artificial Sequence: Synthetic oligonucleotide
cagggauuugccauguggc

SEQ ID NO: 105995 - RNA, 19 nt, Artificial Sequence
  Description of Artificial Sequence: Synthetic oligonucleotide
cagacuucaacuuucacua

SEQ ID NO: 105996 - RNA, 19 nt, Artificial Sequence
  Description of Artificial Sequence: Synthetic oligonucleotide
ucaaugaagucacguacau

SEQ ID NO: 105997 - RNA, 19 nt, Artificial Sequence
  Description of Artificial Sequence: Synthetic oligonucleotide
gauacugcgacgcugggcu

SEQ ID NO: 105998 - RNA, 19 nt, Artificial Sequence
  Description of Artificial Sequence: Synthetic oligonucleotide
ugggugguggacauuugag

SEQ ID NO: 105999 - RNA, 19 nt, Artificial Sequence
  Description of Artificial Sequence: Synthetic oligonucleotide
ucagcuguaacugcaaaau

SEQ ID NO: 106000 - RNA, 19 nt, Artificial Sequence
  Description of Artificial Sequence: Synthetic oligonucleotide
ucgaugcucgcccauguca

SEQ ID NO: 106001 - RNA, 19 nt, Artificial Sequence
  Description of Artificial Sequence: Synthetic oligonucleotide
guaacugcaaaauugggau

SEQ ID NO: 106002 - RNA, 19 nt, Artificial Sequence
  Description of Artificial Sequence: Synthetic oligonucleotide
uuugggaagcucccggaga

SEQ ID NO: 106003 - RNA, 19 nt, Artificial Sequence
  Description of Artificial Sequence: Synthetic oligonucleotide
cuguaacugcaaaauuggg

SEQ ID NO: 106004 - RNA, 19 nt, Artificial Sequence
  Description of Artificial Sequence: Synthetic oligonucleotide
cuuaugcagguacuuuagg

SEQ ID NO: 106005 - RNA, 19 nt, Artificial Sequence
  Description of Artificial Sequence: Synthetic oligonucleotide
ucgacuucgagccuccauc

SEQ ID NO: 106006 - RNA, 19 nt, Artificial Sequence
  Description of Artificial Sequence: Synthetic oligonucleotide
cauuacaguucuuguacac

SEQ ID NO: 106007 - RNA, 19 nt, Artificial Sequence
  Description of Artificial Sequence: Synthetic oligonucleotide
aagagaucugagucauucu

SEQ ID NO: 106008 - RNA, 19 nt, Artificial Sequence
  Description of Artificial Sequence: Synthetic oligonucleotide
agagccauuucagacuccg

SEQ ID NO: 106009 - RNA, 19 nt, Artificial Sequence
  Description of Artificial Sequence: Synthetic oligonucleotide
ugaagucacguacaucauc

SEQ ID NO: 106010 - RNA, 19 nt, Artificial Sequence
  Description of Artificial Sequence: Synthetic oligonucleotide
aacaucaugacuaccccau

SEQ ID NO: 106011 - RNA, 19 nt, Artificial Sequence
  Description of Artificial Sequence: Synthetic oligonucleotide
aaauucggagaucuuuaua

SEQ ID NO: 106012 - RNA, 19 nt, Artificial Sequence
  Description of Artificial Sequence: Synthetic oligonucleotide
aggaagcuucgaucaaggc

SEQ ID NO: 106013 - RNA, 19 nt, Artificial Sequence
  Description of Artificial Sequence: Synthetic oligonucleotide
gaagguccacuguuuagug

SEQ ID NO: 106014 - RNA, 19 nt, Artificial Sequence
  Description of Artificial Sequence: Synthetic oligonucleotide
cuuaugcuagguugaggcc

SEQ ID NO: 106015 - RNA, 19 nt, Artificial Sequence
  Description of Artificial Sequence: Synthetic oligonucleotide
aggucuaugagagccauca

SEQ ID NO: 106016 - RNA, 19 nt, Artificial Sequence
  Description of Artificial Sequence: Synthetic oligonucleotide
gcuguaacugcaaaauugg

SEQ ID NO: 106017 - RNA, 19 nt, Artificial Sequence
  Description of Artificial Sequence: Synthetic oligonucleotide
cauagcggaaauaggagga

SEQ ID NO: 106018 - RNA, 19 nt, Artificial Sequence
  Description of Artificial Sequence: Synthetic oligonucleotide
cuguggauacagcacuugg

SEQ ID NO: 106019 - RNA, 19 nt, Artificial Sequence
  Description of Artificial Sequence: Synthetic oligonucleotide
gugaaggggacacuucugc

SEQ ID NO: 106020 - RNA, 19 nt, Artificial Sequence
  Description of Artificial Sequence: Synthetic oligonucleotide
agcaguagcgcagcgcgcc

SEQ ID NO: 106021 - RNA, 19 nt, Artificial Sequence
  Description of Artificial Sequence: Synthetic oligonucleotide
cuaugagagccaucaguag

SEQ ID NO: 106022 - RNA, 19 nt, Artificial Sequence
  Description of Artificial Sequence: Synthetic oligonucleotide
uuggguucccuccuacggc

SEQ ID NO: 106023 - RNA, 19 nt, Artificial Sequence
  Description of Artificial Sequence: Synthetic oligonucleotide
uucgaucaaggccaucuuc

SEQ ID NO: 106024 - RNA, 19 nt, Artificial Sequence
  Description of Artificial Sequence: Synthetic oligonucleotide
ugucaacuacaucccagac

SEQ ID NO: 106025 - RNA, 19 nt, Artificial Sequence
  Description of Artificial Sequence: Synthetic oligonucleotide
caugucacgguaguugccc

SEQ ID NO: 106026 - RNA, 19 nt, Artificial Sequence
  Description of Artificial Sequence: Synthetic oligonucleotide
uccgauucaucacuuucaa

SEQ ID NO: 106027 - RNA, 19 nt, Artificial Sequence
  Description of Artificial Sequence: Synthetic oligonucleotide
aagguccacuguuuaguga

SEQ ID NO: 106028 - RNA, 19 nt, Artificial Sequence
  Description of Artificial Sequence: Synthetic oligonucleotide
auucggagaucuuuauagu

SEQ ID NO: 106029 - RNA, 19 nt, Artificial Sequence
  Description of Artificial Sequence: Synthetic oligonucleotide
aggaucacuuucugacgac

SEQ ID NO: 106030 - RNA, 19 nt, Artificial Sequence
  Description of Artificial Sequence: Synthetic oligonucleotide
guaguugcccaacacgcac

SEQ ID NO: 106031 - RNA, 19 nt, Artificial Sequence
  Description of Artificial Sequence: Synthetic oligonucleotide
agacuucaacuuucacuac

SEQ ID NO: 106032 - RNA, 19 nt, Artificial Sequence
  Description of Artificial Sequence: Synthetic oligonucleotide
uggacgugcgagccgggcg

SEQ ID NO: 106033 - RNA, 19 nt, Artificial Sequence
  Description of Artificial Sequence: Synthetic oligonucleotide
ugaggguauggcucgggug

SEQ ID NO: 106034 - RNA, 19 nt, Artificial Sequence
  Description of Artificial Sequence: Synthetic oligonucleotide
ugggccacuuugcaguagc

SEQ ID NO: 106035 - RNA, 19 nt, Artificial Sequence
  Description of Artificial Sequence: Synthetic oligonucleotide
aucaguaggugagaccauc

SEQ ID NO: 106036 - RNA, 19 nt, Artificial Sequence
  Description of Artificial Sequence: Synthetic oligonucleotide
uuucugacgacaccugcuu

SEQ ID NO: 106037 - RNA, 19 nt, Artificial Sequence
  Description of Artificial Sequence: Synthetic oligonucleotide
cuugcccugcagucgaugc

SEQ ID NO: 106038 - RNA, 19 nt, Artificial Sequence
  Description of Artificial Sequence: Synthetic oligonucleotide
uccucugcguguccgauuc

SEQ ID NO: 106039 - RNA, 19 nt, Artificial Sequence
  Description of Artificial Sequence: Synthetic oligonucleotide
gguacauuguguucucuug

SEQ ID NO: 106040 - RNA, 19 nt, Artificial Sequence
  Description of Artificial Sequence: Synthetic oligonucleotide
gaagucacguacaucaucu

SEQ ID NO: 106041 - RNA, 19 nt, Artificial Sequence
  Description of Artificial Sequence: Synthetic oligonucleotide
agcauagcggaaauaggag

SEQ ID NO: 106042 - RNA, 19 nt, Artificial Sequence
  Description of Artificial Sequence: Synthetic oligonucleotide
ugggcggagugucuuaaga

SEQ ID NO: 106043 - RNA, 19 nt, Artificial Sequence
  Description of Artificial Sequence: Synthetic oligonucleotide
uuuauagucugggcggagu

SEQ ID NO: 106044 - RNA, 19 nt, Artificial Sequence
  Description of Artificial Sequence: Synthetic oligonucleotide
uggguucccuccuacggcc

SEQ ID NO: 106045 - RNA, 19 nt, Artificial Sequence
  Description of Artificial Sequence: Synthetic oligonucleotide
acacccugccucuguaaac

SEQ ID NO: 106046 - RNA, 19 nt, Artificial Sequence
  Description of Artificial Sequence: Synthetic oligonucleotide
gcaggcuuaugcuagguug

SEQ ID NO: 106047 - RNA, 19 nt, Artificial Sequence
  Description of Artificial Sequence: Synthetic oligonucleotide
caagcagucccacacccug

SEQ ID NO: 106048 - RNA, 19 nt, Artificial Sequence
  Description of Artificial Sequence: Synthetic oligonucleotide
cuaggugguucaccaagcc

SEQ ID NO: 106049 - RNA, 19 nt, Artificial Sequence
  Description of Artificial Sequence: Synthetic oligonucleotide
gugguggacauuugagaag

SEQ ID NO: 106050 - RNA, 19 nt, Artificial Sequence
  Description of Artificial Sequence: Synthetic oligonucleotide
ucgagccuccaucauuuca

SEQ ID NO: 106051 - RNA, 19 nt, Artificial Sequence
  Description of Artificial Sequence: Synthetic oligonucleotide
uuagcgaagcgccucugua

SEQ ID NO: 106052 - RNA, 19 nt, Artificial Sequence
  Description of Artificial Sequence: Synthetic oligonucleotide
cauuggguucccuccuacg

SEQ ID NO: 106053 - RNA, 19 nt, Artificial Sequence
  Description of Artificial Sequence: Synthetic oligonucleotide
ggcggagugucuuaagaag

SEQ ID NO: 106054 - RNA, 19 nt, Artificial Sequence
  Description of Artificial Sequence: Synthetic oligonucleotide
ugcuggacgugcgagccgg

SEQ ID NO: 106055 - RNA, 19 nt, Artificial Sequence
  Description of Artificial Sequence: Synthetic oligonucleotide
caucaucagugguuuguag

SEQ ID NO: 106056 - RNA, 19 nt, Artificial Sequence
  Description of Artificial Sequence: Synthetic oligonucleotide
agggauuugccauguggcu

SEQ ID NO: 106057 - RNA, 19 nt, Artificial Sequence
  Description of Artificial Sequence: Synthetic oligonucleotide
augacgaaggacagcaucu

SEQ ID NO: 106058 - RNA, 19 nt, Artificial Sequence
  Description of Artificial Sequence: Synthetic oligonucleotide
gaugcucgcccaugucacg

SEQ ID NO: 106059 - RNA, 19 nt, Artificial Sequence
  Description of Artificial Sequence: Synthetic oligonucleotide
ccccaaaucacccacuagc

SEQ ID NO: 106060 - RNA, 19 nt, Artificial Sequence
  Description of Artificial Sequence: Synthetic oligonucleotide
ucuuccgauccuccuugcc

SEQ ID NO: 106061 - RNA, 19 nt, Artificial Sequence
  Description of Artificial Sequence: Synthetic oligonucleotide
acauggguacauaggcagc

SEQ ID NO: 106062 - RNA, 19 nt, Artificial Sequence
  Description of Artificial Sequence: Synthetic oligonucleotide
aguagcgcagcgcgccucg

SEQ ID NO: 106063 - RNA, 19 nt, Artificial Sequence
  Description of Artificial Sequence: Synthetic oligonucleotide
aagcagucccacacccugc

SEQ ID NO: 106064 - RNA, 19 nt, Artificial Sequence
  Description of Artificial Sequence: Synthetic oligonucleotide
ucccgaguacacaucugug

SEQ ID NO: 106065 - RNA, 19 nt, Artificial Sequence
  Description of Artificial Sequence: Synthetic oligonucleotide
cuuugggaagcucccggag

SEQ ID NO: 106066 - RNA, 19 nt, Artificial Sequence
  Description of Artificial Sequence: Synthetic oligonucleotide
ugacuaccccauuacaguu

SEQ ID NO: 106067 - RNA, 19 nt, Artificial Sequence
  Description of Artificial Sequence: Synthetic oligonucleotide
uccgucuucaagccaucac

SEQ ID NO: 106068 - RNA, 19 nt, Artificial Sequence
  Description of Artificial Sequence: Synthetic oligonucleotide
uguuagugccucucccaca

SEQ ID NO: 106069 - RNA, 19 nt, Artificial Sequence
  Description of Artificial Sequence: Synthetic oligonucleotide
ucaccccggaucacaaucu

SEQ ID NO: 106070 - RNA, 19 nt, Artificial Sequence
  Description of Artificial Sequence: Synthetic oligonucleotide
guacauaggcagcagccuc

SEQ ID NO: 106071 - RNA, 19 nt, Artificial Sequence
  Description of Artificial Sequence: Synthetic oligonucleotide
uggaaugccuacagcuccu

SEQ ID NO: 106072 - RNA, 19 nt, Artificial Sequence
  Description of Artificial Sequence: Synthetic oligonucleotide
cacguacaucaucugguag

SEQ ID NO: 106073 - RNA, 19 nt, Artificial Sequence
  Description of Artificial Sequence: Synthetic oligonucleotide
agcucuaucuggggagggc

SEQ ID NO: 106074 - RNA, 19 nt, Artificial Sequence
  Description of Artificial Sequence: Synthetic oligonucleotide
uacaguucuuguacacguc

SEQ ID NO: 106075 - RNA, 19 nt, Artificial Sequence
  Description of Artificial Sequence: Synthetic oligonucleotide
cuguuagugccucucccac

SEQ ID NO: 106076 - RNA, 19 nt, Artificial Sequence
  Description of Artificial Sequence: Synthetic oligonucleotide
uccuacggccuccccauca

SEQ ID NO: 106077 - RNA, 19 nt, Artificial Sequence
  Description of Artificial Sequence: Synthetic oligonucleotide
cacgcacaccggcacaugg

SEQ ID NO: 106078 - RNA, 19 nt, Artificial Sequence
  Description of Artificial Sequence: Synthetic oligonucleotide
ucacguacaucaucuggua

SEQ ID NO: 106079 - RNA, 19 nt, Artificial Sequence
  Description of Artificial Sequence: Synthetic oligonucleotide
caucccugagaaacaccgg

SEQ ID NO: 106080 - RNA, 19 nt, Artificial Sequence
  Description of Artificial Sequence: Synthetic oligonucleotide
ggugguggacauuugagaa

SEQ ID NO: 106081 - RNA, 19 nt, Artificial Sequence
  Description of Artificial Sequence: Synthetic oligonucleotide
agagcagucuugccagugu

SEQ ID NO: 106082 - RNA, 19 nt, Artificial Sequence
  Description of Artificial Sequence: Synthetic oligonucleotide
ugauacugcgacgcugggc

SEQ ID NO: 106083 - RNA, 19 nt, Artificial Sequence
  Description of Artificial Sequence: Synthetic oligonucleotide
cugcguguccgauucauca

SEQ ID NO: 106084 - RNA, 19 nt, Artificial Sequence
  Description of Artificial Sequence: Synthetic oligonucleotide
uacugcgacgcugggcugg

SEQ ID NO: 106085 - RNA, 19 nt, Artificial Sequence
  Description of Artificial Sequence: Synthetic oligonucleotide
gaacauaauugaaggucca

SEQ ID NO: 106086 - RNA, 19 nt, Artificial Sequence
  Description of Artificial Sequence: Synthetic oligonucleotide
gucaccccggaucacaauc

SEQ ID NO: 106087 - RNA, 19 nt, Artificial Sequence
  Description of Artificial Sequence: Synthetic oligonucleotide
cugguagaaugacucgaug

SEQ ID NO: 106088 - RNA, 19 nt, Artificial Sequence
  Description of Artificial Sequence: Synthetic oligonucleotide
cacuauccugcugugggcc

SEQ ID NO: 106089 - RNA, 19 nt, Artificial Sequence
  Description of Artificial Sequence: Synthetic oligonucleotide
gcggcaagcuguuagugcc

SEQ ID NO: 106090 - RNA, 19 nt, Artificial Sequence
  Description of Artificial Sequence: Synthetic oligonucleotide
gacgacaccugcuuguccu

SEQ ID NO: 106091 - RNA, 19 nt, Artificial Sequence
  Description of Artificial Sequence: Synthetic oligonucleotide
ugcguguccgauucaucac

SEQ ID NO: 106092 - RNA, 19 nt, Artificial Sequence
  Description of Artificial Sequence: Synthetic oligonucleotide
accccauuacaguucuugu

SEQ ID NO: 106093 - RNA, 19 nt, Artificial Sequence
  Description of Artificial Sequence: Synthetic oligonucleotide
aagcggcaagcuguuagug

SEQ ID NO: 106094 - RNA, 19 nt, Artificial Sequence
  Description of Artificial Sequence: Synthetic oligonucleotide
guagaaugacucgaugcuc

SEQ ID NO: 106095 - RNA, 19 nt, Artificial Sequence
  Description of Artificial Sequence: Synthetic oligonucleotide
gcggagugucuuaagaagg

SEQ ID NO: 106096 - RNA, 19 nt, Artificial Sequence
  Description of Artificial Sequence: Synthetic oligonucleotide
cccauuggccgccaaaggg

SEQ ID NO: 106097 - RNA, 19 nt, Artificial Sequence
  Description of Artificial Sequence: Synthetic oligonucleotide
augcucgcccaugucacgg

SEQ ID NO: 106098 - RNA, 19 nt, Artificial Sequence
  Description of Artificial Sequence: Synthetic oligonucleotide
uuccgauccuccuugccuu

SEQ ID NO: 106099 - RNA, 19 nt, Artificial Sequence
  Description of Artificial Sequence: Synthetic oligonucleotide
cuucucuuacugggaaacc

SEQ ID NO: 106100 - RNA, 19 nt, Artificial Sequence
  Description of Artificial Sequence: Synthetic oligonucleotide
augaggguauggcucgggu

SEQ ID NO: 106101 - RNA, 19 nt, Artificial Sequence
  Description of Artificial Sequence: Synthetic oligonucleotide
gucaaacaucaugacuacc

SEQ ID NO: 106102 - RNA, 19 nt, Artificial Sequence
  Description of Artificial Sequence: Synthetic oligonucleotide
caggcuuaugcuagguuga

SEQ ID NO: 106103 - RNA, 19 nt, Artificial Sequence
  Description of Artificial Sequence: Synthetic oligonucleotide
uagcggaaauaggaggaac

SEQ ID NO: 106104 - RNA, 19 nt, Artificial Sequence
  Description of Artificial Sequence: Synthetic oligonucleotide
gucaacuacaucccagacu

SEQ ID NO: 106105 - RNA, 19 nt, Artificial Sequence
  Description of Artificial Sequence: Synthetic oligonucleotide
uuggccgccaaaggggaug

SEQ ID NO: 106106 - RNA, 19 nt, Artificial Sequence
  Description of Artificial Sequence: Synthetic oligonucleotide
cccgaguacacaucugugc

SEQ ID NO: 106107 - RNA, 19 nt, Artificial Sequence
  Description of Artificial Sequence: Synthetic oligonucleotide
acucgaugcucgcccaugu

SEQ ID NO: 106108 - RNA, 19 nt, Artificial Sequence
  Description of Artificial Sequence: Synthetic oligonucleotide
cagagaggucuucucuuac

SEQ ID NO: 106109 - RNA, 19 nt, Artificial Sequence
  Description of Artificial Sequence: Synthetic oligonucleotide
cacgguaguugcccaacac

SEQ ID NO: 106110 - RNA, 19 nt, Artificial Sequence
  Description of Artificial Sequence: Synthetic oligonucleotide
ugaggucuaugagagccau

SEQ ID NO: 106111 - RNA, 19 nt, Artificial Sequence
  Description of Artificial Sequence: Synthetic oligonucleotide
gagugggccagaccacaug

SEQ ID NO: 106112 - RNA, 19 nt, Artificial Sequence
  Description of Artificial Sequence: Synthetic oligonucleotide
ucugcguguccgauucauc

SEQ ID NO: 106113 - RNA, 19 nt, Artificial Sequence
  Description of Artificial Sequence: Synthetic oligonucleotide
acgccgagaacaucuuccu

SEQ ID NO: 106114 - RNA, 19 nt, Artificial Sequence
  Description of Artificial Sequence: Synthetic oligonucleotide
ucgcccaugucacgguagu

SEQ ID NO: 106115 - RNA, 19 nt, Artificial Sequence
  Description of Artificial Sequence: Synthetic oligonucleotide
cucauaguccccaccucca

SEQ ID NO: 106116 - RNA, 19 nt, Artificial Sequence
  Description of Artificial Sequence: Synthetic oligonucleotide
cuuuauagucugggcggag

SEQ ID NO: 106117 - RNA, 19 nt, Artificial Sequence
  Description of Artificial Sequence: Synthetic oligonucleotide
gucuuaagaaggugcccuc

SEQ ID NO: 106118 - RNA, 19 nt, Artificial Sequence
  Description of Artificial Sequence: Synthetic oligonucleotide
cacaugagggcagacacaa

SEQ ID NO: 106119 - RNA, 19 nt, Artificial Sequence
  Description of Artificial Sequence: Synthetic oligonucleotide
cucgcccaugucacgguag

SEQ ID NO: 106120 - RNA, 19 nt, Artificial Sequence
  Description of Artificial Sequence: Synthetic oligonucleotide
ucaagccaucaccucguuu

SEQ ID NO: 106121 - RNA, 19 nt, Artificial Sequence
  Description of Artificial Sequence: Synthetic oligonucleotide
gaaugccuacagcuccuca

SEQ ID NO: 106122 - RNA, 19 nt, Artificial Sequence
  Description of Artificial Sequence: Synthetic oligonucleotide
guccgauucaucacuuuca

SEQ ID NO: 106123 - RNA, 19 nt, Artificial Sequence
  Description of Artificial Sequence: Synthetic oligonucleotide
ugcacuacucuggauccau

SEQ ID NO: 106124 - RNA, 19 nt, Artificial Sequence
  Description of Artificial Sequence: Synthetic oligonucleotide
cuugucuuuaggcaggguu

SEQ ID NO: 106125 - RNA, 19 nt, Artificial Sequence
  Description of Artificial Sequence: Synthetic oligonucleotide
ccaucaguaggugagacca

SEQ ID NO: 106126 - RNA, 19 nt, Artificial Sequence
  Description of Artificial Sequence: Synthetic oligonucleotide
agacucagcauagcggaaa

SEQ ID NO: 106127 - RNA, 19 nt, Artificial Sequence
  Description of Artificial Sequence: Synthetic oligonucleotide
augacucgaugcucgccca

SEQ ID NO: 106128 - RNA, 19 nt, Artificial Sequence
  Description of Artificial Sequence: Synthetic oligonucleotide
cucgcaccauguccggccg

SEQ ID NO: 106129 - RNA, 19 nt, Artificial Sequence
  Description of Artificial Sequence: Synthetic oligonucleotide
ucaacgccgagaacaucuu

SEQ ID NO: 106130 - RNA, 19 nt, Artificial Sequence
  Description of Artificial Sequence: Synthetic oligonucleotide
guauggcucgggugggagc

SEQ ID NO: 106131 - RNA, 19 nt, Artificial Sequence
  Description of Artificial Sequence: Synthetic oligonucleotide
guaguucugguccuuuccu

SEQ ID NO: 106132 - RNA, 19 nt, Artificial Sequence
  Description of Artificial Sequence: Synthetic oligonucleotide
cucaacaagcagaggcgca

SEQ ID NO: 106133 - RNA, 19 nt, Artificial Sequence
  Description of Artificial Sequence: Synthetic oligonucleotide
cauuggccgccaaagggga

SEQ ID NO: 106134 - RNA, 19 nt, Artificial Sequence
  Description of Artificial Sequence: Synthetic oligonucleotide
caucaugacuaccccauua

SEQ ID NO: 106135 - RNA, 19 nt, Artificial Sequence
  Description of Artificial Sequence: Synthetic oligonucleotide
uucaccaagccagcugcaa

SEQ ID NO: 106136 - RNA, 19 nt, Artificial Sequence
  Description of Artificial Sequence: Synthetic oligonucleotide
ugucacgguaguugcccaa

SEQ ID NO: 106137 - RNA, 19 nt, Artificial Sequence
  Description of Artificial Sequence: Synthetic oligonucleotide
acccacuagcaguuccucu

SEQ ID NO: 106138 - RNA, 19 nt, Artificial Sequence
  Description of Artificial Sequence: Synthetic oligonucleotide
uggccgccaaaggggaugg

SEQ ID NO: 106139 - RNA, 19 nt, Artificial Sequence
  Description of Artificial Sequence: Synthetic oligonucleotide
uguuccugucaccccggau

SEQ ID NO: 106140 - RNA, 19 nt, Artificial Sequence
  Description of Artificial Sequence: Synthetic oligonucleotide
augucacgguaguugccca

SEQ ID NO: 106141 - RNA, 19 nt, Artificial Sequence
  Description of Artificial Sequence: Synthetic oligonucleotide
caugaggguauggcucggg

SEQ ID NO: 106142 - RNA, 19 nt, Artificial Sequence
  Description of Artificial Sequence: Synthetic oligonucleotide
auagcggaaauaggaggaa

SEQ ID NO: 106143 - RNA, 19 nt, Artificial Sequence
  Description of Artificial Sequence: Synthetic oligonucleotide
gugccucucccacaggaga

SEQ ID NO: 106144 - RNA, 19 nt, Artificial Sequence
  Description of Artificial Sequence: Synthetic oligonucleotide
gaaugacccugcacuacuc

SEQ ID NO: 106145 - RNA, 19 nt, Artificial Sequence
  Description of Artificial Sequence: Synthetic oligonucleotide
gacucgaugcucgcccaug

SEQ ID NO: 106146 - RNA, 19 nt, Artificial Sequence
  Description of Artificial Sequence: Synthetic oligonucleotide
ugcccucuaggcucaccug

SEQ ID NO: 106147 - RNA, 19 nt, Artificial Sequence
  Description of Artificial Sequence: Synthetic oligonucleotide
aggcuuaugcuagguugag

SEQ ID NO: 106148 - RNA, 19 nt, Artificial Sequence
  Description of Artificial Sequence: Synthetic oligonucleotide
uuaggccaaagcuguucuu

SEQ ID NO: 106149 - RNA, 19 nt, Artificial Sequence
  Description of Artificial Sequence: Synthetic oligonucleotide
gugggucccuucucggccc

SEQ ID NO: 106150 - RNA, 19 nt, Artificial Sequence
  Description of Artificial Sequence: Synthetic oligonucleotide
cuuaagaaggugcccucua

SEQ ID NO: 106151 - RNA, 19 nt, Artificial Sequence
  Description of Artificial Sequence: Synthetic oligonucleotide
gguagggguggcugggcag

SEQ ID NO: 106152 - RNA, 19 nt, Artificial Sequence
  Description of Artificial Sequence: Synthetic oligonucleotide
ucgcaccauguccggccgg

SEQ ID NO: 106153 - RNA, 19 nt, Artificial Sequence
  Description of Artificial Sequence: Synthetic oligonucleotide
agcaggcuuaugcuagguu

SEQ ID NO: 106154 - RNA, 19 nt, Artificial Sequence
  Description of Artificial Sequence: Synthetic oligonucleotide
accaucggaccaugagggu

SEQ ID NO: 106155 - RNA, 19 nt, Artificial Sequence
  Description of Artificial Sequence: Synthetic oligonucleotide
ucugggcggagugucuuaa

SEQ ID NO: 106156 - RNA, 19 nt, Artificial Sequence
  Description of Artificial Sequence: Synthetic oligonucleotide
gcccucuaggcucaccugc

SEQ ID NO: 106157 - RNA, 19 nt, Artificial Sequence
  Description of Artificial Sequence: Synthetic oligonucleotide
ccagccuuacccagugcgg

SEQ ID NO: 106158 - RNA, 19 nt, Artificial Sequence
  Description of Artificial Sequence: Synthetic oligonucleotide
cugagaaacaccggggacu

SEQ ID NO: 106159 - RNA, 19 nt, Artificial Sequence
  Description of Artificial Sequence: Synthetic oligonucleotide
ggacgugcgagccgggcgc

SEQ ID NO: 106160 - RNA, 19 nt, Artificial Sequence
  Description of Artificial Sequence: Synthetic oligonucleotide
aagacucagcauagcggaa

SEQ ID NO: 106161 - RNA, 19 nt, Artificial Sequence
  Description of Artificial Sequence: Synthetic oligonucleotide
acgcacaccggcacauggg

SEQ ID NO: 106162 - RNA, 19 nt, Artificial Sequence
  Description of Artificial Sequence: Synthetic oligonucleotide
acaucaugacuaccccauu

SEQ ID NO: 106163 - RNA, 19 nt, Artificial Sequence
  Description of Artificial Sequence: Synthetic oligonucleotide
auguacucuuccacaauuu

SEQ ID NO: 106164 - RNA, 19 nt, Artificial Sequence
  Description of Artificial Sequence: Synthetic oligonucleotide
ggucuaugagagccaucag

SEQ ID NO: 106165 - RNA, 19 nt, Artificial Sequence
  Description of Artificial Sequence: Synthetic oligonucleotide
gagaaacaccggggacugg

SEQ ID NO: 106166 - RNA, 19 nt, Artificial Sequence
  Description of Artificial Sequence: Synthetic oligonucleotide
accccggaucacaaucuuc

SEQ ID NO: 106167 - RNA, 19 nt, Artificial Sequence
  Description of Artificial Sequence: Synthetic oligonucleotide
gcuaggugguucaccaagc

SEQ ID NO: 106168 - RNA, 19 nt, Artificial Sequence
  Description of Artificial Sequence: Synthetic oligonucleotide
gucacgguaguugcccaac

SEQ ID NO: 106169 - RNA, 19 nt, Artificial Sequence
  Description of Artificial Sequence: Synthetic oligonucleotide
cccaaaucacccacuagca

SEQ ID NO: 106170 - RNA, 19 nt, Artificial Sequence
  Description of Artificial Sequence: Synthetic oligonucleotide
auacugcgacgcugggcug

SEQ ID NO: 106171 - RNA, 19 nt, Artificial Sequence
  Description of Artificial Sequence: Synthetic oligonucleotide
ucgaugccacagagcaguc

SEQ ID NO: 106172 - RNA, 19 nt, Artificial Sequence
  Description of Artificial Sequence: Synthetic oligonucleotide
ccggaucacaaucuucaug

SEQ ID NO: 106173 - RNA, 19 nt, Artificial Sequence
  Description of Artificial Sequence: Synthetic oligonucleotide
ugcuagguugaggcccagc

SEQ ID NO: 106174 - RNA, 19 nt, Artificial Sequence
  Description of Artificial Sequence: Synthetic oligonucleotide
cugggcggagugucuuaag

SEQ ID NO: 106175 - RNA, 19 nt, Artificial Sequence
  Description of Artificial Sequence: Synthetic oligonucleotide
gaagcucccggagaacaua

SEQ ID NO: 106176 - RNA, 19 nt, Artificial Sequence
  Description of Artificial Sequence: Synthetic oligonucleotide
cuccgaccccaccagcuuc

SEQ ID NO: 106177 - RNA, 19 nt, Artificial Sequence
  Description of Artificial Sequence: Synthetic oligonucleotide
ggaaugacccugcacuacu

SEQ ID NO: 106178 - RNA, 19 nt, Artificial Sequence
  Description of Artificial Sequence: Synthetic oligonucleotide
uucgagccuccaucauuuc

SEQ ID NO: 106179 - RNA, 19 nt, Artificial Sequence
  Description of Artificial Sequence: Synthetic oligonucleotide
ccccggaucacaaucuuca

SEQ ID NO: 106180 - RNA, 19 nt, Artificial Sequence
  Description of Artificial Sequence: Synthetic oligonucleotide
ccaacacgcacaccggcac

SEQ ID NO: 106181 - RNA, 19 nt, Artificial Sequence
  Description of Artificial Sequence: Synthetic oligonucleotide
cucccgaguacacaucugu

SEQ ID NO: 106182 - RNA, 19 nt, Artificial Sequence
  Description of Artificial Sequence: Synthetic oligonucleotide
cagcucuaucuggggaggg

SEQ ID NO: 106183 - RNA, 19 nt, Artificial Sequence
  Description of Artificial Sequence: Synthetic oligonucleotide
cuugguggaaguccguuuu

SEQ ID NO: 106184 - RNA, 19 nt, Artificial Sequence
  Description of Artificial Sequence: Synthetic oligonucleotide
gcgaagcgccucuguagcg

SEQ ID NO: 106185 - RNA, 19 nt, Artificial Sequence
  Description of Artificial Sequence: Synthetic oligonucleotide
cucgaugcucgcccauguc

SEQ ID NO: 106186 - RNA, 19 nt, Artificial Sequence
  Description of Artificial Sequence: Synthetic oligonucleotide
augaagucacguacaucau

SEQ ID NO: 106187 - RNA, 19 nt, Artificial Sequence
  Description of Artificial Sequence: Synthetic oligonucleotide
gacgugcgagccgggcgcg

SEQ ID NO: 106188 - RNA, 19 nt, Artificial Sequence
  Description of Artificial Sequence: Synthetic oligonucleotide
ggaucacuuucugacgaca

SEQ ID NO: 106189 - RNA, 19 nt, Artificial Sequence
  Description of Artificial Sequence: Synthetic oligonucleotide
ccagaguggcaucaauauc

SEQ ID NO: 106190 - RNA, 19 nt, Artificial Sequence
  Description of Artificial Sequence: Synthetic oligonucleotide
gcuucgaucaaggccaucu

SEQ ID NO: 106191 - RNA, 19 nt, Artificial Sequence
  Description of Artificial Sequence: Synthetic oligonucleotide
aggagaggugguacauugu

SEQ ID NO: 106192 - RNA, 19 nt, Artificial Sequence
  Description of Artificial Sequence: Synthetic oligonucleotide
gcgccucgcaccauguccg

SEQ ID NO: 106193 - RNA, 19 nt, Artificial Sequence
  Description of Artificial Sequence: Synthetic oligonucleotide
caucggaccaugaggguau

SEQ ID NO: 106194 - RNA, 19 nt, Artificial Sequence
  Description of Artificial Sequence: Synthetic oligonucleotide
acggugcuuggggacaggu

SEQ ID NO: 106195 - RNA, 19 nt, Artificial Sequence
  Description of Artificial Sequence: Synthetic oligonucleotide
gguaguugcccaacacgca

SEQ ID NO: 106196 - RNA, 19 nt, Artificial Sequence
  Description of Artificial Sequence: Synthetic oligonucleotide
gggcggagugucuuaagaa

SEQ ID NO: 106197 - RNA, 19 nt, Artificial Sequence
  Description of Artificial Sequence: Synthetic oligonucleotide
acacccucccgaguacaca

SEQ ID NO: 106198 - RNA, 19 nt, Artificial Sequence
  Description of Artificial Sequence: Synthetic oligonucleotide
gggaaugacccugcacuac

SEQ ID NO: 106199 - RNA, 19 nt, Artificial Sequence
  Description of Artificial Sequence: Synthetic oligonucleotide
cuggacgugcgagccgggc

SEQ ID NO: 106200 - RNA, 19 nt, Artificial Sequence
  Description of Artificial Sequence: Synthetic oligonucleotide
gccuccccaaaucacccac

SEQ ID NO: 106201 - RNA, 19 nt, Artificial Sequence
  Description of Artificial Sequence: Synthetic oligonucleotide
cacucuccucugcgugucc

SEQ ID NO: 106202 - RNA, 19 nt, Artificial Sequence
  Description of Artificial Sequence: Synthetic oligonucleotide
gcgggauguucuugucccg

SEQ ID NO: 106203 - RNA, 19 nt, Artificial Sequence
  Description of Artificial Sequence: Synthetic oligonucleotide
gacggugcuuggggacagg

SEQ ID NO: 106204 - RNA, 19 nt, Artificial Sequence
  Description of Artificial Sequence: Synthetic oligonucleotide
gccgccaaaggggauggcc

SEQ ID NO: 106205 - RNA, 19 nt, Artificial Sequence
  Description of Artificial Sequence: Synthetic oligonucleotide
cgaugcucgcccaugucac

SEQ ID NO: 106206 - RNA, 19 nt, Artificial Sequence
  Description of Artificial Sequence: Synthetic oligonucleotide
uucccuccuacggccuccc

SEQ ID NO: 106207 - RNA, 19 nt, Artificial Sequence
  Description of Artificial Sequence: Synthetic oligonucleotide
cugagucauucuucagucu

SEQ ID NO: 106208 - RNA, 19 nt, Artificial Sequence
  Description of Artificial Sequence: Synthetic oligonucleotide
cugucaccccggaucacaa

SEQ ID NO: 106209 - RNA, 19 nt, Artificial Sequence
  Description of Artificial Sequence: Synthetic oligonucleotide
cuuagcgaagcgccucugu

SEQ ID NO: 106210 - RNA, 19 nt, Artificial Sequence
  Description of Artificial Sequence: Synthetic oligonucleotide
caauguagagugggccaga

SEQ ID NO: 106211 - RNA, 19 nt, Artificial Sequence
  Description of Artificial Sequence: Synthetic oligonucleotide
agcuucgaucaaggccauc

SEQ ID NO: 106212 - RNA, 19 nt, Artificial Sequence
  Description of Artificial Sequence: Synthetic oligonucleotide
cucuaucuggggagggcua

SEQ ID NO: 106213 - RNA, 19 nt, Artificial Sequence
  Description of Artificial Sequence: Synthetic oligonucleotide
gagggaaguuugcugucuu

SEQ ID NO: 106214 - RNA, 19 nt, Artificial Sequence
  Description of Artificial Sequence: Synthetic oligonucleotide
uggccucgacuucgagccu

SEQ ID NO: 106215 - RNA, 19 nt, Artificial Sequence
  Description of Artificial Sequence: Synthetic oligonucleotide
caauaucuaguugguuugu

SEQ ID NO: 106216 - RNA, 19 nt, Artificial Sequence
  Description of Artificial Sequence: Synthetic oligonucleotide
gcgccugguucauggacug

SEQ ID NO: 106217 - RNA, 19 nt, Artificial Sequence
  Description of Artificial Sequence: Synthetic oligonucleotide
cucagcggcggcagcagua

SEQ ID NO: 106218 - RNA, 19 nt, Artificial Sequence
  Description of Artificial Sequence: Synthetic oligonucleotide
ccauuggguucccuccuac

SEQ ID NO: 106219 - RNA, 19 nt, Artificial Sequence
  Description of Artificial Sequence: Synthetic oligonucleotide
gcggcccgcgagcucagcg

SEQ ID NO: 106220 - RNA, 19 nt, Artificial Sequence
  Description of Artificial Sequence: Synthetic oligonucleotide
acccucccgaguacacauc

SEQ ID NO: 106221 - RNA, 19 nt, Artificial Sequence
  Description of Artificial Sequence: Synthetic oligonucleotide
ggcccgcgagcucagcggc

SEQ ID NO: 106222 - RNA, 19 nt, Artificial Sequence
  Description of Artificial Sequence: Synthetic oligonucleotide
cugggccacuuugcaguag

SEQ ID NO: 106223 - RNA, 19 nt, Artificial Sequence
  Description of Artificial Sequence: Synthetic oligonucleotide
gccuuacccagugcggggc

SEQ ID NO: 106224 - RNA, 19 nt, Artificial Sequence
  Description of Artificial Sequence: Synthetic oligonucleotide
ccgaguacacaucugugcu

SEQ ID NO: 106225 - RNA, 19 nt, Artificial Sequence
  Description of Artificial Sequence: Synthetic oligonucleotide
aucggaccaugaggguaug

SEQ ID NO: 106226 - RNA, 19 nt, Artificial Sequence
  Description of Artificial Sequence: Synthetic oligonucleotide
gccucuagggcuggagcug

SEQ ID NO: 106227 - RNA, 19 nt, Artificial Sequence
  Description of Artificial Sequence: Synthetic oligonucleotide
gaggauggacucugcccau

SEQ ID NO: 106228 - RNA, 19 nt, Artificial Sequence
  Description of Artificial Sequence: Synthetic oligonucleotide
gggagcucccuucuuuugu

SEQ ID NO: 106229 - RNA, 19 nt, Artificial Sequence
  Description of Artificial Sequence: Synthetic oligonucleotide
auggcucgggugggagcuc

SEQ ID NO: 106230 - RNA, 19 nt, Artificial Sequence
  Description of Artificial Sequence: Synthetic oligonucleotide
gugcgagccgggcgcggcc

SEQ ID NO: 106231 - RNA, 19 nt, Artificial Sequence
  Description of Artificial Sequence: Synthetic oligonucleotide
cccaacacgcacaccggca

SEQ ID NO: 106232 - RNA, 19 nt, Artificial Sequence
  Description of Artificial Sequence: Synthetic oligonucleotide
aggcgcggccacaagccga

SEQ ID NO: 106233 - RNA, 19 nt, Artificial Sequence
  Description of Artificial Sequence: Synthetic oligonucleotide
cuuggaaaccagccaccau

SEQ ID NO: 106234 - RNA, 19 nt, Artificial Sequence
  Description of Artificial Sequence: Synthetic oligonucleotide
cgggauguucuugucccgg

SEQ ID NO: 106235 - RNA, 19 nt, Artificial Sequence
  Description of Artificial Sequence: Synthetic oligonucleotide
ccaugcuauggcucuggga

SEQ ID NO: 106236 - RNA, 19 nt, Artificial Sequence
  Description of Artificial Sequence: Synthetic oligonucleotide
caguagcgcagcgcgccuc

SEQ ID NO: 106237 - RNA, 19 nt, Artificial Sequence
  Description of Artificial Sequence: Synthetic oligonucleotide
ccacaugagggcagacaca

SEQ ID NO: 106238 - RNA, 19 nt, Artificial Sequence
  Description of Artificial Sequence: Synthetic oligonucleotide
acaugagggcagacacaau

SEQ ID NO: 106239 - RNA, 19 nt, Artificial Sequence
  Description of Artificial Sequence: Synthetic oligonucleotide
gcacuacucuggauccaug

SEQ ID NO: 106240 - RNA, 19 nt, Artificial Sequence
  Description of Artificial Sequence: Synthetic oligonucleotide
gcaauaggccccucaggau

SEQ ID NO: 106241 - RNA, 19 nt, Artificial Sequence
  Description of Artificial Sequence: Synthetic oligonucleotide
cgacuucgagccuccauca

SEQ ID NO: 106242 - RNA, 19 nt, Artificial Sequence
  Description of Artificial Sequence: Synthetic oligonucleotide
guagcgcagcgcgccucgc

SEQ ID NO: 106243 - RNA, 19 nt, Artificial Sequence
  Description of Artificial Sequence: Synthetic oligonucleotide
ggccucgacuucgagccuc

SEQ ID NO: 106244 - RNA, 19 nt, Artificial Sequence
  Description of Artificial Sequence: Synthetic oligonucleotide
gcucuaucuggggagggcu

SEQ ID NO: 106245 - RNA, 19 nt, Artificial Sequence
  Description of Artificial Sequence: Synthetic oligonucleotide
agcgcgccucgcaccaugu

SEQ ID NO: 106246 - RNA, 19 nt, Artificial Sequence
  Description of Artificial Sequence: Synthetic oligonucleotide
gugguucaccaagccagcu

SEQ ID NO: 106247 - RNA, 19 nt, Artificial Sequence
  Description of Artificial Sequence: Synthetic oligonucleotide
cuccuacggccuccccauc

SEQ ID NO: 106248 - RNA, 19 nt, Artificial Sequence
  Description of Artificial Sequence: Synthetic oligonucleotide
agcucccggagaacauaau

SEQ ID NO: 106249 - RNA, 19 nt, Artificial Sequence
  Description of Artificial Sequence: Synthetic oligonucleotide
ccgauucaucacuuucaaa

SEQ ID NO: 106250 - RNA, 19 nt, Artificial Sequence
  Description of Artificial Sequence: Synthetic oligonucleotide
gugccugacccaagggccu

SEQ ID NO: 106251 - RNA, 19 nt, Artificial Sequence
  Description of Artificial Sequence: Synthetic oligonucleotide
cucugcguguccgauucau

SEQ ID NO: 106252 - RNA, 19 nt, Artificial Sequence
  Description of Artificial Sequence: Synthetic oligonucleotide
ccaucggaccaugagggua

SEQ ID NO: 106253 - RNA, 19 nt, Artificial Sequence
  Description of Artificial Sequence: Synthetic oligonucleotide
cccugccucuguaaacaga

SEQ ID NO: 106254 - RNA, 19 nt, Artificial Sequence
  Description of Artificial Sequence: Synthetic oligonucleotide
gcacaacuggagacuggga

SEQ ID NO: 106255 - RNA, 19 nt, Artificial Sequence
  Description of Artificial Sequence: Synthetic oligonucleotide
cauguccggccggccccag

SEQ ID NO: 106256 - RNA, 19 nt, Artificial Sequence
  Description of Artificial Sequence: Synthetic oligonucleotide
ccccuuagcgaagcgccuc

SEQ ID NO: 106257 - RNA, 19 nt, Artificial Sequence
  Description of Artificial Sequence: Synthetic oligonucleotide
ccuuagcgaagcgccucug

SEQ ID NO: 106258 - RNA, 19 nt, Artificial Sequence
  Description of Artificial Sequence: Synthetic oligonucleotide
cggagugucuuaagaaggu

SEQ ID NO: 106259 - RNA, 19 nt, Artificial Sequence
  Description of Artificial Sequence: Synthetic oligonucleotide
gcuggacgugcgagccggg

SEQ ID NO: 106260 - RNA, 19 nt, Artificial Sequence
  Description of Artificial Sequence: Synthetic oligonucleotide
cccucccgaguacacaucu

SEQ ID NO: 106261 - RNA, 19 nt, Artificial Sequence
  Description of Artificial Sequence: Synthetic oligonucleotide
ccacuagcaguuccucucu

SEQ ID NO: 106262 - RNA, 19 nt, Artificial Sequence
  Description of Artificial Sequence: Synthetic oligonucleotide
gcgacgcugggcuggggcu

SEQ ID NO: 106263 - RNA, 19 nt, Artificial Sequence
  Description of Artificial Sequence: Synthetic oligonucleotide
ccuccuacggccuccccau

SEQ ID NO: 106264 - RNA, 19 nt, Artificial Sequence
  Description of Artificial Sequence: Synthetic oligonucleotide
ccugacccaagggccugac

SEQ ID NO: 106265 - RNA, 19 nt, Artificial Sequence
  Description of Artificial Sequence: Synthetic oligonucleotide
cacuagcaguuccucucuu

SEQ ID NO: 106266 - RNA, 19 nt, Artificial Sequence
  Description of Artificial Sequence: Synthetic oligonucleotide
ccguuuugucucaggcucu

SEQ ID NO: 106267 - RNA, 19 nt, Artificial Sequence
  Description of Artificial Sequence: Synthetic oligonucleotide
ccggccggccccaggcuuc

SEQ ID NO: 106268 - RNA, 19 nt, Artificial Sequence
  Description of Artificial Sequence: Synthetic oligonucleotide
gcaguagcgcagcgcgccu

SEQ ID NO: 106269 - RNA, 19 nt, Artificial Sequence
  Description of Artificial Sequence: Synthetic oligonucleotide
cccggcgggauguucuugu

SEQ ID NO: 106270 - RNA, 19 nt, Artificial Sequence
  Description of Artificial Sequence: Synthetic oligonucleotide
gcccggcgggauguucuug

SEQ ID NO: 106271 - RNA, 19 nt, Artificial Sequence
  Description of Artificial Sequence: Synthetic oligonucleotide
ccuccccaaaucacccacu

SEQ ID NO: 106272 - RNA, 19 nt, Artificial Sequence
  Description of Artificial Sequence: Synthetic oligonucleotide
cccuuagcgaagcgccucu

SEQ ID NO: 106273 - RNA, 19 nt, Artificial Sequence
  Description of Artificial Sequence: Synthetic oligonucleotide
ggccgccaaaggggauggc

SEQ ID NO: 106274 - RNA, 19 nt, Artificial Sequence
  Description of Artificial Sequence: Synthetic oligonucleotide
gcucagcggcggcagcagu

SEQ ID NO: 106275 - RNA, 19 nt, Artificial Sequence
  Description of Artificial Sequence: Synthetic oligonucleotide
cgaccccaccagcuucuuc

SEQ ID NO: 106276 - RNA, 19 nt, Artificial Sequence
  Description of Artificial Sequence: Synthetic oligonucleotide
ccucugcguguccgauuca

SEQ ID NO: 106277 - RNA, 19 nt, Artificial Sequence
  Description of Artificial Sequence: Synthetic oligonucleotide
cguguccgauucaucacuu

SEQ ID NO: 106278 - RNA, 19 nt, Artificial Sequence
  Description of Artificial Sequence: Synthetic oligonucleotide
gcacaagcggcaagcuguu

SEQ ID NO: 106279 - RNA, 19 nt, Artificial Sequence
  Description of Artificial Sequence: Synthetic oligonucleotide
ggacuggcugcagcucuau

SEQ ID NO: 106280 - RNA, 19 nt, Artificial Sequence
  Description of Artificial Sequence: Synthetic oligonucleotide
gcgcggccacaagccgagg

SEQ ID NO: 106281 - RNA, 19 nt, Artificial Sequence
  Description of Artificial Sequence: Synthetic oligonucleotide
cgaugccacagagcagucu

SEQ ID NO: 106282 - RNA, 19 nt, Artificial Sequence
  Description of Artificial Sequence: Synthetic oligonucleotide
cggccggccccaggcuucc

SEQ ID NO: 106283 - RNA, 19 nt, Artificial Sequence
  Description of Artificial Sequence: Synthetic oligonucleotide
ccgaccccaccagcuucuu

SEQ ID NO: 106284 - RNA, 19 nt, Artificial Sequence
  Description of Artificial Sequence: Synthetic oligonucleotide
ucaauucuaaccaugagcc

SEQ ID NO: 106285 - RNA, 19 nt, Artificial Sequence
  Description of Artificial Sequence: Synthetic oligonucleotide
ucacuuauaaucuuaagcc

SEQ ID NO: 106286 - RNA, 19 nt, Artificial Sequence
  Description of Artificial Sequence: Synthetic oligonucleotide
uuuguuacaaccauuucag

SEQ ID NO: 106287 - RNA, 19 nt, Artificial Sequence
  Description of Artificial Sequence: Synthetic oligonucleotide
acuauuacaucccaacagc

SEQ ID NO: 106288 - RNA, 19 nt, Artificial Sequence
  Description of Artificial Sequence: Synthetic oligonucleotide
aacuauuacaucccaacag

SEQ ID NO: 106289 - RNA, 19 nt, Artificial Sequence
  Description of Artificial Sequence: Synthetic oligonucleotide
aauucuaaccaugagccgg

SEQ ID NO: 106290 - RNA, 19 nt, Artificial Sequence
  Description of Artificial Sequence: Synthetic oligonucleotide
aacgacuugagacaggacu

SEQ ID NO: 106291 - RNA, 19 nt, Artificial Sequence
  Description of Artificial Sequence: Synthetic oligonucleotide
uggaauucgauacaccucc

SEQ ID NO: 106292 - RNA, 19 nt, Artificial Sequence
  Description of Artificial Sequence: Synthetic oligonucleotide
uagauuguuuguuacaacc

SEQ ID NO: 106293 - RNA, 19 nt, Artificial Sequence
  Description of Artificial Sequence: Synthetic oligonucleotide
uuauacuguccuuacaaag

SEQ ID NO: 106294 - RNA, 19 nt, Artificial Sequence
  Description of Artificial Sequence: Synthetic oligonucleotide
cuguagaaaguuuauuucg

SEQ ID NO: 106295 - RNA, 19 nt, Artificial Sequence
  Description of Artificial Sequence: Synthetic oligonucleotide
agaaaguuuauuucggucu

SEQ ID NO: 106296 - RNA, 19 nt, Artificial Sequence
  Description of Artificial Sequence: Synthetic oligonucleotide
agacacuauaauucugucc

SEQ ID NO: 106297 - RNA, 19 nt, Artificial Sequence
  Description of Artificial Sequence: Synthetic oligonucleotide
uccacauacgcuugcaugg

SEQ ID NO: 106298 - RNA, 19 nt, Artificial Sequence
  Description of Artificial Sequence: Synthetic oligonucleotide
augauucuagcacauagag

SEQ ID NO: 106299 - RNA, 19 nt, Artificial Sequence
  Description of Artificial Sequence: Synthetic oligonucleotide
aucuuaucaacauagcaca

SEQ ID NO: 106300 - RNA, 19 nt, Artificial Sequence
  Description of Artificial Sequence: Synthetic oligonucleotide
uguuugaaauccucugucg

SEQ ID NO: 106301 - RNA, 19 nt, Artificial Sequence
  Description of Artificial Sequence: Synthetic oligonucleotide
auguggguaauuuacugac

SEQ ID NO: 106302 - RNA, 19 nt, Artificial Sequence
  Description of Artificial Sequence: Synthetic oligonucleotide
agcacauagaggcuaacgg

SEQ ID NO: 106303 - RNA, 19 nt, Artificial Sequence
  Description of Artificial Sequence: Synthetic oligonucleotide
aguaaguacaggccuggcc

SEQ ID NO: 106304 - RNA, 19 nt, Artificial Sequence
  Description of Artificial Sequence: Synthetic oligonucleotide
auuaggauugcuggggucc

SEQ ID NO: 106305 - RNA, 19 nt, Artificial Sequence
  Description of Artificial Sequence: Synthetic oligonucleotide
acgguuugaucucugaagg

SEQ ID NO: 106306 - RNA, 19 nt, Artificial Sequence
  Description of Artificial Sequence: Synthetic oligonucleotide
uuagggaacacacauuguc

SEQ ID NO: 106307 - RNA, 19 nt, Artificial Sequence
  Description of Artificial Sequence: Synthetic oligonucleotide
  modified_base (6)..(6): a, c, u, g, unknown or other
ucuuunuaaucucuuccug

SEQ ID NO: 106308 - RNA, 19 nt, Artificial Sequence
  Description of Artificial Sequence: Synthetic oligonucleotide
guuaggagucuuuggaacg

SEQ ID NO: 106309 - RNA, 19 nt, Artificial Sequence
  Description of Artificial Sequence: Synthetic oligonucleotide
auaaggagaugucacacca

SEQ ID NO: 106310 - RNA, 19 nt, Artificial Sequence
  Description of Artificial Sequence: Synthetic oligonucleotide
uggaaauguccuaccaagg

SEQ ID NO: 106311 - RNA, 19 nt, Artificial Sequence
  Description of Artificial Sequence: Synthetic oligonucleotide
ugggguuuucaucauaugu

SEQ ID NO: 106312 - RNA, 19 nt, Artificial Sequence
  Description of Artificial Sequence: Synthetic oligonucleotide
auaaucuuaagccuucgaa

SEQ ID NO: 106313 - RNA, 19 nt, Artificial Sequence
  Description of Artificial Sequence: Synthetic oligonucleotide
uccucguucaguuacugug

SEQ ID NO: 106314 - RNA, 19 nt, Artificial Sequence
  Description of Artificial Sequence: Synthetic oligonucleotide
uguaucauaucugucgucu

SEQ ID NO: 106315 - RNA, 19 nt, Artificial Sequence
  Description of Artificial Sequence: Synthetic oligonucleotide
guggaaauguccuaccaag

SEQ ID NO: 106316 - RNA, 19 nt, Artificial Sequence
  Description of Artificial Sequence: Synthetic oligonucleotide
uucgauacaccuccuuuag

SEQ ID NO: 106317 - RNA, 19 nt, Artificial Sequence
  Description of Artificial Sequence: Synthetic oligonucleotide
aaauuaaaccuugcaggag

SEQ ID NO: 106318 - RNA, 19 nt, Artificial Sequence
  Description of Artificial Sequence: Synthetic oligonucleotide
uguuaggagucuuuggaac

SEQ ID NO: 106319 - RNA, 19 nt, Artificial Sequence
  Description of Artificial Sequence: Synthetic oligonucleotide
aauucgauacaccuccuuu

SEQ ID NO: 106320 - RNA, 19 nt, Artificial Sequence
  Description of Artificial Sequence: Synthetic oligonucleotide
augguaguaauagaucuuc

SEQ ID NO: 106321 - RNA, 19 nt, Artificial Sequence
  Description of Artificial Sequence: Synthetic oligonucleotide
ucaggguucuuacaguacu

SEQ ID NO: 106322 - RNA, 19 nt, Artificial Sequence
  Description of Artificial Sequence: Synthetic oligonucleotide
agagucaaaggguaguggu

SEQ ID NO: 106323 - RNA, 19 nt, Artificial Sequence
  Description of Artificial Sequence: Synthetic oligonucleotide
ugaucuuaagcaguaaauc

SEQ ID NO: 106324 - RNA, 19 nt, Artificial Sequence
  Description of Artificial Sequence: Synthetic oligonucleotide
aaccccggcaguuagcuga

SEQ ID NO: 106325 - RNA, 19 nt, Artificial Sequence
  Description of Artificial Sequence: Synthetic oligonucleotide
aagaguagccccuucguuu

SEQ ID NO: 106326 - RNA, 19 nt, Artificial Sequence
  Description of Artificial Sequence: Synthetic oligonucleotide
uuaagccuucgaaacacga

SEQ ID NO: 106327 - RNA, 19 nt, Artificial Sequence
  Description of Artificial Sequence: Synthetic oligonucleotide
uuucaucauauguuggggu

SEQ ID NO: 106328 - RNA, 19 nt, Artificial Sequence
  Description of Artificial Sequence: Synthetic oligonucleotide
uuuggacucacacgggcug

SEQ ID NO: 106329 - RNA, 19 nt, Artificial Sequence
  Description of Artificial Sequence: Synthetic oligonucleotide
ugagaggcauuauagccca

SEQ ID NO: 106330 - RNA, 19 nt, Artificial Sequence
  Description of Artificial Sequence: Synthetic oligonucleotide
uuguuccccgcucauaggc

SEQ ID NO: 106331 - RNA, 19 nt, Artificial Sequence
  Description of Artificial Sequence: Synthetic oligonucleotide
uagaaaguuuauuucgguc

SEQ ID NO: 106332 - RNA, 19 nt, Artificial Sequence
  Description of Artificial Sequence: Synthetic oligonucleotide
uauaugguugcuugagacu

SEQ ID NO: 106333 - RNA, 19 nt, Artificial Sequence
  Description of Artificial Sequence: Synthetic oligonucleotide
aucauaucugucgucuggc

SEQ ID NO: 106334 - RNA, 19 nt, Artificial Sequence
  Description of Artificial Sequence: Synthetic oligonucleotide
gucacucuaauucaguguc

SEQ ID NO: 106335 - RNA, 19 nt, Artificial Sequence
  Description of Artificial Sequence: Synthetic oligonucleotide
ucuuaagccuucgaaacac

SEQ ID NO: 106336 - RNA, 19 nt, Artificial Sequence
  Description of Artificial Sequence: Synthetic oligonucleotide
uucugaguuggcuugucug

SEQ ID NO: 106337 - RNA, 19 nt, Artificial Sequence
  Description of Artificial Sequence: Synthetic oligonucleotide
ugaaguuggcugcaccacc

SEQ ID NO: 106338 - RNA, 19 nt, Artificial Sequence
  Description of Artificial Sequence: Synthetic oligonucleotide
uguugugacugcaagucau

SEQ ID NO: 106339 - RNA, 19 nt, Artificial Sequence
  Description of Artificial Sequence: Synthetic oligonucleotide
uuauaaucuuaagccuucg

SEQ ID NO: 106340 - RNA, 19 nt, Artificial Sequence
  Description of Artificial Sequence: Synthetic oligonucleotide
uguaacuauuacaucccaa

SEQ ID NO: 106341 - RNA, 19 nt, Artificial Sequence
  Description of Artificial Sequence: Synthetic oligonucleotide
gccgggauaacuaagaacc

SEQ ID NO: 106342 - RNA, 19 nt, Artificial Sequence
  Description of Artificial Sequence: Synthetic oligonucleotide
agccgggauaacuaagaac

SEQ ID NO: 106343 - RNA, 19 nt, Artificial Sequence
  Description of Artificial Sequence: Synthetic oligonucleotide
agugaucuuaagcaguaaa

SEQ ID NO: 106344 - RNA, 19 nt, Artificial Sequence
  Description of Artificial Sequence: Synthetic oligonucleotide
gaugacaggccaucauacc

SEQ ID NO: 106345 - RNA, 19 nt, Artificial Sequence
  Description of Artificial Sequence: Synthetic oligonucleotide
uggcuuacaguugacaccu

SEQ ID NO: 106346 - RNA, 19 nt, Artificial Sequence
  Description of Artificial Sequence: Synthetic oligonucleotide
ugguaguaauagaucuucc

SEQ ID NO: 106347 - RNA, 19 nt, Artificial Sequence
  Description of Artificial Sequence: Synthetic oligonucleotide
cuuuggaauucgauacacc

SEQ ID NO: 106348 - RNA, 19 nt, Artificial Sequence
  Description of Artificial Sequence: Synthetic oligonucleotide
ucgauacaccuccuuuagg

SEQ ID NO: 106349 - RNA, 19 nt, Artificial Sequence
  Description of Artificial Sequence: Synthetic oligonucleotide
cagaucauugggguaaagg

SEQ ID NO: 106350 - RNA, 19 nt, Artificial Sequence
  Description of Artificial Sequence: Synthetic oligonucleotide
uaaaccuugcaggagaauu

SEQ ID NO: 106351 - RNA, 19 nt, Artificial Sequence
  Description of Artificial Sequence: Synthetic oligonucleotide
uccgguaaggauucaggca

SEQ ID NO: 106352 - RNA, 19 nt, Artificial Sequence
  Description of Artificial Sequence: Synthetic oligonucleotide
aauugaucaagguccucuu

SEQ ID NO: 106353 - RNA, 19 nt, Artificial Sequence
  Description of Artificial Sequence: Synthetic oligonucleotide
guaccaccggcacugaugc

SEQ ID NO: 106354 - RNA, 19 nt, Artificial Sequence
  Description of Artificial Sequence: Synthetic oligonucleotide
uccuuauucauaacuccau

SEQ ID NO: 106355 - RNA, 19 nt, Artificial Sequence
  Description of Artificial Sequence: Synthetic oligonucleotide
agaauuuauacuguccuua

SEQ ID NO: 106356 - RNA, 19 nt, Artificial Sequence
  Description of Artificial Sequence: Synthetic oligonucleotide
gaaacgacuugagacagga

SEQ ID NO: 106357 - RNA, 19 nt, Artificial Sequence
  Description of Artificial Sequence: Synthetic oligonucleotide
agcuccuuauucauaacuc

SEQ ID NO: 106358 - RNA, 19 nt, Artificial Sequence
  Description of Artificial Sequence: Synthetic oligonucleotide
uuuagggaacacacauugu

SEQ ID NO: 106359 - RNA, 19 nt, Artificial Sequence
  Description of Artificial Sequence: Synthetic oligonucleotide
agcagcgacaacccaugac

SEQ ID NO: 106360 - RNA, 19 nt, Artificial Sequence
  Description of Artificial Sequence: Synthetic oligonucleotide
gugcgcaugggucugugcg

SEQ ID NO: 106361 - RNA, 19 nt, Artificial Sequence
  Description of Artificial Sequence: Synthetic oligonucleotide
gagagucaaaggguagugg

SEQ ID NO: 106362 - RNA, 19 nt, Artificial Sequence
  Description of Artificial Sequence: Synthetic oligonucleotide
ucacucuaauucagugucc

SEQ ID NO: 106363 - RNA, 19 nt, Artificial Sequence
  Description of Artificial Sequence: Synthetic oligonucleotide
uguuuguuacaaccauuuc

SEQ ID NO: 106364 - RNA, 19 nt, Artificial Sequence
  Description of Artificial Sequence: Synthetic oligonucleotide
  modified_base (14)..(14): a, c, u, g, unknown or other
cuccagagucuuunuaauc

SEQ ID NO: 106365 - RNA, 19 nt, Artificial Sequence
  Description of Artificial Sequence: Synthetic oligonucleotide
cuucuuucgagagcgcucc

SEQ ID NO: 106366 - RNA, 19 nt, Artificial Sequence
  Description of Artificial Sequence: Synthetic oligonucleotide
guaguaaguacaggccugg

SEQ ID NO: 106367 - RNA, 19 nt, Artificial Sequence
  Description of Artificial Sequence: Synthetic oligonucleotide
ugugcuaccucuuguucaa

SEQ ID NO: 106368 - RNA, 19 nt, Artificial Sequence
  Description of Artificial Sequence: Synthetic oligonucleotide
uugauaauauaugguugcu

SEQ ID NO: 106369 - RNA, 19 nt, Artificial Sequence
  Description of Artificial Sequence: Synthetic oligonucleotide
ucauaccaguaguaaguac

SEQ ID NO: 106370 - RNA, 19 nt, Artificial Sequence
  Description of Artificial Sequence: Synthetic oligonucleotide
  modified_base (7)..(7): a, c, u, g, unknown or other
gucuuunuaaucucuuccu

SEQ ID NO: 106371 - RNA, 19 nt, Artificial Sequence
  Description of Artificial Sequence: Synthetic oligonucleotide
  modified_base (18)..(18): a, c, u, g, unknown or other
aaugcuccagagucuuunu

SEQ ID NO: 106372 - RNA, 19 nt, Artificial Sequence
  Description of Artificial Sequence: Synthetic oligonucleotide
acuuauaaucuuaagccuu

SEQ ID NO: 106373 - RNA, 19 nt, Artificial Sequence
  Description of Artificial Sequence: Synthetic oligonucleotide
auucuaaccaugagccggg

SEQ ID NO: 106374 - RNA, 19 nt, Artificial Sequence
  Description of Artificial Sequence: Synthetic oligonucleotide
ucacggcugaaguuggcug

SEQ ID NO: 106375 - RNA, 19 nt, Artificial Sequence
  Description of Artificial Sequence: Synthetic oligonucleotide
cuacauacugugaacugga

SEQ ID NO: 106376 - RNA, 19 nt, Artificial Sequence
  Description of Artificial Sequence: Synthetic oligonucleotide
auaucugucgucuggccuu

SEQ ID NO: 106377 - RNA, 19 nt, Artificial Sequence
  Description of Artificial Sequence: Synthetic oligonucleotide
ucgagcaagguguuugaaa

SEQ ID NO: 106378 - RNA, 19 nt, Artificial Sequence
  Description of Artificial Sequence: Synthetic oligonucleotide
uuugauccguacuuucuuu

SEQ ID NO: 106379 - RNA, 19 nt, Artificial Sequence
  Description of Artificial Sequence: Synthetic oligonucleotide
gucguggugauucugccca

SEQ ID NO: 106380 - RNA, 19 nt, Artificial Sequence
  Description of Artificial Sequence: Synthetic oligonucleotide
ggugcaacuauugugguca

SEQ ID NO: 106381 - RNA, 19 nt, Artificial Sequence
  Description of Artificial Sequence: Synthetic oligonucleotide
uuacaucccaacagcucac

SEQ ID NO: 106382 - RNA, 19 nt, Artificial Sequence
  Description of Artificial Sequence: Synthetic oligonucleotide
cagaaacgacuugagacag

SEQ ID NO: 106383 - RNA, 19 nt, Artificial Sequence
  Description of Artificial Sequence: Synthetic oligonucleotide
ugcccuggugcaacuauug

SEQ ID NO: 106384 - RNA, 19 nt, Artificial Sequence
  Description of Artificial Sequence: Synthetic oligonucleotide
auacgcuugcaugggauag

SEQ ID NO: 106385 - RNA, 19 nt, Artificial Sequence
  Description of Artificial Sequence: Synthetic oligonucleotide
caucauaccaguaguaagu

SEQ ID NO: 106386 - RNA, 19 nt, Artificial Sequence
  Description of Artificial Sequence: Synthetic oligonucleotide
acgcuugcaugggauagcc

SEQ ID NO: 106387 - RNA, 19 nt, Artificial Sequence
  Description of Artificial Sequence: Synthetic oligonucleotide
auaacucugcacaauuggu

SEQ ID NO: 106388 - RNA, 19 nt, Artificial Sequence
  Description of Artificial Sequence: Synthetic oligonucleotide
ugauaauauaugguugcuu

SEQ ID NO: 106389 - RNA, 19 nt, Artificial Sequence
  Description of Artificial Sequence: Synthetic oligonucleotide
aggguucuuacaguacuuc

SEQ ID NO: 106390 - RNA, 19 nt, Artificial Sequence
  Description of Artificial Sequence: Synthetic oligonucleotide
auagccagcaaagggguga

SEQ ID NO: 106391 - RNA, 19 nt, Artificial Sequence
  Description of Artificial Sequence: Synthetic oligonucleotide
uaaccaugagccgggauaa

SEQ ID NO: 106392 - RNA, 19 nt, Artificial Sequence
  Description of Artificial Sequence: Synthetic oligonucleotide
gaaguugguguaucauauc

SEQ ID NO: 106393 - RNA, 19 nt, Artificial Sequence
  Description of Artificial Sequence: Synthetic oligonucleotide
cacggcugaaguuggcugc

SEQ ID NO: 106394 - RNA, 19 nt, Artificial Sequence
  Description of Artificial Sequence: Synthetic oligonucleotide
uaucagagaggccccucac

SEQ ID NO: 106395 - RNA, 19 nt, Artificial Sequence
  Description of Artificial Sequence: Synthetic oligonucleotide
uggguaauuuacugacuuc

SEQ ID NO: 106396 - RNA, 19 nt, Artificial Sequence
  Description of Artificial Sequence: Synthetic oligonucleotide
guaucauaucugucgucug

SEQ ID NO: 106397 - RNA, 19 nt, Artificial Sequence
  Description of Artificial Sequence: Synthetic oligonucleotide
cuaaccaugagccgggaua

SEQ ID NO: 106398 - RNA, 19 nt, Artificial Sequence
  Description of Artificial Sequence: Synthetic oligonucleotide
ggagaauuuauacuguccu

SEQ ID NO: 106399 - RNA, 19 nt, Artificial Sequence
  Description of Artificial Sequence: Synthetic oligonucleotide
uaugguugcuugagacugu

SEQ ID NO: 106400 - RNA, 19 nt, Artificial Sequence
  Description of Artificial Sequence: Synthetic oligonucleotide
auuucggucuuugauccgu

SEQ ID NO: 106401 - RNA, 19 nt, Artificial Sequence
  Description of Artificial Sequence: Synthetic oligonucleotide
gggaggaucccacugaguc

SEQ ID NO: 106402 - RNA, 19 nt, Artificial Sequence
  Description of Artificial Sequence: Synthetic oligonucleotide
uagaggcuaacggcgaaca

SEQ ID NO: 106403 - RNA, 19 nt, Artificial Sequence
  Description of Artificial Sequence: Synthetic oligonucleotide
cccaugacguuccagaaac

SEQ ID NO: 106404 - RNA, 19 nt, Artificial Sequence
  Description of Artificial Sequence: Synthetic oligonucleotide
aaacgacuugagacaggac

SEQ ID NO: 106405 - RNA, 19 nt, Artificial Sequence
  Description of Artificial Sequence: Synthetic oligonucleotide
uugauccguacuuucuuuu

SEQ ID NO: 106406 - RNA, 19 nt, Artificial Sequence
  Description of Artificial Sequence: Synthetic oligonucleotide
aggcauuauagcccagaga

SEQ ID NO: 106407 - RNA, 19 nt, Artificial Sequence
  Description of Artificial Sequence: Synthetic oligonucleotide
ccgguaaggauucaggcac

SEQ ID NO: 106408 - RNA, 19 nt, Artificial Sequence
  Description of Artificial Sequence: Synthetic oligonucleotide
acucacacgggcuguugug

SEQ ID NO: 106409 - RNA, 19 nt, Artificial Sequence
  Description of Artificial Sequence: Synthetic oligonucleotide
ugguggccaaaucacuuau

SEQ ID NO: 106410 - RNA, 19 nt, Artificial Sequence
  Description of Artificial Sequence: Synthetic oligonucleotide
aauccucugucguggugau

SEQ ID NO: 106411 - RNA, 19 nt, Artificial Sequence
  Description of Artificial Sequence: Synthetic oligonucleotide
cugugcgcugacagcaccg

SEQ ID NO: 106412 - RNA, 19 nt, Artificial Sequence
  Description of Artificial Sequence: Synthetic oligonucleotide
ugaaauccucugucguggu

SEQ ID NO: 106413 - RNA, 19 nt, Artificial Sequence
  Description of Artificial Sequence: Synthetic oligonucleotide
cauugucuaaguucuuuaa

SEQ ID NO: 106414 - RNA, 19 nt, Artificial Sequence
  Description of Artificial Sequence: Synthetic oligonucleotide
cugucguggugauucugcc

SEQ ID NO: 106415 - RNA, 19 nt, Artificial Sequence
  Description of Artificial Sequence: Synthetic oligonucleotide
gaaagaguagccccuucgu

SEQ ID NO: 106416 - RNA, 19 nt, Artificial Sequence
  Description of Artificial Sequence: Synthetic oligonucleotide
cuaccucuuguucaaacaa

SEQ ID NO: 106417 - RNA, 19 nt, Artificial Sequence
  Description of Artificial Sequence: Synthetic oligonucleotide
uucucucgaccuguuagga

SEQ ID NO: 106418 - RNA, 19 nt, Artificial Sequence
  Description of Artificial Sequence: Synthetic oligonucleotide
ugcgcaugggucugugcgc

SEQ ID NO: 106419 - RNA, 19 nt, Artificial Sequence
  Description of Artificial Sequence: Synthetic oligonucleotide
cacuuauaaucuuaagccu

SEQ ID NO: 106420 - RNA, 19 nt, Artificial Sequence
  Description of Artificial Sequence: Synthetic oligonucleotide
ucucgaccuguuaggaguc

SEQ ID NO: 106421 - RNA, 19 nt, Artificial Sequence
  Description of Artificial Sequence: Synthetic oligonucleotide
cuaggggucaguuguaaua

SEQ ID NO: 106422 - RNA, 19 nt, Artificial Sequence
  Description of Artificial Sequence: Synthetic oligonucleotide
aguaaccccggcaguuagc

SEQ ID NO: 106423 - RNA, 19 nt, Artificial Sequence
  Description of Artificial Sequence: Synthetic oligonucleotide
guagaaaguuuauuucggu

SEQ ID NO: 106424 - RNA, 19 nt, Artificial Sequence
  Description of Artificial Sequence: Synthetic oligonucleotide
caugacguuccagaaacga

SEQ ID NO: 106425 - RNA, 19 nt, Artificial Sequence
  Description of Artificial Sequence: Synthetic oligonucleotide
ccaguagauuguuuguuac

SEQ ID NO: 106426 - RNA, 19 nt, Artificial Sequence
  Description of Artificial Sequence: Synthetic oligonucleotide
ucaugggguuuucaucaua

SEQ ID NO: 106427 - RNA, 19 nt, Artificial Sequence
  Description of Artificial Sequence: Synthetic oligonucleotide
aacuaggggucaguuguaa

SEQ ID NO: 106428 - RNA, 19 nt, Artificial Sequence
  Description of Artificial Sequence: Synthetic oligonucleotide
uugagacaggacugcgagu

SEQ ID NO: 106429 - RNA, 19 nt, Artificial Sequence
  Description of Artificial Sequence: Synthetic oligonucleotide
accaugagccgggauaacu

SEQ ID NO: 106430 - RNA, 19 nt, Artificial Sequence
  Description of Artificial Sequence: Synthetic oligonucleotide
agacaggacugcgagugug

SEQ ID NO: 106431 - RNA, 19 nt, Artificial Sequence
  Description of Artificial Sequence: Synthetic oligonucleotide
agaaacgacuugagacagg

SEQ ID NO: 106432 - RNA, 19 nt, Artificial Sequence
  Description of Artificial Sequence: Synthetic oligonucleotide
uuccucguucaguuacugu

SEQ ID NO: 106433 - RNA, 19 nt, Artificial Sequence
  Description of Artificial Sequence: Synthetic oligonucleotide
aggcuaacggcgaacaaaa

SEQ ID NO: 106434 - RNA, 19 nt, Artificial Sequence
  Description of Artificial Sequence: Synthetic oligonucleotide
ccagauuugagaauggggu

SEQ ID NO: 106435 - RNA, 19 nt, Artificial Sequence
  Description of Artificial Sequence: Synthetic oligonucleotide
acuguccuuacaaagucuu

SEQ ID NO: 106436 - RNA, 19 nt, Artificial Sequence
  Description of Artificial Sequence: Synthetic oligonucleotide
cucucgaccuguuaggagu

SEQ ID NO: 106437 - RNA, 19 nt, Artificial Sequence
  Description of Artificial Sequence: Synthetic oligonucleotide
uacgcuugcaugggauagc

SEQ ID NO: 106438 - RNA, 19 nt, Artificial Sequence
  Description of Artificial Sequence: Synthetic oligonucleotide
acuaggggucaguuguaau

SEQ ID NO: 106439 - RNA, 19 nt, Artificial Sequence
  Description of Artificial Sequence: Synthetic oligonucleotide
uucgaaacacgaguuucuu

SEQ ID NO: 106440 - RNA, 19 nt, Artificial Sequence
  Description of Artificial Sequence: Synthetic oligonucleotide
agacugugcaggggaguac

SEQ ID NO: 106441 - RNA, 19 nt, Artificial Sequence
  Description of Artificial Sequence: Synthetic oligonucleotide
ugugcgcugacagcaccgc

SEQ ID NO: 106442 - RNA, 19 nt, Artificial Sequence
  Description of Artificial Sequence: Synthetic oligonucleotide
ccuguuaggagucuuugga

SEQ ID NO: 106443 - RNA, 19 nt, Artificial Sequence
  Description of Artificial Sequence: Synthetic oligonucleotide
agauuuggcugggcauaac

SEQ ID NO: 106444 - RNA, 19 nt, Artificial Sequence
  Description of Artificial Sequence: Synthetic oligonucleotide
aagugaucuuaagcaguaa

SEQ ID NO: 106445 - RNA, 19 nt, Artificial Sequence
  Description of Artificial Sequence: Synthetic oligonucleotide
guggguaauuuacugacuu

SEQ ID NO: 106446 - RNA, 19 nt, Artificial Sequence
  Description of Artificial Sequence: Synthetic oligonucleotide
cucucaacuuuggacucac

SEQ ID NO: 106447 - RNA, 19 nt, Artificial Sequence
  Description of Artificial Sequence: Synthetic oligonucleotide
uuucggucuuugauccgua

SEQ ID NO: 106448 - RNA, 19 nt, Artificial Sequence
  Description of Artificial Sequence: Synthetic oligonucleotide
gcuaccucuuguucaaaca

SEQ ID NO: 106449 - RNA, 19 nt, Artificial Sequence
  Description of Artificial Sequence: Synthetic oligonucleotide
augagccgggauaacuaag

SEQ ID NO: 106450 - RNA, 19 nt, Artificial Sequence
  Description of Artificial Sequence: Synthetic oligonucleotide
cuucgaaacacgaguuucu

SEQ ID NO: 106451 - RNA, 19 nt, Artificial Sequence
  Description of Artificial Sequence: Synthetic oligonucleotide
caugagccgggauaacuaa

SEQ ID NO: 106452 - RNA, 19 nt, Artificial Sequence
  Description of Artificial Sequence: Synthetic oligonucleotide
ucccuaggcuacugccucc

SEQ ID NO: 106453 - RNA, 19 nt, Artificial Sequence
  Description of Artificial Sequence: Synthetic oligonucleotide
gguguaucauaucugucgu

SEQ ID NO: 106454 - RNA, 19 nt, Artificial Sequence
  Description of Artificial Sequence: Synthetic oligonucleotide
caugggguuuucaucauau

SEQ ID NO: 106455 - RNA, 19 nt, Artificial Sequence
  Description of Artificial Sequence: Synthetic oligonucleotide
ucacaacuaggggucaguu

SEQ ID NO: 106456 - RNA, 19 nt, Artificial Sequence
  Description of Artificial Sequence: Synthetic oligonucleotide
gaauggggucagguguggc

SEQ ID NO: 106457 - RNA, 19 nt, Artificial Sequence
  Description of Artificial Sequence: Synthetic oligonucleotide
gugaucuuaagcaguaaau

SEQ ID NO: 106458 - RNA, 19 nt, Artificial Sequence
  Description of Artificial Sequence: Synthetic oligonucleotide
cuguugugacugcaaguca

SEQ ID NO: 106459 - RNA, 19 nt, Artificial Sequence
  Description of Artificial Sequence: Synthetic oligonucleotide
gagccgggauaacuaagaa

SEQ ID NO: 106460 - RNA, 19 nt, Artificial Sequence
  Description of Artificial Sequence: Synthetic oligonucleotide
uuggacucacacgggcugu

SEQ ID NO: 106461 - RNA, 19 nt, Artificial Sequence
  Description of Artificial Sequence: Synthetic oligonucleotide
uaaccccggcaguuagcug

SEQ ID NO: 106462 - RNA, 19 nt, Artificial Sequence
  Description of Artificial Sequence: Synthetic oligonucleotide
ccuucgaaacacgaguuuc

SEQ ID NO: 106463 - RNA, 19 nt, Artificial Sequence
  Description of Artificial Sequence: Synthetic oligonucleotide
agucagcuuucgagcaagg

SEQ ID NO: 106464 - RNA, 19 nt, Artificial Sequence
  Description of Artificial Sequence: Synthetic oligonucleotide
agaggcuaacggcgaacaa

SEQ ID NO: 106465 - RNA, 19 nt, Artificial Sequence
  Description of Artificial Sequence: Synthetic oligonucleotide
acgaguuucuugggagucu

SEQ ID NO: 106466 - RNA, 19 nt, Artificial Sequence
  Description of Artificial Sequence: Synthetic oligonucleotide
uucgagcaagguguuugaa

SEQ ID NO: 106467 - RNA, 19 nt, Artificial Sequence
  Description of Artificial Sequence: Synthetic oligonucleotide
agcgacaacccaugacguu

SEQ ID NO: 106468 - RNA, 19 nt, Artificial Sequence
  Description of Artificial Sequence: Synthetic oligonucleotide
ucuuucgagagcgcuccuu

SEQ ID NO: 106469 - RNA, 19 nt, Artificial Sequence
  Description of Artificial Sequence: Synthetic oligonucleotide
cuuuggacucacacgggcu

SEQ ID NO: 106470 - RNA, 19 nt, Artificial Sequence
  Description of Artificial Sequence: Synthetic oligonucleotide
gcgacaacccaugacguuc

SEQ ID NO: 106471 - RNA, 19 nt, Artificial Sequence
  Description of Artificial Sequence: Synthetic oligonucleotide
gaauucgauacaccuccuu

SEQ ID NO: 106472 - RNA, 19 nt, Artificial Sequence
  Description of Artificial Sequence: Synthetic oligonucleotide
gacucacacgggcuguugu

SEQ ID NO: 106473 - RNA, 19 nt, Artificial Sequence
  Description of Artificial Sequence: Synthetic oligonucleotide
uucuaaccaugagccggga

SEQ ID NO: 106474 - RNA, 19 nt, Artificial Sequence
  Description of Artificial Sequence: Synthetic oligonucleotide
guaaccccggcaguuagcu

SEQ ID NO: 106475 - RNA, 19 nt, Artificial Sequence
  Description of Artificial Sequence: Synthetic oligonucleotide
cuagcacauagaggcuaac

SEQ ID NO: 106476 - RNA, 19 nt, Artificial Sequence
  Description of Artificial Sequence: Synthetic oligonucleotide
ucguggugauucugcccac

SEQ ID NO: 106477 - RNA, 19 nt, Artificial Sequence
  Description of Artificial Sequence: Synthetic oligonucleotide
caagggauucuguggaaau

SEQ ID NO: 106478 - RNA, 19 nt, Artificial Sequence
  Description of Artificial Sequence: Synthetic oligonucleotide
auguccuaccaagggcuga

SEQ ID NO: 106479 - RNA, 19 nt, Artificial Sequence
  Description of Artificial Sequence: Synthetic oligonucleotide
cccagacacuauaauucug

SEQ ID NO: 106480 - RNA, 19 nt, Artificial Sequence
  Description of Artificial Sequence: Synthetic oligonucleotide
agccuucgaaacacgaguu

SEQ ID NO: 106481 - RNA, 19 nt, Artificial Sequence
  Description of Artificial Sequence: Synthetic oligonucleotide
ccaugacguuccagaaacg

SEQ ID NO: 106482 - RNA, 19 nt, Artificial Sequence
  Description of Artificial Sequence: Synthetic oligonucleotide
gugcaacuauuguggucac

SEQ ID NO: 106483 - RNA, 19 nt, Artificial Sequence
  Description of Artificial Sequence: Synthetic oligonucleotide
cacucuaauucaguguccu

SEQ ID NO: 106484 - RNA, 19 nt, Artificial Sequence
  Description of Artificial Sequence: Synthetic oligonucleotide
cucugucguggugauucug

SEQ ID NO: 106485 - RNA, 19 nt, Artificial Sequence
  Description of Artificial Sequence: Synthetic oligonucleotide
gacaacccaugacguucca

SEQ ID NO: 106486 - RNA, 19 nt, Artificial Sequence
  Description of Artificial Sequence: Synthetic oligonucleotide
cgacaacccaugacguucc

SEQ ID NO: 106487 - RNA, 19 nt, Artificial Sequence
  Description of Artificial Sequence: Synthetic oligonucleotide
cgauacaccuccuuuaggu

SEQ ID NO: 106488 - RNA, 19 nt, Artificial Sequence
  Description of Artificial Sequence: Synthetic oligonucleotide
agcucacaacuagggguca

SEQ ID NO: 106489 - RNA, 19 nt, Artificial Sequence
  Description of Artificial Sequence: Synthetic oligonucleotide
aggucuucccuaggcuacu

SEQ ID NO: 106490 - RNA, 19 nt, Artificial Sequence
  Description of Artificial Sequence: Synthetic oligonucleotide
ggugcgcaugggucugugc

SEQ ID NO: 106491 - RNA, 19 nt, Artificial Sequence
  Description of Artificial Sequence: Synthetic oligonucleotide
gcauggucauaaggugcgg

SEQ ID NO: 106492 - RNA, 19 nt, Artificial Sequence
  Description of Artificial Sequence: Synthetic oligonucleotide
cagcgacaacccaugacgu

SEQ ID NO: 106493 - RNA, 19 nt, Artificial Sequence
  Description of Artificial Sequence: Synthetic oligonucleotide
gggagguaaaacaaugguu

SEQ ID NO: 106494 - RNA, 19 nt, Artificial Sequence
  Description of Artificial Sequence: Synthetic oligonucleotide
ggauaacuaagaaccuggu

SEQ ID NO: 106495 - RNA, 19 nt, Artificial Sequence
  Description of Artificial Sequence: Synthetic oligonucleotide
ccaugagccgggauaacua

SEQ ID NO: 106496 - RNA, 19 nt, Artificial Sequence
  Description of Artificial Sequence: Synthetic oligonucleotide
gugggugagcugugaaaau

SEQ ID NO: 106497 - RNA, 19 nt, Artificial Sequence
  Description of Artificial Sequence: Synthetic oligonucleotide
cacacgggcuguuguggua

SEQ ID NO: 106498 - RNA, 19 nt, Artificial Sequence
  Description of Artificial Sequence: Synthetic oligonucleotide
gcugccacaugggguacca

SEQ ID NO: 106499 - RNA, 19 nt, Artificial Sequence
  Description of Artificial Sequence: Synthetic oligonucleotide
cugagucugccuugugauu

SEQ ID NO: 106500 - RNA, 19 nt, Artificial Sequence
  Description of Artificial Sequence: Synthetic oligonucleotide
cugccacaugggguaccac

SEQ ID NO: 106501 - RNA, 19 nt, Artificial Sequence
  Description of Artificial Sequence: Synthetic oligonucleotide
gguggccaaaucacuuaua

SEQ ID NO: 106502 - RNA, 19 nt, Artificial Sequence
  Description of Artificial Sequence: Synthetic oligonucleotide
gccuucgaaacacgaguuu

SEQ ID NO: 106503 - RNA, 19 nt, Artificial Sequence
  Description of Artificial Sequence: Synthetic oligonucleotide
ccgggauaacuaagaaccu

SEQ ID NO: 106504 - RNA, 19 nt, Artificial Sequence
  Description of Artificial Sequence: Synthetic oligonucleotide
cucgaccuguuaggagucu

SEQ ID NO: 106505 - RNA, 19 nt, Artificial Sequence
  Description of Artificial Sequence: Synthetic oligonucleotide
gcgcaugggucugugcgcu

SEQ ID NO: 106506 - RNA, 19 nt, Artificial Sequence
  Description of Artificial Sequence: Synthetic oligonucleotide
aucugucgucuggccuuuu

SEQ ID NO: 106507 - RNA, 19 nt, Artificial Sequence
  Description of Artificial Sequence: Synthetic oligonucleotide
ccucugucguggugauucu

SEQ ID NO: 106508 - RNA, 19 nt, Artificial Sequence
  Description of Artificial Sequence: Synthetic oligonucleotide
agguacaugaauuagaagc

SEQ ID NO: 106509 - RNA, 19 nt, Artificial Sequence
  Description of Artificial Sequence: Synthetic oligonucleotide
aaucaaauguugcuuauac

SEQ ID NO: 106510 - RNA, 19 nt, Artificial Sequence
  Description of Artificial Sequence: Synthetic oligonucleotide
aaugacuccaaaugguucc

SEQ ID NO: 106511 - RNA, 19 nt, Artificial Sequence
  Description of Artificial Sequence: Synthetic oligonucleotide
ugaacuaccacuuucuagg

SEQ ID NO: 106512 - RNA, 19 nt, Artificial Sequence
  Description of Artificial Sequence: Synthetic oligonucleotide
uguauaauaauccacugca

SEQ ID NO: 106513 - RNA, 19 nt, Artificial Sequence
  Description of Artificial Sequence: Synthetic oligonucleotide
ucugcuauaacacuuaaac

SEQ ID NO: 106514 - RNA, 19 nt, Artificial Sequence
  Description of Artificial Sequence: Synthetic oligonucleotide
acuacuagaauacgaaacc

SEQ ID NO: 106515 - RNA, 19 nt, Artificial Sequence
  Description of Artificial Sequence: Synthetic oligonucleotide
ugcuauaacacuuaaacac

SEQ ID NO: 106516 - RNA, 19 nt, Artificial Sequence
  Description of Artificial Sequence: Synthetic oligonucleotide
uugguuaacauuccaaacg

SEQ ID NO: 106517 - RNA, 19 nt, Artificial Sequence
  Description of Artificial Sequence: Synthetic oligonucleotide
acaauggucaaccauugcc

SEQ ID NO: 106518 - RNA, 19 nt, Artificial Sequence
  Description of Artificial Sequence: Synthetic oligonucleotide
uguacuuucugcuauaaca

SEQ ID NO: 106519 - RNA, 19 nt, Artificial Sequence
  Description of Artificial Sequence: Synthetic oligonucleotide
aauaacauuugacuacuag

SEQ ID NO: 106520 - RNA, 19 nt, Artificial Sequence
  Description of Artificial Sequence: Synthetic oligonucleotide
ggcaaaaucacauauagag

SEQ ID NO: 106521 - RNA, 19 nt, Artificial Sequence
  Description of Artificial Sequence: Synthetic oligonucleotide
uauaauaauccacugcagc

SEQ ID NO: 106522 - RNA, 19 nt, Artificial Sequence
  Description of Artificial Sequence: Synthetic oligonucleotide
ugugguuguauaauaaucc

SEQ ID NO: 106523 - RNA, 19 nt, Artificial Sequence
  Description of Artificial Sequence: Synthetic oligonucleotide
aagucaaugccucuguuag

SEQ ID NO: 106524 - RNA, 19 nt, Artificial Sequence
  Description of Artificial Sequence: Synthetic oligonucleotide
aauaguugguaucucaagu

SEQ ID NO: 106525 - RNA, 19 nt, Artificial Sequence
  Description of Artificial Sequence: Synthetic oligonucleotide
uauauaaccagagaguuac

SEQ ID NO: 106526 - RNA, 19 nt, Artificial Sequence
  Description of Artificial Sequence: Synthetic oligonucleotide
uagaauacgaaaccuagca

SEQ ID NO: 106527 - RNA, 19 nt, Artificial Sequence
  Description of Artificial Sequence: Synthetic oligonucleotide
aauacuaacgcuggugugg

SEQ ID NO: 106528 - RNA, 19 nt, Artificial Sequence
  Description of Artificial Sequence: Synthetic oligonucleotide
ugcguauagaauuaugucc

SEQ ID NO: 106529 - RNA, 19 nt, Artificial Sequence
  Description of Artificial Sequence: Synthetic oligonucleotide
aacguuuaaccauccauuc

SEQ ID NO: 106530 - RNA, 19 nt, Artificial Sequence
  Description of Artificial Sequence: Synthetic oligonucleotide
aacuacaggauucaaguga

SEQ ID NO: 106531 - RNA, 19 nt, Artificial Sequence
  Description of Artificial Sequence: Synthetic oligonucleotide
aauuagcaaggucagucuc

SEQ ID NO: 106532 - RNA, 19 nt, Artificial Sequence
  Description of Artificial Sequence: Synthetic oligonucleotide
acauuccaaacguuuaacc

SEQ ID NO: 106533 - RNA, 19 nt, Artificial Sequence
  Description of Artificial Sequence: Synthetic oligonucleotide
gauauguugacuccacucc

SEQ ID NO: 106534 - RNA, 19 nt, Artificial Sequence
  Description of Artificial Sequence: Synthetic oligonucleotide
agagauguaugacaacuac

SEQ ID NO: 106535 - RNA, 19 nt, Artificial Sequence
  Description of Artificial Sequence: Synthetic oligonucleotide
uuuuagguaucacauaguc

SEQ ID NO: 106536 - RNA, 19 nt, Artificial Sequence
  Description of Artificial Sequence: Synthetic oligonucleotide
aaaccgagaucuuuaguag

SEQ ID NO: 106537 - RNA, 19 nt, Artificial Sequence
  Description of Artificial Sequence: Synthetic oligonucleotide
uuguauaauaauccacugc

SEQ ID NO: 106538 - RNA, 19 nt, Artificial Sequence
  Description of Artificial Sequence: Synthetic oligonucleotide
uaacccuucgguaagaguc

SEQ ID NO: 106539 - RNA, 19 nt, Artificial Sequence
  Description of Artificial Sequence: Synthetic oligonucleotide
uguugcuuauaccagagau

SEQ ID NO: 106540 - RNA, 19 nt, Artificial Sequence
  Description of Artificial Sequence: Synthetic oligonucleotide
uaaaccgagaucuuuagua

SEQ ID NO: 106541 - RNA, 19 nt, Artificial Sequence
  Description of Artificial Sequence: Synthetic oligonucleotide
uguuuuagaugaaaaguaa

SEQ ID NO: 106542 - RNA, 19 nt, Artificial Sequence
  Description of Artificial Sequence: Synthetic oligonucleotide
aaugguucuguuaucuuuc

SEQ ID NO: 106543 - RNA, 19 nt, Artificial Sequence
  Description of Artificial Sequence: Synthetic oligonucleotide
aaauguugcuuauaccaga

SEQ ID NO: 106544 - RNA, 19 nt, Artificial Sequence
  Description of Artificial Sequence: Synthetic oligonucleotide
agauguaugacaacuacag

SEQ ID NO: 106545 - RNA, 19 nt, Artificial Sequence
  Description of Artificial Sequence: Synthetic oligonucleotide
gcaguauauaaccagagag

SEQ ID NO: 106546 - RNA, 19 nt, Artificial Sequence
  Description of Artificial Sequence: Synthetic oligonucleotide
cauuugacuacuagaauac

SEQ ID NO: 106547 - RNA, 19 nt, Artificial Sequence
  Description of Artificial Sequence: Synthetic oligonucleotide
ucaaucucuaggaaguacu

SEQ ID NO: 106548 - RNA, 19 nt, Artificial Sequence
  Description of Artificial Sequence: Synthetic oligonucleotide
uaagcaguauauaaccaga

SEQ ID NO: 106549 - RNA, 19 nt, Artificial Sequence
  Description of Artificial Sequence: Synthetic oligonucleotide
aagccaauuacuuaauauu

SEQ ID NO: 106550 - RNA, 19 nt, Artificial Sequence
  Description of Artificial Sequence: Synthetic oligonucleotide
cauuaggcugauauggucc

SEQ ID NO: 106551 - RNA, 19 nt, Artificial Sequence
  Description of Artificial Sequence: Synthetic oligonucleotide
acagucaaucucuaggaag

SEQ ID NO: 106552 - RNA, 19 nt, Artificial Sequence
  Description of Artificial Sequence: Synthetic oligonucleotide
aacauuccaaacguuuaac

SEQ ID NO: 106553 - RNA, 19 nt, Artificial Sequence
  Description of Artificial Sequence: Synthetic oligonucleotide
ugguuaacauuccaaacgu

SEQ ID NO: 106554 - RNA, 19 nt, Artificial Sequence
  Description of Artificial Sequence: Synthetic oligonucleotide
uuucaguaagucaaugccu

SEQ ID NO: 106555 - RNA, 19 nt, Artificial Sequence
  Description of Artificial Sequence: Synthetic oligonucleotide
auuagaagcgugcguauag

SEQ ID NO: 106556 - RNA, 19 nt, Artificial Sequence
  Description of Artificial Sequence: Synthetic oligonucleotide
uguccuguaucauugucag

SEQ ID NO: 106557 - RNA, 19 nt, Artificial Sequence
  Description of Artificial Sequence: Synthetic oligonucleotide
ucucuuauacuucugggau

SEQ ID NO: 106558 - RNA, 19 nt, Artificial Sequence
  Description of Artificial Sequence: Synthetic oligonucleotide
agauuauacaugcaaaguu

SEQ ID NO: 106559 - RNA, 19 nt, Artificial Sequence
  Description of Artificial Sequence: Synthetic oligonucleotide
gauguaugacaacuacagg

SEQ ID NO: 106560 - RNA, 19 nt, Artificial Sequence
  Description of Artificial Sequence: Synthetic oligonucleotide
ucuacucucaggauuauuu

SEQ ID NO: 106561 - RNA, 19 nt, Artificial Sequence
  Description of Artificial Sequence: Synthetic oligonucleotide
acauuugacuacuagaaua

SEQ ID NO: 106562 - RNA, 19 nt, Artificial Sequence
  Description of Artificial Sequence: Synthetic oligonucleotide
ugaacagacaucuauuauu

SEQ ID NO: 106563 - RNA, 19 nt, Artificial Sequence
  Description of Artificial Sequence: Synthetic oligonucleotide
uuuagguaucacauagucu

SEQ ID NO: 106564 - RNA, 19 nt, Artificial Sequence
  Description of Artificial Sequence: Synthetic oligonucleotide
gaaugugguaaauugcuga

SEQ ID NO: 106565 - RNA, 19 nt, Artificial Sequence
  Description of Artificial Sequence: Synthetic oligonucleotide
aaauacuaacgcuggugug

SEQ ID NO: 106566 - RNA, 19 nt, Artificial Sequence
  Description of Artificial Sequence: Synthetic oligonucleotide
ugugguuagccaauuuuca

SEQ ID NO: 106567 - RNA, 19 nt, Artificial Sequence
  Description of Artificial Sequence: Synthetic oligonucleotide
uccuugaaauaauuaagcu

SEQ ID NO: 106568 - RNA, 19 nt, Artificial Sequence
  Description of Artificial Sequence: Synthetic oligonucleotide
acaugaauuagaagcgugc

SEQ ID NO: 106569 - RNA, 19 nt, Artificial Sequence
  Description of Artificial Sequence: Synthetic oligonucleotide
agaauacgaaaccuagcag

SEQ ID NO: 106570 - RNA, 19 nt, Artificial Sequence
  Description of Artificial Sequence: Synthetic oligonucleotide
aguaacuugaauccacaga

SEQ ID NO: 106571 - RNA, 19 nt, Artificial Sequence
  Description of Artificial Sequence: Synthetic oligonucleotide
aaaccuagcaggaacucag

SEQ ID NO: 106572 - RNA, 19 nt, Artificial Sequence
  Description of Artificial Sequence: Synthetic oligonucleotide
uagcuuauaacagucaauc

SEQ ID NO: 106573 - RNA, 19 nt, Artificial Sequence
  Description of Artificial Sequence: Synthetic oligonucleotide
ugauauguugacuccacuc

SEQ ID NO: 106574 - RNA, 19 nt, Artificial Sequence
  Description of Artificial Sequence: Synthetic oligonucleotide
aauacgaaaccuagcagga

SEQ ID NO: 106575 - RNA, 19 nt, Artificial Sequence
  Description of Artificial Sequence: Synthetic oligonucleotide
gacuacuagaauacgaaac

SEQ ID NO: 106576 - RNA, 19 nt, Artificial Sequence
  Description of Artificial Sequence: Synthetic oligonucleotide
aguaaaccgagaucuuuag

SEQ ID NO: 106577 - RNA, 19 nt, Artificial Sequence
  Description of Artificial Sequence: Synthetic oligonucleotide
uaugguccaauucuauacu

SEQ ID NO: 106578 - RNA, 19 nt, Artificial Sequence
  Description of Artificial Sequence: Synthetic oligonucleotide
ugaauuagaagcgugcgua

SEQ ID NO: 106579 - RNA, 19 nt, Artificial Sequence
  Description of Artificial Sequence: Synthetic oligonucleotide
ugcagguacaugaauuaga

SEQ ID NO: 106580 - RNA, 19 nt, Artificial Sequence
  Description of Artificial Sequence: Synthetic oligonucleotide
acaauaguuuucuaacuau

SEQ ID NO: 106581 - RNA, 19 nt, Artificial Sequence
  Description of Artificial Sequence: Synthetic oligonucleotide
uuauugguauucacuucag

SEQ ID NO: 106582 - RNA, 19 nt, Artificial Sequence
  Description of Artificial Sequence: Synthetic oligonucleotide
cuagaauacgaaaccuagc

SEQ ID NO: 106583 - RNA, 19 nt, Artificial Sequence
  Description of Artificial Sequence: Synthetic oligonucleotide
caugaauuagaagcgugcg

SEQ ID NO: 106584 - RNA, 19 nt, Artificial Sequence
  Description of Artificial Sequence: Synthetic oligonucleotide
uucgguaagaguccaugga

SEQ ID NO: 106585 - RNA, 19 nt, Artificial Sequence
  Description of Artificial Sequence: Synthetic oligonucleotide
aguauauaaccagagaguu

SEQ ID NO: 106586 - RNA, 19 nt, Artificial Sequence
  Description of Artificial Sequence: Synthetic oligonucleotide
gacgacugugacuugcucc

SEQ ID NO: 106587 - RNA, 19 nt, Artificial Sequence
  Description of Artificial Sequence: Synthetic oligonucleotide
uuauuagaaugaacuggca

SEQ ID NO: 106588 - RNA, 19 nt, Artificial Sequence
  Description of Artificial Sequence: Synthetic oligonucleotide
cugaacuaccacuuucuag

SEQ ID NO: 106589 - RNA, 19 nt, Artificial Sequence
  Description of Artificial Sequence: Synthetic oligonucleotide
uuaggaauccucagcacua

SEQ ID NO: 106590 - RNA, 19 nt, Artificial Sequence
  Description of Artificial Sequence: Synthetic oligonucleotide
uguuugaaucaucagcauu

SEQ ID NO: 106591 - RNA, 19 nt, Artificial Sequence
  Description of Artificial Sequence: Synthetic oligonucleotide
augguccaauucuauacuc

SEQ ID NO: 106592 - RNA, 19 nt, Artificial Sequence
  Description of Artificial Sequence: Synthetic oligonucleotide
aacccuucgguaagagucc

SEQ ID NO: 106593 - RNA, 19 nt, Artificial Sequence
  Description of Artificial Sequence: Synthetic oligonucleotide
gaguacaauaguuuucuaa

SEQ ID NO: 106594 - RNA, 19 nt, Artificial Sequence
  Description of Artificial Sequence: Synthetic oligonucleotide
caucggacgacacaucccc

SEQ ID NO: 106595 - RNA, 19 nt, Artificial Sequence
  Description of Artificial Sequence: Synthetic oligonucleotide
agaauagccagaauguggu

SEQ ID NO: 106596 - RNA, 19 nt, Artificial Sequence
  Description of Artificial Sequence: Synthetic oligonucleotide
aaccgagaucuuuaguagu

SEQ ID NO: 106597 - RNA, 19 nt, Artificial Sequence
  Description of Artificial Sequence: Synthetic oligonucleotide
caauaguugguaucucaag

SEQ ID NO: 106598 - RNA, 19 nt, Artificial Sequence
  Description of Artificial Sequence: Synthetic oligonucleotide
cuucgguaagaguccaugg

SEQ ID NO: 106599 - RNA, 19 nt, Artificial Sequence
  Description of Artificial Sequence: Synthetic oligonucleotide
ucgguaagaguccauggaa

SEQ ID NO: 106600 - RNA, 19 nt, Artificial Sequence
  Description of Artificial Sequence: Synthetic oligonucleotide
aaacguuuaaccauccauu

SEQ ID NO: 106601 - RNA, 19 nt, Artificial Sequence
  Description of Artificial Sequence: Synthetic oligonucleotide
aagcaguauauaaccagag

SEQ ID NO: 106602 - RNA, 19 nt, Artificial Sequence
  Description of Artificial Sequence: Synthetic oligonucleotide
ugguccaauucuauacuca

SEQ ID NO: 106603 - RNA, 19 nt, Artificial Sequence
  Description of Artificial Sequence: Synthetic oligonucleotide
cuaacuaucgguauuguau

SEQ ID NO: 106604 - RNA, 19 nt, Artificial Sequence
  Description of Artificial Sequence: Synthetic oligonucleotide
auaguugguaucucaaguu

SEQ ID NO: 106605 - RNA, 19 nt, Artificial Sequence
  Description of Artificial Sequence: Synthetic oligonucleotide
uagucuauaccaacaggaa

SEQ ID NO: 106606 - RNA, 19 nt, Artificial Sequence
  Description of Artificial Sequence: Synthetic oligonucleotide
aguaagucaaugccucugu

SEQ ID NO: 106607 - RNA, 19 nt, Artificial Sequence
  Description of Artificial Sequence: Synthetic oligonucleotide
uugaauccacagauauaag

SEQ ID NO: 106608 - RNA, 19 nt, Artificial Sequence
  Description of Artificial Sequence: Synthetic oligonucleotide
uuccaauugccaaucucac

SEQ ID NO: 106609 - RNA, 19 nt, Artificial Sequence
  Description of Artificial Sequence: Synthetic oligonucleotide
ugguuagccaauuuucaau

SEQ ID NO: 106610 - RNA, 19 nt, Artificial Sequence
  Description of Artificial Sequence: Synthetic oligonucleotide
uuccgucuggagaauagga

SEQ ID NO: 106611 - RNA, 19 nt, Artificial Sequence
  Description of Artificial Sequence: Synthetic oligonucleotide
auaaggcucagcuaagcuu

SEQ ID NO: 106612 - RNA, 19 nt, Artificial Sequence
  Description of Artificial Sequence: Synthetic oligonucleotide
auuaggcugauauggucca

SEQ ID NO: 106613 - RNA, 19 nt, Artificial Sequence
  Description of Artificial Sequence: Synthetic oligonucleotide
acguaacccauucuuauaa

SEQ ID NO: 106614 - RNA, 19 nt, Artificial Sequence
  Description of Artificial Sequence: Synthetic oligonucleotide
cugugguuagccaauuuuc

SEQ ID NO: 106615 - RNA, 19 nt, Artificial Sequence
  Description of Artificial Sequence: Synthetic oligonucleotide
augaauuagaagcgugcgu

SEQ ID NO: 106616 - RNA, 19 nt, Artificial Sequence
  Description of Artificial Sequence: Synthetic oligonucleotide
cucuuaguggugcaaguug

SEQ ID NO: 106617 - RNA, 19 nt, Artificial Sequence
  Description of Artificial Sequence: Synthetic oligonucleotide
agcaguauauaaccagaga

SEQ ID NO: 106618 - RNA, 19 nt, Artificial Sequence
  Description of Artificial Sequence: Synthetic oligonucleotide
ugacuacuagaauacgaaa

SEQ ID NO: 106619 - RNA, 19 nt, Artificial Sequence
  Description of Artificial Sequence: Synthetic oligonucleotide
uaagucaaugccucuguua

SEQ ID NO: 106620 - RNA, 19 nt, Artificial Sequence
  Description of Artificial Sequence: Synthetic oligonucleotide
auuugacuacuagaauacg

SEQ ID NO: 106621 - RNA, 19 nt, Artificial Sequence
  Description of Artificial Sequence: Synthetic oligonucleotide
acuuaaacacaugaacaga

SEQ ID NO: 106622 - RNA, 19 nt, Artificial Sequence
  Description of Artificial Sequence: Synthetic oligonucleotide
aucgacgacugugacuugc

SEQ ID NO: 106623 - RNA, 19 nt, Artificial Sequence
  Description of Artificial Sequence: Synthetic oligonucleotide
uaguugguaucucaaguuu

SEQ ID NO: 106624 - RNA, 19 nt, Artificial Sequence
  Description of Artificial Sequence: Synthetic oligonucleotide
acgacugugacuugcucca

SEQ ID NO: 106625 - RNA, 19 nt, Artificial Sequence
  Description of Artificial Sequence: Synthetic oligonucleotide
caauggucaaccauugcca

SEQ ID NO: 106626 - RNA, 19 nt, Artificial Sequence
  Description of Artificial Sequence: Synthetic oligonucleotide
uuaaccauauguguacuuu

SEQ ID NO: 106627 - RNA, 19 nt, Artificial Sequence
  Description of Artificial Sequence: Synthetic oligonucleotide
acaaaagaguacaauaguu

SEQ ID NO: 106628 - RNA, 19 nt, Artificial Sequence
  Description of Artificial Sequence: Synthetic oligonucleotide
uggcaaaaucacauauaga

SEQ ID NO: 106629 - RNA, 19 nt, Artificial Sequence
  Description of Artificial Sequence: Synthetic oligonucleotide
gaaccaucagucuuggacu

SEQ ID NO: 106630 - RNA, 19 nt, Artificial Sequence
  Description of Artificial Sequence: Synthetic oligonucleotide
ccuaaauuagcaaggucag

SEQ ID NO: 106631 - RNA, 19 nt, Artificial Sequence
  Description of Artificial Sequence: Synthetic oligonucleotide
uggugugguuguauaauaa

SEQ ID NO: 106632 - RNA, 19 nt, Artificial Sequence
  Description of Artificial Sequence: Synthetic oligonucleotide
agucaaugccucuguuagg

SEQ ID NO: 106633 - RNA, 19 nt, Artificial Sequence
  Description of Artificial Sequence: Synthetic oligonucleotide
uguuaggaauccucagcac

SEQ ID NO: 106634 - RNA, 19 nt, Artificial Sequence
  Description of Artificial Sequence: Synthetic oligonucleotide
aaugccucauuaauuuuau

SEQ ID NO: 106635 - RNA, 19 nt, Artificial Sequence
  Description of Artificial Sequence: Synthetic oligonucleotide
cagcaugaauggaucaccc

SEQ ID NO: 106636 - RNA, 19 nt, Artificial Sequence
  Description of Artificial Sequence: Synthetic oligonucleotide
ucuaacuaucgguauugua

SEQ ID NO: 106637 - RNA, 19 nt, Artificial Sequence
  Description of Artificial Sequence: Synthetic oligonucleotide
gugcguauagaauuauguc

SEQ ID NO: 106638 - RNA, 19 nt, Artificial Sequence
  Description of Artificial Sequence: Synthetic oligonucleotide
gauaacccuucgguaagag

SEQ ID NO: 106639 - RNA, 19 nt, Artificial Sequence
  Description of Artificial Sequence: Synthetic oligonucleotide
aacuaucgguauuguauuu

SEQ ID NO: 106640 - RNA, 19 nt, Artificial Sequence
  Description of Artificial Sequence: Synthetic oligonucleotide
gacaauggucaaccauugc

SEQ ID NO: 106641 - RNA, 19 nt, Artificial Sequence
  Description of Artificial Sequence: Synthetic oligonucleotide
cugcuauaacacuuaaaca

SEQ ID NO: 106642 - RNA, 19 nt, Artificial Sequence
  Description of Artificial Sequence: Synthetic oligonucleotide
uccgucuggagaauaggau

SEQ ID NO: 106643 - RNA, 19 nt, Artificial Sequence
  Description of Artificial Sequence: Synthetic oligonucleotide
gagauguaugacaacuaca

SEQ ID NO: 106644 - RNA, 19 nt, Artificial Sequence
  Description of Artificial Sequence: Synthetic oligonucleotide
uucugcuauaacacuuaaa

SEQ ID NO: 106645 - RNA, 19 nt, Artificial Sequence
  Description of Artificial Sequence: Synthetic oligonucleotide
guuaggaauccucagcacu

SEQ ID NO: 106646 - RNA, 19 nt, Artificial Sequence
  Description of Artificial Sequence: Synthetic oligonucleotide
ugaauggaucacccauugu

SEQ ID NO: 106647 - RNA, 19 nt, Artificial Sequence
  Description of Artificial Sequence: Synthetic oligonucleotide
ccagaaugugguaaauugc

SEQ ID NO: 106648 - RNA, 19 nt, Artificial Sequence
  Description of Artificial Sequence: Synthetic oligonucleotide
auauguguacuuucugcua

SEQ ID NO: 106649 - RNA, 19 nt, Artificial Sequence
  Description of Artificial Sequence: Synthetic oligonucleotide
auaacccuucgguaagagu

SEQ ID NO: 106650 - RNA, 19 nt, Artificial Sequence
  Description of Artificial Sequence: Synthetic oligonucleotide
uaucgguauuguauuuaaa

SEQ ID NO: 106651 - RNA, 19 nt, Artificial Sequence
  Description of Artificial Sequence: Synthetic oligonucleotide
aauuagaagcgugcguaua

SEQ ID NO: 106652 - RNA, 19 nt, Artificial Sequence
  Description of Artificial Sequence: Synthetic oligonucleotide
cagguacaugaauuagaag

SEQ ID NO: 106653 - RNA, 19 nt, Artificial Sequence
  Description of Artificial Sequence: Synthetic oligonucleotide
auguaaaaucacauccuga

SEQ ID NO: 106654 - RNA, 19 nt, Artificial Sequence
  Description of Artificial Sequence: Synthetic oligonucleotide
agcaugaauggaucaccca

SEQ ID NO: 106655 - RNA, 19 nt, Artificial Sequence
  Description of Artificial Sequence: Synthetic oligonucleotide
caguauauaaccagagagu

SEQ ID NO: 106656 - RNA, 19 nt, Artificial Sequence
  Description of Artificial Sequence: Synthetic oligonucleotide
aaaugcacucucacuggcu

SEQ ID NO: 106657 - RNA, 19 nt, Artificial Sequence
  Description of Artificial Sequence: Synthetic oligonucleotide
caggaguaaaccgagaucu

SEQ ID NO: 106658 - RNA, 19 nt, Artificial Sequence
  Description of Artificial Sequence: Synthetic oligonucleotide
gaaaccuagcaggaacuca

SEQ ID NO: 106659 - RNA, 19 nt, Artificial Sequence
  Description of Artificial Sequence: Synthetic oligonucleotide
gcaaugaguauucuuugca

SEQ ID NO: 106660 - RNA, 19 nt, Artificial Sequence
  Description of Artificial Sequence: Synthetic oligonucleotide
aagccucaaacuacuaaau

SEQ ID NO: 106661 - RNA, 19 nt, Artificial Sequence
  Description of Artificial Sequence: Synthetic oligonucleotide
agacaauggucaaccauug

SEQ ID NO: 106662 - RNA, 19 nt, Artificial Sequence
  Description of Artificial Sequence: Synthetic oligonucleotide
gggauaaaugcacucucac

SEQ ID NO: 106663 - RNA, 19 nt, Artificial Sequence
  Description of Artificial Sequence: Synthetic oligonucleotide
aucuucgccugacuuuucu

SEQ ID NO: 106664 - RNA, 19 nt, Artificial Sequence
  Description of Artificial Sequence: Synthetic oligonucleotide
acuuaaccauauguguacu

SEQ ID NO: 106665 - RNA, 19 nt, Artificial Sequence
  Description of Artificial Sequence: Synthetic oligonucleotide
agccucaaacuacuaaauu

SEQ ID NO: 106666 - RNA, 19 nt, Artificial Sequence
  Description of Artificial Sequence: Synthetic oligonucleotide
gcguauagaauuaugucca

SEQ ID NO: 106667 - RNA, 19 nt, Artificial Sequence
  Description of Artificial Sequence: Synthetic oligonucleotide
uccucgcugaaaauccaua

SEQ ID NO: 106668 - RNA, 19 nt, Artificial Sequence
  Description of Artificial Sequence: Synthetic oligonucleotide
ucuuaucacuuggggauuc

SEQ ID NO: 106669 - RNA, 19 nt, Artificial Sequence
  Description of Artificial Sequence: Synthetic oligonucleotide
auacuaacgcugguguggu

SEQ ID NO: 106670 - RNA, 19 nt, Artificial Sequence
  Description of Artificial Sequence: Synthetic oligonucleotide
cagccuuuuaaacuuaagu

SEQ ID NO: 106671 - RNA, 19 nt, Artificial Sequence
  Description of Artificial Sequence: Synthetic oligonucleotide
aucacauauagagcacaga

SEQ ID NO: 106672 - RNA, 19 nt, Artificial Sequence
  Description of Artificial Sequence: Synthetic oligonucleotide
gugcagguacaugaauuag

SEQ ID NO: 106673 - RNA, 19 nt, Artificial Sequence
  Description of Artificial Sequence: Synthetic oligonucleotide
acuaucgguauuguauuua

SEQ ID NO: 106674 - RNA, 19 nt, Artificial Sequence
  Description of Artificial Sequence: Synthetic oligonucleotide
acugaacuaccacuuucua

SEQ ID NO: 106675 - RNA, 19 nt, Artificial Sequence
  Description of Artificial Sequence: Synthetic oligonucleotide
uguugacuccacuccuuau

SEQ ID NO: 106676 - RNA, 19 nt, Artificial Sequence
  Description of Artificial Sequence: Synthetic oligonucleotide
uucuaacuaucgguauugu

SEQ ID NO: 106677 - RNA, 19 nt, Artificial Sequence
  Description of Artificial Sequence: Synthetic oligonucleotide
ggcuugccaaauacuaacg

SEQ ID NO: 106678 - RNA, 19 nt, Artificial Sequence
  Description of Artificial Sequence: Synthetic oligonucleotide
aagcuggcaucgacgacug

SEQ ID NO: 106679 - RNA, 19 nt, Artificial Sequence
  Description of Artificial Sequence: Synthetic oligonucleotide
agaagcgugcguauagaau

SEQ ID NO: 106680 - RNA, 19 nt, Artificial Sequence
  Description of Artificial Sequence: Synthetic oligonucleotide
uugaagccucaaacuacua

SEQ ID NO: 106681 - RNA, 19 nt, Artificial Sequence
  Description of Artificial Sequence: Synthetic oligonucleotide
gaauuagaagcgugcguau

SEQ ID NO: 106682 - RNA, 19 nt, Artificial Sequence
  Description of Artificial Sequence: Synthetic oligonucleotide
ucggacgacacauccccua

SEQ ID NO: 106683 - RNA, 19 nt, Artificial Sequence
  Description of Artificial Sequence: Synthetic oligonucleotide
acgacacauccccuaaauu

SEQ ID NO: 106684 - RNA, 19 nt, Artificial Sequence
  Description of Artificial Sequence: Synthetic oligonucleotide
gacgacacauccccuaaau

SEQ ID NO: 106685 - RNA, 19 nt, Artificial Sequence
  Description of Artificial Sequence: Synthetic oligonucleotide
gaccacguaacccauucuu

SEQ ID NO: 106686 - RNA, 19 nt, Artificial Sequence
  Description of Artificial Sequence: Synthetic oligonucleotide
ucuucgccugacuuuucuu

SEQ ID NO: 106687 - RNA, 19 nt, Artificial Sequence
  Description of Artificial Sequence: Synthetic oligonucleotide
ccgucuggagaauaggauc

SEQ ID NO: 106688 - RNA, 19 nt, Artificial Sequence
  Description of Artificial Sequence: Synthetic oligonucleotide
aggcucagauuaaaaugug

SEQ ID NO: 106689 - RNA, 19 nt, Artificial Sequence
  Description of Artificial Sequence: Synthetic oligonucleotide
guauauaaccagagaguua

SEQ ID NO: 106690 - RNA, 19 nt, Artificial Sequence
  Description of Artificial Sequence: Synthetic oligonucleotide
accgagaucuuuaguaguu

SEQ ID NO: 106691 - RNA, 19 nt, Artificial Sequence
  Description of Artificial Sequence: Synthetic oligonucleotide
cuacuagaauacgaaaccu

SEQ ID NO: 106692 - RNA, 19 nt, Artificial Sequence
  Description of Artificial Sequence: Synthetic oligonucleotide
guaaaccgagaucuuuagu

SEQ ID NO: 106693 - RNA, 19 nt, Artificial Sequence
  Description of Artificial Sequence: Synthetic oligonucleotide
cuggugugguuguauaaua

SEQ ID NO: 106694 - RNA, 19 nt, Artificial Sequence
  Description of Artificial Sequence: Synthetic oligonucleotide
ucuuuacccucagcuggac

SEQ ID NO: 106695 - RNA, 19 nt, Artificial Sequence
  Description of Artificial Sequence: Synthetic oligonucleotide
ccaauucuauacucaucug

SEQ ID NO: 106696 - RNA, 19 nt, Artificial Sequence
  Description of Artificial Sequence: Synthetic oligonucleotide
ggaucacccauuguguguc

SEQ ID NO: 106697 - RNA, 19 nt, Artificial Sequence
  Description of Artificial Sequence: Synthetic oligonucleotide
guugacuccacuccuuauu

SEQ ID NO: 106698 - RNA, 19 nt, Artificial Sequence
  Description of Artificial Sequence: Synthetic oligonucleotide
auauaaccagagaguuaca

SEQ ID NO: 106699 - RNA, 19 nt, Artificial Sequence
  Description of Artificial Sequence: Synthetic oligonucleotide
cacguaacccauucuuaua

SEQ ID NO: 106700 - RNA, 19 nt, Artificial Sequence
  Description of Artificial Sequence: Synthetic oligonucleotide
accacguaacccauucuua

SEQ ID NO: 106701 - RNA, 19 nt, Artificial Sequence
  Description of Artificial Sequence: Synthetic oligonucleotide
cgacacauccccuaaauua

SEQ ID NO: 106702 - RNA, 19 nt, Artificial Sequence
  Description of Artificial Sequence: Synthetic oligonucleotide
cccauuaccagcacccaga

SEQ ID NO: 106703 - RNA, 19 nt, Artificial Sequence
  Description of Artificial Sequence: Synthetic oligonucleotide
ggccaucugaauuuucacu

SEQ ID NO: 106704 - RNA, 19 nt, Artificial Sequence
  Description of Artificial Sequence: Synthetic oligonucleotide
augccucauuaauuuuauu

SEQ ID NO: 106705 - RNA, 19 nt, Artificial Sequence
  Description of Artificial Sequence: Synthetic oligonucleotide
gcaucgacgacugugacuu

SEQ ID NO: 106706 - RNA, 19 nt, Artificial Sequence
  Description of Artificial Sequence: Synthetic oligonucleotide
cuuaaccauauguguacuu

SEQ ID NO: 106707 - RNA, 19 nt, Artificial Sequence
  Description of Artificial Sequence: Synthetic oligonucleotide
cuaacgcuggugugguugu

SEQ ID NO: 106708 - RNA, 19 nt, Artificial Sequence
  Description of Artificial Sequence: Synthetic oligonucleotide
agcgugcguauagaauuau

SEQ ID NO: 106709 - RNA, 19 nt, Artificial Sequence
  Description of Artificial Sequence: Synthetic oligonucleotide
cgugcguauagaauuaugu

SEQ ID NO: 106710 - RNA, 19 nt, Artificial Sequence
  Description of Artificial Sequence: Synthetic oligonucleotide
ggguagauuucaagaagaa

SEQ ID NO: 106711 - RNA, 19 nt, Artificial Sequence
  Description of Artificial Sequence: Synthetic oligonucleotide
caucgacgacugugacuug

SEQ ID NO: 106712 - RNA, 19 nt, Artificial Sequence
  Description of Artificial Sequence: Synthetic oligonucleotide
cuccauugauauguugacu

SEQ ID NO: 106713 - RNA, 19 nt, Artificial Sequence
  Description of Artificial Sequence: Synthetic oligonucleotide
cuuaguggugcaaguuguu

SEQ ID NO: 106714 - RNA, 19 nt, Artificial Sequence
  Description of Artificial Sequence: Synthetic oligonucleotide
cuuuacccucagcuggacu

SEQ ID NO: 106715 - RNA, 19 nt, Artificial Sequence
  Description of Artificial Sequence: Synthetic oligonucleotide
uacuaacgcuggugugguu

SEQ ID NO: 106716 - RNA, 19 nt, Artificial Sequence
  Description of Artificial Sequence: Synthetic oligonucleotide
gcgugcguauagaauuaug

SEQ ID NO: 106717 - RNA, 19 nt, Artificial Sequence
  Description of Artificial Sequence: Synthetic oligonucleotide
aucggacgacacauccccu

SEQ ID NO: 106718 - RNA, 19 nt, Artificial Sequence
  Description of Artificial Sequence: Synthetic oligonucleotide
ggcaucgacgacugugacu

SEQ ID NO: 106719 - RNA, 19 nt, Artificial Sequence
  Description of Artificial Sequence: Synthetic oligonucleotide
ggaguaaaccgagaucuuu

SEQ ID NO: 106720 - RNA, 19 nt, Artificial Sequence
  Description of Artificial Sequence: Synthetic oligonucleotide
ccaaacguuuaaccaucca

SEQ ID NO: 106721 - RNA, 19 nt, Artificial Sequence
  Description of Artificial Sequence: Synthetic oligonucleotide
cgucuggagaauaggaucu

SEQ ID NO: 106722 - RNA, 19 nt, Artificial Sequence
  Description of Artificial Sequence: Synthetic oligonucleotide
uaacgcuggugugguugua

SEQ ID NO: 106723 - RNA, 19 nt, Artificial Sequence
  Description of Artificial Sequence: Synthetic oligonucleotide
ggacgacacauccccuaaa

SEQ ID NO: 106724 - RNA, 19 nt, Artificial Sequence
  Description of Artificial Sequence: Synthetic oligonucleotide
ccacguaacccauucuuau

SEQ ID NO: 106725 - RNA, 19 nt, Artificial Sequence
  Description of Artificial Sequence: Synthetic oligonucleotide
cagcaccugguucuguauu

SEQ ID NO: 106726 - RNA, 19 nt, Artificial Sequence
  Description of Artificial Sequence: Synthetic oligonucleotide
ccacagauauaagcaguau

SEQ ID NO: 106727 - RNA, 19 nt, Artificial Sequence
  Description of Artificial Sequence: Synthetic oligonucleotide
ccgagaucuuuaguaguuu

SEQ ID NO: 106728 - RNA, 19 nt, Artificial Sequence
  Description of Artificial Sequence: Synthetic oligonucleotide
cccuucgguaagaguccau

SEQ ID NO: 106729 - RNA, 19 nt, Artificial Sequence
  Description of Artificial Sequence: Synthetic oligonucleotide
aaagauauggaaccuaguc

SEQ ID NO: 106730 - RNA, 19 nt, Artificial Sequence
  Description of Artificial Sequence: Synthetic oligonucleotide
uaagauaagauccaggcaa

SEQ ID NO: 106731 - RNA, 19 nt, Artificial Sequence
  Description of Artificial Sequence: Synthetic oligonucleotide
ugaaauagcgaaaucaugu

SEQ ID NO: 106732 - RNA, 19 nt, Artificial Sequence
  Description of Artificial Sequence: Synthetic oligonucleotide
agauuaguaaacuaaagcu

SEQ ID NO: 106733 - RNA, 19 nt, Artificial Sequence
  Description of Artificial Sequence: Synthetic oligonucleotide
aauauggauguccagaaga

SEQ ID NO: 106734 - RNA, 19 nt, Artificial Sequence
  Description of Artificial Sequence: Synthetic oligonucleotide
cuuagguucaggaauaagg

SEQ ID NO: 106735 - RNA, 19 nt, Artificial Sequence
  Description of Artificial Sequence: Synthetic oligonucleotide
aaauuaguugucucaugcc

SEQ ID NO: 106736 - RNA, 19 nt, Artificial Sequence
  Description of Artificial Sequence: Synthetic oligonucleotide
uaaauuaguugucucaugc

SEQ ID NO: 106737 - RNA, 19 nt, Artificial Sequence
  Description of Artificial Sequence: Synthetic oligonucleotide
guuacgaugguguuaaggg

SEQ ID NO: 106738 - RNA, 19 nt, Artificial Sequence
  Description of Artificial Sequence: Synthetic oligonucleotide
aaacauucauaccauaaga

SEQ ID NO: 106739 - RNA, 19 nt, Artificial Sequence
  Description of Artificial Sequence: Synthetic oligonucleotide
agguuaaugcuguugaugg

SEQ ID NO: 106740 - RNA, 19 nt, Artificial Sequence
  Description of Artificial Sequence: Synthetic oligonucleotide
aauuaguugucucaugcca

SEQ ID NO: 106741 - RNA, 19 nt, Artificial Sequence
  Description of Artificial Sequence: Synthetic oligonucleotide
aauagucgcaccauucucc

SEQ ID NO: 106742 - RNA, 19 nt, Artificial Sequence
  Description of Artificial Sequence: Synthetic oligonucleotide
aacuaggcaaccuagcucu

SEQ ID NO: 106743 - RNA, 19 nt, Artificial Sequence
  Description of Artificial Sequence: Synthetic oligonucleotide
aagauauggaaccuagucu

SEQ ID NO: 106744 - RNA, 19 nt, Artificial Sequence
  Description of Artificial Sequence: Synthetic oligonucleotide
aaaaucucagcuaagaaau

SEQ ID NO: 106745 - RNA, 19 nt, Artificial Sequence
  Description of Artificial Sequence: Synthetic oligonucleotide
ucuuauauucguauaacuc

SEQ ID NO: 106746 - RNA, 19 nt, Artificial Sequence
  Description of Artificial Sequence: Synthetic oligonucleotide
uguacacuaaccuaagcca

SEQ ID NO: 106747 - RNA, 19 nt, Artificial Sequence
  Description of Artificial Sequence: Synthetic oligonucleotide
uauaacucugcuaagcccu

SEQ ID NO: 106748 - RNA, 19 nt, Artificial Sequence
  Description of Artificial Sequence: Synthetic oligonucleotide
uuauauucguauaacucug

SEQ ID NO: 106749 - RNA, 19 nt, Artificial Sequence
  Description of Artificial Sequence: Synthetic oligonucleotide
uguaccauugucauuuuca

SEQ ID NO: 106750 - RNA, 19 nt, Artificial Sequence
  Description of Artificial Sequence: Synthetic oligonucleotide
aaauagcgaaaucauguug

SEQ ID NO: 106751 - RNA, 19 nt, Artificial Sequence
  Description of Artificial Sequence: Synthetic oligonucleotide
auuagaagaguuucuaaug

SEQ ID NO: 106752 - RNA, 19 nt, Artificial Sequence
  Description of Artificial Sequence: Synthetic oligonucleotide
ucuagguuaaugcuguuga

SEQ ID NO: 106753 - RNA, 19 nt, Artificial Sequence
  Description of Artificial Sequence: Synthetic oligonucleotide
gauuaguaaacuaaagcug

SEQ ID NO: 106754 - RNA, 19 nt, Artificial Sequence
  Description of Artificial Sequence: Synthetic oligonucleotide
aucuuguaaccacuuagcc

SEQ ID NO: 106755 - RNA, 19 nt, Artificial Sequence
  Description of Artificial Sequence: Synthetic oligonucleotide
uuacuuuggccuuugauga

SEQ ID NO: 106756 - RNA, 19 nt, Artificial Sequence
  Description of Artificial Sequence: Synthetic oligonucleotide
aggggauaaaggaagaugc

SEQ ID NO: 106757 - RNA, 19 nt, Artificial Sequence
  Description of Artificial Sequence: Synthetic oligonucleotide
agcaugugcgacuugugcc

SEQ ID NO: 106758 - RNA, 19 nt, Artificial Sequence
  Description of Artificial Sequence: Synthetic oligonucleotide
gaugagauaggggauaaag

SEQ ID NO: 106759 - RNA, 19 nt, Artificial Sequence
  Description of Artificial Sequence: Synthetic oligonucleotide
auaagacucaacuaggcaa

SEQ ID NO: 106760 - RNA, 19 nt, Artificial Sequence
  Description of Artificial Sequence: Synthetic oligonucleotide
uuaagauaagauccaggca

SEQ ID NO: 106761 - RNA, 19 nt, Artificial Sequence
  Description of Artificial Sequence: Synthetic oligonucleotide
uucauaacaagcucugaga

SEQ ID NO: 106762 - RNA, 19 nt, Artificial Sequence
  Description of Artificial Sequence: Synthetic oligonucleotide
augccaugcauucauacag

SEQ ID NO: 106763 - RNA, 19 nt, Artificial Sequence
  Description of Artificial Sequence: Synthetic oligonucleotide
auagcgaaaucauguugcc

SEQ ID NO: 106764 - RNA, 19 nt, Artificial Sequence
  Description of Artificial Sequence: Synthetic oligonucleotide
acuuuuagcaccuuuuaau

SEQ ID NO: 106765 - RNA, 19 nt, Artificial Sequence
  Description of Artificial Sequence: Synthetic oligonucleotide
aagaguuucuaauggcuga

SEQ ID NO: 106766 - RNA, 19 nt, Artificial Sequence
  Description of Artificial Sequence: Synthetic oligonucleotide
uguuaccuguugaaguggg

SEQ ID NO: 106767 - RNA, 19 nt, Artificial Sequence
  Description of Artificial Sequence: Synthetic oligonucleotide
aauccgagaauccagcauu

SEQ ID NO: 106768 - RNA, 19 nt, Artificial Sequence
  Description of Artificial Sequence: Synthetic oligonucleotide
acagcuauacaacuugaug

SEQ ID NO: 106769 - RNA, 19 nt, Artificial Sequence
  Description of Artificial Sequence: Synthetic oligonucleotide
uaagacucaacuaggcaac

SEQ ID NO: 106770 - RNA, 19 nt, Artificial Sequence
  Description of Artificial Sequence: Synthetic oligonucleotide
aguaaacuaaagcugcaga

SEQ ID NO: 106771 - RNA, 19 nt, Artificial Sequence
  Description of Artificial Sequence: Synthetic oligonucleotide
aguagcuguugcuagcagg

SEQ ID NO: 106772 - RNA, 19 nt, Artificial Sequence
  Description of Artificial Sequence: Synthetic oligonucleotide
ucaacuaggcaaccuagcu

SEQ ID NO: 106773 - RNA, 19 nt, Artificial Sequence
  Description of Artificial Sequence: Synthetic oligonucleotide
aaaaccggaggguaagcca

SEQ ID NO: 106774 - RNA, 19 nt, Artificial Sequence
  Description of Artificial Sequence: Synthetic oligonucleotide
uauaggacuucuagauuag

SEQ ID NO: 106775 - RNA, 19 nt, Artificial Sequence
  Description of Artificial Sequence: Synthetic oligonucleotide
aauacggccuuugccuucc

SEQ ID NO: 106776 - RNA, 19 nt, Artificial Sequence
  Description of Artificial Sequence: Synthetic oligonucleotide
uauauucguauaacucugc

SEQ ID NO: 106777 - RNA, 19 nt, Artificial Sequence
  Description of Artificial Sequence: Synthetic oligonucleotide
uucacugguacaguagagg

SEQ ID NO: 106778 - RNA, 19 nt, Artificial Sequence
  Description of Artificial Sequence: Synthetic oligonucleotide
ugugaagcaugucugugga

SEQ ID NO: 106779 - RNA, 19 nt, Artificial Sequence
  Description of Artificial Sequence: Synthetic oligonucleotide
agcgaaaucauguugccaa

SEQ ID NO: 106780 - RNA, 19 nt, Artificial Sequence
  Description of Artificial Sequence: Synthetic oligonucleotide
uccgauacauaaaaccagu

SEQ ID NO: 106781 - RNA, 19 nt, Artificial Sequence
  Description of Artificial Sequence: Synthetic oligonucleotide
uuaguaaacuaaagcugca

SEQ ID NO: 106782 - RNA, 19 nt, Artificial Sequence
  Description of Artificial Sequence: Synthetic oligonucleotide
ugcuaagcccucuuuagug

SEQ ID NO: 106783 - RNA, 19 nt, Artificial Sequence
  Description of Artificial Sequence: Synthetic oligonucleotide
accuagucugagcugaggg

SEQ ID NO: 106784 - RNA, 19 nt, Artificial Sequence
  Description of Artificial Sequence: Synthetic oligonucleotide
gaggguaagccauuuuaag

SEQ ID NO: 106785 - RNA, 19 nt, Artificial Sequence
  Description of Artificial Sequence: Synthetic oligonucleotide
uggauacuuguguugaugu

SEQ ID NO: 106786 - RNA, 19 nt, Artificial Sequence
  Description of Artificial Sequence: Synthetic oligonucleotide
gaguaaagaggucagugga

SEQ ID NO: 106787 - RNA, 19 nt, Artificial Sequence
  Description of Artificial Sequence: Synthetic oligonucleotide
cuuauauucguauaacucu

SEQ ID NO: 106788 - RNA, 19 nt, Artificial Sequence
  Description of Artificial Sequence: Synthetic oligonucleotide
uggucuaggaucuuagguc

SEQ ID NO: 106789 - RNA, 19 nt, Artificial Sequence
  Description of Artificial Sequence: Synthetic oligonucleotide
aacgcuuguauuggugucg

SEQ ID NO: 106790 - RNA, 19 nt, Artificial Sequence
  Description of Artificial Sequence: Synthetic oligonucleotide
guauaacucugcuaagccc

SEQ ID NO: 106791 - RNA, 19 nt, Artificial Sequence
  Description of Artificial Sequence: Synthetic oligonucleotide
cauaggguaugcagaaggg

SEQ ID NO: 106792 - RNA, 19 nt, Artificial Sequence
  Description of Artificial Sequence: Synthetic oligonucleotide
uguguacuguagaugaguc

SEQ ID NO: 106793 - RNA, 19 nt, Artificial Sequence
  Description of Artificial Sequence: Synthetic oligonucleotide
gauuucucaucuauucgag

SEQ ID NO: 106794 - RNA, 19 nt, Artificial Sequence
  Description of Artificial Sequence: Synthetic oligonucleotide
uguacuguagaugagucuu

SEQ ID NO: 106795 - RNA, 19 nt, Artificial Sequence
  Description of Artificial Sequence: Synthetic oligonucleotide
auggaaccuagucugagcu

SEQ ID NO: 106796 - RNA, 19 nt, Artificial Sequence
  Description of Artificial Sequence: Synthetic oligonucleotide
aggacuucuagauuaguaa

SEQ ID NO: 106797 - RNA, 19 nt, Artificial Sequence
  Description of Artificial Sequence: Synthetic oligonucleotide
cauaccauaagacucaacu

SEQ ID NO: 106798 - RNA, 19 nt, Artificial Sequence
  Description of Artificial Sequence: Synthetic oligonucleotide
uccuuauaggaaauucacu

SEQ ID NO: 106799 - RNA, 19 nt, Artificial Sequence
  Description of Artificial Sequence: Synthetic oligonucleotide
acguggaguaguaaaauuc

SEQ ID NO: 106800 - RNA, 19 nt, Artificial Sequence
  Description of Artificial Sequence: Synthetic oligonucleotide
cucagaaggaacuauuaga

SEQ ID NO: 106801 - RNA, 19 nt, Artificial Sequence
  Description of Artificial Sequence: Synthetic oligonucleotide
aagacucaacuaggcaacc

SEQ ID NO: 106802 - RNA, 19 nt, Artificial Sequence
  Description of Artificial Sequence: Synthetic oligonucleotide
gaggauauuggucuggucu

SEQ ID NO: 106803 - RNA, 19 nt, Artificial Sequence
  Description of Artificial Sequence: Synthetic oligonucleotide
agaacgcuuguauuggugu

SEQ ID NO: 106804 - RNA, 19 nt, Artificial Sequence
  Description of Artificial Sequence: Synthetic oligonucleotide
gauuugguuccuuccauga

SEQ ID NO: 106805 - RNA, 19 nt, Artificial Sequence
  Description of Artificial Sequence: Synthetic oligonucleotide
uuaguugucucaugccaug

SEQ ID NO: 106806 - RNA, 19 nt, Artificial Sequence
  Description of Artificial Sequence: Synthetic oligonucleotide
cuauaggacuucuagauua

SEQ ID NO: 106807 - RNA, 19 nt, Artificial Sequence
  Description of Artificial Sequence: Synthetic oligonucleotide
uauguguacuguagaugag

SEQ ID NO: 106808 - RNA, 19 nt, Artificial Sequence
  Description of Artificial Sequence: Synthetic oligonucleotide
caucucaaucacccgaagg

SEQ ID NO: 106809 - RNA, 19 nt, Artificial Sequence
  Description of Artificial Sequence: Synthetic oligonucleotide
gagucuuagcugcaugaag

SEQ ID NO: 106810 - RNA, 19 nt, Artificial Sequence
  Description of Artificial Sequence: Synthetic oligonucleotide
uccgcaucugaauauuucu

SEQ ID NO: 106811 - RNA, 19 nt, Artificial Sequence
  Description of Artificial Sequence: Synthetic oligonucleotide
agugaucaaccaugacagc

SEQ ID NO: 106812 - RNA, 19 nt, Artificial Sequence
  Description of Artificial Sequence: Synthetic oligonucleotide
ugcaugaagguugcaauca

SEQ ID NO: 106813 - RNA, 19 nt, Artificial Sequence
  Description of Artificial Sequence: Synthetic oligonucleotide
auauucguauaacucugcu

SEQ ID NO: 106814 - RNA, 19 nt, Artificial Sequence
  Description of Artificial Sequence: Synthetic oligonucleotide
ggaucuuagguccuuuuag

SEQ ID NO: 106815 - RNA, 19 nt, Artificial Sequence
  Description of Artificial Sequence: Synthetic oligonucleotide
uccuaugugaauagcuauc

SEQ ID NO: 106816 - RNA, 19 nt, Artificial Sequence
  Description of Artificial Sequence: Synthetic oligonucleotide
auuaaugugaucaggccau

SEQ ID NO: 106817 - RNA, 19 nt, Artificial Sequence
  Description of Artificial Sequence: Synthetic oligonucleotide
accauaagacucaacuagg

SEQ ID NO: 106818 - RNA, 19 nt, Artificial Sequence
  Description of Artificial Sequence: Synthetic oligonucleotide
agaguaaagagcaauuuua

SEQ ID NO: 106819 - RNA, 19 nt, Artificial Sequence
  Description of Artificial Sequence: Synthetic oligonucleotide
uguugccaaugauacagcu

SEQ ID NO: 106820 - RNA, 19 nt, Artificial Sequence
  Description of Artificial Sequence: Synthetic oligonucleotide
uaggacuucuagauuagua

SEQ ID NO: 106821 - RNA, 19 nt, Artificial Sequence
  Description of Artificial Sequence: Synthetic oligonucleotide
guugaagugggaauacggc

SEQ ID NO: 106822 - RNA, 19 nt, Artificial Sequence
  Description of Artificial Sequence: Synthetic oligonucleotide
aucggguucaggauggcac

SEQ ID NO: 106823 - RNA, 19 nt, Artificial Sequence
  Description of Artificial Sequence: Synthetic oligonucleotide
ugucucaugccaugcauuc

SEQ ID NO: 106824 - RNA, 19 nt, Artificial Sequence
  Description of Artificial Sequence: Synthetic oligonucleotide
cuuguguugaugucaccac

SEQ ID NO: 106825 - RNA, 19 nt, Artificial Sequence
  Description of Artificial Sequence: Synthetic oligonucleotide
ucggguucaggauggcacg

SEQ ID NO: 106826 - RNA, 19 nt, Artificial Sequence
  Description of Artificial Sequence: Synthetic oligonucleotide
ucucggcgaaccaucugcg

SEQ ID NO: 106827 - RNA, 19 nt, Artificial Sequence
  Description of Artificial Sequence: Synthetic oligonucleotide
uauucguauaacucugcua

SEQ ID NO: 106828 - RNA, 19 nt, Artificial Sequence
  Description of Artificial Sequence: Synthetic oligonucleotide
uugcguagcacguuggcau

SEQ ID NO: 106829 - RNA, 19 nt, Artificial Sequence
  Description of Artificial Sequence: Synthetic oligonucleotide
uuuguguugucaagaccac

SEQ ID NO: 106830 - RNA, 19 nt, Artificial Sequence
  Description of Artificial Sequence: Synthetic oligonucleotide
uauaguuaaugcgaacuuu

SEQ ID NO: 106831 - RNA, 19 nt, Artificial Sequence
  Description of Artificial Sequence: Synthetic oligonucleotide
cucaacuaggcaaccuagc

SEQ ID NO: 106832 - RNA, 19 nt, Artificial Sequence
  Description of Artificial Sequence: Synthetic oligonucleotide
uggucccuugcguagcacg

SEQ ID NO: 106833 - RNA, 19 nt, Artificial Sequence
  Description of Artificial Sequence: Synthetic oligonucleotide
guagcuguugcuagcaggc

SEQ ID NO: 106834 - RNA, 19 nt, Artificial Sequence
  Description of Artificial Sequence: Synthetic oligonucleotide
aguaaagaggucaguggag

SEQ ID NO: 106835 - RNA, 19 nt, Artificial Sequence
  Description of Artificial Sequence: Synthetic oligonucleotide
aaaagauauggaaccuagu

SEQ ID NO: 106836 - RNA, 19 nt, Artificial Sequence
  Description of Artificial Sequence: Synthetic oligonucleotide
cuaaccuaagccacaguca

SEQ ID NO: 106837 - RNA, 19 nt, Artificial Sequence
  Description of Artificial Sequence: Synthetic oligonucleotide
aggucggucaucuugcuuu

SEQ ID NO: 106838 - RNA, 19 nt, Artificial Sequence
  Description of Artificial Sequence: Synthetic oligonucleotide
acuauuagaagaguuucua

SEQ ID NO: 106839 - RNA, 19 nt, Artificial Sequence
  Description of Artificial Sequence: Synthetic oligonucleotide
auuucucaucuauucgaga

SEQ ID NO: 106840 - RNA, 19 nt, Artificial Sequence
  Description of Artificial Sequence: Synthetic oligonucleotide
guccgauacauaaaaccag

SEQ ID NO: 106841 - RNA, 19 nt, Artificial Sequence
  Description of Artificial Sequence: Synthetic oligonucleotide
auagucgcaccauucucca

SEQ ID NO: 106842 - RNA, 19 nt, Artificial Sequence
  Description of Artificial Sequence: Synthetic oligonucleotide
gaucaauguggccagacau

SEQ ID NO: 106843 - RNA, 19 nt, Artificial Sequence
  Description of Artificial Sequence: Synthetic oligonucleotide
ucuuagguucaggaauaag

SEQ ID NO: 106844 - RNA, 19 nt, Artificial Sequence
  Description of Artificial Sequence: Synthetic oligonucleotide
uccuuuuaguuugcauagg

SEQ ID NO: 106845 - RNA, 19 nt, Artificial Sequence
  Description of Artificial Sequence: Synthetic oligonucleotide
cauuucacacuauaggacu

SEQ ID NO: 106846 - RNA, 19 nt, Artificial Sequence
  Description of Artificial Sequence: Synthetic oligonucleotide
gaaauugauaguggaugca

SEQ ID NO: 106847 - RNA, 19 nt, Artificial Sequence
  Description of Artificial Sequence: Synthetic oligonucleotide
acuauaggacuucuagauu

SEQ ID NO: 106848 - RNA, 19 nt, Artificial Sequence
  Description of Artificial Sequence: Synthetic oligonucleotide
uugcaaucagaaacugauc

SEQ ID NO: 106849 - RNA, 19 nt, Artificial Sequence
  Description of Artificial Sequence: Synthetic oligonucleotide
caacuaggcaaccuagcuc

SEQ ID NO: 106850 - RNA, 19 nt, Artificial Sequence
  Description of Artificial Sequence: Synthetic oligonucleotide
ggcacggacaucuuuacga

SEQ ID NO: 106851 - RNA, 19 nt, Artificial Sequence
  Description of Artificial Sequence: Synthetic oligonucleotide
guacacuaaccuaagccac

SEQ ID NO: 106852 - RNA, 19 nt, Artificial Sequence
  Description of Artificial Sequence: Synthetic oligonucleotide
acucaacuaggcaaccuag

SEQ ID NO: 106853 - RNA, 19 nt, Artificial Sequence
  Description of Artificial Sequence: Synthetic oligonucleotide
ucuuuacgaaugacauccu

SEQ ID NO: 106854 - RNA, 19 nt, Artificial Sequence
  Description of Artificial Sequence: Synthetic oligonucleotide
ucggcgaaccaucugcgau

SEQ ID NO: 106855 - RNA, 19 nt, Artificial Sequence
  Description of Artificial Sequence: Synthetic oligonucleotide
ugcgacuugugccaccaau

SEQ ID NO: 106856 - RNA, 19 nt, Artificial Sequence
  Description of Artificial Sequence: Synthetic oligonucleotide
aaaccggaggguaagccau

SEQ ID NO: 106857 - RNA, 19 nt, Artificial Sequence
  Description of Artificial Sequence: Synthetic oligonucleotide
gaaguagcuguugcuagca

SEQ ID NO: 106858 - RNA, 19 nt, Artificial Sequence
  Description of Artificial Sequence: Synthetic oligonucleotide
cucucucaacauaacucug

SEQ ID NO: 106859 - RNA, 19 nt, Artificial Sequence
  Description of Artificial Sequence: Synthetic oligonucleotide
gaauucucggcgaaccauc

SEQ ID NO: 106860 - RNA, 19 nt, Artificial Sequence
  Description of Artificial Sequence: Synthetic oligonucleotide
accguuacgaugguguuaa

SEQ ID NO: 106861 - RNA, 19 nt, Artificial Sequence
  Description of Artificial Sequence: Synthetic oligonucleotide
auaggguaugcagaagggu

SEQ ID NO: 106862 - RNA, 19 nt, Artificial Sequence
  Description of Artificial Sequence: Synthetic oligonucleotide
cugcaugaagguugcaauc

SEQ ID NO: 106863 - RNA, 19 nt, Artificial Sequence
  Description of Artificial Sequence: Synthetic oligonucleotide
gaacgcuuguauugguguc

SEQ ID NO: 106864 - RNA, 19 nt, Artificial Sequence
  Description of Artificial Sequence: Synthetic oligonucleotide
uauucgagaggcucccuuu

SEQ ID NO: 106865 - RNA, 19 nt, Artificial Sequence
  Description of Artificial Sequence: Synthetic oligonucleotide
gguuccuuccaugaugaag

SEQ ID NO: 106866 - RNA, 19 nt, Artificial Sequence
  Description of Artificial Sequence: Synthetic oligonucleotide
uaccuguugaagugggaau

SEQ ID NO: 106867 - RNA, 19 nt, Artificial Sequence
  Description of Artificial Sequence: Synthetic oligonucleotide
gguccuuuuaguuugcaua

SEQ ID NO: 106868 - RNA, 19 nt, Artificial Sequence
  Description of Artificial Sequence: Synthetic oligonucleotide
gaaauagcgaaaucauguu

SEQ ID NO: 106869 - RNA, 19 nt, Artificial Sequence
  Description of Artificial Sequence: Synthetic oligonucleotide
uugguuaaguuuggaggac

SEQ ID NO: 106870 - RNA, 19 nt, Artificial Sequence
  Description of Artificial Sequence: Synthetic oligonucleotide
caggaauaaggacggguuc

SEQ ID NO: 106871 - RNA, 19 nt, Artificial Sequence
  Description of Artificial Sequence: Synthetic oligonucleotide
auauggauguccagaagaa

SEQ ID NO: 106872 - RNA, 19 nt, Artificial Sequence
  Description of Artificial Sequence: Synthetic oligonucleotide
ugugcgacuugugccacca

SEQ ID NO: 106873 - RNA, 19 nt, Artificial Sequence
  Description of Artificial Sequence: Synthetic oligonucleotide
ggcuacuugggagauaaug

SEQ ID NO: 106874 - RNA, 19 nt, Artificial Sequence
  Description of Artificial Sequence: Synthetic oligonucleotide
caucacguggaguaguaaa

SEQ ID NO: 106875 - RNA, 19 nt, Artificial Sequence
  Description of Artificial Sequence: Synthetic oligonucleotide
ccaucugcgaugcuucugg

SEQ ID NO: 106876 - RNA, 19 nt, Artificial Sequence
  Description of Artificial Sequence: Synthetic oligonucleotide
gguguuaagggcagcauuc

SEQ ID NO: 106877 - RNA, 19 nt, Artificial Sequence
  Description of Artificial Sequence: Synthetic oligonucleotide
cagaacgaaucaccuguug

SEQ ID NO: 106878 - RNA, 19 nt, Artificial Sequence
  Description of Artificial Sequence: Synthetic oligonucleotide
gcuacuugggagauaauga

SEQ ID NO: 106879 - RNA, 19 nt, Artificial Sequence
  Description of Artificial Sequence: Synthetic oligonucleotide
uagcgaaaucauguugcca

SEQ ID NO: 106880 - RNA, 19 nt, Artificial Sequence
  Description of Artificial Sequence: Synthetic oligonucleotide
uguacaccguuacgauggu

SEQ ID NO: 106881 - RNA, 19 nt, Artificial Sequence
  Description of Artificial Sequence: Synthetic oligonucleotide
auuugcgacugcucuuuau

SEQ ID NO: 106882 - RNA, 19 nt, Artificial Sequence
  Description of Artificial Sequence: Synthetic oligonucleotide
ggaugcaguauuacugugc

SEQ ID NO: 106883 - RNA, 19 nt, Artificial Sequence
  Description of Artificial Sequence: Synthetic oligonucleotide
ggaucuuagguucaggaau

SEQ ID NO: 106884 - RNA, 19 nt, Artificial Sequence
  Description of Artificial Sequence: Synthetic oligonucleotide
auaacucugcuaagcccuc

SEQ ID NO: 106885 - RNA, 19 nt, Artificial Sequence
  Description of Artificial Sequence: Synthetic oligonucleotide
gggaauacggccuuugccu

SEQ ID NO: 106886 - RNA, 19 nt, Artificial Sequence
  Description of Artificial Sequence: Synthetic oligonucleotide
uucuggcauuucacaucgg

SEQ ID NO: 106887 - RNA, 19 nt, Artificial Sequence
  Description of Artificial Sequence: Synthetic oligonucleotide
aaucacccgaaggccucuc

SEQ ID NO: 106888 - RNA, 19 nt, Artificial Sequence
  Description of Artificial Sequence: Synthetic oligonucleotide
aucacguggaguaguaaaa

SEQ ID NO: 106889 - RNA, 19 nt, Artificial Sequence
  Description of Artificial Sequence: Synthetic oligonucleotide
ugaggauauuggucugguc

SEQ ID NO: 106890 - RNA, 19 nt, Artificial Sequence
  Description of Artificial Sequence: Synthetic oligonucleotide
uacuuguguugaugucacc

SEQ ID NO: 106891 - RNA, 19 nt, Artificial Sequence
  Description of Artificial Sequence: Synthetic oligonucleotide
cuuauaggaaauucacuuu

SEQ ID NO: 106892 - RNA, 19 nt, Artificial Sequence
  Description of Artificial Sequence: Synthetic oligonucleotide
agcuagacauuugagucuu

SEQ ID NO: 106893 - RNA, 19 nt, Artificial Sequence
  Description of Artificial Sequence: Synthetic oligonucleotide
cugucuagguuaaugcugu

SEQ ID NO: 106894 - RNA, 19 nt, Artificial Sequence
  Description of Artificial Sequence: Synthetic oligonucleotide
uguugcuagcaggcugucc

SEQ ID NO: 106895 - RNA, 19 nt, Artificial Sequence
  Description of Artificial Sequence: Synthetic oligonucleotide
guuuguguacugaggccug

SEQ ID NO: 106896 - RNA, 19 nt, Artificial Sequence
  Description of Artificial Sequence: Synthetic oligonucleotide
auucgagaggcucccuuuu

SEQ ID NO: 106897 - RNA, 19 nt, Artificial Sequence
  Description of Artificial Sequence: Synthetic oligonucleotide
ugcugaccgcuuuauucuc

SEQ ID NO: 106898 - RNA, 19 nt, Artificial Sequence
  Description of Artificial Sequence: Synthetic oligonucleotide
caaucauuguaaggugguc

SEQ ID NO: 106899 - RNA, 19 nt, Artificial Sequence
  Description of Artificial Sequence: Synthetic oligonucleotide
auuucacaucggacuguac

SEQ ID NO: 106900 - RNA, 19 nt, Artificial Sequence
  Description of Artificial Sequence: Synthetic oligonucleotide
aggcucucuaucugaaaua

SEQ ID NO: 106901 - RNA, 19 nt, Artificial Sequence
  Description of Artificial Sequence: Synthetic oligonucleotide
gaggaauugcugguuugga

SEQ ID NO: 106902 - RNA, 19 nt, Artificial Sequence
  Description of Artificial Sequence: Synthetic oligonucleotide
guuuagaagucuguacacu

SEQ ID NO: 106903 - RNA, 19 nt, Artificial Sequence
  Description of Artificial Sequence: Synthetic oligonucleotide
accguugucggagaauuuu

SEQ ID NO: 106904 - RNA, 19 nt, Artificial Sequence
  Description of Artificial Sequence: Synthetic oligonucleotide
guuaagggcagcauuccgu

SEQ ID NO: 106905 - RNA, 19 nt, Artificial Sequence
  Description of Artificial Sequence: Synthetic oligonucleotide
guaaccacuuagccacaca

SEQ ID NO: 106906 - RNA, 19 nt, Artificial Sequence
  Description of Artificial Sequence: Synthetic oligonucleotide
ccuuauaggaaauucacuu

SEQ ID NO: 106907 - RNA, 19 nt, Artificial Sequence
  Description of Artificial Sequence: Synthetic oligonucleotide
auuucacacuauaggacuu

SEQ ID NO: 106908 - RNA, 19 nt, Artificial Sequence
  Description of Artificial Sequence: Synthetic oligonucleotide
caagaucuucaauccgaga

SEQ ID NO: 106909 - RNA, 19 nt, Artificial Sequence
  Description of Artificial Sequence: Synthetic oligonucleotide
gcaugugcgacuugugcca

SEQ ID NO: 106910 - RNA, 19 nt, Artificial Sequence
  Description of Artificial Sequence: Synthetic oligonucleotide
cuuaucagauuugcuccca

SEQ ID NO: 106911 - RNA, 19 nt, Artificial Sequence
  Description of Artificial Sequence: Synthetic oligonucleotide
ggauacuuguguugauguc

SEQ ID NO: 106912 - RNA, 19 nt, Artificial Sequence
  Description of Artificial Sequence: Synthetic oligonucleotide
cguuacgaugguguuaagg

SEQ ID NO: 106913 - RNA, 19 nt, Artificial Sequence
  Description of Artificial Sequence: Synthetic oligonucleotide
guugucucaugccaugcau

SEQ ID NO: 106914 - RNA, 19 nt, Artificial Sequence
  Description of Artificial Sequence: Synthetic oligonucleotide
cuugcguagcacguuggca

SEQ ID NO: 106915 - RNA, 19 nt, Artificial Sequence
  Description of Artificial Sequence: Synthetic oligonucleotide
acaucggguucaggauggc

SEQ ID NO: 106916 - RNA, 19 nt, Artificial Sequence
  Description of Artificial Sequence: Synthetic oligonucleotide
ucuauucgagaggcucccu

SEQ ID NO: 106917 - RNA, 19 nt, Artificial Sequence
  Description of Artificial Sequence: Synthetic oligonucleotide
auccgacacaggugggccu

SEQ ID NO: 106918 - RNA, 19 nt, Artificial Sequence
  Description of Artificial Sequence: Synthetic oligonucleotide
acaccguuacgaugguguu

SEQ ID NO: 106919 - RNA, 19 nt, Artificial Sequence
  Description of Artificial Sequence: Synthetic oligonucleotide
guuggcauuggaguuuaua

SEQ ID NO: 106920 - RNA, 19 nt, Artificial Sequence
  Description of Artificial Sequence: Synthetic oligonucleotide
ugcguagcacguuggcauu

SEQ ID NO: 106921 - RNA, 19 nt, Artificial Sequence
  Description of Artificial Sequence: Synthetic oligonucleotide
ugcuucgagcuugguuaag

SEQ ID NO: 106922 - RNA, 19 nt, Artificial Sequence
  Description of Artificial Sequence: Synthetic oligonucleotide
cuccuaugugaauagcuau

SEQ ID NO: 106923 - RNA, 19 nt, Artificial Sequence
  Description of Artificial Sequence: Synthetic oligonucleotide
cacccgaaggccucucuca

SEQ ID NO: 106924 - RNA, 19 nt, Artificial Sequence
  Description of Artificial Sequence: Synthetic oligonucleotide
ggucuuuagaguccuuaua

SEQ ID NO: 106925 - RNA, 19 nt, Artificial Sequence
  Description of Artificial Sequence: Synthetic oligonucleotide
acgcuuguauuggugucga

SEQ ID NO: 106926 - RNA, 19 nt, Artificial Sequence
  Description of Artificial Sequence: Synthetic oligonucleotide
ggaacuauuagaagaguuu

SEQ ID NO: 106927 - RNA, 19 nt, Artificial Sequence
  Description of Artificial Sequence: Synthetic oligonucleotide
ggcgaaccaucugcgaugc

SEQ ID NO: 106928 - RNA, 19 nt, Artificial Sequence
  Description of Artificial Sequence: Synthetic oligonucleotide
caugugcgacuugugccac

SEQ ID NO: 106929 - RNA, 19 nt, Artificial Sequence
  Description of Artificial Sequence: Synthetic oligonucleotide
guacagcauugucucgguc

SEQ ID NO: 106930 - RNA, 19 nt, Artificial Sequence
  Description of Artificial Sequence: Synthetic oligonucleotide
ugucuagguuaaugcuguu

SEQ ID NO: 106931 - RNA, 19 nt, Artificial Sequence
  Description of Artificial Sequence: Synthetic oligonucleotide
cauuucacaucggacugua

SEQ ID NO: 106932 - RNA, 19 nt, Artificial Sequence
  Description of Artificial Sequence: Synthetic oligonucleotide
guuaccuguugaaguggga

SEQ ID NO: 106933 - RNA, 19 nt, Artificial Sequence
  Description of Artificial Sequence: Synthetic oligonucleotide
ccggaucuuagguucagga

SEQ ID NO: 106934 - RNA, 19 nt, Artificial Sequence
  Description of Artificial Sequence: Synthetic oligonucleotide
guacaccguuacgauggug

SEQ ID NO: 106935 - RNA, 19 nt, Artificial Sequence
  Description of Artificial Sequence: Synthetic oligonucleotide
gcuaagcccucuuuagugu

SEQ ID NO: 106936 - RNA, 19 nt, Artificial Sequence
  Description of Artificial Sequence: Synthetic oligonucleotide
acagaacgaaucaccuguu

SEQ ID NO: 106937 - RNA, 19 nt, Artificial Sequence
  Description of Artificial Sequence: Synthetic oligonucleotide
cagcauuccguacagcauu

SEQ ID NO: 106938 - RNA, 19 nt, Artificial Sequence
  Description of Artificial Sequence: Synthetic oligonucleotide
gauauuggucuggucugau

SEQ ID NO: 106939 - RNA, 19 nt, Artificial Sequence
  Description of Artificial Sequence: Synthetic oligonucleotide
ccaagugaucaaccaugac

SEQ ID NO: 106940 - RNA, 19 nt, Artificial Sequence
  Description of Artificial Sequence: Synthetic oligonucleotide
acguuggcauuggaguuua

SEQ ID NO: 106941 - RNA, 19 nt, Artificial Sequence
  Description of Artificial Sequence: Synthetic oligonucleotide
cucggcgaaccaucugcga

SEQ ID NO: 106942 - RNA, 19 nt, Artificial Sequence
  Description of Artificial Sequence: Synthetic oligonucleotide
cacguggaguaguaaaauu

SEQ ID NO: 106943 - RNA, 19 nt, Artificial Sequence
  Description of Artificial Sequence: Synthetic oligonucleotide
uggaagccucccgggccag

SEQ ID NO: 106944 - RNA, 19 nt, Artificial Sequence
  Description of Artificial Sequence: Synthetic oligonucleotide
guacuguagaugagucuua

SEQ ID NO: 106945 - RNA, 19 nt, Artificial Sequence
  Description of Artificial Sequence: Synthetic oligonucleotide
guagacagauggccccacu

SEQ ID NO: 106946 - RNA, 19 nt, Artificial Sequence
  Description of Artificial Sequence: Synthetic oligonucleotide
cuuggauacuuguguugau

SEQ ID NO: 106947 - RNA, 19 nt, Artificial Sequence
  Description of Artificial Sequence: Synthetic oligonucleotide
cuauucgagaggcucccuu

SEQ ID NO: 106948 - RNA, 19 nt, Artificial Sequence
  Description of Artificial Sequence: Synthetic oligonucleotide
gggucuuuagaguccuuau

SEQ ID NO: 106949 - RNA, 19 nt, Artificial Sequence
  Description of Artificial Sequence: Synthetic oligonucleotide
accggaggguaagccauuu

SEQ ID NO: 106950 - RNA, 19 nt, Artificial Sequence
  Description of Artificial Sequence: Synthetic oligonucleotide
ggaauacggccuuugccuu

SEQ ID NO: 106951 - RNA, 19 nt, Artificial Sequence
  Description of Artificial Sequence: Synthetic oligonucleotide
cuguugcuagcaggcuguc

SEQ ID NO: 106952 - RNA, 19 nt, Artificial Sequence
  Description of Artificial Sequence: Synthetic oligonucleotide
cguagcacguuggcauugg

SEQ ID NO: 106953 - RNA, 19 nt, Artificial Sequence
  Description of Artificial Sequence: Synthetic oligonucleotide
gcguagcacguuggcauug

SEQ ID NO: 106954 - RNA, 19 nt, Artificial Sequence
  Description of Artificial Sequence: Synthetic oligonucleotide
guacaguagagggucucuu

SEQ ID NO: 106955 - RNA, 19 nt, Artificial Sequence
  Description of Artificial Sequence: Synthetic oligonucleotide
acuggcuacuugggagaua

SEQ ID NO: 106956 - RNA, 19 nt, Artificial Sequence
  Description of Artificial Sequence: Synthetic oligonucleotide
caccguuacgaugguguua

SEQ ID NO: 106957 - RNA, 19 nt, Artificial Sequence
  Description of Artificial Sequence: Synthetic oligonucleotide
caggcaauagucgcaccau

SEQ ID NO: 106958 - RNA, 19 nt, Artificial Sequence
  Description of Artificial Sequence: Synthetic oligonucleotide
gcgaaaucauguugccaau

SEQ ID NO: 106959 - RNA, 19 nt, Artificial Sequence
  Description of Artificial Sequence: Synthetic oligonucleotide
ggucccuugcguagcacgu

SEQ ID NO: 106960 - RNA, 19 nt, Artificial Sequence
  Description of Artificial Sequence: Synthetic oligonucleotide
cucggucuccuaugugaau

SEQ ID NO: 106961 - RNA, 19 nt, Artificial Sequence
  Description of Artificial Sequence: Synthetic oligonucleotide
gugucagagcuuggauacu

SEQ ID NO: 106962 - RNA, 19 nt, Artificial Sequence
  Description of Artificial Sequence: Synthetic oligonucleotide
gcugaccgcuuuauucucu

SEQ ID NO: 106963 - RNA, 19 nt, Artificial Sequence
  Description of Artificial Sequence: Synthetic oligonucleotide
gugcgacuugugccaccaa

SEQ ID NO: 106964 - RNA, 19 nt, Artificial Sequence
  Description of Artificial Sequence: Synthetic oligonucleotide
ccguuacgaugguguuaag

SEQ ID NO: 106965 - RNA, 19 nt, Artificial Sequence
  Description of Artificial Sequence: Synthetic oligonucleotide
cacaccguugucggagaau

SEQ ID NO: 106966 - RNA, 19 nt, Artificial Sequence
  Description of Artificial Sequence: Synthetic oligonucleotide
ccgacacaggugggccucc

SEQ ID NO: 106967 - RNA, 19 nt, Artificial Sequence
  Description of Artificial Sequence: Synthetic oligonucleotide
gucccuugcguagcacguu

SEQ ID NO: 106968 - RNA, 19 nt, Artificial Sequence
  Description of Artificial Sequence: Synthetic oligonucleotide
ccacaccguugucggagaa

SEQ ID NO: 106969 - RNA, 19 nt, Artificial Sequence
  Description of Artificial Sequence: Synthetic oligonucleotide
cgcuuguauuggugucgaa

SEQ ID NO: 106970 - RNA, 19 nt, Artificial Sequence
  Description of Artificial Sequence: Synthetic oligonucleotide
gcgaaccaucugcgaugcu

SEQ ID NO: 106971 - RNA, 19 nt, Artificial Sequence
  Description of Artificial Sequence: Synthetic oligonucleotide
ccggaggguaagccauuuu

SEQ ID NO: 106972 - RNA, 19 nt, Artificial Sequence
  Description of Artificial Sequence: Synthetic oligonucleotide
auacauaugaaauuccugc

SEQ ID NO: 106973 - RNA, 19 nt, Artificial Sequence
  Description of Artificial Sequence: Synthetic oligonucleotide
agaguaauuacugugauac

SEQ ID NO: 106974 - RNA, 19 nt, Artificial Sequence
  Description of Artificial Sequence: Synthetic oligonucleotide
aauaugauauaucaaagau

SEQ ID NO: 106975 - RNA, 19 nt, Artificial Sequence
  Description of Artificial Sequence: Synthetic oligonucleotide
aaguuugcugaaucgaugc

SEQ ID NO: 106976 - RNA, 19 nt, Artificial Sequence
  Description of Artificial Sequence: Synthetic oligonucleotide
gaaauaguuaaguuuacgc

SEQ ID NO: 106977 - RNA, 19 nt, Artificial Sequence
  Description of Artificial Sequence: Synthetic oligonucleotide
ugacaagucagguaaagcg

SEQ ID NO: 106978 - RNA, 19 nt, Artificial Sequence
  Description of Artificial Sequence: Synthetic oligonucleotide
acauuuaaacaacugcacc

SEQ ID NO: 106979 - RNA, 19 nt, Artificial Sequence
  Description of Artificial Sequence: Synthetic oligonucleotide
aagaccgggaaguacagcg

SEQ ID NO: 106980 - RNA, 19 nt, Artificial Sequence
  Description of Artificial Sequence: Synthetic oligonucleotide
auagagaauuccuaaacuc

SEQ ID NO: 106981 - RNA, 19 nt, Artificial Sequence
  Description of Artificial Sequence: Synthetic oligonucleotide
aagacuacugucuucacca

SEQ ID NO: 106982 - RNA, 19 nt, Artificial Sequence
  Description of Artificial Sequence: Synthetic oligonucleotide
uuaagcuccacguauacug

SEQ ID NO: 106983 - RNA, 19 nt, Artificial Sequence
  Description of Artificial Sequence: Synthetic oligonucleotide
uguuacaugauuaugccuc

SEQ ID NO: 106984 - RNA, 19 nt, Artificial Sequence
  Description of Artificial Sequence: Synthetic oligonucleotide
uggaaugcugaguagauag

SEQ ID NO: 106985 - RNA, 19 nt, Artificial Sequence
  Description of Artificial Sequence: Synthetic oligonucleotide
uuuagagacguguuguggg

SEQ ID NO: 106986 - RNA, 19 nt, Artificial Sequence
  Description of Artificial Sequence: Synthetic oligonucleotide
aauuccuaaacuccgauua

SEQ ID NO: 106987 - RNA, 19 nt, Artificial Sequence
  Description of Artificial Sequence: Synthetic oligonucleotide
augauuaugccucgggagc

SEQ ID NO: 106988 - RNA, 19 nt, Artificial Sequence
  Description of Artificial Sequence: Synthetic oligonucleotide
ucugcggucaccauuuccg

SEQ ID NO: 106989 - RNA, 19 nt, Artificial Sequence
  Description of Artificial Sequence: Synthetic oligonucleotide
aguuuaaauccacagaccu

SEQ ID NO: 106990 - RNA, 19 nt, Artificial Sequence
  Description of Artificial Sequence: Synthetic oligonucleotide
uuuaggguaguuaacaauu

SEQ ID NO: 106991 - RNA, 19 nt, Artificial Sequence
  Description of Artificial Sequence: Synthetic oligonucleotide
guaacaaacaucacuaagc

SEQ ID NO: 106992 - RNA, 19 nt, Artificial Sequence
  Description of Artificial Sequence: Synthetic oligonucleotide
ugaaauuccugccuaaaau

SEQ ID NO: 106993 - RNA, 19 nt, Artificial Sequence
  Description of Artificial Sequence: Synthetic oligonucleotide
ucacuauccacuaacaguu

SEQ ID NO: 106994 - RNA, 19 nt, Artificial Sequence
  Description of Artificial Sequence: Synthetic oligonucleotide
uuuccucuaacugugugcg

SEQ ID NO: 106995 - RNA, 19 nt, Artificial Sequence
  Description of Artificial Sequence: Synthetic oligonucleotide
auaugauauaucaaagauc

SEQ ID NO: 106996 - RNA, 19 nt, Artificial Sequence
  Description of Artificial Sequence: Synthetic oligonucleotide
cauguuacaugauuaugcc

SEQ ID NO: 106997 - RNA, 19 nt, Artificial Sequence
  Description of Artificial Sequence: Synthetic oligonucleotide
cuagcaaugauguggacuc

SEQ ID NO: 106998 - RNA, 19 nt, Artificial Sequence
  Description of Artificial Sequence: Synthetic oligonucleotide
uccugccuaaaauacaugc

SEQ ID NO: 106999 - RNA, 19 nt, Artificial Sequence
  Description of Artificial Sequence: Synthetic oligonucleotide
uacauaugaaauuccugcc

SEQ ID NO: 107000 - RNA, 19 nt, Artificial Sequence
  Description of Artificial Sequence: Synthetic oligonucleotide
ucgguaacaaacaucacua

SEQ ID NO: 107001 - RNA, 19 nt, Artificial Sequence
  Description of Artificial Sequence: Synthetic oligonucleotide
gaauugucaagaugagucc

SEQ ID NO: 107002 - RNA, 19 nt, Artificial Sequence
  Description of Artificial Sequence: Synthetic oligonucleotide
agucguacguacucugugc

SEQ ID NO: 107003 - RNA, 19 nt, Artificial Sequence
  Description of Artificial Sequence: Synthetic oligonucleotide
cuauauugaaauaguuaag

SEQ ID NO: 107004 - RNA, 19 nt, Artificial Sequence
  Description of Artificial Sequence: Synthetic oligonucleotide
gagucuagagcaucuaagc

SEQ ID NO: 107005 - RNA, 19 nt, Artificial Sequence
  Description of Artificial Sequence: Synthetic oligonucleotide
caugauuaugccucgggag

SEQ ID NO: 107006 - RNA, 19 nt, Artificial Sequence
  Description of Artificial Sequence: Synthetic oligonucleotide
uacaagggauacuucagcc

SEQ ID NO: 107007 - RNA, 19 nt, Artificial Sequence
  Description of Artificial Sequence: Synthetic oligonucleotide
uuaaaguuugcugaaucga

SEQ ID NO: 107008 - RNA, 19 nt, Artificial Sequence
  Description of Artificial Sequence: Synthetic oligonucleotide
caagggauacuucagccgg

SEQ ID NO: 107009 - RNA, 19 nt, Artificial Sequence
  Description of Artificial Sequence: Synthetic oligonucleotide
auagguaaggcucccacca

SEQ ID NO: 107010 - RNA, 19 nt, Artificial Sequence
  Description of Artificial Sequence: Synthetic oligonucleotide
uaagacuacugucuucacc

SEQ ID NO: 107011 - RNA, 19 nt, Artificial Sequence
  Description of Artificial Sequence: Synthetic oligonucleotide
ucuaagcugcauaucuucc

SEQ ID NO: 107012 - RNA, 19 nt, Artificial Sequence
  Description of Artificial Sequence: Synthetic oligonucleotide
gagaccacgagacuccucc

SEQ ID NO: 107013 - RNA, 19 nt, Artificial Sequence
  Description of Artificial Sequence: Synthetic oligonucleotide
acgucuacgcacaacauac

SEQ ID NO: 107014 - RNA, 19 nt, Artificial Sequence
  Description of Artificial Sequence: Synthetic oligonucleotide
uuaggauguaacuaccaaa

SEQ ID NO: 107015 - RNA, 19 nt, Artificial Sequence
  Description of Artificial Sequence: Synthetic oligonucleotide
cuugcaaucccacaucaac

SEQ ID NO: 107016 - RNA, 19 nt, Artificial Sequence
  Description of Artificial Sequence: Synthetic oligonucleotide
aaugagcuguggcuagcac

SEQ ID NO: 107017 - RNA, 19 nt, Artificial Sequence
  Description of Artificial Sequence: Synthetic oligonucleotide
cauacauaugaaauuccug

SEQ ID NO: 107018 - RNA, 19 nt, Artificial Sequence
  Description of Artificial Sequence: Synthetic oligonucleotide
uauucacuauccacuaaca

SEQ ID NO: 107019 - RNA, 19 nt, Artificial Sequence
  Description of Artificial Sequence: Synthetic oligonucleotide
ggagauuuugccuaaacuc

SEQ ID NO: 107020 - RNA, 19 nt, Artificial Sequence
  Description of Artificial Sequence: Synthetic oligonucleotide
uccuaaacuccgauuagca

SEQ ID NO: 107021 - RNA, 19 nt, Artificial Sequence
  Description of Artificial Sequence: Synthetic oligonucleotide
auaggagaccacgagacuc

SEQ ID NO: 107022 - RNA, 19 nt, Artificial Sequence
  Description of Artificial Sequence: Synthetic oligonucleotide
cacauuuaaacaacugcac

SEQ ID NO: 107023 - RNA, 19 nt, Artificial Sequence
  Description of Artificial Sequence: Synthetic oligonucleotide
acaaguaucuuuaggguag

SEQ ID NO: 107024 - RNA, 19 nt, Artificial Sequence
  Description of Artificial Sequence: Synthetic oligonucleotide
uugcaaucccacaucaaca

SEQ ID NO: 107025 - RNA, 19 nt, Artificial Sequence
  Description of Artificial Sequence: Synthetic oligonucleotide
acauaugaaauuccugccu

SEQ ID NO: 107026 - RNA, 19 nt, Artificial Sequence
  Description of Artificial Sequence: Synthetic oligonucleotide
guuacaugauuaugccucg

SEQ ID NO: 107027 - RNA, 19 nt, Artificial Sequence
  Description of Artificial Sequence: Synthetic oligonucleotide
uuguaugugguccacguuu

SEQ ID NO: 107028 - RNA, 19 nt, Artificial Sequence
  Description of Artificial Sequence: Synthetic oligonucleotide
uucacuuagccauucuacu

SEQ ID NO: 107029 - RNA, 19 nt, Artificial Sequence
  Description of Artificial Sequence: Synthetic oligonucleotide
gugacuagacuucuucagg

SEQ ID NO: 107030 - RNA, 19 nt, Artificial Sequence
  Description of Artificial Sequence: Synthetic oligonucleotide
ucacuuagccauucuacug

SEQ ID NO: 107031 - RNA, 19 nt, Artificial Sequence
  Description of Artificial Sequence: Synthetic oligonucleotide
auuuagagacguguugugg

SEQ ID NO: 107032 - RNA, 19 nt, Artificial Sequence
  Description of Artificial Sequence: Synthetic oligonucleotide
gaaauuccugccuaaaaua

SEQ ID NO: 107033 - RNA, 19 nt, Artificial Sequence
  Description of Artificial Sequence: Synthetic oligonucleotide
ucuagcaaugauguggacu

SEQ ID NO: 107034 - RNA, 19 nt, Artificial Sequence
  Description of Artificial Sequence: Synthetic oligonucleotide
ucuaaagaucuguacaguu

SEQ ID NO: 107035 - RNA, 19 nt, Artificial Sequence
  Description of Artificial Sequence: Synthetic oligonucleotide
caucacuccuuguaugugg

SEQ ID NO: 107036 - RNA, 19 nt, Artificial Sequence
  Description of Artificial Sequence: Synthetic oligonucleotide
ggaauugucaagaugaguc

SEQ ID NO: 107037 - RNA, 19 nt, Artificial Sequence
  Description of Artificial Sequence: Synthetic oligonucleotide
aacaauuuggacagcauuu

SEQ ID NO: 107038 - RNA, 19 nt, Artificial Sequence
  Description of Artificial Sequence: Synthetic oligonucleotide
uaacggaauugucaagaug

SEQ ID NO: 107039 - RNA, 19 nt, Artificial Sequence
  Description of Artificial Sequence: Synthetic oligonucleotide
aacuauggucuaaaugguc

SEQ ID NO: 107040 - RNA, 19 nt, Artificial Sequence
  Description of Artificial Sequence: Synthetic oligonucleotide
uacagcgcaaagauuggca

SEQ ID NO: 107041 - RNA, 19 nt, Artificial Sequence
  Description of Artificial Sequence: Synthetic oligonucleotide
caucuaagcauguuacaug

SEQ ID NO: 107042 - RNA, 19 nt, Artificial Sequence
  Description of Artificial Sequence: Synthetic oligonucleotide
agcauuaagacuacugucu

SEQ ID NO: 107043 - RNA, 19 nt, Artificial Sequence
  Description of Artificial Sequence: Synthetic oligonucleotide
aggagauuuugccuaaacu

SEQ ID NO: 107044 - RNA, 19 nt, Artificial Sequence
  Description of Artificial Sequence: Synthetic oligonucleotide
ucugucaacuggcauggcu

SEQ ID NO: 107045 - RNA, 19 nt, Artificial Sequence
  Description of Artificial Sequence: Synthetic oligonucleotide
aacggcgaagauguguggg

SEQ ID NO: 107046 - RNA, 19 nt, Artificial Sequence
  Description of Artificial Sequence: Synthetic oligonucleotide
agucuagagcaucuaagca

SEQ ID NO: 107047 - RNA, 19 nt, Artificial Sequence
  Description of Artificial Sequence: Synthetic oligonucleotide
auuaggauguaacuaccaa

SEQ ID NO: 107048 - RNA, 19 nt, Artificial Sequence
  Description of Artificial Sequence: Synthetic oligonucleotide
aguagauaguccaaaguga

SEQ ID NO: 107049 - RNA, 19 nt, Artificial Sequence
  Description of Artificial Sequence: Synthetic oligonucleotide
aaucgaugcuccaucagcu

SEQ ID NO: 107050 - RNA, 19 nt, Artificial Sequence
  Description of Artificial Sequence: Synthetic oligonucleotide
ucuauguaacgagucaacu

SEQ ID NO: 107051 - RNA, 19 nt, Artificial Sequence
  Description of Artificial Sequence: Synthetic oligonucleotide
auuccuaaacuccgauuag

SEQ ID NO: 107052 - RNA, 19 nt, Artificial Sequence
  Description of Artificial Sequence: Synthetic oligonucleotide
agagcaaguucaucuagca

SEQ ID NO: 107053 - RNA, 19 nt, Artificial Sequence
  Description of Artificial Sequence: Synthetic oligonucleotide
uccacguauacugcaaacc

SEQ ID NO: 107054 - RNA, 19 nt, Artificial Sequence
  Description of Artificial Sequence: Synthetic oligonucleotide
acggcgaagaugugugggc

SEQ ID NO: 107055 - RNA, 19 nt, Artificial Sequence
  Description of Artificial Sequence: Synthetic oligonucleotide
agccggaacaacauucugc

SEQ ID NO: 107056 - RNA, 19 nt, Artificial Sequence
  Description of Artificial Sequence: Synthetic oligonucleotide
guagauaguccaaagugac

SEQ ID NO: 107057 - RNA, 19 nt, Artificial Sequence
  Description of Artificial Sequence: Synthetic oligonucleotide
aaggcucccaccaaagucu

SEQ ID NO: 107058 - RNA, 19 nt, Artificial Sequence
  Description of Artificial Sequence: Synthetic oligonucleotide
ugcccagagacaaguaucu

SEQ ID NO: 107059 - RNA, 19 nt, Artificial Sequence
  Description of Artificial Sequence: Synthetic oligonucleotide
uagucguacguacucugug

SEQ ID NO: 107060 - RNA, 19 nt, Artificial Sequence
  Description of Artificial Sequence: Synthetic oligonucleotide
acaaccguugccugcagca

SEQ ID NO: 107061 - RNA, 19 nt, Artificial Sequence
  Description of Artificial Sequence: Synthetic oligonucleotide
gguaguuaacaauuuggac

SEQ ID NO: 107062 - RNA, 19 nt, Artificial Sequence
  Description of Artificial Sequence: Synthetic oligonucleotide
cauagguaaggcucccacc

SEQ ID NO: 107063 - RNA, 19 nt, Artificial Sequence
  Description of Artificial Sequence: Synthetic oligonucleotide
gacuauauugaaauaguua

SEQ ID NO: 107064 - RNA, 19 nt, Artificial Sequence
  Description of Artificial Sequence: Synthetic oligonucleotide
aaccuaugcacucucucuu

SEQ ID NO: 107065 - RNA, 19 nt, Artificial Sequence
  Description of Artificial Sequence: Synthetic oligonucleotide
uggcacagaacaaccguug

SEQ ID NO: 107066 - RNA, 19 nt, Artificial Sequence
  Description of Artificial Sequence: Synthetic oligonucleotide
uccgauuagcaccauucaa

SEQ ID NO: 107067 - RNA, 19 nt, Artificial Sequence
  Description of Artificial Sequence: Synthetic oligonucleotide
cauaaccuguggcugugcg

SEQ ID NO: 107068 - RNA, 19 nt, Artificial Sequence
  Description of Artificial Sequence: Synthetic oligonucleotide
agucaacuuauuggcagac

SEQ ID NO: 107069 - RNA, 19 nt, Artificial Sequence
  Description of Artificial Sequence: Synthetic oligonucleotide
auugucaagaugaguccac

SEQ ID NO: 107070 - RNA, 19 nt, Artificial Sequence
  Description of Artificial Sequence: Synthetic oligonucleotide
ucucguaagccuugcaauc

SEQ ID NO: 107071 - RNA, 19 nt, Artificial Sequence
  Description of Artificial Sequence: Synthetic oligonucleotide
aaacucuagcugacuggcc

SEQ ID NO: 107072 - RNA, 19 nt, Artificial Sequence
  Description of Artificial Sequence: Synthetic oligonucleotide
agacgcuacuguaaacugc

SEQ ID NO: 107073 - RNA, 19 nt, Artificial Sequence
  Description of Artificial Sequence: Synthetic oligonucleotide
cuuauuggcagacacuaaa

SEQ ID NO: 107074 - RNA, 19 nt, Artificial Sequence
  Description of Artificial Sequence: Synthetic oligonucleotide
cauaacggaauugucaaga

SEQ ID NO: 107075 - RNA, 19 nt, Artificial Sequence
  Description of Artificial Sequence: Synthetic oligonucleotide
cauagucguacguacucug

SEQ ID NO: 107076 - RNA, 19 nt, Artificial Sequence
  Description of Artificial Sequence: Synthetic oligonucleotide
ucuacgcacaacauaccua

SEQ ID NO: 107077 - RNA, 19 nt, Artificial Sequence
  Description of Artificial Sequence: Synthetic oligonucleotide
uuaggguaguuaacaauuu

SEQ ID NO: 107078 - RNA, 19 nt, Artificial Sequence
  Description of Artificial Sequence: Synthetic oligonucleotide
agcgugaaagcaaggacuc

SEQ ID NO: 107079 - RNA, 19 nt, Artificial Sequence
  Description of Artificial Sequence: Synthetic oligonucleotide
aucaacagacggaaggaag

SEQ ID NO: 107080 - RNA, 19 nt, Artificial Sequence
  Description of Artificial Sequence: Synthetic oligonucleotide
uggugcuacgucuacgcac

SEQ ID NO: 107081 - RNA, 19 nt, Artificial Sequence
  Description of Artificial Sequence: Synthetic oligonucleotide
auccacuaacaguuuaacu

SEQ ID NO: 107082 - RNA, 19 nt, Artificial Sequence
  Description of Artificial Sequence: Synthetic oligonucleotide
cacguauacugcaaaccac

SEQ ID NO: 107083 - RNA, 19 nt, Artificial Sequence
  Description of Artificial Sequence: Synthetic oligonucleotide
cuacgcacaacauaccuaa

SEQ ID NO: 107084 - RNA, 19 nt, Artificial Sequence
  Description of Artificial Sequence: Synthetic oligonucleotide
uguuagcauuuagagacgu

SEQ ID NO: 107085 - RNA, 19 nt, Artificial Sequence
  Description of Artificial Sequence: Synthetic oligonucleotide
uacgucuacgcacaacaua

SEQ ID NO: 107086 - RNA, 19 nt, Artificial Sequence
  Description of Artificial Sequence: Synthetic oligonucleotide
cuuacugcgcugucugcag

SEQ ID NO: 107087 - RNA, 19 nt, Artificial Sequence
  Description of Artificial Sequence: Synthetic oligonucleotide
accacgagacuccuccauc

SEQ ID NO: 107088 - RNA, 19 nt, Artificial Sequence
  Description of Artificial Sequence: Synthetic oligonucleotide
auaacggaauugucaagau

SEQ ID NO: 107089 - RNA, 19 nt, Artificial Sequence
  Description of Artificial Sequence: Synthetic oligonucleotide
cauaggcccaggaagccug

SEQ ID NO: 107090 - RNA, 19 nt, Artificial Sequence
  Description of Artificial Sequence: Synthetic oligonucleotide
caucuagcaaugaugugga

SEQ ID NO: 107091 - RNA, 19 nt, Artificial Sequence
  Description of Artificial Sequence: Synthetic oligonucleotide
acaagucagguaaagcgug

SEQ ID NO: 107092 - RNA, 19 nt, Artificial Sequence
  Description of Artificial Sequence: Synthetic oligonucleotide
uguaugugguccacguuuu

SEQ ID NO: 107093 - RNA, 19 nt, Artificial Sequence
  Description of Artificial Sequence: Synthetic oligonucleotide
cuguucaaggcauaacgga

SEQ ID NO: 107094 - RNA, 19 nt, Artificial Sequence
  Description of Artificial Sequence: Synthetic oligonucleotide
cagaacaaccguugccugc

SEQ ID NO: 107095 - RNA, 19 nt, Artificial Sequence
  Description of Artificial Sequence: Synthetic oligonucleotide
uucugcggucaccauuucc

SEQ ID NO: 107096 - RNA, 19 nt, Artificial Sequence
  Description of Artificial Sequence: Synthetic oligonucleotide
ucgagcaguuuuaaaguuu

SEQ ID NO: 107097 - RNA, 19 nt, Artificial Sequence
  Description of Artificial Sequence: Synthetic oligonucleotide
uguaggagauuuugccuaa

SEQ ID NO: 107098 - RNA, 19 nt, Artificial Sequence
  Description of Artificial Sequence: Synthetic oligonucleotide
cauuaagacuacugucuuc

SEQ ID NO: 107099 - RNA, 19 nt, Artificial Sequence
  Description of Artificial Sequence: Synthetic oligonucleotide
uaguuaaguuuacgcuuug

SEQ ID NO: 107100 - RNA, 19 nt, Artificial Sequence
  Description of Artificial Sequence: Synthetic oligonucleotide
caucagaguccguuaaauc

SEQ ID NO: 107101 - RNA, 19 nt, Artificial Sequence
  Description of Artificial Sequence: Synthetic oligonucleotide
cucguaagccuugcaaucc

SEQ ID NO: 107102 - RNA, 19 nt, Artificial Sequence
  Description of Artificial Sequence: Synthetic oligonucleotide
gucgguaacaaacaucacu

SEQ ID NO: 107103 - RNA, 19 nt, Artificial Sequence
  Description of Artificial Sequence: Synthetic oligonucleotide
acguguugugggaagaaag

SEQ ID NO: 107104 - RNA, 19 nt, Artificial Sequence
  Description of Artificial Sequence: Synthetic oligonucleotide
aguucacuuagccauucua

SEQ ID NO: 107105 - RNA, 19 nt, Artificial Sequence
  Description of Artificial Sequence: Synthetic oligonucleotide
uucgagcaguuuuaaaguu

SEQ ID NO: 107106 - RNA, 19 nt, Artificial Sequence
  Description of Artificial Sequence: Synthetic oligonucleotide
uuauuaaggcacucauguu

SEQ ID NO: 107107 - RNA, 19 nt, Artificial Sequence
  Description of Artificial Sequence: Synthetic oligonucleotide
ggguaaaccacagggacag

SEQ ID NO: 107108 - RNA, 19 nt, Artificial Sequence
  Description of Artificial Sequence: Synthetic oligonucleotide
uauggucuaaauggucuac

SEQ ID NO: 107109 - RNA, 19 nt, Artificial Sequence
  Description of Artificial Sequence: Synthetic oligonucleotide
acagaacaaccguugccug

SEQ ID NO: 107110 - RNA, 19 nt, Artificial Sequence
  Description of Artificial Sequence: Synthetic oligonucleotide
agcaucuaagcauguuaca

SEQ ID NO: 107111 - RNA, 19 nt, Artificial Sequence
  Description of Artificial Sequence: Synthetic oligonucleotide
uggucuaaauggucuacau

SEQ ID NO: 107112 - RNA, 19 nt, Artificial Sequence
  Description of Artificial Sequence: Synthetic oligonucleotide
ucaaggcauaacggaauug

SEQ ID NO: 107113 - RNA, 19 nt, Artificial Sequence
  Description of Artificial Sequence: Synthetic oligonucleotide
cagacgcuacuguaaacug

SEQ ID NO: 107114 - RNA, 19 nt, Artificial Sequence
  Description of Artificial Sequence: Synthetic oligonucleotide
uuaaugagcuguggcuagc

SEQ ID NO: 107115 - RNA, 19 nt, Artificial Sequence
  Description of Artificial Sequence: Synthetic oligonucleotide
cauaugaaauuccugccua

SEQ ID NO: 107116 - RNA, 19 nt, Artificial Sequence
  Description of Artificial Sequence: Synthetic oligonucleotide
cagcguucaagagugcugc

SEQ ID NO: 107117 - RNA, 19 nt, Artificial Sequence
  Description of Artificial Sequence: Synthetic oligonucleotide
uuuugagacugaccaguuu

SEQ ID NO: 107118 - RNA, 19 nt, Artificial Sequence
  Description of Artificial Sequence: Synthetic oligonucleotide
aaacaucacuaagcuguug

SEQ ID NO: 107119 - RNA, 19 nt, Artificial Sequence
  Description of Artificial Sequence: Synthetic oligonucleotide
ugccuaaacucuagcugac

SEQ ID NO: 107120 - RNA, 19 nt, Artificial Sequence
  Description of Artificial Sequence: Synthetic oligonucleotide
ugauguggacuccuuugua

SEQ ID NO: 107121 - RNA, 19 nt, Artificial Sequence
  Description of Artificial Sequence: Synthetic oligonucleotide
ggcauaacggaauugucaa

SEQ ID NO: 107122 - RNA, 19 nt, Artificial Sequence
  Description of Artificial Sequence: Synthetic oligonucleotide
ugccauagucguacguacu

SEQ ID NO: 107123 - RNA, 19 nt, Artificial Sequence
  Description of Artificial Sequence: Synthetic oligonucleotide
auaacaacucaugcccugu

SEQ ID NO: 107124 - RNA, 19 nt, Artificial Sequence
  Description of Artificial Sequence: Synthetic oligonucleotide
aucuagcaaugauguggac

SEQ ID NO: 107125 - RNA, 19 nt, Artificial Sequence
  Description of Artificial Sequence: Synthetic oligonucleotide
acgcacaacauaccuaaua

SEQ ID NO: 107126 - RNA, 19 nt, Artificial Sequence
  Description of Artificial Sequence: Synthetic oligonucleotide
uaaugagcuguggcuagca

SEQ ID NO: 107127 - RNA, 19 nt, Artificial Sequence
  Description of Artificial Sequence: Synthetic oligonucleotide
uucagacgcuacuguaaac

SEQ ID NO: 107128 - RNA, 19 nt, Artificial Sequence
  Description of Artificial Sequence: Synthetic oligonucleotide
ugugugcgcuuacugcgcu

SEQ ID NO: 107129 - RNA, 19 nt, Artificial Sequence
  Description of Artificial Sequence: Synthetic oligonucleotide
agaccgggaaguacagcgc

SEQ ID NO: 107130 - RNA, 19 nt, Artificial Sequence
  Description of Artificial Sequence: Synthetic oligonucleotide
aguaugccaacggcgaaga

SEQ ID NO: 107131 - RNA, 19 nt, Artificial Sequence
  Description of Artificial Sequence: Synthetic oligonucleotide
ucccggagugaaucuaaca

SEQ ID NO: 107132 - RNA, 19 nt, Artificial Sequence
  Description of Artificial Sequence: Synthetic oligonucleotide
ccuaaacucuagcugacug

SEQ ID NO: 107133 - RNA, 19 nt, Artificial Sequence
  Description of Artificial Sequence: Synthetic oligonucleotide
ugucugccauagucguacg

SEQ ID NO: 107134 - RNA, 19 nt, Artificial Sequence
  Description of Artificial Sequence: Synthetic oligonucleotide
cuaccauauccucacaucu

SEQ ID NO: 107135 - RNA, 19 nt, Artificial Sequence
  Description of Artificial Sequence: Synthetic oligonucleotide
cagaguccguuaaaucgac

SEQ ID NO: 107136 - RNA, 19 nt, Artificial Sequence
  Description of Artificial Sequence: Synthetic oligonucleotide
acauaccuaauaagccauc

SEQ ID NO: 107137 - RNA, 19 nt, Artificial Sequence
  Description of Artificial Sequence: Synthetic oligonucleotide
uucagucgaggaagugugu

SEQ ID NO: 107138 - RNA, 19 nt, Artificial Sequence
  Description of Artificial Sequence: Synthetic oligonucleotide
guuaaguuuacgcuuuguu

SEQ ID NO: 107139 - RNA, 19 nt, Artificial Sequence
  Description of Artificial Sequence: Synthetic oligonucleotide
uuacugcgcugucugcaga

SEQ ID NO: 107140 - RNA, 19 nt, Artificial Sequence
  Description of Artificial Sequence: Synthetic oligonucleotide
uugucaagaugaguccacu

SEQ ID NO: 107141 - RNA, 19 nt, Artificial Sequence
  Description of Artificial Sequence: Synthetic oligonucleotide
ucguccccagcguucaaga

SEQ ID NO: 107142 - RNA, 19 nt, Artificial Sequence
  Description of Artificial Sequence: Synthetic oligonucleotide
uccaaccuaugcacucucu

SEQ ID NO: 107143 - RNA, 19 nt, Artificial Sequence
  Description of Artificial Sequence: Synthetic oligonucleotide
gaccgggaaguacagcgca

SEQ ID NO: 107144 - RNA, 19 nt, Artificial Sequence
  Description of Artificial Sequence: Synthetic oligonucleotide
aguuaaguuuacgcuuugu

SEQ ID NO: 107145 - RNA, 19 nt, Artificial Sequence
  Description of Artificial Sequence: Synthetic oligonucleotide
agauaacaacucaugcccu

SEQ ID NO: 107146 - RNA, 19 nt, Artificial Sequence
  Description of Artificial Sequence: Synthetic oligonucleotide
aacagacggaaggaaguuu

SEQ ID NO: 107147 - RNA, 19 nt, Artificial Sequence
  Description of Artificial Sequence: Synthetic oligonucleotide
cugugugcgcuuacugcgc

SEQ ID NO: 107148 - RNA, 19 nt, Artificial Sequence
  Description of Artificial Sequence: Synthetic oligonucleotide
uuaugccucgggagccaag

SEQ ID NO: 107149 - RNA, 19 nt, Artificial Sequence
  Description of Artificial Sequence: Synthetic oligonucleotide
ugucuguucaaggcauaac

SEQ ID NO: 107150 - RNA, 19 nt, Artificial Sequence
  Description of Artificial Sequence: Synthetic oligonucleotide
ugucgguaacaaacaucac

SEQ ID NO: 107151 - RNA, 19 nt, Artificial Sequence
  Description of Artificial Sequence: Synthetic oligonucleotide
uuccaaccuaugcacucuc

SEQ ID NO: 107152 - RNA, 19 nt, Artificial Sequence
  Description of Artificial Sequence: Synthetic oligonucleotide
gucguacguacucugugca

SEQ ID NO: 107153 - RNA, 19 nt, Artificial Sequence
  Description of Artificial Sequence: Synthetic oligonucleotide
gacgcuacuguaaacugcu

SEQ ID NO: 107154 - RNA, 19 nt, Artificial Sequence
  Description of Artificial Sequence: Synthetic oligonucleotide
gagacaaaucuugggccac

SEQ ID NO: 107155 - RNA, 19 nt, Artificial Sequence
  Description of Artificial Sequence: Synthetic oligonucleotide
gguuaagcuccacguauac

SEQ ID NO: 107156 - RNA, 19 nt, Artificial Sequence
  Description of Artificial Sequence: Synthetic oligonucleotide
aucaucgcccagucugaug

SEQ ID NO: 107157 - RNA, 19 nt, Artificial Sequence
  Description of Artificial Sequence: Synthetic oligonucleotide
cacucuguucagucgagga

SEQ ID NO: 107158 - RNA, 19 nt, Artificial Sequence
  Description of Artificial Sequence: Synthetic oligonucleotide
agguaaggcucccaccaaa

SEQ ID NO: 107159 - RNA, 19 nt, Artificial Sequence
  Description of Artificial Sequence: Synthetic oligonucleotide
aggcaauagccauuuccaa

SEQ ID NO: 107160 - RNA, 19 nt, Artificial Sequence
  Description of Artificial Sequence: Synthetic oligonucleotide
uagguaaggcucccaccaa

SEQ ID NO: 107161 - RNA, 19 nt, Artificial Sequence
  Description of Artificial Sequence: Synthetic oligonucleotide
caacggcgaagaugugugg

SEQ ID NO: 107162 - RNA, 19 nt, Artificial Sequence
  Description of Artificial Sequence: Synthetic oligonucleotide
agguaaagcgugaaagcaa

SEQ ID NO: 107163 - RNA, 19 nt, Artificial Sequence
  Description of Artificial Sequence: Synthetic oligonucleotide
guacguacucugugcaaca

SEQ ID NO: 107164 - RNA, 19 nt, Artificial Sequence
  Description of Artificial Sequence: Synthetic oligonucleotide
gcacagaacaaccguugcc

SEQ ID NO: 107165 - RNA, 19 nt, Artificial Sequence
  Description of Artificial Sequence: Synthetic oligonucleotide
uuaaaucgacgcugcugua

SEQ ID NO: 107166 - RNA, 19 nt, Artificial Sequence
  Description of Artificial Sequence: Synthetic oligonucleotide
aaucgacgcugcuguaauu

SEQ ID NO: 107167 - RNA, 19 nt, Artificial Sequence
  Description of Artificial Sequence: Synthetic oligonucleotide
gguaaggcucccaccaaag

SEQ ID NO: 107168 - RNA, 19 nt, Artificial Sequence
  Description of Artificial Sequence: Synthetic oligonucleotide
cugguagcguguguacugc

SEQ ID NO: 107169 - RNA, 19 nt, Artificial Sequence
  Description of Artificial Sequence: Synthetic oligonucleotide
acggaauugucaagaugag

SEQ ID NO: 107170 - RNA, 19 nt, Artificial Sequence
  Description of Artificial Sequence: Synthetic oligonucleotide
ggcacagaacaaccguugc

SEQ ID NO: 107171 - RNA, 19 nt, Artificial Sequence
  Description of Artificial Sequence: Synthetic oligonucleotide
guacagcgcaaagauuggc

SEQ ID NO: 107172 - RNA, 19 nt, Artificial Sequence
  Description of Artificial Sequence: Synthetic oligonucleotide
gaagaccgggaaguacagc

SEQ ID NO: 107173 - RNA, 19 nt, Artificial Sequence
  Description of Artificial Sequence: Synthetic oligonucleotide
ccgcacgucuaccauaucc

SEQ ID NO: 107174 - RNA, 19 nt, Artificial Sequence
  Description of Artificial Sequence: Synthetic oligonucleotide
ugcugaaucgaugcuccau

SEQ ID NO: 107175 - RNA, 19 nt, Artificial Sequence
  Description of Artificial Sequence: Synthetic oligonucleotide
gucuacgcacaacauaccu

SEQ ID NO: 107176 - RNA, 19 nt, Artificial Sequence
  Description of Artificial Sequence: Synthetic oligonucleotide
agccugauuggagaucuga

SEQ ID NO: 107177 - RNA, 19 nt, Artificial Sequence
  Description of Artificial Sequence: Synthetic oligonucleotide
ucguacguacucugugcaa

SEQ ID NO: 107178 - RNA, 19 nt, Artificial Sequence
  Description of Artificial Sequence: Synthetic oligonucleotide
ccggagugaaucuaacaac

SEQ ID NO: 107179 - RNA, 19 nt, Artificial Sequence
  Description of Artificial Sequence: Synthetic oligonucleotide
agaguccguuaaaucgacg

SEQ ID NO: 107180 - RNA, 19 nt, Artificial Sequence
  Description of Artificial Sequence: Synthetic oligonucleotide
caaggcauaacggaauugu

SEQ ID NO: 107181 - RNA, 19 nt, Artificial Sequence
  Description of Artificial Sequence: Synthetic oligonucleotide
gcauaacggaauugucaag

SEQ ID NO: 107182 - RNA, 19 nt, Artificial Sequence
  Description of Artificial Sequence: Synthetic oligonucleotide
auagucguacguacucugu

SEQ ID NO: 107183 - RNA, 19 nt, Artificial Sequence
  Description of Artificial Sequence: Synthetic oligonucleotide
agcguaugaccugcagauc

SEQ ID NO: 107184 - RNA, 19 nt, Artificial Sequence
  Description of Artificial Sequence: Synthetic oligonucleotide
cuauguaacgagucaacuu

SEQ ID NO: 107185 - RNA, 19 nt, Artificial Sequence
  Description of Artificial Sequence: Synthetic oligonucleotide
aguaaauccucuggccuua

SEQ ID NO: 107186 - RNA, 19 nt, Artificial Sequence
  Description of Artificial Sequence: Synthetic oligonucleotide
agcuggugcuacgucuacg

SEQ ID NO: 107187 - RNA, 19 nt, Artificial Sequence
  Description of Artificial Sequence: Synthetic oligonucleotide
augauauaucaaagaucug

SEQ ID NO: 107188 - RNA, 19 nt, Artificial Sequence
  Description of Artificial Sequence: Synthetic oligonucleotide
ugagacugaccaguuucau

SEQ ID NO: 107189 - RNA, 19 nt, Artificial Sequence
  Description of Artificial Sequence: Synthetic oligonucleotide
cacagaacaaccguugccu

SEQ ID NO: 107190 - RNA, 19 nt, Artificial Sequence
  Description of Artificial Sequence: Synthetic oligonucleotide
gugcgagcagcucaucauc

SEQ ID NO: 107191 - RNA, 19 nt, Artificial Sequence
  Description of Artificial Sequence: Synthetic oligonucleotide
ccucuuauuuagccagucc

SEQ ID NO: 107192 - RNA, 19 nt, Artificial Sequence
  Description of Artificial Sequence: Synthetic oligonucleotide
ccuaauaagccauccaacu

SEQ ID NO: 107193 - RNA, 19 nt, Artificial Sequence
  Description of Artificial Sequence: Synthetic oligonucleotide
cuuucugcggucaccauuu

SEQ ID NO: 107194 - RNA, 19 nt, Artificial Sequence
  Description of Artificial Sequence: Synthetic oligonucleotide
uggcuucacuacacauaca

SEQ ID NO: 107195 - RNA, 19 nt, Artificial Sequence
  Description of Artificial Sequence: Synthetic oligonucleotide
ccgauuagcaccauucaaa

SEQ ID NO: 107196 - RNA, 19 nt, Artificial Sequence
  Description of Artificial Sequence: Synthetic oligonucleotide
ccugucgguaacaaacauc

SEQ ID NO: 107197 - RNA, 19 nt, Artificial Sequence
  Description of Artificial Sequence: Synthetic oligonucleotide
gccauagucguacguacuc

SEQ ID NO: 107198 - RNA, 19 nt, Artificial Sequence
  Description of Artificial Sequence: Synthetic oligonucleotide
ugguagcguguguacugcu

SEQ ID NO: 107199 - RNA, 19 nt, Artificial Sequence
  Description of Artificial Sequence: Synthetic oligonucleotide
auguaacgagucaacuuau

SEQ ID NO: 107200 - RNA, 19 nt, Artificial Sequence
  Description of Artificial Sequence: Synthetic oligonucleotide
ccacguauacugcaaacca

SEQ ID NO: 107201 - RNA, 19 nt, Artificial Sequence
  Description of Artificial Sequence: Synthetic oligonucleotide
uacgcacaacauaccuaau

SEQ ID NO: 107202 - RNA, 19 nt, Artificial Sequence
  Description of Artificial Sequence: Synthetic oligonucleotide
cgugaaagcaaggacucag

SEQ ID NO: 107203 - RNA, 19 nt, Artificial Sequence
  Description of Artificial Sequence: Synthetic oligonucleotide
uagagcaucuaagcauguu

SEQ ID NO: 107204 - RNA, 19 nt, Artificial Sequence
  Description of Artificial Sequence: Synthetic oligonucleotide
ucacuccuuguaugugguc

SEQ ID NO: 107205 - RNA, 19 nt, Artificial Sequence
  Description of Artificial Sequence: Synthetic oligonucleotide
cagcgcaaagauuggcaca

SEQ ID NO: 107206 - RNA, 19 nt, Artificial Sequence
  Description of Artificial Sequence: Synthetic oligonucleotide
gcguaugaccugcagaucu

SEQ ID NO: 107207 - RNA, 19 nt, Artificial Sequence
  Description of Artificial Sequence: Synthetic oligonucleotide
ugcuacgucuacgcacaac

SEQ ID NO: 107208 - RNA, 19 nt, Artificial Sequence
  Description of Artificial Sequence: Synthetic oligonucleotide
agcguucaagagugcugca

SEQ ID NO: 107209 - RNA, 19 nt, Artificial Sequence
  Description of Artificial Sequence: Synthetic oligonucleotide
guaugugguccacguuuuc

SEQ ID NO: 107210 - RNA, 19 nt, Artificial Sequence
  Description of Artificial Sequence: Synthetic oligonucleotide
cucguccccagcguucaag

SEQ ID NO: 107211 - RNA, 19 nt, Artificial Sequence
  Description of Artificial Sequence: Synthetic oligonucleotide
agccuccgcacgucuacca

SEQ ID NO: 107212 - RNA, 19 nt, Artificial Sequence
  Description of Artificial Sequence: Synthetic oligonucleotide
gucaacuuauuggcagaca

SEQ ID NO: 107213 - RNA, 19 nt, Artificial Sequence
  Description of Artificial Sequence: Synthetic oligonucleotide
cccggagugaaucuaacaa

SEQ ID NO: 107214 - RNA, 19 nt, Artificial Sequence
  Description of Artificial Sequence: Synthetic oligonucleotide
guaaggcucccaccaaagu

SEQ ID NO: 107215 - RNA, 19 nt, Artificial Sequence
  Description of Artificial Sequence: Synthetic oligonucleotide
gaccagccucuuauuuagc

SEQ ID NO: 107216 - RNA, 19 nt, Artificial Sequence
  Description of Artificial Sequence: Synthetic oligonucleotide
cguuaaaucgacgcugcug

SEQ ID NO: 107217 - RNA, 19 nt, Artificial Sequence
  Description of Artificial Sequence: Synthetic oligonucleotide
agggauacuucagccggaa

SEQ ID NO: 107218 - RNA, 19 nt, Artificial Sequence
  Description of Artificial Sequence: Synthetic oligonucleotide
cuguucagucgaggaagug

SEQ ID NO: 107219 - RNA, 19 nt, Artificial Sequence
  Description of Artificial Sequence: Synthetic oligonucleotide
cgcacaacauaccuaauaa

SEQ ID NO: 107220 - RNA, 19 nt, Artificial Sequence
  Description of Artificial Sequence: Synthetic oligonucleotide
cucuucgagcaguuuuaaa

SEQ ID NO: 107221 - RNA, 19 nt, Artificial Sequence
  Description of Artificial Sequence: Synthetic oligonucleotide
guuaagcuccacguauacu

SEQ ID NO: 107222 - RNA, 19 nt, Artificial Sequence
  Description of Artificial Sequence: Synthetic oligonucleotide
cagacggaaggaaguuuaa

SEQ ID NO: 107223 - RNA, 19 nt, Artificial Sequence
  Description of Artificial Sequence: Synthetic oligonucleotide
gugugcgcuuacugcgcug

SEQ ID NO: 107224 - RNA, 19 nt, Artificial Sequence
  Description of Artificial Sequence: Synthetic oligonucleotide
guaaauccucuggccuuac

SEQ ID NO: 107225 - RNA, 19 nt, Artificial Sequence
  Description of Artificial Sequence: Synthetic oligonucleotide
gcaucuaagcauguuacau

SEQ ID NO: 107226 - RNA, 19 nt, Artificial Sequence
  Description of Artificial Sequence: Synthetic oligonucleotide
agcuccacguauacugcaa

SEQ ID NO: 107227 - RNA, 19 nt, Artificial Sequence
  Description of Artificial Sequence: Synthetic oligonucleotide
cuuggacucccaaaauauu

SEQ ID NO: 107228 - RNA, 19 nt, Artificial Sequence
  Description of Artificial Sequence: Synthetic oligonucleotide
gaauuuccucuaacugugu

SEQ ID NO: 107229 - RNA, 19 nt, Artificial Sequence
  Description of Artificial Sequence: Synthetic oligonucleotide
cgauuagcaccauucaaaa

SEQ ID NO: 107230 - RNA, 19 nt, Artificial Sequence
  Description of Artificial Sequence: Synthetic oligonucleotide
ugccaacggcgaagaugug

SEQ ID NO: 107231 - RNA, 19 nt, Artificial Sequence
  Description of Artificial Sequence: Synthetic oligonucleotide
gguagcguguguacugcuc

SEQ ID NO: 107232 - RNA, 19 nt, Artificial Sequence
  Description of Artificial Sequence: Synthetic oligonucleotide
cuggugcuacgucuacgca

SEQ ID NO: 107233 - RNA, 19 nt, Artificial Sequence
  Description of Artificial Sequence: Synthetic oligonucleotide
cuaacugugugcgcuuacu

SEQ ID NO: 107234 - RNA, 19 nt, Artificial Sequence
  Description of Artificial Sequence: Synthetic oligonucleotide
gaccacgagacuccuccau

SEQ ID NO: 107235 - RNA, 19 nt, Artificial Sequence
  Description of Artificial Sequence: Synthetic oligonucleotide
ccauuuccggaugucucag

SEQ ID NO: 107236 - RNA, 19 nt, Artificial Sequence
  Description of Artificial Sequence: Synthetic oligonucleotide
cguaugaccugcagaucug

SEQ ID NO: 107237 - RNA, 19 nt, Artificial Sequence
  Description of Artificial Sequence: Synthetic oligonucleotide
agccucuuauuuagccagu

SEQ ID NO: 107238 - RNA, 19 nt, Artificial Sequence
  Description of Artificial Sequence: Synthetic oligonucleotide
ccacgagacuccuccauca

SEQ ID NO: 107239 - RNA, 19 nt, Artificial Sequence
  Description of Artificial Sequence: Synthetic oligonucleotide
guaugaccugcagaucugu

SEQ ID NO: 107240 - RNA, 19 nt, Artificial Sequence
  Description of Artificial Sequence: Synthetic oligonucleotide
gcauuaagacuacugucuu

SEQ ID NO: 107241 - RNA, 19 nt, Artificial Sequence
  Description of Artificial Sequence: Synthetic oligonucleotide
cggagugaaucuaacaacu

SEQ ID NO: 107242 - RNA, 19 nt, Artificial Sequence
  Description of Artificial Sequence: Synthetic oligonucleotide
cucuagcaucaugagauau

SEQ ID NO: 107243 - RNA, 19 nt, Artificial Sequence
  Description of Artificial Sequence: Synthetic oligonucleotide
cuccgcacgucuaccauau

SEQ ID NO: 107244 - RNA, 19 nt, Artificial Sequence
  Description of Artificial Sequence: Synthetic oligonucleotide
cgucuacgcacaacauacc

SEQ ID NO: 107245 - RNA, 19 nt, Artificial Sequence
  Description of Artificial Sequence: Synthetic oligonucleotide
uccgcacgucuaccauauc

SEQ ID NO: 107246 - RNA, 19 nt, Artificial Sequence
  Description of Artificial Sequence: Synthetic oligonucleotide
gcuccacguauacugcaaa

SEQ ID NO: 107247 - RNA, 19 nt, Artificial Sequence
  Description of Artificial Sequence: Synthetic oligonucleotide
gcgcugucugcagacuucc

SEQ ID NO: 107248 - RNA, 19 nt, Artificial Sequence
  Description of Artificial Sequence: Synthetic oligonucleotide
gucugccauagucguacgu

SEQ ID NO: 107249 - RNA, 19 nt, Artificial Sequence
  Description of Artificial Sequence: Synthetic oligonucleotide
cuacgucuacgcacaacau

SEQ ID NO: 107250 - RNA, 19 nt, Artificial Sequence
  Description of Artificial Sequence: Synthetic oligonucleotide
gccucuuauuuagccaguc

SEQ ID NO: 107251 - RNA, 19 nt, Artificial Sequence
  Description of Artificial Sequence: Synthetic oligonucleotide
ccuagccuucuuugcccag

SEQ ID NO: 107252 - RNA, 19 nt, Artificial Sequence
  Description of Artificial Sequence: Synthetic oligonucleotide
caaguaucuuuaggguagu

SEQ ID NO: 107253 - RNA, 19 nt, Artificial Sequence
  Description of Artificial Sequence: Synthetic oligonucleotide
gcguucaagagugcugcaa

SEQ ID NO: 107254 - RNA, 19 nt, Artificial Sequence
  Description of Artificial Sequence: Synthetic oligonucleotide
gccaacggcgaagaugugu

SEQ ID NO: 107255 - RNA, 19 nt, Artificial Sequence
  Description of Artificial Sequence: Synthetic oligonucleotide
cacuauccacuaacaguuu

SEQ ID NO: 107256 - RNA, 19 nt, Artificial Sequence
  Description of Artificial Sequence: Synthetic oligonucleotide
gucaacuggcauggcucua

SEQ ID NO: 107257 - RNA, 19 nt, Artificial Sequence
  Description of Artificial Sequence: Synthetic oligonucleotide
cgcacgucuaccauauccu

SEQ ID NO: 107258 - RNA, 19 nt, Artificial Sequence
  Description of Artificial Sequence: Synthetic oligonucleotide
gcgugaaagcaaggacuca

SEQ ID NO: 107259 - RNA, 19 nt, Artificial Sequence
  Description of Artificial Sequence: Synthetic oligonucleotide
gugcuacgucuacgcacaa

SEQ ID NO: 107260 - RNA, 19 nt, Artificial Sequence
  Description of Artificial Sequence: Synthetic oligonucleotide
gccugucgguaacaaacau

SEQ ID NO: 107261 - RNA, 19 nt, Artificial Sequence
  Description of Artificial Sequence: Synthetic oligonucleotide
cugcgcugucugcagacuu

SEQ ID NO: 107262 - RNA, 19 nt, Artificial Sequence
  Description of Artificial Sequence: Synthetic oligonucleotide
gccugauuggagaucugau

SEQ ID NO: 107263 - RNA, 19 nt, Artificial Sequence
  Description of Artificial Sequence: Synthetic oligonucleotide
ccuccgcacgucuaccaua

SEQ ID NO: 107264 - RNA, 19 nt, Artificial Sequence
  Description of Artificial Sequence: Synthetic oligonucleotide
gccuaaacucuagcugacu

SEQ ID NO: 107265 - RNA, 19 nt, Artificial Sequence
  Description of Artificial Sequence: Synthetic oligonucleotide
ccucgucauuaagcgcuuc

SEQ ID NO: 107266 - RNA, 19 nt, Artificial Sequence
  Description of Artificial Sequence: Synthetic oligonucleotide
ccaucagcuggugcuacgu

SEQ ID NO: 107267 - RNA, 19 nt, Artificial Sequence
  Description of Artificial Sequence: Synthetic oligonucleotide
cccagcguucaagagugcu

SEQ ID NO: 107268 - RNA, 19 nt, Artificial Sequence
  Description of Artificial Sequence: Synthetic oligonucleotide
cggcgaagaugugugggca

SEQ ID NO: 107269 - RNA, 19 nt, Artificial Sequence
  Description of Artificial Sequence: Synthetic oligonucleotide
ccauaggcccaggaagccu

SEQ ID NO: 107270 - RNA, 19 nt, Artificial Sequence
  Description of Artificial Sequence: Synthetic oligonucleotide
aaaauuaaauccuugcacu

SEQ ID NO: 107271 - RNA, 19 nt, Artificial Sequence
  Description of Artificial Sequence: Synthetic oligonucleotide
uuuuauaaggacaagucug

SEQ ID NO: 107272 - RNA, 19 nt, Artificial Sequence
  Description of Artificial Sequence: Synthetic oligonucleotide
aaugaaauuccggaguucc

SEQ ID NO: 107273 - RNA, 19 nt, Artificial Sequence
  Description of Artificial Sequence: Synthetic oligonucleotide
agaguuaggauauuauacc

SEQ ID NO: 107274 - RNA, 19 nt, Artificial Sequence
  Description of Artificial Sequence: Synthetic oligonucleotide
auaacuauaaagccuacuc

SEQ ID NO: 107275 - RNA, 19 nt, Artificial Sequence
  Description of Artificial Sequence: Synthetic oligonucleotide
uaaucauacacuaaacacc

SEQ ID NO: 107276 - RNA, 19 nt, Artificial Sequence
  Description of Artificial Sequence: Synthetic oligonucleotide
aguggaauaucauacuccc

SEQ ID NO: 107277 - RNA, 19 nt, Artificial Sequence
  Description of Artificial Sequence: Synthetic oligonucleotide
aauaauagcuggcaaacga

SEQ ID NO: 107278 - RNA, 19 nt, Artificial Sequence
  Description of Artificial Sequence: Synthetic oligonucleotide
aaauuaucacucauaauac

SEQ ID NO: 107279 - RNA, 19 nt, Artificial Sequence
  Description of Artificial Sequence: Synthetic oligonucleotide
aaauagucuacucagcaca

SEQ ID NO: 107280 - RNA, 19 nt, Artificial Sequence
  Description of Artificial Sequence: Synthetic oligonucleotide
ugaaugguuaacuucauca

SEQ ID NO: 107281 - RNA, 19 nt, Artificial Sequence
  Description of Artificial Sequence: Synthetic oligonucleotide
ugucccauaauccaaacug

SEQ ID NO: 107282 - RNA, 19 nt, Artificial Sequence
  Description of Artificial Sequence: Synthetic oligonucleotide
auuaucacucauaauaccc

SEQ ID NO: 107283 - RNA, 19 nt, Artificial Sequence
  Description of Artificial Sequence: Synthetic oligonucleotide
aaaauugacgcauaucuau

SEQ ID NO: 107284 - RNA, 19 nt, Artificial Sequence
  Description of Artificial Sequence: Synthetic oligonucleotide
aaaucuaaacugauaaggg

SEQ ID NO: 107285 - RNA, 19 nt, Artificial Sequence
  Description of Artificial Sequence: Synthetic oligonucleotide
ugugaaacaacauuacuac

SEQ ID NO: 107286 - RNA, 19 nt, Artificial Sequence
  Description of Artificial Sequence: Synthetic oligonucleotide
uguaauugaguacaguacu

SEQ ID NO: 107287 - RNA, 19 nt, Artificial Sequence
  Description of Artificial Sequence: Synthetic oligonucleotide
auuucugagucccacuagc

SEQ ID NO: 107288 - RNA, 19 nt, Artificial Sequence
  Description of Artificial Sequence: Synthetic oligonucleotide
agagccacaaguuuuauga

SEQ ID NO: 107289 - RNA, 19 nt, Artificial Sequence
  Description of Artificial Sequence: Synthetic oligonucleotide
uuauagauuccacaaguga

SEQ ID NO: 107290 - RNA, 19 nt, Artificial Sequence
  Description of Artificial Sequence: Synthetic oligonucleotide
uuuaaugccuacaauugcu

SEQ ID NO: 107291 - RNA, 19 nt, Artificial Sequence
  Description of Artificial Sequence: Synthetic oligonucleotide
ucauacucccuuuaaauca

SEQ ID NO: 107292 - RNA, 19 nt, Artificial Sequence
  Description of Artificial Sequence: Synthetic oligonucleotide
aauugugaaacaacauuac

SEQ ID NO: 107293 - RNA, 19 nt, Artificial Sequence
  Description of Artificial Sequence: Synthetic oligonucleotide
ugacgcauaucuauuacag

SEQ ID NO: 107294 - RNA, 19 nt, Artificial Sequence
  Description of Artificial Sequence: Synthetic oligonucleotide
uaauuaccuaaucauauaa

SEQ ID NO: 107295 - RNA, 19 nt, Artificial Sequence
  Description of Artificial Sequence: Synthetic oligonucleotide
auaaauagucuacucagca

SEQ ID NO: 107296 - RNA, 19 nt, Artificial Sequence
  Description of Artificial Sequence: Synthetic oligonucleotide
agugauagcaauaaaauaa

SEQ ID NO: 107297 - RNA, 19 nt, Artificial Sequence
  Description of Artificial Sequence: Synthetic oligonucleotide
aaugguuaacuucaucaga

SEQ ID NO: 107298 - RNA, 19 nt, Artificial Sequence
  Description of Artificial Sequence: Synthetic oligonucleotide
aacuauaaagccuacucuu

SEQ ID NO: 107299 - RNA, 19 nt, Artificial Sequence
  Description of Artificial Sequence: Synthetic oligonucleotide
ugugcaaauagcugcaccc

SEQ ID NO: 107300 - RNA, 19 nt, Artificial Sequence
  Description of Artificial Sequence: Synthetic oligonucleotide
guaaaauugacgcauaucu

SEQ ID NO: 107301 - RNA, 19 nt, Artificial Sequence
  Description of Artificial Sequence: Synthetic oligonucleotide
uccacucuuaaucauacac

SEQ ID NO: 107302 - RNA, 19 nt, Artificial Sequence
  Description of Artificial Sequence: Synthetic oligonucleotide
agcaucgugguuuaauaac

SEQ ID NO: 107303 - RNA, 19 nt, Artificial Sequence
  Description of Artificial Sequence: Synthetic oligonucleotide
aucauacucccuuuaaauc

SEQ ID NO: 107304 - RNA, 19 nt, Artificial Sequence
  Description of Artificial Sequence: Synthetic oligonucleotide
uacccaagcuuaaagaaug

SEQ ID NO: 107305 - RNA, 19 nt, Artificial Sequence
  Description of Artificial Sequence: Synthetic oligonucleotide
uuuguugugugagagaacu

SEQ ID NO: 107306 - RNA, 19 nt, Artificial Sequence
  Description of Artificial Sequence: Synthetic oligonucleotide
aucgugguuuaauaacucc

SEQ ID NO: 107307 - RNA, 19 nt, Artificial Sequence
  Description of Artificial Sequence: Synthetic oligonucleotide
aaugccuacaauugcuugu

SEQ ID NO: 107308 - RNA, 19 nt, Artificial Sequence
  Description of Artificial Sequence: Synthetic oligonucleotide
uauguaaaagcaucguggu

SEQ ID NO: 107309 - RNA, 19 nt, Artificial Sequence
  Description of Artificial Sequence: Synthetic oligonucleotide
ugcuauaucucagaaaugu

SEQ ID NO: 107310 - RNA, 19 nt, Artificial Sequence
  Description of Artificial Sequence: Synthetic oligonucleotide
uaucguaucaucugcauua

SEQ ID NO: 107311 - RNA, 19 nt, Artificial Sequence
  Description of Artificial Sequence: Synthetic oligonucleotide
aaggcagccagauaaaauu

SEQ ID NO: 107312 - RNA, 19 nt, Artificial Sequence
  Description of Artificial Sequence: Synthetic oligonucleotide
uuaucacucauaauaccca

SEQ ID NO: 107313 - RNA, 19 nt, Artificial Sequence
  Description of Artificial Sequence: Synthetic oligonucleotide
auugacgcauaucuauuac

SEQ ID NO: 107314 - RNA, 19 nt, Artificial Sequence
  Description of Artificial Sequence: Synthetic oligonucleotide
gauuccacaagugauagca

SEQ ID NO: 107315 - RNA, 19 nt, Artificial Sequence
  Description of Artificial Sequence: Synthetic oligonucleotide
auuuagugugcauagcuca

SEQ ID NO: 107316 - RNA, 19 nt, Artificial Sequence
  Description of Artificial Sequence: Synthetic oligonucleotide
acugauaaggggcuugauc

SEQ ID NO: 107317 - RNA, 19 nt, Artificial Sequence
  Description of Artificial Sequence: Synthetic oligonucleotide
cacguuuggacuuacaauc

SEQ ID NO: 107318 - RNA, 19 nt, Artificial Sequence
  Description of Artificial Sequence: Synthetic oligonucleotide
uaauacccaagcuuaaaga

SEQ ID NO: 107319 - RNA, 19 nt, Artificial Sequence
  Description of Artificial Sequence: Synthetic oligonucleotide
agaaauguacuacuagcug

SEQ ID NO: 107320 - RNA, 19 nt, Artificial Sequence
  Description of Artificial Sequence: Synthetic oligonucleotide
aaauaauagcuggcaaacg

SEQ ID NO: 107321 - RNA, 19 nt, Artificial Sequence
  Description of Artificial Sequence: Synthetic oligonucleotide
aauaucauacucccuuuaa

SEQ ID NO: 107322 - RNA, 19 nt, Artificial Sequence
  Description of Artificial Sequence: Synthetic oligonucleotide
gagaguuaggauauuauac

SEQ ID NO: 107323 - RNA, 19 nt, Artificial Sequence
  Description of Artificial Sequence: Synthetic oligonucleotide
aaccuacuuuaucaagugg

SEQ ID NO: 107324 - RNA, 19 nt, Artificial Sequence
  Description of Artificial Sequence: Synthetic oligonucleotide
cauuucugagucauauucg

SEQ ID NO: 107325 - RNA, 19 nt, Artificial Sequence
  Description of Artificial Sequence: Synthetic oligonucleotide
auauguauuucaucacauc

SEQ ID NO: 107326 - RNA, 19 nt, Artificial Sequence
  Description of Artificial Sequence: Synthetic oligonucleotide
uccaauccacaaauaaugc

SEQ ID NO: 107327 - RNA, 19 nt, Artificial Sequence
  Description of Artificial Sequence: Synthetic oligonucleotide
cugauaaggggcuugauca

SEQ ID NO: 107328 - RNA, 19 nt, Artificial Sequence
  Description of Artificial Sequence: Synthetic oligonucleotide
uuuuguagccaguagggaa

SEQ ID NO: 107329 - RNA, 19 nt, Artificial Sequence
  Description of Artificial Sequence: Synthetic oligonucleotide
aaaacaagcuaagcuaugu

SEQ ID NO: 107330 - RNA, 19 nt, Artificial Sequence
  Description of Artificial Sequence: Synthetic oligonucleotide
cacauaauuuguuagagaa

SEQ ID NO: 107331 - RNA, 19 nt, Artificial Sequence
  Description of Artificial Sequence: Synthetic oligonucleotide
agcaaaauggaagacacgu

SEQ ID NO: 107332 - RNA, 19 nt, Artificial Sequence
  Description of Artificial Sequence: Synthetic oligonucleotide
uaauagcuggcaaacgaca

SEQ ID NO: 107333 - RNA, 19 nt, Artificial Sequence
  Description of Artificial Sequence: Synthetic oligonucleotide
ugcauacccagucuuaaac

SEQ ID NO: 107334 - RNA, 19 nt, Artificial Sequence
  Description of Artificial Sequence: Synthetic oligonucleotide
acgcauaucuauuacagaa

SEQ ID NO: 107335 - RNA, 19 nt, Artificial Sequence
  Description of Artificial Sequence: Synthetic oligonucleotide
uucgagaauuaacaucacc

SEQ ID NO: 107336 - RNA, 19 nt, Artificial Sequence
  Description of Artificial Sequence: Synthetic oligonucleotide
auugaagacaggucuguug

SEQ ID NO: 107337 - RNA, 19 nt, Artificial Sequence
  Description of Artificial Sequence: Synthetic oligonucleotide
uguuuccgagacaacagug

SEQ ID NO: 107338 - RNA, 19 nt, Artificial Sequence
  Description of Artificial Sequence: Synthetic oligonucleotide
uaaauagucuacucagcac

SEQ ID NO: 107339 - RNA, 19 nt, Artificial Sequence
  Description of Artificial Sequence: Synthetic oligonucleotide
aacgacaguaugcauuccu

SEQ ID NO: 107340 - RNA, 19 nt, Artificial Sequence
  Description of Artificial Sequence: Synthetic oligonucleotide
uggacucuuagcuuuguug

SEQ ID NO: 107341 - RNA, 19 nt, Artificial Sequence
  Description of Artificial Sequence: Synthetic oligonucleotide
caaguaucguaucaucugc

SEQ ID NO: 107342 - RNA, 19 nt, Artificial Sequence
  Description of Artificial Sequence: Synthetic oligonucleotide
cauagacaaaauacauggg

SEQ ID NO: 107343 - RNA, 19 nt, Artificial Sequence
  Description of Artificial Sequence: Synthetic oligonucleotide
ucgugguuuaauaacucca

SEQ ID NO: 107344 - RNA, 19 nt, Artificial Sequence
  Description of Artificial Sequence: Synthetic oligonucleotide
agacaugacagacauuaca

SEQ ID NO: 107345 - RNA, 19 nt, Artificial Sequence
  Description of Artificial Sequence: Synthetic oligonucleotide
aauagcuggcaaacgacag

SEQ ID NO: 107346 - RNA, 19 nt, Artificial Sequence
  Description of Artificial Sequence: Synthetic oligonucleotide
acaaccugauucuuuacca

SEQ ID NO: 107347 - RNA, 19 nt, Artificial Sequence
  Description of Artificial Sequence: Synthetic oligonucleotide
aaucuacaaggagaguuag

SEQ ID NO: 107348 - RNA, 19 nt, Artificial Sequence
  Description of Artificial Sequence: Synthetic oligonucleotide
aauaacuauaaagccuacu

SEQ ID NO: 107349 - RNA, 19 nt, Artificial Sequence
  Description of Artificial Sequence: Synthetic oligonucleotide
gaaugcuuagcauccaauc

SEQ ID NO: 107350 - RNA, 19 nt, Artificial Sequence
  Description of Artificial Sequence: Synthetic oligonucleotide
aauugacgcauaucuauua

SEQ ID NO: 107351 - RNA, 19 nt, Artificial Sequence
  Description of Artificial Sequence: Synthetic oligonucleotide
guuaggauauuauacccuc

SEQ ID NO: 107352 - RNA, 19 nt, Artificial Sequence
  Description of Artificial Sequence: Synthetic oligonucleotide
aaaugaaauuccggaguuc

SEQ ID NO: 107353 - RNA, 19 nt, Artificial Sequence
  Description of Artificial Sequence: Synthetic oligonucleotide
ugaguggccccacauuuag

SEQ ID NO: 107354 - RNA, 19 nt, Artificial Sequence
  Description of Artificial Sequence: Synthetic oligonucleotide
uugugagcuuuucuaagug

SEQ ID NO: 107355 - RNA, 19 nt, Artificial Sequence
  Description of Artificial Sequence: Synthetic oligonucleotide
uaaaauugacgcauaucua

SEQ ID NO: 107356 - RNA, 19 nt, Artificial Sequence
  Description of Artificial Sequence: Synthetic oligonucleotide
ucacauaauuuguuagaga

SEQ ID NO: 107357 - RNA, 19 nt, Artificial Sequence
  Description of Artificial Sequence: Synthetic oligonucleotide
aguuuuaugaaaacuacuu

SEQ ID NO: 107358 - RNA, 19 nt, Artificial Sequence
  Description of Artificial Sequence: Synthetic oligonucleotide
aaggcuucguuccauuuau

SEQ ID NO: 107359 - RNA, 19 nt, Artificial Sequence
  Description of Artificial Sequence: Synthetic oligonucleotide
uacaauugugaaacaacau

SEQ ID NO: 107360 - RNA, 19 nt, Artificial Sequence
  Description of Artificial Sequence: Synthetic oligonucleotide
caauugugaaacaacauua

SEQ ID NO: 107361 - RNA, 19 nt, Artificial Sequence
  Description of Artificial Sequence: Synthetic oligonucleotide
guaacguaaggcauaauca

SEQ ID NO: 107362 - RNA, 19 nt, Artificial Sequence
  Description of Artificial Sequence: Synthetic oligonucleotide
acaagugauagcaauaaaa

SEQ ID NO: 107363 - RNA, 19 nt, Artificial Sequence
  Description of Artificial Sequence: Synthetic oligonucleotide
uuggugaacagguguuggg

SEQ ID NO: 107364 - RNA, 19 nt, Artificial Sequence
  Description of Artificial Sequence: Synthetic oligonucleotide
uggacuaccaacuguucgu

SEQ ID NO: 107365 - RNA, 19 nt, Artificial Sequence
  Description of Artificial Sequence: Synthetic oligonucleotide
uuagcaagugggacugugc

SEQ ID NO: 107366 - RNA, 19 nt, Artificial Sequence
  Description of Artificial Sequence: Synthetic oligonucleotide
uauacccucuaaaauuaaa

SEQ ID NO: 107367 - RNA, 19 nt, Artificial Sequence
  Description of Artificial Sequence: Synthetic oligonucleotide
cuggacuaccaacuguucg

SEQ ID NO: 107368 - RNA, 19 nt, Artificial Sequence
  Description of Artificial Sequence: Synthetic oligonucleotide
uccuggacuauuagaaaac

SEQ ID NO: 107369 - RNA, 19 nt, Artificial Sequence
  Description of Artificial Sequence: Synthetic oligonucleotide
cauacccagucuuaaacuc

SEQ ID NO: 107370 - RNA, 19 nt, Artificial Sequence
  Description of Artificial Sequence: Synthetic oligonucleotide
uguugugacuuucccuaag

SEQ ID NO: 107371 - RNA, 19 nt, Artificial Sequence
  Description of Artificial Sequence: Synthetic oligonucleotide
uugacgcauaucuauuaca

SEQ ID NO: 107372 - RNA, 19 nt, Artificial Sequence
  Description of Artificial Sequence: Synthetic oligonucleotide
gaaggcaggaaacccuugc

SEQ ID NO: 107373 - RNA, 19 nt, Artificial Sequence
  Description of Artificial Sequence: Synthetic oligonucleotide
gucaucaucaucaucaucu

SEQ ID NO: 107374 - RNA, 19 nt, Artificial Sequence
  Description of Artificial Sequence: Synthetic oligonucleotide
ccuacaauugcuuguauac

SEQ ID NO: 107375 - RNA, 19 nt, Artificial Sequence
  Description of Artificial Sequence: Synthetic oligonucleotide
ugcaaauagcugcacccug

SEQ ID NO: 107376 - RNA, 19 nt, Artificial Sequence
  Description of Artificial Sequence: Synthetic oligonucleotide
ugauaaggggcuugaucag

SEQ ID NO: 107377 - RNA, 19 nt, Artificial Sequence
  Description of Artificial Sequence: Synthetic oligonucleotide
uuauggggaggccuggacu

SEQ ID NO: 107378 - RNA, 19 nt, Artificial Sequence
  Description of Artificial Sequence: Synthetic oligonucleotide
uuaggauauuauacccucu

SEQ ID NO: 107379 - RNA, 19 nt, Artificial Sequence
  Description of Artificial Sequence: Synthetic oligonucleotide
uuuccuuuagcaguaggaa

SEQ ID NO: 107380 - RNA, 19 nt, Artificial Sequence
  Description of Artificial Sequence: Synthetic oligonucleotide
uuagcuuuguugugugaga

SEQ ID NO: 107381 - RNA, 19 nt, Artificial Sequence
  Description of Artificial Sequence: Synthetic oligonucleotide
aaaugcauucagacaugac

SEQ ID NO: 107382 - RNA, 19 nt, Artificial Sequence
  Description of Artificial Sequence: Synthetic oligonucleotide
auuauagauuccacaagug

SEQ ID NO: 107383 - RNA, 19 nt, Artificial Sequence
  Description of Artificial Sequence: Synthetic oligonucleotide
auaucauacucccuuuaaa

SEQ ID NO: 107384 - RNA, 19 nt, Artificial Sequence
  Description of Artificial Sequence: Synthetic oligonucleotide
cuacucagcacacugaaaa

SEQ ID NO: 107385 - RNA, 19 nt, Artificial Sequence
  Description of Artificial Sequence: Synthetic oligonucleotide
aagaaugcuuagcauccaa

SEQ ID NO: 107386 - RNA, 19 nt, Artificial Sequence
  Description of Artificial Sequence: Synthetic oligonucleotide
gcaauuauagauuccacaa

SEQ ID NO: 107387 - RNA, 19 nt, Artificial Sequence
  Description of Artificial Sequence: Synthetic oligonucleotide
ccauuauguaaaagcaucg

SEQ ID NO: 107388 - RNA, 19 nt, Artificial Sequence
  Description of Artificial Sequence: Synthetic oligonucleotide
gaauuaacaucacccaaua

SEQ ID NO: 107389 - RNA, 19 nt, Artificial Sequence
  Description of Artificial Sequence: Synthetic oligonucleotide
auagcgccagaacuaacug

SEQ ID NO: 107390 - RNA, 19 nt, Artificial Sequence
  Description of Artificial Sequence: Synthetic oligonucleotide
ugugcaaccagagccacaa

SEQ ID NO: 107391 - RNA, 19 nt, Artificial Sequence
  Description of Artificial Sequence: Synthetic oligonucleotide
gcuuguauacauaaauugc

SEQ ID NO: 107392 - RNA, 19 nt, Artificial Sequence
  Description of Artificial Sequence: Synthetic oligonucleotide
gcauccauugcauagagaa

SEQ ID NO: 107393 - RNA, 19 nt, Artificial Sequence
  Description of Artificial Sequence: Synthetic oligonucleotide
uccauccuggacuauuaga

SEQ ID NO: 107394 - RNA, 19 nt, Artificial Sequence
  Description of Artificial Sequence: Synthetic oligonucleotide
ucucgaggccuuuuguagc

SEQ ID NO: 107395 - RNA, 19 nt, Artificial Sequence
  Description of Artificial Sequence: Synthetic oligonucleotide
agaccaguucugaaguagc

SEQ ID NO: 107396 - RNA, 19 nt, Artificial Sequence
  Description of Artificial Sequence: Synthetic oligonucleotide
gacacguuuggacuuacaa

SEQ ID NO: 107397 - RNA, 19 nt, Artificial Sequence
  Description of Artificial Sequence: Synthetic oligonucleotide
ugguuaacuucaucagagc

SEQ ID NO: 107398 - RNA, 19 nt, Artificial Sequence
  Description of Artificial Sequence: Synthetic oligonucleotide
cauagacugggacagguca

SEQ ID NO: 107399 - RNA, 19 nt, Artificial Sequence
  Description of Artificial Sequence: Synthetic oligonucleotide
ucugcauuacagauuccau

SEQ ID NO: 107400 - RNA, 19 nt, Artificial Sequence
  Description of Artificial Sequence: Synthetic oligonucleotide
uuuauggggaggccuggac

SEQ ID NO: 107401 - RNA, 19 nt, Artificial Sequence
  Description of Artificial Sequence: Synthetic oligonucleotide
aaacccucaacugcaauua

SEQ ID NO: 107402 - RNA, 19 nt, Artificial Sequence
  Description of Artificial Sequence: Synthetic oligonucleotide
aaacgacaguaugcauucc

SEQ ID NO: 107403 - RNA, 19 nt, Artificial Sequence
  Description of Artificial Sequence: Synthetic oligonucleotide
uuuaacauaauggcuccuu

SEQ ID NO: 107404 - RNA, 19 nt, Artificial Sequence
  Description of Artificial Sequence: Synthetic oligonucleotide
acacguuuggacuuacaau

SEQ ID NO: 107405 - RNA, 19 nt, Artificial Sequence
  Description of Artificial Sequence: Synthetic oligonucleotide
uggcaaacgacaguaugca

SEQ ID NO: 107406 - RNA, 19 nt, Artificial Sequence
  Description of Artificial Sequence: Synthetic oligonucleotide
ugcccaugacauguggugg

SEQ ID NO: 107407 - RNA, 19 nt, Artificial Sequence
  Description of Artificial Sequence: Synthetic oligonucleotide
guuuccgagacaacagugc

SEQ ID NO: 107408 - RNA, 19 nt, Artificial Sequence
  Description of Artificial Sequence: Synthetic oligonucleotide
caagugauagcaauaaaau

SEQ ID NO: 107409 - RNA, 19 nt, Artificial Sequence
  Description of Artificial Sequence: Synthetic oligonucleotide
aagcuaagcuaugucaaaa

SEQ ID NO: 107410 - RNA, 19 nt, Artificial Sequence
  Description of Artificial Sequence: Synthetic oligonucleotide
aguuaggauauuauacccu

SEQ ID NO: 107411 - RNA, 19 nt, Artificial Sequence
  Description of Artificial Sequence: Synthetic oligonucleotide
aguaucguaucaucugcau

SEQ ID NO: 107412 - RNA, 19 nt, Artificial Sequence
  Description of Artificial Sequence: Synthetic oligonucleotide
gacucuuagcuuuguugug

SEQ ID NO: 107413 - RNA, 19 nt, Artificial Sequence
  Description of Artificial Sequence: Synthetic oligonucleotide
uuccauccuggacuauuag

SEQ ID NO: 107414 - RNA, 19 nt, Artificial Sequence
  Description of Artificial Sequence: Synthetic oligonucleotide
auaaggggcuugaucaguc

SEQ ID NO: 107415 - RNA, 19 nt, Artificial Sequence
  Description of Artificial Sequence: Synthetic oligonucleotide
cucgaggccuuuuguagcc

SEQ ID NO: 107416 - RNA, 19 nt, Artificial Sequence
  Description of Artificial Sequence: Synthetic oligonucleotide
caccagaaaacaagcuaag

SEQ ID NO: 107417 - RNA, 19 nt, Artificial Sequence
  Description of Artificial Sequence: Synthetic oligonucleotide
uuccggaguucccuuagac

SEQ ID NO: 107418 - RNA, 19 nt, Artificial Sequence
  Description of Artificial Sequence: Synthetic oligonucleotide
aaauugacgcauaucuauu

SEQ ID NO: 107419 - RNA, 19 nt, Artificial Sequence
  Description of Artificial Sequence: Synthetic oligonucleotide
agcuaagcuaugucaaaau

SEQ ID NO: 107420 - RNA, 19 nt, Artificial Sequence
  Description of Artificial Sequence: Synthetic oligonucleotide
aucguaucaucugcauuac

SEQ ID NO: 107421 - RNA, 19 nt, Artificial Sequence
  Description of Artificial Sequence: Synthetic oligonucleotide
ucuggaccuguugaaaagu

SEQ ID NO: 107422 - RNA, 19 nt, Artificial Sequence
  Description of Artificial Sequence: Synthetic oligonucleotide
uguccauugcuugaccgac

SEQ ID NO: 107423 - RNA, 19 nt, Artificial Sequence
  Description of Artificial Sequence: Synthetic oligonucleotide
uccggaguucccuuagacu

SEQ ID NO: 107424 - RNA, 19 nt, Artificial Sequence
  Description of Artificial Sequence: Synthetic oligonucleotide
auacccucuaaaauuaaau

SEQ ID NO: 107425 - RNA, 19 nt, Artificial Sequence
  Description of Artificial Sequence: Synthetic oligonucleotide
uccauugcuugaccgacua

SEQ ID NO: 107426 - RNA, 19 nt, Artificial Sequence
  Description of Artificial Sequence: Synthetic oligonucleotide
ggauauuauacccucuaaa

SEQ ID NO: 107427 - RNA, 19 nt, Artificial Sequence
  Description of Artificial Sequence: Synthetic oligonucleotide
caucgugguuuaauaacuc

SEQ ID NO: 107428 - RNA, 19 nt, Artificial Sequence
  Description of Artificial Sequence: Synthetic oligonucleotide
auucaccuguauuugcaaa

SEQ ID NO: 107429 - RNA, 19 nt, Artificial Sequence
  Description of Artificial Sequence: Synthetic oligonucleotide
ugucccugggcuaggucgc

SEQ ID NO: 107430 - RNA, 19 nt, Artificial Sequence
  Description of Artificial Sequence: Synthetic oligonucleotide
acucuuagcuuuguugugu

SEQ ID NO: 107431 - RNA, 19 nt, Artificial Sequence
  Description of Artificial Sequence: Synthetic oligonucleotide
uuacaaccugauucuuuac

SEQ ID NO: 107432 - RNA, 19 nt, Artificial Sequence
  Description of Artificial Sequence: Synthetic oligonucleotide
cuggcgccuaggcauagcg

SEQ ID NO: 107433 - RNA, 19 nt, Artificial Sequence
  Description of Artificial Sequence: Synthetic oligonucleotide
uugcuuuagcaagugggac

SEQ ID NO: 107434 - RNA, 19 nt, Artificial Sequence
  Description of Artificial Sequence: Synthetic oligonucleotide
cagaaauguacuacuagcu

SEQ ID NO: 107435 - RNA, 19 nt, Artificial Sequence
  Description of Artificial Sequence: Synthetic oligonucleotide
uccugcuauaucucagaaa

SEQ ID NO: 107436 - RNA, 19 nt, Artificial Sequence
  Description of Artificial Sequence: Synthetic oligonucleotide
uuuucgguucauagccaaa

SEQ ID NO: 107437 - RNA, 19 nt, Artificial Sequence
  Description of Artificial Sequence: Synthetic oligonucleotide
ggcgccuaggcauagcgcc

SEQ ID NO: 107438 - RNA, 19 nt, Artificial Sequence
  Description of Artificial Sequence: Synthetic oligonucleotide
aggcuugugagcuuuucua

SEQ ID NO: 107439 - RNA, 19 nt, Artificial Sequence
  Description of Artificial Sequence: Synthetic oligonucleotide
aacuaacugugggcccagc

SEQ ID NO: 107440 - RNA, 19 nt, Artificial Sequence
  Description of Artificial Sequence: Synthetic oligonucleotide
gacaaccauauaauaaaua

SEQ ID NO: 107441 - RNA, 19 nt, Artificial Sequence
  Description of Artificial Sequence: Synthetic oligonucleotide
agcccugugaaugguuaac

SEQ ID NO: 107442 - RNA, 19 nt, Artificial Sequence
  Description of Artificial Sequence: Synthetic oligonucleotide
gcuucguuccauuuaucug

SEQ ID NO: 107443 - RNA, 19 nt, Artificial Sequence
  Description of Artificial Sequence: Synthetic oligonucleotide
gacaggucacuuuauugcu

SEQ ID NO: 107444 - RNA, 19 nt, Artificial Sequence
  Description of Artificial Sequence: Synthetic oligonucleotide
ucauggcuaaacagcugaa

SEQ ID NO: 107445 - RNA, 19 nt, Artificial Sequence
  Description of Artificial Sequence: Synthetic oligonucleotide
ugcauccauugcauagaga

SEQ ID NO: 107446 - RNA, 19 nt, Artificial Sequence
  Description of Artificial Sequence: Synthetic oligonucleotide
ucaucaucaucaucaucuu

SEQ ID NO: 107447 - RNA, 19 nt, Artificial Sequence
  Description of Artificial Sequence: Synthetic oligonucleotide
ucguaucaucugcauuaca

SEQ ID NO: 107448 - RNA, 19 nt, Artificial Sequence
  Description of Artificial Sequence: Synthetic oligonucleotide
caagugggacugugcaacc

SEQ ID NO: 107449 - RNA, 19 nt, Artificial Sequence
  Description of Artificial Sequence: Synthetic oligonucleotide
cuucacgccucauuuccuc

SEQ ID NO: 107450 - RNA, 19 nt, Artificial Sequence
  Description of Artificial Sequence: Synthetic oligonucleotide
cugcuauaucucagaaaug

SEQ ID NO: 107451 - RNA, 19 nt, Artificial Sequence
  Description of Artificial Sequence: Synthetic oligonucleotide
ccaaaccuacuuuaucaag

SEQ ID NO: 107452 - RNA, 19 nt, Artificial Sequence
  Description of Artificial Sequence: Synthetic oligonucleotide
aacccucaacugcaauuau

SEQ ID NO: 107453 - RNA, 19 nt, Artificial Sequence
  Description of Artificial Sequence: Synthetic oligonucleotide
cauagcgccagaacuaacu

SEQ ID NO: 107454 - RNA, 19 nt, Artificial Sequence
  Description of Artificial Sequence: Synthetic oligonucleotide
acacggcaaguaucguauc

SEQ ID NO: 107455 - RNA, 19 nt, Artificial Sequence
  Description of Artificial Sequence: Synthetic oligonucleotide
guaaaagcaucgugguuua

SEQ ID NO: 107456 - RNA, 19 nt, Artificial Sequence
  Description of Artificial Sequence: Synthetic oligonucleotide
ggagaguuaggauauuaua

SEQ ID NO: 107457 - RNA, 19 nt, Artificial Sequence
  Description of Artificial Sequence: Synthetic oligonucleotide
cuugugagcuuuucuaagu

SEQ ID NO: 107458 - RNA, 19 nt, Artificial Sequence
  Description of Artificial Sequence: Synthetic oligonucleotide
aguagauagcauacauuaa

SEQ ID NO: 107459 - RNA, 19 nt, Artificial Sequence
  Description of Artificial Sequence: Synthetic oligonucleotide
gguuuuauggggaggccug

SEQ ID NO: 107460 - RNA, 19 nt, Artificial Sequence
  Description of Artificial Sequence: Synthetic oligonucleotide
ccugcuauaucucagaaau

SEQ ID NO: 107461 - RNA, 19 nt, Artificial Sequence
  Description of Artificial Sequence: Synthetic oligonucleotide
auguaacauuacaauugug

SEQ ID NO: 107462 - RNA, 19 nt, Artificial Sequence
  Description of Artificial Sequence: Synthetic oligonucleotide
acaggucacuuuauugcug

SEQ ID NO: 107463 - RNA, 19 nt, Artificial Sequence
  Description of Artificial Sequence: Synthetic oligonucleotide
uggcgccuaggcauagcgc

SEQ ID NO: 107464 - RNA, 19 nt, Artificial Sequence
  Description of Artificial Sequence: Synthetic oligonucleotide
acguuuggacuuacaaucu

SEQ ID NO: 107465 - RNA, 19 nt, Artificial Sequence
  Description of Artificial Sequence: Synthetic oligonucleotide
caagcuaagcuaugucaaa

SEQ ID NO: 107466 - RNA, 19 nt, Artificial Sequence
  Description of Artificial Sequence: Synthetic oligonucleotide
uuucccuaaugugcuugga

SEQ ID NO: 107467 - RNA, 19 nt, Artificial Sequence
  Description of Artificial Sequence: Synthetic oligonucleotide
gcggcagugucccauaauc

SEQ ID NO: 107468 - RNA, 19 nt, Artificial Sequence
  Description of Artificial Sequence: Synthetic oligonucleotide
gcacuuaauuuguaaaccu

SEQ ID NO: 107469 - RNA, 19 nt, Artificial Sequence
  Description of Artificial Sequence: Synthetic oligonucleotide
gauaaggggcuugaucagu

SEQ ID NO: 107470 - RNA, 19 nt, Artificial Sequence
  Description of Artificial Sequence: Synthetic oligonucleotide
acggcaaguaucguaucau

SEQ ID NO: 107471 - RNA, 19 nt, Artificial Sequence
  Description of Artificial Sequence: Synthetic oligonucleotide
auugcuugaccgacuaaua

SEQ ID NO: 107472 - RNA, 19 nt, Artificial Sequence
  Description of Artificial Sequence: Synthetic oligonucleotide
ucagagcacacggcaagua

SEQ ID NO: 107473 - RNA, 19 nt, Artificial Sequence
  Description of Artificial Sequence: Synthetic oligonucleotide
cacccaugaucauguaaca

SEQ ID NO: 107474 - RNA, 19 nt, Artificial Sequence
  Description of Artificial Sequence: Synthetic oligonucleotide
ugccuacaauugcuuguau

SEQ ID NO: 107475 - RNA, 19 nt, Artificial Sequence
  Description of Artificial Sequence: Synthetic oligonucleotide
augccuacaauugcuugua

SEQ ID NO: 107476 - RNA, 19 nt, Artificial Sequence
  Description of Artificial Sequence: Synthetic oligonucleotide
ggucuggaccuguugaaaa

SEQ ID NO: 107477 - RNA, 19 nt, Artificial Sequence
  Description of Artificial Sequence: Synthetic oligonucleotide
gaaauuccggaguucccuu

SEQ ID NO: 107478 - RNA, 19 nt, Artificial Sequence
  Description of Artificial Sequence: Synthetic oligonucleotide
cuggcaguucguccagcug

SEQ ID NO: 107479 - RNA, 19 nt, Artificial Sequence
  Description of Artificial Sequence: Synthetic oligonucleotide
uuucgacguuucauuucuu

SEQ ID NO: 107480 - RNA, 19 nt, Artificial Sequence
  Description of Artificial Sequence: Synthetic oligonucleotide
ugcggcagugucccauaau

SEQ ID NO: 107481 - RNA, 19 nt, Artificial Sequence
  Description of Artificial Sequence: Synthetic oligonucleotide
gcagcuaaugucgcuucag

SEQ ID NO: 107482 - RNA, 19 nt, Artificial Sequence
  Description of Artificial Sequence: Synthetic oligonucleotide
cuggaccuguugaaaagua

SEQ ID NO: 107483 - RNA, 19 nt, Artificial Sequence
  Description of Artificial Sequence: Synthetic oligonucleotide
auuccauccuggacuauua

SEQ ID NO: 107484 - RNA, 19 nt, Artificial Sequence
  Description of Artificial Sequence: Synthetic oligonucleotide
gaagacacguuuggacuua

SEQ ID NO: 107485 - RNA, 19 nt, Artificial Sequence
  Description of Artificial Sequence: Synthetic oligonucleotide
ccuuucgacguuucauuuc

SEQ ID NO: 107486 - RNA, 19 nt, Artificial Sequence
  Description of Artificial Sequence: Synthetic oligonucleotide
cuugaccgacuaauaauau

SEQ ID NO: 107487 - RNA, 19 nt, Artificial Sequence
  Description of Artificial Sequence: Synthetic oligonucleotide
ggucacuuuauugcuggca

SEQ ID NO: 107488 - RNA, 19 nt, Artificial Sequence
  Description of Artificial Sequence: Synthetic oligonucleotide
ccuacuuuaucaaguggaa

SEQ ID NO: 107489 - RNA, 19 nt, Artificial Sequence
  Description of Artificial Sequence: Synthetic oligonucleotide
ggacugggucaaauggucc

SEQ ID NO: 107490 - RNA, 19 nt, Artificial Sequence
  Description of Artificial Sequence: Synthetic oligonucleotide
gcacccuguaauugaguac

SEQ ID NO: 107491 - RNA, 19 nt, Artificial Sequence
  Description of Artificial Sequence: Synthetic oligonucleotide
guaauugaguacaguacuu

SEQ ID NO: 107492 - RNA, 19 nt, Artificial Sequence
  Description of Artificial Sequence: Synthetic oligonucleotide
uaaaagcaucgugguuuaa

SEQ ID NO: 107493 - RNA, 19 nt, Artificial Sequence
  Description of Artificial Sequence: Synthetic oligonucleotide
gaauagccugcuccuggcu

SEQ ID NO: 107494 - RNA, 19 nt, Artificial Sequence
  Description of Artificial Sequence: Synthetic oligonucleotide
guaucguaucaucugcauu

SEQ ID NO: 107495 - RNA, 19 nt, Artificial Sequence
  Description of Artificial Sequence: Synthetic oligonucleotide
aggcauagcgccagaacua

SEQ ID NO: 107496 - RNA, 19 nt, Artificial Sequence
  Description of Artificial Sequence: Synthetic oligonucleotide
gauuccauccuggacuauu

SEQ ID NO: 107497 - RNA, 19 nt, Artificial Sequence
  Description of Artificial Sequence: Synthetic oligonucleotide
ccuaagugaggguugggaa

SEQ ID NO: 107498 - RNA, 19 nt, Artificial Sequence
  Description of Artificial Sequence: Synthetic oligonucleotide
cuccugcuauaucucagaa

SEQ ID NO: 107499 - RNA, 19 nt, Artificial Sequence
  Description of Artificial Sequence: Synthetic oligonucleotide
uucuggcgccuaggcauag

SEQ ID NO: 107500 - RNA, 19 nt, Artificial Sequence
  Description of Artificial Sequence: Synthetic oligonucleotide
ggcaaguaucguaucaucu

SEQ ID NO: 107501 - RNA, 19 nt, Artificial Sequence
  Description of Artificial Sequence: Synthetic oligonucleotide
aggacaagucugacagaca

SEQ ID NO: 107502 - RNA, 19 nt, Artificial Sequence
  Description of Artificial Sequence: Synthetic oligonucleotide
ucuggcgccuaggcauagc

SEQ ID NO: 107503 - RNA, 19 nt, Artificial Sequence
  Description of Artificial Sequence: Synthetic oligonucleotide
ccaucucucauggcuaaac

SEQ ID NO: 107504 - RNA, 19 nt, Artificial Sequence
  Description of Artificial Sequence: Synthetic oligonucleotide
gcaucgugguuuaauaacu

SEQ ID NO: 107505 - RNA, 19 nt, Artificial Sequence
  Description of Artificial Sequence: Synthetic oligonucleotide
acccucaacugcaauuaua

SEQ ID NO: 107506 - RNA, 19 nt, Artificial Sequence
  Description of Artificial Sequence: Synthetic oligonucleotide
ccgacuaauaauauucuuu

SEQ ID NO: 107507 - RNA, 19 nt, Artificial Sequence
  Description of Artificial Sequence: Synthetic oligonucleotide
ggacuaccaacuguucguc

SEQ ID NO: 107508 - RNA, 19 nt, Artificial Sequence
  Description of Artificial Sequence: Synthetic oligonucleotide
gugcaaauagcugcacccu

SEQ ID NO: 107509 - RNA, 19 nt, Artificial Sequence
  Description of Artificial Sequence: Synthetic oligonucleotide
gcccaugacauguggugga

SEQ ID NO: 107510 - RNA, 19 nt, Artificial Sequence
  Description of Artificial Sequence: Synthetic oligonucleotide
gcuauaucucagaaaugua

SEQ ID NO: 107511 - RNA, 19 nt, Artificial Sequence
  Description of Artificial Sequence: Synthetic oligonucleotide
cagcuaaugucgcuucagu

SEQ ID NO: 107512 - RNA, 19 nt, Artificial Sequence
  Description of Artificial Sequence: Synthetic oligonucleotide
agcacacggcaaguaucgu

SEQ ID NO: 107513 - RNA, 19 nt, Artificial Sequence
  Description of Artificial Sequence: Synthetic oligonucleotide
ucauacucucgaggccuuu

SEQ ID NO: 107514 - RNA, 19 nt, Artificial Sequence
  Description of Artificial Sequence: Synthetic oligonucleotide
gucccacuagcagaagucu

SEQ ID NO: 107515 - RNA, 19 nt, Artificial Sequence
  Description of Artificial Sequence: Synthetic oligonucleotide
ggcauagcgccagaacuaa

SEQ ID NO: 107516 - RNA, 19 nt, Artificial Sequence
  Description of Artificial Sequence: Synthetic oligonucleotide
agacacguuuggacuuaca

SEQ ID NO: 107517 - RNA, 19 nt, Artificial Sequence
  Description of Artificial Sequence: Synthetic oligonucleotide
cuugcggcagugucccaua

SEQ ID NO: 107518 - RNA, 19 nt, Artificial Sequence
  Description of Artificial Sequence: Synthetic oligonucleotide
guacuacuagcugcuuuua

SEQ ID NO: 107519 - RNA, 19 nt, Artificial Sequence
  Description of Artificial Sequence: Synthetic oligonucleotide
ccggaguucccuuagacuu

SEQ ID NO: 107520 - RNA, 19 nt, Artificial Sequence
  Description of Artificial Sequence: Synthetic oligonucleotide
gaaacccuugcggcagugu

SEQ ID NO: 107521 - RNA, 19 nt, Artificial Sequence
  Description of Artificial Sequence: Synthetic oligonucleotide
ccugaacuggcaguucguc

SEQ ID NO: 107522 - RNA, 19 nt, Artificial Sequence
  Description of Artificial Sequence: Synthetic oligonucleotide
ggguuuuauggggaggccu

SEQ ID NO: 107523 - RNA, 19 nt, Artificial Sequence
  Description of Artificial Sequence: Synthetic oligonucleotide
cggcaaguaucguaucauc

SEQ ID NO: 107524 - RNA, 19 nt, Artificial Sequence
  Description of Artificial Sequence: Synthetic oligonucleotide
gccaguguauagaaaucua

SEQ ID NO: 107525 - RNA, 19 nt, Artificial Sequence
  Description of Artificial Sequence: Synthetic oligonucleotide
cccuaaugugcuuggauau

SEQ ID NO: 107526 - RNA, 19 nt, Artificial Sequence
  Description of Artificial Sequence: Synthetic oligonucleotide
ggccuuucgacguuucauu

SEQ ID NO: 107527 - RNA, 19 nt, Artificial Sequence
  Description of Artificial Sequence: Synthetic oligonucleotide
cgucaucaucaucaucauc

SEQ ID NO: 107528 - RNA, 19 nt, Artificial Sequence
  Description of Artificial Sequence: Synthetic oligonucleotide
cccaugacaugugguggac

SEQ ID NO: 107529 - RNA, 19 nt, Artificial Sequence
  Description of Artificial Sequence: Synthetic oligonucleotide
gggcuaggucgcccaggag

SEQ ID NO: 107530 - RNA, 19 nt, Artificial Sequence
  Description of Artificial Sequence: Synthetic oligonucleotide
ggcaaacgacaguaugcau

SEQ ID NO: 107531 - RNA, 19 nt, Artificial Sequence
  Description of Artificial Sequence: Synthetic oligonucleotide
gcauagcgccagaacuaac

SEQ ID NO: 107532 - RNA, 19 nt, Artificial Sequence
  Description of Artificial Sequence: Synthetic oligonucleotide
gggcagaucuguagccaga

SEQ ID NO: 107533 - RNA, 19 nt, Artificial Sequence
  Description of Artificial Sequence: Synthetic oligonucleotide
gccuuucgacguuucauuu

SEQ ID NO: 107534 - RNA, 19 nt, Artificial Sequence
  Description of Artificial Sequence: Synthetic oligonucleotide
cgguucauagccaaagauu

SEQ ID NO: 107535 - RNA, 19 nt, Artificial Sequence
  Description of Artificial Sequence: Synthetic oligonucleotide
guccauugcuugaccgacu

SEQ ID NO: 107536 - RNA, 19 nt, Artificial Sequence
  Description of Artificial Sequence: Synthetic oligonucleotide
ggcagccagauaaaauuuu

SEQ ID NO: 107537 - RNA, 19 nt, Artificial Sequence
  Description of Artificial Sequence: Synthetic oligonucleotide
cuuuagcaagugggacugu

SEQ ID NO: 107538 - RNA, 19 nt, Artificial Sequence
  Description of Artificial Sequence: Synthetic oligonucleotide
cgccuaggcauagcgccag

SEQ ID NO: 107539 - RNA, 19 nt, Artificial Sequence
  Description of Artificial Sequence: Synthetic oligonucleotide
gcgccuaggcauagcgcca

SEQ ID NO: 107540 - RNA, 19 nt, Artificial Sequence
  Description of Artificial Sequence: Synthetic oligonucleotide
ucuuauauucgucagaaca

SEQ ID NO: 107541 - RNA, 19 nt, Artificial Sequence
  Description of Artificial Sequence: Synthetic oligonucleotide
uauuuaacaggacaauugg

SEQ ID NO: 107542 - RNA, 19 nt, Artificial Sequence
  Description of Artificial Sequence: Synthetic oligonucleotide
guauaaaucaaucaagacc

SEQ ID NO: 107543 - RNA, 19 nt, Artificial Sequence
  Description of Artificial Sequence: Synthetic oligonucleotide
aauguggaguaccacaugg

SEQ ID NO: 107544 - RNA, 19 nt, Artificial Sequence
  Description of Artificial Sequence: Synthetic oligonucleotide
aauaguuaguuuaucuggc

SEQ ID NO: 107545 - RNA, 19 nt, Artificial Sequence
  Description of Artificial Sequence: Synthetic oligonucleotide
  modified_base (7)..(7): a, c, u, g, unknown or other
uucaaunacccacagcuga

SEQ ID NO: 107546 - RNA, 19 nt, Artificial Sequence
  Description of Artificial Sequence: Synthetic oligonucleotide
uacauaauuagcuugugga

SEQ ID NO: 107547 - RNA, 19 nt, Artificial Sequence
  Description of Artificial Sequence: Synthetic oligonucleotide
caauaguuaguuuaucugg

SEQ ID NO: 107548 - RNA, 19 nt, Artificial Sequence
  Description of Artificial Sequence: Synthetic oligonucleotide
agggagauucguuacaggc

SEQ ID NO: 107549 - RNA, 19 nt, Artificial Sequence
  Description of Artificial Sequence: Synthetic oligonucleotide
aauuaaagaagcucaguaa

SEQ ID NO: 107550 - RNA, 19 nt, Artificial Sequence
  Description of Artificial Sequence: Synthetic oligonucleotide
uuauuggugacuuauuaga

SEQ ID NO: 107551 - RNA, 19 nt, Artificial Sequence
  Description of Artificial Sequence: Synthetic oligonucleotide
aauaagugggcuuucugca

SEQ ID NO: 107552 - RNA, 19 nt, Artificial Sequence
  Description of Artificial Sequence: Synthetic oligonucleotide
uauuaggaacacaggagcg

SEQ ID NO: 107553 - RNA, 19 nt, Artificial Sequence
  Description of Artificial Sequence: Synthetic oligonucleotide
uucucauacaacuauagau

SEQ ID NO: 107554 - RNA, 19 nt, Artificial Sequence
  Description of Artificial Sequence: Synthetic oligonucleotide
ugucuuacaagcaagucaa

SEQ ID NO: 107555 - RNA, 19 nt, Artificial Sequence
  Description of Artificial Sequence: Synthetic oligonucleotide
aagguaagacccuacacga

SEQ ID NO: 107556 - RNA, 19 nt, Artificial Sequence
  Description of Artificial Sequence: Synthetic oligonucleotide
cuauuaggaacacaggagc

SEQ ID NO: 107557 - RNA, 19 nt, Artificial Sequence
  Description of Artificial Sequence: Synthetic oligonucleotide
gaauaagugggcuuucugc

SEQ ID NO: 107558 - RNA, 19 nt, Artificial Sequence
  Description of Artificial Sequence: Synthetic oligonucleotide
uuauuaagugggucaaagg

SEQ ID NO: 107559 - RNA, 19 nt, Artificial Sequence
  Description of Artificial Sequence: Synthetic oligonucleotide
uuccguucaaucaaaggag

SEQ ID NO: 107560 - RNA, 19 nt, Artificial Sequence
  Description of Artificial Sequence: Synthetic oligonucleotide
acuaagguuacuaugguag

SEQ ID NO: 107561 - RNA, 19 nt, Artificial Sequence
  Description of Artificial Sequence: Synthetic oligonucleotide
aguaccaaaggcuucuauc

SEQ ID NO: 107562 - RNA, 19 nt, Artificial Sequence
  Description of Artificial Sequence: Synthetic oligonucleotide
aguaaaacucauaaagccg

SEQ ID NO: 107563 - RNA, 19 nt, Artificial Sequence
  Description of Artificial Sequence: Synthetic oligonucleotide
ugacacaccacaccuaugc

SEQ ID NO: 107564 - RNA, 19 nt, Artificial Sequence
  Description of Artificial Sequence: Synthetic oligonucleotide
aaaaggggcacacuaacaa

SEQ ID NO: 107565 - RNA, 19 nt, Artificial Sequence
  Description of Artificial Sequence: Synthetic oligonucleotide
uucuuauucccaaacaaaa

SEQ ID NO: 107566 - RNA, 19 nt, Artificial Sequence
  Description of Artificial Sequence: Synthetic oligonucleotide
aacacccuugcaaagcucc

SEQ ID NO: 107567 - RNA, 19 nt, Artificial Sequence
  Description of Artificial Sequence: Synthetic oligonucleotide
ucucauacaacuauagauu

SEQ ID NO: 107568 - RNA, 19 nt, Artificial Sequence
  Description of Artificial Sequence: Synthetic oligonucleotide
uucgucagaacaauucuug

SEQ ID NO: 107569 - RNA, 19 nt, Artificial Sequence
  Description of Artificial Sequence: Synthetic oligonucleotide
uucaugucuuacaagcaag

SEQ ID NO: 107570 - RNA, 19 nt, Artificial Sequence
  Description of Artificial Sequence: Synthetic oligonucleotide
acaauuuaucuacuaagcu

SEQ ID NO: 107571 - RNA, 19 nt, Artificial Sequence
  Description of Artificial Sequence: Synthetic oligonucleotide
aauccuaaacucaauucag

SEQ ID NO: 107572 - RNA, 19 nt, Artificial Sequence
  Description of Artificial Sequence: Synthetic oligonucleotide
acaauuggcgaguaagcuc

SEQ ID NO: 107573 - RNA, 19 nt, Artificial Sequence
  Description of Artificial Sequence: Synthetic oligonucleotide
uauucgucagaacaauucu

SEQ ID NO: 107574 - RNA, 19 nt, Artificial Sequence
  Description of Artificial Sequence: Synthetic oligonucleotide
ugcucaaauagccaggguc

SEQ ID NO: 107575 - RNA, 19 nt, Artificial Sequence
  Description of Artificial Sequence: Synthetic oligonucleotide
uccgucuuguucgagaacg

SEQ ID NO: 107576 - RNA, 19 nt, Artificial Sequence
  Description of Artificial Sequence: Synthetic oligonucleotide
guaagcucaaauuaacuuc

SEQ ID NO: 107577 - RNA, 19 nt, Artificial Sequence
  Description of Artificial Sequence: Synthetic oligonucleotide
cuugaauaagacuccuggg

SEQ ID NO: 107578 - RNA, 19 nt, Artificial Sequence
  Description of Artificial Sequence: Synthetic oligonucleotide
uuggaagaagcuuaugacu

SEQ ID NO: 107579 - RNA, 19 nt, Artificial Sequence
  Description of Artificial Sequence: Synthetic oligonucleotide
uccguucaaucaaaggagg

SEQ ID NO: 107580 - RNA, 19 nt, Artificial Sequence
  Description of Artificial Sequence: Synthetic oligonucleotide
uguaagcucaaauuaacuu

SEQ ID NO: 107581 - RNA, 19 nt, Artificial Sequence
  Description of Artificial Sequence: Synthetic oligonucleotide
auuaggaacacaggagcgc

SEQ ID NO: 107582 - RNA, 19 nt, Artificial Sequence
  Description of Artificial Sequence: Synthetic oligonucleotide
uccucuugccaauaguuag

SEQ ID NO: 107583 - RNA, 19 nt, Artificial Sequence
  Description of Artificial Sequence: Synthetic oligonucleotide
augucuuacaagcaaguca

SEQ ID NO: 107584 - RNA, 19 nt, Artificial Sequence
  Description of Artificial Sequence: Synthetic oligonucleotide
aaccauacagacuggggca

SEQ ID NO: 107585 - RNA, 19 nt, Artificial Sequence
  Description of Artificial Sequence: Synthetic oligonucleotide
uauuggugacuuauuagac

SEQ ID NO: 107586 - RNA, 19 nt, Artificial Sequence
  Description of Artificial Sequence: Synthetic oligonucleotide
  modified_base (6)..(6): a, c, u, g, unknown or other
ucaaunacccacagcugag

SEQ ID NO: 107587 - RNA, 19 nt, Artificial Sequence
  Description of Artificial Sequence: Synthetic oligonucleotide
acaccuaugccuugcaauc

SEQ ID NO: 107588 - RNA, 19 nt, Artificial Sequence
  Description of Artificial Sequence: Synthetic oligonucleotide
aggcauaaugauucaacuc

SEQ ID NO: 107589 - RNA, 19 nt, Artificial Sequence
  Description of Artificial Sequence: Synthetic oligonucleotide
aaaggcccauuuaaaauuc

SEQ ID NO: 107590 - RNA, 19 nt, Artificial Sequence
  Description of Artificial Sequence: Synthetic oligonucleotide
uguagcaaaagacgauuac

SEQ ID NO: 107591 - RNA, 19 nt, Artificial Sequence
  Description of Artificial Sequence: Synthetic oligonucleotide
aaaagggagauucguuaca

SEQ ID NO: 107592 - RNA, 19 nt, Artificial Sequence
  Description of Artificial Sequence: Synthetic oligonucleotide
agugugauaaugacacacc

SEQ ID NO: 107593 - RNA, 19 nt, Artificial Sequence
  Description of Artificial Sequence: Synthetic oligonucleotide
uguggaguaccacauggga

SEQ ID NO: 107594 - RNA, 19 nt, Artificial Sequence
  Description of Artificial Sequence: Synthetic oligonucleotide
aaucucagauaugucaucu

SEQ ID NO: 107595 - RNA, 19 nt, Artificial Sequence
  Description of Artificial Sequence: Synthetic oligonucleotide
uguucgagaacgugccugg

SEQ ID NO: 107596 - RNA, 19 nt, Artificial Sequence
  Description of Artificial Sequence: Synthetic oligonucleotide
uaucuacuaagcuaacagu

SEQ ID NO: 107597 - RNA, 19 nt, Artificial Sequence
  Description of Artificial Sequence: Synthetic oligonucleotide
auagauucgaaauguuagu

SEQ ID NO: 107598 - RNA, 19 nt, Artificial Sequence
  Description of Artificial Sequence: Synthetic oligonucleotide
uuaagugggucaaaggauu

SEQ ID NO: 107599 - RNA, 19 nt, Artificial Sequence
  Description of Artificial Sequence: Synthetic oligonucleotide
ugacaccuaagcuucacca

SEQ ID NO: 107600 - RNA, 19 nt, Artificial Sequence
  Description of Artificial Sequence: Synthetic oligonucleotide
uggcauaauccuaaacuca

SEQ ID NO: 107601 - RNA, 19 nt, Artificial Sequence
  Description of Artificial Sequence: Synthetic oligonucleotide
ucuacuaagcuaacaguau

SEQ ID NO: 107602 - RNA, 19 nt, Artificial Sequence
  Description of Artificial Sequence: Synthetic oligonucleotide
agacccuacacgaaaaggg

SEQ ID NO: 107603 - RNA, 19 nt, Artificial Sequence
  Description of Artificial Sequence: Synthetic oligonucleotide
agauucgaaauguuagugu

SEQ ID NO: 107604 - RNA, 19 nt, Artificial Sequence
  Description of Artificial Sequence: Synthetic oligonucleotide
uagauucgaaauguuagug

SEQ ID NO: 107605 - RNA, 19 nt, Artificial Sequence
  Description of Artificial Sequence: Synthetic oligonucleotide
ugauaaugacacaccacac

SEQ ID NO: 107606 - RNA, 19 nt, Artificial Sequence
  Description of Artificial Sequence: Synthetic oligonucleotide
uccuaaacucaauucagaa

SEQ ID NO: 107607 - RNA, 19 nt, Artificial Sequence
  Description of Artificial Sequence: Synthetic oligonucleotide
acaccuagggucuaaugug

SEQ ID NO: 107608 - RNA, 19 nt, Artificial Sequence
  Description of Artificial Sequence: Synthetic oligonucleotide
uggguugucgguauucucu

SEQ ID NO: 107609 - RNA, 19 nt, Artificial Sequence
  Description of Artificial Sequence: Synthetic oligonucleotide
ggauuuacacaucuucccg

SEQ ID NO: 107610 - RNA, 19 nt, Artificial Sequence
  Description of Artificial Sequence: Synthetic oligonucleotide
ggauaaacuggcauaaucc

SEQ ID NO: 107611 - RNA, 19 nt, Artificial Sequence
  Description of Artificial Sequence: Synthetic oligonucleotide
gggacuauuaggaacacag

SEQ ID NO: 107612 - RNA, 19 nt, Artificial Sequence
  Description of Artificial Sequence: Synthetic oligonucleotide
ucauaaagccgaacgggac

SEQ ID NO: 107613 - RNA, 19 nt, Artificial Sequence
  Description of Artificial Sequence: Synthetic oligonucleotide
ucuaucgggaauguggagu

SEQ ID NO: 107614 - RNA, 19 nt, Artificial Sequence
  Description of Artificial Sequence: Synthetic oligonucleotide
ggagauucguuacaggcag

SEQ ID NO: 107615 - RNA, 19 nt, Artificial Sequence
  Description of Artificial Sequence: Synthetic oligonucleotide
ccuugaauaagacuccugg

SEQ ID NO: 107616 - RNA, 19 nt, Artificial Sequence
  Description of Artificial Sequence: Synthetic oligonucleotide
caauuuaucuacuaagcua

SEQ ID NO: 107617 - RNA, 19 nt, Artificial Sequence
  Description of Artificial Sequence: Synthetic oligonucleotide
ccauacauauauuuuagug

SEQ ID NO: 107618 - RNA, 19 nt, Artificial Sequence
  Description of Artificial Sequence: Synthetic oligonucleotide
uggaauagggcuccguaaa

SEQ ID NO: 107619 - RNA, 19 nt, Artificial Sequence
  Description of Artificial Sequence: Synthetic oligonucleotide
guaacaaaagggagauucg

SEQ ID NO: 107620 - RNA, 19 nt, Artificial Sequence
  Description of Artificial Sequence: Synthetic oligonucleotide
uacuaugguagaauuuuau

SEQ ID NO: 107621 - RNA, 19 nt, Artificial Sequence
  Description of Artificial Sequence: Synthetic oligonucleotide
cuagggucuaaugugcucc

SEQ ID NO: 107622 - RNA, 19 nt, Artificial Sequence
  Description of Artificial Sequence: Synthetic oligonucleotide
gacccuacacgaaaagggg

SEQ ID NO: 107623 - RNA, 19 nt, Artificial Sequence
  Description of Artificial Sequence: Synthetic oligonucleotide
auagaaaccuuacuuccau

SEQ ID NO: 107624 - RNA, 19 nt, Artificial Sequence
  Description of Artificial Sequence: Synthetic oligonucleotide
uguagggaagaaacugaga

SEQ ID NO: 107625 - RNA, 19 nt, Artificial Sequence
  Description of Artificial Sequence: Synthetic oligonucleotide
agacaaaguaccaaaggcu

SEQ ID NO: 107626 - RNA, 19 nt, Artificial Sequence
  Description of Artificial Sequence: Synthetic oligonucleotide
uccgucucaucacaugggc

SEQ ID NO: 107627 - RNA, 19 nt, Artificial Sequence
  Description of Artificial Sequence: Synthetic oligonucleotide
uucguuacaggcagaggac

SEQ ID NO: 107628 - RNA, 19 nt, Artificial Sequence
  Description of Artificial Sequence: Synthetic oligonucleotide
auggacaucgugcucaaau

SEQ ID NO: 107629 - RNA, 19 nt, Artificial Sequence
  Description of Artificial Sequence: Synthetic oligonucleotide
aacuaagguuacuauggua

SEQ ID NO: 107630 - RNA, 19 nt, Artificial Sequence
  Description of Artificial Sequence: Synthetic oligonucleotide
ucgugcucaaauagccagg

SEQ ID NO: 107631 - RNA, 19 nt, Artificial Sequence
  Description of Artificial Sequence: Synthetic oligonucleotide
acuaagcuaacaguauuug

SEQ ID NO: 107632 - RNA, 19 nt, Artificial Sequence
  Description of Artificial Sequence: Synthetic oligonucleotide
augagaaugcgugucaaca

SEQ ID NO: 107633 - RNA, 19 nt, Artificial Sequence
  Description of Artificial Sequence: Synthetic oligonucleotide
aaggggcacacuaacaaca

SEQ ID NO: 107634 - RNA, 19 nt, Artificial Sequence
  Description of Artificial Sequence: Synthetic oligonucleotide
agcaaaagacgauuacagu

SEQ ID NO: 107635 - RNA, 19 nt, Artificial Sequence
  Description of Artificial Sequence: Synthetic oligonucleotide
acaccuaagcuucaccaca

SEQ ID NO: 107636 - RNA, 19 nt, Artificial Sequence
  Description of Artificial Sequence: Synthetic oligonucleotide
acagggcggacuuuacaac

SEQ ID NO: 107637 - RNA, 19 nt, Artificial Sequence
  Description of Artificial Sequence: Synthetic oligonucleotide
uucgaaauguuaguguuua

SEQ ID NO: 107638 - RNA, 19 nt, Artificial Sequence
  Description of Artificial Sequence: Synthetic oligonucleotide
uuggcgaguaagcucccag

SEQ ID NO: 107639 - RNA, 19 nt, Artificial Sequence
  Description of Artificial Sequence: Synthetic oligonucleotide
caugucuacggacucuccc

SEQ ID NO: 107640 - RNA, 19 nt, Artificial Sequence
  Description of Artificial Sequence: Synthetic oligonucleotide
uguuaucuauucuaccauu

SEQ ID NO: 107641 - RNA, 19 nt, Artificial Sequence
  Description of Artificial Sequence: Synthetic oligonucleotide
cagugugauaaugacacac

SEQ ID NO: 107642 - RNA, 19 nt, Artificial Sequence
  Description of Artificial Sequence: Synthetic oligonucleotide
uucuaacuaagguuacuau

SEQ ID NO: 107643 - RNA, 19 nt, Artificial Sequence
  Description of Artificial Sequence: Synthetic oligonucleotide
agauucguuacaggcagag

SEQ ID NO: 107644 - RNA, 19 nt, Artificial Sequence
  Description of Artificial Sequence: Synthetic oligonucleotide
cauaccaaugcucauggaa

SEQ ID NO: 107645 - RNA, 19 nt, Artificial Sequence
  Description of Artificial Sequence: Synthetic oligonucleotide
aacaggacaauuggcgagu

SEQ ID NO: 107646 - RNA, 19 nt, Artificial Sequence
  Description of Artificial Sequence: Synthetic oligonucleotide
  modified_base (8)..(8): a, c, u, g, unknown or other
cuucaaunacccacagcug

SEQ ID NO: 107647 - RNA, 19 nt, Artificial Sequence
  Description of Artificial Sequence: Synthetic oligonucleotide
gggucuaucgggaaugugg

SEQ ID NO: 107648 - RNA, 19 nt, Artificial Sequence
  Description of Artificial Sequence: Synthetic oligonucleotide
guagcaaaagacgauuaca

SEQ ID NO: 107649 - RNA, 19 nt, Artificial Sequence
  Description of Artificial Sequence: Synthetic oligonucleotide
auuaagugggucaaaggau

SEQ ID NO: 107650 - RNA, 19 nt, Artificial Sequence
  Description of Artificial Sequence: Synthetic oligonucleotide
agggguauucccuccaccu

SEQ ID NO: 107651 - RNA, 19 nt, Artificial Sequence
  Description of Artificial Sequence: Synthetic oligonucleotide
ucgagagaacauguaacca

SEQ ID NO: 107652 - RNA, 19 nt, Artificial Sequence
  Description of Artificial Sequence: Synthetic oligonucleotide
cagggcggacuuuacaacc

SEQ ID NO: 107653 - RNA, 19 nt, Artificial Sequence
  Description of Artificial Sequence: Synthetic oligonucleotide
caccuagggucuaaugugc

SEQ ID NO: 107654 - RNA, 19 nt, Artificial Sequence
  Description of Artificial Sequence: Synthetic oligonucleotide
accccauacauauauuuua

SEQ ID NO: 107655 - RNA, 19 nt, Artificial Sequence
  Description of Artificial Sequence: Synthetic oligonucleotide
cucauaaagccgaacggga

SEQ ID NO: 107656 - RNA, 19 nt, Artificial Sequence
  Description of Artificial Sequence: Synthetic oligonucleotide
augucuacggacucucccu

SEQ ID NO: 107657 - RNA, 19 nt, Artificial Sequence
  Description of Artificial Sequence: Synthetic oligonucleotide
gauucgaaauguuaguguu

SEQ ID NO: 107658 - RNA, 19 nt, Artificial Sequence
  Description of Artificial Sequence: Synthetic oligonucleotide
caaaagacgauuacagugu

SEQ ID NO: 107659 - RNA, 19 nt, Artificial Sequence
  Description of Artificial Sequence: Synthetic oligonucleotide
agcucaguaauuagccaac

SEQ ID NO: 107660 - RNA, 19 nt, Artificial Sequence
  Description of Artificial Sequence: Synthetic oligonucleotide
agacgauuacaguguugac

SEQ ID NO: 107661 - RNA, 19 nt, Artificial Sequence
  Description of Artificial Sequence: Synthetic oligonucleotide
gagaagguaagacccuaca

SEQ ID NO: 107662 - RNA, 19 nt, Artificial Sequence
  Description of Artificial Sequence: Synthetic oligonucleotide
ggacaucgugcucaaauag

SEQ ID NO: 107663 - RNA, 19 nt, Artificial Sequence
  Description of Artificial Sequence: Synthetic oligonucleotide
cucggguuucauuuacagc

SEQ ID NO: 107664 - RNA, 19 nt, Artificial Sequence
  Description of Artificial Sequence: Synthetic oligonucleotide
acccuacacgaaaaggggc

SEQ ID NO: 107665 - RNA, 19 nt, Artificial Sequence
  Description of Artificial Sequence: Synthetic oligonucleotide
ucgguauucucugccaucu

SEQ ID NO: 107666 - RNA, 19 nt, Artificial Sequence
  Description of Artificial Sequence: Synthetic oligonucleotide
aucacaugggcaaaggaaa

SEQ ID NO: 107667 - RNA, 19 nt, Artificial Sequence
  Description of Artificial Sequence: Synthetic oligonucleotide
cuucuguaaaggcgggaag

SEQ ID NO: 107668 - RNA, 19 nt, Artificial Sequence
  Description of Artificial Sequence: Synthetic oligonucleotide
uaccccauacauauauuuu

SEQ ID NO: 107669 - RNA, 19 nt, Artificial Sequence
  Description of Artificial Sequence: Synthetic oligonucleotide
aggaaguaucguaggcucc

SEQ ID NO: 107670 - RNA, 19 nt, Artificial Sequence
  Description of Artificial Sequence: Synthetic oligonucleotide
aaagacgauuacaguguug

SEQ ID NO: 107671 - RNA, 19 nt, Artificial Sequence
  Description of Artificial Sequence: Synthetic oligonucleotide
aggaggguauuuaacagga

SEQ ID NO: 107672 - RNA, 19 nt, Artificial Sequence
  Description of Artificial Sequence: Synthetic oligonucleotide
auuuaccuuguagucaaga

SEQ ID NO: 107673 - RNA, 19 nt, Artificial Sequence
  Description of Artificial Sequence: Synthetic oligonucleotide
auuuaucuacuaagcuaac

SEQ ID NO: 107674 - RNA, 19 nt, Artificial Sequence
  Description of Artificial Sequence: Synthetic oligonucleotide
cauaaagccgaacgggaca

SEQ ID NO: 107675 - RNA, 19 nt, Artificial Sequence
  Description of Artificial Sequence: Synthetic oligonucleotide
cacacuucgggcaaaccca

SEQ ID NO: 107676 - RNA, 19 nt, Artificial Sequence
  Description of Artificial Sequence: Synthetic oligonucleotide
ugcgugucaacaugguguc

SEQ ID NO: 107677 - RNA, 19 nt, Artificial Sequence
  Description of Artificial Sequence: Synthetic oligonucleotide
auacuuuggaagaagcuua

SEQ ID NO: 107678 - RNA, 19 nt, Artificial Sequence
  Description of Artificial Sequence: Synthetic oligonucleotide
agaugaacuuaaccauaca

SEQ ID NO: 107679 - RNA, 19 nt, Artificial Sequence
  Description of Artificial Sequence: Synthetic oligonucleotide
agguuacuaugguagaauu

SEQ ID NO: 107680 - RNA, 19 nt, Artificial Sequence
  Description of Artificial Sequence: Synthetic oligonucleotide
auuuggucuccgcaccucu

SEQ ID NO: 107681 - RNA, 19 nt, Artificial Sequence
  Description of Artificial Sequence: Synthetic oligonucleotide
aauuggcgaguaagcuccc

SEQ ID NO: 107682 - RNA, 19 nt, Artificial Sequence
  Description of Artificial Sequence: Synthetic oligonucleotide
agccgaacgggacaucuca

SEQ ID NO: 107683 - RNA, 19 nt, Artificial Sequence
  Description of Artificial Sequence: Synthetic oligonucleotide
uggacaucgugcucaaaua

SEQ ID NO: 107684 - RNA, 19 nt, Artificial Sequence
  Description of Artificial Sequence: Synthetic oligonucleotide
accaugucuacggacucuc

SEQ ID NO: 107685 - RNA, 19 nt, Artificial Sequence
  Description of Artificial Sequence: Synthetic oligonucleotide
aaccuuacuuccaucuuaa

SEQ ID NO: 107686 - RNA, 19 nt, Artificial Sequence
  Description of Artificial Sequence: Synthetic oligonucleotide
caugagaaugcgugucaac

SEQ ID NO: 107687 - RNA, 19 nt, Artificial Sequence
  Description of Artificial Sequence: Synthetic oligonucleotide
gguuuguagcaaaagacga

SEQ ID NO: 107688 - RNA, 19 nt, Artificial Sequence
  Description of Artificial Sequence: Synthetic oligonucleotide
uaacauucuuuaguuggaa

SEQ ID NO: 107689 - RNA, 19 nt, Artificial Sequence
  Description of Artificial Sequence: Synthetic oligonucleotide
uccagcuauguggaguuga

SEQ ID NO: 107690 - RNA, 19 nt, Artificial Sequence
  Description of Artificial Sequence: Synthetic oligonucleotide
cuaagguuacuaugguaga

SEQ ID NO: 107691 - RNA, 19 nt, Artificial Sequence
  Description of Artificial Sequence: Synthetic oligonucleotide
gcuuggugcauaccaaugc

SEQ ID NO: 107692 - RNA, 19 nt, Artificial Sequence
  Description of Artificial Sequence: Synthetic oligonucleotide
ucguuacaggcagaggaca

SEQ ID NO: 107693 - RNA, 19 nt, Artificial Sequence
  Description of Artificial Sequence: Synthetic oligonucleotide
cuaggagaggcauguucac

SEQ ID NO: 107694 - RNA, 19 nt, Artificial Sequence
  Description of Artificial Sequence: Synthetic oligonucleotide
ucauuccguuuccucuugc

SEQ ID NO: 107695 - RNA, 19 nt, Artificial Sequence
  Description of Artificial Sequence: Synthetic oligonucleotide
ugucgguauucucugccau

SEQ ID NO: 107696 - RNA, 19 nt, Artificial Sequence
  Description of Artificial Sequence: Synthetic oligonucleotide
agauuaugcaccacucaga

SEQ ID NO: 107697 - RNA, 19 nt, Artificial Sequence
  Description of Artificial Sequence: Synthetic oligonucleotide
caccuaagcuucaccacac

SEQ ID NO: 107698 - RNA, 19 nt, Artificial Sequence
  Description of Artificial Sequence: Synthetic oligonucleotide
aguaucguaggcucccaua

SEQ ID NO: 107699 - RNA, 19 nt, Artificial Sequence
  Description of Artificial Sequence: Synthetic oligonucleotide
uucgagaacgugccuggau

SEQ ID NO: 107700 - RNA, 19 nt, Artificial Sequence
  Description of Artificial Sequence: Synthetic oligonucleotide
ucucaccaugagaaugcgu

SEQ ID NO: 107701 - RNA, 19 nt, Artificial Sequence
  Description of Artificial Sequence: Synthetic oligonucleotide
aaguaucguaggcucccau

SEQ ID NO: 107702 - RNA, 19 nt, Artificial Sequence
  Description of Artificial Sequence: Synthetic oligonucleotide
caugucuuacaagcaaguc

SEQ ID NO: 107703 - RNA, 19 nt, Artificial Sequence
  Description of Artificial Sequence: Synthetic oligonucleotide
ucgaaauguuaguguuuac

SEQ ID NO: 107704 - RNA, 19 nt, Artificial Sequence
  Description of Artificial Sequence: Synthetic oligonucleotide
ccccauacauauauuuuag

SEQ ID NO: 107705 - RNA, 19 nt, Artificial Sequence
  Description of Artificial Sequence: Synthetic oligonucleotide
ccacacuucgggcaaaccc

SEQ ID NO: 107706 - RNA, 19 nt, Artificial Sequence
  Description of Artificial Sequence: Synthetic oligonucleotide
ugguccgucucaucacaug

SEQ ID NO: 107707 - RNA, 19 nt, Artificial Sequence
  Description of Artificial Sequence: Synthetic oligonucleotide
cacgaaaaggggcacacua

SEQ ID NO: 107708 - RNA, 19 nt, Artificial Sequence
  Description of Artificial Sequence: Synthetic oligonucleotide
acauuguccauuacauuau

SEQ ID NO: 107709 - RNA, 19 nt, Artificial Sequence
  Description of Artificial Sequence: Synthetic oligonucleotide
ggaaguaucguaggcuccc

SEQ ID NO: 107710 - RNA, 19 nt, Artificial Sequence
  Description of Artificial Sequence: Synthetic oligonucleotide
gacaauuggcgaguaagcu

SEQ ID NO: 107711 - RNA, 19 nt, Artificial Sequence
  Description of Artificial Sequence: Synthetic oligonucleotide
acuuaaccauacagacugg

SEQ ID NO: 107712 - RNA, 19 nt, Artificial Sequence
  Description of Artificial Sequence: Synthetic oligonucleotide
cacagggcggacuuuacaa

SEQ ID NO: 107713 - RNA, 19 nt, Artificial Sequence
  Description of Artificial Sequence: Synthetic oligonucleotide
ggacuauuaggaacacagg

SEQ ID NO: 107714 - RNA, 19 nt, Artificial Sequence
  Description of Artificial Sequence: Synthetic oligonucleotide
ccacucagaaacugguuag

SEQ ID NO: 107715 - RNA, 19 nt, Artificial Sequence
  Description of Artificial Sequence: Synthetic oligonucleotide
ugccuggauucccuguccu

SEQ ID NO: 107716 - RNA, 19 nt, Artificial Sequence
  Description of Artificial Sequence: Synthetic oligonucleotide
gucuaucgggaauguggag

SEQ ID NO: 107717 - RNA, 19 nt, Artificial Sequence
  Description of Artificial Sequence: Synthetic oligonucleotide
uucacagggcggacuuuac

SEQ ID NO: 107718 - RNA, 19 nt, Artificial Sequence
  Description of Artificial Sequence: Synthetic oligonucleotide
acccaccggagccucauca

SEQ ID NO: 107719 - RNA, 19 nt, Artificial Sequence
  Description of Artificial Sequence: Synthetic oligonucleotide
aaguggguuggcaguauaa

SEQ ID NO: 107720 - RNA, 19 nt, Artificial Sequence
  Description of Artificial Sequence: Synthetic oligonucleotide
ggacaauuggcgaguaagc

SEQ ID NO: 107721 - RNA, 19 nt, Artificial Sequence
  Description of Artificial Sequence: Synthetic oligonucleotide
augggacuauuaggaacac

SEQ ID NO: 107722 - RNA, 19 nt, Artificial Sequence
  Description of Artificial Sequence: Synthetic oligonucleotide
cuaucgggaauguggagua

SEQ ID NO: 107723 - RNA, 19 nt, Artificial Sequence
  Description of Artificial Sequence: Synthetic oligonucleotide
guaccucucucaccaugag

SEQ ID NO: 107724 - RNA, 19 nt, Artificial Sequence
  Description of Artificial Sequence: Synthetic oligonucleotide
gguuagucaucugaccaug

SEQ ID NO: 107725 - RNA, 19 nt, Artificial Sequence
  Description of Artificial Sequence: Synthetic oligonucleotide
aguggguugucgguauucu

SEQ ID NO: 107726 - RNA, 19 nt, Artificial Sequence
  Description of Artificial Sequence: Synthetic oligonucleotide
cauuuaccuuguagucaag

SEQ ID NO: 107727 - RNA, 19 nt, Artificial Sequence
  Description of Artificial Sequence: Synthetic oligonucleotide
cuuguggaacauuaucccu

SEQ ID NO: 107728 - RNA, 19 nt, Artificial Sequence
  Description of Artificial Sequence: Synthetic oligonucleotide
gucaucugaccaugucuac

SEQ ID NO: 107729 - RNA, 19 nt, Artificial Sequence
  Description of Artificial Sequence: Synthetic oligonucleotide
guccgucucaucacauggg

SEQ ID NO: 107730 - RNA, 19 nt, Artificial Sequence
  Description of Artificial Sequence: Synthetic oligonucleotide
ccaccuaaaauaugggaca

SEQ ID NO: 107731 - RNA, 19 nt, Artificial Sequence
  Description of Artificial Sequence: Synthetic oligonucleotide
cacauuccguccccucggg

SEQ ID NO: 107732 - RNA, 19 nt, Artificial Sequence
  Description of Artificial Sequence: Synthetic oligonucleotide
cagggguauucccuccacc

SEQ ID NO: 107733 - RNA, 19 nt, Artificial Sequence
  Description of Artificial Sequence: Synthetic oligonucleotide
cucucaccaugagaaugcg

SEQ ID NO: 107734 - RNA, 19 nt, Artificial Sequence
  Description of Artificial Sequence: Synthetic oligonucleotide
caggauagaauaucuuccu

SEQ ID NO: 107735 - RNA, 19 nt, Artificial Sequence
  Description of Artificial Sequence: Synthetic oligonucleotide
aggggcacacuaacaacag

SEQ ID NO: 107736 - RNA, 19 nt, Artificial Sequence
  Description of Artificial Sequence: Synthetic oligonucleotide
ggaagaaacugagacugga

SEQ ID NO: 107737 - RNA, 19 nt, Artificial Sequence
  Description of Artificial Sequence: Synthetic oligonucleotide
caucgugcucaaauagcca

SEQ ID NO: 107738 - RNA, 19 nt, Artificial Sequence
  Description of Artificial Sequence: Synthetic oligonucleotide
aucucagauaugucaucuu

SEQ ID NO: 107739 - RNA, 19 nt, Artificial Sequence
  Description of Artificial Sequence: Synthetic oligonucleotide
auucgucagaacaauucuu

SEQ ID NO: 107740 - RNA, 19 nt, Artificial Sequence
  Description of Artificial Sequence: Synthetic oligonucleotide
aggcucccauauuuucaag

SEQ ID NO: 107741 - RNA, 19 nt, Artificial Sequence
  Description of Artificial Sequence: Synthetic oligonucleotide
ugggacuauuaggaacaca

SEQ ID NO: 107742 - RNA, 19 nt, Artificial Sequence
  Description of Artificial Sequence: Synthetic oligonucleotide
cuuuacaaccuugcucuga

SEQ ID NO: 107743 - RNA, 19 nt, Artificial Sequence
  Description of Artificial Sequence: Synthetic oligonucleotide
ggguugucgguauucucug

SEQ ID NO: 107744 - RNA, 19 nt, Artificial Sequence
  Description of Artificial Sequence: Synthetic oligonucleotide
  modified_base (10)..(10): a, c, u, g, unknown or other
gccuucaaunacccacagc

SEQ ID NO: 107745 - RNA, 19 nt, Artificial Sequence
  Description of Artificial Sequence: Synthetic oligonucleotide
guugacaccuaagcuucac

SEQ ID NO: 107746 - RNA, 19 nt, Artificial Sequence
  Description of Artificial Sequence: Synthetic oligonucleotide
gucgguauucucugccauc

SEQ ID NO: 107747 - RNA, 19 nt, Artificial Sequence
  Description of Artificial Sequence: Synthetic oligonucleotide
cuuggugcauaccaaugcu

SEQ ID NO: 107748 - RNA, 19 nt, Artificial Sequence
  Description of Artificial Sequence: Synthetic oligonucleotide
guaagacccuacacgaaaa

SEQ ID NO: 107749 - RNA, 19 nt, Artificial Sequence
  Description of Artificial Sequence: Synthetic oligonucleotide
guaaaggcgggaagaaucu

SEQ ID NO: 107750 - RNA, 19 nt, Artificial Sequence
  Description of Artificial Sequence: Synthetic oligonucleotide
ccuaaaauaugggacacaa

SEQ ID NO: 107751 - RNA, 19 nt, Artificial Sequence
  Description of Artificial Sequence: Synthetic oligonucleotide
acggacucucccugccaag

SEQ ID NO: 107752 - RNA, 19 nt, Artificial Sequence
  Description of Artificial Sequence: Synthetic oligonucleotide
accuuguagucaagaagcu

SEQ ID NO: 107753 - RNA, 19 nt, Artificial Sequence
  Description of Artificial Sequence: Synthetic oligonucleotide
gggcagauuuacuucuuuc

SEQ ID NO: 107754 - RNA, 19 nt, Artificial Sequence
  Description of Artificial Sequence: Synthetic oligonucleotide
ugcuucuguaaaggcggga

SEQ ID NO: 107755 - RNA, 19 nt, Artificial Sequence
  Description of Artificial Sequence: Synthetic oligonucleotide
acgaaaaggggcacacuaa

SEQ ID NO: 107756 - RNA, 19 nt, Artificial Sequence
  Description of Artificial Sequence: Synthetic oligonucleotide
agagaacauguaaccauua

SEQ ID NO: 107757 - RNA, 19 nt, Artificial Sequence
  Description of Artificial Sequence: Synthetic oligonucleotide
cgaaaaggggcacacuaac

SEQ ID NO: 107758 - RNA, 19 nt, Artificial Sequence
  Description of Artificial Sequence: Synthetic oligonucleotide
ggucuaucgggaaugugga

SEQ ID NO: 107759 - RNA, 19 nt, Artificial Sequence
  Description of Artificial Sequence: Synthetic oligonucleotide
  modified_base (5)..(5): a, c, u, g, unknown or other
caaunacccacagcugaga

SEQ ID NO: 107760 - RNA, 19 nt, Artificial Sequence
  Description of Artificial Sequence: Synthetic oligonucleotide
guuaucuauucuaccauuu

SEQ ID NO: 107761 - RNA, 19 nt, Artificial Sequence
  Description of Artificial Sequence: Synthetic oligonucleotide
accacaccuaugccuugca

SEQ ID NO: 107762 - RNA, 19 nt, Artificial Sequence
  Description of Artificial Sequence: Synthetic oligonucleotide
gguugucgguauucucugc

SEQ ID NO: 107763 - RNA, 19 nt, Artificial Sequence
  Description of Artificial Sequence: Synthetic oligonucleotide
gaaguaucguaggcuccca

SEQ ID NO: 107764 - RNA, 19 nt, Artificial Sequence
  Description of Artificial Sequence: Synthetic oligonucleotide
acauuccguccccucgggu

SEQ ID NO: 107765 - RNA, 19 nt, Artificial Sequence
  Description of Artificial Sequence: Synthetic oligonucleotide
cacaccuaugccuugcaau

SEQ ID NO: 107766 - RNA, 19 nt, Artificial Sequence
  Description of Artificial Sequence: Synthetic oligonucleotide
gggucuaaugugcuccaca

SEQ ID NO: 107767 - RNA, 19 nt, Artificial Sequence
  Description of Artificial Sequence: Synthetic oligonucleotide
caagcaagucaagaggacu

SEQ ID NO: 107768 - RNA, 19 nt, Artificial Sequence
  Description of Artificial Sequence: Synthetic oligonucleotide
gggagauucguuacaggca

SEQ ID NO: 107769 - RNA, 19 nt, Artificial Sequence
  Description of Artificial Sequence: Synthetic oligonucleotide
ggacaccuagggucuaaug

SEQ ID NO: 107770 - RNA, 19 nt, Artificial Sequence
  Description of Artificial Sequence: Synthetic oligonucleotide
guggguugucgguauucuc

SEQ ID NO: 107771 - RNA, 19 nt, Artificial Sequence
  Description of Artificial Sequence: Synthetic oligonucleotide
gggcauuuccccugaugug

SEQ ID NO: 107772 - RNA, 19 nt, Artificial Sequence
  Description of Artificial Sequence: Synthetic oligonucleotide
gcggacuuuacaaccuugc

SEQ ID NO: 107773 - RNA, 19 nt, Artificial Sequence
  Description of Artificial Sequence: Synthetic oligonucleotide
gcgaguaagcucccagcug

SEQ ID NO: 107774 - RNA, 19 nt, Artificial Sequence
  Description of Artificial Sequence: Synthetic oligonucleotide
ccuugcaauccucauacaa

SEQ ID NO: 107775 - RNA, 19 nt, Artificial Sequence
  Description of Artificial Sequence: Synthetic oligonucleotide
ggaauagggcuccguaaaa

SEQ ID NO: 107776 - RNA, 19 nt, Artificial Sequence
  Description of Artificial Sequence: Synthetic oligonucleotide
cagcuauguggaguugaac

SEQ ID NO: 107777 - RNA, 19 nt, Artificial Sequence
  Description of Artificial Sequence: Synthetic oligonucleotide
cccuacacgaaaaggggca

SEQ ID NO: 107778 - RNA, 19 nt, Artificial Sequence
  Description of Artificial Sequence: Synthetic oligonucleotide
gguauuuaacaggacaauu

SEQ ID NO: 107779 - RNA, 19 nt, Artificial Sequence
  Description of Artificial Sequence: Synthetic oligonucleotide
auacugucugggucauauu

SEQ ID NO: 107780 - RNA, 19 nt, Artificial Sequence
  Description of Artificial Sequence: Synthetic oligonucleotide
acacgaaaaggggcacacu

SEQ ID NO: 107781 - RNA, 19 nt, Artificial Sequence
  Description of Artificial Sequence: Synthetic oligonucleotide
auuggcgaguaagcuccca

SEQ ID NO: 107782 - RNA, 19 nt, Artificial Sequence
  Description of Artificial Sequence: Synthetic oligonucleotide
aucuggaauagggcuccgu

SEQ ID NO: 107783 - RNA, 19 nt, Artificial Sequence
  Description of Artificial Sequence: Synthetic oligonucleotide
gcuucuguaaaggcgggaa

SEQ ID NO: 107784 - RNA, 19 nt, Artificial Sequence
  Description of Artificial Sequence: Synthetic oligonucleotide
gucucacuccaaagcuacc

SEQ ID NO: 107785 - RNA, 19 nt, Artificial Sequence
  Description of Artificial Sequence: Synthetic oligonucleotide
cucaguaauuagccaacau

SEQ ID NO: 107786 - RNA, 19 nt, Artificial Sequence
  Description of Artificial Sequence: Synthetic oligonucleotide
gagauucguuacaggcaga

SEQ ID NO: 107787 - RNA, 19 nt, Artificial Sequence
  Description of Artificial Sequence: Synthetic oligonucleotide
cguaggcucccauauuuuc

SEQ ID NO: 107788 - RNA, 19 nt, Artificial Sequence
  Description of Artificial Sequence: Synthetic oligonucleotide
uccccucggguuucauuua

SEQ ID NO: 107789 - RNA, 19 nt, Artificial Sequence
  Description of Artificial Sequence: Synthetic oligonucleotide
cuucgggcaaacccaacau

SEQ ID NO: 107790 - RNA, 19 nt, Artificial Sequence
  Description of Artificial Sequence: Synthetic oligonucleotide
ggcggacuuuacaaccuug

SEQ ID NO: 107791 - RNA, 19 nt, Artificial Sequence
  Description of Artificial Sequence: Synthetic oligonucleotide
ccccaccuaaaauauggga

SEQ ID NO: 107792 - RNA, 19 nt, Artificial Sequence
  Description of Artificial Sequence: Synthetic oligonucleotide
ccaugucuacggacucucc

SEQ ID NO: 107793 - RNA, 19 nt, Artificial Sequence
  Description of Artificial Sequence: Synthetic oligonucleotide
ccuacacgaaaaggggcac

SEQ ID NO: 107794 - RNA, 19 nt, Artificial Sequence
  Description of Artificial Sequence: Synthetic oligonucleotide
auacagacuggggcagauu

SEQ ID NO: 107795 - RNA, 19 nt, Artificial Sequence
  Description of Artificial Sequence: Synthetic oligonucleotide
gcucaguaauuagccaaca

SEQ ID NO: 107796 - RNA, 19 nt, Artificial Sequence
  Description of Artificial Sequence: Synthetic oligonucleotide
gaccaugucuacggacucu

SEQ ID NO: 107797 - RNA, 19 nt, Artificial Sequence
  Description of Artificial Sequence: Synthetic oligonucleotide
cuuguucgagaacgugccu

SEQ ID NO: 107798 - RNA, 19 nt, Artificial Sequence
  Description of Artificial Sequence: Synthetic oligonucleotide
gguuacuaugguagaauuu

SEQ ID NO: 107799 - RNA, 19 nt, Artificial Sequence
  Description of Artificial Sequence: Synthetic oligonucleotide
gccgaacgggacaucucag

SEQ ID NO: 107800 - RNA, 19 nt, Artificial Sequence
  Description of Artificial Sequence: Synthetic oligonucleotide
ccugguccgucucaucaca

SEQ ID NO: 107801 - RNA, 19 nt, Artificial Sequence
  Description of Artificial Sequence: Synthetic oligonucleotide
cccauacauauauuuuagu

SEQ ID NO: 107802 - RNA, 19 nt, Artificial Sequence
  Description of Artificial Sequence: Synthetic oligonucleotide
ccccucggguuucauuuac

SEQ ID NO: 107803 - RNA, 19 nt, Artificial Sequence
  Description of Artificial Sequence: Synthetic oligonucleotide
gugcucaaauagccagggu

SEQ ID NO: 107804 - RNA, 19 nt, Artificial Sequence
  Description of Artificial Sequence: Synthetic oligonucleotide
ccgucucaucacaugggca

SEQ ID NO: 107805 - RNA, 19 nt, Artificial Sequence
  Description of Artificial Sequence: Synthetic oligonucleotide
ggcuucuauccuucacaua

SEQ ID NO: 107806 - RNA, 19 nt, Artificial Sequence
  Description of Artificial Sequence: Synthetic oligonucleotide
ccguucaaucaaaggaggu

SEQ ID NO: 107807 - RNA, 19 nt, Artificial Sequence
  Description of Artificial Sequence: Synthetic oligonucleotide
cugguccgucucaucacau

SEQ ID NO: 107808 - RNA, 19 nt, Artificial Sequence
  Description of Artificial Sequence: Synthetic oligonucleotide
ccaugagaaugcgugucaa

SEQ ID NO: 107809 - RNA, 19 nt, Artificial Sequence
  Description of Artificial Sequence: Synthetic oligonucleotide
gcucaggagcggccuguuc

SEQ ID NO: 107810 - RNA, 19 nt, Artificial Sequence
  Description of Artificial Sequence: Synthetic oligonucleotide
ccgaacgggacaucucagu

SEQ ID NO: 107811 - RNA, 19 nt, Artificial Sequence
  Description of Artificial Sequence: Synthetic oligonucleotide
cauggacaucgugcucaaa

SEQ ID NO: 107812 - RNA, 19 nt, Artificial Sequence
  Description of Artificial Sequence: Synthetic oligonucleotide
ccacaccuaugccuugcaa

SEQ ID NO: 107813 - RNA, 19 nt, Artificial Sequence
  Description of Artificial Sequence: Synthetic oligonucleotide
ccgucuuguucgagaacgu

SEQ ID NO: 107814 - RNA, 19 nt, Artificial Sequence
  Description of Artificial Sequence: Synthetic oligonucleotide
cugaaccuguggggaugcu

SEQ ID NO: 107815 - RNA, 19 nt, Artificial Sequence
  Description of Artificial Sequence: Synthetic oligonucleotide
ggacuaggagaggcauguu

SEQ ID NO: 107816 - RNA, 19 nt, Artificial Sequence
  Description of Artificial Sequence: Synthetic oligonucleotide
ccguccccucggguuucau

SEQ ID NO: 107817 - RNA, 19 nt, Artificial Sequence
  Description of Artificial Sequence: Synthetic oligonucleotide
uuuguuagcaguuuagcgg

SEQ ID NO: 107818 - RNA, 19 nt, Artificial Sequence
  Description of Artificial Sequence: Synthetic oligonucleotide
uauauguacagcuacggag

SEQ ID NO: 107819 - RNA, 19 nt, Artificial Sequence
  Description of Artificial Sequence: Synthetic oligonucleotide
ugaacuagagagaacauug

SEQ ID NO: 107820 - RNA, 19 nt, Artificial Sequence
  Description of Artificial Sequence: Synthetic oligonucleotide
uccuauauagcacagaguc

SEQ ID NO: 107821 - RNA, 19 nt, Artificial Sequence
  Description of Artificial Sequence: Synthetic oligonucleotide
auguccuuaccacugaacc

SEQ ID NO: 107822 - RNA, 19 nt, Artificial Sequence
  Description of Artificial Sequence: Synthetic oligonucleotide
aguaacauguguauggagc

SEQ ID NO: 107823 - RNA, 19 nt, Artificial Sequence
  Description of Artificial Sequence: Synthetic oligonucleotide
uuaaagaacaacuggggac

SEQ ID NO: 107824 - RNA, 19 nt, Artificial Sequence
  Description of Artificial Sequence: Synthetic oligonucleotide
aacugcgggacucuguccc

SEQ ID NO: 107825 - RNA, 19 nt, Artificial Sequence
  Description of Artificial Sequence: Synthetic oligonucleotide
agaaacccguaucauaacc

SEQ ID NO: 107826 - RNA, 19 nt, Artificial Sequence
  Description of Artificial Sequence: Synthetic oligonucleotide
acuagagagaacauugugc

SEQ ID NO: 107827 - RNA, 19 nt, Artificial Sequence
  Description of Artificial Sequence: Synthetic oligonucleotide
aaauauaggagcauugacu

SEQ ID NO: 107828 - RNA, 19 nt, Artificial Sequence
  Description of Artificial Sequence: Synthetic oligonucleotide
aguaugagccuguuaaagg

SEQ ID NO: 107829 - RNA, 19 nt, Artificial Sequence
  Description of Artificial Sequence: Synthetic oligonucleotide
aagacuugcauacucgacu

SEQ ID NO: 107830 - RNA, 19 nt, Artificial Sequence
  Description of Artificial Sequence: Synthetic oligonucleotide
aacuacucuccacucuucc

SEQ ID NO: 107831 - RNA, 19 nt, Artificial Sequence
  Description of Artificial Sequence: Synthetic oligonucleotide
aguccuauauagcacagag

SEQ ID NO: 107832 - RNA, 19 nt, Artificial Sequence
  Description of Artificial Sequence: Synthetic oligonucleotide
uuaaagauggaauccacau

SEQ ID NO: 107833 - RNA, 19 nt, Artificial Sequence
  Description of Artificial Sequence: Synthetic oligonucleotide
aaacccguaucauaaccuc

SEQ ID NO: 107834 - RNA, 19 nt, Artificial Sequence
  Description of Artificial Sequence: Synthetic oligonucleotide
ucauaccugagaauaaaca

SEQ ID NO: 107835 - RNA, 19 nt, Artificial Sequence
  Description of Artificial Sequence: Synthetic oligonucleotide
uugucuaauggcaaggcac

SEQ ID NO: 107836 - RNA, 19 nt, Artificial Sequence
  Description of Artificial Sequence: Synthetic oligonucleotide
aacuagagagaacauugug

SEQ ID NO: 107837 - RNA, 19 nt, Artificial Sequence
  Description of Artificial Sequence: Synthetic oligonucleotide
uuguuagcaguuuagcggc

SEQ ID NO: 107838 - RNA, 19 nt, Artificial Sequence
  Description of Artificial Sequence: Synthetic oligonucleotide
uucugguuacaacaacugg

SEQ ID NO: 107839 - RNA, 19 nt, Artificial Sequence
  Description of Artificial Sequence: Synthetic oligonucleotide
agugguacaucccaaucuc

SEQ ID NO: 107840 - RNA, 19 nt, Artificial Sequence
  Description of Artificial Sequence: Synthetic oligonucleotide
cuacaaucugcuuuguuag

SEQ ID NO: 107841 - RNA, 19 nt, Artificial Sequence
  Description of Artificial Sequence: Synthetic oligonucleotide
agcggcuuuuagcagagcc

SEQ ID NO: 107842 - RNA, 19 nt, Artificial Sequence
  Description of Artificial Sequence: Synthetic oligonucleotide
aaagguuuaccagucagcu

SEQ ID NO: 107843 - RNA, 19 nt, Artificial Sequence
  Description of Artificial Sequence: Synthetic oligonucleotide
cuggcuaggaacuggaacc

SEQ ID NO: 107844 - RNA, 19 nt, Artificial Sequence
  Description of Artificial Sequence: Synthetic oligonucleotide
ugaaguccuauauagcaca

SEQ ID NO: 107845 - RNA, 19 nt, Artificial Sequence
  Description of Artificial Sequence: Synthetic oligonucleotide
ugggccaacauuucuagcc

SEQ ID NO: 107846 - RNA, 19 nt, Artificial Sequence
  Description of Artificial Sequence: Synthetic oligonucleotide
cucuaucugacgaaggcgc

SEQ ID NO: 107847 - RNA, 19 nt, Artificial Sequence
  Description of Artificial Sequence: Synthetic oligonucleotide
aguuauaggggccugguaa

SEQ ID NO: 107848 - RNA, 19 nt, Artificial Sequence
  Description of Artificial Sequence: Synthetic oligonucleotide
aacagaaugcccauggcca

SEQ ID NO: 107849 - RNA, 19 nt, Artificial Sequence
  Description of Artificial Sequence: Synthetic oligonucleotide
uuauauguacagcuacgga

SEQ ID NO: 107850 - RNA, 19 nt, Artificial Sequence
  Description of Artificial Sequence: Synthetic oligonucleotide
acuacaaucugcuuuguua

SEQ ID NO: 107851 - RNA, 19 nt, Artificial Sequence
  Description of Artificial Sequence: Synthetic oligonucleotide
agagauuguuuguggggcc

SEQ ID NO: 107852 - RNA, 19 nt, Artificial Sequence
  Description of Artificial Sequence: Synthetic oligonucleotide
aauaaacaacucagcaguc

SEQ ID NO: 107853 - RNA, 19 nt, Artificial Sequence
  Description of Artificial Sequence: Synthetic oligonucleotide
aaccgaaacuacucuccac

SEQ ID NO: 107854 - RNA, 19 nt, Artificial Sequence
  Description of Artificial Sequence: Synthetic oligonucleotide
gaacccugcaaucaccaag

SEQ ID NO: 107855 - RNA, 19 nt, Artificial Sequence
  Description of Artificial Sequence: Synthetic oligonucleotide
uacuagggaaggcuucugg

SEQ ID NO: 107856 - RNA, 19 nt, Artificial Sequence
  Description of Artificial Sequence: Synthetic oligonucleotide
uauguacagcuacggagag

SEQ ID NO: 107857 - RNA, 19 nt, Artificial Sequence
  Description of Artificial Sequence: Synthetic oligonucleotide
uuaaggggagagaugcaug

SEQ ID NO: 107858 - RNA, 19 nt, Artificial Sequence
  Description of Artificial Sequence: Synthetic oligonucleotide
aucgugucuguguacacag

SEQ ID NO: 107859 - RNA, 19 nt, Artificial Sequence
  Description of Artificial Sequence: Synthetic oligonucleotide
uaaggggagagaugcauga

SEQ ID NO: 107860 - RNA, 19 nt, Artificial Sequence
  Description of Artificial Sequence: Synthetic oligonucleotide
aacgggucaucacuucauc

SEQ ID NO: 107861 - RNA, 19 nt, Artificial Sequence
  Description of Artificial Sequence: Synthetic oligonucleotide
cugucucagaccuucauuc

SEQ ID NO: 107862 - RNA, 19 nt, Artificial Sequence
  Description of Artificial Sequence: Synthetic oligonucleotide
aguccuuauuccucccagc

SEQ ID NO: 107863 - RNA, 19 nt, Artificial Sequence
  Description of Artificial Sequence: Synthetic oligonucleotide
accgaaacuacucuccacu

SEQ ID NO: 107864 - RNA, 19 nt, Artificial Sequence
  Description of Artificial Sequence: Synthetic oligonucleotide
ucaggaauauccugugaga

SEQ ID NO: 107865 - RNA, 19 nt, Artificial Sequence
  Description of Artificial Sequence: Synthetic oligonucleotide
uaauguuaggcugacuuuc

SEQ ID NO: 107866 - RNA, 19 nt, Artificial Sequence
  Description of Artificial Sequence: Synthetic oligonucleotide
agacuugcauacucgacug

SEQ ID NO: 107867 - RNA, 19 nt, Artificial Sequence
  Description of Artificial Sequence: Synthetic oligonucleotide
ucgacuggguucaaauagc

SEQ ID NO: 107868 - RNA, 19 nt, Artificial Sequence
  Description of Artificial Sequence: Synthetic oligonucleotide
cauaccugagaauaaacaa

SEQ ID NO: 107869 - RNA, 19 nt, Artificial Sequence
  Description of Artificial Sequence: Synthetic oligonucleotide
acauuucuagccuccccgg

SEQ ID NO: 107870 - RNA, 19 nt, Artificial Sequence
  Description of Artificial Sequence: Synthetic oligonucleotide
augaaguccuauauagcac

SEQ ID NO: 107871 - RNA, 19 nt, Artificial Sequence
  Description of Artificial Sequence: Synthetic oligonucleotide
acuugcauacucgacuggg

SEQ ID NO: 107872 - RNA, 19 nt, Artificial Sequence
  Description of Artificial Sequence: Synthetic oligonucleotide
cuacggagaguuaugguuc

SEQ ID NO: 107873 - RNA, 19 nt, Artificial Sequence
  Description of Artificial Sequence: Synthetic oligonucleotide
uguuggccgaggaagagau

SEQ ID NO: 107874 - RNA, 19 nt, Artificial Sequence
  Description of Artificial Sequence: Synthetic oligonucleotide
uucaaauagcugcuggcua

SEQ ID NO: 107875 - RNA, 19 nt, Artificial Sequence
  Description of Artificial Sequence: Synthetic oligonucleotide
uucguuucagcagacagua

SEQ ID NO: 107876 - RNA, 19 nt, Artificial Sequence
  Description of Artificial Sequence: Synthetic oligonucleotide
uuaggcugacuuucugucc

SEQ ID NO: 107877 - RNA, 19 nt, Artificial Sequence
  Description of Artificial Sequence: Synthetic oligonucleotide
agaguagcaucauccaccu

SEQ ID NO: 107878 - RNA, 19 nt, Artificial Sequence
  Description of Artificial Sequence: Synthetic oligonucleotide
ugagguaccaaggccaacu

SEQ ID NO: 107879 - RNA, 19 nt, Artificial Sequence
  Description of Artificial Sequence: Synthetic oligonucleotide
uagccaacgggucaucacu

SEQ ID NO: 107880 - RNA, 19 nt, Artificial Sequence
  Description of Artificial Sequence: Synthetic oligonucleotide
ugcccaaacaggcagccaa

SEQ ID NO: 107881 - RNA, 19 nt, Artificial Sequence
  Description of Artificial Sequence: Synthetic oligonucleotide
aagugaguuagaguuugca

SEQ ID NO: 107882 - RNA, 19 nt, Artificial Sequence
  Description of Artificial Sequence: Synthetic oligonucleotide
acccaagaaacccguauca

SEQ ID NO: 107883 - RNA, 19 nt, Artificial Sequence
  Description of Artificial Sequence: Synthetic oligonucleotide
guuauaggggccugguaac

SEQ ID NO: 107884 - RNA, 19 nt, Artificial Sequence
  Description of Artificial Sequence: Synthetic oligonucleotide
agcaagacuugcauacucg

SEQ ID NO: 107885 - RNA, 19 nt, Artificial Sequence
  Description of Artificial Sequence: Synthetic oligonucleotide
agggaacuagacugugagg

SEQ ID NO: 107886 - RNA, 19 nt, Artificial Sequence
  Description of Artificial Sequence: Synthetic oligonucleotide
cugguuuaaggcucuuuug

SEQ ID NO: 107887 - RNA, 19 nt, Artificial Sequence
  Description of Artificial Sequence: Synthetic oligonucleotide
uacucgacuggguucaaau

SEQ ID NO: 107888 - RNA, 19 nt, Artificial Sequence
  Description of Artificial Sequence: Synthetic oligonucleotide
cguaucauaaccucuuggc

SEQ ID NO: 107889 - RNA, 19 nt, Artificial Sequence
  Description of Artificial Sequence: Synthetic oligonucleotide
uuccuauacccacuuccac

SEQ ID NO: 107890 - RNA, 19 nt, Artificial Sequence
  Description of Artificial Sequence: Synthetic oligonucleotide
aaacuacucuccacucuuc

SEQ ID NO: 107891 - RNA, 19 nt, Artificial Sequence
  Description of Artificial Sequence: Synthetic oligonucleotide
caugauugguuugcuuugg

SEQ ID NO: 107892 - RNA, 19 nt, Artificial Sequence
  Description of Artificial Sequence: Synthetic oligonucleotide
caagacuugcauacucgac

SEQ ID NO: 107893 - RNA, 19 nt, Artificial Sequence
  Description of Artificial Sequence: Synthetic oligonucleotide
uucuuagaguagcaucauc

SEQ ID NO: 107894 - RNA, 19 nt, Artificial Sequence
  Description of Artificial Sequence: Synthetic oligonucleotide
cauugacuccucuuuagga

SEQ ID NO: 107895 - RNA, 19 nt, Artificial Sequence
  Description of Artificial Sequence: Synthetic oligonucleotide
uccuugaguacaagugagu

SEQ ID NO: 107896 - RNA, 19 nt, Artificial Sequence
  Description of Artificial Sequence: Synthetic oligonucleotide
uaccaacaauucaaagcac

SEQ ID NO: 107897 - RNA, 19 nt, Artificial Sequence
  Description of Artificial Sequence: Synthetic oligonucleotide
gacuugcauacucgacugg

SEQ ID NO: 107898 - RNA, 19 nt, Artificial Sequence
  Description of Artificial Sequence: Synthetic oligonucleotide
uggaucgugucuguguaca

SEQ ID NO: 107899 - RNA, 19 nt, Artificial Sequence
  Description of Artificial Sequence: Synthetic oligonucleotide
ggaagcauguccuuaccac

SEQ ID NO: 107900 - RNA, 19 nt, Artificial Sequence
  Description of Artificial Sequence: Synthetic oligonucleotide
uauggagcuguuugugcgu

SEQ ID NO: 107901 - RNA, 19 nt, Artificial Sequence
  Description of Artificial Sequence: Synthetic oligonucleotide
ugucucagaccuucauucu

SEQ ID NO: 107902 - RNA, 19 nt, Artificial Sequence
  Description of Artificial Sequence: Synthetic oligonucleotide
auagguucccacaauuccu

SEQ ID NO: 107903 - RNA, 19 nt, Artificial Sequence
  Description of Artificial Sequence: Synthetic oligonucleotide
gucucagaccuucauucug

SEQ ID NO: 107904 - RNA, 19 nt, Artificial Sequence
  Description of Artificial Sequence: Synthetic oligonucleotide
uugcauacucgacuggguu

SEQ ID NO: 107905 - RNA, 19 nt, Artificial Sequence
  Description of Artificial Sequence: Synthetic oligonucleotide
caaagggagcccuacacaa

SEQ ID NO: 107906 - RNA, 19 nt, Artificial Sequence
  Description of Artificial Sequence: Synthetic oligonucleotide
gauuguguggagagcuuug

SEQ ID NO: 107907 - RNA, 19 nt, Artificial Sequence
  Description of Artificial Sequence: Synthetic oligonucleotide
agacccaagaaacccguau

SEQ ID NO: 107908 - RNA, 19 nt, Artificial Sequence
  Description of Artificial Sequence: Synthetic oligonucleotide
uuauaggggccugguaacc

SEQ ID NO: 107909 - RNA, 19 nt, Artificial Sequence
  Description of Artificial Sequence: Synthetic oligonucleotide
gaggaauggucacuaaugu

SEQ ID NO: 107910 - RNA, 19 nt, Artificial Sequence
  Description of Artificial Sequence: Synthetic oligonucleotide
acccuguuucacuagacuu

SEQ ID NO: 107911 - RNA, 19 nt, Artificial Sequence
  Description of Artificial Sequence: Synthetic oligonucleotide
uucuaggaacccugcaauc

SEQ ID NO: 107912 - RNA, 19 nt, Artificial Sequence
  Description of Artificial Sequence: Synthetic oligonucleotide
ggaauggucacuaauguua

SEQ ID NO: 107913 - RNA, 19 nt, Artificial Sequence
  Description of Artificial Sequence: Synthetic oligonucleotide
ugggaagcauguccuuacc

SEQ ID NO: 107914 - RNA, 19 nt, Artificial Sequence
  Description of Artificial Sequence: Synthetic oligonucleotide
uggauuucccuguguuggc

SEQ ID NO: 107915 - RNA, 19 nt, Artificial Sequence
  Description of Artificial Sequence: Synthetic oligonucleotide
aacuggagcagaauagguu

SEQ ID NO: 107916 - RNA, 19 nt, Artificial Sequence
  Description of Artificial Sequence: Synthetic oligonucleotide
cauugaagcgcagagagcu

SEQ ID NO: 107917 - RNA, 19 nt, Artificial Sequence
  Description of Artificial Sequence: Synthetic oligonucleotide
ccgaggaagagauuguuug

SEQ ID NO: 107918 - RNA, 19 nt, Artificial Sequence
  Description of Artificial Sequence: Synthetic oligonucleotide
cagacucuaucugacgaag

SEQ ID NO: 107919 - RNA, 19 nt, Artificial Sequence
  Description of Artificial Sequence: Synthetic oligonucleotide
aaguggucagguagccaac

SEQ ID NO: 107920 - RNA, 19 nt, Artificial Sequence
  Description of Artificial Sequence: Synthetic oligonucleotide
gaagcauguccuuaccacu

SEQ ID NO: 107921 - RNA, 19 nt, Artificial Sequence
  Description of Artificial Sequence: Synthetic oligonucleotide
gaggcugcuauagcaagac

SEQ ID NO: 107922 - RNA, 19 nt, Artificial Sequence
  Description of Artificial Sequence: Synthetic oligonucleotide
auguuaggcugacuuucug

SEQ ID NO: 107923 - RNA, 19 nt, Artificial Sequence
  Description of Artificial Sequence: Synthetic oligonucleotide
acgggucaucacuucaucu

SEQ ID NO: 107924 - RNA, 19 nt, Artificial Sequence
  Description of Artificial Sequence: Synthetic oligonucleotide
guuucacuagacuuugccu

SEQ ID NO: 107925 - RNA, 19 nt, Artificial Sequence
  Description of Artificial Sequence: Synthetic oligonucleotide
aacccguaucauaaccucu

SEQ ID NO: 107926 - RNA, 19 nt, Artificial Sequence
  Description of Artificial Sequence: Synthetic oligonucleotide
uccccggcagcaaagguuu

SEQ ID NO: 107927 - RNA, 19 nt, Artificial Sequence
  Description of Artificial Sequence: Synthetic oligonucleotide
accgugcggacacucaacu

SEQ ID NO: 107928 - RNA, 19 nt, Artificial Sequence
  Description of Artificial Sequence: Synthetic oligonucleotide
uguuagcaguuuagcggcu

SEQ ID NO: 107929 - RNA, 19 nt, Artificial Sequence
  Description of Artificial Sequence: Synthetic oligonucleotide
uggucaaguuaaagaugga

SEQ ID NO: 107930 - RNA, 19 nt, Artificial Sequence
  Description of Artificial Sequence: Synthetic oligonucleotide
cauaacagugggcagccaa

SEQ ID NO: 107931 - RNA, 19 nt, Artificial Sequence
  Description of Artificial Sequence: Synthetic oligonucleotide
cagcuacggagaguuaugg

SEQ ID NO: 107932 - RNA, 19 nt, Artificial Sequence
  Description of Artificial Sequence: Synthetic oligonucleotide
ggaguccucaccccugagg

SEQ ID NO: 107933 - RNA, 19 nt, Artificial Sequence
  Description of Artificial Sequence: Synthetic oligonucleotide
uaacugcgggacucugucc

SEQ ID NO: 107934 - RNA, 19 nt, Artificial Sequence
  Description of Artificial Sequence: Synthetic oligonucleotide
gaggaaugagcaaugcucu

SEQ ID NO: 107935 - RNA, 19 nt, Artificial Sequence
  Description of Artificial Sequence: Synthetic oligonucleotide
gggccugguaaccuguagg

SEQ ID NO: 107936 - RNA, 19 nt, Artificial Sequence
  Description of Artificial Sequence: Synthetic oligonucleotide
ugaguacaagugaguuaga

SEQ ID NO: 107937 - RNA, 19 nt, Artificial Sequence
  Description of Artificial Sequence: Synthetic oligonucleotide
cugcuauagcaagacuugc

SEQ ID NO: 107938 - RNA, 19 nt, Artificial Sequence
  Description of Artificial Sequence: Synthetic oligonucleotide
gaaacccguaucauaaccu

SEQ ID NO: 107939 - RNA, 19 nt, Artificial Sequence
  Description of Artificial Sequence: Synthetic oligonucleotide
acacucaacuuuauucacu

SEQ ID NO: 107940 - RNA, 19 nt, Artificial Sequence
  Description of Artificial Sequence: Synthetic oligonucleotide
ggcaaagggagcccuacac

SEQ ID NO: 107941 - RNA, 19 nt, Artificial Sequence
  Description of Artificial Sequence: Synthetic oligonucleotide
cugauagcaggagccagac

SEQ ID NO: 107942 - RNA, 19 nt, Artificial Sequence
  Description of Artificial Sequence: Synthetic oligonucleotide
agcuacggagaguuauggu

SEQ ID NO: 107943 - RNA, 19 nt, Artificial Sequence
  Description of Artificial Sequence: Synthetic oligonucleotide
guuggaucgugucugugua

SEQ ID NO: 107944 - RNA, 19 nt, Artificial Sequence
  Description of Artificial Sequence: Synthetic oligonucleotide
gaucgugucuguguacaca

SEQ ID NO: 107945 - RNA, 19 nt, Artificial Sequence
  Description of Artificial Sequence: Synthetic oligonucleotide
caguacuagggaaggcuuc

SEQ ID NO: 107946 - RNA, 19 nt, Artificial Sequence
  Description of Artificial Sequence: Synthetic oligonucleotide
gcugcuauagcaagacuug

SEQ ID NO: 107947 - RNA, 19 nt, Artificial Sequence
  Description of Artificial Sequence: Synthetic oligonucleotide
agcauguccuuaccacuga

SEQ ID NO: 107948 - RNA, 19 nt, Artificial Sequence
  Description of Artificial Sequence: Synthetic oligonucleotide
auuucccuguguuggccga

SEQ ID NO: 107949 - RNA, 19 nt, Artificial Sequence
  Description of Artificial Sequence: Synthetic oligonucleotide
cucuagggcaccguugcac

SEQ ID NO: 107950 - RNA, 19 nt, Artificial Sequence
  Description of Artificial Sequence: Synthetic oligonucleotide
auagcaagacuugcauacu

SEQ ID NO: 107951 - RNA, 19 nt, Artificial Sequence
  Description of Artificial Sequence: Synthetic oligonucleotide
cuagacuuugccucugugu

SEQ ID NO: 107952 - RNA, 19 nt, Artificial Sequence
  Description of Artificial Sequence: Synthetic oligonucleotide
uccuuaccacugaaccuaa

SEQ ID NO: 107953 - RNA, 19 nt, Artificial Sequence
  Description of Artificial Sequence: Synthetic oligonucleotide
ggaugaaguccuauauagc

SEQ ID NO: 107954 - RNA, 19 nt, Artificial Sequence
  Description of Artificial Sequence: Synthetic oligonucleotide
gagauuguuuguggggcca

SEQ ID NO: 107955 - RNA, 19 nt, Artificial Sequence
  Description of Artificial Sequence: Synthetic oligonucleotide
uggguucaaauagcugcug

SEQ ID NO: 107956 - RNA, 19 nt, Artificial Sequence
  Description of Artificial Sequence: Synthetic oligonucleotide
cauccagcccucacacuac

SEQ ID NO: 107957 - RNA, 19 nt, Artificial Sequence
  Description of Artificial Sequence: Synthetic oligonucleotide
ugcugucucagaccuucau

SEQ ID NO: 107958 - RNA, 19 nt, Artificial Sequence
  Description of Artificial Sequence: Synthetic oligonucleotide
guaaccuguaggcuuccaa

SEQ ID NO: 107959 - RNA, 19 nt, Artificial Sequence
  Description of Artificial Sequence: Synthetic oligonucleotide
gggaacuagacugugaggu

SEQ ID NO: 107960 - RNA, 19 nt, Artificial Sequence
  Description of Artificial Sequence: Synthetic oligonucleotide
gaaugggacuugggaaggc

SEQ ID NO: 107961 - RNA, 19 nt, Artificial Sequence
  Description of Artificial Sequence: Synthetic oligonucleotide
gauacccugggcuucguuu

SEQ ID NO: 107962 - RNA, 19 nt, Artificial Sequence
  Description of Artificial Sequence: Synthetic oligonucleotide
cuaucugacgaaggcgcug

SEQ ID NO: 107963 - RNA, 19 nt, Artificial Sequence
  Description of Artificial Sequence: Synthetic oligonucleotide
ucucuagggcaccguugca

SEQ ID NO: 107964 - RNA, 19 nt, Artificial Sequence
  Description of Artificial Sequence: Synthetic oligonucleotide
ccguaucauaaccucuugg

SEQ ID NO: 107965 - RNA, 19 nt, Artificial Sequence
  Description of Artificial Sequence: Synthetic oligonucleotide
aaagaacaacuggggacua

SEQ ID NO: 107966 - RNA, 19 nt, Artificial Sequence
  Description of Artificial Sequence: Synthetic oligonucleotide
guccuuaccacugaaccua

SEQ ID NO: 107967 - RNA, 19 nt, Artificial Sequence
  Description of Artificial Sequence: Synthetic oligonucleotide
aggaacccugcaaucacca

SEQ ID NO: 107968 - RNA, 19 nt, Artificial Sequence
  Description of Artificial Sequence: Synthetic oligonucleotide
aaguccccauugaagcgca

SEQ ID NO: 107969 - RNA, 19 nt, Artificial Sequence
  Description of Artificial Sequence: Synthetic oligonucleotide
guccuuauuccucccagcu

SEQ ID NO: 107970 - RNA, 19 nt, Artificial Sequence
  Description of Artificial Sequence: Synthetic oligonucleotide
uuaggagaaaaggguuaua

SEQ ID NO: 107971 - RNA, 19 nt, Artificial Sequence
  Description of Artificial Sequence: Synthetic oligonucleotide
aucggcagggcacuacauu

SEQ ID NO: 107972 - RNA, 19 nt, Artificial Sequence
  Description of Artificial Sequence: Synthetic oligonucleotide
gcaagacuugcauacucga

SEQ ID NO: 107973 - RNA, 19 nt, Artificial Sequence
  Description of Artificial Sequence: Synthetic oligonucleotide
gucucgaaugggacuuggg

SEQ ID NO: 107974 - RNA, 19 nt, Artificial Sequence
  Description of Artificial Sequence: Synthetic oligonucleotide
agcagggaacuagacugug

SEQ ID NO: 107975 - RNA, 19 nt, Artificial Sequence
  Description of Artificial Sequence: Synthetic oligonucleotide
cuagggcaccguugcacac

SEQ ID NO: 107976 - RNA, 19 nt, Artificial Sequence
  Description of Artificial Sequence: Synthetic oligonucleotide
gaacuagagagaacauugu

SEQ ID NO: 107977 - RNA, 19 nt, Artificial Sequence
  Description of Artificial Sequence: Synthetic oligonucleotide
gacuuguggaacccugagu

SEQ ID NO: 107978 - RNA, 19 nt, Artificial Sequence
  Description of Artificial Sequence: Synthetic oligonucleotide
uucuagccuccccggcagc

SEQ ID NO: 107979 - RNA, 19 nt, Artificial Sequence
  Description of Artificial Sequence: Synthetic oligonucleotide
aaggcgcuguuggaucgug

SEQ ID NO: 107980 - RNA, 19 nt, Artificial Sequence
  Description of Artificial Sequence: Synthetic oligonucleotide
aaggggagagaugcaugau

SEQ ID NO: 107981 - RNA, 19 nt, Artificial Sequence
  Description of Artificial Sequence: Synthetic oligonucleotide
ggccagacucuaucugacg

SEQ ID NO: 107982 - RNA, 19 nt, Artificial Sequence
  Description of Artificial Sequence: Synthetic oligonucleotide
cacaaaccgaaacuacucu

SEQ ID NO: 107983 - RNA, 19 nt, Artificial Sequence
  Description of Artificial Sequence: Synthetic oligonucleotide
ggcuauucagccacuugug

SEQ ID NO: 107984 - RNA, 19 nt, Artificial Sequence
  Description of Artificial Sequence: Synthetic oligonucleotide
ugggucuaaaugguuucuu

SEQ ID NO: 107985 - RNA, 19 nt, Artificial Sequence
  Description of Artificial Sequence: Synthetic oligonucleotide
gaagcccgcaucaggcuga

SEQ ID NO: 107986 - RNA, 19 nt, Artificial Sequence
  Description of Artificial Sequence: Synthetic oligonucleotide
gcccuacacaaucugguca

SEQ ID NO: 107987 - RNA, 19 nt, Artificial Sequence
  Description of Artificial Sequence: Synthetic oligonucleotide
gcuauagcaagacuugcau

SEQ ID NO: 107988 - RNA, 19 nt, Artificial Sequence
  Description of Artificial Sequence: Synthetic oligonucleotide
gggaagcauguccuuacca

SEQ ID NO: 107989 - RNA, 19 nt, Artificial Sequence
  Description of Artificial Sequence: Synthetic oligonucleotide
aggcugcuauagcaagacu

SEQ ID NO: 107990 - RNA, 19 nt, Artificial Sequence
  Description of Artificial Sequence: Synthetic oligonucleotide
cuaauguuaggcugacuuu

SEQ ID NO: 107991 - RNA, 19 nt, Artificial Sequence
  Description of Artificial Sequence: Synthetic oligonucleotide
gcuacggagaguuaugguu

SEQ ID NO: 107992 - RNA, 19 nt, Artificial Sequence
  Description of Artificial Sequence: Synthetic oligonucleotide
cuuaaggggagagaugcau

SEQ ID NO: 107993 - RNA, 19 nt, Artificial Sequence
  Description of Artificial Sequence: Synthetic oligonucleotide
ugccuaguucagggcaggc

SEQ ID NO: 107994 - RNA, 19 nt, Artificial Sequence
  Description of Artificial Sequence: Synthetic oligonucleotide
acccguaucauaaccucuu

SEQ ID NO: 107995 - RNA, 19 nt, Artificial Sequence
  Description of Artificial Sequence: Synthetic oligonucleotide
gcugauuguguggagagcu

SEQ ID NO: 107996 - RNA, 19 nt, Artificial Sequence
  Description of Artificial Sequence: Synthetic oligonucleotide
aagcccgcaucaggcugag

SEQ ID NO: 107997 - RNA, 19 nt, Artificial Sequence
  Description of Artificial Sequence: Synthetic oligonucleotide
gucccuuaaggggagagau

SEQ ID NO: 107998 - RNA, 19 nt, Artificial Sequence
  Description of Artificial Sequence: Synthetic oligonucleotide
gugaacuagagagaacauu

SEQ ID NO: 107999 - RNA, 19 nt, Artificial Sequence
  Description of Artificial Sequence: Synthetic oligonucleotide
ccgaaacuacucuccacuc

SEQ ID NO: 108000 - RNA, 19 nt, Artificial Sequence
  Description of Artificial Sequence: Synthetic oligonucleotide
ggauggccucccugagugg

SEQ ID NO: 108001 - RNA, 19 nt, Artificial Sequence
  Description of Artificial Sequence: Synthetic oligonucleotide
ucggacugcccaggcugag

SEQ ID NO: 108002 - RNA, 19 nt, Artificial Sequence
  Description of Artificial Sequence: Synthetic oligonucleotide
gaguagcaucauccaccuc

SEQ ID NO: 108003 - RNA, 19 nt, Artificial Sequence
  Description of Artificial Sequence: Synthetic oligonucleotide
ggcugcuauagcaagacuu

SEQ ID NO: 108004 - RNA, 19 nt, Artificial Sequence
  Description of Artificial Sequence: Synthetic oligonucleotide
gcaccguugcacacaauuc

SEQ ID NO: 108005 - RNA, 19 nt, Artificial Sequence
  Description of Artificial Sequence: Synthetic oligonucleotide
guccuauauagcacagagu

SEQ ID NO: 108006 - RNA, 19 nt, Artificial Sequence
  Description of Artificial Sequence: Synthetic oligonucleotide
ggacugcccaggcugagua

SEQ ID NO: 108007 - RNA, 19 nt, Artificial Sequence
  Description of Artificial Sequence: Synthetic oligonucleotide
auacucgacuggguucaaa

SEQ ID NO: 108008 - RNA, 19 nt, Artificial Sequence
  Description of Artificial Sequence: Synthetic oligonucleotide
agccaacgggucaucacuu

SEQ ID NO: 108009 - RNA, 19 nt, Artificial Sequence
  Description of Artificial Sequence: Synthetic oligonucleotide
cugucuacauuugucuaau

SEQ ID NO: 108010 - RNA, 19 nt, Artificial Sequence
  Description of Artificial Sequence: Synthetic oligonucleotide
caacgggucaucacuucau

SEQ ID NO: 108011 - RNA, 19 nt, Artificial Sequence
  Description of Artificial Sequence: Synthetic oligonucleotide
gcggcuuuuagcagagcca

SEQ ID NO: 108012 - RNA, 19 nt, Artificial Sequence
  Description of Artificial Sequence: Synthetic oligonucleotide
cccguaucauaaccucuug

SEQ ID NO: 108013 - RNA, 19 nt, Artificial Sequence
  Description of Artificial Sequence: Synthetic oligonucleotide
gggccaacauuucuagccu

SEQ ID NO: 108014 - RNA, 19 nt, Artificial Sequence
  Description of Artificial Sequence: Synthetic oligonucleotide
ccaacgggucaucacuuca

SEQ ID NO: 108015 - RNA, 19 nt, Artificial Sequence
  Description of Artificial Sequence: Synthetic oligonucleotide
gccaacgggucaucacuuc

SEQ ID NO: 108016 - RNA, 19 nt, Artificial Sequence
  Description of Artificial Sequence: Synthetic oligonucleotide
ccagacucuaucugacgaa

SEQ ID NO: 108017 - RNA, 19 nt, Artificial Sequence
  Description of Artificial Sequence: Synthetic oligonucleotide
gggacuuguggaacccuga

SEQ ID NO: 108018 - RNA, 19 nt, Artificial Sequence
  Description of Artificial Sequence: Synthetic oligonucleotide
gacuccucuuuaggagaaa

SEQ ID NO: 108019 - RNA, 19 nt, Artificial Sequence
  Description of Artificial Sequence: Synthetic oligonucleotide
cugggucuaaaugguuucu

SEQ ID NO: 108020 - RNA, 19 nt, Artificial Sequence
  Description of Artificial Sequence: Synthetic oligonucleotide
cagacccaagaaacccgua

SEQ ID NO: 108021 - RNA, 19 nt, Artificial Sequence
  Description of Artificial Sequence: Synthetic oligonucleotide
agccagacacgugcccaaa

SEQ ID NO: 108022 - RNA, 19 nt, Artificial Sequence
  Description of Artificial Sequence: Synthetic oligonucleotide
gggacgccuggguccuucc

SEQ ID NO: 108023 - RNA, 19 nt, Artificial Sequence
  Description of Artificial Sequence: Synthetic oligonucleotide
gaaggcgcuguuggaucgu

SEQ ID NO: 108024 - RNA, 19 nt, Artificial Sequence
  Description of Artificial Sequence: Synthetic oligonucleotide
aggcgcuguuggaucgugu

SEQ ID NO: 108025 - RNA, 19 nt, Artificial Sequence
  Description of Artificial Sequence: Synthetic oligonucleotide
cccugucuacauuugucua

SEQ ID NO: 108026 - RNA, 19 nt, Artificial Sequence
  Description of Artificial Sequence: Synthetic oligonucleotide
cccacaccuccaaaccaca

SEQ ID NO: 108027 - RNA, 19 nt, Artificial Sequence
  Description of Artificial Sequence: Synthetic oligonucleotide
gguaaccuguaggcuucca

SEQ ID NO: 108028 - RNA, 19 nt, Artificial Sequence
  Description of Artificial Sequence: Synthetic oligonucleotide
cucucggacugcccaggcu

SEQ ID NO: 108029 - RNA, 19 nt, Artificial Sequence
  Description of Artificial Sequence: Synthetic oligonucleotide
cgugcggacacucaacuuu

SEQ ID NO: 108030 - RNA, 19 nt, Artificial Sequence
  Description of Artificial Sequence: Synthetic oligonucleotide
gcggacacucaacuuuauu

SEQ ID NO: 108031 - RNA, 19 nt, Artificial Sequence
  Description of Artificial Sequence: Synthetic oligonucleotide
gggacccacucucugccuu

SEQ ID NO: 108032 - RNA, 19 nt, Artificial Sequence
  Description of Artificial Sequence: Synthetic oligonucleotide
cccgcaucaggcugagggu

SEQ ID NO: 108033 - RNA, 19 nt, Artificial Sequence
  Description of Artificial Sequence: Synthetic oligonucleotide
cccaagaaacccguaucau

SEQ ID NO: 108034 - RNA, 19 nt, Artificial Sequence
  Description of Artificial Sequence: Synthetic oligonucleotide
ccaaaguguaugggccucu

SEQ ID NO: 108035 - RNA, 19 nt, Artificial Sequence
  Description of Artificial Sequence: Synthetic oligonucleotide
ccauccaagcaggcucuaa

SEQ ID NO: 108036 - RNA, 19 nt, Artificial Sequence
  Description of Artificial Sequence: Synthetic oligonucleotide
ccgugcggacacucaacuu

SEQ ID NO: 108037 - RNA, 19 nt, Artificial Sequence
  Description of Artificial Sequence: Synthetic oligonucleotide
ccauugggugugggguacu

SEQ ID NO: 108038 - RNA, 19 nt, Artificial Sequence
  Description of Artificial Sequence: Synthetic oligonucleotide
aauaauaggcagguaaucc

SEQ ID NO: 108039 - RNA, 19 nt, Artificial Sequence
  Description of Artificial Sequence: Synthetic oligonucleotide
uuaaauuuuaggcaccgcu

SEQ ID NO: 108040 - RNA, 19 nt, Artificial Sequence
  Description of Artificial Sequence: Synthetic oligonucleotide
auugauacggucuaccaug

SEQ ID NO: 108041 - RNA, 19 nt, Artificial Sequence
  Description of Artificial Sequence: Synthetic oligonucleotide
aauuuuaggcaccgcuugg

SEQ ID NO: 108042 - RNA, 19 nt, Artificial Sequence
  Description of Artificial Sequence: Synthetic oligonucleotide
gagugaaauggucuguucg

SEQ ID NO: 108043 - RNA, 19 nt, Artificial Sequence
  Description of Artificial Sequence: Synthetic oligonucleotide
agugaaauggucuguucgg

SEQ ID NO: 108044 - RNA, 19 nt, Artificial Sequence
  Description of Artificial Sequence: Synthetic oligonucleotide
acguugguaagccaccucc

SEQ ID NO: 108045 - RNA, 19 nt, Artificial Sequence
  Description of Artificial Sequence: Synthetic oligonucleotide
uggugaacuacaaagcgca

SEQ ID NO: 108046 - RNA, 19 nt, Artificial Sequence
  Description of Artificial Sequence: Synthetic oligonucleotide
cuauaguagcccuugcugg

SEQ ID NO: 108047 - RNA, 19 nt, Artificial Sequence
  Description of Artificial Sequence: Synthetic oligonucleotide
uaauaggcagguaauccag

SEQ ID NO: 108048 - RNA, 19 nt, Artificial Sequence
  Description of Artificial Sequence: Synthetic oligonucleotide
uuucccgagacacaggcug

SEQ ID NO: 108049 - RNA, 19 nt, Artificial Sequence
  Description of Artificial Sequence: Synthetic oligonucleotide
acuauaguagcccuugcug

SEQ ID NO: 108050 - RNA, 19 nt, Artificial Sequence
  Description of Artificial Sequence: Synthetic oligonucleotide
uuaggcaccgcuugggagg

SEQ ID NO: 108051 - RNA, 19 nt, Artificial Sequence
  Description of Artificial Sequence: Synthetic oligonucleotide
uaauccagagacacacugg

SEQ ID NO: 108052 - RNA, 19 nt, Artificial Sequence
  Description of Artificial Sequence: Synthetic oligonucleotide
uggcuuagaggucuggagg

SEQ ID NO: 108053 - RNA, 19 nt, Artificial Sequence
  Description of Artificial Sequence: Synthetic oligonucleotide
caagguuaguggaacaugc

SEQ ID NO: 108054 - RNA, 19 nt, Artificial Sequence
  Description of Artificial Sequence: Synthetic oligonucleotide
aagaguaagaggaagucga

SEQ ID NO: 108055 - RNA, 19 nt, Artificial Sequence
  Description of Artificial Sequence: Synthetic oligonucleotide
cauagcgacggccauaacc

SEQ ID NO: 108056 - RNA, 19 nt, Artificial Sequence
  Description of Artificial Sequence: Synthetic oligonucleotide
auagcgacggccauaaccg

SEQ ID NO: 108057 - RNA, 19 nt, Artificial Sequence
  Description of Artificial Sequence: Synthetic oligonucleotide
auaauaggcagguaaucca

SEQ ID NO: 108058 - RNA, 19 nt, Artificial Sequence
  Description of Artificial Sequence: Synthetic oligonucleotide
uccaguaacagcccgcucu

SEQ ID NO: 108059 - RNA, 19 nt, Artificial Sequence
  Description of Artificial Sequence: Synthetic oligonucleotide
aagaagacgaacccacgga

SEQ ID NO: 108060 - RNA, 19 nt, Artificial Sequence
  Description of Artificial Sequence: Synthetic oligonucleotide
aagacgaacccacggagga

SEQ ID NO: 108061 - RNA, 19 nt, Artificial Sequence
  Description of Artificial Sequence: Synthetic oligonucleotide
uguagggacuauaguagcc

SEQ ID NO: 108062 - RNA, 19 nt, Artificial Sequence
  Description of Artificial Sequence: Synthetic oligonucleotide
guuuaaauuuuaggcaccg

SEQ ID NO: 108063 - RNA, 19 nt, Artificial Sequence
  Description of Artificial Sequence: Synthetic oligonucleotide
aguaacagcccgcucugcg

SEQ ID NO: 108064 - RNA, 19 nt, Artificial Sequence
  Description of Artificial Sequence: Synthetic oligonucleotide
uaaauuuuaggcaccgcuu

SEQ ID NO: 108065 - RNA, 19 nt, Artificial Sequence
  Description of Artificial Sequence: Synthetic oligonucleotide
gauacggucuaccaugauc

SEQ ID NO: 108066 - RNA, 19 nt, Artificial Sequence
  Description of Artificial Sequence: Synthetic oligonucleotide
ucgucgaugucauacugcc

SEQ ID NO: 108067 - RNA, 19 nt, Artificial Sequence
  Description of Artificial Sequence: Synthetic oligonucleotide
ucggucaaugaucauagau

SEQ ID NO: 108068 - RNA, 19 nt, Artificial Sequence
  Description of Artificial Sequence: Synthetic oligonucleotide
gugauagaaagugugccgg

SEQ ID NO: 108069 - RNA, 19 nt, Artificial Sequence
  Description of Artificial Sequence: Synthetic oligonucleotide
auccggagaacccuccagc

SEQ ID NO: 108070 - RNA, 19 nt, Artificial Sequence
  Description of Artificial Sequence: Synthetic oligonucleotide
uuaguguucugccuggcau

SEQ ID NO: 108071 - RNA, 19 nt, Artificial Sequence
  Description of Artificial Sequence: Synthetic oligonucleotide
acgguauugguccagugcu

SEQ ID NO: 108072 - RNA, 19 nt, Artificial Sequence
  Description of Artificial Sequence: Synthetic oligonucleotide
aaaagaccccagcgccucc

SEQ ID NO: 108073 - RNA, 19 nt, Artificial Sequence
  Description of Artificial Sequence: Synthetic oligonucleotide
ucaucaagggguacacggc

SEQ ID NO: 108074 - RNA, 19 nt, Artificial Sequence
  Description of Artificial Sequence: Synthetic oligonucleotide
auacggucuaccaugaucu

SEQ ID NO: 108075 - RNA, 19 nt, Artificial Sequence
  Description of Artificial Sequence: Synthetic oligonucleotide
cacgguauccaguaacagc

SEQ ID NO: 108076 - RNA, 19 nt, Artificial Sequence
  Description of Artificial Sequence: Synthetic oligonucleotide
aauggucuguucgguauag

SEQ ID NO: 108077 - RNA, 19 nt, Artificial Sequence
  Description of Artificial Sequence: Synthetic oligonucleotide
agagugaaauggucuguuc

SEQ ID NO: 108078 - RNA, 19 nt, Artificial Sequence
  Description of Artificial Sequence: Synthetic oligonucleotide
aagacccaaugaauaauag

SEQ ID NO: 108079 - RNA, 19 nt, Artificial Sequence
  Description of Artificial Sequence: Synthetic oligonucleotide
agauugauacggucuacca

SEQ ID NO: 108080 - RNA, 19 nt, Artificial Sequence
  Description of Artificial Sequence: Synthetic oligonucleotide
agauagaauccucccagga

SEQ ID NO: 108081 - RNA, 19 nt, Artificial Sequence
  Description of Artificial Sequence: Synthetic oligonucleotide
  modified_base (6)..(6): a, c, u, g, unknown or other
uccgunuuggggucaaaga

SEQ ID NO: 108082 - RNA, 19 nt, Artificial Sequence
  Description of Artificial Sequence: Synthetic oligonucleotide
gaagacgaacccacggagg

SEQ ID NO: 108083 - RNA, 19 nt, Artificial Sequence
  Description of Artificial Sequence: Synthetic oligonucleotide
  modified_base (3)..(3): a, c, u, g, unknown or other
gunuuggggucaaagaaac

SEQ ID NO: 108084 - RNA, 19 nt, Artificial Sequence
  Description of Artificial Sequence: Synthetic oligonucleotide
ugauagaaagugugccggc

SEQ ID NO: 108085 - RNA, 19 nt, Artificial Sequence
  Description of Artificial Sequence: Synthetic oligonucleotide
gaagagacggcuggcuugg

SEQ ID NO: 108086 - RNA, 19 nt, Artificial Sequence
  Description of Artificial Sequence: Synthetic oligonucleotide
ucaagguuaguggaacaug

SEQ ID NO: 108087 - RNA, 19 nt, Artificial Sequence
  Description of Artificial Sequence: Synthetic oligonucleotide
ugaccagugauguugucua

SEQ ID NO: 108088 - RNA, 19 nt, Artificial Sequence
  Description of Artificial Sequence: Synthetic oligonucleotide
ucguaguacagccagccuu

SEQ ID NO: 108089 - RNA, 19 nt, Artificial Sequence
  Description of Artificial Sequence: Synthetic oligonucleotide
ccccuaaagagguugaagg

SEQ ID NO: 108090 - RNA, 19 nt, Artificial Sequence
  Description of Artificial Sequence: Synthetic oligonucleotide
ugcguggguccucaaaccc

SEQ ID NO: 108091 - RNA, 19 nt, Artificial Sequence
  Description of Artificial Sequence: Synthetic oligonucleotide
gaauccucccaggagagac

SEQ ID NO: 108092 - RNA, 19 nt, Artificial Sequence
  Description of Artificial Sequence: Synthetic oligonucleotide
  modified_base (2)..(2): a, c, u, g, unknown or other
unuuggggucaaagaaacc

SEQ ID NO: 108093 - RNA, 19 nt, Artificial Sequence
  Description of Artificial Sequence: Synthetic oligonucleotide
gaauaauaggcagguaauc

SEQ ID NO: 108094 - RNA, 19 nt, Artificial Sequence
  Description of Artificial Sequence: Synthetic oligonucleotide
ggaagagugaaauggucug

SEQ ID NO: 108095 - RNA, 19 nt, Artificial Sequence
  Description of Artificial Sequence: Synthetic oligonucleotide
gucuuuagggccuggguac

SEQ ID NO: 108096 - RNA, 19 nt, Artificial Sequence
  Description of Artificial Sequence: Synthetic oligonucleotide
uaaccggaggaagaguaag

SEQ ID NO: 108097 - RNA, 19 nt, Artificial Sequence
  Description of Artificial Sequence: Synthetic oligonucleotide
aggccuuaucuucccaugg

SEQ ID NO: 108098 - RNA, 19 nt, Artificial Sequence
  Description of Artificial Sequence: Synthetic oligonucleotide
gucgggcucaaucagacca

SEQ ID NO: 108099 - RNA, 19 nt, Artificial Sequence
  Description of Artificial Sequence: Synthetic oligonucleotide
agagcgucggucaaugauc

SEQ ID NO: 108100 - RNA, 19 nt, Artificial Sequence
  Description of Artificial Sequence: Synthetic oligonucleotide
ugugccggcacgguauugg

SEQ ID NO: 108101 - RNA, 19 nt, Artificial Sequence
  Description of Artificial Sequence: Synthetic oligonucleotide
ugucuaggaugccagccac

SEQ ID NO: 108102 - RNA, 19 nt, Artificial Sequence
  Description of Artificial Sequence: Synthetic oligonucleotide
aagcuaacugguuccuaga

SEQ ID NO: 108103 - RNA, 19 nt, Artificial Sequence
  Description of Artificial Sequence: Synthetic oligonucleotide
agcauuacccgagagcaug

SEQ ID NO: 108104 - RNA, 19 nt, Artificial Sequence
  Description of Artificial Sequence: Synthetic oligonucleotide
cacgguauugguccagugc

SEQ ID NO: 108105 - RNA, 19 nt, Artificial Sequence
  Description of Artificial Sequence: Synthetic oligonucleotide
cagauagaauccucccagg

SEQ ID NO: 108106 - RNA, 19 nt, Artificial Sequence
  Description of Artificial Sequence: Synthetic oligonucleotide
auaagcgggccaccucagc

SEQ ID NO: 108107 - RNA, 19 nt, Artificial Sequence
  Description of Artificial Sequence: Synthetic oligonucleotide
agcaagacccaaugaauaa

SEQ ID NO: 108108 - RNA, 19 nt, Artificial Sequence
  Description of Artificial Sequence: Synthetic oligonucleotide
ucccagauagaauccuccc

SEQ ID NO: 108109 - RNA, 19 nt, Artificial Sequence
  Description of Artificial Sequence: Synthetic oligonucleotide
gaaggcacuuacaagggga

SEQ ID NO: 108110 - RNA, 19 nt, Artificial Sequence
  Description of Artificial Sequence: Synthetic oligonucleotide
guuccuagagacggcaggg

SEQ ID NO: 108111 - RNA, 19 nt, Artificial Sequence
  Description of Artificial Sequence: Synthetic oligonucleotide
ggugccacgcugcagagcc

SEQ ID NO: 108112 - RNA, 19 nt, Artificial Sequence
  Description of Artificial Sequence: Synthetic oligonucleotide
agguuaguggaacaugcaa

SEQ ID NO: 108113 - RNA, 19 nt, Artificial Sequence
  Description of Artificial Sequence: Synthetic oligonucleotide
guagggacuauaguagccc

SEQ ID NO: 108114 - RNA, 19 nt, Artificial Sequence
  Description of Artificial Sequence: Synthetic oligonucleotide
uccuagagacggcagggcu

SEQ ID NO: 108115 - RNA, 19 nt, Artificial Sequence
  Description of Artificial Sequence: Synthetic oligonucleotide
agaaagugugccggcacgg

SEQ ID NO: 108116 - RNA, 19 nt, Artificial Sequence
  Description of Artificial Sequence: Synthetic oligonucleotide
uccggagaacccuccagcc

SEQ ID NO: 108117 - RNA, 19 nt, Artificial Sequence
  Description of Artificial Sequence: Synthetic oligonucleotide
gauccggagaacccuccag

SEQ ID NO: 108118 - RNA, 19 nt, Artificial Sequence
  Description of Artificial Sequence: Synthetic oligonucleotide
cucgguaggaucagaccag

SEQ ID NO: 108119 - RNA, 19 nt, Artificial Sequence
  Description of Artificial Sequence: Synthetic oligonucleotide
cacuguagggacuauagua

SEQ ID NO: 108120 - RNA, 19 nt, Artificial Sequence
  Description of Artificial Sequence: Synthetic oligonucleotide
cuggaagagugaaaugguc

SEQ ID NO: 108121 - RNA, 19 nt, Artificial Sequence
  Description of Artificial Sequence: Synthetic oligonucleotide
ggugcuaacgucagcacag

SEQ ID NO: 108122 - RNA, 19 nt, Artificial Sequence
  Description of Artificial Sequence: Synthetic oligonucleotide
cagauugauacggucuacc

SEQ ID NO: 108123 - RNA, 19 nt, Artificial Sequence
  Description of Artificial Sequence: Synthetic oligonucleotide
guagccacguugguaagcc

SEQ ID NO: 108124 - RNA, 19 nt, Artificial Sequence
  Description of Artificial Sequence: Synthetic oligonucleotide
cauaaccggaggaagagua

SEQ ID NO: 108125 - RNA, 19 nt, Artificial Sequence
  Description of Artificial Sequence: Synthetic oligonucleotide
caauaagcgggccaccuca

SEQ ID NO: 108126 - RNA, 19 nt, Artificial Sequence
  Description of Artificial Sequence: Synthetic oligonucleotide
ggagaagucucagauccgg

SEQ ID NO: 108127 - RNA, 19 nt, Artificial Sequence
  Description of Artificial Sequence: Synthetic oligonucleotide
agccacguugguaagccac

SEQ ID NO: 108128 - RNA, 19 nt, Artificial Sequence
  Description of Artificial Sequence: Synthetic oligonucleotide
aagagugaaauggucuguu

SEQ ID NO: 108129 - RNA, 19 nt, Artificial Sequence
  Description of Artificial Sequence: Synthetic oligonucleotide
ggggaguaaguacagggug

SEQ ID NO: 108130 - RNA, 19 nt, Artificial Sequence
  Description of Artificial Sequence: Synthetic oligonucleotide
  modified_base (7)..(7): a, c, u, g, unknown or other
cuccgunuuggggucaaag

SEQ ID NO: 108131 - RNA, 19 nt, Artificial Sequence
  Description of Artificial Sequence: Synthetic oligonucleotide
aggugcuaacgucagcaca

SEQ ID NO: 108132 - RNA, 19 nt, Artificial Sequence
  Description of Artificial Sequence: Synthetic oligonucleotide
aauaagcgggccaccucag

SEQ ID NO: 108133 - RNA, 19 nt, Artificial Sequence
  Description of Artificial Sequence: Synthetic oligonucleotide
ucgguaggaucagaccagg

SEQ ID NO: 108134 - RNA, 19 nt, Artificial Sequence
  Description of Artificial Sequence: Synthetic oligonucleotide
ugucuggacaucuguguua

SEQ ID NO: 108135 - RNA, 19 nt, Artificial Sequence
  Description of Artificial Sequence: Synthetic oligonucleotide
cuuggaggacgucuuccgc

SEQ ID NO: 108136 - RNA, 19 nt, Artificial Sequence
  Description of Artificial Sequence: Synthetic oligonucleotide
ugcaaagcucauugagggu

SEQ ID NO: 108137 - RNA, 19 nt, Artificial Sequence
  Description of Artificial Sequence: Synthetic oligonucleotide
guaugucugguggucaaug

SEQ ID NO: 108138 - RNA, 19 nt, Artificial Sequence
  Description of Artificial Sequence: Synthetic oligonucleotide
ucgaugucauacugccggc

SEQ ID NO: 108139 - RNA, 19 nt, Artificial Sequence
  Description of Artificial Sequence: Synthetic oligonucleotide
acacuguagggacuauagu

SEQ ID NO: 108140 - RNA, 19 nt, Artificial Sequence
  Description of Artificial Sequence: Synthetic oligonucleotide
cugugcuuccagcaauaag

SEQ ID NO: 108141 - RNA, 19 nt, Artificial Sequence
  Description of Artificial Sequence: Synthetic oligonucleotide
uaggccucguacacugaca

SEQ ID NO: 108142 - RNA, 19 nt, Artificial Sequence
  Description of Artificial Sequence: Synthetic oligonucleotide
agcauccacggugccacgc

SEQ ID NO: 108143 - RNA, 19 nt, Artificial Sequence
  Description of Artificial Sequence: Synthetic oligonucleotide
ccgaucaugcagcucaggg

SEQ ID NO: 108144 - RNA, 19 nt, Artificial Sequence
  Description of Artificial Sequence: Synthetic oligonucleotide
ggugcguggguccucaaac

SEQ ID NO: 108145 - RNA, 19 nt, Artificial Sequence
  Description of Artificial Sequence: Synthetic oligonucleotide
acugguuccuagagacggc

SEQ ID NO: 108146 - RNA, 19 nt, Artificial Sequence
  Description of Artificial Sequence: Synthetic oligonucleotide
guaggccucguacacugac

SEQ ID NO: 108147 - RNA, 19 nt, Artificial Sequence
  Description of Artificial Sequence: Synthetic oligonucleotide
ggucacgguauccaguaac

SEQ ID NO: 108148 - RNA, 19 nt, Artificial Sequence
  Description of Artificial Sequence: Synthetic oligonucleotide
cuaccagacccuuccgcac

SEQ ID NO: 108149 - RNA, 19 nt, Artificial Sequence
  Description of Artificial Sequence: Synthetic oligonucleotide
gggaacggaagccaccagc

SEQ ID NO: 108150 - RNA, 19 nt, Artificial Sequence
  Description of Artificial Sequence: Synthetic oligonucleotide
gaccacgccgucugaggag

SEQ ID NO: 108151 - RNA, 19 nt, Artificial Sequence
  Description of Artificial Sequence: Synthetic oligonucleotide
ucucggguggggaguaagu

SEQ ID NO: 108152 - RNA, 19 nt, Artificial Sequence
  Description of Artificial Sequence: Synthetic oligonucleotide
aagugugccggcacgguau

SEQ ID NO: 108153 - RNA, 19 nt, Artificial Sequence
  Description of Artificial Sequence: Synthetic oligonucleotide
gugaagcggucacugggcc

SEQ ID NO: 108154 - RNA, 19 nt, Artificial Sequence
  Description of Artificial Sequence: Synthetic oligonucleotide
uacccgagagcaugucagc

SEQ ID NO: 108155 - RNA, 19 nt, Artificial Sequence
  Description of Artificial Sequence: Synthetic oligonucleotide
ugggccagauugauacggu

SEQ ID NO: 108156 - RNA, 19 nt, Artificial Sequence
  Description of Artificial Sequence: Synthetic oligonucleotide
agcaauaagcgggccaccu

SEQ ID NO: 108157 - RNA, 19 nt, Artificial Sequence
  Description of Artificial Sequence: Synthetic oligonucleotide
ugcgugaaccagcgguaga

SEQ ID NO: 108158 - RNA, 19 nt, Artificial Sequence
  Description of Artificial Sequence: Synthetic oligonucleotide
aaaggaucagggagaccca

SEQ ID NO: 108159 - RNA, 19 nt, Artificial Sequence
  Description of Artificial Sequence: Synthetic oligonucleotide
ugcuaacgucagcacagau

SEQ ID NO: 108160 - RNA, 19 nt, Artificial Sequence
  Description of Artificial Sequence: Synthetic oligonucleotide
ggaagacaccuuuacaugu

SEQ ID NO: 108161 - RNA, 19 nt, Artificial Sequence
  Description of Artificial Sequence: Synthetic oligonucleotide
uuccuagagacggcagggc

SEQ ID NO: 108162 - RNA, 19 nt, Artificial Sequence
  Description of Artificial Sequence: Synthetic oligonucleotide
acuuacaaggggagcugag

SEQ ID NO: 108163 - RNA, 19 nt, Artificial Sequence
  Description of Artificial Sequence: Synthetic oligonucleotide
agcgggaacggaagccacc

SEQ ID NO: 108164 - RNA, 19 nt, Artificial Sequence
  Description of Artificial Sequence: Synthetic oligonucleotide
cgucggucaaugaucauag

SEQ ID NO: 108165 - RNA, 19 nt, Artificial Sequence
  Description of Artificial Sequence: Synthetic oligonucleotide
ugcgcgaaccagugcguga

SEQ ID NO: 108166 - RNA, 19 nt, Artificial Sequence
  Description of Artificial Sequence: Synthetic oligonucleotide
gguuaguggaacaugcaaa

SEQ ID NO: 108167 - RNA, 19 nt, Artificial Sequence
  Description of Artificial Sequence: Synthetic oligonucleotide
gggacuauaguagcccuug

SEQ ID NO: 108168 - RNA, 19 nt, Artificial Sequence
  Description of Artificial Sequence: Synthetic oligonucleotide
aggcgcucauccguggagg

SEQ ID NO: 108169 - RNA, 19 nt, Artificial Sequence
  Description of Artificial Sequence: Synthetic oligonucleotide
agauccggagaacccucca

SEQ ID NO: 108170 - RNA, 19 nt, Artificial Sequence
  Description of Artificial Sequence: Synthetic oligonucleotide
ggcgucgucgaugucauac

SEQ ID NO: 108171 - RNA, 19 nt, Artificial Sequence
  Description of Artificial Sequence: Synthetic oligonucleotide
ggauccacauagcugcgca

SEQ ID NO: 108172 - RNA, 19 nt, Artificial Sequence
  Description of Artificial Sequence: Synthetic oligonucleotide
gccauaaccggaggaagag

SEQ ID NO: 108173 - RNA, 19 nt, Artificial Sequence
  Description of Artificial Sequence: Synthetic oligonucleotide
acggaagccaccagcauua

SEQ ID NO: 108174 - RNA, 19 nt, Artificial Sequence
  Description of Artificial Sequence: Synthetic oligonucleotide
ggagagacgcagcuggcuc

SEQ ID NO: 108175 - RNA, 19 nt, Artificial Sequence
  Description of Artificial Sequence: Synthetic oligonucleotide
ccguucacccuucacuggg

SEQ ID NO: 108176 - RNA, 19 nt, Artificial Sequence
  Description of Artificial Sequence: Synthetic oligonucleotide
auggucuguucgguauagg

SEQ ID NO: 108177 - RNA, 19 nt, Artificial Sequence
  Description of Artificial Sequence: Synthetic oligonucleotide
ugauacggucuaccaugau

SEQ ID NO: 108178 - RNA, 19 nt, Artificial Sequence
  Description of Artificial Sequence: Synthetic oligonucleotide
gacaccgcagggccuccgc

SEQ ID NO: 108179 - RNA, 19 nt, Artificial Sequence
  Description of Artificial Sequence: Synthetic oligonucleotide
uggguguagcugaggcgcu

SEQ ID NO: 108180 - RNA, 19 nt, Artificial Sequence
  Description of Artificial Sequence: Synthetic oligonucleotide
agacgaacccacggaggag

SEQ ID NO: 108181 - RNA, 19 nt, Artificial Sequence
  Description of Artificial Sequence: Synthetic oligonucleotide
uggugcguggguccucaaa

SEQ ID NO: 108182 - RNA, 19 nt, Artificial Sequence
  Description of Artificial Sequence: Synthetic oligonucleotide
ccucgguaggaucagacca

SEQ ID NO: 108183 - RNA, 19 nt, Artificial Sequence
  Description of Artificial Sequence: Synthetic oligonucleotide
auuugaccacgccgucuga

SEQ ID NO: 108184 - RNA, 19 nt, Artificial Sequence
  Description of Artificial Sequence: Synthetic oligonucleotide
cagugcgugaaccagcggu

SEQ ID NO: 108185 - RNA, 19 nt, Artificial Sequence
  Description of Artificial Sequence: Synthetic oligonucleotide
ccucguaguacagccagcc

SEQ ID NO: 108186 - RNA, 19 nt, Artificial Sequence
  Description of Artificial Sequence: Synthetic oligonucleotide
cauccguggagggauccac

SEQ ID NO: 108187 - RNA, 19 nt, Artificial Sequence
  Description of Artificial Sequence: Synthetic oligonucleotide
gguauugguccagugcuga

SEQ ID NO: 108188 - RNA, 19 nt, Artificial Sequence
  Description of Artificial Sequence: Synthetic oligonucleotide
gcucaagacagaggccucg

SEQ ID NO: 108189 - RNA, 19 nt, Artificial Sequence
  Description of Artificial Sequence: Synthetic oligonucleotide
auaaccggaggaagaguaa

SEQ ID NO: 108190 - RNA, 19 nt, Artificial Sequence
  Description of Artificial Sequence: Synthetic oligonucleotide
cauccacggugccacgcug

SEQ ID NO: 108191 - RNA, 19 nt, Artificial Sequence
  Description of Artificial Sequence: Synthetic oligonucleotide
aagagacggcuggcuuggg

SEQ ID NO: 108192 - RNA, 19 nt, Artificial Sequence
  Description of Artificial Sequence: Synthetic oligonucleotide
acggugccacgcugcagag

SEQ ID NO: 108193 - RNA, 19 nt, Artificial Sequence
  Description of Artificial Sequence: Synthetic oligonucleotide
cggugcgcgaaccagugcg

SEQ ID NO: 108194 - RNA, 19 nt, Artificial Sequence
  Description of Artificial Sequence: Synthetic oligonucleotide
  modified_base (5)..(5): a, c, u, g, unknown or other
ccgunuuggggucaaagaa

SEQ ID NO: 108195 - RNA, 19 nt, Artificial Sequence
  Description of Artificial Sequence: Synthetic oligonucleotide
cacguugguaagccaccuc

SEQ ID NO: 108196 - RNA, 19 nt, Artificial Sequence
  Description of Artificial Sequence: Synthetic oligonucleotide
ccuaccagacccuuccgca

SEQ ID NO: 108197 - RNA, 19 nt, Artificial Sequence
  Description of Artificial Sequence: Synthetic oligonucleotide
auuucccgagacacaggcu

SEQ ID NO: 108198 - RNA, 19 nt, Artificial Sequence
  Description of Artificial Sequence: Synthetic oligonucleotide
agcgacggccauaaccgga

SEQ ID NO: 108199 - RNA, 19 nt, Artificial Sequence
  Description of Artificial Sequence: Synthetic oligonucleotide
acccuucacuggguccagc

SEQ ID NO: 108200 - RNA, 19 nt, Artificial Sequence
  Description of Artificial Sequence: Synthetic oligonucleotide
cauuacccgagagcauguc

SEQ ID NO: 108201 - RNA, 19 nt, Artificial Sequence
  Description of Artificial Sequence: Synthetic oligonucleotide
ugcggugcauggccuccgu

SEQ ID NO: 108202 - RNA, 19 nt, Artificial Sequence
  Description of Artificial Sequence: Synthetic oligonucleotide
gcgaaccagugcgugaacc

SEQ ID NO: 108203 - RNA, 19 nt, Artificial Sequence
  Description of Artificial Sequence: Synthetic oligonucleotide
gccagauugauacggucua

SEQ ID NO: 108204 - RNA, 19 nt, Artificial Sequence
  Description of Artificial Sequence: Synthetic oligonucleotide
gugaaauggucuguucggu

SEQ ID NO: 108205 - RNA, 19 nt, Artificial Sequence
  Description of Artificial Sequence: Synthetic oligonucleotide
ccauuucccgagacacagg

SEQ ID NO: 108206 - RNA, 19 nt, Artificial Sequence
  Description of Artificial Sequence: Synthetic oligonucleotide
ccgcugaccagugauguug

SEQ ID NO: 108207 - RNA, 19 nt, Artificial Sequence
  Description of Artificial Sequence: Synthetic oligonucleotide
agugugccggcacgguauu

SEQ ID NO: 108208 - RNA, 19 nt, Artificial Sequence
  Description of Artificial Sequence: Synthetic oligonucleotide
caccgcuugggaggaagac

SEQ ID NO: 108209 - RNA, 19 nt, Artificial Sequence
  Description of Artificial Sequence: Synthetic oligonucleotide
gagcgggaacggaagccac

SEQ ID NO: 108210 - RNA, 19 nt, Artificial Sequence
  Description of Artificial Sequence: Synthetic oligonucleotide
gccgcaugcagagcgggag

SEQ ID NO: 108211 - RNA, 19 nt, Artificial Sequence
  Description of Artificial Sequence: Synthetic oligonucleotide
ggcauagcgacggccauaa

SEQ ID NO: 108212 - RNA, 19 nt, Artificial Sequence
  Description of Artificial Sequence: Synthetic oligonucleotide
cuacccugugucugggucu

SEQ ID NO: 108213 - RNA, 19 nt, Artificial Sequence
  Description of Artificial Sequence: Synthetic oligonucleotide
gucggucaaugaucauaga

SEQ ID NO: 108214 - RNA, 19 nt, Artificial Sequence
  Description of Artificial Sequence: Synthetic oligonucleotide
cagagcgucggucaaugau

SEQ ID NO: 108215 - RNA, 19 nt, Artificial Sequence
  Description of Artificial Sequence: Synthetic oligonucleotide
gaaagugugccggcacggu

SEQ ID NO: 108216 - RNA, 19 nt, Artificial Sequence
  Description of Artificial Sequence: Synthetic oligonucleotide
ccggagaacccuccagccc

SEQ ID NO: 108217 - RNA, 19 nt, Artificial Sequence
  Description of Artificial Sequence: Synthetic oligonucleotide
ggaggacgucuuccgcucc

SEQ ID NO: 108218 - RNA, 19 nt, Artificial Sequence
  Description of Artificial Sequence: Synthetic oligonucleotide
cagcccgcucugcggaaag

SEQ ID NO: 108219 - RNA, 19 nt, Artificial Sequence
  Description of Artificial Sequence: Synthetic oligonucleotide
cucaagguuaguggaacau

SEQ ID NO: 108220 - RNA, 19 nt, Artificial Sequence
  Description of Artificial Sequence: Synthetic oligonucleotide
cccagauagaauccuccca

SEQ ID NO: 108221 - RNA, 19 nt, Artificial Sequence
  Description of Artificial Sequence: Synthetic oligonucleotide
gccagagcgucggucaaug

SEQ ID NO: 108222 - RNA, 19 nt, Artificial Sequence
  Description of Artificial Sequence: Synthetic oligonucleotide
auccguggagggauccaca

SEQ ID NO: 108223 - RNA, 19 nt, Artificial Sequence
  Description of Artificial Sequence: Synthetic oligonucleotide
gggauccacauagcugcgc

SEQ ID NO: 108224 - RNA, 19 nt, Artificial Sequence
  Description of Artificial Sequence: Synthetic oligonucleotide
gcgcuugcgcacugaagac

SEQ ID NO: 108225 - RNA, 19 nt, Artificial Sequence
  Description of Artificial Sequence: Synthetic oligonucleotide
ggaaaggaucagggagacc

SEQ ID NO: 108226 - RNA, 19 nt, Artificial Sequence
  Description of Artificial Sequence: Synthetic oligonucleotide
gugcuaacgucagcacaga

SEQ ID NO: 108227 - RNA, 19 nt, Artificial Sequence
  Description of Artificial Sequence: Synthetic oligonucleotide
ggccagauugauacggucu

SEQ ID NO: 108228 - RNA, 19 nt, Artificial Sequence
  Description of Artificial Sequence: Synthetic oligonucleotide
acgaacccacggaggagga

SEQ ID NO: 108229 - RNA, 19 nt, Artificial Sequence
  Description of Artificial Sequence: Synthetic oligonucleotide
ggggcaugugagguacuug

SEQ ID NO: 108230 - RNA, 19 nt, Artificial Sequence
  Description of Artificial Sequence: Synthetic oligonucleotide
agcgucggucaaugaucau

SEQ ID NO: 108231 - RNA, 19 nt, Artificial Sequence
  Description of Artificial Sequence: Synthetic oligonucleotide
ccagauugauacggucuac

SEQ ID NO: 108232 - RNA, 19 nt, Artificial Sequence
  Description of Artificial Sequence: Synthetic oligonucleotide
gaggcauagcgacggccau

SEQ ID NO: 108233 - RNA, 19 nt, Artificial Sequence
  Description of Artificial Sequence: Synthetic oligonucleotide
cgucgucgaugucauacug

SEQ ID NO: 108234 - RNA, 19 nt, Artificial Sequence
  Description of Artificial Sequence: Synthetic oligonucleotide
caguggcgaucugagccuc

SEQ ID NO: 108235 - RNA, 19 nt, Artificial Sequence
  Description of Artificial Sequence: Synthetic oligonucleotide
gggguacacggccaggggu

SEQ ID NO: 108236 - RNA, 19 nt, Artificial Sequence
  Description of Artificial Sequence: Synthetic oligonucleotide
gcgucggucaaugaucaua

SEQ ID NO: 108237 - RNA, 19 nt, Artificial Sequence
  Description of Artificial Sequence: Synthetic oligonucleotide
ccgagagcaugucagcaaa

SEQ ID NO: 108238 - RNA, 19 nt, Artificial Sequence
  Description of Artificial Sequence: Synthetic oligonucleotide
gccgaucaugcagcucagg

SEQ ID NO: 108239 - RNA, 19 nt, Artificial Sequence
  Description of Artificial Sequence: Synthetic oligonucleotide
gcccugaggcauagcgacg

SEQ ID NO: 108240 - RNA, 19 nt, Artificial Sequence
  Description of Artificial Sequence: Synthetic oligonucleotide
cgguauugguccagugcug

SEQ ID NO: 108241 - RNA, 19 nt, Artificial Sequence
  Description of Artificial Sequence: Synthetic oligonucleotide
gccggugcgcgaaccagug

SEQ ID NO: 108242 - RNA, 19 nt, Artificial Sequence
  Description of Artificial Sequence: Synthetic oligonucleotide
guguuagucuggucuuauu

SEQ ID NO: 108243 - RNA, 19 nt, Artificial Sequence
  Description of Artificial Sequence: Synthetic oligonucleotide
gugugccggcacgguauug

SEQ ID NO: 108244 - RNA, 19 nt, Artificial Sequence
  Description of Artificial Sequence: Synthetic oligonucleotide
gcguggguccucaaaccca

SEQ ID NO: 108245 - RNA, 19 nt, Artificial Sequence
  Description of Artificial Sequence: Synthetic oligonucleotide
cguugguaagccaccucca

SEQ ID NO: 108246 - RNA, 19 nt, Artificial Sequence
  Description of Artificial Sequence: Synthetic oligonucleotide
ggcucaagacagaggccuc

SEQ ID NO: 108247 - RNA, 19 nt, Artificial Sequence
  Description of Artificial Sequence: Synthetic oligonucleotide
ggaagcuaacugguuccua

SEQ ID NO: 108248 - RNA, 19 nt, Artificial Sequence
  Description of Artificial Sequence: Synthetic oligonucleotide
gugccggcacgguauuggu

SEQ ID NO: 108249 - RNA, 19 nt, Artificial Sequence
  Description of Artificial Sequence: Synthetic oligonucleotide
cggccauaaccggaggaag

SEQ ID NO: 108250 - RNA, 19 nt, Artificial Sequence
  Description of Artificial Sequence: Synthetic oligonucleotide
ccgugguccuucaggauua

SEQ ID NO: 108251 - RNA, 19 nt, Artificial Sequence
  Description of Artificial Sequence: Synthetic oligonucleotide
cagcauuacccgagagcau

SEQ ID NO: 108252 - RNA, 19 nt, Artificial Sequence
  Description of Artificial Sequence: Synthetic oligonucleotide
ccacauagcugcgcaccuc

SEQ ID NO: 108253 - RNA, 19 nt, Artificial Sequence
  Description of Artificial Sequence: Synthetic oligonucleotide
gcauuacccgagagcaugu

SEQ ID NO: 108254 - RNA, 19 nt, Artificial Sequence
  Description of Artificial Sequence: Synthetic oligonucleotide
ccggugcgcgaaccagugc

SEQ ID NO: 108255 - RNA, 19 nt, Artificial Sequence
  Description of Artificial Sequence: Synthetic oligonucleotide
uagagacggcagggcugau

SEQ ID NO: 108256 - RNA, 19 nt, Artificial Sequence
  Description of Artificial Sequence: Synthetic oligonucleotide
ggccugccucguaguacag

SEQ ID NO: 108257 - RNA, 19 nt, Artificial Sequence
  Description of Artificial Sequence: Synthetic oligonucleotide
gcauagcgacggccauaac

SEQ ID NO: 108258 - RNA, 19 nt, Artificial Sequence
  Description of Artificial Sequence: Synthetic oligonucleotide
ccagagcgucggucaauga

SEQ ID NO: 108259 - RNA, 19 nt, Artificial Sequence
  Description of Artificial Sequence: Synthetic oligonucleotide
ggccuuucccagauagaau

SEQ ID NO: 108260 - RNA, 19 nt, Artificial Sequence
  Description of Artificial Sequence: Synthetic oligonucleotide
ggugcgcgaaccagugcgu

SEQ ID NO: 108261 - RNA, 19 nt, Artificial Sequence
  Description of Artificial Sequence: Synthetic oligonucleotide
cgggaacggaagccaccag

SEQ ID NO: 108262 - RNA, 19 nt, Artificial Sequence
  Description of Artificial Sequence: Synthetic oligonucleotide
ccauaaccggaggaagagu

SEQ ID NO: 108263 - RNA, 19 nt, Artificial Sequence
  Description of Artificial Sequence: Synthetic oligonucleotide
cgugguccuucaggauuag

SEQ ID NO: 108264 - RNA, 19 nt, Artificial Sequence
  Description of Artificial Sequence: Synthetic oligonucleotide
gcgguaggccucguacacu

SEQ ID NO: 108265 - RNA, 19 nt, Artificial Sequence
  Description of Artificial Sequence: Synthetic oligonucleotide
ccacguugguaagccaccu

SEQ ID NO: 108266 - RNA, 19 nt, Artificial Sequence
  Description of Artificial Sequence: Synthetic oligonucleotide
cuaccagguugcggugcau

SEQ ID NO: 108267 - RNA, 19 nt, Artificial Sequence
  Description of Artificial Sequence: Synthetic oligonucleotide
gugccacgcugcagagccu

SEQ ID NO: 108268 - RNA, 19 nt, Artificial Sequence
  Description of Artificial Sequence: Synthetic oligonucleotide
ggcggacaccgcagggccu

SEQ ID NO: 108269 - RNA, 19 nt, Artificial Sequence
  Description of Artificial Sequence: Synthetic oligonucleotide
aauguuaccauuuaagcuc

SEQ ID NO: 108270 - RNA, 19 nt, Artificial Sequence
  Description of Artificial Sequence: Synthetic oligonucleotide
auugcuacaugucauaggc

SEQ ID NO: 108271 - RNA, 19 nt, Artificial Sequence
  Description of Artificial Sequence: Synthetic oligonucleotide
acauauucagcaucgaacc

SEQ ID NO: 108272 - RNA, 19 nt, Artificial Sequence
  Description of Artificial Sequence: Synthetic oligonucleotide
uaguuaauccauuagagcc

SEQ ID NO: 108273 - RNA, 19 nt, Artificial Sequence
  Description of Artificial Sequence: Synthetic oligonucleotide
ucaauuauaauagaagugc

SEQ ID NO: 108274 - RNA, 19 nt, Artificial Sequence
  Description of Artificial Sequence: Synthetic oligonucleotide
ugauguuuuaucuugagac

SEQ ID NO: 108275 - RNA, 19 nt, Artificial Sequence
  Description of Artificial Sequence: Synthetic oligonucleotide
uacucuaucauccacaagu

SEQ ID NO: 108276 - RNA, 19 nt, Artificial Sequence
  Description of Artificial Sequence: Synthetic oligonucleotide
cuaauuauuacuaggcuag

SEQ ID NO: 108277 - RNA, 19 nt, Artificial Sequence
  Description of Artificial Sequence: Synthetic oligonucleotide
auaguuaauccauuagagc

SEQ ID NO: 108278 - RNA, 19 nt, Artificial Sequence
  Description of Artificial Sequence: Synthetic oligonucleotide
ucacuuaucgcccacaggc

SEQ ID NO: 108279 - RNA, 19 nt, Artificial Sequence
  Description of Artificial Sequence: Synthetic oligonucleotide
aacaaguuauuauaguuca

SEQ ID NO: 108280 - RNA, 19 nt, Artificial Sequence
  Description of Artificial Sequence: Synthetic oligonucleotide
auacguauuuuguucaacc

SEQ ID NO: 108281 - RNA, 19 nt, Artificial Sequence
  Description of Artificial Sequence: Synthetic oligonucleotide
agaacauuuauauuccauc

SEQ ID NO: 108282 - RNA, 19 nt, Artificial Sequence
  Description of Artificial Sequence: Synthetic oligonucleotide
aacuaaagaauaagcaccc

SEQ ID NO: 108283 - RNA, 19 nt, Artificial Sequence
  Description of Artificial Sequence: Synthetic oligonucleotide
uuaauuaagaaucuaugua

SEQ ID NO: 108284 - RNA, 19 nt, Artificial Sequence
  Description of Artificial Sequence: Synthetic oligonucleotide
ucaacuaaagaauaagcac

SEQ ID NO: 108285 - RNA, 19 nt, Artificial Sequence
  Description of Artificial Sequence: Synthetic oligonucleotide
aaaaugacuaauguuacca

SEQ ID NO: 108286 - RNA, 19 nt, Artificial Sequence
  Description of Artificial Sequence: Synthetic oligonucleotide
uuaccauuuaagcucaugc

SEQ ID NO: 108287 - RNA, 19 nt, Artificial Sequence
  Description of Artificial Sequence: Synthetic oligonucleotide
cuaauguuaccauuuaagc

SEQ ID NO: 108288 - RNA, 19 nt, Artificial Sequence
  Description of Artificial Sequence: Synthetic oligonucleotide
gauaguuaauccauuagag

SEQ ID NO: 108289 - RNA, 19 nt, Artificial Sequence
  Description of Artificial Sequence: Synthetic oligonucleotide
cuaguuagaggaaacacag

SEQ ID NO: 108290 - RNA, 19 nt, Artificial Sequence
  Description of Artificial Sequence: Synthetic oligonucleotide
ugauaguuaauccauuaga

SEQ ID NO: 108291 - RNA, 19 nt, Artificial Sequence
  Description of Artificial Sequence: Synthetic oligonucleotide
aaugucuauccauucaaug

SEQ ID NO: 108292 - RNA, 19 nt, Artificial Sequence
  Description of Artificial Sequence: Synthetic oligonucleotide
uuuuauacguauuuuguuc

SEQ ID NO: 108293 - RNA, 19 nt, Artificial Sequence
  Description of Artificial Sequence: Synthetic oligonucleotide
cuaggauacaacaagcuac

SEQ ID NO: 108294 - RNA, 19 nt, Artificial Sequence
  Description of Artificial Sequence: Synthetic oligonucleotide
aguagguacucuaucaucc

SEQ ID NO: 108295 - RNA, 19 nt, Artificial Sequence
  Description of Artificial Sequence: Synthetic oligonucleotide
uuuauacguauuuuguuca

SEQ ID NO: 108296 - RNA, 19 nt, Artificial Sequence
  Description of Artificial Sequence: Synthetic oligonucleotide
aauuagacuaguuuacuuu

SEQ ID NO: 108297 - RNA, 19 nt, Artificial Sequence
  Description of Artificial Sequence: Synthetic oligonucleotide
acuauuaggaauauuaacu

SEQ ID NO: 108298 - RNA, 19 nt, Artificial Sequence
  Description of Artificial Sequence: Synthetic oligonucleotide
uuaaugauauggaugccug

SEQ ID NO: 108299 - RNA, 19 nt, Artificial Sequence
  Description of Artificial Sequence: Synthetic oligonucleotide
aaugcgauugauuugugua

SEQ ID NO: 108300 - RNA, 19 nt, Artificial Sequence
  Description of Artificial Sequence: Synthetic oligonucleotide
aguuauagauauucacugg

SEQ ID NO: 108301 - RNA, 19 nt, Artificial Sequence
  Description of Artificial Sequence: Synthetic oligonucleotide
acaauaguagguuuugucu

SEQ ID NO: 108302 - RNA, 19 nt, Artificial Sequence
  Description of Artificial Sequence: Synthetic oligonucleotide
uguguaaauuccauguugu

SEQ ID NO: 108303 - RNA, 19 nt, Artificial Sequence
  Description of Artificial Sequence: Synthetic oligonucleotide
auuggauacuaucagguca

SEQ ID NO: 108304 - RNA, 19 nt, Artificial Sequence
  Description of Artificial Sequence: Synthetic oligonucleotide
aaacgagugcuuuggcccc

SEQ ID NO: 108305 - RNA, 19 nt, Artificial Sequence
  Description of Artificial Sequence: Synthetic oligonucleotide
uggcuaauuauuacuaggc

SEQ ID NO: 108306 - RNA, 19 nt, Artificial Sequence
  Description of Artificial Sequence: Synthetic oligonucleotide
auacuaauggcuaaaauga

SEQ ID NO: 108307 - RNA, 19 nt, Artificial Sequence
  Description of Artificial Sequence: Synthetic oligonucleotide
uugaaauuaguauacugaa

SEQ ID NO: 108308 - RNA, 19 nt, Artificial Sequence
  Description of Artificial Sequence: Synthetic oligonucleotide
auggcuaauuauuacuagg

SEQ ID NO: 108309 - RNA, 19 nt, Artificial Sequence
  Description of Artificial Sequence: Synthetic oligonucleotide
aaaugcaccuuagcuaagc

SEQ ID NO: 108310 - RNA, 19 nt, Artificial Sequence
  Description of Artificial Sequence: Synthetic oligonucleotide
auaacaaguuauuauaguu

SEQ ID NO: 108311 - RNA, 19 nt, Artificial Sequence
  Description of Artificial Sequence: Synthetic oligonucleotide
uaauuggcagaguaaacug

SEQ ID NO: 108312 - RNA, 19 nt, Artificial Sequence
  Description of Artificial Sequence: Synthetic oligonucleotide
uucgaugauaguuaaucca

SEQ ID NO: 108313 - RNA, 19 nt, Artificial Sequence
  Description of Artificial Sequence: Synthetic oligonucleotide
uacuaauauuugcugaucu

SEQ ID NO: 108314 - RNA, 19 nt, Artificial Sequence
  Description of Artificial Sequence: Synthetic oligonucleotide
gacuauuaggaauauuaac

SEQ ID NO: 108315 - RNA, 19 nt, Artificial Sequence
  Description of Artificial Sequence: Synthetic oligonucleotide
aguuauguguagcaugaag

SEQ ID NO: 108316 - RNA, 19 nt, Artificial Sequence
  Description of Artificial Sequence: Synthetic oligonucleotide
agcaaauauugauuugagg

SEQ ID NO: 108317 - RNA, 19 nt, Artificial Sequence
  Description of Artificial Sequence: Synthetic oligonucleotide
uuugaagugaauccguuuu

SEQ ID NO: 108318 - RNA, 19 nt, Artificial Sequence
  Description of Artificial Sequence: Synthetic oligonucleotide
acuuaucgcccacaggccc

SEQ ID NO: 108319 - RNA, 19 nt, Artificial Sequence
  Description of Artificial Sequence: Synthetic oligonucleotide
uucagcaucgaaccuaugu

SEQ ID NO: 108320 - RNA, 19 nt, Artificial Sequence
  Description of Artificial Sequence: Synthetic oligonucleotide
uaugacuccucucagcagu

SEQ ID NO: 108321 - RNA, 19 nt, Artificial Sequence
  Description of Artificial Sequence: Synthetic oligonucleotide
acguauuuuguucaaccuc

SEQ ID NO: 108322 - RNA, 19 nt, Artificial Sequence
  Description of Artificial Sequence: Synthetic oligonucleotide
ucaugugguucaaugaugu

SEQ ID NO: 108323 - RNA, 19 nt, Artificial Sequence
  Description of Artificial Sequence: Synthetic oligonucleotide
uguagaauggcuacccuuc

SEQ ID NO: 108324 - RNA, 19 nt, Artificial Sequence
  Description of Artificial Sequence: Synthetic oligonucleotide
ugucuauccauucaaugaa

SEQ ID NO: 108325 - RNA, 19 nt, Artificial Sequence
  Description of Artificial Sequence: Synthetic oligonucleotide
augucuauccauucaauga

SEQ ID NO: 108326 - RNA, 19 nt, Artificial Sequence
  Description of Artificial Sequence: Synthetic oligonucleotide
augauaguuaauccauuag

SEQ ID NO: 108327 - RNA, 19 nt, Artificial Sequence
  Description of Artificial Sequence: Synthetic oligonucleotide
aaauuagacuaguuuacuu

SEQ ID NO: 108328 - RNA, 19 nt, Artificial Sequence
  Description of Artificial Sequence: Synthetic oligonucleotide
uauagauauucacuggaau

SEQ ID NO: 108329 - RNA, 19 nt, Artificial Sequence
  Description of Artificial Sequence: Synthetic oligonucleotide
uaaaccuggaguaggaaau

SEQ ID NO: 108330 - RNA, 19 nt, Artificial Sequence
  Description of Artificial Sequence: Synthetic oligonucleotide
aaguuauuauaguucagua

SEQ ID NO: 108331 - RNA, 19 nt, Artificial Sequence
  Description of Artificial Sequence: Synthetic oligonucleotide
gauggcgcacucuuagucg

SEQ ID NO: 108332 - RNA, 19 nt, Artificial Sequence
  Description of Artificial Sequence: Synthetic oligonucleotide
guuauagauauucacugga

SEQ ID NO: 108333 - RNA, 19 nt, Artificial Sequence
  Description of Artificial Sequence: Synthetic oligonucleotide
uuauguguagcaugaaguc

SEQ ID NO: 108334 - RNA, 19 nt, Artificial Sequence
  Description of Artificial Sequence: Synthetic oligonucleotide
ugugaacaauucaucagcu

SEQ ID NO: 108335 - RNA, 19 nt, Artificial Sequence
  Description of Artificial Sequence: Synthetic oligonucleotide
ugaaauuaguauacugaaa

SEQ ID NO: 108336 - RNA, 19 nt, Artificial Sequence
  Description of Artificial Sequence: Synthetic oligonucleotide
aagacgcagcaguucagcg

SEQ ID NO: 108337 - RNA, 19 nt, Artificial Sequence
  Description of Artificial Sequence: Synthetic oligonucleotide
ucgaugauaguuaauccau

SEQ ID NO: 108338 - RNA, 19 nt, Artificial Sequence
  Description of Artificial Sequence: Synthetic oligonucleotide
cauuuaccaguuuuauacg

SEQ ID NO: 108339 - RNA, 19 nt, Artificial Sequence
  Description of Artificial Sequence: Synthetic oligonucleotide
gauagcacacuugauggag

SEQ ID NO: 108340 - RNA, 19 nt, Artificial Sequence
  Description of Artificial Sequence: Synthetic oligonucleotide
aagaaucuauguacaauag

SEQ ID NO: 108341 - RNA, 19 nt, Artificial Sequence
  Description of Artificial Sequence: Synthetic oligonucleotide
ugcaguaagaucagacaca

SEQ ID NO: 108342 - RNA, 19 nt, Artificial Sequence
  Description of Artificial Sequence: Synthetic oligonucleotide
cuucgaugauaguuaaucc

SEQ ID NO: 108343 - RNA, 19 nt, Artificial Sequence
  Description of Artificial Sequence: Synthetic oligonucleotide
gaaugucuuaaugcgauug

SEQ ID NO: 108344 - RNA, 19 nt, Artificial Sequence
  Description of Artificial Sequence: Synthetic oligonucleotide
uacaauaguagguuuuguc

SEQ ID NO: 108345 - RNA, 19 nt, Artificial Sequence
  Description of Artificial Sequence: Synthetic oligonucleotide
cucuuagucgcucuguagc

SEQ ID NO: 108346 - RNA, 19 nt, Artificial Sequence
  Description of Artificial Sequence: Synthetic oligonucleotide
ucuuauguauucugacuug

SEQ ID NO: 108347 - RNA, 19 nt, Artificial Sequence
  Description of Artificial Sequence: Synthetic oligonucleotide
uccauuagagcccgugugc

SEQ ID NO: 108348 - RNA, 19 nt, Artificial Sequence
  Description of Artificial Sequence: Synthetic oligonucleotide
agaaccaauggcuaauuau

SEQ ID NO: 108349 - RNA, 19 nt, Artificial Sequence
  Description of Artificial Sequence: Synthetic oligonucleotide
aaacuaguugccggugagc

SEQ ID NO: 108350 - RNA, 19 nt, Artificial Sequence
  Description of Artificial Sequence: Synthetic oligonucleotide
uggaaugucuuaaugcgau

SEQ ID NO: 108351 - RNA, 19 nt, Artificial Sequence
  Description of Artificial Sequence: Synthetic oligonucleotide
aauccauuagagcccgugu

SEQ ID NO: 108352 - RNA, 19 nt, Artificial Sequence
  Description of Artificial Sequence: Synthetic oligonucleotide
ugcauaugucccuucaacu

SEQ ID NO: 108353 - RNA, 19 nt, Artificial Sequence
  Description of Artificial Sequence: Synthetic oligonucleotide
agaaucuauguacaauagu

SEQ ID NO: 108354 - RNA, 19 nt, Artificial Sequence
  Description of Artificial Sequence: Synthetic oligonucleotide
acuaggcuaguguauaaca

SEQ ID NO: 108355 - RNA, 19 nt, Artificial Sequence
  Description of Artificial Sequence: Synthetic oligonucleotide
auggcgcacucuuagucgc

SEQ ID NO: 108356 - RNA, 19 nt, Artificial Sequence
  Description of Artificial Sequence: Synthetic oligonucleotide
ugcuaaagaugcugaaggc

SEQ ID NO: 108357 - RNA, 19 nt, Artificial Sequence
  Description of Artificial Sequence: Synthetic oligonucleotide
uauuacuaggcuaguguau

SEQ ID NO: 108358 - RNA, 19 nt, Artificial Sequence
  Description of Artificial Sequence: Synthetic oligonucleotide
uacuaauggcuaaaaugac

SEQ ID NO: 108359 - RNA, 19 nt, Artificial Sequence
  Description of Artificial Sequence: Synthetic oligonucleotide
uuggauacuaucaggucau

SEQ ID NO: 108360 - RNA, 19 nt, Artificial Sequence
  Description of Artificial Sequence: Synthetic oligonucleotide
gacaugaguggcuucgaug

SEQ ID NO: 108361 - RNA, 19 nt, Artificial Sequence
  Description of Artificial Sequence: Synthetic oligonucleotide
aaugcaccuuagcuaagca

SEQ ID NO: 108362 - RNA, 19 nt, Artificial Sequence
  Description of Artificial Sequence: Synthetic oligonucleotide
augcaccuuagcuaagcac

SEQ ID NO: 108363 - RNA, 19 nt, Artificial Sequence
  Description of Artificial Sequence: Synthetic oligonucleotide
acgaugagaccccacacug

SEQ ID NO: 108364 - RNA, 19 nt, Artificial Sequence
  Description of Artificial Sequence: Synthetic oligonucleotide
uacguauuuuguucaaccu

SEQ ID NO: 108365 - RNA, 19 nt, Artificial Sequence
  Description of Artificial Sequence: Synthetic oligonucleotide
auaauagaagugcauucau

SEQ ID NO: 108366 - RNA, 19 nt, Artificial Sequence
  Description of Artificial Sequence: Synthetic oligonucleotide
uaauggcuaaaaugacuag

SEQ ID NO: 108367 - RNA, 19 nt, Artificial Sequence
  Description of Artificial Sequence: Synthetic oligonucleotide
gacacacgauuucucaaag

SEQ ID NO: 108368 - RNA, 19 nt, Artificial Sequence
  Description of Artificial Sequence: Synthetic oligonucleotide
gauauggaugccugcuaag

SEQ ID NO: 108369 - RNA, 19 nt, Artificial Sequence
  Description of Artificial Sequence: Synthetic oligonucleotide
agcugucgagcacagauug

SEQ ID NO: 108370 - RNA, 19 nt, Artificial Sequence
  Description of Artificial Sequence: Synthetic oligonucleotide
ucucacuuaucgcccacag

SEQ ID NO: 108371 - RNA, 19 nt, Artificial Sequence
  Description of Artificial Sequence: Synthetic oligonucleotide
agagaaaacgagugcuuug

SEQ ID NO: 108372 - RNA, 19 nt, Artificial Sequence
  Description of Artificial Sequence: Synthetic oligonucleotide
uuaccaguuuuauacguau

SEQ ID NO: 108373 - RNA, 19 nt, Artificial Sequence
  Description of Artificial Sequence: Synthetic oligonucleotide
gaugauaguuaauccauua

SEQ ID NO: 108374 - RNA, 19 nt, Artificial Sequence
  Description of Artificial Sequence: Synthetic oligonucleotide
uguagccauugcaaguuca

SEQ ID NO: 108375 - RNA, 19 nt, Artificial Sequence
  Description of Artificial Sequence: Synthetic oligonucleotide
aauucgguguacccugcca

SEQ ID NO: 108376 - RNA, 19 nt, Artificial Sequence
  Description of Artificial Sequence: Synthetic oligonucleotide
ugauugcuacaugucauag

SEQ ID NO: 108377 - RNA, 19 nt, Artificial Sequence
  Description of Artificial Sequence: Synthetic oligonucleotide
aggaaaugcaccuuagcua

SEQ ID NO: 108378 - RNA, 19 nt, Artificial Sequence
  Description of Artificial Sequence: Synthetic oligonucleotide
aggagcguaauacuucucu

SEQ ID NO: 108379 - RNA, 19 nt, Artificial Sequence
  Description of Artificial Sequence: Synthetic oligonucleotide
auucugacuuguuauuaca

SEQ ID NO: 108380 - RNA, 19 nt, Artificial Sequence
  Description of Artificial Sequence: Synthetic oligonucleotide
cuuagcuaagcaccagagc

SEQ ID NO: 108381 - RNA, 19 nt, Artificial Sequence
  Description of Artificial Sequence: Synthetic oligonucleotide
ucgagcacagauuggacaa

SEQ ID NO: 108382 - RNA, 19 nt, Artificial Sequence
  Description of Artificial Sequence: Synthetic oligonucleotide
guaauacuucucuguacag

SEQ ID NO: 108383 - RNA, 19 nt, Artificial Sequence
  Description of Artificial Sequence: Synthetic oligonucleotide
cuuucuuaauuccccugcc

SEQ ID NO: 108384 - RNA, 19 nt, Artificial Sequence
  Description of Artificial Sequence: Synthetic oligonucleotide
ucgaagagauccauugaaa

SEQ ID NO: 108385 - RNA, 19 nt, Artificial Sequence
  Description of Artificial Sequence: Synthetic oligonucleotide
uuucauagaucgcucuguc

SEQ ID NO: 108386 - RNA, 19 nt, Artificial Sequence
  Description of Artificial Sequence: Synthetic oligonucleotide
ucagaggagcguaauacuu

SEQ ID NO: 108387 - RNA, 19 nt, Artificial Sequence
  Description of Artificial Sequence: Synthetic oligonucleotide
uugacuguguuagaaaaua

SEQ ID NO: 108388 - RNA, 19 nt, Artificial Sequence
  Description of Artificial Sequence: Synthetic oligonucleotide
agaggagcguaauacuucu

SEQ ID NO: 108389 - RNA, 19 nt, Artificial Sequence
  Description of Artificial Sequence: Synthetic oligonucleotide
gauuggauacuaucagguc

SEQ ID NO: 108390 - RNA, 19 nt, Artificial Sequence
  Description of Artificial Sequence: Synthetic oligonucleotide
uguccaauucgguguaccc

SEQ ID NO: 108391 - RNA, 19 nt, Artificial Sequence
  Description of Artificial Sequence: Synthetic oligonucleotide
uuuguagaauggcuacccu

SEQ ID NO: 108392 - RNA, 19 nt, Artificial Sequence
  Description of Artificial Sequence: Synthetic oligonucleotide
uauugcuuucauagaucgc

SEQ ID NO: 108393 - RNA, 19 nt, Artificial Sequence
  Description of Artificial Sequence: Synthetic oligonucleotide
ccugcuaagccguuuaggg

SEQ ID NO: 108394 - RNA, 19 nt, Artificial Sequence
  Description of Artificial Sequence: Synthetic oligonucleotide
ugucuuaaugcgauugauu

SEQ ID NO: 108395 - RNA, 19 nt, Artificial Sequence
  Description of Artificial Sequence: Synthetic oligonucleotide
acuaauggcuaaaaugacu

SEQ ID NO: 108396 - RNA, 19 nt, Artificial Sequence
  Description of Artificial Sequence: Synthetic oligonucleotide
caaaagacgcagcaguuca

SEQ ID NO: 108397 - RNA, 19 nt, Artificial Sequence
  Description of Artificial Sequence: Synthetic oligonucleotide
uacucaccuuuaaugauau

SEQ ID NO: 108398 - RNA, 19 nt, Artificial Sequence
  Description of Artificial Sequence: Synthetic oligonucleotide
uaaugcgauugauuugugu

SEQ ID NO: 108399 - RNA, 19 nt, Artificial Sequence
  Description of Artificial Sequence: Synthetic oligonucleotide
aguacaucuauuaauucuu

SEQ ID NO: 108400 - RNA, 19 nt, Artificial Sequence
  Description of Artificial Sequence: Synthetic oligonucleotide
gaaccuaugugaucuugca

SEQ ID NO: 108401 - RNA, 19 nt, Artificial Sequence
  Description of Artificial Sequence: Synthetic oligonucleotide
ugucugauugcuacauguc

SEQ ID NO: 108402 - RNA, 19 nt, Artificial Sequence
  Description of Artificial Sequence: Synthetic oligonucleotide
ucggugagagcuuuugaaa

SEQ ID NO: 108403 - RNA, 19 nt, Artificial Sequence
  Description of Artificial Sequence: Synthetic oligonucleotide
uauacguauuuuguucaac

SEQ ID NO: 108404 - RNA, 19 nt, Artificial Sequence
  Description of Artificial Sequence: Synthetic oligonucleotide
uuauacguauuuuguucaa

SEQ ID NO: 108405 - RNA, 19 nt, Artificial Sequence
  Description of Artificial Sequence: Synthetic oligonucleotide
uagguacucuaucauccac

SEQ ID NO: 108406 - RNA, 19 nt, Artificial Sequence
  Description of Artificial Sequence: Synthetic oligonucleotide
ugguaagaacuccccacga

SEQ ID NO: 108407 - RNA, 19 nt, Artificial Sequence
  Description of Artificial Sequence: Synthetic oligonucleotide
guuauguguagcaugaagu

SEQ ID NO: 108408 - RNA, 19 nt, Artificial Sequence
  Description of Artificial Sequence: Synthetic oligonucleotide
uuccuaauuggcagaguaa

SEQ ID NO: 108409 - RNA, 19 nt, Artificial Sequence
  Description of Artificial Sequence: Synthetic oligonucleotide
ucauucaagcuccucgguu

SEQ ID NO: 108410 - RNA, 19 nt, Artificial Sequence
  Description of Artificial Sequence: Synthetic oligonucleotide
uucauagaucgcucugucu

SEQ ID NO: 108411 - RNA, 19 nt, Artificial Sequence
  Description of Artificial Sequence: Synthetic oligonucleotide
guaaaccuggaguaggaaa

SEQ ID NO: 108412 - RNA, 19 nt, Artificial Sequence
  Description of Artificial Sequence: Synthetic oligonucleotide
uuaaugcgauugauuugug

SEQ ID NO: 108413 - RNA, 19 nt, Artificial Sequence
  Description of Artificial Sequence: Synthetic oligonucleotide
cugcuaagccguuuagggc

SEQ ID NO: 108414 - RNA, 19 nt, Artificial Sequence
  Description of Artificial Sequence: Synthetic oligonucleotide
aagaaccaauggcuaauua

SEQ ID NO: 108415 - RNA, 19 nt, Artificial Sequence
  Description of Artificial Sequence: Synthetic oligonucleotide
cuuaaugcgauugauuugu

SEQ ID NO: 108416 - RNA, 19 nt, Artificial Sequence
  Description of Artificial Sequence: Synthetic oligonucleotide
acaagcuacuucuuauuuu

SEQ ID NO: 108417 - RNA, 19 nt, Artificial Sequence
  Description of Artificial Sequence: Synthetic oligonucleotide
ugcuuucauagaucgcucu

SEQ ID NO: 108418 - RNA, 19 nt, Artificial Sequence
  Description of Artificial Sequence: Synthetic oligonucleotide
uacauugauuggauacuau

SEQ ID NO: 108419 - RNA, 19 nt, Artificial Sequence
  Description of Artificial Sequence: Synthetic oligonucleotide
ggagcuaaugaauccugag

SEQ ID NO: 108420 - RNA, 19 nt, Artificial Sequence
  Description of Artificial Sequence: Synthetic oligonucleotide
ggauacaacaagcuacuuc

SEQ ID NO: 108421 - RNA, 19 nt, Artificial Sequence
  Description of Artificial Sequence: Synthetic oligonucleotide
gcuaauuauuacuaggcua

SEQ ID NO: 108422 - RNA, 19 nt, Artificial Sequence
  Description of Artificial Sequence: Synthetic oligonucleotide
gacuaauguuaccauuuaa

SEQ ID NO: 108423 - RNA, 19 nt, Artificial Sequence
  Description of Artificial Sequence: Synthetic oligonucleotide
auagaucgcucugucucac

SEQ ID NO: 108424 - RNA, 19 nt, Artificial Sequence
  Description of Artificial Sequence: Synthetic oligonucleotide
accuuucuuaauuccccug

SEQ ID NO: 108425 - RNA, 19 nt, Artificial Sequence
  Description of Artificial Sequence: Synthetic oligonucleotide
ucuaucacuuacaguuaua

SEQ ID NO: 108426 - RNA, 19 nt, Artificial Sequence
  Description of Artificial Sequence: Synthetic oligonucleotide
agauagcacacuugaugga

SEQ ID NO: 108427 - RNA, 19 nt, Artificial Sequence
  Description of Artificial Sequence: Synthetic oligonucleotide
cuaguugccggugagccuc

SEQ ID NO: 108428 - RNA, 19 nt, Artificial Sequence
  Description of Artificial Sequence: Synthetic oligonucleotide
cacuuaucgcccacaggcc

SEQ ID NO: 108429 - RNA, 19 nt, Artificial Sequence
  Description of Artificial Sequence: Synthetic oligonucleotide
uugcuacaugucauaggca

SEQ ID NO: 108430 - RNA, 19 nt, Artificial Sequence
  Description of Artificial Sequence: Synthetic oligonucleotide
cauaugucccuucaacuaa

SEQ ID NO: 108431 - RNA, 19 nt, Artificial Sequence
  Description of Artificial Sequence: Synthetic oligonucleotide
uuacuaggcuaguguauaa

SEQ ID NO: 108432 - RNA, 19 nt, Artificial Sequence
  Description of Artificial Sequence: Synthetic oligonucleotide
cucacuuaucgcccacagg

SEQ ID NO: 108433 - RNA, 19 nt, Artificial Sequence
  Description of Artificial Sequence: Synthetic oligonucleotide
cuaggcuaguguauaacaa

SEQ ID NO: 108434 - RNA, 19 nt, Artificial Sequence
  Description of Artificial Sequence: Synthetic oligonucleotide
gucgagcacagauuggaca

SEQ ID NO: 108435 - RNA, 19 nt, Artificial Sequence
  Description of Artificial Sequence: Synthetic oligonucleotide
cuacgaugagaccccacac

SEQ ID NO: 108436 - RNA, 19 nt, Artificial Sequence
  Description of Artificial Sequence: Synthetic oligonucleotide
cuaauuggcagaguaaacu

SEQ ID NO: 108437 - RNA, 19 nt, Artificial Sequence
  Description of Artificial Sequence: Synthetic oligonucleotide
uaauuauuacuaggcuagu

SEQ ID NO: 108438 - RNA, 19 nt, Artificial Sequence
  Description of Artificial Sequence: Synthetic oligonucleotide
cauuagagcccgugugcag

SEQ ID NO: 108439 - RNA, 19 nt, Artificial Sequence
  Description of Artificial Sequence: Synthetic oligonucleotide
ugcgauugauuuguguaaa

SEQ ID NO: 108440 - RNA, 19 nt, Artificial Sequence
  Description of Artificial Sequence: Synthetic oligonucleotide
guaugacuccucucagcag

SEQ ID NO: 108441 - RNA, 19 nt, Artificial Sequence
  Description of Artificial Sequence: Synthetic oligonucleotide
uacuaggcuaguguauaac

SEQ ID NO: 108442 - RNA, 19 nt, Artificial Sequence
  Description of Artificial Sequence: Synthetic oligonucleotide
ggccccuggaucuuuaagc

SEQ ID NO: 108443 - RNA, 19 nt, Artificial Sequence
  Description of Artificial Sequence: Synthetic oligonucleotide
agcuuuaccacagcauccu

SEQ ID NO: 108444 - RNA, 19 nt, Artificial Sequence
  Description of Artificial Sequence: Synthetic oligonucleotide
caguugcagacucaaucac

SEQ ID NO: 108445 - RNA, 19 nt, Artificial Sequence
  Description of Artificial Sequence: Synthetic oligonucleotide
ucgaaccuaugugaucuug

SEQ ID NO: 108446 - RNA, 19 nt, Artificial Sequence
  Description of Artificial Sequence: Synthetic oligonucleotide
ugcuuuaauuaagaaucua

SEQ ID NO: 108447 - RNA, 19 nt, Artificial Sequence
  Description of Artificial Sequence: Synthetic oligonucleotide
gagugguaagaacucccca

SEQ ID NO: 108448 - RNA, 19 nt, Artificial Sequence
  Description of Artificial Sequence: Synthetic oligonucleotide
cagcaucgaaccuauguga

SEQ ID NO: 108449 - RNA, 19 nt, Artificial Sequence
  Description of Artificial Sequence: Synthetic oligonucleotide
gacgucuuugugugaugug

SEQ ID NO: 108450 - RNA, 19 nt, Artificial Sequence
  Description of Artificial Sequence: Synthetic oligonucleotide
gucggugagagcuuuugaa

SEQ ID NO: 108451 - RNA, 19 nt, Artificial Sequence
  Description of Artificial Sequence: Synthetic oligonucleotide
auguuaccauuuaagcuca

SEQ ID NO: 108452 - RNA, 19 nt, Artificial Sequence
  Description of Artificial Sequence: Synthetic oligonucleotide
accuguaaaccuggaguag

SEQ ID NO: 108453 - RNA, 19 nt, Artificial Sequence
  Description of Artificial Sequence: Synthetic oligonucleotide
gguaguaguagguacucua

SEQ ID NO: 108454 - RNA, 19 nt, Artificial Sequence
  Description of Artificial Sequence: Synthetic oligonucleotide
aggcuaguguauaacaaaa

SEQ ID NO: 108455 - RNA, 19 nt, Artificial Sequence
  Description of Artificial Sequence: Synthetic oligonucleotide
acuaaagaauaagcaccca

SEQ ID NO: 108456 - RNA, 19 nt, Artificial Sequence
  Description of Artificial Sequence: Synthetic oligonucleotide
caugugguucaaugaugug

SEQ ID NO: 108457 - RNA, 19 nt, Artificial Sequence
  Description of Artificial Sequence: Synthetic oligonucleotide
uugguuccuugggauggcg

SEQ ID NO: 108458 - RNA, 19 nt, Artificial Sequence
  Description of Artificial Sequence: Synthetic oligonucleotide
acaucuugccacguagaga

SEQ ID NO: 108459 - RNA, 19 nt, Artificial Sequence
  Description of Artificial Sequence: Synthetic oligonucleotide
auacucaccuuuaaugaua

SEQ ID NO: 108460 - RNA, 19 nt, Artificial Sequence
  Description of Artificial Sequence: Synthetic oligonucleotide
ugucucacuuaucgcccac

SEQ ID NO: 108461 - RNA, 19 nt, Artificial Sequence
  Description of Artificial Sequence: Synthetic oligonucleotide
gcuuucauagaucgcucug

SEQ ID NO: 108462 - RNA, 19 nt, Artificial Sequence
  Description of Artificial Sequence: Synthetic oligonucleotide
cuguaaaccuggaguagga

SEQ ID NO: 108463 - RNA, 19 nt, Artificial Sequence
  Description of Artificial Sequence: Synthetic oligonucleotide
caucgaaccuaugugaucu

SEQ ID NO: 108464 - RNA, 19 nt, Artificial Sequence
  Description of Artificial Sequence: Synthetic oligonucleotide
guacucuaucauccacaag

SEQ ID NO: 108465 - RNA, 19 nt, Artificial Sequence
  Description of Artificial Sequence: Synthetic oligonucleotide
gagacgucuuugugugaug

SEQ ID NO: 108466 - RNA, 19 nt, Artificial Sequence
  Description of Artificial Sequence: Synthetic oligonucleotide
gagggucacuugaaacucc

SEQ ID NO: 108467 - RNA, 19 nt, Artificial Sequence
  Description of Artificial Sequence: Synthetic oligonucleotide
gugagagcuuuugaaauaa

SEQ ID NO: 108468 - RNA, 19 nt, Artificial Sequence
  Description of Artificial Sequence: Synthetic oligonucleotide
augucuuaaugcgauugau

SEQ ID NO: 108469 - RNA, 19 nt, Artificial Sequence
  Description of Artificial Sequence: Synthetic oligonucleotide
ucgguguacccugccaaug

SEQ ID NO: 108470 - RNA, 19 nt, Artificial Sequence
  Description of Artificial Sequence: Synthetic oligonucleotide
uccucagaggagcguaaua

SEQ ID NO: 108471 - RNA, 19 nt, Artificial Sequence
  Description of Artificial Sequence: Synthetic oligonucleotide
gcuacgaugagaccccaca

SEQ ID NO: 108472 - RNA, 19 nt, Artificial Sequence
  Description of Artificial Sequence: Synthetic oligonucleotide
gucuuugugugaugugguc

SEQ ID NO: 108473 - RNA, 19 nt, Artificial Sequence
  Description of Artificial Sequence: Synthetic oligonucleotide
caccuguaaaccuggagua

SEQ ID NO: 108474 - RNA, 19 nt, Artificial Sequence
  Description of Artificial Sequence: Synthetic oligonucleotide
cucgguuucuugguaaaca

SEQ ID NO: 108475 - RNA, 19 nt, Artificial Sequence
  Description of Artificial Sequence: Synthetic oligonucleotide
uccucgguuucuugguaaa

SEQ ID NO: 108476 - RNA, 19 nt, Artificial Sequence
  Description of Artificial Sequence: Synthetic oligonucleotide
ccuaauuggcagaguaaac

SEQ ID NO: 108477 - RNA, 19 nt, Artificial Sequence
  Description of Artificial Sequence: Synthetic oligonucleotide
guacccugccaauggcuug

SEQ ID NO: 108478 - RNA, 19 nt, Artificial Sequence
  Description of Artificial Sequence: Synthetic oligonucleotide
gugcuuuggccccuggauc

SEQ ID NO: 108479 - RNA, 19 nt, Artificial Sequence
  Description of Artificial Sequence: Synthetic oligonucleotide
ggauggcgcacucuuaguc

SEQ ID NO: 108480 - RNA, 19 nt, Artificial Sequence
  Description of Artificial Sequence: Synthetic oligonucleotide
agcaucgaaccuaugugau

SEQ ID NO: 108481 - RNA, 19 nt, Artificial Sequence
  Description of Artificial Sequence: Synthetic oligonucleotide
agagauccauugaaacacu

SEQ ID NO: 108482 - RNA, 19 nt, Artificial Sequence
  Description of Artificial Sequence: Synthetic oligonucleotide
gcuaggauacaacaagcua

SEQ ID NO: 108483 - RNA, 19 nt, Artificial Sequence
  Description of Artificial Sequence: Synthetic oligonucleotide
agucgcucuguagccauug

SEQ ID NO: 108484 - RNA, 19 nt, Artificial Sequence
  Description of Artificial Sequence: Synthetic oligonucleotide
gcauaugucccuucaacua

SEQ ID NO: 108485 - RNA, 19 nt, Artificial Sequence
  Description of Artificial Sequence: Synthetic oligonucleotide
gcugccgaggcauacucac

SEQ ID NO: 108486 - RNA, 19 nt, Artificial Sequence
  Description of Artificial Sequence: Synthetic oligonucleotide
gguguacccugccaauggc

SEQ ID NO: 108487 - RNA, 19 nt, Artificial Sequence
  Description of Artificial Sequence: Synthetic oligonucleotide
ugaauccguuuugaguuuu

SEQ ID NO: 108488 - RNA, 19 nt, Artificial Sequence
  Description of Artificial Sequence: Synthetic oligonucleotide
cugccgaggcauacucacc

SEQ ID NO: 108489 - RNA, 19 nt, Artificial Sequence
  Description of Artificial Sequence: Synthetic oligonucleotide
cgaaccuaugugaucuugc

SEQ ID NO: 108490 - RNA, 19 nt, Artificial Sequence
  Description of Artificial Sequence: Synthetic oligonucleotide
gguaagaacuccccacgaa

SEQ ID NO: 108491 - RNA, 19 nt, Artificial Sequence
  Description of Artificial Sequence: Synthetic oligonucleotide
ggcuaauuauuacuaggcu

SEQ ID NO: 108492 - RNA, 19 nt, Artificial Sequence
  Description of Artificial Sequence: Synthetic oligonucleotide
aggugggagguauccccug

SEQ ID NO: 108493 - RNA, 19 nt, Artificial Sequence
  Description of Artificial Sequence: Synthetic oligonucleotide
cugcugccgaggcauacuc

SEQ ID NO: 108494 - RNA, 19 nt, Artificial Sequence
  Description of Artificial Sequence: Synthetic oligonucleotide
uccccugccuuaucaguua

SEQ ID NO: 108495 - RNA, 19 nt, Artificial Sequence
  Description of Artificial Sequence: Synthetic oligonucleotide
gaucgcucugucucacuua

SEQ ID NO: 108496 - RNA, 19 nt, Artificial Sequence
  Description of Artificial Sequence: Synthetic oligonucleotide
cucagaggagcguaauacu

SEQ ID NO: 108497 - RNA, 19 nt, Artificial Sequence
  Description of Artificial Sequence: Synthetic oligonucleotide
uaagccguuuagggcacaa

SEQ ID NO: 108498 - RNA, 19 nt, Artificial Sequence
  Description of Artificial Sequence: Synthetic oligonucleotide
uguuaccauuuaagcucau

SEQ ID NO: 108499 - RNA, 19 nt, Artificial Sequence
  Description of Artificial Sequence: Synthetic oligonucleotide
gaauccguuuugaguuuuc

SEQ ID NO: 108500 - RNA, 19 nt, Artificial Sequence
  Description of Artificial Sequence: Synthetic oligonucleotide
acaucacgggauggagguc

SEQ ID NO: 108501 - RNA, 19 nt, Artificial Sequence
  Description of Artificial Sequence: Synthetic oligonucleotide
aguuccuaauuggcagagu

SEQ ID NO: 108502 - RNA, 19 nt, Artificial Sequence
  Description of Artificial Sequence: Synthetic oligonucleotide
cugccuuaucaguuauaga

SEQ ID NO: 108503 - RNA, 19 nt, Artificial Sequence
  Description of Artificial Sequence: Synthetic oligonucleotide
cauucgcucuucuuauugu

SEQ ID NO: 108504 - RNA, 19 nt, Artificial Sequence
  Description of Artificial Sequence: Synthetic oligonucleotide
guauccccugguguuuggc

SEQ ID NO: 108505 - RNA, 19 nt, Artificial Sequence
  Description of Artificial Sequence: Synthetic oligonucleotide
gggacuaguccaguacagc

SEQ ID NO: 108506 - RNA, 19 nt, Artificial Sequence
  Description of Artificial Sequence: Synthetic oligonucleotide
agcuacgaugagaccccac

SEQ ID NO: 108507 - RNA, 19 nt, Artificial Sequence
  Description of Artificial Sequence: Synthetic oligonucleotide
ccaauggcuaauuauuacu

SEQ ID NO: 108508 - RNA, 19 nt, Artificial Sequence
  Description of Artificial Sequence: Synthetic oligonucleotide
uagagcccgugugcagggg

SEQ ID NO: 108509 - RNA, 19 nt, Artificial Sequence
  Description of Artificial Sequence: Synthetic oligonucleotide
ggccccggguaguaguagg

SEQ ID NO: 108510 - RNA, 19 nt, Artificial Sequence
  Description of Artificial Sequence: Synthetic oligonucleotide
cuuugaagugaauccguuu

SEQ ID NO: 108511 - RNA, 19 nt, Artificial Sequence
  Description of Artificial Sequence: Synthetic oligonucleotide
cugucucacuuaucgccca

SEQ ID NO: 108512 - RNA, 19 nt, Artificial Sequence
  Description of Artificial Sequence: Synthetic oligonucleotide
uggcgcacucuuagucgcu

SEQ ID NO: 108513 - RNA, 19 nt, Artificial Sequence
  Description of Artificial Sequence: Synthetic oligonucleotide
guaguaguagguacucuau

SEQ ID NO: 108514 - RNA, 19 nt, Artificial Sequence
  Description of Artificial Sequence: Synthetic oligonucleotide
gccaauggcuugaagcuca

SEQ ID NO: 108515 - RNA, 19 nt, Artificial Sequence
  Description of Artificial Sequence: Synthetic oligonucleotide
cuaucaggucauacaaaau

SEQ ID NO: 108516 - RNA, 19 nt, Artificial Sequence
  Description of Artificial Sequence: Synthetic oligonucleotide
gcaucgaaccuaugugauc

SEQ ID NO: 108517 - RNA, 19 nt, Artificial Sequence
  Description of Artificial Sequence: Synthetic oligonucleotide
aagccguuuagggcacaaa

SEQ ID NO: 108518 - RNA, 19 nt, Artificial Sequence
  Description of Artificial Sequence: Synthetic oligonucleotide
ccguuuagggcacaaacua

SEQ ID NO: 108519 - RNA, 19 nt, Artificial Sequence
  Description of Artificial Sequence: Synthetic oligonucleotide
caucacgggauggaggucu

SEQ ID NO: 108520 - RNA, 19 nt, Artificial Sequence
  Description of Artificial Sequence: Synthetic oligonucleotide
cuaagcaccagagcucacu

SEQ ID NO: 108521 - RNA, 19 nt, Artificial Sequence
  Description of Artificial Sequence: Synthetic oligonucleotide
gcugucgagcacagauugg

SEQ ID NO: 108522 - RNA, 19 nt, Artificial Sequence
  Description of Artificial Sequence: Synthetic oligonucleotide
agccgaagcagaggauaca

SEQ ID NO: 108523 - RNA, 19 nt, Artificial Sequence
  Description of Artificial Sequence: Synthetic oligonucleotide
aggaggacccagggacuag

SEQ ID NO: 108524 - RNA, 19 nt, Artificial Sequence
  Description of Artificial Sequence: Synthetic oligonucleotide
guccaauucgguguacccu

SEQ ID NO: 108525 - RNA, 19 nt, Artificial Sequence
  Description of Artificial Sequence: Synthetic oligonucleotide
cgguguacccugccaaugg

SEQ ID NO: 108526 - RNA, 19 nt, Artificial Sequence
  Description of Artificial Sequence: Synthetic oligonucleotide
gaggagcguaauacuucuc

SEQ ID NO: 108527 - RNA, 19 nt, Artificial Sequence
  Description of Artificial Sequence: Synthetic oligonucleotide
gacuaguccaguacagcuu

SEQ ID NO: 108528 - RNA, 19 nt, Artificial Sequence
  Description of Artificial Sequence: Synthetic oligonucleotide
augccucgaagagauccau

SEQ ID NO: 108529 - RNA, 19 nt, Artificial Sequence
  Description of Artificial Sequence: Synthetic oligonucleotide
accucaugcuggcggugau

SEQ ID NO: 108530 - RNA, 19 nt, Artificial Sequence
  Description of Artificial Sequence: Synthetic oligonucleotide
uggauacuaucaggucaua

SEQ ID NO: 108531 - RNA, 19 nt, Artificial Sequence
  Description of Artificial Sequence: Synthetic oligonucleotide
gggagguauccccuggugu

SEQ ID NO: 108532 - RNA, 19 nt, Artificial Sequence
  Description of Artificial Sequence: Synthetic oligonucleotide
cuaauacaucuugccacgu

SEQ ID NO: 108533 - RNA, 19 nt, Artificial Sequence
  Description of Artificial Sequence: Synthetic oligonucleotide
gcuaagccguuuagggcac

SEQ ID NO: 108534 - RNA, 19 nt, Artificial Sequence
  Description of Artificial Sequence: Synthetic oligonucleotide
ccauuagagcccgugugca

SEQ ID NO: 108535 - RNA, 19 nt, Artificial Sequence
  Description of Artificial Sequence: Synthetic oligonucleotide
caccucaugcuggcgguga

SEQ ID NO: 108536 - RNA, 19 nt, Artificial Sequence
  Description of Artificial Sequence: Synthetic oligonucleotide
cgcucuguagccauugcaa

SEQ ID NO: 108537 - RNA, 19 nt, Artificial Sequence
  Description of Artificial Sequence: Synthetic oligonucleotide
ggagacgucuuugugugau

SEQ ID NO: 108538 - RNA, 19 nt, Artificial Sequence
  Description of Artificial Sequence: Synthetic oligonucleotide
acgagugcuuuggccccug

SEQ ID NO: 108539 - RNA, 19 nt, Artificial Sequence
  Description of Artificial Sequence: Synthetic oligonucleotide
ccuaugugaucuugcaaau

SEQ ID NO: 108540 - RNA, 19 nt, Artificial Sequence
  Description of Artificial Sequence: Synthetic oligonucleotide
ggaaugucuuaaugcgauu

SEQ ID NO: 108541 - RNA, 19 nt, Artificial Sequence
  Description of Artificial Sequence: Synthetic oligonucleotide
guucagcgggagucuggcu

SEQ ID NO: 108542 - RNA, 19 nt, Artificial Sequence
  Description of Artificial Sequence: Synthetic oligonucleotide
cuaagccguuuagggcaca

SEQ ID NO: 108543 - RNA, 19 nt, Artificial Sequence
  Description of Artificial Sequence: Synthetic oligonucleotide
cagcugucgagcacagauu

SEQ ID NO: 108544 - RNA, 19 nt, Artificial Sequence
  Description of Artificial Sequence: Synthetic oligonucleotide
ccggguaguaguagguacu

SEQ ID NO: 108545 - RNA, 19 nt, Artificial Sequence
  Description of Artificial Sequence: Synthetic oligonucleotide
cggguaguaguagguacuc

SEQ ID NO: 108546 - RNA, 19 nt, Artificial Sequence
  Description of Artificial Sequence: Synthetic oligonucleotide
ggguaguaguagguacucu

SEQ ID NO: 108547 - RNA, 19 nt, Artificial Sequence
  Description of Artificial Sequence: Synthetic oligonucleotide
cuggaucuuuaagcuguau

SEQ ID NO: 108548 - RNA, 19 nt, Artificial Sequence
  Description of Artificial Sequence: Synthetic oligonucleotide
cgaugauaguuaauccauu

SEQ ID NO: 108549 - RNA, 19 nt, Artificial Sequence
  Description of Artificial Sequence: Synthetic oligonucleotide
cuuuggccccuggaucuuu

SEQ ID NO: 108550 - RNA, 19 nt, Artificial Sequence
  Description of Artificial Sequence: Synthetic oligonucleotide
ggcuucgaugauaguuaau

SEQ ID NO: 108551 - RNA, 19 nt, Artificial Sequence
  Description of Artificial Sequence: Synthetic oligonucleotide
gccccggguaguaguaggu

SEQ ID NO: 108552 - RNA, 19 nt, Artificial Sequence
  Description of Artificial Sequence: Synthetic oligonucleotide
ccccugccuuaucaguuau

SEQ ID NO: 108553 - RNA, 19 nt, Artificial Sequence
  Description of Artificial Sequence: Synthetic oligonucleotide
uuauuaaucaguaaguugc

SEQ ID NO: 108554 - RNA, 19 nt, Artificial Sequence
  Description of Artificial Sequence: Synthetic oligonucleotide
aauuaugaugauuaguuga

SEQ ID NO: 108555 - RNA, 19 nt, Artificial Sequence
  Description of Artificial Sequence: Synthetic oligonucleotide
uguguuaccaguuauuucc

SEQ ID NO: 108556 - RNA, 19 nt, Artificial Sequence
  Description of Artificial Sequence: Synthetic oligonucleotide
uuaauuaugaugauuaguu

SEQ ID NO: 108557 - RNA, 19 nt, Artificial Sequence
  Description of Artificial Sequence: Synthetic oligonucleotide
uauaucagacacaagcccg

SEQ ID NO: 108558 - RNA, 19 nt, Artificial Sequence
  Description of Artificial Sequence: Synthetic oligonucleotide
agugcuaaguaacaauucc

SEQ ID NO: 108559 - RNA, 19 nt, Artificial Sequence
  Description of Artificial Sequence: Synthetic oligonucleotide
aguaugugauccuagaauc

SEQ ID NO: 108560 - RNA, 19 nt, Artificial Sequence
  Description of Artificial Sequence: Synthetic oligonucleotide
uuuagugcgaaucacccag

SEQ ID NO: 108561 - RNA, 19 nt, Artificial Sequence
  Description of Artificial Sequence: Synthetic oligonucleotide
ucuugcaugagcucaaagg

SEQ ID NO: 108562 - RNA, 19 nt, Artificial Sequence
  Description of Artificial Sequence: Synthetic oligonucleotide
ugauuacuuauaaugauga

SEQ ID NO: 108563 - RNA, 19 nt, Artificial Sequence
  Description of Artificial Sequence: Synthetic oligonucleotide
aaggauuugagggacacgg

SEQ ID NO: 108564 - RNA, 19 nt, Artificial Sequence
  Description of Artificial Sequence: Synthetic oligonucleotide
cuaacgauaaugaauugag

SEQ ID NO: 108565 - RNA, 19 nt, Artificial Sequence
  Description of Artificial Sequence: Synthetic oligonucleotide
uaaugaguaguaaaucucc

SEQ ID NO: 108566 - RNA, 19 nt, Artificial Sequence
  Description of Artificial Sequence: Synthetic oligonucleotide
aguauuaagcucuccuacc

SEQ ID NO: 108567 - RNA, 19 nt, Artificial Sequence
  Description of Artificial Sequence: Synthetic oligonucleotide
ugaguacuuacuuugcagg

SEQ ID NO: 108568 - RNA, 19 nt, Artificial Sequence
  Description of Artificial Sequence: Synthetic oligonucleotide
gaggcaaagaccuuagucc

SEQ ID NO: 108569 - RNA, 19 nt, Artificial Sequence
  Description of Artificial Sequence: Synthetic oligonucleotide
uguuacuuaugcauuaacu

SEQ ID NO: 108570 - RNA, 19 nt, Artificial Sequence
  Description of Artificial Sequence: Synthetic oligonucleotide
guucccuuaagucugaccc

SEQ ID NO: 108571 - RNA, 19 nt, Artificial Sequence
  Description of Artificial Sequence: Synthetic oligonucleotide
ucuaggagccccaugagca

SEQ ID NO: 108572 - RNA, 19 nt, Artificial Sequence
  Description of Artificial Sequence: Synthetic oligonucleotide
auuaguauuaagcucuccu

SEQ ID NO: 108573 - RNA, 19 nt, Artificial Sequence
  Description of Artificial Sequence: Synthetic oligonucleotide
auuuuagugcgaaucaccc

SEQ ID NO: 108574 - RNA, 19 nt, Artificial Sequence
  Description of Artificial Sequence: Synthetic oligonucleotide
agcuacuaaucucaauugc

SEQ ID NO: 108575 - RNA, 19 nt, Artificial Sequence
  Description of Artificial Sequence: Synthetic oligonucleotide
aacguucuggguucugagc

SEQ ID NO: 108576 - RNA, 19 nt, Artificial Sequence
  Description of Artificial Sequence: Synthetic oligonucleotide
agaccuuagucccaaugcc

SEQ ID NO: 108577 - RNA, 19 nt, Artificial Sequence
  Description of Artificial Sequence: Synthetic oligonucleotide
auccuuacugauuuuaaug

SEQ ID NO: 108578 - RNA, 19 nt, Artificial Sequence
  Description of Artificial Sequence: Synthetic oligonucleotide
cauagaucaacaaaaggca

SEQ ID NO: 108579 - RNA, 19 nt, Artificial Sequence
  Description of Artificial Sequence: Synthetic oligonucleotide
ugaggaaucuagaugcuga

SEQ ID NO: 108580 - RNA, 19 nt, Artificial Sequence
  Description of Artificial Sequence: Synthetic oligonucleotide
ugcauuaacuauuaauuau

SEQ ID NO: 108581 - RNA, 19 nt, Artificial Sequence
  Description of Artificial Sequence: Synthetic oligonucleotide
uuugauuacuuauaaugau

SEQ ID NO: 108582 - RNA, 19 nt, Artificial Sequence
  Description of Artificial Sequence: Synthetic oligonucleotide
uaauuaugaugauuaguug

SEQ ID NO: 108583 - RNA, 19 nt, Artificial Sequence
  Description of Artificial Sequence: Synthetic oligonucleotide
gaguauacccuacauuugc

SEQ ID NO: 108584 - RNA, 19 nt, Artificial Sequence
  Description of Artificial Sequence: Synthetic oligonucleotide
aaugaauugaguacuuacu

SEQ ID NO: 108585 - RNA, 19 nt, Artificial Sequence
  Description of Artificial Sequence: Synthetic oligonucleotide
ugucugaaguaugugaucc

SEQ ID NO: 108586 - RNA, 19 nt, Artificial Sequence
  Description of Artificial Sequence: Synthetic oligonucleotide
uuacugauuuuaaugucca

SEQ ID NO: 108587 - RNA, 19 nt, Artificial Sequence
  Description of Artificial Sequence: Synthetic oligonucleotide
cuaaugaguaguaaaucuc

SEQ ID NO: 108588 - RNA, 19 nt, Artificial Sequence
  Description of Artificial Sequence: Synthetic oligonucleotide
aucuaaacguucuggguuc

SEQ ID NO: 108589 - RNA, 19 nt, Artificial Sequence
  Description of Artificial Sequence: Synthetic oligonucleotide
auuaugaugauuaguugag

SEQ ID NO: 108590 - RNA, 19 nt, Artificial Sequence
  Description of Artificial Sequence: Synthetic oligonucleotide
acuuauaaugaugaugucu

SEQ ID NO: 108591 - RNA, 19 nt, Artificial Sequence
  Description of Artificial Sequence: Synthetic oligonucleotide
gguaaggcgagucugcucg

SEQ ID NO: 108592 - RNA, 19 nt, Artificial Sequence
  Description of Artificial Sequence: Synthetic oligonucleotide
auuaauuaugaugauuagu

SEQ ID NO: 108593 - RNA, 19 nt, Artificial Sequence
  Description of Artificial Sequence: Synthetic oligonucleotide
uugaccaguuauuaaucag

SEQ ID NO: 108594 - RNA, 19 nt, Artificial Sequence
  Description of Artificial Sequence: Synthetic oligonucleotide
uccucgucuguaaaagggg

SEQ ID NO: 108595 - RNA, 19 nt, Artificial Sequence
  Description of Artificial Sequence: Synthetic oligonucleotide
guauuaagcucuccuaccc

SEQ ID NO: 108596 - RNA, 19 nt, Artificial Sequence
  Description of Artificial Sequence: Synthetic oligonucleotide
gauccagucgaugaguacc

SEQ ID NO: 108597 - RNA, 19 nt, Artificial Sequence
  Description of Artificial Sequence: Synthetic oligonucleotide
uugccuaacgauaaugaau

SEQ ID NO: 108598 - RNA, 19 nt, Artificial Sequence
  Description of Artificial Sequence: Synthetic oligonucleotide
uuaguauuaagcucuccua

SEQ ID NO: 108599 - RNA, 19 nt, Artificial Sequence
  Description of Artificial Sequence: Synthetic oligonucleotide
ugcuaaguaacaauuccua

SEQ ID NO: 108600 - RNA, 19 nt, Artificial Sequence
  Description of Artificial Sequence: Synthetic oligonucleotide
ugugcagggguacaaagua

SEQ ID NO: 108601 - RNA, 19 nt, Artificial Sequence
  Description of Artificial Sequence: Synthetic oligonucleotide
acacuauuaauugaguuaa

SEQ ID NO: 108602 - RNA, 19 nt, Artificial Sequence
  Description of Artificial Sequence: Synthetic oligonucleotide
agcaugcacacacuuuagg

SEQ ID NO: 108603 - RNA, 19 nt, Artificial Sequence
  Description of Artificial Sequence: Synthetic oligonucleotide
aguaaugcucacacaggcc

SEQ ID NO: 108604 - RNA, 19 nt, Artificial Sequence
  Description of Artificial Sequence: Synthetic oligonucleotide
aguauacccuacauuugcc

SEQ ID NO: 108605 - RNA, 19 nt, Artificial Sequence
  Description of Artificial Sequence: Synthetic oligonucleotide
aaguagcccucuaggagcc

SEQ ID NO: 108606 - RNA, 19 nt, Artificial Sequence
  Description of Artificial Sequence: Synthetic oligonucleotide
acacacacuauuaauugag

SEQ ID NO: 108607 - RNA, 19 nt, Artificial Sequence
  Description of Artificial Sequence: Synthetic oligonucleotide
auuaguugagaugggaaga

SEQ ID NO: 108608 - RNA, 19 nt, Artificial Sequence
  Description of Artificial Sequence: Synthetic oligonucleotide
uaacgauaaugaauugagu

SEQ ID NO: 108609 - RNA, 19 nt, Artificial Sequence
  Description of Artificial Sequence: Synthetic oligonucleotide
uuugccuaacgauaaugaa

SEQ ID NO: 108610 - RNA, 19 nt, Artificial Sequence
  Description of Artificial Sequence: Synthetic oligonucleotide
agaucuaaacguucugggu

SEQ ID NO: 108611 - RNA, 19 nt, Artificial Sequence
  Description of Artificial Sequence: Synthetic oligonucleotide
cuugggaucacugcgugag

SEQ ID NO: 108612 - RNA, 19 nt, Artificial Sequence
  Description of Artificial Sequence: Synthetic oligonucleotide
auauagggcacauccauua

SEQ ID NO: 108613 - RNA, 19 nt, Artificial Sequence
  Description of Artificial Sequence: Synthetic oligonucleotide
ugggcacucuauuaauucc

SEQ ID NO: 108614 - RNA, 19 nt, Artificial Sequence
  Description of Artificial Sequence: Synthetic oligonucleotide
auagaucaacaaaaggcag

SEQ ID NO: 108615 - RNA, 19 nt, Artificial Sequence
  Description of Artificial Sequence: Synthetic oligonucleotide
aaugaguaguaaaucucca

SEQ ID NO: 108616 - RNA, 19 nt, Artificial Sequence
  Description of Artificial Sequence: Synthetic oligonucleotide
cucacccugacuguggugg

SEQ ID NO: 108617 - RNA, 19 nt, Artificial Sequence
  Description of Artificial Sequence: Synthetic oligonucleotide
uuuuagugcgaaucaccca

SEQ ID NO: 108618 - RNA, 19 nt, Artificial Sequence
  Description of Artificial Sequence: Synthetic oligonucleotide
aucucaauugaagagcaca

SEQ ID NO: 108619 - RNA, 19 nt, Artificial Sequence
  Description of Artificial Sequence: Synthetic oligonucleotide
augaguaccuucaucagcu

SEQ ID NO: 108620 - RNA, 19 nt, Artificial Sequence
  Description of Artificial Sequence: Synthetic oligonucleotide
aacagcgugucaaaggcgu

SEQ ID NO: 108621 - RNA, 19 nt, Artificial Sequence
  Description of Artificial Sequence: Synthetic oligonucleotide
ucaagggucucccauugau

SEQ ID NO: 108622 - RNA, 19 nt, Artificial Sequence
  Description of Artificial Sequence: Synthetic oligonucleotide
agucccaaugcccaguuau

SEQ ID NO: 108623 - RNA, 19 nt, Artificial Sequence
  Description of Artificial Sequence: Synthetic oligonucleotide
uagggcacauccauuacau

SEQ ID NO: 108624 - RNA, 19 nt, Artificial Sequence
  Description of Artificial Sequence: Synthetic oligonucleotide
caugcuaaugaguaguaaa

SEQ ID NO: 108625 - RNA, 19 nt, Artificial Sequence
  Description of Artificial Sequence: Synthetic oligonucleotide
cacugcgugaguuuggauc

SEQ ID NO: 108626 - RNA, 19 nt, Artificial Sequence
  Description of Artificial Sequence: Synthetic oligonucleotide
ugugcgaguauacccuaca

SEQ ID NO: 108627 - RNA, 19 nt, Artificial Sequence
  Description of Artificial Sequence: Synthetic oligonucleotide
ugucgagacuggaggaucc

SEQ ID NO: 108628 - RNA, 19 nt, Artificial Sequence
  Description of Artificial Sequence: Synthetic oligonucleotide
auuugucgagacuggagga

SEQ ID NO: 108629 - RNA, 19 nt, Artificial Sequence
  Description of Artificial Sequence: Synthetic oligonucleotide
gugauccuagaaucuaaag

SEQ ID NO: 108630 - RNA, 19 nt, Artificial Sequence
  Description of Artificial Sequence: Synthetic oligonucleotide
gaugacaggguuauauauc

SEQ ID NO: 108631 - RNA, 19 nt, Artificial Sequence
  Description of Artificial Sequence: Synthetic oligonucleotide
uccgaguuuccccaaguaa

SEQ ID NO: 108632 - RNA, 19 nt, Artificial Sequence
  Description of Artificial Sequence: Synthetic oligonucleotide
uauacccuacauuugccua

SEQ ID NO: 108633 - RNA, 19 nt, Artificial Sequence
  Description of Artificial Sequence: Synthetic oligonucleotide
uuuaccacguugagcuugu

SEQ ID NO: 108634 - RNA, 19 nt, Artificial Sequence
  Description of Artificial Sequence: Synthetic oligonucleotide
auaucagacacaagcccgg

SEQ ID NO: 108635 - RNA, 19 nt, Artificial Sequence
  Description of Artificial Sequence: Synthetic oligonucleotide
auuugccuaacgauaauga

SEQ ID NO: 108636 - RNA, 19 nt, Artificial Sequence
  Description of Artificial Sequence: Synthetic oligonucleotide
gcuaaguaacaauuccuag

SEQ ID NO: 108637 - RNA, 19 nt, Artificial Sequence
  Description of Artificial Sequence: Synthetic oligonucleotide
aggccaaacagcuacuaau

SEQ ID NO: 108638 - RNA, 19 nt, Artificial Sequence
  Description of Artificial Sequence: Synthetic oligonucleotide
aaaccaugcucaugucuga

SEQ ID NO: 108639 - RNA, 19 nt, Artificial Sequence
  Description of Artificial Sequence: Synthetic oligonucleotide
agucugcucgagcaugcac

SEQ ID NO: 108640 - RNA, 19 nt, Artificial Sequence
  Description of Artificial Sequence: Synthetic oligonucleotide
cagcuacuaaucucaauug

SEQ ID NO: 108641 - RNA, 19 nt, Artificial Sequence
  Description of Artificial Sequence: Synthetic oligonucleotide
auuggguacacugucugcu

SEQ ID NO: 108642 - RNA, 19 nt, Artificial Sequence
  Description of Artificial Sequence: Synthetic oligonucleotide
agucugacccucccucuac

SEQ ID NO: 108643 - RNA, 19 nt, Artificial Sequence
  Description of Artificial Sequence: Synthetic oligonucleotide
uuaugaugauuaguugaga

SEQ ID NO: 108644 - RNA, 19 nt, Artificial Sequence
  Description of Artificial Sequence: Synthetic oligonucleotide
ugcuaaugaguaguaaauc

SEQ ID NO: 108645 - RNA, 19 nt, Artificial Sequence
  Description of Artificial Sequence: Synthetic oligonucleotide
ugagaucagagugucuugu

SEQ ID NO: 108646 - RNA, 19 nt, Artificial Sequence
  Description of Artificial Sequence: Synthetic oligonucleotide
uguucccuuaagucugacc

SEQ ID NO: 108647 - RNA, 19 nt, Artificial Sequence
  Description of Artificial Sequence: Synthetic oligonucleotide
ucuuggauuugucgagacu

SEQ ID NO: 108648 - RNA, 19 nt, Artificial Sequence
  Description of Artificial Sequence: Synthetic oligonucleotide
cauuugccuaacgauaaug

SEQ ID NO: 108649 - RNA, 19 nt, Artificial Sequence
  Description of Artificial Sequence: Synthetic oligonucleotide
uuagugcgaaucacccagc

SEQ ID NO: 108650 - RNA, 19 nt, Artificial Sequence
  Description of Artificial Sequence: Synthetic oligonucleotide
agaucucaauugaagagca

SEQ ID NO: 108651 - RNA, 19 nt, Artificial Sequence
  Description of Artificial Sequence: Synthetic oligonucleotide
gaucuaaacguucuggguu

SEQ ID NO: 108652 - RNA, 19 nt, Artificial Sequence
  Description of Artificial Sequence: Synthetic oligonucleotide
uauguaaccugcagcccuc

SEQ ID NO: 108653 - RNA, 19 nt, Artificial Sequence
  Description of Artificial Sequence: Synthetic oligonucleotide
gcuacuaaucucaauugcc

SEQ ID NO: 108654 - RNA, 19 nt, Artificial Sequence
  Description of Artificial Sequence: Synthetic oligonucleotide
guucaagggucucccauug

SEQ ID NO: 108655 - RNA, 19 nt, Artificial Sequence
  Description of Artificial Sequence: Synthetic oligonucleotide
augcacacacuuuaggaua

SEQ ID NO: 108656 - RNA, 19 nt, Artificial Sequence
  Description of Artificial Sequence: Synthetic oligonucleotide
caauuuuagugcgaaucac

SEQ ID NO: 108657 - RNA, 19 nt, Artificial Sequence
  Description of Artificial Sequence: Synthetic oligonucleotide
cucgucuguaaaaggggag

SEQ ID NO: 108658 - RNA, 19 nt, Artificial Sequence
  Description of Artificial Sequence: Synthetic oligonucleotide
aacagcuacuaaucucaau

SEQ ID NO: 108659 - RNA, 19 nt, Artificial Sequence
  Description of Artificial Sequence: Synthetic oligonucleotide
gugcgaaucacccagcucu

SEQ ID NO: 108660 - RNA, 19 nt, Artificial Sequence
  Description of Artificial Sequence: Synthetic oligonucleotide
ucgucuguaaaaggggaga

SEQ ID NO: 108661 - RNA, 19 nt, Artificial Sequence
  Description of Artificial Sequence: Synthetic oligonucleotide
agacuuagccagaaugcuc

SEQ ID NO: 108662 - RNA, 19 nt, Artificial Sequence
  Description of Artificial Sequence: Synthetic oligonucleotide
gaacucggacacuuccuug

SEQ ID NO: 108663 - RNA, 19 nt, Artificial Sequence
  Description of Artificial Sequence: Synthetic oligonucleotide
guagaccccaucugcaaac

SEQ ID NO: 108664 - RNA, 19 nt, Artificial Sequence
  Description of Artificial Sequence: Synthetic oligonucleotide
agaccgauggggaaaagga

SEQ ID NO: 108665 - RNA, 19 nt, Artificial Sequence
  Description of Artificial Sequence: Synthetic oligonucleotide
ugcgaguauacccuacauu

SEQ ID NO: 108666 - RNA, 19 nt, Artificial Sequence
  Description of Artificial Sequence: Synthetic oligonucleotide
aaacaagaucucaauugaa

SEQ ID NO: 108667 - RNA, 19 nt, Artificial Sequence
  Description of Artificial Sequence: Synthetic oligonucleotide
uggggucccagauuaaaua

SEQ ID NO: 108668 - RNA, 19 nt, Artificial Sequence
  Description of Artificial Sequence: Synthetic oligonucleotide
cagugcuaaguaacaauuc

SEQ ID NO: 108669 - RNA, 19 nt, Artificial Sequence
  Description of Artificial Sequence: Synthetic oligonucleotide
gcaauuuuagugcgaauca

SEQ ID NO: 108670 - RNA, 19 nt, Artificial Sequence
  Description of Artificial Sequence: Synthetic oligonucleotide
uacuuacuuugcaggaaaa

SEQ ID NO: 108671 - RNA, 19 nt, Artificial Sequence
  Description of Artificial Sequence: Synthetic oligonucleotide
gcuaaugaguaguaaaucu

SEQ ID NO: 108672 - RNA, 19 nt, Artificial Sequence
  Description of Artificial Sequence: Synthetic oligonucleotide
ugaauggcguucauuccuu

SEQ ID NO: 108673 - RNA, 19 nt, Artificial Sequence
  Description of Artificial Sequence: Synthetic oligonucleotide
augcuaaugaguaguaaau

SEQ ID NO: 108674 - RNA, 19 nt, Artificial Sequence
  Description of Artificial Sequence: Synthetic oligonucleotide
cagucgaugaguaccuuca

SEQ ID NO: 108675 - RNA, 19 nt, Artificial Sequence
  Description of Artificial Sequence: Synthetic oligonucleotide
gguaaccucugccacguug

SEQ ID NO: 108676 - RNA, 19 nt, Artificial Sequence
  Description of Artificial Sequence: Synthetic oligonucleotide
uuguccgcaccucauucuc

SEQ ID NO: 108677 - RNA, 19 nt, Artificial Sequence
  Description of Artificial Sequence: Synthetic oligonucleotide
ugcgaaucacccagcucug

SEQ ID NO: 108678 - RNA, 19 nt, Artificial Sequence
  Description of Artificial Sequence: Synthetic oligonucleotide
aaguaacgagucauccucu

SEQ ID NO: 108679 - RNA, 19 nt, Artificial Sequence
  Description of Artificial Sequence: Synthetic oligonucleotide
gaccacaaccacuuggaua

SEQ ID NO: 108680 - RNA, 19 nt, Artificial Sequence
  Description of Artificial Sequence: Synthetic oligonucleotide
cacuaucucuggguggucg

SEQ ID NO: 108681 - RNA, 19 nt, Artificial Sequence
  Description of Artificial Sequence: Synthetic oligonucleotide
uacugauuuuaauguccac

SEQ ID NO: 108682 - RNA, 19 nt, Artificial Sequence
  Description of Artificial Sequence: Synthetic oligonucleotide
uucccuuaagucugacccu

SEQ ID NO: 108683 - RNA, 19 nt, Artificial Sequence
  Description of Artificial Sequence: Synthetic oligonucleotide
ggguuuaggcuuuucuagc

SEQ ID NO: 108684 - RNA, 19 nt, Artificial Sequence
  Description of Artificial Sequence: Synthetic oligonucleotide
aaugggcacucuauuaauu

SEQ ID NO: 108685 - RNA, 19 nt, Artificial Sequence
  Description of Artificial Sequence: Synthetic oligonucleotide
ccgaguuuccccaaguaac

SEQ ID NO: 108686 - RNA, 19 nt, Artificial Sequence
  Description of Artificial Sequence: Synthetic oligonucleotide
uucuuucucccaccagcac

SEQ ID NO: 108687 - RNA, 19 nt, Artificial Sequence
  Description of Artificial Sequence: Synthetic oligonucleotide
accgauggggaaaaggaga

SEQ ID NO: 108688 - RNA, 19 nt, Artificial Sequence
  Description of Artificial Sequence: Synthetic oligonucleotide
aggcgagucugcucgagca

SEQ ID NO: 108689 - RNA, 19 nt, Artificial Sequence
  Description of Artificial Sequence: Synthetic oligonucleotide
gccaguaauugcauguggg

SEQ ID NO: 108690 - RNA, 19 nt, Artificial Sequence
  Description of Artificial Sequence: Synthetic oligonucleotide
ugauccagucgaugaguac

SEQ ID NO: 108691 - RNA, 19 nt, Artificial Sequence
  Description of Artificial Sequence: Synthetic oligonucleotide
gagaucagagugucuuguc

SEQ ID NO: 108692 - RNA, 19 nt, Artificial Sequence
  Description of Artificial Sequence: Synthetic oligonucleotide
uggguaaccucugccacgu

SEQ ID NO: 108693 - RNA, 19 nt, Artificial Sequence
  Description of Artificial Sequence: Synthetic oligonucleotide
cauuaguauuaagcucucc

SEQ ID NO: 108694 - RNA, 19 nt, Artificial Sequence
  Description of Artificial Sequence: Synthetic oligonucleotide
caguaauugcaugugggca

SEQ ID NO: 108695 - RNA, 19 nt, Artificial Sequence
  Description of Artificial Sequence: Synthetic oligonucleotide
ucggauuggugcccggaaa

SEQ ID NO: 108696 - RNA, 19 nt, Artificial Sequence
  Description of Artificial Sequence: Synthetic oligonucleotide
ugguggcaccacuccauag

SEQ ID NO: 108697 - RNA, 19 nt, Artificial Sequence
  Description of Artificial Sequence: Synthetic oligonucleotide
ucccuuaagucugacccuc

SEQ ID NO: 108698 - RNA, 19 nt, Artificial Sequence
  Description of Artificial Sequence: Synthetic oligonucleotide
gaggaucccuucucguuuc

SEQ ID NO: 108699 - RNA, 19 nt, Artificial Sequence
  Description of Artificial Sequence: Synthetic oligonucleotide
gaccaguuauuaaucagua

SEQ ID NO: 108700 - RNA, 19 nt, Artificial Sequence
  Description of Artificial Sequence: Synthetic oligonucleotide
acguugagcuugucuggag

SEQ ID NO: 108701 - RNA, 19 nt, Artificial Sequence
  Description of Artificial Sequence: Synthetic oligonucleotide
uagacagacuggguccuca

SEQ ID NO: 108702 - RNA, 19 nt, Artificial Sequence
  Description of Artificial Sequence: Synthetic oligonucleotide
guauacccuacauuugccu

SEQ ID NO: 108703 - RNA, 19 nt, Artificial Sequence
  Description of Artificial Sequence: Synthetic oligonucleotide
cgaguuuccccaaguaacg

SEQ ID NO: 108704 - RNA, 19 nt, Artificial Sequence
  Description of Artificial Sequence: Synthetic oligonucleotide
ucuaaacguucuggguucu

SEQ ID NO: 108705 - RNA, 19 nt, Artificial Sequence
  Description of Artificial Sequence: Synthetic oligonucleotide
uugucgagacuggaggauc

SEQ ID NO: 108706 - RNA, 19 nt, Artificial Sequence
  Description of Artificial Sequence: Synthetic oligonucleotide
uucucaggcgaugcuccag

SEQ ID NO: 108707 - RNA, 19 nt, Artificial Sequence
  Description of Artificial Sequence: Synthetic oligonucleotide
uuagacgcucacagugcua

SEQ ID NO: 108708 - RNA, 19 nt, Artificial Sequence
  Description of Artificial Sequence: Synthetic oligonucleotide
cucguuucuggaccacaac

SEQ ID NO: 108709 - RNA, 19 nt, Artificial Sequence
  Description of Artificial Sequence: Synthetic oligonucleotide
ugaaggaauuaaggguaau

SEQ ID NO: 108710 - RNA, 19 nt, Artificial Sequence
  Description of Artificial Sequence: Synthetic oligonucleotide
agguagaccccaucugcaa

SEQ ID NO: 108711 - RNA, 19 nt, Artificial Sequence
  Description of Artificial Sequence: Synthetic oligonucleotide
gcgaguauacccuacauuu

SEQ ID NO: 108712 - RNA, 19 nt, Artificial Sequence
  Description of Artificial Sequence: Synthetic oligonucleotide
gaucucaauugaagagcac

SEQ ID NO: 108713 - RNA, 19 nt, Artificial Sequence
  Description of Artificial Sequence: Synthetic oligonucleotide
gcgaccaacagguggagga

SEQ ID NO: 108714 - RNA, 19 nt, Artificial Sequence
  Description of Artificial Sequence: Synthetic oligonucleotide
acccuacauuugccuaacg

SEQ ID NO: 108715 - RNA, 19 nt, Artificial Sequence
  Description of Artificial Sequence: Synthetic oligonucleotide
cuguguuacuuaugcauua

SEQ ID NO: 108716 - RNA, 19 nt, Artificial Sequence
  Description of Artificial Sequence: Synthetic oligonucleotide
gaguuuccccaaguaacga

SEQ ID NO: 108717 - RNA, 19 nt, Artificial Sequence
  Description of Artificial Sequence: Synthetic oligonucleotide
guaauugcaugugggcaga

SEQ ID NO: 108718 - RNA, 19 nt, Artificial Sequence
  Description of Artificial Sequence: Synthetic oligonucleotide
uacccuacauuugccuaac

SEQ ID NO: 108719 - RNA, 19 nt, Artificial Sequence
  Description of Artificial Sequence: Synthetic oligonucleotide
auguaaccugcagcccucg

SEQ ID NO: 108720 - RNA, 19 nt, Artificial Sequence
  Description of Artificial Sequence: Synthetic oligonucleotide
agugaggaaucuagaugcu

SEQ ID NO: 108721 - RNA, 19 nt, Artificial Sequence
  Description of Artificial Sequence: Synthetic oligonucleotide
auccagucgaugaguaccu

SEQ ID NO: 108722 - RNA, 19 nt, Artificial Sequence
  Description of Artificial Sequence: Synthetic oligonucleotide
guccucacuccacguuccg

SEQ ID NO: 108723 - RNA, 19 nt, Artificial Sequence
  Description of Artificial Sequence: Synthetic oligonucleotide
uccuaccccaauucuuguu

SEQ ID NO: 108724 - RNA, 19 nt, Artificial Sequence
  Description of Artificial Sequence: Synthetic oligonucleotide
uggagaccgauggggaaaa

SEQ ID NO: 108725 - RNA, 19 nt, Artificial Sequence
  Description of Artificial Sequence: Synthetic oligonucleotide
ggggucccagauuaaauaa

SEQ ID NO: 108726 - RNA, 19 nt, Artificial Sequence
  Description of Artificial Sequence: Synthetic oligonucleotide
ggccaaacagcuacuaauc

SEQ ID NO: 108727 - RNA, 19 nt, Artificial Sequence
  Description of Artificial Sequence: Synthetic oligonucleotide
uacccaccagccccuuugu

SEQ ID NO: 108728 - RNA, 19 nt, Artificial Sequence
  Description of Artificial Sequence: Synthetic oligonucleotide
agacgcucacagugcuaag

SEQ ID NO: 108729 - RNA, 19 nt, Artificial Sequence
  Description of Artificial Sequence: Synthetic oligonucleotide
agcgaccaacagguggagg

SEQ ID NO: 108730 - RNA, 19 nt, Artificial Sequence
  Description of Artificial Sequence: Synthetic oligonucleotide
gcguucauuccuuacccuc

SEQ ID NO: 108731 - RNA, 19 nt, Artificial Sequence
  Description of Artificial Sequence: Synthetic oligonucleotide
cacaguugaccaguuauua

SEQ ID NO: 108732 - RNA, 19 nt, Artificial Sequence
  Description of Artificial Sequence: Synthetic oligonucleotide
gagucggauuggugcccgg

SEQ ID NO: 108733 - RNA, 19 nt, Artificial Sequence
  Description of Artificial Sequence: Synthetic oligonucleotide
guaugugauccuagaaucu

SEQ ID NO: 108734 - RNA, 19 nt, Artificial Sequence
  Description of Artificial Sequence: Synthetic oligonucleotide
cuuagacgcucacagugcu

SEQ ID NO: 108735 - RNA, 19 nt, Artificial Sequence
  Description of Artificial Sequence: Synthetic oligonucleotide
agugugagaccaacauuaa

SEQ ID NO: 108736 - RNA, 19 nt, Artificial Sequence
  Description of Artificial Sequence: Synthetic oligonucleotide
cucaauugaagagcacaaa

SEQ ID NO: 108737 - RNA, 19 nt, Artificial Sequence
  Description of Artificial Sequence: Synthetic oligonucleotide
gagcgugggcuuauuacaa

SEQ ID NO: 108738 - RNA, 19 nt, Artificial Sequence
  Description of Artificial Sequence: Synthetic oligonucleotide
cacacacuauuaauugagu

SEQ ID NO: 108739 - RNA, 19 nt, Artificial Sequence
  Description of Artificial Sequence: Synthetic oligonucleotide
auaugcagguaaggcgagu

SEQ ID NO: 108740 - RNA, 19 nt, Artificial Sequence
  Description of Artificial Sequence: Synthetic oligonucleotide
auugccugccaggaauuua

SEQ ID NO: 108741 - RNA, 19 nt, Artificial Sequence
  Description of Artificial Sequence: Synthetic oligonucleotide
cuaaacguucuggguucug

SEQ ID NO: 108742 - RNA, 19 nt, Artificial Sequence
  Description of Artificial Sequence: Synthetic oligonucleotide
ggguccucacuccacguuc

SEQ ID NO: 108743 - RNA, 19 nt, Artificial Sequence
  Description of Artificial Sequence: Synthetic oligonucleotide
cacuauuaauugaguuaaa

SEQ ID NO: 108744 - RNA, 19 nt, Artificial Sequence
  Description of Artificial Sequence: Synthetic oligonucleotide
ccuacauuugccuaacgau

SEQ ID NO: 108745 - RNA, 19 nt, Artificial Sequence
  Description of Artificial Sequence: Synthetic oligonucleotide
gacgcucacagugcuaagu

SEQ ID NO: 108746 - RNA, 19 nt, Artificial Sequence
  Description of Artificial Sequence: Synthetic oligonucleotide
gguagaccccaucugcaaa

SEQ ID NO: 108747 - RNA, 19 nt, Artificial Sequence
  Description of Artificial Sequence: Synthetic oligonucleotide
gaauggcguucauuccuua

SEQ ID NO: 108748 - RNA, 19 nt, Artificial Sequence
  Description of Artificial Sequence: Synthetic oligonucleotide
cgaguauacccuacauuug

SEQ ID NO: 108749 - RNA, 19 nt, Artificial Sequence
  Description of Artificial Sequence: Synthetic oligonucleotide
gagcgaccaacagguggag

SEQ ID NO: 108750 - RNA, 19 nt, Artificial Sequence
  Description of Artificial Sequence: Synthetic oligonucleotide
gggcacucuauuaauucca

SEQ ID NO: 108751 - RNA, 19 nt, Artificial Sequence
  Description of Artificial Sequence: Synthetic oligonucleotide
ccagucgaugaguaccuuc

SEQ ID NO: 108752 - RNA, 19 nt, Artificial Sequence
  Description of Artificial Sequence: Synthetic oligonucleotide
agucggauuggugcccgga

SEQ ID NO: 108753 - RNA, 19 nt, Artificial Sequence
  Description of Artificial Sequence: Synthetic oligonucleotide
cccuacauuugccuaacga

SEQ ID NO: 108754 - RNA, 19 nt, Artificial Sequence
  Description of Artificial Sequence: Synthetic oligonucleotide
gucggauuggugcccggaa

SEQ ID NO: 108755 - RNA, 19 nt, Artificial Sequence
  Description of Artificial Sequence: Synthetic oligonucleotide
cagguuugcuccaggagau

SEQ ID NO: 108756 - RNA, 19 nt, Artificial Sequence
  Description of Artificial Sequence: Synthetic oligonucleotide
guggagaccgauggggaaa

SEQ ID NO: 108757 - RNA, 19 nt, Artificial Sequence
  Description of Artificial Sequence: Synthetic oligonucleotide
caaaucuuugagccucagu

SEQ ID NO: 108758 - RNA, 19 nt, Artificial Sequence
  Description of Artificial Sequence: Synthetic oligonucleotide
guaaggcgagucugcucga

SEQ ID NO: 108759 - RNA, 19 nt, Artificial Sequence
  Description of Artificial Sequence: Synthetic oligonucleotide
ggguuauauaucagacaca

SEQ ID NO: 108760 - RNA, 19 nt, Artificial Sequence
  Description of Artificial Sequence: Synthetic oligonucleotide
gguacaaaguagcccucua

SEQ ID NO: 108761 - RNA, 19 nt, Artificial Sequence
  Description of Artificial Sequence: Synthetic oligonucleotide
gcgagucugcucgagcaug

SEQ ID NO: 108762 - RNA, 19 nt, Artificial Sequence
  Description of Artificial Sequence: Synthetic oligonucleotide
acagagcgaccaacaggug

SEQ ID NO: 108763 - RNA, 19 nt, Artificial Sequence
  Description of Artificial Sequence: Synthetic oligonucleotide
ggcgaugcuccaguggguc

SEQ ID NO: 108764 - RNA, 19 nt, Artificial Sequence
  Description of Artificial Sequence: Synthetic oligonucleotide
cuggccgggguuuaggcuu

SEQ ID NO: 108765 - RNA, 19 nt, Artificial Sequence
  Description of Artificial Sequence: Synthetic oligonucleotide
cugcgaaaugggcacucua

SEQ ID NO: 108766 - RNA, 19 nt, Artificial Sequence
  Description of Artificial Sequence: Synthetic oligonucleotide
aaccggagcgugggcuuau

SEQ ID NO: 108767 - RNA, 19 nt, Artificial Sequence
  Description of Artificial Sequence: Synthetic oligonucleotide
cucacuccacguuccggua

SEQ ID NO: 108768 - RNA, 19 nt, Artificial Sequence
  Description of Artificial Sequence: Synthetic oligonucleotide
cuggaggaucccuucucgu

SEQ ID NO: 108769 - RNA, 19 nt, Artificial Sequence
  Description of Artificial Sequence: Synthetic oligonucleotide
gugcgaguauacccuacau

SEQ ID NO: 108770 - RNA, 19 nt, Artificial Sequence
  Description of Artificial Sequence: Synthetic oligonucleotide
ggaggaucccuucucguuu

SEQ ID NO: 108771 - RNA, 19 nt, Artificial Sequence
  Description of Artificial Sequence: Synthetic oligonucleotide
cacucaagugaggaaucua

SEQ ID NO: 108772 - RNA, 19 nt, Artificial Sequence
  Description of Artificial Sequence: Synthetic oligonucleotide
ccaaguaacgagucauccu

SEQ ID NO: 108773 - RNA, 19 nt, Artificial Sequence
  Description of Artificial Sequence: Synthetic oligonucleotide
ccccaaguaacgagucauc

SEQ ID NO: 108774 - RNA, 19 nt, Artificial Sequence
  Description of Artificial Sequence: Synthetic oligonucleotide
uugaugcuccuggguggaa

SEQ ID NO: 108775 - RNA, 19 nt, Artificial Sequence
  Description of Artificial Sequence: Synthetic oligonucleotide
ggaacucggacacuuccuu

SEQ ID NO: 108776 - RNA, 19 nt, Artificial Sequence
  Description of Artificial Sequence: Synthetic oligonucleotide
cagacacaagcccgggacu

SEQ ID NO: 108777 - RNA, 19 nt, Artificial Sequence
  Description of Artificial Sequence: Synthetic oligonucleotide
ucccuccgaguuuccccaa

SEQ ID NO: 108778 - RNA, 19 nt, Artificial Sequence
  Description of Artificial Sequence: Synthetic oligonucleotide
cucgagcaugcacacacuu

SEQ ID NO: 108779 - RNA, 19 nt, Artificial Sequence
  Description of Artificial Sequence: Synthetic oligonucleotide
gcuugggaucacugcguga

SEQ ID NO: 108780 - RNA, 19 nt, Artificial Sequence
  Description of Artificial Sequence: Synthetic oligonucleotide
ccaugagaugacaggguua

SEQ ID NO: 108781 - RNA, 19 nt, Artificial Sequence
  Description of Artificial Sequence: Synthetic oligonucleotide
cuccuaccccaauucuugu

SEQ ID NO: 108782 - RNA, 19 nt, Artificial Sequence
  Description of Artificial Sequence: Synthetic oligonucleotide
aggcugcgaaaugggcacu

SEQ ID NO: 108783 - RNA, 19 nt, Artificial Sequence
  Description of Artificial Sequence: Synthetic oligonucleotide
ggggagaaugaccuccuuu

SEQ ID NO: 108784 - RNA, 19 nt, Artificial Sequence
  Description of Artificial Sequence: Synthetic oligonucleotide
aggcgaugcuccagugggu

SEQ ID NO: 108785 - RNA, 19 nt, Artificial Sequence
  Description of Artificial Sequence: Synthetic oligonucleotide
gaugcuccagugggucugu

SEQ ID NO: 108786 - RNA, 19 nt, Artificial Sequence
  Description of Artificial Sequence: Synthetic oligonucleotide
gaggugcacagcagaucua

SEQ ID NO: 108787 - RNA, 19 nt, Artificial Sequence
  Description of Artificial Sequence: Synthetic oligonucleotide
gcgugggcuuauuacaaau

SEQ ID NO: 108788 - RNA, 19 nt, Artificial Sequence
  Description of Artificial Sequence: Synthetic oligonucleotide
ccggaaauacugagacaga

SEQ ID NO: 108789 - RNA, 19 nt, Artificial Sequence
  Description of Artificial Sequence: Synthetic oligonucleotide
ggcugcgaaaugggcacuc

SEQ ID NO: 108790 - RNA, 19 nt, Artificial Sequence
  Description of Artificial Sequence: Synthetic oligonucleotide
ggagaccgauggggaaaag

SEQ ID NO: 108791 - RNA, 19 nt, Artificial Sequence
  Description of Artificial Sequence: Synthetic oligonucleotide
cccuacuucucaggcgaug

SEQ ID NO: 108792 - RNA, 19 nt, Artificial Sequence
  Description of Artificial Sequence: Synthetic oligonucleotide
gcccucgagucacucaagu

SEQ ID NO: 108793 - RNA, 19 nt, Artificial Sequence
  Description of Artificial Sequence: Synthetic oligonucleotide
agcccucuaggagccccau

SEQ ID NO: 108794 - RNA, 19 nt, Artificial Sequence
  Description of Artificial Sequence: Synthetic oligonucleotide
ggcgucacguucaugucuu

SEQ ID NO: 108795 - RNA, 19 nt, Artificial Sequence
  Description of Artificial Sequence: Synthetic oligonucleotide
gcgucccuccgaguuuccc

SEQ ID NO: 108796 - RNA, 19 nt, Artificial Sequence
  Description of Artificial Sequence: Synthetic oligonucleotide
caaccggagcgugggcuua

SEQ ID NO: 108797 - RNA, 19 nt, Artificial Sequence
  Description of Artificial Sequence: Synthetic oligonucleotide
gcgucacguucaugucuuc

SEQ ID NO: 108798 - RNA, 19 nt, Artificial Sequence
  Description of Artificial Sequence: Synthetic oligonucleotide
gguggucgcugggcuuaug

SEQ ID NO: 108799 - RNA, 19 nt, Artificial Sequence
  Description of Artificial Sequence: Synthetic oligonucleotide
gcccuagggugagaucaga

SEQ ID NO: 108800 - RNA, 19 nt, Artificial Sequence
  Description of Artificial Sequence: Synthetic oligonucleotide
cucuacccaccagccccuu

SEQ ID NO: 108801 - RNA, 19 nt, Artificial Sequence
  Description of Artificial Sequence: Synthetic oligonucleotide
gcccuacuucucaggcgau

SEQ ID NO: 108802 - RNA, 19 nt, Artificial Sequence
  Description of Artificial Sequence: Synthetic oligonucleotide
auauguagcauucagggcc

SEQ ID NO: 108803 - RNA, 19 nt, Artificial Sequence
  Description of Artificial Sequence: Synthetic oligonucleotide
uuagauugaaacaagcgag

SEQ ID NO: 108804 - RNA, 19 nt, Artificial Sequence
  Description of Artificial Sequence: Synthetic oligonucleotide
aaucugauauacuuagagg

SEQ ID NO: 108805 - RNA, 19 nt, Artificial Sequence
  Description of Artificial Sequence: Synthetic oligonucleotide
acaaguguguagcacaucc

SEQ ID NO: 108806 - RNA, 19 nt, Artificial Sequence
  Description of Artificial Sequence: Synthetic oligonucleotide
aaguguguagcacaucccc

SEQ ID NO: 108807 - RNA, 19 nt, Artificial Sequence
  Description of Artificial Sequence: Synthetic oligonucleotide
acuaauugccugcacaacc

SEQ ID NO: 108808 - RNA, 19 nt, Artificial Sequence
  Description of Artificial Sequence: Synthetic oligonucleotide
aaacauuugcuugaucugc

SEQ ID NO: 108809 - RNA, 19 nt, Artificial Sequence
  Description of Artificial Sequence: Synthetic oligonucleotide
ucugaauauggucagacac

SEQ ID NO: 108810 - RNA, 19 nt, Artificial Sequence
  Description of Artificial Sequence: Synthetic oligonucleotide
auaaauaaccauuucgugu

SEQ ID NO: 108811 - RNA, 19 nt, Artificial Sequence
  Description of Artificial Sequence: Synthetic oligonucleotide
aauucgaaucagcauacag

SEQ ID NO: 108812 - RNA, 19 nt, Artificial Sequence
  Description of Artificial Sequence: Synthetic oligonucleotide
aagaacuuauccuacagaa

SEQ ID NO: 108813 - RNA, 19 nt, Artificial Sequence
  Description of Artificial Sequence: Synthetic oligonucleotide
aauggauuccggcuucccc

SEQ ID NO: 108814 - RNA, 19 nt, Artificial Sequence
  Description of Artificial Sequence: Synthetic oligonucleotide
uauuuaacaucuuggagac

SEQ ID NO: 108815 - RNA, 19 nt, Artificial Sequence
  Description of Artificial Sequence: Synthetic oligonucleotide
ugauauugucacuugacgc

SEQ ID NO: 108816 - RNA, 19 nt, Artificial Sequence
  Description of Artificial Sequence: Synthetic oligonucleotide
aauguaguaauggccaggg

SEQ ID NO: 108817 - RNA, 19 nt, Artificial Sequence
  Description of Artificial Sequence: Synthetic oligonucleotide
agcacuaccagacuccucg

SEQ ID NO: 108818 - RNA, 19 nt, Artificial Sequence
  Description of Artificial Sequence: Synthetic oligonucleotide
uggcuuagaagucacaagc

SEQ ID NO: 108819 - RNA, 19 nt, Artificial Sequence
  Description of Artificial Sequence: Synthetic oligonucleotide
ucauuagauugaaacaagc

SEQ ID NO: 108820 - RNA, 19 nt, Artificial Sequence
  Description of Artificial Sequence: Synthetic oligonucleotide
uguuugaucauuagauuga

SEQ ID NO: 108821 - RNA, 19 nt, Artificial Sequence
  Description of Artificial Sequence: Synthetic oligonucleotide
cuucauaggagucggacgg

SEQ ID NO: 108822 - RNA, 19 nt, Artificial Sequence
  Description of Artificial Sequence: Synthetic oligonucleotide
gauauugucacuugacgca

SEQ ID NO: 108823 - RNA, 19 nt, Artificial Sequence
  Description of Artificial Sequence: Synthetic oligonucleotide
ugauuugagaccacauuug

SEQ ID NO: 108824 - RNA, 19 nt, Artificial Sequence
  Description of Artificial Sequence: Synthetic oligonucleotide
aaaaccacgaauaggguga

SEQ ID NO: 108825 - RNA, 19 nt, Artificial Sequence
  Description of Artificial Sequence: Synthetic oligonucleotide
uuuaguaccuucugaauau

SEQ ID NO: 108826 - RNA, 19 nt, Artificial Sequence
  Description of Artificial Sequence: Synthetic oligonucleotide
agaguggacugucaugacc

SEQ ID NO: 108827 - RNA, 19 nt, Artificial Sequence
  Description of Artificial Sequence: Synthetic oligonucleotide
auaggagucggacgguucc

SEQ ID NO: 108828 - RNA, 19 nt, Artificial Sequence
  Description of Artificial Sequence: Synthetic oligonucleotide
ugaauauggucagacacag

SEQ ID NO: 108829 - RNA, 19 nt, Artificial Sequence
  Description of Artificial Sequence: Synthetic oligonucleotide
uugaguaaguacagaaucu

SEQ ID NO: 108830 - RNA, 19 nt, Artificial Sequence
  Description of Artificial Sequence: Synthetic oligonucleotide
augguaagguagcacauuc

SEQ ID NO: 108831 - RNA, 19 nt, Artificial Sequence
  Description of Artificial Sequence: Synthetic oligonucleotide
ucuuccuaaggugauacag

SEQ ID NO: 108832 - RNA, 19 nt, Artificial Sequence
  Description of Artificial Sequence: Synthetic oligonucleotide
uuauuucgcaagcagcucu

SEQ ID NO: 108833 - RNA, 19 nt, Artificial Sequence
  Description of Artificial Sequence: Synthetic oligonucleotide
cuuagaagucacaagcgug

SEQ ID NO: 108834 - RNA, 19 nt, Artificial Sequence
  Description of Artificial Sequence: Synthetic oligonucleotide
uguucgaaaggaaagucau

SEQ ID NO: 108835 - RNA, 19 nt, Artificial Sequence
  Description of Artificial Sequence: Synthetic oligonucleotide
gaaacaagcgagucauugc

SEQ ID NO: 108836 - RNA, 19 nt, Artificial Sequence
  Description of Artificial Sequence: Synthetic oligonucleotide
gaauagggugagcauagcc

SEQ ID NO: 108837 - RNA, 19 nt, Artificial Sequence
  Description of Artificial Sequence: Synthetic oligonucleotide
uuccuaaggugauacagca

SEQ ID NO: 108838 - RNA, 19 nt, Artificial Sequence
  Description of Artificial Sequence: Synthetic oligonucleotide
cuuucaguaagcgacuagc

SEQ ID NO: 108839 - RNA, 19 nt, Artificial Sequence
  Description of Artificial Sequence: Synthetic oligonucleotide
aguacuucauaggagucgg

SEQ ID NO: 108840 - RNA, 19 nt, Artificial Sequence
  Description of Artificial Sequence: Synthetic oligonucleotide
auucuuccuaaggugauac

SEQ ID NO: 108841 - RNA, 19 nt, Artificial Sequence
  Description of Artificial Sequence: Synthetic oligonucleotide
uauccaucguuuaaccaca

SEQ ID NO: 108842 - RNA, 19 nt, Artificial Sequence
  Description of Artificial Sequence: Synthetic oligonucleotide
uuuauccaucguuuaacca

SEQ ID NO: 108843 - RNA, 19 nt, Artificial Sequence
  Description of Artificial Sequence: Synthetic oligonucleotide
cuuaguagccagaacggug

SEQ ID NO: 108844 - RNA, 19 nt, Artificial Sequence
  Description of Artificial Sequence: Synthetic oligonucleotide
uagauugaaacaagcgagu

SEQ ID NO: 108845 - RNA, 19 nt, Artificial Sequence
  Description of Artificial Sequence: Synthetic oligonucleotide
uuucaguaagcgacuagca

SEQ ID NO: 108846 - RNA, 19 nt, Artificial Sequence
  Description of Artificial Sequence: Synthetic oligonucleotide
ugauacaucgcacgaagua

SEQ ID NO: 108847 - RNA, 19 nt, Artificial Sequence
  Description of Artificial Sequence: Synthetic oligonucleotide
gaauaugcgugccuccugc

SEQ ID NO: 108848 - RNA, 19 nt, Artificial Sequence
  Description of Artificial Sequence: Synthetic oligonucleotide
uauacuuagaggggacagg

SEQ ID NO: 108849 - RNA, 19 nt, Artificial Sequence
  Description of Artificial Sequence: Synthetic oligonucleotide
uccaggacuacucuauuaa

SEQ ID NO: 108850 - RNA, 19 nt, Artificial Sequence
  Description of Artificial Sequence: Synthetic oligonucleotide
cauuucguguuuauuucgc

SEQ ID NO: 108851 - RNA, 19 nt, Artificial Sequence
  Description of Artificial Sequence: Synthetic oligonucleotide
uagaagguagcucgguccc

SEQ ID NO: 108852 - RNA, 19 nt, Artificial Sequence
  Description of Artificial Sequence: Synthetic oligonucleotide
gauacaucgcacgaaguac

SEQ ID NO: 108853 - RNA, 19 nt, Artificial Sequence
  Description of Artificial Sequence: Synthetic oligonucleotide
cgagucauugcaaagaagg

SEQ ID NO: 108854 - RNA, 19 nt, Artificial Sequence
  Description of Artificial Sequence: Synthetic oligonucleotide
guaagcgacuagcaauucg

SEQ ID NO: 108855 - RNA, 19 nt, Artificial Sequence
  Description of Artificial Sequence: Synthetic oligonucleotide
gauugaaacaagcgaguca

SEQ ID NO: 108856 - RNA, 19 nt, Artificial Sequence
  Description of Artificial Sequence: Synthetic oligonucleotide
ugggacguagcacaguacu

SEQ ID NO: 108857 - RNA, 19 nt, Artificial Sequence
  Description of Artificial Sequence: Synthetic oligonucleotide
acaagcgugauuucugacu

SEQ ID NO: 108858 - RNA, 19 nt, Artificial Sequence
  Description of Artificial Sequence: Synthetic oligonucleotide
uuauucucagguacuuugu

SEQ ID NO: 108859 - RNA, 19 nt, Artificial Sequence
  Description of Artificial Sequence: Synthetic oligonucleotide
agauugaaacaagcgaguc

SEQ ID NO: 108860 - RNA, 19 nt, Artificial Sequence
  Description of Artificial Sequence: Synthetic oligonucleotide
gagagcacuaauugccugc

SEQ ID NO: 108861 - RNA, 19 nt, Artificial Sequence
  Description of Artificial Sequence: Synthetic oligonucleotide
ucugugauuaaguucucua

SEQ ID NO: 108862 - RNA, 19 nt, Artificial Sequence
  Description of Artificial Sequence: Synthetic oligonucleotide
guggucaguaaacacgugc

SEQ ID NO: 108863 - RNA, 19 nt, Artificial Sequence
  Description of Artificial Sequence: Synthetic oligonucleotide
aaauggauuccggcuuccc

SEQ ID NO: 108864 - RNA, 19 nt, Artificial Sequence
  Description of Artificial Sequence: Synthetic oligonucleotide
gauuggaagcacuaccaga

SEQ ID NO: 108865 - RNA, 19 nt, Artificial Sequence
  Description of Artificial Sequence: Synthetic oligonucleotide
cugauuguaagggaggcug

SEQ ID NO: 108866 - RNA, 19 nt, Artificial Sequence
  Description of Artificial Sequence: Synthetic oligonucleotide
aagccgaucauucuuccua

SEQ ID NO: 108867 - RNA, 19 nt, Artificial Sequence
  Description of Artificial Sequence: Synthetic oligonucleotide
ucuagggcccucuuugccc

SEQ ID NO: 108868 - RNA, 19 nt, Artificial Sequence
  Description of Artificial Sequence: Synthetic oligonucleotide
gagcaauguaguaauggcc

SEQ ID NO: 108869 - RNA, 19 nt, Artificial Sequence
  Description of Artificial Sequence: Synthetic oligonucleotide
ugucaagauaugcaagcau

SEQ ID NO: 108870 - RNA, 19 nt, Artificial Sequence
  Description of Artificial Sequence: Synthetic oligonucleotide
agacucauaaacucaggaa

SEQ ID NO: 108871 - RNA, 19 nt, Artificial Sequence
  Description of Artificial Sequence: Synthetic oligonucleotide
gugcuugauacaucgcacg

SEQ ID NO: 108872 - RNA, 19 nt, Artificial Sequence
  Description of Artificial Sequence: Synthetic oligonucleotide
aaacacgugcuugauacau

SEQ ID NO: 108873 - RNA, 19 nt, Artificial Sequence
  Description of Artificial Sequence: Synthetic oligonucleotide
auucgaaucagcauacagu

SEQ ID NO: 108874 - RNA, 19 nt, Artificial Sequence
  Description of Artificial Sequence: Synthetic oligonucleotide
gaccguugaagauauaugu

SEQ ID NO: 108875 - RNA, 19 nt, Artificial Sequence
  Description of Artificial Sequence: Synthetic oligonucleotide
accguuaccuucuccagca

SEQ ID NO: 108876 - RNA, 19 nt, Artificial Sequence
  Description of Artificial Sequence: Synthetic oligonucleotide
acgugcuugauacaucgca

SEQ ID NO: 108877 - RNA, 19 nt, Artificial Sequence
  Description of Artificial Sequence: Synthetic oligonucleotide
guaccuucugaauaugguc

SEQ ID NO: 108878 - RNA, 19 nt, Artificial Sequence
  Description of Artificial Sequence: Synthetic oligonucleotide
uacagcuaaaggugcuugc

SEQ ID NO: 108879 - RNA, 19 nt, Artificial Sequence
  Description of Artificial Sequence: Synthetic oligonucleotide
uguuuugagcaauguagua

SEQ ID NO: 108880 - RNA, 19 nt, Artificial Sequence
  Description of Artificial Sequence: Synthetic oligonucleotide
aagcgagucauugcaaaga

SEQ ID NO: 108881 - RNA, 19 nt, Artificial Sequence
  Description of Artificial Sequence: Synthetic oligonucleotide
guuugagucugugauuaag

SEQ ID NO: 108882 - RNA, 19 nt, Artificial Sequence
  Description of Artificial Sequence: Synthetic oligonucleotide
ccguugaagauauauguag

SEQ ID NO: 108883 - RNA, 19 nt, Artificial Sequence
  Description of Artificial Sequence: Synthetic oligonucleotide
caaagaguggacugucaug

SEQ ID NO: 108884 - RNA, 19 nt, Artificial Sequence
  Description of Artificial Sequence: Synthetic oligonucleotide
gcgacuagcaauucgaauc

SEQ ID NO: 108885 - RNA, 19 nt, Artificial Sequence
  Description of Artificial Sequence: Synthetic oligonucleotide
auacuuagaggggacagga

SEQ ID NO: 108886 - RNA, 19 nt, Artificial Sequence
  Description of Artificial Sequence: Synthetic oligonucleotide
cugcauaucucaagggcug

SEQ ID NO: 108887 - RNA, 19 nt, Artificial Sequence
  Description of Artificial Sequence: Synthetic oligonucleotide
uacuucauaggagucggac

SEQ ID NO: 108888 - RNA, 19 nt, Artificial Sequence
  Description of Artificial Sequence: Synthetic oligonucleotide
auuucguguuuauuucgca

SEQ ID NO: 108889 - RNA, 19 nt, Artificial Sequence
  Description of Artificial Sequence: Synthetic oligonucleotide
cagcuguagaauagcauac

SEQ ID NO: 108890 - RNA, 19 nt, Artificial Sequence
  Description of Artificial Sequence: Synthetic oligonucleotide
uugauacaucgcacgaagu

SEQ ID NO: 108891 - RNA, 19 nt, Artificial Sequence
  Description of Artificial Sequence: Synthetic oligonucleotide
aauaugcgugccuccugca

SEQ ID NO: 108892 - RNA, 19 nt, Artificial Sequence
  Description of Artificial Sequence: Synthetic oligonucleotide
agaacuuauccuacagaag

SEQ ID NO: 108893 - RNA, 19 nt, Artificial Sequence
  Description of Artificial Sequence: Synthetic oligonucleotide
caagcgagucauugcaaag

SEQ ID NO: 108894 - RNA, 19 nt, Artificial Sequence
  Description of Artificial Sequence: Synthetic oligonucleotide
gaguguuugaucauuagau

SEQ ID NO: 108895 - RNA, 19 nt, Artificial Sequence
  Description of Artificial Sequence: Synthetic oligonucleotide
auagcgagaggaauggacu

SEQ ID NO: 108896 - RNA, 19 nt, Artificial Sequence
  Description of Artificial Sequence: Synthetic oligonucleotide
uauuucgcaagcagcucuc

SEQ ID NO: 108897 - RNA, 19 nt, Artificial Sequence
  Description of Artificial Sequence: Synthetic oligonucleotide
caaguguguagcacauccc

SEQ ID NO: 108898 - RNA, 19 nt, Artificial Sequence
  Description of Artificial Sequence: Synthetic oligonucleotide
agagagcacuaauugccug

SEQ ID NO: 108899 - RNA, 19 nt, Artificial Sequence
  Description of Artificial Sequence: Synthetic oligonucleotide
cauugaauaugcgugccuc

SEQ ID NO: 108900 - RNA, 19 nt, Artificial Sequence
  Description of Artificial Sequence: Synthetic oligonucleotide
auaugcgugccuccugcag

SEQ ID NO: 108901 - RNA, 19 nt, Artificial Sequence
  Description of Artificial Sequence: Synthetic oligonucleotide
acgaauagggugagcauag

SEQ ID NO: 108902 - RNA, 19 nt, Artificial Sequence
  Description of Artificial Sequence: Synthetic oligonucleotide
ugguaagguagcacauucu

SEQ ID NO: 108903 - RNA, 19 nt, Artificial Sequence
  Description of Artificial Sequence: Synthetic oligonucleotide
acuuauccuacagaagcca

SEQ ID NO: 108904 - RNA, 19 nt, Artificial Sequence
  Description of Artificial Sequence: Synthetic oligonucleotide
uccggcaagcgaacaagug

SEQ ID NO: 108905 - RNA, 19 nt, Artificial Sequence
  Description of Artificial Sequence: Synthetic oligonucleotide
ugagaccacauuuggugaa

SEQ ID NO: 108906 - RNA, 19 nt, Artificial Sequence
  Description of Artificial Sequence: Synthetic oligonucleotide
ucauaagccuguccacgcu

SEQ ID NO: 108907 - RNA, 19 nt, Artificial Sequence
  Description of Artificial Sequence: Synthetic oligonucleotide
uucgcaagcagcucucaau

SEQ ID NO: 108908 - RNA, 19 nt, Artificial Sequence
  Description of Artificial Sequence: Synthetic oligonucleotide
aggguagcaaugcuucugu

SEQ ID NO: 108909 - RNA, 19 nt, Artificial Sequence
  Description of Artificial Sequence: Synthetic oligonucleotide
cauguucgaaaggaaaguc

SEQ ID NO: 108910 - RNA, 19 nt, Artificial Sequence
  Description of Artificial Sequence: Synthetic oligonucleotide
aagcauguucgaaaggaaa

SEQ ID NO: 108911 - RNA, 19 nt, Artificial Sequence
  Description of Artificial Sequence: Synthetic oligonucleotide
cuaaggugauacagcacuc

SEQ ID NO: 108912 - RNA, 19 nt, Artificial Sequence
  Description of Artificial Sequence: Synthetic oligonucleotide
ugaucgcaccagcaaguca

SEQ ID NO: 108913 - RNA, 19 nt, Artificial Sequence
  Description of Artificial Sequence: Synthetic oligonucleotide
ugaaggcucuaguguauac

SEQ ID NO: 108914 - RNA, 19 nt, Artificial Sequence
  Description of Artificial Sequence: Synthetic oligonucleotide
agcgagucauugcaaagaa

SEQ ID NO: 108915 - RNA, 19 nt, Artificial Sequence
  Description of Artificial Sequence: Synthetic oligonucleotide
agcaagccgaucauucuuc

SEQ ID NO: 108916 - RNA, 19 nt, Artificial Sequence
  Description of Artificial Sequence: Synthetic oligonucleotide
cagcacucccaaugcaugg

SEQ ID NO: 108917 - RNA, 19 nt, Artificial Sequence
  Description of Artificial Sequence: Synthetic oligonucleotide
auguucgaaaggaaaguca

SEQ ID NO: 108918 - RNA, 19 nt, Artificial Sequence
  Description of Artificial Sequence: Synthetic oligonucleotide
aaaccacgaauagggugag

SEQ ID NO: 108919 - RNA, 19 nt, Artificial Sequence
  Description of Artificial Sequence: Synthetic oligonucleotide
ucccguaccucaucaucag

SEQ ID NO: 108920 - RNA, 19 nt, Artificial Sequence
  Description of Artificial Sequence: Synthetic oligonucleotide
ugagacagcaggcgccaac

SEQ ID NO: 108921 - RNA, 19 nt, Artificial Sequence
  Description of Artificial Sequence: Synthetic oligonucleotide
agguagcucggucccguac

SEQ ID NO: 108922 - RNA, 19 nt, Artificial Sequence
  Description of Artificial Sequence: Synthetic oligonucleotide
uccuaaggugauacagcac

SEQ ID NO: 108923 - RNA, 19 nt, Artificial Sequence
  Description of Artificial Sequence: Synthetic oligonucleotide
auacaucgcacgaaguacu

SEQ ID NO: 108924 - RNA, 19 nt, Artificial Sequence
  Description of Artificial Sequence: Synthetic oligonucleotide
ggcuuagaagucacaagcg

SEQ ID NO: 108925 - RNA, 19 nt, Artificial Sequence
  Description of Artificial Sequence: Synthetic oligonucleotide
cauagauucugguuuucaa

SEQ ID NO: 108926 - RNA, 19 nt, Artificial Sequence
  Description of Artificial Sequence: Synthetic oligonucleotide
agaccguugaagauauaug

SEQ ID NO: 108927 - RNA, 19 nt, Artificial Sequence
  Description of Artificial Sequence: Synthetic oligonucleotide
uacaucgcacgaaguacuc

SEQ ID NO: 108928 - RNA, 19 nt, Artificial Sequence
  Description of Artificial Sequence: Synthetic oligonucleotide
ggauuggaagcacuaccag

SEQ ID NO: 108929 - RNA, 19 nt, Artificial Sequence
  Description of Artificial Sequence: Synthetic oligonucleotide
ucccaaugcaugguacugc

SEQ ID NO: 108930 - RNA, 19 nt, Artificial Sequence
  Description of Artificial Sequence: Synthetic oligonucleotide
guaaguguagaaucuuagu

SEQ ID NO: 108931 - RNA, 19 nt, Artificial Sequence
  Description of Artificial Sequence: Synthetic oligonucleotide
acauagauucugguuuuca

SEQ ID NO: 108932 - RNA, 19 nt, Artificial Sequence
  Description of Artificial Sequence: Synthetic oligonucleotide
ucgaaucagcauacaguau

SEQ ID NO: 108933 - RNA, 19 nt, Artificial Sequence
  Description of Artificial Sequence: Synthetic oligonucleotide
agcgacuagcaauucgaau

SEQ ID NO: 108934 - RNA, 19 nt, Artificial Sequence
  Description of Artificial Sequence: Synthetic oligonucleotide
cauccggcaagcgaacaag

SEQ ID NO: 108935 - RNA, 19 nt, Artificial Sequence
  Description of Artificial Sequence: Synthetic oligonucleotide
caggcgccaacucucuugc

SEQ ID NO: 108936 - RNA, 19 nt, Artificial Sequence
  Description of Artificial Sequence: Synthetic oligonucleotide
auccccggcugauuguaag

SEQ ID NO: 108937 - RNA, 19 nt, Artificial Sequence
  Description of Artificial Sequence: Synthetic oligonucleotide
uacccaucgucaucuggga

SEQ ID NO: 108938 - RNA, 19 nt, Artificial Sequence
  Description of Artificial Sequence: Synthetic oligonucleotide
uucuuccuaaggugauaca

SEQ ID NO: 108939 - RNA, 19 nt, Artificial Sequence
  Description of Artificial Sequence: Synthetic oligonucleotide
ugugcuuucgaggguacuu

SEQ ID NO: 108940 - RNA, 19 nt, Artificial Sequence
  Description of Artificial Sequence: Synthetic oligonucleotide
aacugugauuugagaccac

SEQ ID NO: 108941 - RNA, 19 nt, Artificial Sequence
  Description of Artificial Sequence: Synthetic oligonucleotide
acgguguguucacaguccu

SEQ ID NO: 108942 - RNA, 19 nt, Artificial Sequence
  Description of Artificial Sequence: Synthetic oligonucleotide
cauaggagucggacgguuc

SEQ ID NO: 108943 - RNA, 19 nt, Artificial Sequence
  Description of Artificial Sequence: Synthetic oligonucleotide
agcgaacaaguguguagca

SEQ ID NO: 108944 - RNA, 19 nt, Artificial Sequence
  Description of Artificial Sequence: Synthetic oligonucleotide
auacaagugcugaacugga

SEQ ID NO: 108945 - RNA, 19 nt, Artificial Sequence
  Description of Artificial Sequence: Synthetic oligonucleotide
ucggacgguuccaucugca

SEQ ID NO: 108946 - RNA, 19 nt, Artificial Sequence
  Description of Artificial Sequence: Synthetic oligonucleotide
agccauagcgagaggaaug

SEQ ID NO: 108947 - RNA, 19 nt, Artificial Sequence
  Description of Artificial Sequence: Synthetic oligonucleotide
ggcgccaacucucuugcag

SEQ ID NO: 108948 - RNA, 19 nt, Artificial Sequence
  Description of Artificial Sequence: Synthetic oligonucleotide
ggacgguuccaucugcacc

SEQ ID NO: 108949 - RNA, 19 nt, Artificial Sequence
  Description of Artificial Sequence: Synthetic oligonucleotide
cacaagcgugauuucugac

SEQ ID NO: 108950 - RNA, 19 nt, Artificial Sequence
  Description of Artificial Sequence: Synthetic oligonucleotide
gaucgcaccagcaagucau

SEQ ID NO: 108951 - RNA, 19 nt, Artificial Sequence
  Description of Artificial Sequence: Synthetic oligonucleotide
gccauagcgagaggaaugg

SEQ ID NO: 108952 - RNA, 19 nt, Artificial Sequence
  Description of Artificial Sequence: Synthetic oligonucleotide
uggcucagggccaaacauu

SEQ ID NO: 108953 - RNA, 19 nt, Artificial Sequence
  Description of Artificial Sequence: Synthetic oligonucleotide
ccuugaucgcaccagcaag

SEQ ID NO: 108954 - RNA, 19 nt, Artificial Sequence
  Description of Artificial Sequence: Synthetic oligonucleotide
uagcgagaggaauggacuu

SEQ ID NO: 108955 - RNA, 19 nt, Artificial Sequence
  Description of Artificial Sequence: Synthetic oligonucleotide
aggcucuaguguauacugg

SEQ ID NO: 108956 - RNA, 19 nt, Artificial Sequence
  Description of Artificial Sequence: Synthetic oligonucleotide
guuugaucauuagauugaa

SEQ ID NO: 108957 - RNA, 19 nt, Artificial Sequence
  Description of Artificial Sequence: Synthetic oligonucleotide
agccgaucauucuuccuaa

SEQ ID NO: 108958 - RNA, 19 nt, Artificial Sequence
  Description of Artificial Sequence: Synthetic oligonucleotide
agaagguagcucggucccg

SEQ ID NO: 108959 - RNA, 19 nt, Artificial Sequence
  Description of Artificial Sequence: Synthetic oligonucleotide
agucccggacuguaaacuu

SEQ ID NO: 108960 - RNA, 19 nt, Artificial Sequence
  Description of Artificial Sequence: Synthetic oligonucleotide
uugaucgcaccagcaaguc

SEQ ID NO: 108961 - RNA, 19 nt, Artificial Sequence
  Description of Artificial Sequence: Synthetic oligonucleotide
caggguagcaaugcuucug

SEQ ID NO: 108962 - RNA, 19 nt, Artificial Sequence
  Description of Artificial Sequence: Synthetic oligonucleotide
cuugaucgcaccagcaagu

SEQ ID NO: 108963 - RNA, 19 nt, Artificial Sequence
  Description of Artificial Sequence: Synthetic oligonucleotide
aucauguguaaggaagaua

SEQ ID NO: 108964 - RNA, 19 nt, Artificial Sequence
  Description of Artificial Sequence: Synthetic oligonucleotide
gcaguuaggaaggugaaua

SEQ ID NO: 108965 - RNA, 19 nt, Artificial Sequence
  Description of Artificial Sequence: Synthetic oligonucleotide
ccggcugauuguaagggag

SEQ ID NO: 108966 - RNA, 19 nt, Artificial Sequence
  Description of Artificial Sequence: Synthetic oligonucleotide
auguaguaauggccagggu

SEQ ID NO: 108967 - RNA, 19 nt, Artificial Sequence
  Description of Artificial Sequence: Synthetic oligonucleotide
gggcuucauuuauccaucg

SEQ ID NO: 108968 - RNA, 19 nt, Artificial Sequence
  Description of Artificial Sequence: Synthetic oligonucleotide
cacgugcuugauacaucgc

SEQ ID NO: 108969 - RNA, 19 nt, Artificial Sequence
  Description of Artificial Sequence: Synthetic oligonucleotide
ugcaguuaggaaggugaau

SEQ ID NO: 108970 - RNA, 19 nt, Artificial Sequence
  Description of Artificial Sequence: Synthetic oligonucleotide
uucauaggagucggacggu

SEQ ID NO: 108971 - RNA, 19 nt, Artificial Sequence
  Description of Artificial Sequence: Synthetic oligonucleotide
gucccguaccucaucauca

SEQ ID NO: 108972 - RNA, 19 nt, Artificial Sequence
  Description of Artificial Sequence: Synthetic oligonucleotide
aagcacuaccagacuccuc

SEQ ID NO: 108973 - RNA, 19 nt, Artificial Sequence
  Description of Artificial Sequence: Synthetic oligonucleotide
caauuggccugcuucauau

SEQ ID NO: 108974 - RNA, 19 nt, Artificial Sequence
  Description of Artificial Sequence: Synthetic oligonucleotide
ccuaaggugauacagcacu

SEQ ID NO: 108975 - RNA, 19 nt, Artificial Sequence
  Description of Artificial Sequence: Synthetic oligonucleotide
cauagucccaaagggcuca

SEQ ID NO: 108976 - RNA, 19 nt, Artificial Sequence
  Description of Artificial Sequence: Synthetic oligonucleotide
uccugaguguuugaucauu

SEQ ID NO: 108977 - RNA, 19 nt, Artificial Sequence
  Description of Artificial Sequence: Synthetic oligonucleotide
ccagacucauaaacucagg

SEQ ID NO: 108978 - RNA, 19 nt, Artificial Sequence
  Description of Artificial Sequence: Synthetic oligonucleotide
ggacguagcacaguacuuc

SEQ ID NO: 108979 - RNA, 19 nt, Artificial Sequence
  Description of Artificial Sequence: Synthetic oligonucleotide
caucguuuaaccacaucau

SEQ ID NO: 108980 - RNA, 19 nt, Artificial Sequence
  Description of Artificial Sequence: Synthetic oligonucleotide
cuagggcccucuuugccca

SEQ ID NO: 108981 - RNA, 19 nt, Artificial Sequence
  Description of Artificial Sequence: Synthetic oligonucleotide
aagcgacuagcaauucgaa

SEQ ID NO: 108982 - RNA, 19 nt, Artificial Sequence
  Description of Artificial Sequence: Synthetic oligonucleotide
ucauaggagucggacgguu

SEQ ID NO: 108983 - RNA, 19 nt, Artificial Sequence
  Description of Artificial Sequence: Synthetic oligonucleotide
cugggacguagcacaguac

SEQ ID NO: 108984 - RNA, 19 nt, Artificial Sequence
  Description of Artificial Sequence: Synthetic oligonucleotide
gcaggcgccaacucucuug

SEQ ID NO: 108985 - RNA, 19 nt, Artificial Sequence
  Description of Artificial Sequence: Synthetic oligonucleotide
acaucgcacgaaguacucu

SEQ ID NO: 108986 - RNA, 19 nt, Artificial Sequence
  Description of Artificial Sequence: Synthetic oligonucleotide
cacuaccagacuccucguc

SEQ ID NO: 108987 - RNA, 19 nt, Artificial Sequence
  Description of Artificial Sequence: Synthetic oligonucleotide
cggcaagcgaacaagugug

SEQ ID NO: 108988 - RNA, 19 nt, Artificial Sequence
  Description of Artificial Sequence: Synthetic oligonucleotide
cgugcuugauacaucgcac

SEQ ID NO: 108989 - RNA, 19 nt, Artificial Sequence
  Description of Artificial Sequence: Synthetic oligonucleotide
caagcgugauuucugacuu

SEQ ID NO: 108990 - RNA, 19 nt, Artificial Sequence
  Description of Artificial Sequence: Synthetic oligonucleotide
gaacaaguguguagcacau

SEQ ID NO: 108991 - RNA, 19 nt, Artificial Sequence
  Description of Artificial Sequence: Synthetic oligonucleotide
gaagcacuaccagacuccu

SEQ ID NO: 108992 - RNA, 19 nt, Artificial Sequence
  Description of Artificial Sequence: Synthetic oligonucleotide
caguaagcgacuagcaauu

SEQ ID NO: 108993 - RNA, 19 nt, Artificial Sequence
  Description of Artificial Sequence: Synthetic oligonucleotide
aagguagcucggucccgua

SEQ ID NO: 108994 - RNA, 19 nt, Artificial Sequence
  Description of Artificial Sequence: Synthetic oligonucleotide
cuccaggacuacucuauua

SEQ ID NO: 108995 - RNA, 19 nt, Artificial Sequence
  Description of Artificial Sequence: Synthetic oligonucleotide
cagaccguugaagauauau

SEQ ID NO: 108996 - RNA, 19 nt, Artificial Sequence
  Description of Artificial Sequence: Synthetic oligonucleotide
cugguugaguaaguacaga

SEQ ID NO: 108997 - RNA, 19 nt, Artificial Sequence
  Description of Artificial Sequence: Synthetic oligonucleotide
gcgaacaaguguguagcac

SEQ ID NO: 108998 - RNA, 19 nt, Artificial Sequence
  Description of Artificial Sequence: Synthetic oligonucleotide
gcuaggccggcuucuuuac

SEQ ID NO: 108999 - RNA, 19 nt, Artificial Sequence
  Description of Artificial Sequence: Synthetic oligonucleotide
guagccagaacgguguguu

SEQ ID NO: 109000 - RNA, 19 nt, Artificial Sequence
  Description of Artificial Sequence: Synthetic oligonucleotide
ccgugagcugaacaggcuc

SEQ ID NO: 109001 - RNA, 19 nt, Artificial Sequence
  Description of Artificial Sequence: Synthetic oligonucleotide
cgacuagcaauucgaauca

SEQ ID NO: 109002 - RNA, 19 nt, Artificial Sequence
  Description of Artificial Sequence: Synthetic oligonucleotide
aucucucacauggcugcau

SEQ ID NO: 109003 - RNA, 19 nt, Artificial Sequence
  Description of Artificial Sequence: Synthetic oligonucleotide
ccguaccucaucaucagua

SEQ ID NO: 109004 - RNA, 19 nt, Artificial Sequence
  Description of Artificial Sequence: Synthetic oligonucleotide
cuuuacucucaggguucuc

SEQ ID NO: 109005 - RNA, 19 nt, Artificial Sequence
  Description of Artificial Sequence: Synthetic oligonucleotide
ucagaccguugaagauaua

SEQ ID NO: 109006 - RNA, 19 nt, Artificial Sequence
  Description of Artificial Sequence: Synthetic oligonucleotide
gcauguucgaaaggaaagu

SEQ ID NO: 109007 - RNA, 19 nt, Artificial Sequence
  Description of Artificial Sequence: Synthetic oligonucleotide
ggcuaggccggcuucuuua

SEQ ID NO: 109008 - RNA, 19 nt, Artificial Sequence
  Description of Artificial Sequence: Synthetic oligonucleotide
agggccccagacucauaaa

SEQ ID NO: 109009 - RNA, 19 nt, Artificial Sequence
  Description of Artificial Sequence: Synthetic oligonucleotide
ggaaaggauuggaagcacu

SEQ ID NO: 109010 - RNA, 19 nt, Artificial Sequence
  Description of Artificial Sequence: Synthetic oligonucleotide
auacacugguagacuuuau

SEQ ID NO: 109011 - RNA, 19 nt, Artificial Sequence
  Description of Artificial Sequence: Synthetic oligonucleotide
cauugcaaagaaggcuucu

SEQ ID NO: 109012 - RNA, 19 nt, Artificial Sequence
  Description of Artificial Sequence: Synthetic oligonucleotide
gggucgcagucccggacug

SEQ ID NO: 109013 - RNA, 19 nt, Artificial Sequence
  Description of Artificial Sequence: Synthetic oligonucleotide
caagccgaucauucuuccu

SEQ ID NO: 109014 - RNA, 19 nt, Artificial Sequence
  Description of Artificial Sequence: Synthetic oligonucleotide
ggugggcuaggccggcuuc

SEQ ID NO: 109015 - RNA, 19 nt, Artificial Sequence
  Description of Artificial Sequence: Synthetic oligonucleotide
cagucccggacuguaaacu

SEQ ID NO: 109016 - RNA, 19 nt, Artificial Sequence
  Description of Artificial Sequence: Synthetic oligonucleotide
auccaucguuuaaccacau

SEQ ID NO: 109017 - RNA, 19 nt, Artificial Sequence
  Description of Artificial Sequence: Synthetic oligonucleotide
ggcuucauuuauccaucgu

SEQ ID NO: 109018 - RNA, 19 nt, Artificial Sequence
  Description of Artificial Sequence: Synthetic oligonucleotide
cagcaagccgaucauucuu

SEQ ID NO: 109019 - RNA, 19 nt, Artificial Sequence
  Description of Artificial Sequence: Synthetic oligonucleotide
cauccccggcugauuguaa

SEQ ID NO: 109020 - RNA, 19 nt, Artificial Sequence
  Description of Artificial Sequence: Synthetic oligonucleotide
ccggcaagcgaacaagugu

SEQ ID NO: 109021 - RNA, 19 nt, Artificial Sequence
  Description of Artificial Sequence: Synthetic oligonucleotide
gcgccaacucucuugcagu

SEQ ID NO: 109022 - RNA, 19 nt, Artificial Sequence
  Description of Artificial Sequence: Synthetic oligonucleotide
gcacucccaaugcauggua

SEQ ID NO: 109023 - RNA, 19 nt, Artificial Sequence
  Description of Artificial Sequence: Synthetic oligonucleotide
cacccugguugaguaagua

SEQ ID NO: 109024 - RNA, 19 nt, Artificial Sequence
  Description of Artificial Sequence: Synthetic oligonucleotide
cacauccccggcugauugu

SEQ ID NO: 109025 - RNA, 19 nt, Artificial Sequence
  Description of Artificial Sequence: Synthetic oligonucleotide
cuaggccggcuucuuuacu

SEQ ID NO: 109026 - RNA, 19 nt, Artificial Sequence
  Description of Artificial Sequence: Synthetic oligonucleotide
cggacgguuccaucugcac

SEQ ID NO: 109027 - RNA, 19 nt, Artificial Sequence
  Description of Artificial Sequence: Synthetic oligonucleotide
gcugauuguaagggaggcu

SEQ ID NO: 109028 - RNA, 19 nt, Artificial Sequence
  Description of Artificial Sequence: Synthetic oligonucleotide
gugggcuaggccggcuucu

SEQ ID NO: 109029 - RNA, 19 nt, Artificial Sequence
  Description of Artificial Sequence: Synthetic oligonucleotide
gcacuaccagacuccucgu

SEQ ID NO: 109030 - RNA, 19 nt, Artificial Sequence
  Description of Artificial Sequence: Synthetic oligonucleotide
cgguguguucacaguccuc

SEQ ID NO: 109031 - RNA, 19 nt, Artificial Sequence
  Description of Artificial Sequence: Synthetic oligonucleotide
ccauagcgagaggaaugga

SEQ ID NO: 109032 - RNA, 19 nt, Artificial Sequence
  Description of Artificial Sequence: Synthetic oligonucleotide
gggacguagcacaguacuu

SEQ ID NO: 109033 - RNA, 19 nt, Artificial Sequence
  Description of Artificial Sequence: Synthetic oligonucleotide
ggaguucuagggcccucuu

SEQ ID NO: 109034 - RNA, 19 nt, Artificial Sequence
  Description of Artificial Sequence: Synthetic oligonucleotide
gccccgguacacaucuucu

SEQ ID NO: 109035 - RNA, 19 nt, Artificial Sequence
  Description of Artificial Sequence: Synthetic oligonucleotide
cccguaccucaucaucagu

SEQ ID NO: 109036 - RNA, 19 nt, Artificial Sequence
  Description of Artificial Sequence: Synthetic oligonucleotide
gggcuaggccggcuucuuu

SEQ ID NO: 109037 - RNA, 19 nt, Artificial Sequence
  Description of Artificial Sequence: Synthetic oligonucleotide
ugauuaauuacucuggugg

SEQ ID NO: 109038 - RNA, 19 nt, Artificial Sequence
  Description of Artificial Sequence: Synthetic oligonucleotide
ugaaacauagacaagacac

SEQ ID NO: 109039 - RNA, 19 nt, Artificial Sequence
  Description of Artificial Sequence: Synthetic oligonucleotide
uuuaugauuaauuacucug

SEQ ID NO: 109040 - RNA, 19 nt, Artificial Sequence
  Description of Artificial Sequence: Synthetic oligonucleotide
uuaugauuaauuacucugg

SEQ ID NO: 109041 - RNA, 19 nt, Artificial Sequence
  Description of Artificial Sequence: Synthetic oligonucleotide
aaguguacgguacagcccg

SEQ ID NO: 109042 - RNA, 19 nt, Artificial Sequence
  Description of Artificial Sequence: Synthetic oligonucleotide
uucaacacgacuuuuauau

SEQ ID NO: 109043 - RNA, 19 nt, Artificial Sequence
  Description of Artificial Sequence: Synthetic oligonucleotide
uacuccaacgacaacaucc

SEQ ID NO: 109044 - RNA, 19 nt, Artificial Sequence
  Description of Artificial Sequence: Synthetic oligonucleotide
uuuacuggacucuaacugg

SEQ ID NO: 109045 - RNA, 19 nt, Artificial Sequence
  Description of Artificial Sequence: Synthetic oligonucleotide
uuaaccagcauauuuccag

SEQ ID NO: 109046 - RNA, 19 nt, Artificial Sequence
  Description of Artificial Sequence: Synthetic oligonucleotide
aacgacaacauccccuucg

SEQ ID NO: 109047 - RNA, 19 nt, Artificial Sequence
  Description of Artificial Sequence: Synthetic oligonucleotide
aaucacaagaacucgggcu

SEQ ID NO: 109048 - RNA, 19 nt, Artificial Sequence
  Description of Artificial Sequence: Synthetic oligonucleotide
caaucuucaguuuaguccc

SEQ ID NO: 109049 - RNA, 19 nt, Artificial Sequence
  Description of Artificial Sequence: Synthetic oligonucleotide
agaaguaaguccccuaacg

SEQ ID NO: 109050 - RNA, 19 nt, Artificial Sequence
  Description of Artificial Sequence: Synthetic oligonucleotide
ugaucagugauggagacag

SEQ ID NO: 109051 - RNA, 19 nt, Artificial Sequence
  Description of Artificial Sequence: Synthetic oligonucleotide
aacauugcaaccuggucug

SEQ ID NO: 109052 - RNA, 19 nt, Artificial Sequence
  Description of Artificial Sequence: Synthetic oligonucleotide
caaaacggcaauuaaacuc

SEQ ID NO: 109053 - RNA, 19 nt, Artificial Sequence
  Description of Artificial Sequence: Synthetic oligonucleotide
acagacuaugucuacagag

SEQ ID NO: 109054 - RNA, 19 nt, Artificial Sequence
  Description of Artificial Sequence: Synthetic oligonucleotide
aacaaccacgaacucaauc

SEQ ID NO: 109055 - RNA, 19 nt, Artificial Sequence
  Description of Artificial Sequence: Synthetic oligonucleotide
uuuagucagcauuauacca

SEQ ID NO: 109056 - RNA, 19 nt, Artificial Sequence
  Description of Artificial Sequence: Synthetic oligonucleotide
auaggcaacagugaauggc

SEQ ID NO: 109057 - RNA, 19 nt, Artificial Sequence
  Description of Artificial Sequence: Synthetic oligonucleotide
caaaguguacgguacagcc

SEQ ID NO: 109058 - RNA, 19 nt, Artificial Sequence
  Description of Artificial Sequence: Synthetic oligonucleotide
uuuagucccaacaccaucu

SEQ ID NO: 109059 - RNA, 19 nt, Artificial Sequence
  Description of Artificial Sequence: Synthetic oligonucleotide
ugcaagacagacuaugucu

SEQ ID NO: 109060 - RNA, 19 nt, Artificial Sequence
  Description of Artificial Sequence: Synthetic oligonucleotide
ucaguuuagucccaacacc

SEQ ID NO: 109061 - RNA, 19 nt, Artificial Sequence
  Description of Artificial Sequence: Synthetic oligonucleotide
uucaguuguacugagguca

SEQ ID NO: 109062 - RNA, 19 nt, Artificial Sequence
  Description of Artificial Sequence: Synthetic oligonucleotide
acauagacaagacacuucu

SEQ ID NO: 109063 - RNA, 19 nt, Artificial Sequence
  Description of Artificial Sequence: Synthetic oligonucleotide
uucaguuuagucccaacac

SEQ ID NO: 109064 - RNA, 19 nt, Artificial Sequence
  Description of Artificial Sequence: Synthetic oligonucleotide
cuuugacacguccugaacg

SEQ ID NO: 109065 - RNA, 19 nt, Artificial Sequence
  Description of Artificial Sequence: Synthetic oligonucleotide
uuacuggacucuaacuggg

SEQ ID NO: 109066 - RNA, 19 nt, Artificial Sequence
  Description of Artificial Sequence: Synthetic oligonucleotide
aaaguguacgguacagccc

SEQ ID NO: 109067 - RNA, 19 nt, Artificial Sequence
  Description of Artificial Sequence: Synthetic oligonucleotide
acaaccacgaugugugugg

SEQ ID NO: 109068 - RNA, 19 nt, Artificial Sequence
  Description of Artificial Sequence: Synthetic oligonucleotide
ugaucccuuaaaagaaggg

SEQ ID NO: 109069 - RNA, 19 nt, Artificial Sequence
  Description of Artificial Sequence: Synthetic oligonucleotide
ugcaugaaauaccugcagc

SEQ ID NO: 109070 - RNA, 19 nt, Artificial Sequence
  Description of Artificial Sequence: Synthetic oligonucleotide
auacacugcucccucaaac

SEQ ID NO: 109071 - RNA, 19 nt, Artificial Sequence
  Description of Artificial Sequence: Synthetic oligonucleotide
auuaagacagccacucucg

SEQ ID NO: 109072 - RNA, 19 nt, Artificial Sequence
  Description of Artificial Sequence: Synthetic oligonucleotide
aucacaagaacucgggcug

SEQ ID NO: 109073 - RNA, 19 nt, Artificial Sequence
  Description of Artificial Sequence: Synthetic oligonucleotide
ucggugauccuuucgagcc

SEQ ID NO: 109074 - RNA, 19 nt, Artificial Sequence
  Description of Artificial Sequence: Synthetic oligonucleotide
aaugucuaccccagauucc

SEQ ID NO: 109075 - RNA, 19 nt, Artificial Sequence
  Description of Artificial Sequence: Synthetic oligonucleotide
aucgcuuaugguccugugc

SEQ ID NO: 109076 - RNA, 19 nt, Artificial Sequence
  Description of Artificial Sequence: Synthetic oligonucleotide
ucagcauuauaccagcgua

SEQ ID NO: 109077 - RNA, 19 nt, Artificial Sequence
  Description of Artificial Sequence: Synthetic oligonucleotide
acagaguugcaacacuguc

SEQ ID NO: 109078 - RNA, 19 nt, Artificial Sequence
  Description of Artificial Sequence: Synthetic oligonucleotide
agaauauuggagggaagac

SEQ ID NO: 109079 - RNA, 19 nt, Artificial Sequence
  Description of Artificial Sequence: Synthetic oligonucleotide
aagccaauauccuuccuau

SEQ ID NO: 109080 - RNA, 19 nt, Artificial Sequence
  Description of Artificial Sequence: Synthetic oligonucleotide
aacaguuacggcagagugg

SEQ ID NO: 109081 - RNA, 19 nt, Artificial Sequence
  Description of Artificial Sequence: Synthetic oligonucleotide
agacagacuaugucuacag

SEQ ID NO: 109082 - RNA, 19 nt, Artificial Sequence
  Description of Artificial Sequence: Synthetic oligonucleotide
gacacugccuaucacccag

SEQ ID NO: 109083 - RNA, 19 nt, Artificial Sequence
  Description of Artificial Sequence: Synthetic oligonucleotide
auagcacccacagcaaacc

SEQ ID NO: 109084 - RNA, 19 nt, Artificial Sequence
  Description of Artificial Sequence: Synthetic oligonucleotide
augauuaauuacucuggug

SEQ ID NO: 109085 - RNA, 19 nt, Artificial Sequence
  Description of Artificial Sequence: Synthetic oligonucleotide
uccugaacguaugauaggc

SEQ ID NO: 109086 - RNA, 19 nt, Artificial Sequence
  Description of Artificial Sequence: Synthetic oligonucleotide
gcauuugagaucuuuccgg

SEQ ID NO: 109087 - RNA, 19 nt, Artificial Sequence
  Description of Artificial Sequence: Synthetic oligonucleotide
cagcauuugagaucuuucc

SEQ ID NO: 109088 - RNA, 19 nt, Artificial Sequence
  Description of Artificial Sequence: Synthetic oligonucleotide
acaaaguguacgguacagc

SEQ ID NO: 109089 - RNA, 19 nt, Artificial Sequence
  Description of Artificial Sequence: Synthetic oligonucleotide
acccuguuaucucuacacc

SEQ ID NO: 109090 - RNA, 19 nt, Artificial Sequence
  Description of Artificial Sequence: Synthetic oligonucleotide
aaucgugacuccagcuucc

SEQ ID NO: 109091 - RNA, 19 nt, Artificial Sequence
  Description of Artificial Sequence: Synthetic oligonucleotide
uaaucgugacuccagcuuc

SEQ ID NO: 109092 - RNA, 19 nt, Artificial Sequence
  Description of Artificial Sequence: Synthetic oligonucleotide
aaucacgccuuucccagcu

SEQ ID NO: 109093 - RNA, 19 nt, Artificial Sequence
  Description of Artificial Sequence: Synthetic oligonucleotide
augaaauaccugcagcccu

SEQ ID NO: 109094 - RNA, 19 nt, Artificial Sequence
  Description of Artificial Sequence: Synthetic oligonucleotide
ugaacguaugauaggcaac

SEQ ID NO: 109095 - RNA, 19 nt, Artificial Sequence
  Description of Artificial Sequence: Synthetic oligonucleotide
gacggguggauguugagca

SEQ ID NO: 109096 - RNA, 19 nt, Artificial Sequence
  Description of Artificial Sequence: Synthetic oligonucleotide
cucgcuacgaucuuccuca

SEQ ID NO: 109097 - RNA, 19 nt, Artificial Sequence
  Description of Artificial Sequence: Synthetic oligonucleotide
acaguuacggcagaguggu

SEQ ID NO: 109098 - RNA, 19 nt, Artificial Sequence
  Description of Artificial Sequence: Synthetic oligonucleotide
agugggaggauuacuuggc

SEQ ID NO: 109099 - RNA, 19 nt, Artificial Sequence
  Description of Artificial Sequence: Synthetic oligonucleotide
cuuugucuaggccagcgac

SEQ ID NO: 109100 - RNA, 19 nt, Artificial Sequence
  Description of Artificial Sequence: Synthetic oligonucleotide
acgacacugccuaucaccc

SEQ ID NO: 109101 - RNA, 19 nt, Artificial Sequence
  Description of Artificial Sequence: Synthetic oligonucleotide
aguaaguccccuaacgucu

SEQ ID NO: 109102 - RNA, 19 nt, Artificial Sequence
  Description of Artificial Sequence: Synthetic oligonucleotide
aucguacgccugcacaggc

SEQ ID NO: 109103 - RNA, 19 nt, Artificial Sequence
  Description of Artificial Sequence: Synthetic oligonucleotide
gaucccuuaaaagaaggga

SEQ ID NO: 109104 - RNA, 19 nt, Artificial Sequence
  Description of Artificial Sequence: Synthetic oligonucleotide
agaauucucaugaauccug

SEQ ID NO: 109105 - RNA, 19 nt, Artificial Sequence
  Description of Artificial Sequence: Synthetic oligonucleotide
uucggugauccuuucgagc

SEQ ID NO: 109106 - RNA, 19 nt, Artificial Sequence
  Description of Artificial Sequence: Synthetic oligonucleotide
uugcgcucauaauaaagcu

SEQ ID NO: 109107 - RNA, 19 nt, Artificial Sequence
  Description of Artificial Sequence: Synthetic oligonucleotide
uuggaguuagaaguaaguc

SEQ ID NO: 109108 - RNA, 19 nt, Artificial Sequence
  Description of Artificial Sequence: Synthetic oligonucleotide
gaacguaugauaggcaaca

SEQ ID NO: 109109 - RNA, 19 nt, Artificial Sequence
  Description of Artificial Sequence: Synthetic oligonucleotide
agacuaugucuacagagaa

SEQ ID NO: 109110 - RNA, 19 nt, Artificial Sequence
  Description of Artificial Sequence: Synthetic oligonucleotide
uaacgucuggucaccaugu

SEQ ID NO: 109111 - RNA, 19 nt, Artificial Sequence
  Description of Artificial Sequence: Synthetic oligonucleotide
uacacugcucccucaaacu

SEQ ID NO: 109112 - RNA, 19 nt, Artificial Sequence
  Description of Artificial Sequence: Synthetic oligonucleotide
gaauucucaugaauccugc

SEQ ID NO: 109113 - RNA, 19 nt, Artificial Sequence
  Description of Artificial Sequence: Synthetic oligonucleotide
acgacaacauccccuucgg

SEQ ID NO: 109114 - RNA, 19 nt, Artificial Sequence
  Description of Artificial Sequence: Synthetic oligonucleotide
uuaucucuacacccuuggc

SEQ ID NO: 109115 - RNA, 19 nt, Artificial Sequence
  Description of Artificial Sequence: Synthetic oligonucleotide
uuuaagaagugggaggauu

SEQ ID NO: 109116 - RNA, 19 nt, Artificial Sequence
  Description of Artificial Sequence: Synthetic oligonucleotide
cuaacgucuggucaccaug

SEQ ID NO: 109117 - RNA, 19 nt, Artificial Sequence
  Description of Artificial Sequence: Synthetic oligonucleotide
caaagcagggaaguuugcg

SEQ ID NO: 109118 - RNA, 19 nt, Artificial Sequence
  Description of Artificial Sequence: Synthetic oligonucleotide
cugucgucccucuucacag

SEQ ID NO: 109119 - RNA, 19 nt, Artificial Sequence
  Description of Artificial Sequence: Synthetic oligonucleotide
aggauuacuuggcauucug

SEQ ID NO: 109120 - RNA, 19 nt, Artificial Sequence
  Description of Artificial Sequence: Synthetic oligonucleotide
guugcaacacugucguccc

SEQ ID NO: 109121 - RNA, 19 nt, Artificial Sequence
  Description of Artificial Sequence: Synthetic oligonucleotide
agcguagagaauuccugug

SEQ ID NO: 109122 - RNA, 19 nt, Artificial Sequence
  Description of Artificial Sequence: Synthetic oligonucleotide
cagcauuauaccagcguag

SEQ ID NO: 109123 - RNA, 19 nt, Artificial Sequence
  Description of Artificial Sequence: Synthetic oligonucleotide
aaacccuguuaucucuaca

SEQ ID NO: 109124 - RNA, 19 nt, Artificial Sequence
  Description of Artificial Sequence: Synthetic oligonucleotide
ucaccaaaacggcaauuaa

SEQ ID NO: 109125 - RNA, 19 nt, Artificial Sequence
  Description of Artificial Sequence: Synthetic oligonucleotide
aaacuuuauagcagcgagu

SEQ ID NO: 109126 - RNA, 19 nt, Artificial Sequence
  Description of Artificial Sequence: Synthetic oligonucleotide
augucgggcaucucugcgg

SEQ ID NO: 109127 - RNA, 19 nt, Artificial Sequence
  Description of Artificial Sequence: Synthetic oligonucleotide
ucugacacgaggggaaucu

SEQ ID NO: 109128 - RNA, 19 nt, Artificial Sequence
  Description of Artificial Sequence: Synthetic oligonucleotide
ugaaauaccugcagcccua

SEQ ID NO: 109129 - RNA, 19 nt, Artificial Sequence
  Description of Artificial Sequence: Synthetic oligonucleotide
aacgucuggucaccauguc

SEQ ID NO: 109130 - RNA, 19 nt, Artificial Sequence
  Description of Artificial Sequence: Synthetic oligonucleotide
cauuugacaccaccgcccc

SEQ ID NO: 109131 - RNA, 19 nt, Artificial Sequence
  Description of Artificial Sequence: Synthetic oligonucleotide
gaagccaauauccuuccua

SEQ ID NO: 109132 - RNA, 19 nt, Artificial Sequence
  Description of Artificial Sequence: Synthetic oligonucleotide
uccugucccggauauuaag

SEQ ID NO: 109133 - RNA, 19 nt, Artificial Sequence
  Description of Artificial Sequence: Synthetic oligonucleotide
aaucgcuuaugguccugug

SEQ ID NO: 109134 - RNA, 19 nt, Artificial Sequence
  Description of Artificial Sequence: Synthetic oligonucleotide
augagacugugcaaguuuc

SEQ ID NO: 109135 - RNA, 19 nt, Artificial Sequence
  Description of Artificial Sequence: Synthetic oligonucleotide
caauaggcucccauucccc

SEQ ID NO: 109136 - RNA, 19 nt, Artificial Sequence
  Description of Artificial Sequence: Synthetic oligonucleotide
agcaaggacggguggaugu

SEQ ID NO: 109137 - RNA, 19 nt, Artificial Sequence
  Description of Artificial Sequence: Synthetic oligonucleotide
acugucgucccucuucaca

SEQ ID NO: 109138 - RNA, 19 nt, Artificial Sequence
  Description of Artificial Sequence: Synthetic oligonucleotide
acguaugauaggcaacagu

SEQ ID NO: 109139 - RNA, 19 nt, Artificial Sequence
  Description of Artificial Sequence: Synthetic oligonucleotide
aacguaugauaggcaacag

SEQ ID NO: 109140 - RNA, 19 nt, Artificial Sequence
  Description of Artificial Sequence: Synthetic oligonucleotide
agcgaccccagcuuuguug

SEQ ID NO: 109141 - RNA, 19 nt, Artificial Sequence
  Description of Artificial Sequence: Synthetic oligonucleotide
aagggcugacacaagauuu

SEQ ID NO: 109142 - RNA, 19 nt, Artificial Sequence
  Description of Artificial Sequence: Synthetic oligonucleotide
agcagcgaguccuuucuug

SEQ ID NO: 109143 - RNA, 19 nt, Artificial Sequence
  Description of Artificial Sequence: Synthetic oligonucleotide
ugacacguccugaacguau

SEQ ID NO: 109144 - RNA, 19 nt, Artificial Sequence
  Description of Artificial Sequence: Synthetic oligonucleotide
ucacgccuuucccagcugc

SEQ ID NO: 109145 - RNA, 19 nt, Artificial Sequence
  Description of Artificial Sequence: Synthetic oligonucleotide
aggcgcacccuccugccgc

SEQ ID NO: 109146 - RNA, 19 nt, Artificial Sequence
  Description of Artificial Sequence: Synthetic oligonucleotide
auuggagggaagaccucgc

SEQ ID NO: 109147 - RNA, 19 nt, Artificial Sequence
  Description of Artificial Sequence: Synthetic oligonucleotide
cuggacucuaacugggcug

SEQ ID NO: 109148 - RNA, 19 nt, Artificial Sequence
  Description of Artificial Sequence: Synthetic oligonucleotide
acagcuucaguuguacuga

SEQ ID NO: 109149 - RNA, 19 nt, Artificial Sequence
  Description of Artificial Sequence: Synthetic oligonucleotide
uguaaggcgcacccuccug

SEQ ID NO: 109150 - RNA, 19 nt, Artificial Sequence
  Description of Artificial Sequence: Synthetic oligonucleotide
cugaacguaugauaggcaa

SEQ ID NO: 109151 - RNA, 19 nt, Artificial Sequence
  Description of Artificial Sequence: Synthetic oligonucleotide
gagggaagaccucgcuacg

SEQ ID NO: 109152 - RNA, 19 nt, Artificial Sequence
  Description of Artificial Sequence: Synthetic oligonucleotide
ugaucccuuuccauagcac

SEQ ID NO: 109153 - RNA, 19 nt, Artificial Sequence
  Description of Artificial Sequence: Synthetic oligonucleotide
guaaggcgcacccuccugc

SEQ ID NO: 109154 - RNA, 19 nt, Artificial Sequence
  Description of Artificial Sequence: Synthetic oligonucleotide
gaaacccuguuaucucuac

SEQ ID NO: 109155 - RNA, 19 nt, Artificial Sequence
  Description of Artificial Sequence: Synthetic oligonucleotide
accccagauuccuuguaag

SEQ ID NO: 109156 - RNA, 19 nt, Artificial Sequence
  Description of Artificial Sequence: Synthetic oligonucleotide
uccuauacacugcucccuc

SEQ ID NO: 109157 - RNA, 19 nt, Artificial Sequence
  Description of Artificial Sequence: Synthetic oligonucleotide
agcauuauaccagcguaga

SEQ ID NO: 109158 - RNA, 19 nt, Artificial Sequence
  Description of Artificial Sequence: Synthetic oligonucleotide
cuaggguggacugaaucac

SEQ ID NO: 109159 - RNA, 19 nt, Artificial Sequence
  Description of Artificial Sequence: Synthetic oligonucleotide
uccccuaacgucuggucac

SEQ ID NO: 109160 - RNA, 19 nt, Artificial Sequence
  Description of Artificial Sequence: Synthetic oligonucleotide
aguccccuaacgucugguc

SEQ ID NO: 109161 - RNA, 19 nt, Artificial Sequence
  Description of Artificial Sequence: Synthetic oligonucleotide
cuucggugauccuuucgag

SEQ ID NO: 109162 - RNA, 19 nt, Artificial Sequence
  Description of Artificial Sequence: Synthetic oligonucleotide
ugacacgaggggaaucuuc

SEQ ID NO: 109163 - RNA, 19 nt, Artificial Sequence
  Description of Artificial Sequence: Synthetic oligonucleotide
cacgaacucaaucuuuuca

SEQ ID NO: 109164 - RNA, 19 nt, Artificial Sequence
  Description of Artificial Sequence: Synthetic oligonucleotide
uaagaagugggaggauuac

SEQ ID NO: 109165 - RNA, 19 nt, Artificial Sequence
  Description of Artificial Sequence: Synthetic oligonucleotide
uguacgguacagcccguaa

SEQ ID NO: 109166 - RNA, 19 nt, Artificial Sequence
  Description of Artificial Sequence: Synthetic oligonucleotide
ugcggcuuugacucuuuca

SEQ ID NO: 109167 - RNA, 19 nt, Artificial Sequence
  Description of Artificial Sequence: Synthetic oligonucleotide
ggggccaaagcaucguacg

SEQ ID NO: 109168 - RNA, 19 nt, Artificial Sequence
  Description of Artificial Sequence: Synthetic oligonucleotide
aggguauguucccucccuc

SEQ ID NO: 109169 - RNA, 19 nt, Artificial Sequence
  Description of Artificial Sequence: Synthetic oligonucleotide
gaugacaaccacgaugugu

SEQ ID NO: 109170 - RNA, 19 nt, Artificial Sequence
  Description of Artificial Sequence: Synthetic oligonucleotide
aauuccuguguaaggcgca

SEQ ID NO: 109171 - RNA, 19 nt, Artificial Sequence
  Description of Artificial Sequence: Synthetic oligonucleotide
ccauuugacaccaccgccc

SEQ ID NO: 109172 - RNA, 19 nt, Artificial Sequence
  Description of Artificial Sequence: Synthetic oligonucleotide
uggggccaaagcaucguac

SEQ ID NO: 109173 - RNA, 19 nt, Artificial Sequence
  Description of Artificial Sequence: Synthetic oligonucleotide
auacucgccaggaggguac

SEQ ID NO: 109174 - RNA, 19 nt, Artificial Sequence
  Description of Artificial Sequence: Synthetic oligonucleotide
aaggcgcacccuccugccg

SEQ ID NO: 109175 - RNA, 19 nt, Artificial Sequence
  Description of Artificial Sequence: Synthetic oligonucleotide
cccuguuaucucuacaccc

SEQ ID NO: 109176 - RNA, 19 nt, Artificial Sequence
  Description of Artificial Sequence: Synthetic oligonucleotide
auucaacacgacuuuuaua

SEQ ID NO: 109177 - RNA, 19 nt, Artificial Sequence
  Description of Artificial Sequence: Synthetic oligonucleotide
gacacgaggggaaucuuca

SEQ ID NO: 109178 - RNA, 19 nt, Artificial Sequence
  Description of Artificial Sequence: Synthetic oligonucleotide
gcuacgaucuuccucacaa

SEQ ID NO: 109179 - RNA, 19 nt, Artificial Sequence
  Description of Artificial Sequence: Synthetic oligonucleotide
ugacucugacacgagggga

SEQ ID NO: 109180 - RNA, 19 nt, Artificial Sequence
  Description of Artificial Sequence: Synthetic oligonucleotide
cugcaagacagacuauguc

SEQ ID NO: 109181 - RNA, 19 nt, Artificial Sequence
  Description of Artificial Sequence: Synthetic oligonucleotide
uaaggcgcacccuccugcc

SEQ ID NO: 109182 - RNA, 19 nt, Artificial Sequence
  Description of Artificial Sequence: Synthetic oligonucleotide
uaggguggacugaaucacu

SEQ ID NO: 109183 - RNA, 19 nt, Artificial Sequence
  Description of Artificial Sequence: Synthetic oligonucleotide
ucgauccugucccggauau

SEQ ID NO: 109184 - RNA, 19 nt, Artificial Sequence
  Description of Artificial Sequence: Synthetic oligonucleotide
gaagaccucgcuacgaucu

SEQ ID NO: 109185 - RNA, 19 nt, Artificial Sequence
  Description of Artificial Sequence: Synthetic oligonucleotide
ugggaggauuacuuggcau

SEQ ID NO: 109186 - RNA, 19 nt, Artificial Sequence
  Description of Artificial Sequence: Synthetic oligonucleotide
ucccgucccauuuucugac

SEQ ID NO: 109187 - RNA, 19 nt, Artificial Sequence
  Description of Artificial Sequence: Synthetic oligonucleotide
gauccugucccggauauua

SEQ ID NO: 109188 - RNA, 19 nt, Artificial Sequence
  Description of Artificial Sequence: Synthetic oligonucleotide
cagcccguaaucgugacuc

SEQ ID NO: 109189 - RNA, 19 nt, Artificial Sequence
  Description of Artificial Sequence: Synthetic oligonucleotide
gacagacuaugucuacaga

SEQ ID NO: 109190 - RNA, 19 nt, Artificial Sequence
  Description of Artificial Sequence: Synthetic oligonucleotide
gacggcuguuacugugagg

SEQ ID NO: 109191 - RNA, 19 nt, Artificial Sequence
  Description of Artificial Sequence: Synthetic oligonucleotide
acguccugaacguaugaua

SEQ ID NO: 109192 - RNA, 19 nt, Artificial Sequence
  Description of Artificial Sequence: Synthetic oligonucleotide
cuaccccaagcuucuuggg

SEQ ID NO: 109193 - RNA, 19 nt, Artificial Sequence
  Description of Artificial Sequence: Synthetic oligonucleotide
uggagggaagaccucgcua

SEQ ID NO: 109194 - RNA, 19 nt, Artificial Sequence
  Description of Artificial Sequence: Synthetic oligonucleotide
ucuacgucuucagcuacaa

SEQ ID NO: 109195 - RNA, 19 nt, Artificial Sequence
  Description of Artificial Sequence: Synthetic oligonucleotide
ucccggauauuaagacagc

SEQ ID NO: 109196 - RNA, 19 nt, Artificial Sequence
  Description of Artificial Sequence: Synthetic oligonucleotide
ucguacgccugcacaggcc

SEQ ID NO: 109197 - RNA, 19 nt, Artificial Sequence
  Description of Artificial Sequence: Synthetic oligonucleotide
uggcgaccaaauccugacc

SEQ ID NO: 109198 - RNA, 19 nt, Artificial Sequence
  Description of Artificial Sequence: Synthetic oligonucleotide
augucgguccauaaacucu

SEQ ID NO: 109199 - RNA, 19 nt, Artificial Sequence
  Description of Artificial Sequence: Synthetic oligonucleotide
ggcaauaggcucccauucc

SEQ ID NO: 109200 - RNA, 19 nt, Artificial Sequence
  Description of Artificial Sequence: Synthetic oligonucleotide
ugggcaauaggcucccauu

SEQ ID NO: 109201 - RNA, 19 nt, Artificial Sequence
  Description of Artificial Sequence: Synthetic oligonucleotide
ccgagggaguuucugaucc

SEQ ID NO: 109202 - RNA, 19 nt, Artificial Sequence
  Description of Artificial Sequence: Synthetic oligonucleotide
acacgaggggaaucuucag

SEQ ID NO: 109203 - RNA, 19 nt, Artificial Sequence
  Description of Artificial Sequence: Synthetic oligonucleotide
gcuguaaccaugagaagac

SEQ ID NO: 109204 - RNA, 19 nt, Artificial Sequence
  Description of Artificial Sequence: Synthetic oligonucleotide
cacucucgacuucuuuugc

SEQ ID NO: 109205 - RNA, 19 nt, Artificial Sequence
  Description of Artificial Sequence: Synthetic oligonucleotide
gguacagcccguaaucgug

SEQ ID NO: 109206 - RNA, 19 nt, Artificial Sequence
  Description of Artificial Sequence: Synthetic oligonucleotide
ggcgaccaaauccugacca

SEQ ID NO: 109207 - RNA, 19 nt, Artificial Sequence
  Description of Artificial Sequence: Synthetic oligonucleotide
caccgccccauucauuugc

SEQ ID NO: 109208 - RNA, 19 nt, Artificial Sequence
  Description of Artificial Sequence: Synthetic oligonucleotide
gcucauaauaaagcugcag

SEQ ID NO: 109209 - RNA, 19 nt, Artificial Sequence
  Description of Artificial Sequence: Synthetic oligonucleotide
gcauuauaccagcguagag

SEQ ID NO: 109210 - RNA, 19 nt, Artificial Sequence
  Description of Artificial Sequence: Synthetic oligonucleotide
ugcgcaguugggauuccau

SEQ ID NO: 109211 - RNA, 19 nt, Artificial Sequence
  Description of Artificial Sequence: Synthetic oligonucleotide
caucguacgccugcacagg

SEQ ID NO: 109212 - RNA, 19 nt, Artificial Sequence
  Description of Artificial Sequence: Synthetic oligonucleotide
cugccuaucacccaggcuu

SEQ ID NO: 109213 - RNA, 19 nt, Artificial Sequence
  Description of Artificial Sequence: Synthetic oligonucleotide
cuguaaccaugagaagacc

SEQ ID NO: 109214 - RNA, 19 nt, Artificial Sequence
  Description of Artificial Sequence: Synthetic oligonucleotide
gggaaguuugcgcucauaa

SEQ ID NO: 109215 - RNA, 19 nt, Artificial Sequence
  Description of Artificial Sequence: Synthetic oligonucleotide
uucgauccugucccggaua

SEQ ID NO: 109216 - RNA, 19 nt, Artificial Sequence
  Description of Artificial Sequence: Synthetic oligonucleotide
cacauggcgaccaaauccu

SEQ ID NO: 109217 - RNA, 19 nt, Artificial Sequence
  Description of Artificial Sequence: Synthetic oligonucleotide
agcaaucgcuuaugguccu

SEQ ID NO: 109218 - RNA, 19 nt, Artificial Sequence
  Description of Artificial Sequence: Synthetic oligonucleotide
gguuggaguuagaaguaag

SEQ ID NO: 109219 - RNA, 19 nt, Artificial Sequence
  Description of Artificial Sequence: Synthetic oligonucleotide
uaccagcguagagaauucc

SEQ ID NO: 109220 - RNA, 19 nt, Artificial Sequence
  Description of Artificial Sequence: Synthetic oligonucleotide
aaguccccuaacgucuggu

SEQ ID NO: 109221 - RNA, 19 nt, Artificial Sequence
  Description of Artificial Sequence: Synthetic oligonucleotide
agaccucgcuacgaucuuc

SEQ ID NO: 109222 - RNA, 19 nt, Artificial Sequence
  Description of Artificial Sequence: Synthetic oligonucleotide
gucagcauuauaccagcgu

SEQ ID NO: 109223 - RNA, 19 nt, Artificial Sequence
  Description of Artificial Sequence: Synthetic oligonucleotide
agcuucaguuguacugagg

SEQ ID NO: 109224 - RNA, 19 nt, Artificial Sequence
  Description of Artificial Sequence: Synthetic oligonucleotide
uucgagccgagggaguuuc

SEQ ID NO: 109225 - RNA, 19 nt, Artificial Sequence
  Description of Artificial Sequence: Synthetic oligonucleotide
uccccuucggugauccuuu

SEQ ID NO: 109226 - RNA, 19 nt, Artificial Sequence
  Description of Artificial Sequence: Synthetic oligonucleotide
cgcuggagaagaauauugg

SEQ ID NO: 109227 - RNA, 19 nt, Artificial Sequence
  Description of Artificial Sequence: Synthetic oligonucleotide
uacagcccguaaucgugac

SEQ ID NO: 109228 - RNA, 19 nt, Artificial Sequence
  Description of Artificial Sequence: Synthetic oligonucleotide
aagaccucgcuacgaucuu

SEQ ID NO: 109229 - RNA, 19 nt, Artificial Sequence
  Description of Artificial Sequence: Synthetic oligonucleotide
cuauacacugcucccucaa

SEQ ID NO: 109230 - RNA, 19 nt, Artificial Sequence
  Description of Artificial Sequence: Synthetic oligonucleotide
ugacaccaccgccccauuc

SEQ ID NO: 109231 - RNA, 19 nt, Artificial Sequence
  Description of Artificial Sequence: Synthetic oligonucleotide
agaugacaaccacgaugug

SEQ ID NO: 109232 - RNA, 19 nt, Artificial Sequence
  Description of Artificial Sequence: Synthetic oligonucleotide
cacgacuuuuauauaauuu

SEQ ID NO: 109233 - RNA, 19 nt, Artificial Sequence
  Description of Artificial Sequence: Synthetic oligonucleotide
ugcaacaaucacgccuuuc

SEQ ID NO: 109234 - RNA, 19 nt, Artificial Sequence
  Description of Artificial Sequence: Synthetic oligonucleotide
agguucgauccugucccgg

SEQ ID NO: 109235 - RNA, 19 nt, Artificial Sequence
  Description of Artificial Sequence: Synthetic oligonucleotide
acagcccguaaucgugacu

SEQ ID NO: 109236 - RNA, 19 nt, Artificial Sequence
  Description of Artificial Sequence: Synthetic oligonucleotide
guuguacugaggucaaguu

SEQ ID NO: 109237 - RNA, 19 nt, Artificial Sequence
  Description of Artificial Sequence: Synthetic oligonucleotide
cacugcgcaguugggauuc

SEQ ID NO: 109238 - RNA, 19 nt, Artificial Sequence
  Description of Artificial Sequence: Synthetic oligonucleotide
acauugcaaccuggucugg

SEQ ID NO: 109239 - RNA, 19 nt, Artificial Sequence
  Description of Artificial Sequence: Synthetic oligonucleotide
agggaagaccucgcuacga

SEQ ID NO: 109240 - RNA, 19 nt, Artificial Sequence
  Description of Artificial Sequence: Synthetic oligonucleotide
ggaggauuacuuggcauuc

SEQ ID NO: 109241 - RNA, 19 nt, Artificial Sequence
  Description of Artificial Sequence: Synthetic oligonucleotide
cccggauauuaagacagcc

SEQ ID NO: 109242 - RNA, 19 nt, Artificial Sequence
  Description of Artificial Sequence: Synthetic oligonucleotide
ggaagaccucgcuacgauc

SEQ ID NO: 109243 - RNA, 19 nt, Artificial Sequence
  Description of Artificial Sequence: Synthetic oligonucleotide
cccguaaucgugacuccag

SEQ ID NO: 109244 - RNA, 19 nt, Artificial Sequence
  Description of Artificial Sequence: Synthetic oligonucleotide
ggccaucuaggguggacug

SEQ ID NO: 109245 - RNA, 19 nt, Artificial Sequence
  Description of Artificial Sequence: Synthetic oligonucleotide
ccggauauuaagacagcca

SEQ ID NO: 109246 - RNA, 19 nt, Artificial Sequence
  Description of Artificial Sequence: Synthetic oligonucleotide
guacagcccguaaucguga

SEQ ID NO: 109247 - RNA, 19 nt, Artificial Sequence
  Description of Artificial Sequence: Synthetic oligonucleotide
uugcaacacugucgucccu

SEQ ID NO: 109248 - RNA, 19 nt, Artificial Sequence
  Description of Artificial Sequence: Synthetic oligonucleotide
acugcgcaguugggauucc

SEQ ID NO: 109249 - RNA, 19 nt, Artificial Sequence
  Description of Artificial Sequence: Synthetic oligonucleotide
gauuuuccccgacggcugu

SEQ ID NO: 109250 - RNA, 19 nt, Artificial Sequence
  Description of Artificial Sequence: Synthetic oligonucleotide
gcgcaguugggauuccaug

SEQ ID NO: 109251 - RNA, 19 nt, Artificial Sequence
  Description of Artificial Sequence: Synthetic oligonucleotide
cagcguagagaauuccugu

SEQ ID NO: 109252 - RNA, 19 nt, Artificial Sequence
  Description of Artificial Sequence: Synthetic oligonucleotide
guaaccaugagaagaccuu

SEQ ID NO: 109253 - RNA, 19 nt, Artificial Sequence
  Description of Artificial Sequence: Synthetic oligonucleotide
gguucgauccugucccgga

SEQ ID NO: 109254 - RNA, 19 nt, Artificial Sequence
  Description of Artificial Sequence: Synthetic oligonucleotide
ccguaaucgugacuccagc

SEQ ID NO: 109255 - RNA, 19 nt, Artificial Sequence
  Description of Artificial Sequence: Synthetic oligonucleotide
ccugucccggauauuaaga

SEQ ID NO: 109256 - RNA, 19 nt, Artificial Sequence
  Description of Artificial Sequence: Synthetic oligonucleotide
acggguggauguugagcau

SEQ ID NO: 109257 - RNA, 19 nt, Artificial Sequence
  Description of Artificial Sequence: Synthetic oligonucleotide
accucgcuacgaucuuccu

SEQ ID NO: 109258 - RNA, 19 nt, Artificial Sequence
  Description of Artificial Sequence: Synthetic oligonucleotide
uagcagcgaguccuuucuu

SEQ ID NO: 109259 - RNA, 19 nt, Artificial Sequence
  Description of Artificial Sequence: Synthetic oligonucleotide
uugcaacaaucacgccuuu

SEQ ID NO: 109260 - RNA, 19 nt, Artificial Sequence
  Description of Artificial Sequence: Synthetic oligonucleotide
ucgcuacgaucuuccucac

SEQ ID NO: 109261 - RNA, 19 nt, Artificial Sequence
  Description of Artificial Sequence: Synthetic oligonucleotide
cucugacacgaggggaauc

SEQ ID NO: 109262 - RNA, 19 nt, Artificial Sequence
  Description of Artificial Sequence: Synthetic oligonucleotide
acucugacacgaggggaau

SEQ ID NO: 109263 - RNA, 19 nt, Artificial Sequence
  Description of Artificial Sequence: Synthetic oligonucleotide
cuagccaaacaggcagaga

SEQ ID NO: 109264 - RNA, 19 nt, Artificial Sequence
  Description of Artificial Sequence: Synthetic oligonucleotide
ucgagccgagggaguuucu

SEQ ID NO: 109265 - RNA, 19 nt, Artificial Sequence
  Description of Artificial Sequence: Synthetic oligonucleotide
caggccaucuaggguggac

SEQ ID NO: 109266 - RNA, 19 nt, Artificial Sequence
  Description of Artificial Sequence: Synthetic oligonucleotide
gggaggauuacuuggcauu

SEQ ID NO: 109267 - RNA, 19 nt, Artificial Sequence
  Description of Artificial Sequence: Synthetic oligonucleotide
uacucgccaggaggguaca

SEQ ID NO: 109268 - RNA, 19 nt, Artificial Sequence
  Description of Artificial Sequence: Synthetic oligonucleotide
ccugaacguaugauaggca

SEQ ID NO: 109269 - RNA, 19 nt, Artificial Sequence
  Description of Artificial Sequence: Synthetic oligonucleotide
aggcgcuggagaagaauau

SEQ ID NO: 109270 - RNA, 19 nt, Artificial Sequence
  Description of Artificial Sequence: Synthetic oligonucleotide
gcuuugucuaggccagcga

SEQ ID NO: 109271 - RNA, 19 nt, Artificial Sequence
  Description of Artificial Sequence: Synthetic oligonucleotide
cacugucgucccucuucac

SEQ ID NO: 109272 - RNA, 19 nt, Artificial Sequence
  Description of Artificial Sequence: Synthetic oligonucleotide
cauacucgccaggagggua

SEQ ID NO: 109273 - RNA, 19 nt, Artificial Sequence
  Description of Artificial Sequence: Synthetic oligonucleotide
ccagaugaagcuacuccaa

SEQ ID NO: 109274 - RNA, 19 nt, Artificial Sequence
  Description of Artificial Sequence: Synthetic oligonucleotide
ccucgcuacgaucuuccuc

SEQ ID NO: 109275 - RNA, 19 nt, Artificial Sequence
  Description of Artificial Sequence: Synthetic oligonucleotide
gaucaccaaaacggcaauu

SEQ ID NO: 109276 - RNA, 19 nt, Artificial Sequence
  Description of Artificial Sequence: Synthetic oligonucleotide
ggcguaggcuccaggguac

SEQ ID NO: 109277 - RNA, 19 nt, Artificial Sequence
  Description of Artificial Sequence: Synthetic oligonucleotide
accgccccauucauuugca

SEQ ID NO: 109278 - RNA, 19 nt, Artificial Sequence
  Description of Artificial Sequence: Synthetic oligonucleotide
caaccacgaugugugugga

SEQ ID NO: 109279 - RNA, 19 nt, Artificial Sequence
  Description of Artificial Sequence: Synthetic oligonucleotide
cuacgucuucagcuacaaa

SEQ ID NO: 109280 - RNA, 19 nt, Artificial Sequence
  Description of Artificial Sequence: Synthetic oligonucleotide
guucgauccugucccggau

SEQ ID NO: 109281 - RNA, 19 nt, Artificial Sequence
  Description of Artificial Sequence: Synthetic oligonucleotide
aguguacgguacagcccgu

SEQ ID NO: 109282 - RNA, 19 nt, Artificial Sequence
  Description of Artificial Sequence: Synthetic oligonucleotide
cgaggggaaucuucaggac

SEQ ID NO: 109283 - RNA, 19 nt, Artificial Sequence
  Description of Artificial Sequence: Synthetic oligonucleotide
ggguguugggcaauaggcu

SEQ ID NO: 109284 - RNA, 19 nt, Artificial Sequence
  Description of Artificial Sequence: Synthetic oligonucleotide
ggaaacccuguuaucucua

SEQ ID NO: 109285 - RNA, 19 nt, Artificial Sequence
  Description of Artificial Sequence: Synthetic oligonucleotide
agggaaguuugcgcucaua

SEQ ID NO: 109286 - RNA, 19 nt, Artificial Sequence
  Description of Artificial Sequence: Synthetic oligonucleotide
agccgcuccaaaagacuuu

SEQ ID NO: 109287 - RNA, 19 nt, Artificial Sequence
  Description of Artificial Sequence: Synthetic oligonucleotide
gcugucuacaaggcaggaa

SEQ ID NO: 109288 - RNA, 19 nt, Artificial Sequence
  Description of Artificial Sequence: Synthetic oligonucleotide
cgagggaguuucugauccc

SEQ ID NO: 109289 - RNA, 19 nt, Artificial Sequence
  Description of Artificial Sequence: Synthetic oligonucleotide
gggaagaccucgcuacgau

SEQ ID NO: 109290 - RNA, 19 nt, Artificial Sequence
  Description of Artificial Sequence: Synthetic oligonucleotide
gcaaucgcuuaugguccug

SEQ ID NO: 109291 - RNA, 19 nt, Artificial Sequence
  Description of Artificial Sequence: Synthetic oligonucleotide
ccaucuaggguggacugaa

SEQ ID NO: 109292 - RNA, 19 nt, Artificial Sequence
  Description of Artificial Sequence: Synthetic oligonucleotide
cuuucgagccgagggaguu

SEQ ID NO: 109293 - RNA, 19 nt, Artificial Sequence
  Description of Artificial Sequence: Synthetic oligonucleotide
gccgcaugccaucuacugu

SEQ ID NO: 109294 - RNA, 19 nt, Artificial Sequence
  Description of Artificial Sequence: Synthetic oligonucleotide
gcccguaaucgugacucca

SEQ ID NO: 109295 - RNA, 19 nt, Artificial Sequence
  Description of Artificial Sequence: Synthetic oligonucleotide
ccccuaacgucuggucacc

SEQ ID NO: 109296 - RNA, 19 nt, Artificial Sequence
  Description of Artificial Sequence: Synthetic oligonucleotide
cguaaucgugacuccagcu

SEQ ID NO: 109297 - RNA, 19 nt, Artificial Sequence
  Description of Artificial Sequence: Synthetic oligonucleotide
cacguccugaacguaugau

SEQ ID NO: 109298 - RNA, 19 nt, Artificial Sequence
  Description of Artificial Sequence: Synthetic oligonucleotide
gccuaucacccaggcuucc

SEQ ID NO: 109299 - RNA, 19 nt, Artificial Sequence
  Description of Artificial Sequence: Synthetic oligonucleotide
cugcgcaguugggauucca

SEQ ID NO: 109300 - RNA, 19 nt, Artificial Sequence
  Description of Artificial Sequence: Synthetic oligonucleotide
ccccagauuccuuguaagu

SEQ ID NO: 109301 - RNA, 19 nt, Artificial Sequence
  Description of Artificial Sequence: Synthetic oligonucleotide
caucuaggguggacugaau

SEQ ID NO: 109302 - RNA, 19 nt, Artificial Sequence
  Description of Artificial Sequence: Synthetic oligonucleotide
guugggcaauaggcuccca

SEQ ID NO: 109303 - RNA, 19 nt, Artificial Sequence
  Description of Artificial Sequence: Synthetic oligonucleotide
cgcucauaauaaagcugca

SEQ ID NO: 109304 - RNA, 19 nt, Artificial Sequence
  Description of Artificial Sequence: Synthetic oligonucleotide
cucuaugcucugcggcuuu

SEQ ID NO: 109305 - RNA, 19 nt, Artificial Sequence
  Description of Artificial Sequence: Synthetic oligonucleotide
cuaugagagcuuggagguu

SEQ ID NO: 109306 - RNA, 19 nt, Artificial Sequence
  Description of Artificial Sequence: Synthetic oligonucleotide
gcgaguccuuucuuggcuu

SEQ ID NO: 109307 - RNA, 19 nt, Artificial Sequence
  Description of Artificial Sequence: Synthetic oligonucleotide
ggcgcuggagaagaauauu

SEQ ID NO: 109308 - RNA, 19 nt, Artificial Sequence
  Description of Artificial Sequence: Synthetic oligonucleotide
cccgucccauuuucugaca

SEQ ID NO: 109309 - RNA, 19 nt, Artificial Sequence
  Description of Artificial Sequence: Synthetic oligonucleotide
ccaagccgcacggccccgc

SEQ ID NO: 109310 - RNA, 19 nt, Artificial Sequence
  Description of Artificial Sequence: Synthetic oligonucleotide
ccuaacgucuggucaccau

SEQ ID NO: 109311 - RNA, 19 nt, Artificial Sequence
  Description of Artificial Sequence: Synthetic oligonucleotide
cugacacgaggggaaucuu

SEQ ID NO: 109312 - RNA, 19 nt, Artificial Sequence
  Description of Artificial Sequence: Synthetic oligonucleotide
cauccccuucggugauccu

SEQ ID NO: 109313 - RNA, 19 nt, Artificial Sequence
  Description of Artificial Sequence: Synthetic oligonucleotide
cagggaaguuugcgcucau

SEQ ID NO: 109314 - RNA, 19 nt, Artificial Sequence
  Description of Artificial Sequence: Synthetic oligonucleotide
cccuaacgucuggucacca

SEQ ID NO: 109315 - RNA, 19 nt, Artificial Sequence
  Description of Artificial Sequence: Synthetic oligonucleotide
caguuacggcagagugguu

SEQ ID NO: 109316 - RNA, 19 nt, Artificial Sequence
  Description of Artificial Sequence: Synthetic oligonucleotide
cgacaacauccccuucggu

SEQ ID NO: 109317 - RNA, 19 nt, Artificial Sequence
  Description of Artificial Sequence: Synthetic oligonucleotide
cgauccugucccggauauu

SEQ ID NO: 109318 - RNA, 19 nt, Artificial Sequence
  Description of Artificial Sequence: Synthetic oligonucleotide
aaucuauucaacucuaggc

SEQ ID NO: 109319 - RNA, 19 nt, Artificial Sequence
  Description of Artificial Sequence: Synthetic oligonucleotide
ucuauuaacauucuuagug

SEQ ID NO: 109320 - RNA, 19 nt, Artificial Sequence
  Description of Artificial Sequence: Synthetic oligonucleotide
ucuguuauacugcacagcg

SEQ ID NO: 109321 - RNA, 19 nt, Artificial Sequence
  Description of Artificial Sequence: Synthetic oligonucleotide
ugggauaacacccauauug

SEQ ID NO: 109322 - RNA, 19 nt, Artificial Sequence
  Description of Artificial Sequence: Synthetic oligonucleotide
aguaauuucacuaagguug

SEQ ID NO: 109323 - RNA, 19 nt, Artificial Sequence
  Description of Artificial Sequence: Synthetic oligonucleotide
uucuacuuaauguagcucg

SEQ ID NO: 109324 - RNA, 19 nt, Artificial Sequence
  Description of Artificial Sequence: Synthetic oligonucleotide
uguacuagcaaacuguucu

SEQ ID NO: 109325 - RNA, 19 nt, Artificial Sequence
  Description of Artificial Sequence: Synthetic oligonucleotide
auuaguagaagacuaauga

SEQ ID NO: 109326 - RNA, 19 nt, Artificial Sequence
  Description of Artificial Sequence: Synthetic oligonucleotide
uuuacugugucguaugagg

SEQ ID NO: 109327 - RNA, 19 nt, Artificial Sequence
  Description of Artificial Sequence: Synthetic oligonucleotide
uuagauaaugcagagauac

SEQ ID NO: 109328 - RNA, 19 nt, Artificial Sequence
  Description of Artificial Sequence: Synthetic oligonucleotide
cagaauguaaaauaugggc

SEQ ID NO: 109329 - RNA, 19 nt, Artificial Sequence
  Description of Artificial Sequence: Synthetic oligonucleotide
ucccauauauauuagcagg

SEQ ID NO: 109330 - RNA, 19 nt, Artificial Sequence
  Description of Artificial Sequence: Synthetic oligonucleotide
uaagguugggauaacaccc

SEQ ID NO: 109331 - RNA, 19 nt, Artificial Sequence
  Description of Artificial Sequence: Synthetic oligonucleotide
acuuacuuuaaguaaaucu

SEQ ID NO: 109332 - RNA, 19 nt, Artificial Sequence
  Description of Artificial Sequence: Synthetic oligonucleotide
uccgauuuagauaaugcag

SEQ ID NO: 109333 - RNA, 19 nt, Artificial Sequence
  Description of Artificial Sequence: Synthetic oligonucleotide
ucagaauguaaaauauggg

SEQ ID NO: 109334 - RNA, 19 nt, Artificial Sequence
  Description of Artificial Sequence: Synthetic oligonucleotide
agacuaaugagugagcagc

SEQ ID NO: 109335 - RNA, 19 nt, Artificial Sequence
  Description of Artificial Sequence: Synthetic oligonucleotide
ucuagauguaaccacacac

SEQ ID NO: 109336 - RNA, 19 nt, Artificial Sequence
  Description of Artificial Sequence: Synthetic oligonucleotide
aauucgcaauugcuaaugc

SEQ ID NO: 109337 - RNA, 19 nt, Artificial Sequence
  Description of Artificial Sequence: Synthetic oligonucleotide
aucagaauguaaaauaugg

SEQ ID NO: 109338 - RNA, 19 nt, Artificial Sequence
  Description of Artificial Sequence: Synthetic oligonucleotide
uucgcaauugcuaaugccc

SEQ ID NO: 109339 - RNA, 19 nt, Artificial Sequence
  Description of Artificial Sequence: Synthetic oligonucleotide
uguaguaccaaguuuacau

SEQ ID NO: 109340 - RNA, 19 nt, Artificial Sequence
  Description of Artificial Sequence: Synthetic oligonucleotide
uguuauacugcacagcgac

SEQ ID NO: 109341 - RNA, 19 nt, Artificial Sequence
  Description of Artificial Sequence: Synthetic oligonucleotide
uuaguagaagacuaaugag

SEQ ID NO: 109342 - RNA, 19 nt, Artificial Sequence
  Description of Artificial Sequence: Synthetic oligonucleotide
ucuuauauccaucuagagu

SEQ ID NO: 109343 - RNA, 19 nt, Artificial Sequence
  Description of Artificial Sequence: Synthetic oligonucleotide
ugcagagauaccuauaucu

SEQ ID NO: 109344 - RNA, 19 nt, Artificial Sequence
  Description of Artificial Sequence: Synthetic oligonucleotide
uauauauuagcagggauca

SEQ ID NO: 109345 - RNA, 19 nt, Artificial Sequence
  Description of Artificial Sequence: Synthetic oligonucleotide
uggaacauuacacgcaugc

SEQ ID NO: 109346 - RNA, 19 nt, Artificial Sequence
  Description of Artificial Sequence: Synthetic oligonucleotide
ugaacaaucucuagcagac

SEQ ID NO: 109347 - RNA, 19 nt, Artificial Sequence
  Description of Artificial Sequence: Synthetic oligonucleotide
aaguuuacaucaucauagg

SEQ ID NO: 109348 - RNA, 19 nt, Artificial Sequence
  Description of Artificial Sequence: Synthetic oligonucleotide
ugagagacucuuaacaaug

SEQ ID NO: 109349 - RNA, 19 nt, Artificial Sequence
  Description of Artificial Sequence: Synthetic oligonucleotide
cauuaguccacuuauccag

SEQ ID NO: 109350 - RNA, 19 nt, Artificial Sequence
  Description of Artificial Sequence: Synthetic oligonucleotide
aaugcagagauaccuauau

SEQ ID NO: 109351 - RNA, 19 nt, Artificial Sequence
  Description of Artificial Sequence: Synthetic oligonucleotide
aacaagagcuucauucugc

SEQ ID NO: 109352 - RNA, 19 nt, Artificial Sequence
  Description of Artificial Sequence: Synthetic oligonucleotide
agaauuaugcaacauuagu

SEQ ID NO: 109353 - RNA, 19 nt, Artificial Sequence
  Description of Artificial Sequence: Synthetic oligonucleotide
uuacugugucguaugaggg

SEQ ID NO: 109354 - RNA, 19 nt, Artificial Sequence
  Description of Artificial Sequence: Synthetic oligonucleotide
uuuaucguguucuauuugu

SEQ ID NO: 109355 - RNA, 19 nt, Artificial Sequence
  Description of Artificial Sequence: Synthetic oligonucleotide
aaauugccuaaacaguuca

SEQ ID NO: 109356 - RNA, 19 nt, Artificial Sequence
  Description of Artificial Sequence: Synthetic oligonucleotide
ucauagggcuacaacaugc

SEQ ID NO: 109357 - RNA, 19 nt, Artificial Sequence
  Description of Artificial Sequence: Synthetic oligonucleotide
auaacacccauauugauua

SEQ ID NO: 109358 - RNA, 19 nt, Artificial Sequence
  Description of Artificial Sequence: Synthetic oligonucleotide
aucuauucaacucuaggca

SEQ ID NO: 109359 - RNA, 19 nt, Artificial Sequence
  Description of Artificial Sequence: Synthetic oligonucleotide
uacauguucacuaguugcc

SEQ ID NO: 109360 - RNA, 19 nt, Artificial Sequence
  Description of Artificial Sequence: Synthetic oligonucleotide
uguuuguacuagcaaacug

SEQ ID NO: 109361 - RNA, 19 nt, Artificial Sequence
  Description of Artificial Sequence: Synthetic oligonucleotide
aaauguaccggacuggcua

SEQ ID NO: 109362 - RNA, 19 nt, Artificial Sequence
  Description of Artificial Sequence: Synthetic oligonucleotide
gacaauugcuaguuaacug

SEQ ID NO: 109363 - RNA, 19 nt, Artificial Sequence
  Description of Artificial Sequence: Synthetic oligonucleotide
gauggagaacauugggugg

SEQ ID NO: 109364 - RNA, 19 nt, Artificial Sequence
  Description of Artificial Sequence: Synthetic oligonucleotide
caauaaguguagcacaagc

SEQ ID NO: 109365 - RNA, 19 nt, Artificial Sequence
  Description of Artificial Sequence: Synthetic oligonucleotide
uacaacaugcacauucuac

SEQ ID NO: 109366 - RNA, 19 nt, Artificial Sequence
  Description of Artificial Sequence: Synthetic oligonucleotide
aagccuaaugaagucuugc

SEQ ID NO: 109367 - RNA, 19 nt, Artificial Sequence
  Description of Artificial Sequence: Synthetic oligonucleotide
agccuaaugaagucuugcc

SEQ ID NO: 109368 - RNA, 19 nt, Artificial Sequence
  Description of Artificial Sequence: Synthetic oligonucleotide
aaacgcuccaccaauuuag

SEQ ID NO: 109369 - RNA, 19 nt, Artificial Sequence
  Description of Artificial Sequence: Synthetic oligonucleotide
aauguaaaauaugggcaag

SEQ ID NO: 109370 - RNA, 19 nt, Artificial Sequence
  Description of Artificial Sequence: Synthetic oligonucleotide
aauaaguguagcacaagca

SEQ ID NO: 109371 - RNA, 19 nt, Artificial Sequence
  Description of Artificial Sequence: Synthetic oligonucleotide
uucccauauauauuagcag

SEQ ID NO: 109372 - RNA, 19 nt, Artificial Sequence
  Description of Artificial Sequence: Synthetic oligonucleotide
agugguuaguggcagugac

SEQ ID NO: 109373 - RNA, 19 nt, Artificial Sequence
  Description of Artificial Sequence: Synthetic oligonucleotide
agacucuuaacaaugacug

SEQ ID NO: 109374 - RNA, 19 nt, Artificial Sequence
  Description of Artificial Sequence: Synthetic oligonucleotide
aaauucgcaauugcuaaug

SEQ ID NO: 109375 - RNA, 19 nt, Artificial Sequence
  Description of Artificial Sequence: Synthetic oligonucleotide
ugaagucuugccauguugu

SEQ ID NO: 109376 - RNA, 19 nt, Artificial Sequence
  Description of Artificial Sequence: Synthetic oligonucleotide
uuuaagcucggcagcauca

SEQ ID NO: 109377 - RNA, 19 nt, Artificial Sequence
  Description of Artificial Sequence: Synthetic oligonucleotide
ucuaacaucgaguccuggc

SEQ ID NO: 109378 - RNA, 19 nt, Artificial Sequence
  Description of Artificial Sequence: Synthetic oligonucleotide
uaagcuagacagauccugc

SEQ ID NO: 109379 - RNA, 19 nt, Artificial Sequence
  Description of Artificial Sequence: Synthetic oligonucleotide
uggagcuagaacuucaaaa

SEQ ID NO: 109380 - RNA, 19 nt, Artificial Sequence
  Description of Artificial Sequence: Synthetic oligonucleotide
auuagcagggaucaaacuu

SEQ ID NO: 109381 - RNA, 19 nt, Artificial Sequence
  Description of Artificial Sequence: Synthetic oligonucleotide
uaaguguagcacaagcagu

SEQ ID NO: 109382 - RNA, 19 nt, Artificial Sequence
  Description of Artificial Sequence: Synthetic oligonucleotide
auuacacgcaugcacaaga

SEQ ID NO: 109383 - RNA, 19 nt, Artificial Sequence
  Description of Artificial Sequence: Synthetic oligonucleotide
cucauuccuacaauaagug

SEQ ID NO: 109384 - RNA, 19 nt, Artificial Sequence
  Description of Artificial Sequence: Synthetic oligonucleotide
uuaauguagcucgagcgcc

SEQ ID NO: 109385 - RNA, 19 nt, Artificial Sequence
  Description of Artificial Sequence: Synthetic oligonucleotide
aguccgauuuagauaaugc

SEQ ID NO: 109386 - RNA, 19 nt, Artificial Sequence
  Description of Artificial Sequence: Synthetic oligonucleotide
uuuuaucguguucuauuug

SEQ ID NO: 109387 - RNA, 19 nt, Artificial Sequence
  Description of Artificial Sequence: Synthetic oligonucleotide
auaccuauaucuccuguug

SEQ ID NO: 109388 - RNA, 19 nt, Artificial Sequence
  Description of Artificial Sequence: Synthetic oligonucleotide
uuauucgauggaauccaag

SEQ ID NO: 109389 - RNA, 19 nt, Artificial Sequence
  Description of Artificial Sequence: Synthetic oligonucleotide
uaaguuuuagcgacccgug

SEQ ID NO: 109390 - RNA, 19 nt, Artificial Sequence
  Description of Artificial Sequence: Synthetic oligonucleotide
ucacuaguugccaugguaa

SEQ ID NO: 109391 - RNA, 19 nt, Artificial Sequence
  Description of Artificial Sequence: Synthetic oligonucleotide
gguaacuagaugcuuaaug

SEQ ID NO: 109392 - RNA, 19 nt, Artificial Sequence
  Description of Artificial Sequence: Synthetic oligonucleotide
aauuucacuaagguuggga

SEQ ID NO: 109393 - RNA, 19 nt, Artificial Sequence
  Description of Artificial Sequence: Synthetic oligonucleotide
aacuagaugcuuaaugcca

SEQ ID NO: 109394 - RNA, 19 nt, Artificial Sequence
  Description of Artificial Sequence: Synthetic oligonucleotide
auauggacagaauuaugca

SEQ ID NO: 109395 - RNA, 19 nt, Artificial Sequence
  Description of Artificial Sequence: Synthetic oligonucleotide
cagagauaccuauaucucc

SEQ ID NO: 109396 - RNA, 19 nt, Artificial Sequence
  Description of Artificial Sequence: Synthetic oligonucleotide
cuguacucaauuuuccuug

SEQ ID NO: 109397 - RNA, 19 nt, Artificial Sequence
  Description of Artificial Sequence: Synthetic oligonucleotide
auuacaaucugugcaccac

SEQ ID NO: 109398 - RNA, 19 nt, Artificial Sequence
  Description of Artificial Sequence: Synthetic oligonucleotide
uguucucaugacuucgaag

SEQ ID NO: 109399 - RNA, 19 nt, Artificial Sequence
  Description of Artificial Sequence: Synthetic oligonucleotide
acuaagguugggauaacac

SEQ ID NO: 109400 - RNA, 19 nt, Artificial Sequence
  Description of Artificial Sequence: Synthetic oligonucleotide
cagggaucaaacuugggug

SEQ ID NO: 109401 - RNA, 19 nt, Artificial Sequence
  Description of Artificial Sequence: Synthetic oligonucleotide
ucgguguagagucuguaca

SEQ ID NO: 109402 - RNA, 19 nt, Artificial Sequence
  Description of Artificial Sequence: Synthetic oligonucleotide
gaguauugaaucuauucaa

SEQ ID NO: 109403 - RNA, 19 nt, Artificial Sequence
  Description of Artificial Sequence: Synthetic oligonucleotide
gucguaugagggcagagag

SEQ ID NO: 109404 - RNA, 19 nt, Artificial Sequence
  Description of Artificial Sequence: Synthetic oligonucleotide
uuauuaggcagguaccuau

SEQ ID NO: 109405 - RNA, 19 nt, Artificial Sequence
  Description of Artificial Sequence: Synthetic oligonucleotide
aaaauucgcaauugcuaau

SEQ ID NO: 109406 - RNA, 19 nt, Artificial Sequence
  Description of Artificial Sequence: Synthetic oligonucleotide
aucaacuauggguggagag

SEQ ID NO: 109407 - RNA, 19 nt, Artificial Sequence
  Description of Artificial Sequence: Synthetic oligonucleotide
aacaucgaguccuggcuug

SEQ ID NO: 109408 - RNA, 19 nt, Artificial Sequence
  Description of Artificial Sequence: Synthetic oligonucleotide
uuauuacauguucacuagu

SEQ ID NO: 109409 - RNA, 19 nt, Artificial Sequence
  Description of Artificial Sequence: Synthetic oligonucleotide
acccguguuggacaauugc

SEQ ID NO: 109410 - RNA, 19 nt, Artificial Sequence
  Description of Artificial Sequence: Synthetic oligonucleotide
cuuaaauggucaauuacaa

SEQ ID NO: 109411 - RNA, 19 nt, Artificial Sequence
  Description of Artificial Sequence: Synthetic oligonucleotide
gguugaaacauauggcaag

SEQ ID NO: 109412 - RNA, 19 nt, Artificial Sequence
  Description of Artificial Sequence: Synthetic oligonucleotide
ucgcaauugcuaaugcccc

SEQ ID NO: 109413 - RNA, 19 nt, Artificial Sequence
  Description of Artificial Sequence: Synthetic oligonucleotide
acacgcaugcacaagagag

SEQ ID NO: 109414 - RNA, 19 nt, Artificial Sequence
  Description of Artificial Sequence: Synthetic oligonucleotide
gguggagagaucuuauuag

SEQ ID NO: 109415 - RNA, 19 nt, Artificial Sequence
  Description of Artificial Sequence: Synthetic oligonucleotide
uuacacgcaugcacaagag

SEQ ID NO: 109416 - RNA, 19 nt, Artificial Sequence
  Description of Artificial Sequence: Synthetic oligonucleotide
ugguuauucgauggaaucc

SEQ ID NO: 109417 - RNA, 19 nt, Artificial Sequence
  Description of Artificial Sequence: Synthetic oligonucleotide
acaagcuuacaucuucaug

SEQ ID NO: 109418 - RNA, 19 nt, Artificial Sequence
  Description of Artificial Sequence: Synthetic oligonucleotide
guuaguggcagugacgagc

SEQ ID NO: 109419 - RNA, 19 nt, Artificial Sequence
  Description of Artificial Sequence: Synthetic oligonucleotide
aauuuaccaguacauuguu

SEQ ID NO: 109420 - RNA, 19 nt, Artificial Sequence
  Description of Artificial Sequence: Synthetic oligonucleotide
ugcuaguuaacugauggaa

SEQ ID NO: 109421 - RNA, 19 nt, Artificial Sequence
  Description of Artificial Sequence: Synthetic oligonucleotide
auuaggcagguaccuauag

SEQ ID NO: 109422 - RNA, 19 nt, Artificial Sequence
  Description of Artificial Sequence: Synthetic oligonucleotide
acuagaugcuuaaugccac

SEQ ID NO: 109423 - RNA, 19 nt, Artificial Sequence
  Description of Artificial Sequence: Synthetic oligonucleotide
ugguugaaacauauggcaa

SEQ ID NO: 109424 - RNA, 19 nt, Artificial Sequence
  Description of Artificial Sequence: Synthetic oligonucleotide
uccaucuagaguagcacaa

SEQ ID NO: 109425 - RNA, 19 nt, Artificial Sequence
  Description of Artificial Sequence: Synthetic oligonucleotide
auagggcuacaacaugcac

SEQ ID NO: 109426 - RNA, 19 nt, Artificial Sequence
  Description of Artificial Sequence: Synthetic oligonucleotide
uagaguuauauuugauuuc

SEQ ID NO: 109427 - RNA, 19 nt, Artificial Sequence
  Description of Artificial Sequence: Synthetic oligonucleotide
uagcagggaucaaacuugg

SEQ ID NO: 109428 - RNA, 19 nt, Artificial Sequence
  Description of Artificial Sequence: Synthetic oligonucleotide
agucugugagauuacugug

SEQ ID NO: 109429 - RNA, 19 nt, Artificial Sequence
  Description of Artificial Sequence: Synthetic oligonucleotide
uugguacuggaacauuaca

SEQ ID NO: 109430 - RNA, 19 nt, Artificial Sequence
  Description of Artificial Sequence: Synthetic oligonucleotide
auauuugauuucuggggca

SEQ ID NO: 109431 - RNA, 19 nt, Artificial Sequence
  Description of Artificial Sequence: Synthetic oligonucleotide
uucgguugguacuggaaca

SEQ ID NO: 109432 - RNA, 19 nt, Artificial Sequence
  Description of Artificial Sequence: Synthetic oligonucleotide
ucuuuacucgacucgaguu

SEQ ID NO: 109433 - RNA, 19 nt, Artificial Sequence
  Description of Artificial Sequence: Synthetic oligonucleotide
ucucugugaccccagcuga

SEQ ID NO: 109434 - RNA, 19 nt, Artificial Sequence
  Description of Artificial Sequence: Synthetic oligonucleotide
uucuagauguaaccacaca

SEQ ID NO: 109435 - RNA, 19 nt, Artificial Sequence
  Description of Artificial Sequence: Synthetic oligonucleotide
aguaaguuuuagcgacccg

SEQ ID NO: 109436 - RNA, 19 nt, Artificial Sequence
  Description of Artificial Sequence: Synthetic oligonucleotide
aguccacuuauccagccca

SEQ ID NO: 109437 - RNA, 19 nt, Artificial Sequence
  Description of Artificial Sequence: Synthetic oligonucleotide
aaguuuuagcgacccgugu

SEQ ID NO: 109438 - RNA, 19 nt, Artificial Sequence
  Description of Artificial Sequence: Synthetic oligonucleotide
cauugcuauaguucaucag

SEQ ID NO: 109439 - RNA, 19 nt, Artificial Sequence
  Description of Artificial Sequence: Synthetic oligonucleotide
caaacuguucuuuacucga

SEQ ID NO: 109440 - RNA, 19 nt, Artificial Sequence
  Description of Artificial Sequence: Synthetic oligonucleotide
uacugugucguaugagggc

SEQ ID NO: 109441 - RNA, 19 nt, Artificial Sequence
  Description of Artificial Sequence: Synthetic oligonucleotide
guuucuaacaucgaguccu

SEQ ID NO: 109442 - RNA, 19 nt, Artificial Sequence
  Description of Artificial Sequence: Synthetic oligonucleotide
uuaguccacuuauccagcc

SEQ ID NO: 109443 - RNA, 19 nt, Artificial Sequence
  Description of Artificial Sequence: Synthetic oligonucleotide
cuuuacucgacucgaguuc

SEQ ID NO: 109444 - RNA, 19 nt, Artificial Sequence
  Description of Artificial Sequence: Synthetic oligonucleotide
cauuccuggcaaaauucgc

SEQ ID NO: 109445 - RNA, 19 nt, Artificial Sequence
  Description of Artificial Sequence: Synthetic oligonucleotide
ugcuaaugccccagcaagc

SEQ ID NO: 109446 - RNA, 19 nt, Artificial Sequence
  Description of Artificial Sequence: Synthetic oligonucleotide
uacucaauuuuccuugguu

SEQ ID NO: 109447 - RNA, 19 nt, Artificial Sequence
  Description of Artificial Sequence: Synthetic oligonucleotide
aaguccgauuuagauaaug

SEQ ID NO: 109448 - RNA, 19 nt, Artificial Sequence
  Description of Artificial Sequence: Synthetic oligonucleotide
cuucgguugguacuggaac

SEQ ID NO: 109449 - RNA, 19 nt, Artificial Sequence
  Description of Artificial Sequence: Synthetic oligonucleotide
auauugauuagcugagcuu

SEQ ID NO: 109450 - RNA, 19 nt, Artificial Sequence
  Description of Artificial Sequence: Synthetic oligonucleotide
gcaaacuguucuuuacucg

SEQ ID NO: 109451 - RNA, 19 nt, Artificial Sequence
  Description of Artificial Sequence: Synthetic oligonucleotide
ugaauaguuuuaccagcuc

SEQ ID NO: 109452 - RNA, 19 nt, Artificial Sequence
  Description of Artificial Sequence: Synthetic oligonucleotide
ugagaagccuaaugaaguc

SEQ ID NO: 109453 - RNA, 19 nt, Artificial Sequence
  Description of Artificial Sequence: Synthetic oligonucleotide
ucuaauuuaccaguacauu

SEQ ID NO: 109454 - RNA, 19 nt, Artificial Sequence
  Description of Artificial Sequence: Synthetic oligonucleotide
gcuaggguuucuuuaaccc

SEQ ID NO: 109455 - RNA, 19 nt, Artificial Sequence
  Description of Artificial Sequence: Synthetic oligonucleotide
acagcgaccuuaaaugguc

SEQ ID NO: 109456 - RNA, 19 nt, Artificial Sequence
  Description of Artificial Sequence: Synthetic oligonucleotide
aucuauuaacauucuuagu

SEQ ID NO: 109457 - RNA, 19 nt, Artificial Sequence
  Description of Artificial Sequence: Synthetic oligonucleotide
acgagcacacuacauuuug

SEQ ID NO: 109458 - RNA, 19 nt, Artificial Sequence
  Description of Artificial Sequence: Synthetic oligonucleotide
agagauaccuauaucuccu

SEQ ID NO: 109459 - RNA, 19 nt, Artificial Sequence
  Description of Artificial Sequence: Synthetic oligonucleotide
gcuauaguucaucagcaug

SEQ ID NO: 109460 - RNA, 19 nt, Artificial Sequence
  Description of Artificial Sequence: Synthetic oligonucleotide
aauugccuaaacaguucag

SEQ ID NO: 109461 - RNA, 19 nt, Artificial Sequence
  Description of Artificial Sequence: Synthetic oligonucleotide
ugacgagcacacuacauuu

SEQ ID NO: 109462 - RNA, 19 nt, Artificial Sequence
  Description of Artificial Sequence: Synthetic oligonucleotide
agauugugugucaaagcuc

SEQ ID NO: 109463 - RNA, 19 nt, Artificial Sequence
  Description of Artificial Sequence: Synthetic oligonucleotide
uauuugauuucuggggcac

SEQ ID NO: 109464 - RNA, 19 nt, Artificial Sequence
  Description of Artificial Sequence: Synthetic oligonucleotide
cucggcggaacccaauucc

SEQ ID NO: 109465 - RNA, 19 nt, Artificial Sequence
  Description of Artificial Sequence: Synthetic oligonucleotide
gauuuacugugucguauga

SEQ ID NO: 109466 - RNA, 19 nt, Artificial Sequence
  Description of Artificial Sequence: Synthetic oligonucleotide
gugguuauucgauggaauc

SEQ ID NO: 109467 - RNA, 19 nt, Artificial Sequence
  Description of Artificial Sequence: Synthetic oligonucleotide
ucgagcgccagggauacag

SEQ ID NO: 109468 - RNA, 19 nt, Artificial Sequence
  Description of Artificial Sequence: Synthetic oligonucleotide
uccucgacgugucugucga

SEQ ID NO: 109469 - RNA, 19 nt, Artificial Sequence
  Description of Artificial Sequence: Synthetic oligonucleotide
guaguaccaaguuuacauc

SEQ ID NO: 109470 - RNA, 19 nt, Artificial Sequence
  Description of Artificial Sequence: Synthetic oligonucleotide
aguuuuagcgacccguguu

SEQ ID NO: 109471 - RNA, 19 nt, Artificial Sequence
  Description of Artificial Sequence: Synthetic oligonucleotide
guccgauuuagauaaugca

SEQ ID NO: 109472 - RNA, 19 nt, Artificial Sequence
  Description of Artificial Sequence: Synthetic oligonucleotide
uaucguguucuauuuguuu

SEQ ID NO: 109473 - RNA, 19 nt, Artificial Sequence
  Description of Artificial Sequence: Synthetic oligonucleotide
caagaagguuucuaacauc

SEQ ID NO: 109474 - RNA, 19 nt, Artificial Sequence
  Description of Artificial Sequence: Synthetic oligonucleotide
aucagugggaauugcuagu

SEQ ID NO: 109475 - RNA, 19 nt, Artificial Sequence
  Description of Artificial Sequence: Synthetic oligonucleotide
ucgacucgaguucugcuaa

SEQ ID NO: 109476 - RNA, 19 nt, Artificial Sequence
  Description of Artificial Sequence: Synthetic oligonucleotide
agauaccuauaucuccugu

SEQ ID NO: 109477 - RNA, 19 nt, Artificial Sequence
  Description of Artificial Sequence: Synthetic oligonucleotide
aauaagcuagacagauccu

SEQ ID NO: 109478 - RNA, 19 nt, Artificial Sequence
  Description of Artificial Sequence: Synthetic oligonucleotide
gacuaaugagugagcagcc

SEQ ID NO: 109479 - RNA, 19 nt, Artificial Sequence
  Description of Artificial Sequence: Synthetic oligonucleotide
cuauaucuccuguugggga

SEQ ID NO: 109480 - RNA, 19 nt, Artificial Sequence
  Description of Artificial Sequence: Synthetic oligonucleotide
agacacucuaccaaaccug

SEQ ID NO: 109481 - RNA, 19 nt, Artificial Sequence
  Description of Artificial Sequence: Synthetic oligonucleotide
aggaccauagaguuauauu

SEQ ID NO: 109482 - RNA, 19 nt, Artificial Sequence
  Description of Artificial Sequence: Synthetic oligonucleotide
uuaucguguucuauuuguu

SEQ ID NO: 109483 - RNA, 19 nt, Artificial Sequence
  Description of Artificial Sequence: Synthetic oligonucleotide
aauguagcucgagcgccag

SEQ ID NO: 109484 - RNA, 19 nt, Artificial Sequence
  Description of Artificial Sequence: Synthetic oligonucleotide
ugucacuauccaccgucug

SEQ ID NO: 109485 - RNA, 19 nt, Artificial Sequence
  Description of Artificial Sequence: Synthetic oligonucleotide
uuagcgacccguguuggac

SEQ ID NO: 109486 - RNA, 19 nt, Artificial Sequence
  Description of Artificial Sequence: Synthetic oligonucleotide
acaauaaguguagcacaag

SEQ ID NO: 109487 - RNA, 19 nt, Artificial Sequence
  Description of Artificial Sequence: Synthetic oligonucleotide
ugucguaugagggcagaga

SEQ ID NO: 109488 - RNA, 19 nt, Artificial Sequence
  Description of Artificial Sequence: Synthetic oligonucleotide
uauuaggcagguaccuaua

SEQ ID NO: 109489 - RNA, 19 nt, Artificial Sequence
  Description of Artificial Sequence: Synthetic oligonucleotide
gaauugcuagucagguuug

SEQ ID NO: 109490 - RNA, 19 nt, Artificial Sequence
  Description of Artificial Sequence: Synthetic oligonucleotide
guagaagacuaaugaguga

SEQ ID NO: 109491 - RNA, 19 nt, Artificial Sequence
  Description of Artificial Sequence: Synthetic oligonucleotide
cuagaguagcacaauauau

SEQ ID NO: 109492 - RNA, 19 nt, Artificial Sequence
  Description of Artificial Sequence: Synthetic oligonucleotide
ucggcggaacccaauucca

SEQ ID NO: 109493 - RNA, 19 nt, Artificial Sequence
  Description of Artificial Sequence: Synthetic oligonucleotide
cuacaaucccacugucuac

SEQ ID NO: 109494 - RNA, 19 nt, Artificial Sequence
  Description of Artificial Sequence: Synthetic oligonucleotide
aucgaguccuggcuugcag

SEQ ID NO: 109495 - RNA, 19 nt, Artificial Sequence
  Description of Artificial Sequence: Synthetic oligonucleotide
gcuaguuaacugauggaag

SEQ ID NO: 109496 - RNA, 19 nt, Artificial Sequence
  Description of Artificial Sequence: Synthetic oligonucleotide
ugguagugguuaguggcag

SEQ ID NO: 109497 - RNA, 19 nt, Artificial Sequence
  Description of Artificial Sequence: Synthetic oligonucleotide
gagacucuuaacaaugacu

SEQ ID NO: 109498 - RNA, 19 nt, Artificial Sequence
  Description of Artificial Sequence: Synthetic oligonucleotide
aagguugggauaacaccca

SEQ ID NO: 109499 - RNA, 19 nt, Artificial Sequence
  Description of Artificial Sequence: Synthetic oligonucleotide
ucucaugacuucgaaguuu

SEQ ID NO: 109500 - RNA, 19 nt, Artificial Sequence
  Description of Artificial Sequence: Synthetic oligonucleotide
cuucgcaccacucaaccaa

SEQ ID NO: 109501 - RNA, 19 nt, Artificial Sequence
  Description of Artificial Sequence: Synthetic oligonucleotide
aauugcuagucagguuugu

SEQ ID NO: 109502 - RNA, 19 nt, Artificial Sequence
  Description of Artificial Sequence: Synthetic oligonucleotide
cuguugggcaacacuuuug

SEQ ID NO: 109503 - RNA, 19 nt, Artificial Sequence
  Description of Artificial Sequence: Synthetic oligonucleotide
uucuaacaucgaguccugg

SEQ ID NO: 109504 - RNA, 19 nt, Artificial Sequence
  Description of Artificial Sequence: Synthetic oligonucleotide
uuuagcgacccguguugga

SEQ ID NO: 109505 - RNA, 19 nt, Artificial Sequence
  Description of Artificial Sequence: Synthetic oligonucleotide
aucuagaguagcacaauau

SEQ ID NO: 109506 - RNA, 19 nt, Artificial Sequence
  Description of Artificial Sequence: Synthetic oligonucleotide
accggacuggcuacuaugg

SEQ ID NO: 109507 - RNA, 19 nt, Artificial Sequence
  Description of Artificial Sequence: Synthetic oligonucleotide
guaaguuuuagcgacccgu

SEQ ID NO: 109508 - RNA, 19 nt, Artificial Sequence
  Description of Artificial Sequence: Synthetic oligonucleotide
gacagucaagagcuucuca

SEQ ID NO: 109509 - RNA, 19 nt, Artificial Sequence
  Description of Artificial Sequence: Synthetic oligonucleotide
gucgguguagagucuguac

SEQ ID NO: 109510 - RNA, 19 nt, Artificial Sequence
  Description of Artificial Sequence: Synthetic oligonucleotide
gaccuuaaauggucaauua

SEQ ID NO: 109511 - RNA, 19 nt, Artificial Sequence
  Description of Artificial Sequence: Synthetic oligonucleotide
agcuggugguuauucgaug

SEQ ID NO: 109512 - RNA, 19 nt, Artificial Sequence
  Description of Artificial Sequence: Synthetic oligonucleotide
cauucuacuuaauguagcu

SEQ ID NO: 109513 - RNA, 19 nt, Artificial Sequence
  Description of Artificial Sequence: Synthetic oligonucleotide
cauagggcuacaacaugca

SEQ ID NO: 109514 - RNA, 19 nt, Artificial Sequence
  Description of Artificial Sequence: Synthetic oligonucleotide
cacuugguagugguuagug

SEQ ID NO: 109515 - RNA, 19 nt, Artificial Sequence
  Description of Artificial Sequence: Synthetic oligonucleotide
ccgauuuagauaaugcaga

SEQ ID NO: 109516 - RNA, 19 nt, Artificial Sequence
  Description of Artificial Sequence: Synthetic oligonucleotide
acaucgaguccuggcuugc

SEQ ID NO: 109517 - RNA, 19 nt, Artificial Sequence
  Description of Artificial Sequence: Synthetic oligonucleotide
ucauggcuaucguagcaua

SEQ ID NO: 109518 - RNA, 19 nt, Artificial Sequence
  Description of Artificial Sequence: Synthetic oligonucleotide
gguuauucgauggaaucca

SEQ ID NO: 109519 - RNA, 19 nt, Artificial Sequence
  Description of Artificial Sequence: Synthetic oligonucleotide
gaagccuaaugaagucuug

SEQ ID NO: 109520 - RNA, 19 nt, Artificial Sequence
  Description of Artificial Sequence: Synthetic oligonucleotide
cucgacgugucugucgagc

SEQ ID NO: 109521 - RNA, 19 nt, Artificial Sequence
  Description of Artificial Sequence: Synthetic oligonucleotide
aacuauggguggagagauc

SEQ ID NO: 109522 - RNA, 19 nt, Artificial Sequence
  Description of Artificial Sequence: Synthetic oligonucleotide
cuaacaucgaguccuggcu

SEQ ID NO: 109523 - RNA, 19 nt, Artificial Sequence
  Description of Artificial Sequence: Synthetic oligonucleotide
aaugggccugacauuagua

SEQ ID NO: 109524 - RNA, 19 nt, Artificial Sequence
  Description of Artificial Sequence: Synthetic oligonucleotide
uacucgacucgaguucugc

SEQ ID NO: 109525 - RNA, 19 nt, Artificial Sequence
  Description of Artificial Sequence: Synthetic oligonucleotide
gauaccuauaucuccuguu

SEQ ID NO: 109526 - RNA, 19 nt, Artificial Sequence
  Description of Artificial Sequence: Synthetic oligonucleotide
guccucgacgugucugucg

SEQ ID NO: 109527 - RNA, 19 nt, Artificial Sequence
  Description of Artificial Sequence: Synthetic oligonucleotide
cugcgugcugcacagucac

SEQ ID NO: 109528 - RNA, 19 nt, Artificial Sequence
  Description of Artificial Sequence: Synthetic oligonucleotide
acucaaccaaacgcuccac

SEQ ID NO: 109529 - RNA, 19 nt, Artificial Sequence
  Description of Artificial Sequence: Synthetic oligonucleotide
ucucggcggaacccaauuc

SEQ ID NO: 109530 - RNA, 19 nt, Artificial Sequence
  Description of Artificial Sequence: Synthetic oligonucleotide
cugcauuguggcaguggcc

SEQ ID NO: 109531 - RNA, 19 nt, Artificial Sequence
  Description of Artificial Sequence: Synthetic oligonucleotide
cauauauauuagcagggau

SEQ ID NO: 109532 - RNA, 19 nt, Artificial Sequence
  Description of Artificial Sequence: Synthetic oligonucleotide
gcaucuauuaacauucuua

SEQ ID NO: 109533 - RNA, 19 nt, Artificial Sequence
  Description of Artificial Sequence: Synthetic oligonucleotide
uuauggguggagacuuguu

SEQ ID NO: 109534 - RNA, 19 nt, Artificial Sequence
  Description of Artificial Sequence: Synthetic oligonucleotide
uuacucgacucgaguucug

SEQ ID NO: 109535 - RNA, 19 nt, Artificial Sequence
  Description of Artificial Sequence: Synthetic oligonucleotide
guacaagcuuagcacuuuc

SEQ ID NO: 109536 - RNA, 19 nt, Artificial Sequence
  Description of Artificial Sequence: Synthetic oligonucleotide
ccuauaucuccuguugggg

SEQ ID NO: 109537 - RNA, 19 nt, Artificial Sequence
  Description of Artificial Sequence: Synthetic oligonucleotide
uucucggcggaacccaauu

SEQ ID NO: 109538 - RNA, 19 nt, Artificial Sequence
  Description of Artificial Sequence: Synthetic oligonucleotide
uagcgacccguguuggaca

SEQ ID NO: 109539 - RNA, 19 nt, Artificial Sequence
  Description of Artificial Sequence: Synthetic oligonucleotide
aagcaccccuuuggaacac

SEQ ID NO: 109540 - RNA, 19 nt, Artificial Sequence
  Description of Artificial Sequence: Synthetic oligonucleotide
ggucaacugcacuucugcc

SEQ ID NO: 109541 - RNA, 19 nt, Artificial Sequence
  Description of Artificial Sequence: Synthetic oligonucleotide
ggcuucgcaccacucaacc

SEQ ID NO: 109542 - RNA, 19 nt, Artificial Sequence
  Description of Artificial Sequence: Synthetic oligonucleotide
ugagauuacugugguucuc

SEQ ID NO: 109543 - RNA, 19 nt, Artificial Sequence
  Description of Artificial Sequence: Synthetic oligonucleotide
uucccuuauuuggccauca

SEQ ID NO: 109544 - RNA, 19 nt, Artificial Sequence
  Description of Artificial Sequence: Synthetic oligonucleotide
uugaaacauauggcaagua

SEQ ID NO: 109545 - RNA, 19 nt, Artificial Sequence
  Description of Artificial Sequence: Synthetic oligonucleotide
cucuuaacaaugacugcua

SEQ ID NO: 109546 - RNA, 19 nt, Artificial Sequence
  Description of Artificial Sequence: Synthetic oligonucleotide
gaacauuggguggucagcu

SEQ ID NO: 109547 - RNA, 19 nt, Artificial Sequence
  Description of Artificial Sequence: Synthetic oligonucleotide
cacucaaccaaacgcucca

SEQ ID NO: 109548 - RNA, 19 nt, Artificial Sequence
  Description of Artificial Sequence: Synthetic oligonucleotide
ugugucguaugagggcaga

SEQ ID NO: 109549 - RNA, 19 nt, Artificial Sequence
  Description of Artificial Sequence: Synthetic oligonucleotide
aaaugcgacaagacacauu

SEQ ID NO: 109550 - RNA, 19 nt, Artificial Sequence
  Description of Artificial Sequence: Synthetic oligonucleotide
uuaagcucggcagcaucau

SEQ ID NO: 109551 - RNA, 19 nt, Artificial Sequence
  Description of Artificial Sequence: Synthetic oligonucleotide
ucgguugguacuggaacau

SEQ ID NO: 109552 - RNA, 19 nt, Artificial Sequence
  Description of Artificial Sequence: Synthetic oligonucleotide
auguagcucgagcgccagg

SEQ ID NO: 109553 - RNA, 19 nt, Artificial Sequence
  Description of Artificial Sequence: Synthetic oligonucleotide
uagugguuaguggcaguga

SEQ ID NO: 109554 - RNA, 19 nt, Artificial Sequence
  Description of Artificial Sequence: Synthetic oligonucleotide
cacaaugggccugacauua

SEQ ID NO: 109555 - RNA, 19 nt, Artificial Sequence
  Description of Artificial Sequence: Synthetic oligonucleotide
gcaauguuuguacuagcaa

SEQ ID NO: 109556 - RNA, 19 nt, Artificial Sequence
  Description of Artificial Sequence: Synthetic oligonucleotide
agcgaccuuaaauggucaa

SEQ ID NO: 109557 - RNA, 19 nt, Artificial Sequence
  Description of Artificial Sequence: Synthetic oligonucleotide
uugggauaacacccauauu

SEQ ID NO: 109558 - RNA, 19 nt, Artificial Sequence
  Description of Artificial Sequence: Synthetic oligonucleotide
cuggcggggucuguuauac

SEQ ID NO: 109559 - RNA, 19 nt, Artificial Sequence
  Description of Artificial Sequence: Synthetic oligonucleotide
cuggaacauuacacgcaug

SEQ ID NO: 109560 - RNA, 19 nt, Artificial Sequence
  Description of Artificial Sequence: Synthetic oligonucleotide
ugaccccagcugauaacau

SEQ ID NO: 109561 - RNA, 19 nt, Artificial Sequence
  Description of Artificial Sequence: Synthetic oligonucleotide
uuucucggcggaacccaau

SEQ ID NO: 109562 - RNA, 19 nt, Artificial Sequence
  Description of Artificial Sequence: Synthetic oligonucleotide
agugacgagcacacuacau

SEQ ID NO: 109563 - RNA, 19 nt, Artificial Sequence
  Description of Artificial Sequence: Synthetic oligonucleotide
caggaguuugaacuggacu

SEQ ID NO: 109564 - RNA, 19 nt, Artificial Sequence
  Description of Artificial Sequence: Synthetic oligonucleotide
gugagauuacugugguucu

SEQ ID NO: 109565 - RNA, 19 nt, Artificial Sequence
  Description of Artificial Sequence: Synthetic oligonucleotide
ggguggagagaucuuauua

SEQ ID NO: 109566 - RNA, 19 nt, Artificial Sequence
  Description of Artificial Sequence: Synthetic oligonucleotide
agacuuguuuggacaguug

SEQ ID NO: 109567 - RNA, 19 nt, Artificial Sequence
  Description of Artificial Sequence: Synthetic oligonucleotide
caguaauuucacuaagguu

SEQ ID NO: 109568 - RNA, 19 nt, Artificial Sequence
  Description of Artificial Sequence: Synthetic oligonucleotide
cucgacucgaguucugcua

SEQ ID NO: 109569 - RNA, 19 nt, Artificial Sequence
  Description of Artificial Sequence: Synthetic oligonucleotide
uaaccccuuuguucugauc

SEQ ID NO: 109570 - RNA, 19 nt, Artificial Sequence
  Description of Artificial Sequence: Synthetic oligonucleotide
uucccguccucgacguguc

SEQ ID NO: 109571 - RNA, 19 nt, Artificial Sequence
  Description of Artificial Sequence: Synthetic oligonucleotide
aguuuggauacaacaucua

SEQ ID NO: 109572 - RNA, 19 nt, Artificial Sequence
  Description of Artificial Sequence: Synthetic oligonucleotide
gugacgagcacacuacauu

SEQ ID NO: 109573 - RNA, 19 nt, Artificial Sequence
  Description of Artificial Sequence: Synthetic oligonucleotide
ccaguaauuucacuaaggu

SEQ ID NO: 109574 - RNA, 19 nt, Artificial Sequence
  Description of Artificial Sequence: Synthetic oligonucleotide
agcgacccguguuggacaa

SEQ ID NO: 109575 - RNA, 19 nt, Artificial Sequence
  Description of Artificial Sequence: Synthetic oligonucleotide
ugguaacuagaugcuuaau

SEQ ID NO: 109576 - RNA, 19 nt, Artificial Sequence
  Description of Artificial Sequence: Synthetic oligonucleotide
guccacuuauccagcccag

SEQ ID NO: 109577 - RNA, 19 nt, Artificial Sequence
  Description of Artificial Sequence: Synthetic oligonucleotide
guuauucgauggaauccaa

SEQ ID NO: 109578 - RNA, 19 nt, Artificial Sequence
  Description of Artificial Sequence: Synthetic oligonucleotide
guuggacaauugcuaguua

SEQ ID NO: 109579 - RNA, 19 nt, Artificial Sequence
  Description of Artificial Sequence: Synthetic oligonucleotide
cagucaagagcuucucacu

SEQ ID NO: 109580 - RNA, 19 nt, Artificial Sequence
  Description of Artificial Sequence: Synthetic oligonucleotide
uguaccggacuggcuacua

SEQ ID NO: 109581 - RNA, 19 nt, Artificial Sequence
  Description of Artificial Sequence: Synthetic oligonucleotide
uauccaccgucugcugaac

SEQ ID NO: 109582 - RNA, 19 nt, Artificial Sequence
  Description of Artificial Sequence: Synthetic oligonucleotide
cacagcgaccuuaaauggu

SEQ ID NO: 109583 - RNA, 19 nt, Artificial Sequence
  Description of Artificial Sequence: Synthetic oligonucleotide
guuauggguggagacuugu

SEQ ID NO: 109584 - RNA, 19 nt, Artificial Sequence
  Description of Artificial Sequence: Synthetic oligonucleotide
auggaaugagaagccuaau

SEQ ID NO: 109585 - RNA, 19 nt, Artificial Sequence
  Description of Artificial Sequence: Synthetic oligonucleotide
gcaugcuaggguuucuuua

SEQ ID NO: 109586 - RNA, 19 nt, Artificial Sequence
  Description of Artificial Sequence: Synthetic oligonucleotide
aaaguccgauuuagauaau

SEQ ID NO: 109587 - RNA, 19 nt, Artificial Sequence
  Description of Artificial Sequence: Synthetic oligonucleotide
cuugugcaucuauuaacau

SEQ ID NO: 109588 - RNA, 19 nt, Artificial Sequence
  Description of Artificial Sequence: Synthetic oligonucleotide
acacucuaccaaaccugcu

SEQ ID NO: 109589 - RNA, 19 nt, Artificial Sequence
  Description of Artificial Sequence: Synthetic oligonucleotide
guagcucgagcgccaggga

SEQ ID NO: 109590 - RNA, 19 nt, Artificial Sequence
  Description of Artificial Sequence: Synthetic oligonucleotide
gcuguacucaauuuuccuu

SEQ ID NO: 109591 - RNA, 19 nt, Artificial Sequence
  Description of Artificial Sequence: Synthetic oligonucleotide
guucccuuauuuggccauc

SEQ ID NO: 109592 - RNA, 19 nt, Artificial Sequence
  Description of Artificial Sequence: Synthetic oligonucleotide
gggaaucauucucauugcu

SEQ ID NO: 109593 - RNA, 19 nt, Artificial Sequence
  Description of Artificial Sequence: Synthetic oligonucleotide
cauggcuaucguagcauau

SEQ ID NO: 109594 - RNA, 19 nt, Artificial Sequence
  Description of Artificial Sequence: Synthetic oligonucleotide
cagguaccuauagaguucu

SEQ ID NO: 109595 - RNA, 19 nt, Artificial Sequence
  Description of Artificial Sequence: Synthetic oligonucleotide
guucccguccucgacgugu

SEQ ID NO: 109596 - RNA, 19 nt, Artificial Sequence
  Description of Artificial Sequence: Synthetic oligonucleotide
gcauuauuacauguucacu

SEQ ID NO: 109597 - RNA, 19 nt, Artificial Sequence
  Description of Artificial Sequence: Synthetic oligonucleotide
gacugcuaugaggccaucu

SEQ ID NO: 109598 - RNA, 19 nt, Artificial Sequence
  Description of Artificial Sequence: Synthetic oligonucleotide
gcggggucuguuauacugc

SEQ ID NO: 109599 - RNA, 19 nt, Artificial Sequence
  Description of Artificial Sequence: Synthetic oligonucleotide
agcucgagcgccagggaua

SEQ ID NO: 109600 - RNA, 19 nt, Artificial Sequence
  Description of Artificial Sequence: Synthetic oligonucleotide
auguaccggacuggcuacu

SEQ ID NO: 109601 - RNA, 19 nt, Artificial Sequence
  Description of Artificial Sequence: Synthetic oligonucleotide
uggcggggucuguuauacu

SEQ ID NO: 109602 - RNA, 19 nt, Artificial Sequence
  Description of Artificial Sequence: Synthetic oligonucleotide
ggagaacauugggugguca

SEQ ID NO: 109603 - RNA, 19 nt, Artificial Sequence
  Description of Artificial Sequence: Synthetic oligonucleotide
gcgccagggauacaggaua

SEQ ID NO: 109604 - RNA, 19 nt, Artificial Sequence
  Description of Artificial Sequence: Synthetic oligonucleotide
ucccguccucgacgugucu

SEQ ID NO: 109605 - RNA, 19 nt, Artificial Sequence
  Description of Artificial Sequence: Synthetic oligonucleotide
ggugguuauucgauggaau

SEQ ID NO: 109606 - RNA, 19 nt, Artificial Sequence
  Description of Artificial Sequence: Synthetic oligonucleotide
agcaccccuuuggaacaca

SEQ ID NO: 109607 - RNA, 19 nt, Artificial Sequence
  Description of Artificial Sequence: Synthetic oligonucleotide
gacgagcacacuacauuuu

SEQ ID NO: 109608 - RNA, 19 nt, Artificial Sequence
  Description of Artificial Sequence: Synthetic oligonucleotide
gccuuguaaaggagccuac

SEQ ID NO: 109609 - RNA, 19 nt, Artificial Sequence
  Description of Artificial Sequence: Synthetic oligonucleotide
guaccggacuggcuacuau

SEQ ID NO: 109610 - RNA, 19 nt, Artificial Sequence
  Description of Artificial Sequence: Synthetic oligonucleotide
gcgugcugcacagucacgu

SEQ ID NO: 109611 - RNA, 19 nt, Artificial Sequence
  Description of Artificial Sequence: Synthetic oligonucleotide
ggacagaauuaugcaacau

SEQ ID NO: 109612 - RNA, 19 nt, Artificial Sequence
  Description of Artificial Sequence: Synthetic oligonucleotide
cccguccucgacgugucug

SEQ ID NO: 109613 - RNA, 19 nt, Artificial Sequence
  Description of Artificial Sequence: Synthetic oligonucleotide
gccaauggagcuagaacuu

SEQ ID NO: 109614 - RNA, 19 nt, Artificial Sequence
  Description of Artificial Sequence: Synthetic oligonucleotide
ccucgacgugucugucgag

SEQ ID NO: 109615 - RNA, 19 nt, Artificial Sequence
  Description of Artificial Sequence: Synthetic oligonucleotide
gcgaccuuaaauggucaau

SEQ ID NO: 109616 - RNA, 19 nt, Artificial Sequence
  Description of Artificial Sequence: Synthetic oligonucleotide
agguaccuauagaguucuu

SEQ ID NO: 109617 - RNA, 19 nt, Artificial Sequence
  Description of Artificial Sequence: Synthetic oligonucleotide
ccuguugggcaacacuuuu

SEQ ID NO: 109618 - RNA, 19 nt, Artificial Sequence
  Description of Artificial Sequence: Synthetic oligonucleotide
cgaccuuaaauggucaauu

SEQ ID NO: 109619 - RNA, 19 nt, Artificial Sequence
  Description of Artificial Sequence: Synthetic oligonucleotide
ccaucuagaguagcacaau

SEQ ID NO: 109620 - RNA, 19 nt, Artificial Sequence
  Description of Artificial Sequence: Synthetic oligonucleotide
gccuguugggcaacacuuu

SEQ ID NO: 109621 - RNA, 19 nt, Artificial Sequence
  Description of Artificial Sequence: Synthetic oligonucleotide
cguucccguccucgacgug

SEQ ID NO: 109622 - RNA, 19 nt, Artificial Sequence
  Description of Artificial Sequence: Synthetic oligonucleotide
gggcuacaacaugcacauu

SEQ ID NO: 109623 - RNA, 19 nt, Artificial Sequence
  Description of Artificial Sequence: Synthetic oligonucleotide
gcgacccguguuggacaau

SEQ ID NO: 109624 - RNA, 19 nt, Artificial Sequence
  Description of Artificial Sequence: Synthetic oligonucleotide
aaaaugauauguuaagcac

SEQ ID NO: 109625 - RNA, 19 nt, Artificial Sequence
  Description of Artificial Sequence: Synthetic oligonucleotide
aaagcuaagaaacugucuc

SEQ ID NO: 109626 - RNA, 19 nt, Artificial Sequence
  Description of Artificial Sequence: Synthetic oligonucleotide
aauuauacuacccacuccu

SEQ ID NO: 109627 - RNA, 19 nt, Artificial Sequence
  Description of Artificial Sequence: Synthetic oligonucleotide
aacuagauaauuuaauccu

SEQ ID NO: 109628 - RNA, 19 nt, Artificial Sequence
  Description of Artificial Sequence: Synthetic oligonucleotide
auaguuagaagguugcugg

SEQ ID NO: 109629 - RNA, 19 nt, Artificial Sequence
  Description of Artificial Sequence: Synthetic oligonucleotide
aacguugucuuauuacacc

SEQ ID NO: 109630 - RNA, 19 nt, Artificial Sequence
  Description of Artificial Sequence: Synthetic oligonucleotide
agacucaauuuauagauac

SEQ ID NO: 109631 - RNA, 19 nt, Artificial Sequence
  Description of Artificial Sequence: Synthetic oligonucleotide
aauaucggcuccuuccacc

SEQ ID NO: 109632 - RNA, 19 nt, Artificial Sequence
  Description of Artificial Sequence: Synthetic oligonucleotide
uguaguaaagacacuaaug

SEQ ID NO: 109633 - RNA, 19 nt, Artificial Sequence
  Description of Artificial Sequence: Synthetic oligonucleotide
uuaugcaugacugagauaa

SEQ ID NO: 109634 - RNA, 19 nt, Artificial Sequence
  Description of Artificial Sequence: Synthetic oligonucleotide
aaaacguugucuuauuaca

SEQ ID NO: 109635 - RNA, 19 nt, Artificial Sequence
  Description of Artificial Sequence: Synthetic oligonucleotide
uuuuaacccaacuauuuag

SEQ ID NO: 109636 - RNA, 19 nt, Artificial Sequence
  Description of Artificial Sequence: Synthetic oligonucleotide
uauguuaagcaccugaauc

SEQ ID NO: 109637 - RNA, 19 nt, Artificial Sequence
  Description of Artificial Sequence: Synthetic oligonucleotide
uaucccuuaaguuaacuag

SEQ ID NO: 109638 - RNA, 19 nt, Artificial Sequence
  Description of Artificial Sequence: Synthetic oligonucleotide
auuucgauaaccugaagcu

SEQ ID NO: 109639 - RNA, 19 nt, Artificial Sequence
  Description of Artificial Sequence: Synthetic oligonucleotide
aacuauuuaguacagggua

SEQ ID NO: 109640 - RNA, 19 nt, Artificial Sequence
  Description of Artificial Sequence: Synthetic oligonucleotide
uacaaugggcaaaauaacc

SEQ ID NO: 109641 - RNA, 19 nt, Artificial Sequence
  Description of Artificial Sequence: Synthetic oligonucleotide
uuaccuaccauuuuacuac

SEQ ID NO: 109642 - RNA, 19 nt, Artificial Sequence
  Description of Artificial Sequence: Synthetic oligonucleotide
accaauaaagaguuugcgg

SEQ ID NO: 109643 - RNA, 19 nt, Artificial Sequence
  Description of Artificial Sequence: Synthetic oligonucleotide
uuauguuagacucaauuua

SEQ ID NO: 109644 - RNA, 19 nt, Artificial Sequence
  Description of Artificial Sequence: Synthetic oligonucleotide
uccuuagcuaauuugaugu

SEQ ID NO: 109645 - RNA, 19 nt, Artificial Sequence
  Description of Artificial Sequence: Synthetic oligonucleotide
agaauauacuuguccaugg

SEQ ID NO: 109646 - RNA, 19 nt, Artificial Sequence
  Description of Artificial Sequence: Synthetic oligonucleotide
ugaaguugcuuccuggucc

SEQ ID NO: 109647 - RNA, 19 nt, Artificial Sequence
  Description of Artificial Sequence: Synthetic oligonucleotide
aacaacaacuuugcaaugg

SEQ ID NO: 109648 - RNA, 19 nt, Artificial Sequence
  Description of Artificial Sequence: Synthetic oligonucleotide
ugauauguuaagcaccuga

SEQ ID NO: 109649 - RNA, 19 nt, Artificial Sequence
  Description of Artificial Sequence: Synthetic oligonucleotide
gacacuaaugccuaguuga

SEQ ID NO: 109650 - RNA, 19 nt, Artificial Sequence
  Description of Artificial Sequence: Synthetic oligonucleotide
uguguauaagcccugagua

SEQ ID NO: 109651 - RNA, 19 nt, Artificial Sequence
  Description of Artificial Sequence: Synthetic oligonucleotide
ucacugauguguauaagcc

SEQ ID NO: 109652 - RNA, 19 nt, Artificial Sequence
  Description of Artificial Sequence: Synthetic oligonucleotide
uaaaucauaaauguacaac

SEQ ID NO: 109653 - RNA, 19 nt, Artificial Sequence
  Description of Artificial Sequence: Synthetic oligonucleotide
aagaaccuaaauaaacuuc

SEQ ID NO: 109654 - RNA, 19 nt, Artificial Sequence
  Description of Artificial Sequence: Synthetic oligonucleotide
uccauauccaucagaaccc

SEQ ID NO: 109655 - RNA, 19 nt, Artificial Sequence
  Description of Artificial Sequence: Synthetic oligonucleotide
aaugaauuuccguagccaa

SEQ ID NO: 109656 - RNA, 19 nt, Artificial Sequence
  Description of Artificial Sequence: Synthetic oligonucleotide
uucuuauguaguaaagaca

SEQ ID NO: 109657 - RNA, 19 nt, Artificial Sequence
  Description of Artificial Sequence: Synthetic oligonucleotide
uggaccuuaauuauacuac

SEQ ID NO: 109658 - RNA, 19 nt, Artificial Sequence
  Description of Artificial Sequence: Synthetic oligonucleotide
auacccauuauagccaucc

SEQ ID NO: 109659 - RNA, 19 nt, Artificial Sequence
  Description of Artificial Sequence: Synthetic oligonucleotide
ugaugaauugcagacaaca

SEQ ID NO: 109660 - RNA, 19 nt, Artificial Sequence
  Description of Artificial Sequence: Synthetic oligonucleotide
aguacaaugggcaaaauaa

SEQ ID NO: 109661 - RNA, 19 nt, Artificial Sequence
  Description of Artificial Sequence: Synthetic oligonucleotide
ugcuaaaauuccagcaggg

SEQ ID NO: 109662 - RNA, 19 nt, Artificial Sequence
  Description of Artificial Sequence: Synthetic oligonucleotide
agauaauuuaauccugaug

SEQ ID NO: 109663 - RNA, 19 nt, Artificial Sequence
  Description of Artificial Sequence: Synthetic oligonucleotide
acgagaaucaccaaaacca

SEQ ID NO: 109664 - RNA, 19 nt, Artificial Sequence
  Description of Artificial Sequence: Synthetic oligonucleotide
auaaccacauuuuaaccca

SEQ ID NO: 109665 - RNA, 19 nt, Artificial Sequence
  Description of Artificial Sequence: Synthetic oligonucleotide
uucgauaaccugaagcugu

SEQ ID NO: 109666 - RNA, 19 nt, Artificial Sequence
  Description of Artificial Sequence: Synthetic oligonucleotide
cucacugauguguauaagc

SEQ ID NO: 109667 - RNA, 19 nt, Artificial Sequence
  Description of Artificial Sequence: Synthetic oligonucleotide
auauuuaugcaugacugag

SEQ ID NO: 109668 - RNA, 19 nt, Artificial Sequence
  Description of Artificial Sequence: Synthetic oligonucleotide
auuauguuagacucaauuu

SEQ ID NO: 109669 - RNA, 19 nt, Artificial Sequence
  Description of Artificial Sequence: Synthetic oligonucleotide
uuuauuauguuagacucaa

SEQ ID NO: 109670 - RNA, 19 nt, Artificial Sequence
  Description of Artificial Sequence: Synthetic oligonucleotide
auuuaugcaugacugagau

SEQ ID NO: 109671 - RNA, 19 nt, Artificial Sequence
  Description of Artificial Sequence: Synthetic oligonucleotide
aagaguaccucgcuggggu

SEQ ID NO: 109672 - RNA, 19 nt, Artificial Sequence
  Description of Artificial Sequence: Synthetic oligonucleotide
auaugguccucccauguuc

SEQ ID NO: 109673 - RNA, 19 nt, Artificial Sequence
  Description of Artificial Sequence: Synthetic oligonucleotide
uuaacauuguuauuucgau

SEQ ID NO: 109674 - RNA, 19 nt, Artificial Sequence
  Description of Artificial Sequence: Synthetic oligonucleotide
aguaagguaauguuauuaa

SEQ ID NO: 109675 - RNA, 19 nt, Artificial Sequence
  Description of Artificial Sequence: Synthetic oligonucleotide
uaauuauacuacccacucc

SEQ ID NO: 109676 - RNA, 19 nt, Artificial Sequence
  Description of Artificial Sequence: Synthetic oligonucleotide
gcuaauuugauguuaacuc

SEQ ID NO: 109677 - RNA, 19 nt, Artificial Sequence
  Description of Artificial Sequence: Synthetic oligonucleotide
uugaaaugaagcacuuuac

SEQ ID NO: 109678 - RNA, 19 nt, Artificial Sequence
  Description of Artificial Sequence: Synthetic oligonucleotide
uuaaagcagacucacugau

SEQ ID NO: 109679 - RNA, 19 nt, Artificial Sequence
  Description of Artificial Sequence: Synthetic oligonucleotide
uauuuaugcaugacugaga

SEQ ID NO: 109680 - RNA, 19 nt, Artificial Sequence
  Description of Artificial Sequence: Synthetic oligonucleotide
acgggacucguccugacgc

SEQ ID NO: 109681 - RNA, 19 nt, Artificial Sequence
  Description of Artificial Sequence: Synthetic oligonucleotide
ugagcuuagucgucaagag

SEQ ID NO: 109682 - RNA, 19 nt, Artificial Sequence
  Description of Artificial Sequence: Synthetic oligonucleotide
auacauuauccuuagcuaa

SEQ ID NO: 109683 - RNA, 19 nt, Artificial Sequence
  Description of Artificial Sequence: Synthetic oligonucleotide
ugaagaguaccucgcuggg

SEQ ID NO: 109684 - RNA, 19 nt, Artificial Sequence
  Description of Artificial Sequence: Synthetic oligonucleotide
ucuccuauuuauacaguga

SEQ ID NO: 109685 - RNA, 19 nt, Artificial Sequence
  Description of Artificial Sequence: Synthetic oligonucleotide
auuaaaucauaaauguaca

SEQ ID NO: 109686 - RNA, 19 nt, Artificial Sequence
  Description of Artificial Sequence: Synthetic oligonucleotide
accuuaauuauacuaccca

SEQ ID NO: 109687 - RNA, 19 nt, Artificial Sequence
  Description of Artificial Sequence: Synthetic oligonucleotide
ugguucauaucaaugcuaa

SEQ ID NO: 109688 - RNA, 19 nt, Artificial Sequence
  Description of Artificial Sequence: Synthetic oligonucleotide
agaaccuaaauaaacuuca

SEQ ID NO: 109689 - RNA, 19 nt, Artificial Sequence
  Description of Artificial Sequence: Synthetic oligonucleotide
acacgcacgggacucgucc

SEQ ID NO: 109690 - RNA, 19 nt, Artificial Sequence
  Description of Artificial Sequence: Synthetic oligonucleotide
ccuauuuauacagugaagc

SEQ ID NO: 109691 - RNA, 19 nt, Artificial Sequence
  Description of Artificial Sequence: Synthetic oligonucleotide
aacuacucugccaucaaug

SEQ ID NO: 109692 - RNA, 19 nt, Artificial Sequence
  Description of Artificial Sequence: Synthetic oligonucleotide
cacguuuuggcucaacuac

SEQ ID NO: 109693 - RNA, 19 nt, Artificial Sequence
  Description of Artificial Sequence: Synthetic oligonucleotide
uguauaagcccugaguauc

SEQ ID NO: 109694 - RNA, 19 nt, Artificial Sequence
  Description of Artificial Sequence: Synthetic oligonucleotide
aucucauuuauugaacuug

SEQ ID NO: 109695 - RNA, 19 nt, Artificial Sequence
  Description of Artificial Sequence: Synthetic oligonucleotide
agauaagaguuuccuuaac

SEQ ID NO: 109696 - RNA, 19 nt, Artificial Sequence
  Description of Artificial Sequence: Synthetic oligonucleotide
ugucuuauuacaccaugau

SEQ ID NO: 109697 - RNA, 19 nt, Artificial Sequence
  Description of Artificial Sequence: Synthetic oligonucleotide
augccuaguugacucaaac

SEQ ID NO: 109698 - RNA, 19 nt, Artificial Sequence
  Description of Artificial Sequence: Synthetic oligonucleotide
ggcaauaaagccuagaagu

SEQ ID NO: 109699 - RNA, 19 nt, Artificial Sequence
  Description of Artificial Sequence: Synthetic oligonucleotide
agguaauguuauuaaauaa

SEQ ID NO: 109700 - RNA, 19 nt, Artificial Sequence
  Description of Artificial Sequence: Synthetic oligonucleotide
ugucaccugaaacuuacaa

SEQ ID NO: 109701 - RNA, 19 nt, Artificial Sequence
  Description of Artificial Sequence: Synthetic oligonucleotide
aaacugcuugauccaggac

SEQ ID NO: 109702 - RNA, 19 nt, Artificial Sequence
  Description of Artificial Sequence: Synthetic oligonucleotide
auguguauaagcccugagu

SEQ ID NO: 109703 - RNA, 19 nt, Artificial Sequence
  Description of Artificial Sequence: Synthetic oligonucleotide
uuaacucuacacacgcacu

SEQ ID NO: 109704 - RNA, 19 nt, Artificial Sequence
  Description of Artificial Sequence: Synthetic oligonucleotide
uuauugaacuugcagccua

SEQ ID NO: 109705 - RNA, 19 nt, Artificial Sequence
  Description of Artificial Sequence: Synthetic oligonucleotide
aaaagcuaagaaacugucu

SEQ ID NO: 109706 - RNA, 19 nt, Artificial Sequence
  Description of Artificial Sequence: Synthetic oligonucleotide
acauuguuauuucgauaac

SEQ ID NO: 109707 - RNA, 19 nt, Artificial Sequence
  Description of Artificial Sequence: Synthetic oligonucleotide
gacucagucgcuucagccc

SEQ ID NO: 109708 - RNA, 19 nt, Artificial Sequence
  Description of Artificial Sequence: Synthetic oligonucleotide
aguaauacugaagaaguuu

SEQ ID NO: 109709 - RNA, 19 nt, Artificial Sequence
  Description of Artificial Sequence: Synthetic oligonucleotide
ucgucaagaguucucuugu

SEQ ID NO: 109710 - RNA, 19 nt, Artificial Sequence
  Description of Artificial Sequence: Synthetic oligonucleotide
caauacauuauccuuagcu

SEQ ID NO: 109711 - RNA, 19 nt, Artificial Sequence
  Description of Artificial Sequence: Synthetic oligonucleotide
uggcuaauagcuuuucaaa

SEQ ID NO: 109712 - RNA, 19 nt, Artificial Sequence
  Description of Artificial Sequence: Synthetic oligonucleotide
acaauacauuauccuuagc

SEQ ID NO: 109713 - RNA, 19 nt, Artificial Sequence
  Description of Artificial Sequence: Synthetic oligonucleotide
agcuaauuugauguuaacu

SEQ ID NO: 109714 - RNA, 19 nt, Artificial Sequence
  Description of Artificial Sequence: Synthetic oligonucleotide
cauaguuagaagguugcug

SEQ ID NO: 109715 - RNA, 19 nt, Artificial Sequence
  Description of Artificial Sequence: Synthetic oligonucleotide
acuagauaauuuaauccug

SEQ ID NO: 109716 - RNA, 19 nt, Artificial Sequence
  Description of Artificial Sequence: Synthetic oligonucleotide
accgacaaacaguuucuuc

SEQ ID NO: 109717 - RNA, 19 nt, Artificial Sequence
  Description of Artificial Sequence: Synthetic oligonucleotide
cagccuaacuuuuaccuac

SEQ ID NO: 109718 - RNA, 19 nt, Artificial Sequence
  Description of Artificial Sequence: Synthetic oligonucleotide
gcuucuuaacucuacacac

SEQ ID NO: 109719 - RNA, 19 nt, Artificial Sequence
  Description of Artificial Sequence: Synthetic oligonucleotide
auggaccuuaauuauacua

SEQ ID NO: 109720 - RNA, 19 nt, Artificial Sequence
  Description of Artificial Sequence: Synthetic oligonucleotide
aagacacuaaugccuaguu

SEQ ID NO: 109721 - RNA, 19 nt, Artificial Sequence
  Description of Artificial Sequence: Synthetic oligonucleotide
gaugaauugcagacaacac

SEQ ID NO: 109722 - RNA, 19 nt, Artificial Sequence
  Description of Artificial Sequence: Synthetic oligonucleotide
acguugucuuauuacacca

SEQ ID NO: 109723 - RNA, 19 nt, Artificial Sequence
  Description of Artificial Sequence: Synthetic oligonucleotide
uuucgauaaccugaagcug

SEQ ID NO: 109724 - RNA, 19 nt, Artificial Sequence
  Description of Artificial Sequence: Synthetic oligonucleotide
ugguccaaaauugccgccg

SEQ ID NO: 109725 - RNA, 19 nt, Artificial Sequence
  Description of Artificial Sequence: Synthetic oligonucleotide
uuaacccaacuauuuagua

SEQ ID NO: 109726 - RNA, 19 nt, Artificial Sequence
  Description of Artificial Sequence: Synthetic oligonucleotide
uuauuucgauaaccugaag

SEQ ID NO: 109727 - RNA, 19 nt, Artificial Sequence
  Description of Artificial Sequence: Synthetic oligonucleotide
gaccuuaauuauacuaccc

SEQ ID NO: 109728 - RNA, 19 nt, Artificial Sequence
  Description of Artificial Sequence: Synthetic oligonucleotide
agacacuaaugccuaguug

SEQ ID NO: 109729 - RNA, 19 nt, Artificial Sequence
  Description of Artificial Sequence: Synthetic oligonucleotide
gucgucaagaguucucuug

SEQ ID NO: 109730 - RNA, 19 nt, Artificial Sequence
  Description of Artificial Sequence: Synthetic oligonucleotide
gucuuauuacaccaugauc

SEQ ID NO: 109731 - RNA, 19 nt, Artificial Sequence
  Description of Artificial Sequence: Synthetic oligonucleotide
ugauuaaagcagacucacu

SEQ ID NO: 109732 - RNA, 19 nt, Artificial Sequence
  Description of Artificial Sequence: Synthetic oligonucleotide
ccaauaaagaguuugcgga

SEQ ID NO: 109733 - RNA, 19 nt, Artificial Sequence
  Description of Artificial Sequence: Synthetic oligonucleotide
ucuuaacucuacacacgca

SEQ ID NO: 109734 - RNA, 19 nt, Artificial Sequence
  Description of Artificial Sequence: Synthetic oligonucleotide
uaacauuguuauuucgaua

SEQ ID NO: 109735 - RNA, 19 nt, Artificial Sequence
  Description of Artificial Sequence: Synthetic oligonucleotide
cuuaauuauacuacccacu

SEQ ID NO: 109736 - RNA, 19 nt, Artificial Sequence
  Description of Artificial Sequence: Synthetic oligonucleotide
aaaggcaauaaagccuaga

SEQ ID NO: 109737 - RNA, 19 nt, Artificial Sequence
  Description of Artificial Sequence: Synthetic oligonucleotide
auaucccuuaaguuaacua

SEQ ID NO: 109738 - RNA, 19 nt, Artificial Sequence
  Description of Artificial Sequence: Synthetic oligonucleotide
agcuuagucgucaagaguu

SEQ ID NO: 109739 - RNA, 19 nt, Artificial Sequence
  Description of Artificial Sequence: Synthetic oligonucleotide
uuagucgucaagaguucuc

SEQ ID NO: 109740 - RNA, 19 nt, Artificial Sequence
  Description of Artificial Sequence: Synthetic oligonucleotide
accauugauggugugauau

SEQ ID NO: 109741 - RNA, 19 nt, Artificial Sequence
  Description of Artificial Sequence: Synthetic oligonucleotide
cuucauuaguuaccugcag

SEQ ID NO: 109742 - RNA, 19 nt, Artificial Sequence
  Description of Artificial Sequence: Synthetic oligonucleotide
ugccuaguugacucaaacu

SEQ ID NO: 109743 - RNA, 19 nt, Artificial Sequence
  Description of Artificial Sequence: Synthetic oligonucleotide
ggaccuuaauuauacuacc

SEQ ID NO: 109744 - RNA, 19 nt, Artificial Sequence
  Description of Artificial Sequence: Synthetic oligonucleotide
aaccuguacuaaaucaaga

SEQ ID NO: 109745 - RNA, 19 nt, Artificial Sequence
  Description of Artificial Sequence: Synthetic oligonucleotide
ccuuaauuauacuacccac

SEQ ID NO: 109746 - RNA, 19 nt, Artificial Sequence
  Description of Artificial Sequence: Synthetic oligonucleotide
uacuacccacuccuuaacu

SEQ ID NO: 109747 - RNA, 19 nt, Artificial Sequence
  Description of Artificial Sequence: Synthetic oligonucleotide
aauuuccguagccaaccua

SEQ ID NO: 109748 - RNA, 19 nt, Artificial Sequence
  Description of Artificial Sequence: Synthetic oligonucleotide
aggccuugcagccauggca

SEQ ID NO: 109749 - RNA, 19 nt, Artificial Sequence
  Description of Artificial Sequence: Synthetic oligonucleotide
agcacguuuuggcucaacu

SEQ ID NO: 109750 - RNA, 19 nt, Artificial Sequence
  Description of Artificial Sequence: Synthetic oligonucleotide
ucccagacugccuaucagu

SEQ ID NO: 109751 - RNA, 19 nt, Artificial Sequence
  Description of Artificial Sequence: Synthetic oligonucleotide
gaagaguaccucgcugggg

SEQ ID NO: 109752 - RNA, 19 nt, Artificial Sequence
  Description of Artificial Sequence: Synthetic oligonucleotide
ccuaucaguaauuauuuca

SEQ ID NO: 109753 - RNA, 19 nt, Artificial Sequence
  Description of Artificial Sequence: Synthetic oligonucleotide
uagguaaaucucauuuauu

SEQ ID NO: 109754 - RNA, 19 nt, Artificial Sequence
  Description of Artificial Sequence: Synthetic oligonucleotide
ugaccauugauggugugau

SEQ ID NO: 109755 - RNA, 19 nt, Artificial Sequence
  Description of Artificial Sequence: Synthetic oligonucleotide
agaaccuguacuaaaucaa

SEQ ID NO: 109756 - RNA, 19 nt, Artificial Sequence
  Description of Artificial Sequence: Synthetic oligonucleotide
caggugaauaaaauacaca

SEQ ID NO: 109757 - RNA, 19 nt, Artificial Sequence
  Description of Artificial Sequence: Synthetic oligonucleotide
acaggguuuauaaaauuau

SEQ ID NO: 109758 - RNA, 19 nt, Artificial Sequence
  Description of Artificial Sequence: Synthetic oligonucleotide
gaccacuagaaagaaacaa

SEQ ID NO: 109759 - RNA, 19 nt, Artificial Sequence
  Description of Artificial Sequence: Synthetic oligonucleotide
guacaaugggcaaaauaac

SEQ ID NO: 109760 - RNA, 19 nt, Artificial Sequence
  Description of Artificial Sequence: Synthetic oligonucleotide
guuagaagguugcugguua

SEQ ID NO: 109761 - RNA, 19 nt, Artificial Sequence
  Description of Artificial Sequence: Synthetic oligonucleotide
aaauccccuugaucuuuug

SEQ ID NO: 109762 - RNA, 19 nt, Artificial Sequence
  Description of Artificial Sequence: Synthetic oligonucleotide
guuuauuauguuagacuca

SEQ ID NO: 109763 - RNA, 19 nt, Artificial Sequence
  Description of Artificial Sequence: Synthetic oligonucleotide
uuuccguagccaaccuaca

SEQ ID NO: 109764 - RNA, 19 nt, Artificial Sequence
  Description of Artificial Sequence: Synthetic oligonucleotide
uaaucucuaaggugguguu

SEQ ID NO: 109765 - RNA, 19 nt, Artificial Sequence
  Description of Artificial Sequence: Synthetic oligonucleotide
uuagaagguugcugguuau

SEQ ID NO: 109766 - RNA, 19 nt, Artificial Sequence
  Description of Artificial Sequence: Synthetic oligonucleotide
cuucagcccgauuucccgc

SEQ ID NO: 109767 - RNA, 19 nt, Artificial Sequence
  Description of Artificial Sequence: Synthetic oligonucleotide
agaguuugcggaacugcuc

SEQ ID NO: 109768 - RNA, 19 nt, Artificial Sequence
  Description of Artificial Sequence: Synthetic oligonucleotide
caauaaagaguuugcggaa

SEQ ID NO: 109769 - RNA, 19 nt, Artificial Sequence
  Description of Artificial Sequence: Synthetic oligonucleotide
agaagguugcugguuauaa

SEQ ID NO: 109770 - RNA, 19 nt, Artificial Sequence
  Description of Artificial Sequence: Synthetic oligonucleotide
acugccuaucaguaauuau

SEQ ID NO: 109771 - RNA, 19 nt, Artificial Sequence
  Description of Artificial Sequence: Synthetic oligonucleotide
aacugucucaaaggcauuu

SEQ ID NO: 109772 - RNA, 19 nt, Artificial Sequence
  Description of Artificial Sequence: Synthetic oligonucleotide
acucuacacacgcacuuaa

SEQ ID NO: 109773 - RNA, 19 nt, Artificial Sequence
  Description of Artificial Sequence: Synthetic oligonucleotide
uacuagaccugugucccug

SEQ ID NO: 109774 - RNA, 19 nt, Artificial Sequence
  Description of Artificial Sequence: Synthetic oligonucleotide
cucuuacaaagaccacuag

SEQ ID NO: 109775 - RNA, 19 nt, Artificial Sequence
  Description of Artificial Sequence: Synthetic oligonucleotide
ugauguguauaagcccuga

SEQ ID NO: 109776 - RNA, 19 nt, Artificial Sequence
  Description of Artificial Sequence: Synthetic oligonucleotide
uagcuaauuugauguuaac

SEQ ID NO: 109777 - RNA, 19 nt, Artificial Sequence
  Description of Artificial Sequence: Synthetic oligonucleotide
uggguaguacaaugggcaa

SEQ ID NO: 109778 - RNA, 19 nt, Artificial Sequence
  Description of Artificial Sequence: Synthetic oligonucleotide
uucagcccgauuucccgca

SEQ ID NO: 109779 - RNA, 19 nt, Artificial Sequence
  Description of Artificial Sequence: Synthetic oligonucleotide
ucgagaaaccgcgccgcgg

SEQ ID NO: 109780 - RNA, 19 nt, Artificial Sequence
  Description of Artificial Sequence: Synthetic oligonucleotide
auuccaccgacaaacaguu

SEQ ID NO: 109781 - RNA, 19 nt, Artificial Sequence
  Description of Artificial Sequence: Synthetic oligonucleotide
gggaccgccgcuuuucuag

SEQ ID NO: 109782 - RNA, 19 nt, Artificial Sequence
  Description of Artificial Sequence: Synthetic oligonucleotide
uuauuauguuagacucaau

SEQ ID NO: 109783 - RNA, 19 nt, Artificial Sequence
  Description of Artificial Sequence: Synthetic oligonucleotide
cuaguugacucaaacugcu

SEQ ID NO: 109784 - RNA, 19 nt, Artificial Sequence
  Description of Artificial Sequence: Synthetic oligonucleotide
cugagcuuagucgucaaga

SEQ ID NO: 109785 - RNA, 19 nt, Artificial Sequence
  Description of Artificial Sequence: Synthetic oligonucleotide
ucauugggccauaguuaga

SEQ ID NO: 109786 - RNA, 19 nt, Artificial Sequence
  Description of Artificial Sequence: Synthetic oligonucleotide
acucuuacaaagaccacua

SEQ ID NO: 109787 - RNA, 19 nt, Artificial Sequence
  Description of Artificial Sequence: Synthetic oligonucleotide
uggcucaacuacucugcca

SEQ ID NO: 109788 - RNA, 19 nt, Artificial Sequence
  Description of Artificial Sequence: Synthetic oligonucleotide
uaccaacaccacugaagga

SEQ ID NO: 109789 - RNA, 19 nt, Artificial Sequence
  Description of Artificial Sequence: Synthetic oligonucleotide
aaggguggaaugauaggua

SEQ ID NO: 109790 - RNA, 19 nt, Artificial Sequence
  Description of Artificial Sequence: Synthetic oligonucleotide
ucguccugacgcugugggg

SEQ ID NO: 109791 - RNA, 19 nt, Artificial Sequence
  Description of Artificial Sequence: Synthetic oligonucleotide
gaguucucuuguacuagac

SEQ ID NO: 109792 - RNA, 19 nt, Artificial Sequence
  Description of Artificial Sequence: Synthetic oligonucleotide
agauaucccuuaaguuaac

SEQ ID NO: 109793 - RNA, 19 nt, Artificial Sequence
  Description of Artificial Sequence: Synthetic oligonucleotide
uucuuaagacuggcugagc

SEQ ID NO: 109794 - RNA, 19 nt, Artificial Sequence
  Description of Artificial Sequence: Synthetic oligonucleotide
gagaaaccgcgccgcgggg

SEQ ID NO: 109795 - RNA, 19 nt, Artificial Sequence
  Description of Artificial Sequence: Synthetic oligonucleotide
aacucuacacacgcacuua

SEQ ID NO: 109796 - RNA, 19 nt, Artificial Sequence
  Description of Artificial Sequence: Synthetic oligonucleotide
uguugaaaugaagcacuuu

SEQ ID NO: 109797 - RNA, 19 nt, Artificial Sequence
  Description of Artificial Sequence: Synthetic oligonucleotide
gaaaggcaauaaagccuag

SEQ ID NO: 109798 - RNA, 19 nt, Artificial Sequence
  Description of Artificial Sequence: Synthetic oligonucleotide
aguuagaagguugcugguu

SEQ ID NO: 109799 - RNA, 19 nt, Artificial Sequence
  Description of Artificial Sequence: Synthetic oligonucleotide
cucgagaaaccgcgccgcg

SEQ ID NO: 109800 - RNA, 19 nt, Artificial Sequence
  Description of Artificial Sequence: Synthetic oligonucleotide
ucagcccgauuucccgcag

SEQ ID NO: 109801 - RNA, 19 nt, Artificial Sequence
  Description of Artificial Sequence: Synthetic oligonucleotide
caguaagguaauguuauua

SEQ ID NO: 109802 - RNA, 19 nt, Artificial Sequence
  Description of Artificial Sequence: Synthetic oligonucleotide
acauuauccuuagcuaauu

SEQ ID NO: 109803 - RNA, 19 nt, Artificial Sequence
  Description of Artificial Sequence: Synthetic oligonucleotide
gaagcaagaaaagcuuuau

SEQ ID NO: 109804 - RNA, 19 nt, Artificial Sequence
  Description of Artificial Sequence: Synthetic oligonucleotide
cacgggacucguccugacg

SEQ ID NO: 109805 - RNA, 19 nt, Artificial Sequence
  Description of Artificial Sequence: Synthetic oligonucleotide
uucugccauaucacugcau

SEQ ID NO: 109806 - RNA, 19 nt, Artificial Sequence
  Description of Artificial Sequence: Synthetic oligonucleotide
agacucacugauguguaua

SEQ ID NO: 109807 - RNA, 19 nt, Artificial Sequence
  Description of Artificial Sequence: Synthetic oligonucleotide
auuucccgcagccgagcga

SEQ ID NO: 109808 - RNA, 19 nt, Artificial Sequence
  Description of Artificial Sequence: Synthetic oligonucleotide
gagcuuagucgucaagagu

SEQ ID NO: 109809 - RNA, 19 nt, Artificial Sequence
  Description of Artificial Sequence: Synthetic oligonucleotide
ccuagaagucagaggguag

SEQ ID NO: 109810 - RNA, 19 nt, Artificial Sequence
  Description of Artificial Sequence: Synthetic oligonucleotide
ugcagacaacacacuuaaa

SEQ ID NO: 109811 - RNA, 19 nt, Artificial Sequence
  Description of Artificial Sequence: Synthetic oligonucleotide
guccaaaauugccgccgcc

SEQ ID NO: 109812 - RNA, 19 nt, Artificial Sequence
  Description of Artificial Sequence: Synthetic oligonucleotide
gguccaaaauugccgccgc

SEQ ID NO: 109813 - RNA, 19 nt, Artificial Sequence
  Description of Artificial Sequence: Synthetic oligonucleotide
cucccauguuccugcuacc

SEQ ID NO: 109814 - RNA, 19 nt, Artificial Sequence
  Description of Artificial Sequence: Synthetic oligonucleotide
acccaacuauuuaguacag

SEQ ID NO: 109815 - RNA, 19 nt, Artificial Sequence
  Description of Artificial Sequence: Synthetic oligonucleotide
ccaucgcggacucagucgc

SEQ ID NO: 109816 - RNA, 19 nt, Artificial Sequence
  Description of Artificial Sequence: Synthetic oligonucleotide
gacucguccugacgcugug

SEQ ID NO: 109817 - RNA, 19 nt, Artificial Sequence
  Description of Artificial Sequence: Synthetic oligonucleotide
gaagguugcugguuauaau

SEQ ID NO: 109818 - RNA, 19 nt, Artificial Sequence
  Description of Artificial Sequence: Synthetic oligonucleotide
cagagauaucccuuaaguu

SEQ ID NO: 109819 - RNA, 19 nt, Artificial Sequence
  Description of Artificial Sequence: Synthetic oligonucleotide
cauacccauuauagccauc

SEQ ID NO: 109820 - RNA, 19 nt, Artificial Sequence
  Description of Artificial Sequence: Synthetic oligonucleotide
ggcucaacuacucugccau

SEQ ID NO: 109821 - RNA, 19 nt, Artificial Sequence
  Description of Artificial Sequence: Synthetic oligonucleotide
gcaguuuuggguaguacaa

SEQ ID NO: 109822 - RNA, 19 nt, Artificial Sequence
  Description of Artificial Sequence: Synthetic oligonucleotide
gccgagcgagaugagaaag

SEQ ID NO: 109823 - RNA, 19 nt, Artificial Sequence
  Description of Artificial Sequence: Synthetic oligonucleotide
cgagaaaccgcgccgcggg

SEQ ID NO: 109824 - RNA, 19 nt, Artificial Sequence
  Description of Artificial Sequence: Synthetic oligonucleotide
gcugagcuuagucgucaag

SEQ ID NO: 109825 - RNA, 19 nt, Artificial Sequence
  Description of Artificial Sequence: Synthetic oligonucleotide
cauuaguuaccugcagcaa

SEQ ID NO: 109826 - RNA, 19 nt, Artificial Sequence
  Description of Artificial Sequence: Synthetic oligonucleotide
ggguaguuucaggaaauga

SEQ ID NO: 109827 - RNA, 19 nt, Artificial Sequence
  Description of Artificial Sequence: Synthetic oligonucleotide
cucuacacacgcacuuaaa

SEQ ID NO: 109828 - RNA, 19 nt, Artificial Sequence
  Description of Artificial Sequence: Synthetic oligonucleotide
cauugugaccauugauggu

SEQ ID NO: 109829 - RNA, 19 nt, Artificial Sequence
  Description of Artificial Sequence: Synthetic oligonucleotide
gaggguaguuucaggaaau

SEQ ID NO: 109830 - RNA, 19 nt, Artificial Sequence
  Description of Artificial Sequence: Synthetic oligonucleotide
aguaccucgcugggguuau

SEQ ID NO: 109831 - RNA, 19 nt, Artificial Sequence
  Description of Artificial Sequence: Synthetic oligonucleotide
ccacgagaaucaccaaaac

SEQ ID NO: 109832 - RNA, 19 nt, Artificial Sequence
  Description of Artificial Sequence: Synthetic oligonucleotide
gcucgagaaaccgcgccgc

SEQ ID NO: 109833 - RNA, 19 nt, Artificial Sequence
  Description of Artificial Sequence: Synthetic oligonucleotide
cagcccgauuucccgcagc

SEQ ID NO: 109834 - RNA, 19 nt, Artificial Sequence
  Description of Artificial Sequence: Synthetic oligonucleotide
cagccgccgcucgagaaac

SEQ ID NO: 109835 - RNA, 19 nt, Artificial Sequence
  Description of Artificial Sequence: Synthetic oligonucleotide
cgccgcucgagaaaccgcg

SEQ ID NO: 109836 - RNA, 19 nt, Artificial Sequence
  Description of Artificial Sequence: Synthetic oligonucleotide
gcagccuaacuuuuaccua

SEQ ID NO: 109837 - RNA, 19 nt, Artificial Sequence
  Description of Artificial Sequence: Synthetic oligonucleotide
ucgcugggguuauuuccuu

SEQ ID NO: 109838 - RNA, 19 nt, Artificial Sequence
  Description of Artificial Sequence: Synthetic oligonucleotide
cccgauuucccgcagccga

SEQ ID NO: 109839 - RNA, 19 nt, Artificial Sequence
  Description of Artificial Sequence: Synthetic oligonucleotide
gcuuagucgucaagaguuc

SEQ ID NO: 109840 - RNA, 19 nt, Artificial Sequence
  Description of Artificial Sequence: Synthetic oligonucleotide
aucgcggacucagucgcuu

SEQ ID NO: 109841 - RNA, 19 nt, Artificial Sequence
  Description of Artificial Sequence: Synthetic oligonucleotide
cuagaccugugucccugaa

SEQ ID NO: 109842 - RNA, 19 nt, Artificial Sequence
  Description of Artificial Sequence: Synthetic oligonucleotide
cacacgcacgggacucguc

SEQ ID NO: 109843 - RNA, 19 nt, Artificial Sequence
  Description of Artificial Sequence: Synthetic oligonucleotide
ggguaguacaaugggcaaa

SEQ ID NO: 109844 - RNA, 19 nt, Artificial Sequence
  Description of Artificial Sequence: Synthetic oligonucleotide
ccgcucgagaaaccgcgcc

SEQ ID NO: 109845 - RNA, 19 nt, Artificial Sequence
  Description of Artificial Sequence: Synthetic oligonucleotide
auccuggcuaauagcuuuu

SEQ ID NO: 109846 - RNA, 19 nt, Artificial Sequence
  Description of Artificial Sequence: Synthetic oligonucleotide
cccugaguaucacaguucu

SEQ ID NO: 109847 - RNA, 19 nt, Artificial Sequence
  Description of Artificial Sequence: Synthetic oligonucleotide
ccgagcgagaugagaaaga

SEQ ID NO: 109848 - RNA, 19 nt, Artificial Sequence
  Description of Artificial Sequence: Synthetic oligonucleotide
gggacucguccugacgcug

SEQ ID NO: 109849 - RNA, 19 nt, Artificial Sequence
  Description of Artificial Sequence: Synthetic oligonucleotide
guacuagaccugugucccu

SEQ ID NO: 109850 - RNA, 19 nt, Artificial Sequence
  Description of Artificial Sequence: Synthetic oligonucleotide
cucagucgcuucagcccga

SEQ ID NO: 109851 - RNA, 19 nt, Artificial Sequence
  Description of Artificial Sequence: Synthetic oligonucleotide
cguagccaaccuacagcag

SEQ ID NO: 109852 - RNA, 19 nt, Artificial Sequence
  Description of Artificial Sequence: Synthetic oligonucleotide
ggggaaagaccugcacaca

SEQ ID NO: 109853 - RNA, 19 nt, Artificial Sequence
  Description of Artificial Sequence: Synthetic oligonucleotide
gcggacucagucgcuucag

SEQ ID NO: 109854 - RNA, 19 nt, Artificial Sequence
  Description of Artificial Sequence: Synthetic oligonucleotide
gcccgauuucccgcagccg

SEQ ID NO: 109855 - RNA, 19 nt, Artificial Sequence
  Description of Artificial Sequence: Synthetic oligonucleotide
cagacucacugauguguau

SEQ ID NO: 109856 - RNA, 19 nt, Artificial Sequence
  Description of Artificial Sequence: Synthetic oligonucleotide
cccuuaaguuaacuagaua

SEQ ID NO: 109857 - RNA, 19 nt, Artificial Sequence
  Description of Artificial Sequence: Synthetic oligonucleotide
acccacuccuuaacuuauu

SEQ ID NO: 109858 - RNA, 19 nt, Artificial Sequence
  Description of Artificial Sequence: Synthetic oligonucleotide
cucuugcuacagcacguuu

SEQ ID NO: 109859 - RNA, 19 nt, Artificial Sequence
  Description of Artificial Sequence: Synthetic oligonucleotide
gcggacgcacacgcacggg

SEQ ID NO: 109860 - RNA, 19 nt, Artificial Sequence
  Description of Artificial Sequence: Synthetic oligonucleotide
gcacgggacucguccugac

SEQ ID NO: 109861 - RNA, 19 nt, Artificial Sequence
  Description of Artificial Sequence: Synthetic oligonucleotide
gccgcucgagaaaccgcgc

SEQ ID NO: 109862 - RNA, 19 nt, Artificial Sequence
  Description of Artificial Sequence: Synthetic oligonucleotide
ccauacccauuauagccau

SEQ ID NO: 109863 - RNA, 19 nt, Artificial Sequence
  Description of Artificial Sequence: Synthetic oligonucleotide
agccgggaccgccgcuuuu

SEQ ID NO: 109864 - RNA, 19 nt, Artificial Sequence
  Description of Artificial Sequence: Synthetic oligonucleotide
gccgggaccgccgcuuuuc

SEQ ID NO: 109865 - RNA, 19 nt, Artificial Sequence
  Description of Artificial Sequence: Synthetic oligonucleotide
ccuuagcuaauuugauguu

SEQ ID NO: 109866 - RNA, 19 nt, Artificial Sequence
  Description of Artificial Sequence: Synthetic oligonucleotide
caucgcggacucagucgcu

SEQ ID NO: 109867 - RNA, 19 nt, Artificial Sequence
  Description of Artificial Sequence: Synthetic oligonucleotide
cggacgcacacgcacggga

SEQ ID NO: 109868 - RNA, 19 nt, Artificial Sequence
  Description of Artificial Sequence: Synthetic oligonucleotide
ccauaguuagaagguugcu

SEQ ID NO: 109869 - RNA, 19 nt, Artificial Sequence
  Description of Artificial Sequence: Synthetic oligonucleotide
ggacucguccugacgcugu

SEQ ID NO: 109870 - RNA, 19 nt, Artificial Sequence
  Description of Artificial Sequence: Synthetic oligonucleotide
cccacuccuuaacuuauuu

SEQ ID NO: 109871 - RNA, 19 nt, Artificial Sequence
  Description of Artificial Sequence: Synthetic oligonucleotide
cguugucuuauuacaccau

SEQ ID NO: 109872 - RNA, 19 nt, Artificial Sequence
  Description of Artificial Sequence: Synthetic oligonucleotide
gagccgggaccgccgcuuu

SEQ ID NO: 109873 - RNA, 19 nt, Artificial Sequence
  Description of Artificial Sequence: Synthetic oligonucleotide
cgggacucguccugacgcu

SEQ ID NO: 109874 - RNA, 19 nt, Artificial Sequence
  Description of Artificial Sequence: Synthetic oligonucleotide
ccgggaccgccgcuuuucu

SEQ ID NO: 109875 - RNA, 19 nt, Artificial Sequence
  Description of Artificial Sequence: Synthetic oligonucleotide
guaccucgcugggguuauu

SEQ ID NO: 109876 - RNA, 19 nt, Artificial Sequence
  Description of Artificial Sequence: Synthetic oligonucleotide
aaacauuugccuuaguucc

SEQ ID NO: 109877 - RNA, 19 nt, Artificial Sequence
  Description of Artificial Sequence: Synthetic oligonucleotide
uauacaacguugaagauga

SEQ ID NO: 109878 - RNA, 19 nt, Artificial Sequence
  Description of Artificial Sequence: Synthetic oligonucleotide
gaugacaggagaucgacgg

SEQ ID NO: 109879 - RNA, 19 nt, Artificial Sequence
  Description of Artificial Sequence: Synthetic oligonucleotide
aucuucuacacacacacac

SEQ ID NO: 109880 - RNA, 19 nt, Artificial Sequence
  Description of Artificial Sequence: Synthetic oligonucleotide
aaacuggcuguccagaccg

SEQ ID NO: 109881 - RNA, 19 nt, Artificial Sequence
  Description of Artificial Sequence: Synthetic oligonucleotide
ugagauaagagaucuacgc

SEQ ID NO: 109882 - RNA, 19 nt, Artificial Sequence
  Description of Artificial Sequence: Synthetic oligonucleotide
uuagccuuuagcuuagagg

SEQ ID NO: 109883 - RNA, 19 nt, Artificial Sequence
  Description of Artificial Sequence: Synthetic oligonucleotide
uuuauugcuauguuugcag

SEQ ID NO: 109884 - RNA, 19 nt, Artificial Sequence
  Description of Artificial Sequence: Synthetic oligonucleotide
aauggggauuccuccaacc

SEQ ID NO: 109885 - RNA, 19 nt, Artificial Sequence
  Description of Artificial Sequence: Synthetic oligonucleotide
ugugaguuuaaccugcuac

SEQ ID NO: 109886 - RNA, 19 nt, Artificial Sequence
  Description of Artificial Sequence: Synthetic oligonucleotide
uagggaauaaggaacacac

SEQ ID NO: 109887 - RNA, 19 nt, Artificial Sequence
  Description of Artificial Sequence: Synthetic oligonucleotide
ucuacacacacacacacac

SEQ ID NO: 109888 - RNA, 19 nt, Artificial Sequence
  Description of Artificial Sequence: Synthetic oligonucleotide
auaaauucacacuccuugg

SEQ ID NO: 109889 - RNA, 19 nt, Artificial Sequence
  Description of Artificial Sequence: Synthetic oligonucleotide
aaacggaaguaguaggaag

SEQ ID NO: 109890 - RNA, 19 nt, Artificial Sequence
  Description of Artificial Sequence: Synthetic oligonucleotide
gaugauaccauccagggcu

SEQ ID NO: 109891 - RNA, 19 nt, Artificial Sequence
  Description of Artificial Sequence: Synthetic oligonucleotide
agaucuacgcaucuucuac

SEQ ID NO: 109892 - RNA, 19 nt, Artificial Sequence
  Description of Artificial Sequence: Synthetic oligonucleotide
uagguauuguuguagacca

SEQ ID NO: 109893 - RNA, 19 nt, Artificial Sequence
  Description of Artificial Sequence: Synthetic oligonucleotide
ucuagaauaggguugggaa

SEQ ID NO: 109894 - RNA, 19 nt, Artificial Sequence
  Description of Artificial Sequence: Synthetic oligonucleotide
agcuccguaaacccaagcc

SEQ ID NO: 109895 - RNA, 19 nt, Artificial Sequence
  Description of Artificial Sequence: Synthetic oligonucleotide
aaauucacacuccuuggcu

SEQ ID NO: 109896 - RNA, 19 nt, Artificial Sequence
  Description of Artificial Sequence: Synthetic oligonucleotide
uacacacacacacacacac

SEQ ID NO: 109897 - RNA, 19 nt, Artificial Sequence
  Description of Artificial Sequence: Synthetic oligonucleotide
uucaccuaugaaaauuaag

SEQ ID NO: 109898 - RNA, 19 nt, Artificial Sequence
  Description of Artificial Sequence: Synthetic oligonucleotide
gauauaguagguguugcag

SEQ ID NO: 109899 - RNA, 19 nt, Artificial Sequence
  Description of Artificial Sequence: Synthetic oligonucleotide
aucuauccauaccugaggg

SEQ ID NO: 109900 - RNA, 19 nt, Artificial Sequence
  Description of Artificial Sequence: Synthetic oligonucleotide
aauaggggacagauguucc

SEQ ID NO: 109901 - RNA, 19 nt, Artificial Sequence
  Description of Artificial Sequence: Synthetic oligonucleotide
ucauaguauacaacguuga

SEQ ID NO: 109902 - RNA, 19 nt, Artificial Sequence
  Description of Artificial Sequence: Synthetic oligonucleotide
gugaagguguguuacagag

SEQ ID NO: 109903 - RNA, 19 nt, Artificial Sequence
  Description of Artificial Sequence: Synthetic oligonucleotide
ucaaaaguacauuagccuu

SEQ ID NO: 109904 - RNA, 19 nt, Artificial Sequence
  Description of Artificial Sequence: Synthetic oligonucleotide
agauaagagaucuacgcau

SEQ ID NO: 109905 - RNA, 19 nt, Artificial Sequence
  Description of Artificial Sequence: Synthetic oligonucleotide
ucuagggcuacuuagcuau

SEQ ID NO: 109906 - RNA, 19 nt, Artificial Sequence
  Description of Artificial Sequence: Synthetic oligonucleotide
cuacuuagcuaucucaggc

SEQ ID NO: 109907 - RNA, 19 nt, Artificial Sequence
  Description of Artificial Sequence: Synthetic oligonucleotide
augcuauagccuucuaccc

SEQ ID NO: 109908 - RNA, 19 nt, Artificial Sequence
  Description of Artificial Sequence: Synthetic oligonucleotide
gacauagggaauaaggaac

SEQ ID NO: 109909 - RNA, 19 nt, Artificial Sequence
  Description of Artificial Sequence: Synthetic oligonucleotide
uguugaagcgauuguagcu

SEQ ID NO: 109910 - RNA, 19 nt, Artificial Sequence
  Description of Artificial Sequence: Synthetic oligonucleotide
ucaugaacuggccuaguga

SEQ ID NO: 109911 - RNA, 19 nt, Artificial Sequence
  Description of Artificial Sequence: Synthetic oligonucleotide
agaugauaccauccagggc

SEQ ID NO: 109912 - RNA, 19 nt, Artificial Sequence
  Description of Artificial Sequence: Synthetic oligonucleotide
uaaccugcuacacggaaga

SEQ ID NO: 109913 - RNA, 19 nt, Artificial Sequence
  Description of Artificial Sequence: Synthetic oligonucleotide
aucuaauccagcugaaaca

SEQ ID NO: 109914 - RNA, 19 nt, Artificial Sequence
  Description of Artificial Sequence: Synthetic oligonucleotide
aacguugaagaugaagaug

SEQ ID NO: 109915 - RNA, 19 nt, Artificial Sequence
  Description of Artificial Sequence: Synthetic oligonucleotide
cuuucuagggcuacuuagc

SEQ ID NO: 109916 - RNA, 19 nt, Artificial Sequence
  Description of Artificial Sequence: Synthetic oligonucleotide
agggaucuaauccagcuga

SEQ ID NO: 109917 - RNA, 19 nt, Artificial Sequence
  Description of Artificial Sequence: Synthetic oligonucleotide
ucuauccauaccugagggg

SEQ ID NO: 109918 - RNA, 19 nt, Artificial Sequence
  Description of Artificial Sequence: Synthetic oligonucleotide
acacacacacacucagacc

SEQ ID NO: 109919 - RNA, 19 nt, Artificial Sequence
  Description of Artificial Sequence: Synthetic oligonucleotide
ugcuauagccuucuacccc

SEQ ID NO: 109920 - RNA, 19 nt, Artificial Sequence
  Description of Artificial Sequence: Synthetic oligonucleotide
cuucuacacacacacacac

SEQ ID NO: 109921 - RNA, 19 nt, Artificial Sequence
  Description of Artificial Sequence: Synthetic oligonucleotide
ugaccagguaauagaagcc

SEQ ID NO: 109922 - RNA, 19 nt, Artificial Sequence
  Description of Artificial Sequence: Synthetic oligonucleotide
ucucuagcuucuagaauag

SEQ ID NO: 109923 - RNA, 19 nt, Artificial Sequence
  Description of Artificial Sequence: Synthetic oligonucleotide
cuuagucuagcccugugug

SEQ ID NO: 109924 - RNA, 19 nt, Artificial Sequence
  Description of Artificial Sequence: Synthetic oligonucleotide
aagacguacauuccgccau

SEQ ID NO: 109925 - RNA, 19 nt, Artificial Sequence
  Description of Artificial Sequence: Synthetic oligonucleotide
ucuucuacacacacacaca

SEQ ID NO: 109926 - RNA, 19 nt, Artificial Sequence
  Description of Artificial Sequence: Synthetic oligonucleotide
uuucuagggcuacuuagcu

SEQ ID NO: 109927 - RNA, 19 nt, Artificial Sequence
  Description of Artificial Sequence: Synthetic oligonucleotide
guauacaacguugaagaug

SEQ ID NO: 109928 - RNA, 19 nt, Artificial Sequence
  Description of Artificial Sequence: Synthetic oligonucleotide
aauucacacuccuuggcua

SEQ ID NO: 109929 - RNA, 19 nt, Artificial Sequence
  Description of Artificial Sequence: Synthetic oligonucleotide
aaaaucugggucccggcau

SEQ ID NO: 109930 - RNA, 19 nt, Artificial Sequence
  Description of Artificial Sequence: Synthetic oligonucleotide
uccacaccuacaaacuggc

SEQ ID NO: 109931 - RNA, 19 nt, Artificial Sequence
  Description of Artificial Sequence: Synthetic oligonucleotide
cacacacacacacacacac

SEQ ID NO: 109932 - RNA, 19 nt, Artificial Sequence
  Description of Artificial Sequence: Synthetic oligonucleotide
agaucgaugacaaagcaaa

SEQ ID NO: 109933 - RNA, 19 nt, Artificial Sequence
  Description of Artificial Sequence: Synthetic oligonucleotide
cuggaagacguacauuccg

SEQ ID NO: 109934 - RNA, 19 nt, Artificial Sequence
  Description of Artificial Sequence: Synthetic oligonucleotide
caucuauccauaccugagg

SEQ ID NO: 109935 - RNA, 19 nt, Artificial Sequence
  Description of Artificial Sequence: Synthetic oligonucleotide
guaauagaagccccaggcc

SEQ ID NO: 109936 - RNA, 19 nt, Artificial Sequence
  Description of Artificial Sequence: Synthetic oligonucleotide
uauaguagguguugcagua

SEQ ID NO: 109937 - RNA, 19 nt, Artificial Sequence
  Description of Artificial Sequence: Synthetic oligonucleotide
ugggacaaugcuauagccu

SEQ ID NO: 109938 - RNA, 19 nt, Artificial Sequence
  Description of Artificial Sequence: Synthetic oligonucleotide
agaucgacggucagcaagc

SEQ ID NO: 109939 - RNA, 19 nt, Artificial Sequence
  Description of Artificial Sequence: Synthetic oligonucleotide
guaaacccaagccaccacc

SEQ ID NO: 109940 - RNA, 19 nt, Artificial Sequence
  Description of Artificial Sequence: Synthetic oligonucleotide
cacacacacacacucagac

SEQ ID NO: 109941 - RNA, 19 nt, Artificial Sequence
  Description of Artificial Sequence: Synthetic oligonucleotide
ggaaguaguaggaagccgg

SEQ ID NO: 109942 - RNA, 19 nt, Artificial Sequence
  Description of Artificial Sequence: Synthetic oligonucleotide
auucacacuccuuggcuag

SEQ ID NO: 109943 - RNA, 19 nt, Artificial Sequence
  Description of Artificial Sequence: Synthetic oligonucleotide
gagagaucgaugacaaagc

SEQ ID NO: 109944 - RNA, 19 nt, Artificial Sequence
  Description of Artificial Sequence: Synthetic oligonucleotide
gaaaauggggauuccucca

SEQ ID NO: 109945 - RNA, 19 nt, Artificial Sequence
  Description of Artificial Sequence: Synthetic oligonucleotide
aauuaauauugguggcaau

SEQ ID NO: 109946 - RNA, 19 nt, Artificial Sequence
  Description of Artificial Sequence: Synthetic oligonucleotide
uggcgaaagaucuccacac

SEQ ID NO: 109947 - RNA, 19 nt, Artificial Sequence
  Description of Artificial Sequence: Synthetic oligonucleotide
guugaagcgauuguagcug

SEQ ID NO: 109948 - RNA, 19 nt, Artificial Sequence
  Description of Artificial Sequence: Synthetic oligonucleotide
cacacacacacacacacuc

SEQ ID NO: 109949 - RNA, 19 nt, Artificial Sequence
  Description of Artificial Sequence: Synthetic oligonucleotide
cuuaguuccacugucccuc

SEQ ID NO: 109950 - RNA, 19 nt, Artificial Sequence
  Description of Artificial Sequence: Synthetic oligonucleotide
uuguuguagaccaguggcu

SEQ ID NO: 109951 - RNA, 19 nt, Artificial Sequence
  Description of Artificial Sequence: Synthetic oligonucleotide
ugcguaagagaagaaaauc

SEQ ID NO: 109952 - RNA, 19 nt, Artificial Sequence
  Description of Artificial Sequence: Synthetic oligonucleotide
uguuucaccuaugaaaauu

SEQ ID NO: 109953 - RNA, 19 nt, Artificial Sequence
  Description of Artificial Sequence: Synthetic oligonucleotide
auugcguaagagaagaaaa

SEQ ID NO: 109954 - RNA, 19 nt, Artificial Sequence
  Description of Artificial Sequence: Synthetic oligonucleotide
auaagagaucuacgcaucu

SEQ ID NO: 109955 - RNA, 19 nt, Artificial Sequence
  Description of Artificial Sequence: Synthetic oligonucleotide
uggcaauuggcgcaagaac

SEQ ID NO: 109956 - RNA, 19 nt, Artificial Sequence
  Description of Artificial Sequence: Synthetic oligonucleotide
gaauaggggacagauguuc

SEQ ID NO: 109957 - RNA, 19 nt, Artificial Sequence
  Description of Artificial Sequence: Synthetic oligonucleotide
cucccuuuggaaacggaag

SEQ ID NO: 109958 - RNA, 19 nt, Artificial Sequence
  Description of Artificial Sequence: Synthetic oligonucleotide
aggccuuugaauaggggac

SEQ ID NO: 109959 - RNA, 19 nt, Artificial Sequence
  Description of Artificial Sequence: Synthetic oligonucleotide
cacacacacacacacucag

SEQ ID NO: 109960 - RNA, 19 nt, Artificial Sequence
  Description of Artificial Sequence: Synthetic oligonucleotide
gucaaaaguacauuagccu

SEQ ID NO: 109961 - RNA, 19 nt, Artificial Sequence
  Description of Artificial Sequence: Synthetic oligonucleotide
acauuccgccaucagucac

SEQ ID NO: 109962 - RNA, 19 nt, Artificial Sequence
  Description of Artificial Sequence: Synthetic oligonucleotide
gauaagagaucuacgcauc

SEQ ID NO: 109963 - RNA, 19 nt, Artificial Sequence
  Description of Artificial Sequence: Synthetic oligonucleotide
aaggucgguacccaaucau

SEQ ID NO: 109964 - RNA, 19 nt, Artificial Sequence
  Description of Artificial Sequence: Synthetic oligonucleotide
uugaagcgauuguagcugc

SEQ ID NO: 109965 - RNA, 19 nt, Artificial Sequence
  Description of Artificial Sequence: Synthetic oligonucleotide
caaggcuagaagauagguc

SEQ ID NO: 109966 - RNA, 19 nt, Artificial Sequence
  Description of Artificial Sequence: Synthetic oligonucleotide
agcgauuguagcugccuag

SEQ ID NO: 109967 - RNA, 19 nt, Artificial Sequence
  Description of Artificial Sequence: Synthetic oligonucleotide
uucuacacacacacacaca

SEQ ID NO: 109968 - RNA, 19 nt, Artificial Sequence
  Description of Artificial Sequence: Synthetic oligonucleotide
auggcgaaagaucuccaca

SEQ ID NO: 109969 - RNA, 19 nt, Artificial Sequence
  Description of Artificial Sequence: Synthetic oligonucleotide
cauuccgccaucagucacc

SEQ ID NO: 109970 - RNA, 19 nt, Artificial Sequence
  Description of Artificial Sequence: Synthetic oligonucleotide
uucuagaauaggguuggga

SEQ ID NO: 109971 - RNA, 19 nt, Artificial Sequence
  Description of Artificial Sequence: Synthetic oligonucleotide
uguuguagaccaguggcuc

SEQ ID NO: 109972 - RNA, 19 nt, Artificial Sequence
  Description of Artificial Sequence: Synthetic oligonucleotide
auccauaccugaggggacc

SEQ ID NO: 109973 - RNA, 19 nt, Artificial Sequence
  Description of Artificial Sequence: Synthetic oligonucleotide
gaagacguacauuccgcca

SEQ ID NO: 109974 - RNA, 19 nt, Artificial Sequence
  Description of Artificial Sequence: Synthetic oligonucleotide
gauugcguaagagaagaaa

SEQ ID NO: 109975 - RNA, 19 nt, Artificial Sequence
  Description of Artificial Sequence: Synthetic oligonucleotide
caaacuggcuguccagacc

SEQ ID NO: 109976 - RNA, 19 nt, Artificial Sequence
  Description of Artificial Sequence: Synthetic oligonucleotide
gauggcguccuuguagcag

SEQ ID NO: 109977 - RNA, 19 nt, Artificial Sequence
  Description of Artificial Sequence: Synthetic oligonucleotide
acggagaucucccuuugga

SEQ ID NO: 109978 - RNA, 19 nt, Artificial Sequence
  Description of Artificial Sequence: Synthetic oligonucleotide
uauccauaccugaggggac

SEQ ID NO: 109979 - RNA, 19 nt, Artificial Sequence
  Description of Artificial Sequence: Synthetic oligonucleotide
ucuacgcaucuucuacaca

SEQ ID NO: 109980 - RNA, 19 nt, Artificial Sequence
  Description of Artificial Sequence: Synthetic oligonucleotide
aggggaauguagcagugaa

SEQ ID NO: 109981 - RNA, 19 nt, Artificial Sequence
  Description of Artificial Sequence: Synthetic oligonucleotide
aggguagugccacuagcug

SEQ ID NO: 109982 - RNA, 19 nt, Artificial Sequence
  Description of Artificial Sequence: Synthetic oligonucleotide
caggccuuugaauagggga

SEQ ID NO: 109983 - RNA, 19 nt, Artificial Sequence
  Description of Artificial Sequence: Synthetic oligonucleotide
uacauuccgccaucaguca

SEQ ID NO: 109984 - RNA, 19 nt, Artificial Sequence
  Description of Artificial Sequence: Synthetic oligonucleotide
ucgaugacaggagaucgac

SEQ ID NO: 109985 - RNA, 19 nt, Artificial Sequence
  Description of Artificial Sequence: Synthetic oligonucleotide
agacguacauuccgccauc

SEQ ID NO: 109986 - RNA, 19 nt, Artificial Sequence
  Description of Artificial Sequence: Synthetic oligonucleotide
uacgcaucuucuacacaca

SEQ ID NO: 109987 - RNA, 19 nt, Artificial Sequence
  Description of Artificial Sequence: Synthetic oligonucleotide
cacguagguauuguuguag

SEQ ID NO: 109988 - RNA, 19 nt, Artificial Sequence
  Description of Artificial Sequence: Synthetic oligonucleotide
ucuaccccacacaaacuua

SEQ ID NO: 109989 - RNA, 19 nt, Artificial Sequence
  Description of Artificial Sequence: Synthetic oligonucleotide
acguagguauuguuguaga

SEQ ID NO: 109990 - RNA, 19 nt, Artificial Sequence
  Description of Artificial Sequence: Synthetic oligonucleotide
gcgaaagaucuccacacag

SEQ ID NO: 109991 - RNA, 19 nt, Artificial Sequence
  Description of Artificial Sequence: Synthetic oligonucleotide
ccuuucuagggcuacuuag

SEQ ID NO: 109992 - RNA, 19 nt, Artificial Sequence
  Description of Artificial Sequence: Synthetic oligonucleotide
guauuguuguagaccagug

SEQ ID NO: 109993 - RNA, 19 nt, Artificial Sequence
  Description of Artificial Sequence: Synthetic oligonucleotide
ugccccuaggccgauugcg

SEQ ID NO: 109994 - RNA, 19 nt, Artificial Sequence
  Description of Artificial Sequence: Synthetic oligonucleotide
agugccccuaggccgauug

SEQ ID NO: 109995 - RNA, 19 nt, Artificial Sequence
  Description of Artificial Sequence: Synthetic oligonucleotide
uggccuagugagauuucca

SEQ ID NO: 109996 - RNA, 19 nt, Artificial Sequence
  Description of Artificial Sequence: Synthetic oligonucleotide
uggcuucgccccaccaugg

SEQ ID NO: 109997 - RNA, 19 nt, Artificial Sequence
  Description of Artificial Sequence: Synthetic oligonucleotide
cuagcugaguaguagucaa

SEQ ID NO: 109998 - RNA, 19 nt, Artificial Sequence
  Description of Artificial Sequence: Synthetic oligonucleotide
accauggguacacguaggu

SEQ ID NO: 109999 - RNA, 19 nt, Artificial Sequence
  Description of Artificial Sequence: Synthetic oligonucleotide
ggccuagugagauuuccag

SEQ ID NO: 110000 - RNA, 19 nt, Artificial Sequence
  Description of Artificial Sequence: Synthetic oligonucleotide
ggcaauuggcgcaagaaca

SEQ ID NO: 110001 - RNA, 19 nt, Artificial Sequence
  Description of Artificial Sequence: Synthetic oligonucleotide
ggaagacguacauuccgcc

SEQ ID NO: 110002 - RNA, 19 nt, Artificial Sequence
  Description of Artificial Sequence: Synthetic oligonucleotide
aggcauagggucaccuccc

SEQ ID NO: 110003 - RNA, 19 nt, Artificial Sequence
  Description of Artificial Sequence: Synthetic oligonucleotide
uacaagcagaagucucacu

SEQ ID NO: 110004 - RNA, 19 nt, Artificial Sequence
  Description of Artificial Sequence: Synthetic oligonucleotide
caccauggguacacguagg

SEQ ID NO: 110005 - RNA, 19 nt, Artificial Sequence
  Description of Artificial Sequence: Synthetic oligonucleotide
gaaugguaggguggggaug

SEQ ID NO: 110006 - RNA, 19 nt, Artificial Sequence
  Description of Artificial Sequence: Synthetic oligonucleotide
gccuagugagauuuccagg

SEQ ID NO: 110007 - RNA, 19 nt, Artificial Sequence
  Description of Artificial Sequence: Synthetic oligonucleotide
caauuaauauugguggcaa

SEQ ID NO: 110008 - RNA, 19 nt, Artificial Sequence
  Description of Artificial Sequence: Synthetic oligonucleotide
ggcuacuuagcuaucucag

SEQ ID NO: 110009 - RNA, 19 nt, Artificial Sequence
  Description of Artificial Sequence: Synthetic oligonucleotide
ggggauuccuccaaccagg

SEQ ID NO: 110010 - RNA, 19 nt, Artificial Sequence
  Description of Artificial Sequence: Synthetic oligonucleotide
aaccugcuacacggaagac

SEQ ID NO: 110011 - RNA, 19 nt, Artificial Sequence
  Description of Artificial Sequence: Synthetic oligonucleotide
uucuagggcuacuuagcua

SEQ ID NO: 110012 - RNA, 19 nt, Artificial Sequence
  Description of Artificial Sequence: Synthetic oligonucleotide
agcauggggauacccuuga

SEQ ID NO: 110013 - RNA, 19 nt, Artificial Sequence
  Description of Artificial Sequence: Synthetic oligonucleotide
caugcuaggugagcagacc

SEQ ID NO: 110014 - RNA, 19 nt, Artificial Sequence
  Description of Artificial Sequence: Synthetic oligonucleotide
cauacucaacagccugaag

SEQ ID NO: 110015 - RNA, 19 nt, Artificial Sequence
  Description of Artificial Sequence: Synthetic oligonucleotide
gagaucgaugacaaagcaa

SEQ ID NO: 110016 - RNA, 19 nt, Artificial Sequence
  Description of Artificial Sequence: Synthetic oligonucleotide
gauagcauggggauacccu

SEQ ID NO: 110017 - RNA, 19 nt, Artificial Sequence
  Description of Artificial Sequence: Synthetic oligonucleotide
cagggcaaucaggacauag

SEQ ID NO: 110018 - RNA, 19 nt, Artificial Sequence
  Description of Artificial Sequence: Synthetic oligonucleotide
gcaagccugagcaugcuag

SEQ ID NO: 110019 - RNA, 19 nt, Artificial Sequence
  Description of Artificial Sequence: Synthetic oligonucleotide
cuggccuagugagauuucc

SEQ ID NO: 110020 - RNA, 19 nt, Artificial Sequence
  Description of Artificial Sequence: Synthetic oligonucleotide
acguacauuccgccaucag

SEQ ID NO: 110021 - RNA, 19 nt, Artificial Sequence
  Description of Artificial Sequence: Synthetic oligonucleotide
ccacguaggggaauguagc

SEQ ID NO: 110022 - RNA, 19 nt, Artificial Sequence
  Description of Artificial Sequence: Synthetic oligonucleotide
cauagggaauaaggaacac

SEQ ID NO: 110023 - RNA, 19 nt, Artificial Sequence
  Description of Artificial Sequence: Synthetic oligonucleotide
uaagagaucuacgcaucuu

SEQ ID NO: 110024 - RNA, 19 nt, Artificial Sequence
  Description of Artificial Sequence: Synthetic oligonucleotide
ggugccuuuugcccugagg

SEQ ID NO: 110025 - RNA, 19 nt, Artificial Sequence
  Description of Artificial Sequence: Synthetic oligonucleotide
gcuccguaaacccaagcca

SEQ ID NO: 110026 - RNA, 19 nt, Artificial Sequence
  Description of Artificial Sequence: Synthetic oligonucleotide
cuuugaauaggggacagau

SEQ ID NO: 110027 - RNA, 19 nt, Artificial Sequence
  Description of Artificial Sequence: Synthetic oligonucleotide
caccccucgcaccagcagc

SEQ ID NO: 110028 - RNA, 19 nt, Artificial Sequence
  Description of Artificial Sequence: Synthetic oligonucleotide
augggacacagaugugagu

SEQ ID NO: 110029 - RNA, 19 nt, Artificial Sequence
  Description of Artificial Sequence: Synthetic oligonucleotide
cucuagcuucuagaauagg

SEQ ID NO: 110030 - RNA, 19 nt, Artificial Sequence
  Description of Artificial Sequence: Synthetic oligonucleotide
aggaccacguaggggaaug

SEQ ID NO: 110031 - RNA, 19 nt, Artificial Sequence
  Description of Artificial Sequence: Synthetic oligonucleotide
cuacacacacacacacaca

SEQ ID NO: 110032 - RNA, 19 nt, Artificial Sequence
  Description of Artificial Sequence: Synthetic oligonucleotide
ggucgguacccaaucauac

SEQ ID NO: 110033 - RNA, 19 nt, Artificial Sequence
  Description of Artificial Sequence: Synthetic oligonucleotide
gcgauuguagcugccuagg

SEQ ID NO: 110034 - RNA, 19 nt, Artificial Sequence
  Description of Artificial Sequence: Synthetic oligonucleotide
cacggaagacuugagaugu

SEQ ID NO: 110035 - RNA, 19 nt, Artificial Sequence
  Description of Artificial Sequence: Synthetic oligonucleotide
ggggacagauguuccagac

SEQ ID NO: 110036 - RNA, 19 nt, Artificial Sequence
  Description of Artificial Sequence: Synthetic oligonucleotide
gcaauuggcgcaagaacac

SEQ ID NO: 110037 - RNA, 19 nt, Artificial Sequence
  Description of Artificial Sequence: Synthetic oligonucleotide
uucgccccaccauggguac

SEQ ID NO: 110038 - RNA, 19 nt, Artificial Sequence
  Description of Artificial Sequence: Synthetic oligonucleotide
cuauagccuucuaccccac

SEQ ID NO: 110039 - RNA, 19 nt, Artificial Sequence
  Description of Artificial Sequence: Synthetic oligonucleotide
ugauuagugccaggaugau

SEQ ID NO: 110040 - RNA, 19 nt, Artificial Sequence
  Description of Artificial Sequence: Synthetic oligonucleotide
uguguccaugggugauccc

SEQ ID NO: 110041 - RNA, 19 nt, Artificial Sequence
  Description of Artificial Sequence: Synthetic oligonucleotide
acacguagguauuguugua

SEQ ID NO: 110042 - RNA, 19 nt, Artificial Sequence
  Description of Artificial Sequence: Synthetic oligonucleotide
ggugaagguguguuacaga

SEQ ID NO: 110043 - RNA, 19 nt, Artificial Sequence
  Description of Artificial Sequence: Synthetic oligonucleotide
acacacacacacacacuca

SEQ ID NO: 110044 - RNA, 19 nt, Artificial Sequence
  Description of Artificial Sequence: Synthetic oligonucleotide
cuucgccccaccaugggua

SEQ ID NO: 110045 - RNA, 19 nt, Artificial Sequence
  Description of Artificial Sequence: Synthetic oligonucleotide
ugccacuagcugaguagua

SEQ ID NO: 110046 - RNA, 19 nt, Artificial Sequence
  Description of Artificial Sequence: Synthetic oligonucleotide
cucuuguuucaccuaugaa

SEQ ID NO: 110047 - RNA, 19 nt, Artificial Sequence
  Description of Artificial Sequence: Synthetic oligonucleotide
gggacaaugcuauagccuu

SEQ ID NO: 110048 - RNA, 19 nt, Artificial Sequence
  Description of Artificial Sequence: Synthetic oligonucleotide
gguauuguuguagaccagu

SEQ ID NO: 110049 - RNA, 19 nt, Artificial Sequence
  Description of Artificial Sequence: Synthetic oligonucleotide
agguauuguuguagaccag

SEQ ID NO: 110050 - RNA, 19 nt, Artificial Sequence
  Description of Artificial Sequence: Synthetic oligonucleotide
ggccgauugcguaagagaa

SEQ ID NO: 110051 - RNA, 19 nt, Artificial Sequence
  Description of Artificial Sequence: Synthetic oligonucleotide
auaccugaggggaccccag

SEQ ID NO: 110052 - RNA, 19 nt, Artificial Sequence
  Description of Artificial Sequence: Synthetic oligonucleotide
acacacacacacacacaca

SEQ ID NO: 110053 - RNA, 19 nt, Artificial Sequence
  Description of Artificial Sequence: Synthetic oligonucleotide
acacacacacacacacacu

SEQ ID NO: 110054 - RNA, 19 nt, Artificial Sequence
  Description of Artificial Sequence: Synthetic oligonucleotide
guacccaaucauacaggca

SEQ ID NO: 110055 - RNA, 19 nt, Artificial Sequence
  Description of Artificial Sequence: Synthetic oligonucleotide
agccuuuagcuuagaggug

SEQ ID NO: 110056 - RNA, 19 nt, Artificial Sequence
  Description of Artificial Sequence: Synthetic oligonucleotide
caauuggcgcaagaacaca

SEQ ID NO: 110057 - RNA, 19 nt, Artificial Sequence
  Description of Artificial Sequence: Synthetic oligonucleotide
acacacacacacacucaga

SEQ ID NO: 110058 - RNA, 19 nt, Artificial Sequence
  Description of Artificial Sequence: Synthetic oligonucleotide
aggcuagaagauagguccu

SEQ ID NO: 110059 - RNA, 19 nt, Artificial Sequence
  Description of Artificial Sequence: Synthetic oligonucleotide
acuggccuagugagauuuc

SEQ ID NO: 110060 - RNA, 19 nt, Artificial Sequence
  Description of Artificial Sequence: Synthetic oligonucleotide
cguagguauuguuguagac

SEQ ID NO: 110061 - RNA, 19 nt, Artificial Sequence
  Description of Artificial Sequence: Synthetic oligonucleotide
ggcgaaagaucuccacaca

SEQ ID NO: 110062 - RNA, 19 nt, Artificial Sequence
  Description of Artificial Sequence: Synthetic oligonucleotide
agcucuuguuucaccuaug

SEQ ID NO: 110063 - RNA, 19 nt, Artificial Sequence
  Description of Artificial Sequence: Synthetic oligonucleotide
acggaagacuugagauguc

SEQ ID NO: 110064 - RNA, 19 nt, Artificial Sequence
  Description of Artificial Sequence: Synthetic oligonucleotide
ggaugugaaggaaaggaau

SEQ ID NO: 110065 - RNA, 19 nt, Artificial Sequence
  Description of Artificial Sequence: Synthetic oligonucleotide
ggcgcaagaacacaagguu

SEQ ID NO: 110066 - RNA, 19 nt, Artificial Sequence
  Description of Artificial Sequence: Synthetic oligonucleotide
cugcuacacggaagacuug

SEQ ID NO: 110067 - RNA, 19 nt, Artificial Sequence
  Description of Artificial Sequence: Synthetic oligonucleotide
ccgauugcguaagagaaga

SEQ ID NO: 110068 - RNA, 19 nt, Artificial Sequence
  Description of Artificial Sequence: Synthetic oligonucleotide
ccccaaacugucaaggaaa

SEQ ID NO: 110069 - RNA, 19 nt, Artificial Sequence
  Description of Artificial Sequence: Synthetic oligonucleotide
gcauagggucaccucccag

SEQ ID NO: 110070 - RNA, 19 nt, Artificial Sequence
  Description of Artificial Sequence: Synthetic oligonucleotide
ucccggcaucuauccauac

SEQ ID NO: 110071 - RNA, 19 nt, Artificial Sequence
  Description of Artificial Sequence: Synthetic oligonucleotide
cgaugacaggagaucgacg

SEQ ID NO: 110072 - RNA, 19 nt, Artificial Sequence
  Description of Artificial Sequence: Synthetic oligonucleotide
agggcaaggucgguaccca

SEQ ID NO: 110073 - RNA, 19 nt, Artificial Sequence
  Description of Artificial Sequence: Synthetic oligonucleotide
gcgcaagaacacaagguuc

SEQ ID NO: 110074 - RNA, 19 nt, Artificial Sequence
  Description of Artificial Sequence: Synthetic oligonucleotide
agccgggaggagauccagg

SEQ ID NO: 110075 - RNA, 19 nt, Artificial Sequence
  Description of Artificial Sequence: Synthetic oligonucleotide
aggucgguacccaaucaua

SEQ ID NO: 110076 - RNA, 19 nt, Artificial Sequence
  Description of Artificial Sequence: Synthetic oligonucleotide
gccgauugcguaagagaag

SEQ ID NO: 110077 - RNA, 19 nt, Artificial Sequence
  Description of Artificial Sequence: Synthetic oligonucleotide
ggcuuagucuagcccugug

SEQ ID NO: 110078 - RNA, 19 nt, Artificial Sequence
  Description of Artificial Sequence: Synthetic oligonucleotide
uggcuuagucuagcccugu

SEQ ID NO: 110079 - RNA, 19 nt, Artificial Sequence
  Description of Artificial Sequence: Synthetic oligonucleotide
cccggcaucuauccauacc

SEQ ID NO: 110080 - RNA, 19 nt, Artificial Sequence
  Description of Artificial Sequence: Synthetic oligonucleotide
ggcugcuauggcuaccaaa

SEQ ID NO: 110081 - RNA, 19 nt, Artificial Sequence
  Description of Artificial Sequence: Synthetic oligonucleotide
gcuuagucuagcccugugu

SEQ ID NO: 110082 - RNA, 19 nt, Artificial Sequence
  Description of Artificial Sequence: Synthetic oligonucleotide
ccacacaaacuuaggggca

SEQ ID NO: 110083 - RNA, 19 nt, Artificial Sequence
  Description of Artificial Sequence: Synthetic oligonucleotide
uguagaccaguggcucaua

SEQ ID NO: 110084 - RNA, 19 nt, Artificial Sequence
  Description of Artificial Sequence: Synthetic oligonucleotide
accccucgcaccagcagca

SEQ ID NO: 110085 - RNA, 19 nt, Artificial Sequence
  Description of Artificial Sequence: Synthetic oligonucleotide
ccggcaucuauccauaccu

SEQ ID NO: 110086 - RNA, 19 nt, Artificial Sequence
  Description of Artificial Sequence: Synthetic oligonucleotide
gaccacguaggggaaugua

SEQ ID NO: 110087 - RNA, 19 nt, Artificial Sequence
  Description of Artificial Sequence: Synthetic oligonucleotide
acccaagcucauacaauua

SEQ ID NO: 110088 - RNA, 19 nt, Artificial Sequence
  Description of Artificial Sequence: Synthetic oligonucleotide
caugggugaucccugcaau

SEQ ID NO: 110089 - RNA, 19 nt, Artificial Sequence
  Description of Artificial Sequence: Synthetic oligonucleotide
gugccccuaggccgauugc

SEQ ID NO: 110090 - RNA, 19 nt, Artificial Sequence
  Description of Artificial Sequence: Synthetic oligonucleotide
ggaucuaauccagcugaaa

SEQ ID NO: 110091 - RNA, 19 nt, Artificial Sequence
  Description of Artificial Sequence: Synthetic oligonucleotide
gcaugcuaggugagcagac

SEQ ID NO: 110092 - RNA, 19 nt, Artificial Sequence
  Description of Artificial Sequence: Synthetic oligonucleotide
gcaaggcuagaagauaggu

SEQ ID NO: 110093 - RNA, 19 nt, Artificial Sequence
  Description of Artificial Sequence: Synthetic oligonucleotide
ccagcgcucugccauggug

SEQ ID NO: 110094 - RNA, 19 nt, Artificial Sequence
  Description of Artificial Sequence: Synthetic oligonucleotide
ggaaugguaggguggggau

SEQ ID NO: 110095 - RNA, 19 nt, Artificial Sequence
  Description of Artificial Sequence: Synthetic oligonucleotide
ccuaggccgauugcguaag

SEQ ID NO: 110096 - RNA, 19 nt, Artificial Sequence
  Description of Artificial Sequence: Synthetic oligonucleotide
uggcguccuuguagcaguu

SEQ ID NO: 110097 - RNA, 19 nt, Artificial Sequence
  Description of Artificial Sequence: Synthetic oligonucleotide
caccuacaaacuggcuguc

SEQ ID NO: 110098 - RNA, 19 nt, Artificial Sequence
  Description of Artificial Sequence: Synthetic oligonucleotide
ggcauagggucaccuccca

SEQ ID NO: 110099 - RNA, 19 nt, Artificial Sequence
  Description of Artificial Sequence: Synthetic oligonucleotide
cguaaacccaagccaccac

SEQ ID NO: 110100 - RNA, 19 nt, Artificial Sequence
  Description of Artificial Sequence: Synthetic oligonucleotide
gacggucagcaagcugguc

SEQ ID NO: 110101 - RNA, 19 nt, Artificial Sequence
  Description of Artificial Sequence: Synthetic oligonucleotide
cuaggccgauugcguaaga

SEQ ID NO: 110102 - RNA, 19 nt, Artificial Sequence
  Description of Artificial Sequence: Synthetic oligonucleotide
ccgggaggagauccaggag

SEQ ID NO: 110103 - RNA, 19 nt, Artificial Sequence
  Description of Artificial Sequence: Synthetic oligonucleotide
ccaugggugaucccugcaa

SEQ ID NO: 110104 - RNA, 19 nt, Artificial Sequence
  Description of Artificial Sequence: Synthetic oligonucleotide
gggauagcauggggauacc

SEQ ID NO: 110105 - RNA, 19 nt, Artificial Sequence
  Description of Artificial Sequence: Synthetic oligonucleotide
gccuuucuagggcuacuua

SEQ ID NO: 110106 - RNA, 19 nt, Artificial Sequence
  Description of Artificial Sequence: Synthetic oligonucleotide
auacaacguugaagaugaa

SEQ ID NO: 110107 - RNA, 19 nt, Artificial Sequence
  Description of Artificial Sequence: Synthetic oligonucleotide
cggagaucucccuuuggaa

SEQ ID NO: 110108 - RNA, 19 nt, Artificial Sequence
  Description of Artificial Sequence: Synthetic oligonucleotide
cccuaggccgauugcguaa

SEQ ID NO: 110109 - RNA, 19 nt, Artificial Sequence
  Description of Artificial Sequence: Synthetic oligonucleotide
cuucaugaacuggccuagu

SEQ ID NO: 110110 - RNA, 19 nt, Artificial Sequence
  Description of Artificial Sequence: Synthetic oligonucleotide
cgauugcguaagagaagaa

SEQ ID NO: 110111 - RNA, 19 nt, Artificial Sequence
  Description of Artificial Sequence: Synthetic oligonucleotide
ccccuaggccgauugcgua

SEQ ID NO: 110112 - RNA, 19 nt, Artificial Sequence
  Description of Artificial Sequence: Synthetic oligonucleotide
gccccuaggccgauugcgu

SEQ ID NO: 110113 - RNA, 19 nt, Artificial Sequence
  Description of Artificial Sequence: Synthetic oligonucleotide
ggaccacguaggggaaugu

SEQ ID NO: 110114 - RNA, 19 nt, Artificial Sequence
  Description of Artificial Sequence: Synthetic oligonucleotide
gggccacggagaucucccu

SEQ ID NO: 110115 - RNA, 19 nt, Artificial Sequence
  Description of Artificial Sequence: Synthetic oligonucleotide
ccccgcagagagucucaaa

SEQ ID NO: 110116 - RNA, 19 nt, Artificial Sequence
  Description of Artificial Sequence: Synthetic oligonucleotide
gccccgcagagagucucaa

SEQ ID NO: 110117 - RNA, 19 nt, Artificial Sequence
  Description of Artificial Sequence: Synthetic oligonucleotide
ccagccccgcagagagucu

SEQ ID NO: 110118 - RNA, 19 nt, Artificial Sequence
  Description of Artificial Sequence: Synthetic oligonucleotide
aguuaggucaaauaggugc

SEQ ID NO: 110119 - RNA, 19 nt, Artificial Sequence
  Description of Artificial Sequence: Synthetic oligonucleotide
uaucaaauguaucacaccc

SEQ ID NO: 110120 - RNA, 19 nt, Artificial Sequence
  Description of Artificial Sequence: Synthetic oligonucleotide
aauaccgccuucuaggauc

SEQ ID NO: 110121 - RNA, 19 nt, Artificial Sequence
  Description of Artificial Sequence: Synthetic oligonucleotide
acuaaguuaacccauuauc

SEQ ID NO: 110122 - RNA, 19 nt, Artificial Sequence
  Description of Artificial Sequence: Synthetic oligonucleotide
aagacauacgaagauauuc

SEQ ID NO: 110123 - RNA, 19 nt, Artificial Sequence
  Description of Artificial Sequence: Synthetic oligonucleotide
caaaauaccgccuucuagg

SEQ ID NO: 110124 - RNA, 19 nt, Artificial Sequence
  Description of Artificial Sequence: Synthetic oligonucleotide
uaguuaaccgguuagcuag

SEQ ID NO: 110125 - RNA, 19 nt, Artificial Sequence
  Description of Artificial Sequence: Synthetic oligonucleotide
auaagcugauuuuauuagc

SEQ ID NO: 110126 - RNA, 19 nt, Artificial Sequence
  Description of Artificial Sequence: Synthetic oligonucleotide
aagucuacguaacaguuug

SEQ ID NO: 110127 - RNA, 19 nt, Artificial Sequence
  Description of Artificial Sequence: Synthetic oligonucleotide
gaacuuaaagaacuggcug

SEQ ID NO: 110128 - RNA, 19 nt, Artificial Sequence
  Description of Artificial Sequence: Synthetic oligonucleotide
uaagcugauuuuauuagca

SEQ ID NO: 110129 - RNA, 19 nt, Artificial Sequence
  Description of Artificial Sequence: Synthetic oligonucleotide
cauauggaugguaaguucc

SEQ ID NO: 110130 - RNA, 19 nt, Artificial Sequence
  Description of Artificial Sequence: Synthetic oligonucleotide
cugacuagcacacagcccc

SEQ ID NO: 110131 - RNA, 19 nt, Artificial Sequence
  Description of Artificial Sequence: Synthetic oligonucleotide
aguaugaccaggcuuaacu

SEQ ID NO: 110132 - RNA, 19 nt, Artificial Sequence
  Description of Artificial Sequence: Synthetic oligonucleotide
aucuuuaguucuuagugag

SEQ ID NO: 110133 - RNA, 19 nt, Artificial Sequence
  Description of Artificial Sequence: Synthetic oligonucleotide
agcguguugaaccuuuggc

SEQ ID NO: 110134 - RNA, 19 nt, Artificial Sequence
  Description of Artificial Sequence: Synthetic oligonucleotide
agguauucuacuuaaggcu

SEQ ID NO: 110135 - RNA, 19 nt, Artificial Sequence
  Description of Artificial Sequence: Synthetic oligonucleotide
ucccuagugcccuugaagg

SEQ ID NO: 110136 - RNA, 19 nt, Artificial Sequence
  Description of Artificial Sequence: Synthetic oligonucleotide
gggaauauagacaacaaag

SEQ ID NO: 110137 - RNA, 19 nt, Artificial Sequence
  Description of Artificial Sequence: Synthetic oligonucleotide
auugaauaggacuucagua

SEQ ID NO: 110138 - RNA, 19 nt, Artificial Sequence
  Description of Artificial Sequence: Synthetic oligonucleotide
ucagucucgagacacaauc

SEQ ID NO: 110139 - RNA, 19 nt, Artificial Sequence
  Description of Artificial Sequence: Synthetic oligonucleotide
gauaguccuaacuccaggc

SEQ ID NO: 110140 - RNA, 19 nt, Artificial Sequence
  Description of Artificial Sequence: Synthetic oligonucleotide
guaucuagucccuagugcc

SEQ ID NO: 110141 - RNA, 19 nt, Artificial Sequence
  Description of Artificial Sequence: Synthetic oligonucleotide
caucucucaacauugcccc

SEQ ID NO: 110142 - RNA, 19 nt, Artificial Sequence
  Description of Artificial Sequence: Synthetic oligonucleotide
acaucucucaacauugccc

SEQ ID NO: 110143 - RNA, 19 nt, Artificial Sequence
  Description of Artificial Sequence: Synthetic oligonucleotide
cacauuaaccaaauucacc

SEQ ID NO: 110144 - RNA, 19 nt, Artificial Sequence
  Description of Artificial Sequence: Synthetic oligonucleotide
uggagaacgaguugaguag

SEQ ID NO: 110145 - RNA, 19 nt, Artificial Sequence
  Description of Artificial Sequence: Synthetic oligonucleotide
aaaauaccgccuucuagga

SEQ ID NO: 110146 - RNA, 19 nt, Artificial Sequence
  Description of Artificial Sequence: Synthetic oligonucleotide
uguauuggagagacaagca

SEQ ID NO: 110147 - RNA, 19 nt, Artificial Sequence
  Description of Artificial Sequence: Synthetic oligonucleotide
aucacugacuagcacacag

SEQ ID NO: 110148 - RNA, 19 nt, Artificial Sequence
  Description of Artificial Sequence: Synthetic oligonucleotide
auuaaccaaauucaccaga

SEQ ID NO: 110149 - RNA, 19 nt, Artificial Sequence
  Description of Artificial Sequence: Synthetic oligonucleotide
gacacguuuugugaggugg

SEQ ID NO: 110150 - RNA, 19 nt, Artificial Sequence
  Description of Artificial Sequence: Synthetic oligonucleotide
gaacgaguugaguaggagc

SEQ ID NO: 110151 - RNA, 19 nt, Artificial Sequence
  Description of Artificial Sequence: Synthetic oligonucleotide
ugggguuagcccaacagug

SEQ ID NO: 110152 - RNA, 19 nt, Artificial Sequence
  Description of Artificial Sequence: Synthetic oligonucleotide
cacagauaguccuaacucc

SEQ ID NO: 110153 - RNA, 19 nt, Artificial Sequence
  Description of Artificial Sequence: Synthetic oligonucleotide
aacgcaccugcauaaccac

SEQ ID NO: 110154 - RNA, 19 nt, Artificial Sequence
  Description of Artificial Sequence: Synthetic oligonucleotide
aacgaguugaguaggagca

SEQ ID NO: 110155 - RNA, 19 nt, Artificial Sequence
  Description of Artificial Sequence: Synthetic oligonucleotide
auaucugagagcgcgcccc

SEQ ID NO: 110156 - RNA, 19 nt, Artificial Sequence
  Description of Artificial Sequence: Synthetic oligonucleotide
aaguuaacccauuauccuu

SEQ ID NO: 110157 - RNA, 19 nt, Artificial Sequence
  Description of Artificial Sequence: Synthetic oligonucleotide
uaucacaccccacuagaug

SEQ ID NO: 110158 - RNA, 19 nt, Artificial Sequence
  Description of Artificial Sequence: Synthetic oligonucleotide
cauaacucuugucagccag

SEQ ID NO: 110159 - RNA, 19 nt, Artificial Sequence
  Description of Artificial Sequence: Synthetic oligonucleotide
cuauccuugucuugggcgg

SEQ ID NO: 110160 - RNA, 19 nt, Artificial Sequence
  Description of Artificial Sequence: Synthetic oligonucleotide
uauuggaggggaaccauac

SEQ ID NO: 110161 - RNA, 19 nt, Artificial Sequence
  Description of Artificial Sequence: Synthetic oligonucleotide
agucuauuggaggggaacc

SEQ ID NO: 110162 - RNA, 19 nt, Artificial Sequence
  Description of Artificial Sequence: Synthetic oligonucleotide
agauaguccuaacuccagg

SEQ ID NO: 110163 - RNA, 19 nt, Artificial Sequence
  Description of Artificial Sequence: Synthetic oligonucleotide
uucacauauggaugguaag

SEQ ID NO: 110164 - RNA, 19 nt, Artificial Sequence
  Description of Artificial Sequence: Synthetic oligonucleotide
augugcuacaaugagaggu

SEQ ID NO: 110165 - RNA, 19 nt, Artificial Sequence
  Description of Artificial Sequence: Synthetic oligonucleotide
uaaccgguuagcuaguuua

SEQ ID NO: 110166 - RNA, 19 nt, Artificial Sequence
  Description of Artificial Sequence: Synthetic oligonucleotide
uuuauaugucaugaggcuc

SEQ ID NO: 110167 - RNA, 19 nt, Artificial Sequence
  Description of Artificial Sequence: Synthetic oligonucleotide
aauaugagccuggucucuc

SEQ ID NO: 110168 - RNA, 19 nt, Artificial Sequence
  Description of Artificial Sequence: Synthetic oligonucleotide
aggagauagaacaguaggg

SEQ ID NO: 110169 - RNA, 19 nt, Artificial Sequence
  Description of Artificial Sequence: Synthetic oligonucleotide
auauggaugguaaguuccc

SEQ ID NO: 110170 - RNA, 19 nt, Artificial Sequence
  Description of Artificial Sequence: Synthetic oligonucleotide
gaggacauagcaagggucc

SEQ ID NO: 110171 - RNA, 19 nt, Artificial Sequence
  Description of Artificial Sequence: Synthetic oligonucleotide
ggauacaucacugacuagc

SEQ ID NO: 110172 - RNA, 19 nt, Artificial Sequence
  Description of Artificial Sequence: Synthetic oligonucleotide
accguagucagcgggaugg

SEQ ID NO: 110173 - RNA, 19 nt, Artificial Sequence
  Description of Artificial Sequence: Synthetic oligonucleotide
uuagcuaguuuaacacucu

SEQ ID NO: 110174 - RNA, 19 nt, Artificial Sequence
  Description of Artificial Sequence: Synthetic oligonucleotide
uaucuagucccuagugccc

SEQ ID NO: 110175 - RNA, 19 nt, Artificial Sequence
  Description of Artificial Sequence: Synthetic oligonucleotide
ggcuuaacuucucaugugg

SEQ ID NO: 110176 - RNA, 19 nt, Artificial Sequence
  Description of Artificial Sequence: Synthetic oligonucleotide
uuccacuaaaacucagucu

SEQ ID NO: 110177 - RNA, 19 nt, Artificial Sequence
  Description of Artificial Sequence: Synthetic oligonucleotide
uuaguuaaccgguuagcua

SEQ ID NO: 110178 - RNA, 19 nt, Artificial Sequence
  Description of Artificial Sequence: Synthetic oligonucleotide
ugaauaugagccuggucuc

SEQ ID NO: 110179 - RNA, 19 nt, Artificial Sequence
  Description of Artificial Sequence: Synthetic oligonucleotide
ugggcggaagcucuguuug

SEQ ID NO: 110180 - RNA, 19 nt, Artificial Sequence
  Description of Artificial Sequence: Synthetic oligonucleotide
ugugcuacaaugagaggua

SEQ ID NO: 110181 - RNA, 19 nt, Artificial Sequence
  Description of Artificial Sequence: Synthetic oligonucleotide
caagggaagacaucagcug

SEQ ID NO: 110182 - RNA, 19 nt, Artificial Sequence
  Description of Artificial Sequence: Synthetic oligonucleotide
uucaguaggugacacguuu

SEQ ID NO: 110183 - RNA, 19 nt, Artificial Sequence
  Description of Artificial Sequence: Synthetic oligonucleotide
guuagcuaguuuaacacuc

SEQ ID NO: 110184 - RNA, 19 nt, Artificial Sequence
  Description of Artificial Sequence: Synthetic oligonucleotide
cuuuaguucuuagugagga

SEQ ID NO: 110185 - RNA, 19 nt, Artificial Sequence
  Description of Artificial Sequence: Synthetic oligonucleotide
uucuuagugaggagaggga

SEQ ID NO: 110186 - RNA, 19 nt, Artificial Sequence
  Description of Artificial Sequence: Synthetic oligonucleotide
agacauacgaagauauuca

SEQ ID NO: 110187 - RNA, 19 nt, Artificial Sequence
  Description of Artificial Sequence: Synthetic oligonucleotide
uggggauacaucacugacu

SEQ ID NO: 110188 - RNA, 19 nt, Artificial Sequence
  Description of Artificial Sequence: Synthetic oligonucleotide
gguaaguucccugugucgg

SEQ ID NO: 110189 - RNA, 19 nt, Artificial Sequence
  Description of Artificial Sequence: Synthetic oligonucleotide
aaccgagacaagggaagac

SEQ ID NO: 110190 - RNA, 19 nt, Artificial Sequence
  Description of Artificial Sequence: Synthetic oligonucleotide
gugucgggaauauagacaa

SEQ ID NO: 110191 - RNA, 19 nt, Artificial Sequence
  Description of Artificial Sequence: Synthetic oligonucleotide
caccccacuagauguaagg

SEQ ID NO: 110192 - RNA, 19 nt, Artificial Sequence
  Description of Artificial Sequence: Synthetic oligonucleotide
caaacgcaccugcauaacc

SEQ ID NO: 110193 - RNA, 19 nt, Artificial Sequence
  Description of Artificial Sequence: Synthetic oligonucleotide
guaggggagaaugaagagc

SEQ ID NO: 110194 - RNA, 19 nt, Artificial Sequence
  Description of Artificial Sequence: Synthetic oligonucleotide
ugcaaguauuucaggugug

SEQ ID NO: 110195 - RNA, 19 nt, Artificial Sequence
  Description of Artificial Sequence: Synthetic oligonucleotide
cugugucgggaauauagac

SEQ ID NO: 110196 - RNA, 19 nt, Artificial Sequence
  Description of Artificial Sequence: Synthetic oligonucleotide
acagauaaugugcugccuu

SEQ ID NO: 110197 - RNA, 19 nt, Artificial Sequence
  Description of Artificial Sequence: Synthetic oligonucleotide
uuauccuucuaagagcgua

SEQ ID NO: 110198 - RNA, 19 nt, Artificial Sequence
  Description of Artificial Sequence: Synthetic oligonucleotide
ugucuugggcggaagcucu

SEQ ID NO: 110199 - RNA, 19 nt, Artificial Sequence
  Description of Artificial Sequence: Synthetic oligonucleotide
ucgggaauauagacaacaa

SEQ ID NO: 110200 - RNA, 19 nt, Artificial Sequence
  Description of Artificial Sequence: Synthetic oligonucleotide
gcaaaauaccgccuucuag

SEQ ID NO: 110201 - RNA, 19 nt, Artificial Sequence
  Description of Artificial Sequence: Synthetic oligonucleotide
ugccccuaaagcuguuagg

SEQ ID NO: 110202 - RNA, 19 nt, Artificial Sequence
  Description of Artificial Sequence: Synthetic oligonucleotide
gagcguaucuagucccuag

SEQ ID NO: 110203 - RNA, 19 nt, Artificial Sequence
  Description of Artificial Sequence: Synthetic oligonucleotide
guauuggagagacaagcaa

SEQ ID NO: 110204 - RNA, 19 nt, Artificial Sequence
  Description of Artificial Sequence: Synthetic oligonucleotide
gccaggguuaguuaaccgg

SEQ ID NO: 110205 - RNA, 19 nt, Artificial Sequence
  Description of Artificial Sequence: Synthetic oligonucleotide
aaauaccgccuucuaggau

SEQ ID NO: 110206 - RNA, 19 nt, Artificial Sequence
  Description of Artificial Sequence: Synthetic oligonucleotide
ccuagguguauguugcugg

SEQ ID NO: 110207 - RNA, 19 nt, Artificial Sequence
  Description of Artificial Sequence: Synthetic oligonucleotide
aaguaugaccaggcuuaac

SEQ ID NO: 110208 - RNA, 19 nt, Artificial Sequence
  Description of Artificial Sequence: Synthetic oligonucleotide
cuggggauacaucacugac

SEQ ID NO: 110209 - RNA, 19 nt, Artificial Sequence
  Description of Artificial Sequence: Synthetic oligonucleotide
gcuaguuuaacacucuaaa

SEQ ID NO: 110210 - RNA, 19 nt, Artificial Sequence
  Description of Artificial Sequence: Synthetic oligonucleotide
acagauaguccuaacucca

SEQ ID NO: 110211 - RNA, 19 nt, Artificial Sequence
  Description of Artificial Sequence: Synthetic oligonucleotide
gacucacuagaccaucaca

SEQ ID NO: 110212 - RNA, 19 nt, Artificial Sequence
  Description of Artificial Sequence: Synthetic oligonucleotide
uggcuugggguuuuacccc

SEQ ID NO: 110213 - RNA, 19 nt, Artificial Sequence
  Description of Artificial Sequence: Synthetic oligonucleotide
gucuacguaacaguuugug

SEQ ID NO: 110214 - RNA, 19 nt, Artificial Sequence
  Description of Artificial Sequence: Synthetic oligonucleotide
acccauuauccuucuaaga

SEQ ID NO: 110215 - RNA, 19 nt, Artificial Sequence
  Description of Artificial Sequence: Synthetic oligonucleotide
cuggagaacgaguugagua

SEQ ID NO: 110216 - RNA, 19 nt, Artificial Sequence
  Description of Artificial Sequence: Synthetic oligonucleotide
cuacguaacaguuugugau

SEQ ID NO: 110217 - RNA, 19 nt, Artificial Sequence
  Description of Artificial Sequence: Synthetic oligonucleotide
auucacauauggaugguaa

SEQ ID NO: 110218 - RNA, 19 nt, Artificial Sequence
  Description of Artificial Sequence: Synthetic oligonucleotide
uagucaccugcccaucaca

SEQ ID NO: 110219 - RNA, 19 nt, Artificial Sequence
  Description of Artificial Sequence: Synthetic oligonucleotide
acaauggaagaacuacaua

SEQ ID NO: 110220 - RNA, 19 nt, Artificial Sequence
  Description of Artificial Sequence: Synthetic oligonucleotide
uccuuuaccccuggcacug

SEQ ID NO: 110221 - RNA, 19 nt, Artificial Sequence
  Description of Artificial Sequence: Synthetic oligonucleotide
ugccugguaggccauacuu

SEQ ID NO: 110222 - RNA, 19 nt, Artificial Sequence
  Description of Artificial Sequence: Synthetic oligonucleotide
uggaggggaaccauacaua

SEQ ID NO: 110223 - RNA, 19 nt, Artificial Sequence
  Description of Artificial Sequence: Synthetic oligonucleotide
ggguuaguuaaccgguuag

SEQ ID NO: 110224 - RNA, 19 nt, Artificial Sequence
  Description of Artificial Sequence: Synthetic oligonucleotide
acauacgaagauauucaca

SEQ ID NO: 110225 - RNA, 19 nt, Artificial Sequence
  Description of Artificial Sequence: Synthetic oligonucleotide
ggcaguuacaagucuaaga

SEQ ID NO: 110226 - RNA, 19 nt, Artificial Sequence
  Description of Artificial Sequence: Synthetic oligonucleotide
guaagggcagguauucuac

SEQ ID NO: 110227 - RNA, 19 nt, Artificial Sequence
  Description of Artificial Sequence: Synthetic oligonucleotide
ucaguaggugacacguuuu

SEQ ID NO: 110228 - RNA, 19 nt, Artificial Sequence
  Description of Artificial Sequence: Synthetic oligonucleotide
agcugggcauaguuugauc

SEQ ID NO: 110229 - RNA, 19 nt, Artificial Sequence
  Description of Artificial Sequence: Synthetic oligonucleotide
gagagagucugacucccca

SEQ ID NO: 110230 - RNA, 19 nt, Artificial Sequence
  Description of Artificial Sequence: Synthetic oligonucleotide
gacgguuagccccagccaa

SEQ ID NO: 110231 - RNA, 19 nt, Artificial Sequence
  Description of Artificial Sequence: Synthetic oligonucleotide
uaugaccuggguugcuacu

SEQ ID NO: 110232 - RNA, 19 nt, Artificial Sequence
  Description of Artificial Sequence: Synthetic oligonucleotide
gaccucgucauccacagau

SEQ ID NO: 110233 - RNA, 19 nt, Artificial Sequence
  Description of Artificial Sequence: Synthetic oligonucleotide
aggcuguuuauagucaccu

SEQ ID NO: 110234 - RNA, 19 nt, Artificial Sequence
  Description of Artificial Sequence: Synthetic oligonucleotide
caccugacucugaaguggc

SEQ ID NO: 110235 - RNA, 19 nt, Artificial Sequence
  Description of Artificial Sequence: Synthetic oligonucleotide
auaaccacagaugguuccu

SEQ ID NO: 110236 - RNA, 19 nt, Artificial Sequence
  Description of Artificial Sequence: Synthetic oligonucleotide
uuaaccgguuagcuaguuu

SEQ ID NO: 110237 - RNA, 19 nt, Artificial Sequence
  Description of Artificial Sequence: Synthetic oligonucleotide
aaacaggaaguugggcaga

SEQ ID NO: 110238 - RNA, 19 nt, Artificial Sequence
  Description of Artificial Sequence: Synthetic oligonucleotide
uauggaugguaaguucccu

SEQ ID NO: 110239 - RNA, 19 nt, Artificial Sequence
  Description of Artificial Sequence: Synthetic oligonucleotide
agcguaucuagucccuagu

SEQ ID NO: 110240 - RNA, 19 nt, Artificial Sequence
  Description of Artificial Sequence: Synthetic oligonucleotide
accgguuagcuaguuuaac

SEQ ID NO: 110241 - RNA, 19 nt, Artificial Sequence
  Description of Artificial Sequence: Synthetic oligonucleotide
agaccagcguguugaaccu

SEQ ID NO: 110242 - RNA, 19 nt, Artificial Sequence
  Description of Artificial Sequence: Synthetic oligonucleotide
ggaaccgagacaagggaag

SEQ ID NO: 110243 - RNA, 19 nt, Artificial Sequence
  Description of Artificial Sequence: Synthetic oligonucleotide
accgagacaagggaagaca

SEQ ID NO: 110244 - RNA, 19 nt, Artificial Sequence
  Description of Artificial Sequence: Synthetic oligonucleotide
cuacuggguugcucggacg

SEQ ID NO: 110245 - RNA, 19 nt, Artificial Sequence
  Description of Artificial Sequence: Synthetic oligonucleotide
aguccugauaaaggcagca

SEQ ID NO: 110246 - RNA, 19 nt, Artificial Sequence
  Description of Artificial Sequence: Synthetic oligonucleotide
guggcugaauaugagccug

SEQ ID NO: 110247 - RNA, 19 nt, Artificial Sequence
  Description of Artificial Sequence: Synthetic oligonucleotide
cauugaauaggacuucagu

SEQ ID NO: 110248 - RNA, 19 nt, Artificial Sequence
  Description of Artificial Sequence: Synthetic oligonucleotide
acgaagauauucacauaug

SEQ ID NO: 110249 - RNA, 19 nt, Artificial Sequence
  Description of Artificial Sequence: Synthetic oligonucleotide
auaugagccuggucucuca

SEQ ID NO: 110250 - RNA, 19 nt, Artificial Sequence
  Description of Artificial Sequence: Synthetic oligonucleotide
guuaugggaaccccuugaa

SEQ ID NO: 110251 - RNA, 19 nt, Artificial Sequence
  Description of Artificial Sequence: Synthetic oligonucleotide
gguuaguuaaccgguuagc

SEQ ID NO: 110252 - RNA, 19 nt, Artificial Sequence
  Description of Artificial Sequence: Synthetic oligonucleotide
guuaguuaaccgguuagcu

SEQ ID NO: 110253 - RNA, 19 nt, Artificial Sequence
  Description of Artificial Sequence: Synthetic oligonucleotide
aguucagccacugggguua

SEQ ID NO: 110254 - RNA, 19 nt, Artificial Sequence
  Description of Artificial Sequence: Synthetic oligonucleotide
aaaguaugaccaggcuuaa

SEQ ID NO: 110255 - RNA, 19 nt, Artificial Sequence
  Description of Artificial Sequence: Synthetic oligonucleotide
cagcguguugaaccuuugg

SEQ ID NO: 110256 - RNA, 19 nt, Artificial Sequence
  Description of Artificial Sequence: Synthetic oligonucleotide
ugcuacaaugagagguaua

SEQ ID NO: 110257 - RNA, 19 nt, Artificial Sequence
  Description of Artificial Sequence: Synthetic oligonucleotide
ucguugggaguuuccacau

SEQ ID NO: 110258 - RNA, 19 nt, Artificial Sequence
  Description of Artificial Sequence: Synthetic oligonucleotide
cucagguuaugggaacccc

SEQ ID NO: 110259 - RNA, 19 nt, Artificial Sequence
  Description of Artificial Sequence: Synthetic oligonucleotide
uuugccugguaggccauac

SEQ ID NO: 110260 - RNA, 19 nt, Artificial Sequence
  Description of Artificial Sequence: Synthetic oligonucleotide
uugucuugggcggaagcuc

SEQ ID NO: 110261 - RNA, 19 nt, Artificial Sequence
  Description of Artificial Sequence: Synthetic oligonucleotide
agagacccugagccugacg

SEQ ID NO: 110262 - RNA, 19 nt, Artificial Sequence
  Description of Artificial Sequence: Synthetic oligonucleotide
gaacaguaggggagaauga

SEQ ID NO: 110263 - RNA, 19 nt, Artificial Sequence
  Description of Artificial Sequence: Synthetic oligonucleotide
agguaguggggaccucguc

SEQ ID NO: 110264 - RNA, 19 nt, Artificial Sequence
  Description of Artificial Sequence: Synthetic oligonucleotide
aggguuaguuaaccgguua

SEQ ID NO: 110265 - RNA, 19 nt, Artificial Sequence
  Description of Artificial Sequence: Synthetic oligonucleotide
cguaucuagucccuagugc

SEQ ID NO: 110266 - RNA, 19 nt, Artificial Sequence
  Description of Artificial Sequence: Synthetic oligonucleotide
cccacuagauguaagggca

SEQ ID NO: 110267 - RNA, 19 nt, Artificial Sequence
  Description of Artificial Sequence: Synthetic oligonucleotide
ugucgggaauauagacaac

SEQ ID NO: 110268 - RNA, 19 nt, Artificial Sequence
  Description of Artificial Sequence: Synthetic oligonucleotide
ugacuagcacacagccccu

SEQ ID NO: 110269 - RNA, 19 nt, Artificial Sequence
  Description of Artificial Sequence: Synthetic oligonucleotide
ccacuaaaacucagucucg

SEQ ID NO: 110270 - RNA, 19 nt, Artificial Sequence
  Description of Artificial Sequence: Synthetic oligonucleotide
caggcuuaacuucucaugu

SEQ ID NO: 110271 - RNA, 19 nt, Artificial Sequence
  Description of Artificial Sequence: Synthetic oligonucleotide
cucgcuggguccacuugag

SEQ ID NO: 110272 - RNA, 19 nt, Artificial Sequence
  Description of Artificial Sequence: Synthetic oligonucleotide
guacuucgguuguucuuug

SEQ ID NO: 110273 - RNA, 19 nt, Artificial Sequence
  Description of Artificial Sequence: Synthetic oligonucleotide
agcuaguuuaacacucuaa

SEQ ID NO: 110274 - RNA, 19 nt, Artificial Sequence
  Description of Artificial Sequence: Synthetic oligonucleotide
ccccacuagauguaagggc

SEQ ID NO: 110275 - RNA, 19 nt, Artificial Sequence
  Description of Artificial Sequence: Synthetic oligonucleotide
gguauucuacuuaaggcua

SEQ ID NO: 110276 - RNA, 19 nt, Artificial Sequence
  Description of Artificial Sequence: Synthetic oligonucleotide
ugcgggacuugguaucaaa

SEQ ID NO: 110277 - RNA, 19 nt, Artificial Sequence
  Description of Artificial Sequence: Synthetic oligonucleotide
cgguuagcuaguuuaacac

SEQ ID NO: 110278 - RNA, 19 nt, Artificial Sequence
  Description of Artificial Sequence: Synthetic oligonucleotide
aacucagucucgagacaca

SEQ ID NO: 110279 - RNA, 19 nt, Artificial Sequence
  Description of Artificial Sequence: Synthetic oligonucleotide
uuugugagguggacucauu

SEQ ID NO: 110280 - RNA, 19 nt, Artificial Sequence
  Description of Artificial Sequence: Synthetic oligonucleotide
uggggaugcugggucagug

SEQ ID NO: 110281 - RNA, 19 nt, Artificial Sequence
  Description of Artificial Sequence: Synthetic oligonucleotide
agauguaagggcagguauu

SEQ ID NO: 110282 - RNA, 19 nt, Artificial Sequence
  Description of Artificial Sequence: Synthetic oligonucleotide
ccuagugcccuugaaggcc

SEQ ID NO: 110283 - RNA, 19 nt, Artificial Sequence
  Description of Artificial Sequence: Synthetic oligonucleotide
uucuggucaccaguaucac

SEQ ID NO: 110284 - RNA, 19 nt, Artificial Sequence
  Description of Artificial Sequence: Synthetic oligonucleotide
aaccgguuagcuaguuuaa

SEQ ID NO: 110285 - RNA, 19 nt, Artificial Sequence
  Description of Artificial Sequence: Synthetic oligonucleotide
ucgcuggguccacuugagc

SEQ ID NO: 110286 - RNA, 19 nt, Artificial Sequence
  Description of Artificial Sequence: Synthetic oligonucleotide
gcguaucuagucccuagug

SEQ ID NO: 110287 - RNA, 19 nt, Artificial Sequence
  Description of Artificial Sequence: Synthetic oligonucleotide
uugcaaccugacucuccug

SEQ ID NO: 110288 - RNA, 19 nt, Artificial Sequence
  Description of Artificial Sequence: Synthetic oligonucleotide
ccgggaacguagcaaacgc

SEQ ID NO: 110289 - RNA, 19 nt, Artificial Sequence
  Description of Artificial Sequence: Synthetic oligonucleotide
gucuauuggaggggaacca

SEQ ID NO: 110290 - RNA, 19 nt, Artificial Sequence
  Description of Artificial Sequence: Synthetic oligonucleotide
ccuccugacucacuagacc

SEQ ID NO: 110291 - RNA, 19 nt, Artificial Sequence
  Description of Artificial Sequence: Synthetic oligonucleotide
ugccgggaacguagcaaac

SEQ ID NO: 110292 - RNA, 19 nt, Artificial Sequence
  Description of Artificial Sequence: Synthetic oligonucleotide
gguguauguugcugggcac

SEQ ID NO: 110293 - RNA, 19 nt, Artificial Sequence
  Description of Artificial Sequence: Synthetic oligonucleotide
cuuaaugagugaaguggau

SEQ ID NO: 110294 - RNA, 19 nt, Artificial Sequence
  Description of Artificial Sequence: Synthetic oligonucleotide
cacguuuugugagguggac

SEQ ID NO: 110295 - RNA, 19 nt, Artificial Sequence
  Description of Artificial Sequence: Synthetic oligonucleotide
uggguugcucggacgguua

SEQ ID NO: 110296 - RNA, 19 nt, Artificial Sequence
  Description of Artificial Sequence: Synthetic oligonucleotide
gccgggaacguagcaaacg

SEQ ID NO: 110297 - RNA, 19 nt, Artificial Sequence
  Description of Artificial Sequence: Synthetic oligonucleotide
gccccuaaagcuguuagga

SEQ ID NO: 110298 - RNA, 19 nt, Artificial Sequence
  Description of Artificial Sequence: Synthetic oligonucleotide
gaauaugagccuggucucu

SEQ ID NO: 110299 - RNA, 19 nt, Artificial Sequence
  Description of Artificial Sequence: Synthetic oligonucleotide
aguuaaccgguuagcuagu

SEQ ID NO: 110300 - RNA, 19 nt, Artificial Sequence
  Description of Artificial Sequence: Synthetic oligonucleotide
acacguuuugugaggugga

SEQ ID NO: 110301 - RNA, 19 nt, Artificial Sequence
  Description of Artificial Sequence: Synthetic oligonucleotide
cugccgggaacguagcaaa

SEQ ID NO: 110302 - RNA, 19 nt, Artificial Sequence
  Description of Artificial Sequence: Synthetic oligonucleotide
agcaccguagucagcggga

SEQ ID NO: 110303 - RNA, 19 nt, Artificial Sequence
  Description of Artificial Sequence: Synthetic oligonucleotide
ccgguuagcuaguuuaaca

SEQ ID NO: 110304 - RNA, 19 nt, Artificial Sequence
  Description of Artificial Sequence: Synthetic oligonucleotide
ggcggaagcucuguuugag

SEQ ID NO: 110305 - RNA, 19 nt, Artificial Sequence
  Description of Artificial Sequence: Synthetic oligonucleotide
auaccgccuucuaggaucu

SEQ ID NO: 110306 - RNA, 19 nt, Artificial Sequence
  Description of Artificial Sequence: Synthetic oligonucleotide
guaguggggaccucgucau

SEQ ID NO: 110307 - RNA, 19 nt, Artificial Sequence
  Description of Artificial Sequence: Synthetic oligonucleotide
gcguguugaaccuuuggcu

SEQ ID NO: 110308 - RNA, 19 nt, Artificial Sequence
  Description of Artificial Sequence: Synthetic oligonucleotide
agcuguuaggagagaggca

SEQ ID NO: 110309 - RNA, 19 nt, Artificial Sequence
  Description of Artificial Sequence: Synthetic oligonucleotide
gucacacuaggcucagcua

SEQ ID NO: 110310 - RNA, 19 nt, Artificial Sequence
  Description of Artificial Sequence: Synthetic oligonucleotide
cacuaaguuaacccauuau

SEQ ID NO: 110311 - RNA, 19 nt, Artificial Sequence
  Description of Artificial Sequence: Synthetic oligonucleotide
gcuggggauacaucacuga

SEQ ID NO: 110312 - RNA, 19 nt, Artificial Sequence
  Description of Artificial Sequence: Synthetic oligonucleotide
agggagguaguuaggucaa

SEQ ID NO: 110313 - RNA, 19 nt, Artificial Sequence
  Description of Artificial Sequence: Synthetic oligonucleotide
acaccccacuagauguaag

SEQ ID NO: 110314 - RNA, 19 nt, Artificial Sequence
  Description of Artificial Sequence: Synthetic oligonucleotide
agucuacguaacaguuugu

SEQ ID NO: 110315 - RNA, 19 nt, Artificial Sequence
  Description of Artificial Sequence: Synthetic oligonucleotide
guagaagccuggggaggug

SEQ ID NO: 110316 - RNA, 19 nt, Artificial Sequence
  Description of Artificial Sequence: Synthetic oligonucleotide
gcucagguuaugggaaccc

SEQ ID NO: 110317 - RNA, 19 nt, Artificial Sequence
  Description of Artificial Sequence: Synthetic oligonucleotide
agagcgcgccccauagucu

SEQ ID NO: 110318 - RNA, 19 nt, Artificial Sequence
  Description of Artificial Sequence: Synthetic oligonucleotide
cggacgguuagccccagcc

SEQ ID NO: 110319 - RNA, 19 nt, Artificial Sequence
  Description of Artificial Sequence: Synthetic oligonucleotide
ucggacgguuagccccagc

SEQ ID NO: 110320 - RNA, 19 nt, Artificial Sequence
  Description of Artificial Sequence: Synthetic oligonucleotide
gguguuucgguguucucau

SEQ ID NO: 110321 - RNA, 19 nt, Artificial Sequence
  Description of Artificial Sequence: Synthetic oligonucleotide
ggguugcucggacgguuag

SEQ ID NO: 110322 - RNA, 19 nt, Artificial Sequence
  Description of Artificial Sequence: Synthetic oligonucleotide
cagucucgagacacaaucu

SEQ ID NO: 110323 - RNA, 19 nt, Artificial Sequence
  Description of Artificial Sequence: Synthetic oligonucleotide
guuucgguguucucaucau

SEQ ID NO: 110324 - RNA, 19 nt, Artificial Sequence
  Description of Artificial Sequence: Synthetic oligonucleotide
ggacgguuagccccagcca

SEQ ID NO: 110325 - RNA, 19 nt, Artificial Sequence
  Description of Artificial Sequence: Synthetic oligonucleotide
ccugugucgggaauauaga

SEQ ID NO: 110326 - RNA, 19 nt, Artificial Sequence
  Description of Artificial Sequence: Synthetic oligonucleotide
caccguagucagcgggaug

SEQ ID NO: 110327 - RNA, 19 nt, Artificial Sequence
  Description of Artificial Sequence: Synthetic oligonucleotide
aggcuacaugaaaaggcuu

SEQ ID NO: 110328 - RNA, 19 nt, Artificial Sequence
  Description of Artificial Sequence: Synthetic oligonucleotide
cugcauaaccacagauggu

SEQ ID NO: 110329 - RNA, 19 nt, Artificial Sequence
  Description of Artificial Sequence: Synthetic oligonucleotide
cuacaaugagagguauaua

SEQ ID NO: 110330 - RNA, 19 nt, Artificial Sequence
  Description of Artificial Sequence: Synthetic oligonucleotide
uucugguguuucgguguuc

SEQ ID NO: 110331 - RNA, 19 nt, Artificial Sequence
  Description of Artificial Sequence: Synthetic oligonucleotide
ccuucuaagagcguaucua

SEQ ID NO: 110332 - RNA, 19 nt, Artificial Sequence
  Description of Artificial Sequence: Synthetic oligonucleotide
ggccugcaaagugaaggug

SEQ ID NO: 110333 - RNA, 19 nt, Artificial Sequence
  Description of Artificial Sequence: Synthetic oligonucleotide
cguaacaguuugugauuac

SEQ ID NO: 110334 - RNA, 19 nt, Artificial Sequence
  Description of Artificial Sequence: Synthetic oligonucleotide
gguugcucggacgguuagc

SEQ ID NO: 110335 - RNA, 19 nt, Artificial Sequence
  Description of Artificial Sequence: Synthetic oligonucleotide
gggaaccgagacaagggaa

SEQ ID NO: 110336 - RNA, 19 nt, Artificial Sequence
  Description of Artificial Sequence: Synthetic oligonucleotide
cagcaaaauaccgccuucu

SEQ ID NO: 110337 - RNA, 19 nt, Artificial Sequence
  Description of Artificial Sequence: Synthetic oligonucleotide
cagguuaugggaaccccuu

SEQ ID NO: 110338 - RNA, 19 nt, Artificial Sequence
  Description of Artificial Sequence: Synthetic oligonucleotide
guaucacaccccacuagau

SEQ ID NO: 110339 - RNA, 19 nt, Artificial Sequence
  Description of Artificial Sequence: Synthetic oligonucleotide
gcaaacgcaccugcauaac

SEQ ID NO: 110340 - RNA, 19 nt, Artificial Sequence
  Description of Artificial Sequence: Synthetic oligonucleotide
acgguuagccccagccaaa

SEQ ID NO: 110341 - RNA, 19 nt, Artificial Sequence
  Description of Artificial Sequence: Synthetic oligonucleotide
cacaagcuauuuccuggcu

SEQ ID NO: 110342 - RNA, 19 nt, Artificial Sequence
  Description of Artificial Sequence: Synthetic oligonucleotide
caccggaaguccugauaaa

SEQ ID NO: 110343 - RNA, 19 nt, Artificial Sequence
  Description of Artificial Sequence: Synthetic oligonucleotide
cacaccccacuagauguaa

SEQ ID NO: 110344 - RNA, 19 nt, Artificial Sequence
  Description of Artificial Sequence: Synthetic oligonucleotide
auccuugucuugggcggaa

SEQ ID NO: 110345 - RNA, 19 nt, Artificial Sequence
  Description of Artificial Sequence: Synthetic oligonucleotide
gagguaguggggaccucgu

SEQ ID NO: 110346 - RNA, 19 nt, Artificial Sequence
  Description of Artificial Sequence: Synthetic oligonucleotide
caugaggcuccaucuuaau

SEQ ID NO: 110347 - RNA, 19 nt, Artificial Sequence
  Description of Artificial Sequence: Synthetic oligonucleotide
cucagucucgagacacaau

SEQ ID NO: 110348 - RNA, 19 nt, Artificial Sequence
  Description of Artificial Sequence: Synthetic oligonucleotide
cuucaguaggugacacguu

SEQ ID NO: 110349 - RNA, 19 nt, Artificial Sequence
  Description of Artificial Sequence: Synthetic oligonucleotide
gggcggaagcucuguuuga

SEQ ID NO: 110350 - RNA, 19 nt, Artificial Sequence
  Description of Artificial Sequence: Synthetic oligonucleotide
cuuuaccccuggcacugau

SEQ ID NO: 110351 - RNA, 19 nt, Artificial Sequence
  Description of Artificial Sequence: Synthetic oligonucleotide
ucccugugucgggaauaua

SEQ ID NO: 110352 - RNA, 19 nt, Artificial Sequence
  Description of Artificial Sequence: Synthetic oligonucleotide
guuaaccgguuagcuaguu

SEQ ID NO: 110353 - RNA, 19 nt, Artificial Sequence
  Description of Artificial Sequence: Synthetic oligonucleotide
cucggacgguuagccccag

SEQ ID NO: 110354 - RNA, 19 nt, Artificial Sequence
  Description of Artificial Sequence: Synthetic oligonucleotide
ccgagacaagggaagacau

SEQ ID NO: 110355 - RNA, 19 nt, Artificial Sequence
  Description of Artificial Sequence: Synthetic oligonucleotide
gcucggacgguuagcccca

SEQ ID NO: 110356 - RNA, 19 nt, Artificial Sequence
  Description of Artificial Sequence: Synthetic oligonucleotide
cccuugaaagcaccugacu

SEQ ID NO: 110357 - RNA, 19 nt, Artificial Sequence
  Description of Artificial Sequence: Synthetic oligonucleotide
cuacuccuagguguauguu

SEQ ID NO: 110358 - RNA, 19 nt, Artificial Sequence
  Description of Artificial Sequence: Synthetic oligonucleotide
gggagguaguuaggucaaa

SEQ ID NO: 110359 - RNA, 19 nt, Artificial Sequence
  Description of Artificial Sequence: Synthetic oligonucleotide
cauugccccuaaagcuguu

SEQ ID NO: 110360 - RNA, 19 nt, Artificial Sequence
  Description of Artificial Sequence: Synthetic oligonucleotide
gcaccguagucagcgggau

SEQ ID NO: 110361 - RNA, 19 nt, Artificial Sequence
  Description of Artificial Sequence: Synthetic oligonucleotide
gcgggauggucugcagggu

SEQ ID NO: 110362 - RNA, 19 nt, Artificial Sequence
  Description of Artificial Sequence: Synthetic oligonucleotide
ccguagucagcgggauggu

SEQ ID NO: 110363 - RNA, 19 nt, Artificial Sequence
  Description of Artificial Sequence: Synthetic oligonucleotide
aaauauuaacagcaacaac

SEQ ID NO: 110364 - RNA, 19 nt, Artificial Sequence
  Description of Artificial Sequence: Synthetic oligonucleotide
auuuauuccuaauggaguc

SEQ ID NO: 110365 - RNA, 19 nt, Artificial Sequence
  Description of Artificial Sequence: Synthetic oligonucleotide
uccacagaugcucuuaagg

SEQ ID NO: 110366 - RNA, 19 nt, Artificial Sequence
  Description of Artificial Sequence: Synthetic oligonucleotide
aaaccaggcaauccagggc

SEQ ID NO: 110367 - RNA, 19 nt, Artificial Sequence
  Description of Artificial Sequence: Synthetic oligonucleotide
ugucugaugaaccucuuga

SEQ ID NO: 110368 - RNA, 19 nt, Artificial Sequence
  Description of Artificial Sequence: Synthetic oligonucleotide
aagaccauuuucucccgcg

SEQ ID NO: 110369 - RNA, 19 nt, Artificial Sequence
  Description of Artificial Sequence: Synthetic oligonucleotide
aaucacacagaucucuccu

SEQ ID NO: 110370 - RNA, 19 nt, Artificial Sequence
  Description of Artificial Sequence: Synthetic oligonucleotide
aguguauccgcgcucuccc

SEQ ID NO: 110371 - RNA, 19 nt, Artificial Sequence
  Description of Artificial Sequence: Synthetic oligonucleotide
ucuugccauaaccuggagg

SEQ ID NO: 110372 - RNA, 19 nt, Artificial Sequence
  Description of Artificial Sequence: Synthetic oligonucleotide
acuguugucuccccuggcc

SEQ ID NO: 110373 - RNA, 19 nt, Artificial Sequence
  Description of Artificial Sequence: Synthetic oligonucleotide
aggcccauaguggagaucc

SEQ ID NO: 110374 - RNA, 19 nt, Artificial Sequence
  Description of Artificial Sequence: Synthetic oligonucleotide
cauaauucaccaugucucc

SEQ ID NO: 110375 - RNA, 19 nt, Artificial Sequence
  Description of Artificial Sequence: Synthetic oligonucleotide
aaggaucccagcucggcag

SEQ ID NO: 110376 - RNA, 19 nt, Artificial Sequence
  Description of Artificial Sequence: Synthetic oligonucleotide
cagcguuggacauacuucg

SEQ ID NO: 110377 - RNA, 19 nt, Artificial Sequence
  Description of Artificial Sequence: Synthetic oligonucleotide
uuaucuccagucaggcccg

SEQ ID NO: 110378 - RNA, 19 nt, Artificial Sequence
  Description of Artificial Sequence: Synthetic oligonucleotide
aggauugauuucaaugagc

SEQ ID NO: 110379 - RNA, 19 nt, Artificial Sequence
  Description of Artificial Sequence: Synthetic oligonucleotide
cauggguggauacuguugc

SEQ ID NO: 110380 - RNA, 19 nt, Artificial Sequence
  Description of Artificial Sequence: Synthetic oligonucleotide
caccaugucucccauagag

SEQ ID NO: 110381 - RNA, 19 nt, Artificial Sequence
  Description of Artificial Sequence: Synthetic oligonucleotide
ucccgcgaugccaacaccg

SEQ ID NO: 110382 - RNA, 19 nt, Artificial Sequence
  Description of Artificial Sequence: Synthetic oligonucleotide
uguccgagggcccaagaug

SEQ ID NO: 110383 - RNA, 19 nt, Artificial Sequence
  Description of Artificial Sequence: Synthetic oligonucleotide
ucccgguaagaucucacag

SEQ ID NO: 110384 - RNA, 19 nt, Artificial Sequence
  Description of Artificial Sequence: Synthetic oligonucleotide
uuuauuccuaauggagucc

SEQ ID NO: 110385 - RNA, 19 nt, Artificial Sequence
  Description of Artificial Sequence: Synthetic oligonucleotide
uuuccagggagucccacga

SEQ ID NO: 110386 - RNA, 19 nt, Artificial Sequence
  Description of Artificial Sequence: Synthetic oligonucleotide
aggaugaacaggguucccc

SEQ ID NO: 110387 - RNA, 19 nt, Artificial Sequence
  Description of Artificial Sequence: Synthetic oligonucleotide
agucccacgaaauucugga

SEQ ID NO: 110388 - RNA, 19 nt, Artificial Sequence
  Description of Artificial Sequence: Synthetic oligonucleotide
uacuguugcuccauuggca

SEQ ID NO: 110389 - RNA, 19 nt, Artificial Sequence
  Description of Artificial Sequence: Synthetic oligonucleotide
uacaaauaguuucguuucu

SEQ ID NO: 110390 - RNA, 19 nt, Artificial Sequence
  Description of Artificial Sequence: Synthetic oligonucleotide
ugaugguuucagccaaaag

SEQ ID NO: 110391 - RNA, 19 nt, Artificial Sequence
  Description of Artificial Sequence: Synthetic oligonucleotide
agugaucccgggcuguccg

SEQ ID NO: 110392 - RNA, 19 nt, Artificial Sequence
  Description of Artificial Sequence: Synthetic oligonucleotide
cuugccauaaccuggaggu

SEQ ID NO: 110393 - RNA, 19 nt, Artificial Sequence
  Description of Artificial Sequence: Synthetic oligonucleotide
uggagagccccucgcaccg

SEQ ID NO: 110394 - RNA, 19 nt, Artificial Sequence
  Description of Artificial Sequence: Synthetic oligonucleotide
cucgaaucccuucacugcc

SEQ ID NO: 110395 - RNA, 19 nt, Artificial Sequence
  Description of Artificial Sequence: Synthetic oligonucleotide
aacaggucccauggaaccg

SEQ ID NO: 110396 - RNA, 19 nt, Artificial Sequence
  Description of Artificial Sequence: Synthetic oligonucleotide
uccaucacccuucucgccu

SEQ ID NO: 110397 - RNA, 19 nt, Artificial Sequence
  Description of Artificial Sequence: Synthetic oligonucleotide
ugguuucagccaaaaggcc

SEQ ID NO: 110398 - RNA, 19 nt, Artificial Sequence
  Description of Artificial Sequence: Synthetic oligonucleotide
uuccuaauggaguccuuug

SEQ ID NO: 110399 - RNA, 19 nt, Artificial Sequence
  Description of Artificial Sequence: Synthetic oligonucleotide
caauggguaaggaucccag

SEQ ID NO: 110400 - RNA, 19 nt, Artificial Sequence
  Description of Artificial Sequence: Synthetic oligonucleotide
ugauggaccucgaaucccu

SEQ ID NO: 110401 - RNA, 19 nt, Artificial Sequence
  Description of Artificial Sequence: Synthetic oligonucleotide
uccuaauggaguccuuugu

SEQ ID NO: 110402 - RNA, 19 nt, Artificial Sequence
  Description of Artificial Sequence: Synthetic oligonucleotide
ugguaauccuuugaggccu

SEQ ID NO: 110403 - RNA, 19 nt, Artificial Sequence
  Description of Artificial Sequence: Synthetic oligonucleotide
uugacuucaguauccccgu

SEQ ID NO: 110404 - RNA, 19 nt, Artificial Sequence
  Description of Artificial Sequence: Synthetic oligonucleotide
agggagucccacgaaauuc

SEQ ID NO: 110405 - RNA, 19 nt, Artificial Sequence
  Description of Artificial Sequence: Synthetic oligonucleotide
gagcucauuacucugggua

SEQ ID NO: 110406 - RNA, 19 nt, Artificial Sequence
  Description of Artificial Sequence: Synthetic oligonucleotide
aggggaaccaggcaagccu

SEQ ID NO: 110407 - RNA, 19 nt, Artificial Sequence
  Description of Artificial Sequence: Synthetic oligonucleotide
uguugcgcccaucuugcca

SEQ ID NO: 110408 - RNA, 19 nt, Artificial Sequence
  Description of Artificial Sequence: Synthetic oligonucleotide
caggggaaccccauggaag

SEQ ID NO: 110409 - RNA, 19 nt, Artificial Sequence
  Description of Artificial Sequence: Synthetic oligonucleotide
uuucauggguggauacugu

SEQ ID NO: 110410 - RNA, 19 nt, Artificial Sequence
  Description of Artificial Sequence: Synthetic oligonucleotide
uggaugggccgucuggccc

SEQ ID NO: 110411 - RNA, 19 nt, Artificial Sequence
  Description of Artificial Sequence: Synthetic oligonucleotide
gguguaguaagccauccuc

SEQ ID NO: 110412 - RNA, 19 nt, Artificial Sequence
  Description of Artificial Sequence: Synthetic oligonucleotide
cauuuauuccuaauggagu

SEQ ID NO: 110413 - RNA, 19 nt, Artificial Sequence
  Description of Artificial Sequence: Synthetic oligonucleotide
cugaaccagguucacccgg

SEQ ID NO: 110414 - RNA, 19 nt, Artificial Sequence
  Description of Artificial Sequence: Synthetic oligonucleotide
aucacacagaucucuccug

SEQ ID NO: 110415 - RNA, 19 nt, Artificial Sequence
  Description of Artificial Sequence: Synthetic oligonucleotide
ucuaguccauccagcccag

SEQ ID NO: 110416 - RNA, 19 nt, Artificial Sequence
  Description of Artificial Sequence: Synthetic oligonucleotide
ucaauggguaaggauccca

SEQ ID NO: 110417 - RNA, 19 nt, Artificial Sequence
  Description of Artificial Sequence: Synthetic oligonucleotide
caucuaguccauccagccc

SEQ ID NO: 110418 - RNA, 19 nt, Artificial Sequence
  Description of Artificial Sequence: Synthetic oligonucleotide
cuuuggugccagguaaucc

SEQ ID NO: 110419 - RNA, 19 nt, Artificial Sequence
  Description of Artificial Sequence: Synthetic oligonucleotide
acacccucccgguaagauc

SEQ ID NO: 110420 - RNA, 19 nt, Artificial Sequence
  Description of Artificial Sequence: Synthetic oligonucleotide
agcucauuacucuggguau

SEQ ID NO: 110421 - RNA, 19 nt, Artificial Sequence
  Description of Artificial Sequence: Synthetic oligonucleotide
ucgaaucccuucacugccc

SEQ ID NO: 110422 - RNA, 19 nt, Artificial Sequence
  Description of Artificial Sequence: Synthetic oligonucleotide
aacccaucagagucuguaa

SEQ ID NO: 110423 - RNA, 19 nt, Artificial Sequence
  Description of Artificial Sequence: Synthetic oligonucleotide
gguuucagccaaaaggccc

SEQ ID NO: 110424 - RNA, 19 nt, Artificial Sequence
  Description of Artificial Sequence: Synthetic oligonucleotide
uggccgaccaucucggccu

SEQ ID NO: 110425 - RNA, 19 nt, Artificial Sequence
  Description of Artificial Sequence: Synthetic oligonucleotide
acauacuucgcagggguca

SEQ ID NO: 110426 - RNA, 19 nt, Artificial Sequence
  Description of Artificial Sequence: Synthetic oligonucleotide
ucaguauccccgugggccu

SEQ ID NO: 110427 - RNA, 19 nt, Artificial Sequence
  Description of Artificial Sequence: Synthetic oligonucleotide
gaagaccauuuucucccgc

SEQ ID NO: 110428 - RNA, 19 nt, Artificial Sequence
  Description of Artificial Sequence: Synthetic oligonucleotide
cuuagucccuggcacuccc

SEQ ID NO: 110429 - RNA, 19 nt, Artificial Sequence
  Description of Artificial Sequence: Synthetic oligonucleotide
ucugaggauugauuucaau

SEQ ID NO: 110430 - RNA, 19 nt, Artificial Sequence
  Description of Artificial Sequence: Synthetic oligonucleotide
acagggcgggcacucauug

SEQ ID NO: 110431 - RNA, 19 nt, Artificial Sequence
  Description of Artificial Sequence: Synthetic oligonucleotide
cuuuaggaccugguuuucc

SEQ ID NO: 110432 - RNA, 19 nt, Artificial Sequence
  Description of Artificial Sequence: Synthetic oligonucleotide
guaguaagccauccucuca

SEQ ID NO: 110433 - RNA, 19 nt, Artificial Sequence
  Description of Artificial Sequence: Synthetic oligonucleotide
acagaucucuccuggccga

SEQ ID NO: 110434 - RNA, 19 nt, Artificial Sequence
  Description of Artificial Sequence: Synthetic oligonucleotide
agccugauggaccucgaau

SEQ ID NO: 110435 - RNA, 19 nt, Artificial Sequence
  Description of Artificial Sequence: Synthetic oligonucleotide
ggguggauacuguugcucc

SEQ ID NO: 110436 - RNA, 19 nt, Artificial Sequence
  Description of Artificial Sequence: Synthetic oligonucleotide
cauagagccccugcuuucc

SEQ ID NO: 110437 - RNA, 19 nt, Artificial Sequence
  Description of Artificial Sequence: Synthetic oligonucleotide
ugaaaucccgggucacccu

SEQ ID NO: 110438 - RNA, 19 nt, Artificial Sequence
  Description of Artificial Sequence: Synthetic oligonucleotide
aaucccgggucacccuucu

SEQ ID NO: 110439 - RNA, 19 nt, Artificial Sequence
  Description of Artificial Sequence: Synthetic oligonucleotide
cucgaggacccgcugggcc

SEQ ID NO: 110440 - RNA, 19 nt, Artificial Sequence
  Description of Artificial Sequence: Synthetic oligonucleotide
aacccuucaggcagcguug

SEQ ID NO: 110441 - RNA, 19 nt, Artificial Sequence
  Description of Artificial Sequence: Synthetic oligonucleotide
acccuuugggcccggaggu

SEQ ID NO: 110442 - RNA, 19 nt, Artificial Sequence
  Description of Artificial Sequence: Synthetic oligonucleotide
cuaggccuucccuggcugg

SEQ ID NO: 110443 - RNA, 19 nt, Artificial Sequence
  Description of Artificial Sequence: Synthetic oligonucleotide
agccgggcaaaccaggcaa

SEQ ID NO: 110444 - RNA, 19 nt, Artificial Sequence
  Description of Artificial Sequence: Synthetic oligonucleotide
uuaggcccagggaggccgg

SEQ ID NO: 110445 - RNA, 19 nt, Artificial Sequence
  Description of Artificial Sequence: Synthetic oligonucleotide
ggagcaccaucuuucccgg

SEQ ID NO: 110446 - RNA, 19 nt, Artificial Sequence
  Description of Artificial Sequence: Synthetic oligonucleotide
ugggcccaaucacacagau

SEQ ID NO: 110447 - RNA, 19 nt, Artificial Sequence
  Description of Artificial Sequence: Synthetic oligonucleotide
aaaucccgggucacccuuc

SEQ ID NO: 110448 - RNA, 19 nt, Artificial Sequence
  Description of Artificial Sequence: Synthetic oligonucleotide
uucccuggugucccagagc

SEQ ID NO: 110449 - RNA, 19 nt, Artificial Sequence
  Description of Artificial Sequence: Synthetic oligonucleotide
cuuccuaucugaccaggga

SEQ ID NO: 110450 - RNA, 19 nt, Artificial Sequence
  Description of Artificial Sequence: Synthetic oligonucleotide
uaaugaucucuugucugau

SEQ ID NO: 110451 - RNA, 19 nt, Artificial Sequence
  Description of Artificial Sequence: Synthetic oligonucleotide
caggcgauccuggagcacc

SEQ ID NO: 110452 - RNA, 19 nt, Artificial Sequence
  Description of Artificial Sequence: Synthetic oligonucleotide
agguguaguaagccauccu

SEQ ID NO: 110453 - RNA, 19 nt, Artificial Sequence
  Description of Artificial Sequence: Synthetic oligonucleotide
agcguuggacauacuucgc

SEQ ID NO: 110454 - RNA, 19 nt, Artificial Sequence
  Description of Artificial Sequence: Synthetic oligonucleotide
ugacuucaguauccccgug

SEQ ID NO: 110455 - RNA, 19 nt, Artificial Sequence
  Description of Artificial Sequence: Synthetic oligonucleotide
auagagccgggcaaaccag

SEQ ID NO: 110456 - RNA, 19 nt, Artificial Sequence
  Description of Artificial Sequence: Synthetic oligonucleotide
uguugucuccccuggccuc

SEQ ID NO: 110457 - RNA, 19 nt, Artificial Sequence
  Description of Artificial Sequence: Synthetic oligonucleotide
aguggagaucccagguggg

SEQ ID NO: 110458 - RNA, 19 nt, Artificial Sequence
  Description of Artificial Sequence: Synthetic oligonucleotide
uguauccgcgcucucccuu

SEQ ID NO: 110459 - RNA, 19 nt, Artificial Sequence
  Description of Artificial Sequence: Synthetic oligonucleotide
gagagccccucgcaccggg

SEQ ID NO: 110460 - RNA, 19 nt, Artificial Sequence
  Description of Artificial Sequence: Synthetic oligonucleotide
uguaagcuuugcccauuua

SEQ ID NO: 110461 - RNA, 19 nt, Artificial Sequence
  Description of Artificial Sequence: Synthetic oligonucleotide
uggaaccgcucuugccagg

SEQ ID NO: 110462 - RNA, 19 nt, Artificial Sequence
  Description of Artificial Sequence: Synthetic oligonucleotide
ugaccagccuuccccggcu

SEQ ID NO: 110463 - RNA, 19 nt, Artificial Sequence
  Description of Artificial Sequence: Synthetic oligonucleotide
auuccuaauggaguccuuu

SEQ ID NO: 110464 - RNA, 19 nt, Artificial Sequence
  Description of Artificial Sequence: Synthetic oligonucleotide
ucccggcgggccuuugugg

SEQ ID NO: 110465 - RNA, 19 nt, Artificial Sequence
  Description of Artificial Sequence: Synthetic oligonucleotide
gggcccaagaugcugggcc

SEQ ID NO: 110466 - RNA, 19 nt, Artificial Sequence
  Description of Artificial Sequence: Synthetic oligonucleotide
uggguggauacuguugcuc

SEQ ID NO: 110467 - RNA, 19 nt, Artificial Sequence
  Description of Artificial Sequence: Synthetic oligonucleotide
cccgguaagaucucacagc

SEQ ID NO: 110468 - RNA, 19 nt, Artificial Sequence
  Description of Artificial Sequence: Synthetic oligonucleotide
guauccgcgcucucccuug

SEQ ID NO: 110469 - RNA, 19 nt, Artificial Sequence
  Description of Artificial Sequence: Synthetic oligonucleotide
cauuggcauggccccaaag

SEQ ID NO: 110470 - RNA, 19 nt, Artificial Sequence
  Description of Artificial Sequence: Synthetic oligonucleotide
ccuaauggaguccuuuguc

SEQ ID NO: 110471 - RNA, 19 nt, Artificial Sequence
  Description of Artificial Sequence: Synthetic oligonucleotide
cccggagguccauagagcc

SEQ ID NO: 110472 - RNA, 19 nt, Artificial Sequence
  Description of Artificial Sequence: Synthetic oligonucleotide
agccccucgcaccgggugg

SEQ ID NO: 110473 - RNA, 19 nt, Artificial Sequence
  Description of Artificial Sequence: Synthetic oligonucleotide
uugggcgcucccuuccugu

SEQ ID NO: 110474 - RNA, 19 nt, Artificial Sequence
  Description of Artificial Sequence: Synthetic oligonucleotide
auccucucaucaaacauuu

SEQ ID NO: 110475 - RNA, 19 nt, Artificial Sequence
  Description of Artificial Sequence: Synthetic oligonucleotide
aagugggguuacaaauagu

SEQ ID NO: 110476 - RNA, 19 nt, Artificial Sequence
  Description of Artificial Sequence: Synthetic oligonucleotide
accgcucuugccaggcccc

SEQ ID NO: 110477 - RNA, 19 nt, Artificial Sequence
  Description of Artificial Sequence: Synthetic oligonucleotide
uucccgucagcugugcauc

SEQ ID NO: 110478 - RNA, 19 nt, Artificial Sequence
  Description of Artificial Sequence: Synthetic oligonucleotide
aagccugauggaccucgaa

SEQ ID NO: 110479 - RNA, 19 nt, Artificial Sequence
  Description of Artificial Sequence: Synthetic oligonucleotide
augugcgccugcugaaggu

SEQ ID NO: 110480 - RNA, 19 nt, Artificial Sequence
  Description of Artificial Sequence: Synthetic oligonucleotide
acaccgaugucucccuuuu

SEQ ID NO: 110481 - RNA, 19 nt, Artificial Sequence
  Description of Artificial Sequence: Synthetic oligonucleotide
gugaccagccuuccccggc

SEQ ID NO: 110482 - RNA, 19 nt, Artificial Sequence
  Description of Artificial Sequence: Synthetic oligonucleotide
accgucugaaccagguuca

SEQ ID NO: 110483 - RNA, 19 nt, Artificial Sequence
  Description of Artificial Sequence: Synthetic oligonucleotide
auggguggauacuguugcu

SEQ ID NO: 110484 - RNA, 19 nt, Artificial Sequence
  Description of Artificial Sequence: Synthetic oligonucleotide
cacaguagaugugcgccug

SEQ ID NO: 110485 - RNA, 19 nt, Artificial Sequence
  Description of Artificial Sequence: Synthetic oligonucleotide
auagagccccugcuuucca

SEQ ID NO: 110486 - RNA, 19 nt, Artificial Sequence
  Description of Artificial Sequence: Synthetic oligonucleotide
cacccucccgguaagaucu

SEQ ID NO: 110487 - RNA, 19 nt, Artificial Sequence
  Description of Artificial Sequence: Synthetic oligonucleotide
uauuccuaauggaguccuu

SEQ ID NO: 110488 - RNA, 19 nt, Artificial Sequence
  Description of Artificial Sequence: Synthetic oligonucleotide
cucaauggguaaggauccc

SEQ ID NO: 110489 - RNA, 19 nt, Artificial Sequence
  Description of Artificial Sequence: Synthetic oligonucleotide
cacaacccaucagagucug

SEQ ID NO: 110490 - RNA, 19 nt, Artificial Sequence
  Description of Artificial Sequence: Synthetic oligonucleotide
aucccggcgggccuuugug

SEQ ID NO: 110491 - RNA, 19 nt, Artificial Sequence
  Description of Artificial Sequence: Synthetic oligonucleotide
cugugcaggugaugguuuc

SEQ ID NO: 110492 - RNA, 19 nt, Artificial Sequence
  Description of Artificial Sequence: Synthetic oligonucleotide
cagcggguauaaaccuugc

SEQ ID NO: 110493 - RNA, 19 nt, Artificial Sequence
  Description of Artificial Sequence: Synthetic oligonucleotide
ugucucccauagagccggg

SEQ ID NO: 110494 - RNA, 19 nt, Artificial Sequence
  Description of Artificial Sequence: Synthetic oligonucleotide
ccagucaggcccgugaggc

SEQ ID NO: 110495 - RNA, 19 nt, Artificial Sequence
  Description of Artificial Sequence: Synthetic oligonucleotide
cguuggacauacuucgcag

SEQ ID NO: 110496 - RNA, 19 nt, Artificial Sequence
  Description of Artificial Sequence: Synthetic oligonucleotide
gcgauccuggagcaccugg

SEQ ID NO: 110497 - RNA, 19 nt, Artificial Sequence
  Description of Artificial Sequence: Synthetic oligonucleotide
ccggucuccuuucaggccc

SEQ ID NO: 110498 - RNA, 19 nt, Artificial Sequence
  Description of Artificial Sequence: Synthetic oligonucleotide
cauuggcccuguugcgccc

SEQ ID NO: 110499 - RNA, 19 nt, Artificial Sequence
  Description of Artificial Sequence: Synthetic oligonucleotide
agcucggcagugaucccgg

SEQ ID NO: 110500 - RNA, 19 nt, Artificial Sequence
  Description of Artificial Sequence: Synthetic oligonucleotide
ccgguaagaucucacagca

SEQ ID NO: 110501 - RNA, 19 nt, Artificial Sequence
  Description of Artificial Sequence: Synthetic oligonucleotide
uauccgcgcucucccuuga

SEQ ID NO: 110502 - RNA, 19 nt, Artificial Sequence
  Description of Artificial Sequence: Synthetic oligonucleotide
guuccccuuuaggaccugg

SEQ ID NO: 110503 - RNA, 19 nt, Artificial Sequence
  Description of Artificial Sequence: Synthetic oligonucleotide
ccauccuuuccaucuaguc

SEQ ID NO: 110504 - RNA, 19 nt, Artificial Sequence
  Description of Artificial Sequence: Synthetic oligonucleotide
aggaucccagcucggcagu

SEQ ID NO: 110505 - RNA, 19 nt, Artificial Sequence
  Description of Artificial Sequence: Synthetic oligonucleotide
acccuucaggcagcguugg

SEQ ID NO: 110506 - RNA, 19 nt, Artificial Sequence
  Description of Artificial Sequence: Synthetic oligonucleotide
gguaaggaucccagcucgg

SEQ ID NO: 110507 - RNA, 19 nt, Artificial Sequence
  Description of Artificial Sequence: Synthetic oligonucleotide
caguugucaaagccuggca

SEQ ID NO: 110508 - RNA, 19 nt, Artificial Sequence
  Description of Artificial Sequence: Synthetic oligonucleotide
ccuaucugaccagggagcc

SEQ ID NO: 110509 - RNA, 19 nt, Artificial Sequence
  Description of Artificial Sequence: Synthetic oligonucleotide
ccggcuggcccauuggacc

SEQ ID NO: 110510 - RNA, 19 nt, Artificial Sequence
  Description of Artificial Sequence: Synthetic oligonucleotide
gcagcguuggacauacuuc

SEQ ID NO: 110511 - RNA, 19 nt, Artificial Sequence
  Description of Artificial Sequence: Synthetic oligonucleotide
caacccaucagagucugua

SEQ ID NO: 110512 - RNA, 19 nt, Artificial Sequence
  Description of Artificial Sequence: Synthetic oligonucleotide
gagccgggcaaaccaggca

SEQ ID NO: 110513 - RNA, 19 nt, Artificial Sequence
  Description of Artificial Sequence: Synthetic oligonucleotide
cccuguugcgcccaucuug

SEQ ID NO: 110514 - RNA, 19 nt, Artificial Sequence
  Description of Artificial Sequence: Synthetic oligonucleotide
ccucgcaccggguggaccc

SEQ ID NO: 110515 - RNA, 19 nt, Artificial Sequence
  Description of Artificial Sequence: Synthetic oligonucleotide
cauagcacccggguagcca

SEQ ID NO: 110516 - RNA, 19 nt, Artificial Sequence
  Description of Artificial Sequence: Synthetic oligonucleotide
gguggauacuguugcucca

SEQ ID NO: 110517 - RNA, 19 nt, Artificial Sequence
  Description of Artificial Sequence: Synthetic oligonucleotide
gucugaugaaccucuugau

SEQ ID NO: 110518 - RNA, 19 nt, Artificial Sequence
  Description of Artificial Sequence: Synthetic oligonucleotide
guaauccuuugaggccucc

SEQ ID NO: 110519 - RNA, 19 nt, Artificial Sequence
  Description of Artificial Sequence: Synthetic oligonucleotide
gcguuggacauacuucgca

SEQ ID NO: 110520 - RNA, 19 nt, Artificial Sequence
  Description of Artificial Sequence: Synthetic oligonucleotide
cuguugcgcccaucuugcc

SEQ ID NO: 110521 - RNA, 19 nt, Artificial Sequence
  Description of Artificial Sequence: Synthetic oligonucleotide
gaaaucccgggucacccuu

SEQ ID NO: 110522 - RNA, 19 nt, Artificial Sequence
  Description of Artificial Sequence: Synthetic oligonucleotide
ucggcucuugggcgcuccc

SEQ ID NO: 110523 - RNA, 19 nt, Artificial Sequence
  Description of Artificial Sequence: Synthetic oligonucleotide
gaaagccgggcuggccuug

SEQ ID NO: 110524 - RNA, 19 nt, Artificial Sequence
  Description of Artificial Sequence: Synthetic oligonucleotide
ucgcccuuuucucccuuuu

SEQ ID NO: 110525 - RNA, 19 nt, Artificial Sequence
  Description of Artificial Sequence: Synthetic oligonucleotide
cagucugagggguugcagu

SEQ ID NO: 110526 - RNA, 19 nt, Artificial Sequence
  Description of Artificial Sequence: Synthetic oligonucleotide
cacucccggcuucccaggc

SEQ ID NO: 110527 - RNA, 19 nt, Artificial Sequence
  Description of Artificial Sequence: Synthetic oligonucleotide
gaccucgaaucccuucacu

SEQ ID NO: 110528 - RNA, 19 nt, Artificial Sequence
  Description of Artificial Sequence: Synthetic oligonucleotide
ccuggcacgccagggaugc

SEQ ID NO: 110529 - RNA, 19 nt, Artificial Sequence
  Description of Artificial Sequence: Synthetic oligonucleotide
ucgucccuggggucccaug

SEQ ID NO: 110530 - RNA, 19 nt, Artificial Sequence
  Description of Artificial Sequence: Synthetic oligonucleotide
cagucccucaggcccaaca

SEQ ID NO: 110531 - RNA, 19 nt, Artificial Sequence
  Description of Artificial Sequence: Synthetic oligonucleotide
cuggugggcccgacucgcc

SEQ ID NO: 110532 - RNA, 19 nt, Artificial Sequence
  Description of Artificial Sequence: Synthetic oligonucleotide
cuuaggccaggcuugccau

SEQ ID NO: 110533 - RNA, 19 nt, Artificial Sequence
  Description of Artificial Sequence: Synthetic oligonucleotide
ccacgaaauucuggaaccc

SEQ ID NO: 110534 - RNA, 19 nt, Artificial Sequence
  Description of Artificial Sequence: Synthetic oligonucleotide
cucccgcgaugccaacacc

SEQ ID NO: 110535 - RNA, 19 nt, Artificial Sequence
  Description of Artificial Sequence: Synthetic oligonucleotide
cagugaucccgggcugucc

SEQ ID NO: 110536 - RNA, 19 nt, Artificial Sequence
  Description of Artificial Sequence: Synthetic oligonucleotide
augccagaucugcccuucu

SEQ ID NO: 110537 - RNA, 19 nt, Artificial Sequence
  Description of Artificial Sequence: Synthetic oligonucleotide
gguuacaaauaguuucguu

SEQ ID NO: 110538 - RNA, 19 nt, Artificial Sequence
  Description of Artificial Sequence: Synthetic oligonucleotide
gggacacccucccgguaag

SEQ ID NO: 110539 - RNA, 19 nt, Artificial Sequence
  Description of Artificial Sequence: Synthetic oligonucleotide
ccauagagccccugcuuuc

SEQ ID NO: 110540 - RNA, 19 nt, Artificial Sequence
  Description of Artificial Sequence: Synthetic oligonucleotide
cuguugucuccccuggccu

SEQ ID NO: 110541 - RNA, 19 nt, Artificial Sequence
  Description of Artificial Sequence: Synthetic oligonucleotide
uauccccgugggccuuugu

SEQ ID NO: 110542 - RNA, 19 nt, Artificial Sequence
  Description of Artificial Sequence: Synthetic oligonucleotide
ggaccucgaaucccuucac

SEQ ID NO: 110543 - RNA, 19 nt, Artificial Sequence
  Description of Artificial Sequence: Synthetic oligonucleotide
caccggguggacccucuuc

SEQ ID NO: 110544 - RNA, 19 nt, Artificial Sequence
  Description of Artificial Sequence: Synthetic oligonucleotide
ggccgucuggcccugggca

SEQ ID NO: 110545 - RNA, 19 nt, Artificial Sequence
  Description of Artificial Sequence: Synthetic oligonucleotide
gagguccauagagccccug

SEQ ID NO: 110546 - RNA, 19 nt, Artificial Sequence
  Description of Artificial Sequence: Synthetic oligonucleotide
ccggagguccauagagccc

SEQ ID NO: 110547 - RNA, 19 nt, Artificial Sequence
  Description of Artificial Sequence: Synthetic oligonucleotide
ggggacacccucccgguaa

SEQ ID NO: 110548 - RNA, 19 nt, Artificial Sequence
  Description of Artificial Sequence: Synthetic oligonucleotide
gaaaggcuggaugggccgu

SEQ ID NO: 110549 - RNA, 19 nt, Artificial Sequence
  Description of Artificial Sequence: Synthetic oligonucleotide
cagaucucuccuggccgac

SEQ ID NO: 110550 - RNA, 19 nt, Artificial Sequence
  Description of Artificial Sequence: Synthetic oligonucleotide
cuaguccauccagcccagc

SEQ ID NO: 110551 - RNA, 19 nt, Artificial Sequence
  Description of Artificial Sequence: Synthetic oligonucleotide
caagccugauggaccucga

SEQ ID NO: 110552 - RNA, 19 nt, Artificial Sequence
  Description of Artificial Sequence: Synthetic oligonucleotide
gucucccauagagccgggc

SEQ ID NO: 110553 - RNA, 19 nt, Artificial Sequence
  Description of Artificial Sequence: Synthetic oligonucleotide
ggucccauagcacccgggu

SEQ ID NO: 110554 - RNA, 19 nt, Artificial Sequence
  Description of Artificial Sequence: Synthetic oligonucleotide
ggcagcguuggacauacuu

SEQ ID NO: 110555 - RNA, 19 nt, Artificial Sequence
  Description of Artificial Sequence: Synthetic oligonucleotide
cucggcucuugggcgcucc

SEQ ID NO: 110556 - RNA, 19 nt, Artificial Sequence
  Description of Artificial Sequence: Synthetic oligonucleotide
caccgaugucucccuuuuc

SEQ ID NO: 110557 - RNA, 19 nt, Artificial Sequence
  Description of Artificial Sequence: Synthetic oligonucleotide
aggucccauggaaccgcuc

SEQ ID NO: 110558 - RNA, 19 nt, Artificial Sequence
  Description of Artificial Sequence: Synthetic oligonucleotide
gugaucccgggcuguccga

SEQ ID NO: 110559 - RNA, 19 nt, Artificial Sequence
  Description of Artificial Sequence: Synthetic oligonucleotide
ccuugaaaucccgggucac

SEQ ID NO: 110560 - RNA, 19 nt, Artificial Sequence
  Description of Artificial Sequence: Synthetic oligonucleotide
cccgacucgcccuucucuc

SEQ ID NO: 110561 - RNA, 19 nt, Artificial Sequence
  Description of Artificial Sequence: Synthetic oligonucleotide
gguucacccggagggccag

SEQ ID NO: 110562 - RNA, 19 nt, Artificial Sequence
  Description of Artificial Sequence: Synthetic oligonucleotide
ccgggaugcccuguuuucc

SEQ ID NO: 110563 - RNA, 19 nt, Artificial Sequence
  Description of Artificial Sequence: Synthetic oligonucleotide
cccugaaucccaggagggc

SEQ ID NO: 110564 - RNA, 19 nt, Artificial Sequence
  Description of Artificial Sequence: Synthetic oligonucleotide
gggucccauagcacccggg

SEQ ID NO: 110565 - RNA, 19 nt, Artificial Sequence
  Description of Artificial Sequence: Synthetic oligonucleotide
cccggcuggcccauuggac

SEQ ID NO: 110566 - RNA, 19 nt, Artificial Sequence
  Description of Artificial Sequence: Synthetic oligonucleotide
cuucgcaggggucacccuu

SEQ ID NO: 110567 - RNA, 19 nt, Artificial Sequence
  Description of Artificial Sequence: Synthetic oligonucleotide
cccuggucgcccuuuucuc

SEQ ID NO: 110568 - RNA, 19 nt, Artificial Sequence
  Description of Artificial Sequence: Synthetic oligonucleotide
cagggcgggcacucauuga

SEQ ID NO: 110569 - RNA, 19 nt, Artificial Sequence
  Description of Artificial Sequence: Synthetic oligonucleotide
ccgggucacaguagaugug

SEQ ID NO: 110570 - RNA, 19 nt, Artificial Sequence
  Description of Artificial Sequence: Synthetic oligonucleotide
ccuuagucccuggcacucc

SEQ ID NO: 110571 - RNA, 19 nt, Artificial Sequence
  Description of Artificial Sequence: Synthetic oligonucleotide
cccauagcacccggguagc

SEQ ID NO: 110572 - RNA, 19 nt, Artificial Sequence
  Description of Artificial Sequence: Synthetic oligonucleotide
auccgcgcucucccuugau

SEQ ID NO: 110573 - RNA, 19 nt, Artificial Sequence
  Description of Artificial Sequence: Synthetic oligonucleotide
ccaagcagaagcagcgggu

SEQ ID NO: 110574 - RNA, 19 nt, Artificial Sequence
  Description of Artificial Sequence: Synthetic oligonucleotide
ggcccgugaggccucgcuc

SEQ ID NO: 110575 - RNA, 19 nt, Artificial Sequence
  Description of Artificial Sequence: Synthetic oligonucleotide
cuucucgccuuggccagaa

SEQ ID NO: 110576 - RNA, 19 nt, Artificial Sequence
  Description of Artificial Sequence: Synthetic oligonucleotide
ggaucccagcucggcagug

SEQ ID NO: 110577 - RNA, 19 nt, Artificial Sequence
  Description of Artificial Sequence: Synthetic oligonucleotide
uugcgcccaucuugccaua

SEQ ID NO: 110578 - RNA, 19 nt, Artificial Sequence
  Description of Artificial Sequence: Synthetic oligonucleotide
guguauccgcgcucucccu

SEQ ID NO: 110579 - RNA, 19 nt, Artificial Sequence
  Description of Artificial Sequence: Synthetic oligonucleotide
guauccccgugggccuuug

SEQ ID NO: 110580 - RNA, 19 nt, Artificial Sequence
  Description of Artificial Sequence: Synthetic oligonucleotide
ggagagccccucgcaccgg

SEQ ID NO: 110581 - RNA, 19 nt, Artificial Sequence
  Description of Artificial Sequence: Synthetic oligonucleotide
gcgggcacucauugacuuc

SEQ ID NO: 110582 - RNA, 19 nt, Artificial Sequence
  Description of Artificial Sequence: Synthetic oligonucleotide
cagucccuaggccuucccu

SEQ ID NO: 110583 - RNA, 19 nt, Artificial Sequence
  Description of Artificial Sequence: Synthetic oligonucleotide
ccgaccaucucggccuggc

SEQ ID NO: 110584 - RNA, 19 nt, Artificial Sequence
  Description of Artificial Sequence: Synthetic oligonucleotide
cccgggcuguccgagggcc

SEQ ID NO: 110585 - RNA, 19 nt, Artificial Sequence
  Description of Artificial Sequence: Synthetic oligonucleotide
gcgcccaucuugccauaac

SEQ ID NO: 110586 - RNA, 19 nt, Artificial Sequence
  Description of Artificial Sequence: Synthetic oligonucleotide
ccauagcacccggguagcc

SEQ ID NO: 110587 - RNA, 19 nt, Artificial Sequence
  Description of Artificial Sequence: Synthetic oligonucleotide
gccaguguauccgcgcucu

SEQ ID NO: 110588 - RNA, 19 nt, Artificial Sequence
  Description of Artificial Sequence: Synthetic oligonucleotide
agagccccucgcaccgggu

SEQ ID NO: 110589 - RNA, 19 nt, Artificial Sequence
  Description of Artificial Sequence: Synthetic oligonucleotide
ccuggccgaccaucucggc

SEQ ID NO: 110590 - RNA, 19 nt, Artificial Sequence
  Description of Artificial Sequence: Synthetic oligonucleotide
gggcgcucccuuccuguga

SEQ ID NO: 110591 - RNA, 19 nt, Artificial Sequence
  Description of Artificial Sequence: Synthetic oligonucleotide
gauggaccucgaaucccuu

SEQ ID NO: 110592 - RNA, 19 nt, Artificial Sequence
  Description of Artificial Sequence: Synthetic oligonucleotide
ccuggccggccacugcuuc

SEQ ID NO: 110593 - RNA, 19 nt, Artificial Sequence
  Description of Artificial Sequence: Synthetic oligonucleotide
gcccgugaggccucgcucu

SEQ ID NO: 110594 - RNA, 19 nt, Artificial Sequence
  Description of Artificial Sequence: Synthetic oligonucleotide
ccuuaggcccagggaggcc

SEQ ID NO: 110595 - RNA, 19 nt, Artificial Sequence
  Description of Artificial Sequence: Synthetic oligonucleotide
gcagugaucccgggcuguc

SEQ ID NO: 110596 - RNA, 19 nt, Artificial Sequence
  Description of Artificial Sequence: Synthetic oligonucleotide
ggggacccgguaggccugg

SEQ ID NO: 110597 - RNA, 19 nt, Artificial Sequence
  Description of Artificial Sequence: Synthetic oligonucleotide
ucgcaccggguggacccuc

SEQ ID NO: 110598 - RNA, 19 nt, Artificial Sequence
  Description of Artificial Sequence: Synthetic oligonucleotide
ggcuguccgagggcccaag

SEQ ID NO: 110599 - RNA, 19 nt, Artificial Sequence
  Description of Artificial Sequence: Synthetic oligonucleotide
guaucccggcgggccuuug

SEQ ID NO: 110600 - RNA, 19 nt, Artificial Sequence
  Description of Artificial Sequence: Synthetic oligonucleotide
gaggccgggaugcccuguu

SEQ ID NO: 110601 - RNA, 19 nt, Artificial Sequence
  Description of Artificial Sequence: Synthetic oligonucleotide
ggugggcccgacucgcccu

SEQ ID NO: 110602 - RNA, 19 nt, Artificial Sequence
  Description of Artificial Sequence: Synthetic oligonucleotide
ccaacagucccuaggccuu

SEQ ID NO: 110603 - RNA, 19 nt, Artificial Sequence
  Description of Artificial Sequence: Synthetic oligonucleotide
ccggguggacccucuucuc

SEQ ID NO: 110604 - RNA, 19 nt, Artificial Sequence
  Description of Artificial Sequence: Synthetic oligonucleotide
ccagggagucccacgaaau

SEQ ID NO: 110605 - RNA, 19 nt, Artificial Sequence
  Description of Artificial Sequence: Synthetic oligonucleotide
ccgggcaaaccaggcaauc

SEQ ID NO: 110606 - RNA, 19 nt, Artificial Sequence
  Description of Artificial Sequence: Synthetic oligonucleotide
ggcgauccuggagcaccug

SEQ ID NO: 110607 - RNA, 19 nt, Artificial Sequence
  Description of Artificial Sequence: Synthetic oligonucleotide
cagaagcagcggguauaaa

SEQ ID NO: 110608 - RNA, 19 nt, Artificial Sequence
  Description of Artificial Sequence: Synthetic oligonucleotide
gcauggccccaaagcaguc

SEQ ID NO: 110609 - RNA, 19 nt, Artificial Sequence
  Description of Artificial Sequence: Synthetic oligonucleotide
ggcccgacucgcccuucuc

SEQ ID NO: 110610 - RNA, 19 nt, Artificial Sequence
  Description of Artificial Sequence: Synthetic oligonucleotide
ccgucugaaccagguucac

SEQ ID NO: 110611 - RNA, 19 nt, Artificial Sequence
  Description of Artificial Sequence: Synthetic oligonucleotide
cccgugaggccucgcucuc

SEQ ID NO: 110612 - RNA, 19 nt, Artificial Sequence
  Description of Artificial Sequence: Synthetic oligonucleotide
ggcagugaucccgggcugu

SEQ ID NO: 110613 - RNA, 19 nt, Artificial Sequence
  Description of Artificial Sequence: Synthetic oligonucleotide
gccagguaauccucucauu

SEQ ID NO: 110614 - RNA, 19 nt, Artificial Sequence
  Description of Artificial Sequence: Synthetic oligonucleotide
accuggccggccacugcuu

SEQ ID NO: 110615 - RNA, 19 nt, Artificial Sequence
  Description of Artificial Sequence: Synthetic oligonucleotide
ccggcgggccuuugugguc

SEQ ID NO: 110616 - RNA, 19 nt, Artificial Sequence
  Description of Artificial Sequence: Synthetic oligonucleotide
cccucgcaccggguggacc

SEQ ID NO: 110617 - RNA, 19 nt, Artificial Sequence
  Description of Artificial Sequence: Synthetic oligonucleotide
ccaggcgauccuggagcac

SEQ ID NO: 110618 - RNA, 19 nt, Artificial Sequence
  Description of Artificial Sequence: Synthetic oligonucleotide
ggcacgccagggaugcccu

SEQ ID NO: 110619 - RNA, 19 nt, Artificial Sequence
  Description of Artificial Sequence: Synthetic oligonucleotide
ccccggcuggcccauugga

SEQ ID NO: 110620 - RNA, 19 nt, Artificial Sequence
  Description of Artificial Sequence: Synthetic oligonucleotide
ccguggacacagggcgggc

SEQ ID NO: 110621 - RNA, 19 nt, Artificial Sequence
  Description of Artificial Sequence: Synthetic oligonucleotide
cccugcuuuccaggagguc

SEQ ID NO: 110622 - RNA, 19 nt, Artificial Sequence
  Description of Artificial Sequence: Synthetic oligonucleotide
ggcgggccuuuguggucuc

SEQ ID NO: 110623 - RNA, 19 nt, Artificial Sequence
  Description of Artificial Sequence: Synthetic oligonucleotide
cccggcgggccuuuguggu

SEQ ID NO: 110624 - RNA, 19 nt, Artificial Sequence
  Description of Artificial Sequence: Synthetic oligonucleotide
gccccucgcaccgggugga

SEQ ID NO: 110625 - RNA, 19 nt, Artificial Sequence
  Description of Artificial Sequence: Synthetic oligonucleotide
aggcagcguuggacauacu

SEQ ID NO: 110626 - RNA, 19 nt, Artificial Sequence
  Description of Artificial Sequence: Synthetic oligonucleotide
ccgucuggcccugggcaca

SEQ ID NO: 110627 - RNA, 19 nt, Artificial Sequence
  Description of Artificial Sequence: Synthetic oligonucleotide
cucgcaccggguggacccu

SEQ ID NO: 110628 - RNA, 19 nt, Artificial Sequence
  Description of Artificial Sequence: Synthetic oligonucleotide
gggcccgacucgcccuucu

SEQ ID NO: 110629 - RNA, 19 nt, Artificial Sequence
  Description of Artificial Sequence: Synthetic oligonucleotide
gccgggcaaaccaggcaau

SEQ ID NO: 110630 - RNA, 19 nt, Artificial Sequence
  Description of Artificial Sequence: Synthetic oligonucleotide
ggucgucccugggguccca

SEQ ID NO: 110631 - RNA, 19 nt, Artificial Sequence
  Description of Artificial Sequence: Synthetic oligonucleotide
ccgcgaugccaacaccgau

SEQ ID NO: 110632 - RNA, 19 nt, Artificial Sequence
  Description of Artificial Sequence: Synthetic oligonucleotide
cgggcuguccgagggccca

SEQ ID NO: 110633 - RNA, 19 nt, Artificial Sequence
  Description of Artificial Sequence: Synthetic oligonucleotide
ccccucgcaccggguggac

SEQ ID NO: 110634 - RNA, 19 nt, Artificial Sequence
  Description of Artificial Sequence: Synthetic oligonucleotide
ccucggcucuugggcgcuc

SEQ ID NO: 110635 - RNA, 19 nt, Artificial Sequence
  Description of Artificial Sequence: Synthetic oligonucleotide
gcaccggguggacccucuu

SEQ ID NO: 110636 - RNA, 19 nt, Artificial Sequence
  Description of Artificial Sequence: Synthetic oligonucleotide
cuuccccggcuggcccauu

SEQ ID NO: 110637 - RNA, 19 nt, Artificial Sequence
  Description of Artificial Sequence: Synthetic oligonucleotide
aacuaagacuuucaaaggc

SEQ ID NO: 110638 - RNA, 19 nt, Artificial Sequence
  Description of Artificial Sequence: Synthetic oligonucleotide
aaaugcauucccuauggac

SEQ ID NO: 110639 - RNA, 19 nt, Artificial Sequence
  Description of Artificial Sequence: Synthetic oligonucleotide
aagauaacaauacauggaa

SEQ ID NO: 110640 - RNA, 19 nt, Artificial Sequence
  Description of Artificial Sequence: Synthetic oligonucleotide
aacacacacgcacacacac

SEQ ID NO: 110641 - RNA, 19 nt, Artificial Sequence
  Description of Artificial Sequence: Synthetic oligonucleotide
aagaaucuccgccagugcg

SEQ ID NO: 110642 - RNA, 19 nt, Artificial Sequence
  Description of Artificial Sequence: Synthetic oligonucleotide
uuuauuauaccuugcuucu

SEQ ID NO: 110643 - RNA, 19 nt, Artificial Sequence
  Description of Artificial Sequence: Synthetic oligonucleotide
uaagggagaaucuaaggca

SEQ ID NO: 110644 - RNA, 19 nt, Artificial Sequence
  Description of Artificial Sequence: Synthetic oligonucleotide
aaugacguucuguacuuag

SEQ ID NO: 110645 - RNA, 19 nt, Artificial Sequence
  Description of Artificial Sequence: Synthetic oligonucleotide
aaaugagugcagcagagau

SEQ ID NO: 110646 - RNA, 19 nt, Artificial Sequence
  Description of Artificial Sequence: Synthetic oligonucleotide
uguuuguacagcagaaccc

SEQ ID NO: 110647 - RNA, 19 nt, Artificial Sequence
  Description of Artificial Sequence: Synthetic oligonucleotide
uuauaccgcaaccggaggg

SEQ ID NO: 110648 - RNA, 19 nt, Artificial Sequence
  Description of Artificial Sequence: Synthetic oligonucleotide
uauaccuugcuucuucagc

SEQ ID NO: 110649 - RNA, 19 nt, Artificial Sequence
  Description of Artificial Sequence: Synthetic oligonucleotide
uauaaaacuccaacccgag

SEQ ID NO: 110650 - RNA, 19 nt, Artificial Sequence
  Description of Artificial Sequence: Synthetic oligonucleotide
gugauuuacaacaaggaac

SEQ ID NO: 110651 - RNA, 19 nt, Artificial Sequence
  Description of Artificial Sequence: Synthetic oligonucleotide
ucuccuacuucgcugaaug

SEQ ID NO: 110652 - RNA, 19 nt, Artificial Sequence
  Description of Artificial Sequence: Synthetic oligonucleotide
aggaccauccuggagaggc

SEQ ID NO: 110653 - RNA, 19 nt, Artificial Sequence
  Description of Artificial Sequence: Synthetic oligonucleotide
agauuuuauccaucgguag

SEQ ID NO: 110654 - RNA, 19 nt, Artificial Sequence
  Description of Artificial Sequence: Synthetic oligonucleotide
auaucgcugaucccuaagg

SEQ ID NO: 110655 - RNA, 19 nt, Artificial Sequence
  Description of Artificial Sequence: Synthetic oligonucleotide
aauaucgcugaucccuaag

SEQ ID NO: 110656 - RNA, 19 nt, Artificial Sequence
  Description of Artificial Sequence: Synthetic oligonucleotide
agcugaccaauccugcucc

SEQ ID NO: 110657 - RNA, 19 nt, Artificial Sequence
  Description of Artificial Sequence: Synthetic oligonucleotide
aagaggauuucgauaacuc

SEQ ID NO: 110658 - RNA, 19 nt, Artificial Sequence
  Description of Artificial Sequence: Synthetic oligonucleotide
accgucagggcguaaaggg

SEQ ID NO: 110659 - RNA, 19 nt, Artificial Sequence
  Description of Artificial Sequence: Synthetic oligonucleotide
aguguaacugaagagucuc

SEQ ID NO: 110660 - RNA, 19 nt, Artificial Sequence
  Description of Artificial Sequence: Synthetic oligonucleotide
uuuggggacaauacuuuga

SEQ ID NO: 110661 - RNA, 19 nt, Artificial Sequence
  Description of Artificial Sequence: Synthetic oligonucleotide
aaagaggauuucgauaacu

SEQ ID NO: 110662 - RNA, 19 nt, Artificial Sequence
  Description of Artificial Sequence: Synthetic oligonucleotide
aguuaggcaguccucaaga

SEQ ID NO: 110663 - RNA, 19 nt, Artificial Sequence
  Description of Artificial Sequence: Synthetic oligonucleotide
agcaacuuggaaugacaac

SEQ ID NO: 110664 - RNA, 19 nt, Artificial Sequence
  Description of Artificial Sequence: Synthetic oligonucleotide
cauuauguccucacuugcc

SEQ ID NO: 110665 - RNA, 19 nt, Artificial Sequence
  Description of Artificial Sequence: Synthetic oligonucleotide
agaggauuucgauaacucu

SEQ ID NO: 110666 - RNA, 19 nt, Artificial Sequence
  Description of Artificial Sequence: Synthetic oligonucleotide
uauaccgcaaccggagggg

SEQ ID NO: 110667 - RNA, 19 nt, Artificial Sequence
  Description of Artificial Sequence: Synthetic oligonucleotide
gcaacuuggaaugacaacc

SEQ ID NO: 110668 - RNA, 19 nt, Artificial Sequence
  Description of Artificial Sequence: Synthetic oligonucleotide
ugacguucuguacuuaguc

SEQ ID NO: 110669 - RNA, 19 nt, Artificial Sequence
  Description of Artificial Sequence: Synthetic oligonucleotide
acaaggaacacagggucac

SEQ ID NO: 110670 - RNA, 19 nt, Artificial Sequence
  Description of Artificial Sequence: Synthetic oligonucleotide
caaccuuggucguaguggg

SEQ ID NO: 110671 - RNA, 19 nt, Artificial Sequence
  Description of Artificial Sequence: Synthetic oligonucleotide
uauccaucgguaguuuagg

SEQ ID NO: 110672 - RNA, 19 nt, Artificial Sequence
  Description of Artificial Sequence: Synthetic oligonucleotide
auucccuauggacucaaca

SEQ ID NO: 110673 - RNA, 19 nt, Artificial Sequence
  Description of Artificial Sequence: Synthetic oligonucleotide
aacucuagggacaguaacu

SEQ ID NO: 110674 - RNA, 19 nt, Artificial Sequence
  Description of Artificial Sequence: Synthetic oligonucleotide
uuggggacaauacuuugau

SEQ ID NO: 110675 - RNA, 19 nt, Artificial Sequence
  Description of Artificial Sequence: Synthetic oligonucleotide
gagguguauucugugaggc

SEQ ID NO: 110676 - RNA, 19 nt, Artificial Sequence
  Description of Artificial Sequence: Synthetic oligonucleotide
cacacacgcacacacacac

SEQ ID NO: 110677 - RNA, 19 nt, Artificial Sequence
  Description of Artificial Sequence: Synthetic oligonucleotide
uucgauaacucuuccuuua

SEQ ID NO: 110678 - RNA, 19 nt, Artificial Sequence
  Description of Artificial Sequence: Synthetic oligonucleotide
acugacucgcuuggaaacc

SEQ ID NO: 110679 - RNA, 19 nt, Artificial Sequence
  Description of Artificial Sequence: Synthetic oligonucleotide
uccaucuaagggagaaucu

SEQ ID NO: 110680 - RNA, 19 nt, Artificial Sequence
  Description of Artificial Sequence: Synthetic oligonucleotide
ugcaaugagcauuccauuu

SEQ ID NO: 110681 - RNA, 19 nt, Artificial Sequence
  Description of Artificial Sequence: Synthetic oligonucleotide
gauuuuauccaucgguagu

SEQ ID NO: 110682 - RNA, 19 nt, Artificial Sequence
  Description of Artificial Sequence: Synthetic oligonucleotide
acguucuguacuuagucau

SEQ ID NO: 110683 - RNA, 19 nt, Artificial Sequence
  Description of Artificial Sequence: Synthetic oligonucleotide
ucgguugaggaguuaggca

SEQ ID NO: 110684 - RNA, 19 nt, Artificial Sequence
  Description of Artificial Sequence: Synthetic oligonucleotide
agaaucuaaggcacuguag

SEQ ID NO: 110685 - RNA, 19 nt, Artificial Sequence
  Description of Artificial Sequence: Synthetic oligonucleotide
agaacucuuggcacucugc

SEQ ID NO: 110686 - RNA, 19 nt, Artificial Sequence
  Description of Artificial Sequence: Synthetic oligonucleotide
ucguagugggaauaucgcu

SEQ ID NO: 110687 - RNA, 19 nt, Artificial Sequence
  Description of Artificial Sequence: Synthetic oligonucleotide
agugcgucgucaucaucgg

SEQ ID NO: 110688 - RNA, 19 nt, Artificial Sequence
  Description of Artificial Sequence: Synthetic oligonucleotide
ggucguagugggaauaucg

SEQ ID NO: 110689 - RNA, 19 nt, Artificial Sequence
  Description of Artificial Sequence: Synthetic oligonucleotide
gacguucuguacuuaguca

SEQ ID NO: 110690 - RNA, 19 nt, Artificial Sequence
  Description of Artificial Sequence: Synthetic oligonucleotide
aggaagcggaacuuggcca

SEQ ID NO: 110691 - RNA, 19 nt, Artificial Sequence
  Description of Artificial Sequence: Synthetic oligonucleotide
agcuaaagaggauuucgau

SEQ ID NO: 110692 - RNA, 19 nt, Artificial Sequence
  Description of Artificial Sequence: Synthetic oligonucleotide
auguguugggccauugggg

SEQ ID NO: 110693 - RNA, 19 nt, Artificial Sequence
  Description of Artificial Sequence: Synthetic oligonucleotide
auagcagccugggagcaac

SEQ ID NO: 110694 - RNA, 19 nt, Artificial Sequence
  Description of Artificial Sequence: Synthetic oligonucleotide
uucgcugaauggcugccca

SEQ ID NO: 110695 - RNA, 19 nt, Artificial Sequence
  Description of Artificial Sequence: Synthetic oligonucleotide
agagucucgguugaggagu

SEQ ID NO: 110696 - RNA, 19 nt, Artificial Sequence
  Description of Artificial Sequence: Synthetic oligonucleotide
uaacacacacgcacacaca

SEQ ID NO: 110697 - RNA, 19 nt, Artificial Sequence
  Description of Artificial Sequence: Synthetic oligonucleotide
aguucuucccacaggccac

SEQ ID NO: 110698 - RNA, 19 nt, Artificial Sequence
  Description of Artificial Sequence: Synthetic oligonucleotide
acuugccaacagaagacgg

SEQ ID NO: 110699 - RNA, 19 nt, Artificial Sequence
  Description of Artificial Sequence: Synthetic oligonucleotide
uuuauccaucgguaguuua

SEQ ID NO: 110700 - RNA, 19 nt, Artificial Sequence
  Description of Artificial Sequence: Synthetic oligonucleotide
cacuacccaaaucccaagc

SEQ ID NO: 110701 - RNA, 19 nt, Artificial Sequence
  Description of Artificial Sequence: Synthetic oligonucleotide
cacgcacacacacacauga

SEQ ID NO: 110702 - RNA, 19 nt, Artificial Sequence
  Description of Artificial Sequence: Synthetic oligonucleotide
ccuuuaaccuucuccgugg

SEQ ID NO: 110703 - RNA, 19 nt, Artificial Sequence
  Description of Artificial Sequence: Synthetic oligonucleotide
ucacucgcauugacuuugg

SEQ ID NO: 110704 - RNA, 19 nt, Artificial Sequence
  Description of Artificial Sequence: Synthetic oligonucleotide
ggcaaauuuguacacagua

SEQ ID NO: 110705 - RNA, 19 nt, Artificial Sequence
  Description of Artificial Sequence: Synthetic oligonucleotide
gaaccgucagggcguaaag

SEQ ID NO: 110706 - RNA, 19 nt, Artificial Sequence
  Description of Artificial Sequence: Synthetic oligonucleotide
uggcaaucaaggucugaca

SEQ ID NO: 110707 - RNA, 19 nt, Artificial Sequence
  Description of Artificial Sequence: Synthetic oligonucleotide
acuucgcugaauggcugcc

SEQ ID NO: 110708 - RNA, 19 nt, Artificial Sequence
  Description of Artificial Sequence: Synthetic oligonucleotide
auacacgaugaugggcggc

SEQ ID NO: 110709 - RNA, 19 nt, Artificial Sequence
  Description of Artificial Sequence: Synthetic oligonucleotide
uacacgaugaugggcggca

SEQ ID NO: 110710 - RNA, 19 nt, Artificial Sequence
  Description of Artificial Sequence: Synthetic oligonucleotide
ugcucuuaaggagucuugu

SEQ ID NO: 110711 - RNA, 19 nt, Artificial Sequence
  Description of Artificial Sequence: Synthetic oligonucleotide
cauacacaaccugcaaggc

SEQ ID NO: 110712 - RNA, 19 nt, Artificial Sequence
  Description of Artificial Sequence: Synthetic oligonucleotide
cuagccggaacaggguugg

SEQ ID NO: 110713 - RNA, 19 nt, Artificial Sequence
  Description of Artificial Sequence: Synthetic oligonucleotide
aaggaacacagggucacaa

SEQ ID NO: 110714 - RNA, 19 nt, Artificial Sequence
  Description of Artificial Sequence: Synthetic oligonucleotide
agucuugucagaagcuuug

SEQ ID NO: 110715 - RNA, 19 nt, Artificial Sequence
  Description of Artificial Sequence: Synthetic oligonucleotide
aaucuccgccagugcgucg

SEQ ID NO: 110716 - RNA, 19 nt, Artificial Sequence
  Description of Artificial Sequence: Synthetic oligonucleotide
ucgcauugacuuugggaca

SEQ ID NO: 110717 - RNA, 19 nt, Artificial Sequence
  Description of Artificial Sequence: Synthetic oligonucleotide
cuccguacuuccuccacug

SEQ ID NO: 110718 - RNA, 19 nt, Artificial Sequence
  Description of Artificial Sequence: Synthetic oligonucleotide
gauuucgauaacucuuccu

SEQ ID NO: 110719 - RNA, 19 nt, Artificial Sequence
  Description of Artificial Sequence: Synthetic oligonucleotide
gucguagugggaauaucgc

SEQ ID NO: 110720 - RNA, 19 nt, Artificial Sequence
  Description of Artificial Sequence: Synthetic oligonucleotide
aggaguuaggcaguccuca

SEQ ID NO: 110721 - RNA, 19 nt, Artificial Sequence
  Description of Artificial Sequence: Synthetic oligonucleotide
gccggaacaggguuggccg

SEQ ID NO: 110722 - RNA, 19 nt, Artificial Sequence
  Description of Artificial Sequence: Synthetic oligonucleotide
caucgguggugucacuugc

SEQ ID NO: 110723 - RNA, 19 nt, Artificial Sequence
  Description of Artificial Sequence: Synthetic oligonucleotide
guccaucuaagggagaauc

SEQ ID NO: 110724 - RNA, 19 nt, Artificial Sequence
  Description of Artificial Sequence: Synthetic oligonucleotide
cuccuacuucgcugaaugg

SEQ ID NO: 110725 - RNA, 19 nt, Artificial Sequence
  Description of Artificial Sequence: Synthetic oligonucleotide
uucugaagccauugcgguc

SEQ ID NO: 110726 - RNA, 19 nt, Artificial Sequence
  Description of Artificial Sequence: Synthetic oligonucleotide
cacguugacucgucccucc

SEQ ID NO: 110727 - RNA, 19 nt, Artificial Sequence
  Description of Artificial Sequence: Synthetic oligonucleotide
ggauagcugaccaauccug

SEQ ID NO: 110728 - RNA, 19 nt, Artificial Sequence
  Description of Artificial Sequence: Synthetic oligonucleotide
accgcaaccggagggguuc

SEQ ID NO: 110729 - RNA, 19 nt, Artificial Sequence
  Description of Artificial Sequence: Synthetic oligonucleotide
ugcacaucuccagaaccgu

SEQ ID NO: 110730 - RNA, 19 nt, Artificial Sequence
  Description of Artificial Sequence: Synthetic oligonucleotide
auccaucgguaguuuagga

SEQ ID NO: 110731 - RNA, 19 nt, Artificial Sequence
  Description of Artificial Sequence: Synthetic oligonucleotide
cagcuaaagaggauuucga

SEQ ID NO: 110732 - RNA, 19 nt, Artificial Sequence
  Description of Artificial Sequence: Synthetic oligonucleotide
ugcuagccggaacaggguu

SEQ ID NO: 110733 - RNA, 19 nt, Artificial Sequence
  Description of Artificial Sequence: Synthetic oligonucleotide
agaccaaccaggucccuuu

SEQ ID NO: 110734 - RNA, 19 nt, Artificial Sequence
  Description of Artificial Sequence: Synthetic oligonucleotide
uugcuagccggaacagggu

SEQ ID NO: 110735 - RNA, 19 nt, Artificial Sequence
  Description of Artificial Sequence: Synthetic oligonucleotide
ggcguaaagggcuuccuuc

SEQ ID NO: 110736 - RNA, 19 nt, Artificial Sequence
  Description of Artificial Sequence: Synthetic oligonucleotide
cacuugaagcaaauaccca

SEQ ID NO: 110737 - RNA, 19 nt, Artificial Sequence
  Description of Artificial Sequence: Synthetic oligonucleotide
agcuuggaacuggaugccg

SEQ ID NO: 110738 - RNA, 19 nt, Artificial Sequence
  Description of Artificial Sequence: Synthetic oligonucleotide
gccccuagguacuuugggg

SEQ ID NO: 110739 - RNA, 19 nt, Artificial Sequence
  Description of Artificial Sequence: Synthetic oligonucleotide
ggauuucgauaacucuucc

SEQ ID NO: 110740 - RNA, 19 nt, Artificial Sequence
  Description of Artificial Sequence: Synthetic oligonucleotide
aacagaagacgggugucuu

SEQ ID NO: 110741 - RNA, 19 nt, Artificial Sequence
  Description of Artificial Sequence: Synthetic oligonucleotide
agcaaauacccaacccucu

SEQ ID NO: 110742 - RNA, 19 nt, Artificial Sequence
  Description of Artificial Sequence: Synthetic oligonucleotide
ggacuagccagcuagcugu

SEQ ID NO: 110743 - RNA, 19 nt, Artificial Sequence
  Description of Artificial Sequence: Synthetic oligonucleotide
gagcuuggaacuggaugcc

SEQ ID NO: 110744 - RNA, 19 nt, Artificial Sequence
  Description of Artificial Sequence: Synthetic oligonucleotide
acuuuggggacaauacuuu

SEQ ID NO: 110745 - RNA, 19 nt, Artificial Sequence
  Description of Artificial Sequence: Synthetic oligonucleotide
uccgccgacucggugcccg

SEQ ID NO: 110746 - RNA, 19 nt, Artificial Sequence
  Description of Artificial Sequence: Synthetic oligonucleotide
gagugugccccagaagaca

SEQ ID NO: 110747 - RNA, 19 nt, Artificial Sequence
  Description of Artificial Sequence: Synthetic oligonucleotide
caugauuggcccaccaagu

SEQ ID NO: 110748 - RNA, 19 nt, Artificial Sequence
  Description of Artificial Sequence: Synthetic oligonucleotide
auucccuaaugaaaaugaa

SEQ ID NO: 110749 - RNA, 19 nt, Artificial Sequence
  Description of Artificial Sequence: Synthetic oligonucleotide
cagcaacuuggaaugacaa

SEQ ID NO: 110750 - RNA, 19 nt, Artificial Sequence
  Description of Artificial Sequence: Synthetic oligonucleotide
gaaucuccgccagugcguc

SEQ ID NO: 110751 - RNA, 19 nt, Artificial Sequence
  Description of Artificial Sequence: Synthetic oligonucleotide
ggccccuagguacuuuggg

SEQ ID NO: 110752 - RNA, 19 nt, Artificial Sequence
  Description of Artificial Sequence: Synthetic oligonucleotide
agguacuuuggggacaaua

SEQ ID NO: 110753 - RNA, 19 nt, Artificial Sequence
  Description of Artificial Sequence: Synthetic oligonucleotide
ccgguuugcagccugaaga

SEQ ID NO: 110754 - RNA, 19 nt, Artificial Sequence
  Description of Artificial Sequence: Synthetic oligonucleotide
acgcuggccuaaguguaac

SEQ ID NO: 110755 - RNA, 19 nt, Artificial Sequence
  Description of Artificial Sequence: Synthetic oligonucleotide
agaagacgggugucuucca

SEQ ID NO: 110756 - RNA, 19 nt, Artificial Sequence
  Description of Artificial Sequence: Synthetic oligonucleotide
gacucggugcccgccgggg

SEQ ID NO: 110757 - RNA, 19 nt, Artificial Sequence
  Description of Artificial Sequence: Synthetic oligonucleotide
agccagcuagcugugauuu

SEQ ID NO: 110758 - RNA, 19 nt, Artificial Sequence
  Description of Artificial Sequence: Synthetic oligonucleotide
gacuuugggacagccaccu

SEQ ID NO: 110759 - RNA, 19 nt, Artificial Sequence
  Description of Artificial Sequence: Synthetic oligonucleotide
uccccacguugacucgucc

SEQ ID NO: 110760 - RNA, 19 nt, Artificial Sequence
  Description of Artificial Sequence: Synthetic oligonucleotide
gcaaugagcauuccauuua

SEQ ID NO: 110761 - RNA, 19 nt, Artificial Sequence
  Description of Artificial Sequence: Synthetic oligonucleotide
ugucacuugcuagccggaa

SEQ ID NO: 110762 - RNA, 19 nt, Artificial Sequence
  Description of Artificial Sequence: Synthetic oligonucleotide
uuggauugugagggucaug

SEQ ID NO: 110763 - RNA, 19 nt, Artificial Sequence
  Description of Artificial Sequence: Synthetic oligonucleotide
gaacgcuggccuaagugua

SEQ ID NO: 110764 - RNA, 19 nt, Artificial Sequence
  Description of Artificial Sequence: Synthetic oligonucleotide
aacgcuggccuaaguguaa

SEQ ID NO: 110765 - RNA, 19 nt, Artificial Sequence
  Description of Artificial Sequence: Synthetic oligonucleotide
aucuccgccagugcgucgu

SEQ ID NO: 110766 - RNA, 19 nt, Artificial Sequence
  Description of Artificial Sequence: Synthetic oligonucleotide
ggcaaucaaggucugacau

SEQ ID NO: 110767 - RNA, 19 nt, Artificial Sequence
  Description of Artificial Sequence: Synthetic oligonucleotide
ccaacaugcagaagcagaa

SEQ ID NO: 110768 - RNA, 19 nt, Artificial Sequence
  Description of Artificial Sequence: Synthetic oligonucleotide
uagugggaauaucgcugau

SEQ ID NO: 110769 - RNA, 19 nt, Artificial Sequence
  Description of Artificial Sequence: Synthetic oligonucleotide
ucgcugaauggcugcccac

SEQ ID NO: 110770 - RNA, 19 nt, Artificial Sequence
  Description of Artificial Sequence: Synthetic oligonucleotide
uccgccagugcgucgucau

SEQ ID NO: 110771 - RNA, 19 nt, Artificial Sequence
  Description of Artificial Sequence: Synthetic oligonucleotide
gcucuuaaggagucuuguc

SEQ ID NO: 110772 - RNA, 19 nt, Artificial Sequence
  Description of Artificial Sequence: Synthetic oligonucleotide
ccgaccagacagugaaagg

SEQ ID NO: 110773 - RNA, 19 nt, Artificial Sequence
  Description of Artificial Sequence: Synthetic oligonucleotide
aacccgaggcagggacaac

SEQ ID NO: 110774 - RNA, 19 nt, Artificial Sequence
  Description of Artificial Sequence: Synthetic oligonucleotide
cacacgcacacacacacau

SEQ ID NO: 110775 - RNA, 19 nt, Artificial Sequence
  Description of Artificial Sequence: Synthetic oligonucleotide
gcacacacacacaugaucu

SEQ ID NO: 110776 - RNA, 19 nt, Artificial Sequence
  Description of Artificial Sequence: Synthetic oligonucleotide
uuccccacguugacucguc

SEQ ID NO: 110777 - RNA, 19 nt, Artificial Sequence
  Description of Artificial Sequence: Synthetic oligonucleotide
cccgaccagacagugaaag

SEQ ID NO: 110778 - RNA, 19 nt, Artificial Sequence
  Description of Artificial Sequence: Synthetic oligonucleotide
gacuagccagcuagcugug

SEQ ID NO: 110779 - RNA, 19 nt, Artificial Sequence
  Description of Artificial Sequence: Synthetic oligonucleotide
cuucacguggcuccguacu

SEQ ID NO: 110780 - RNA, 19 nt, Artificial Sequence
  Description of Artificial Sequence: Synthetic oligonucleotide
guuugugaacagaaagaau

SEQ ID NO: 110781 - RNA, 19 nt, Artificial Sequence
  Description of Artificial Sequence: Synthetic oligonucleotide
gggagcaacuaagacuuuc

SEQ ID NO: 110782 - RNA, 19 nt, Artificial Sequence
  Description of Artificial Sequence: Synthetic oligonucleotide
acacacacgcacacacaca

SEQ ID NO: 110783 - RNA, 19 nt, Artificial Sequence
  Description of Artificial Sequence: Synthetic oligonucleotide
uggucguagugggaauauc

SEQ ID NO: 110784 - RNA, 19 nt, Artificial Sequence
  Description of Artificial Sequence: Synthetic oligonucleotide
ccgucagggcguaaagggc

SEQ ID NO: 110785 - RNA, 19 nt, Artificial Sequence
  Description of Artificial Sequence: Synthetic oligonucleotide
gcacccuccgccgacucgg

SEQ ID NO: 110786 - RNA, 19 nt, Artificial Sequence
  Description of Artificial Sequence: Synthetic oligonucleotide
cccggucugagagaagugc

SEQ ID NO: 110787 - RNA, 19 nt, Artificial Sequence
  Description of Artificial Sequence: Synthetic oligonucleotide
auaccgcaaccggaggggu

SEQ ID NO: 110788 - RNA, 19 nt, Artificial Sequence
  Description of Artificial Sequence: Synthetic oligonucleotide
cacacacacacaugaucua

SEQ ID NO: 110789 - RNA, 19 nt, Artificial Sequence
  Description of Artificial Sequence: Synthetic oligonucleotide
acacgcacacacacacaug

SEQ ID NO: 110790 - RNA, 19 nt, Artificial Sequence
  Description of Artificial Sequence: Synthetic oligonucleotide
cccuagguacuuuggggac

SEQ ID NO: 110791 - RNA, 19 nt, Artificial Sequence
  Description of Artificial Sequence: Synthetic oligonucleotide
ccuuggauugugaggguca

SEQ ID NO: 110792 - RNA, 19 nt, Artificial Sequence
  Description of Artificial Sequence: Synthetic oligonucleotide
gcuuuauuauaccuugcuu

SEQ ID NO: 110793 - RNA, 19 nt, Artificial Sequence
  Description of Artificial Sequence: Synthetic oligonucleotide
aggccccuagguacuuugg

SEQ ID NO: 110794 - RNA, 19 nt, Artificial Sequence
  Description of Artificial Sequence: Synthetic oligonucleotide
cgcacacacacacaugauc

SEQ ID NO: 110795 - RNA, 19 nt, Artificial Sequence
  Description of Artificial Sequence: Synthetic oligonucleotide
gggccugcgguacaugcuc

SEQ ID NO: 110796 - RNA, 19 nt, Artificial Sequence
  Description of Artificial Sequence: Synthetic oligonucleotide
uaccgcaaccggagggguu

SEQ ID NO: 110797 - RNA, 19 nt, Artificial Sequence
  Description of Artificial Sequence: Synthetic oligonucleotide
gacucaacaccaggcaaau

SEQ ID NO: 110798 - RNA, 19 nt, Artificial Sequence
  Description of Artificial Sequence: Synthetic oligonucleotide
aucgguggugucacuugcu

SEQ ID NO: 110799 - RNA, 19 nt, Artificial Sequence
  Description of Artificial Sequence: Synthetic oligonucleotide
gcuagccggaacaggguug

SEQ ID NO: 110800 - RNA, 19 nt, Artificial Sequence
  Description of Artificial Sequence: Synthetic oligonucleotide
cgauaacucuuccuuuaac

SEQ ID NO: 110801 - RNA, 19 nt, Artificial Sequence
  Description of Artificial Sequence: Synthetic oligonucleotide
gccgguuugcagccugaag

SEQ ID NO: 110802 - RNA, 19 nt, Artificial Sequence
  Description of Artificial Sequence: Synthetic oligonucleotide
ccccacguugacucguccc

SEQ ID NO: 110803 - RNA, 19 nt, Artificial Sequence
  Description of Artificial Sequence: Synthetic oligonucleotide
ggcacccuccgccgacucg

SEQ ID NO: 110804 - RNA, 19 nt, Artificial Sequence
  Description of Artificial Sequence: Synthetic oligonucleotide
acacacgcacacacacaca

SEQ ID NO: 110805 - RNA, 19 nt, Artificial Sequence
  Description of Artificial Sequence: Synthetic oligonucleotide
ccgggccugcgguacaugc

SEQ ID NO: 110806 - RNA, 19 nt, Artificial Sequence
  Description of Artificial Sequence: Synthetic oligonucleotide
gccgcgaccgcagucacuc

SEQ ID NO: 110807 - RNA, 19 nt, Artificial Sequence
  Description of Artificial Sequence: Synthetic oligonucleotide
gcagccugggagcaacuaa

SEQ ID NO: 110808 - RNA, 19 nt, Artificial Sequence
  Description of Artificial Sequence: Synthetic oligonucleotide
cuggccgggccugcgguac

SEQ ID NO: 110809 - RNA, 19 nt, Artificial Sequence
  Description of Artificial Sequence: Synthetic oligonucleotide
caacccgaggcagggacaa

SEQ ID NO: 110810 - RNA, 19 nt, Artificial Sequence
  Description of Artificial Sequence: Synthetic oligonucleotide
caaggaacacagggucaca

SEQ ID NO: 110811 - RNA, 19 nt, Artificial Sequence
  Description of Artificial Sequence: Synthetic oligonucleotide
ggacugaaugcagggagcu

SEQ ID NO: 110812 - RNA, 19 nt, Artificial Sequence
  Description of Artificial Sequence: Synthetic oligonucleotide
cuguagugaaggacaugau

SEQ ID NO: 110813 - RNA, 19 nt, Artificial Sequence
  Description of Artificial Sequence: Synthetic oligonucleotide
acgcacacacacacaugau

SEQ ID NO: 110814 - RNA, 19 nt, Artificial Sequence
  Description of Artificial Sequence: Synthetic oligonucleotide
gcgaccgcagucacuccag

SEQ ID NO: 110815 - RNA, 19 nt, Artificial Sequence
  Description of Artificial Sequence: Synthetic oligonucleotide
aucgguaguuuaggaucuu

SEQ ID NO: 110816 - RNA, 19 nt, Artificial Sequence
  Description of Artificial Sequence: Synthetic oligonucleotide
gguuacacuugaagcaaau

SEQ ID NO: 110817 - RNA, 19 nt, Artificial Sequence
  Description of Artificial Sequence: Synthetic oligonucleotide
ccuagguacuuuggggaca

SEQ ID NO: 110818 - RNA, 19 nt, Artificial Sequence
  Description of Artificial Sequence: Synthetic oligonucleotide
cccgccggggcuccagucc

SEQ ID NO: 110819 - RNA, 19 nt, Artificial Sequence
  Description of Artificial Sequence: Synthetic oligonucleotide
gguugaggaguuaggcagu

SEQ ID NO: 110820 - RNA, 19 nt, Artificial Sequence
  Description of Artificial Sequence: Synthetic oligonucleotide
caaugacguucuguacuua

SEQ ID NO: 110821 - RNA, 19 nt, Artificial Sequence
  Description of Artificial Sequence: Synthetic oligonucleotide
agccgguuugcagccugaa

SEQ ID NO: 110822 - RNA, 19 nt, Artificial Sequence
  Description of Artificial Sequence: Synthetic oligonucleotide
cagccgguuugcagccuga

SEQ ID NO: 110823 - RNA, 19 nt, Artificial Sequence
  Description of Artificial Sequence: Synthetic oligonucleotide
gugugccccagaagacaca

SEQ ID NO: 110824 - RNA, 19 nt, Artificial Sequence
  Description of Artificial Sequence: Synthetic oligonucleotide
ccgcagugguucaugcaca

SEQ ID NO: 110825 - RNA, 19 nt, Artificial Sequence
  Description of Artificial Sequence: Synthetic oligonucleotide
ccgccggggcuccaguccc

SEQ ID NO: 110826 - RNA, 19 nt, Artificial Sequence
  Description of Artificial Sequence: Synthetic oligonucleotide
agucucgguugaggaguua

SEQ ID NO: 110827 - RNA, 19 nt, Artificial Sequence
  Description of Artificial Sequence: Synthetic oligonucleotide
gugcgucgucaucaucggu

SEQ ID NO: 110828 - RNA, 19 nt, Artificial Sequence
  Description of Artificial Sequence: Synthetic oligonucleotide
gcauucccuauggacucaa

SEQ ID NO: 110829 - RNA, 19 nt, Artificial Sequence
  Description of Artificial Sequence: Synthetic oligonucleotide
gagucucgguugaggaguu

SEQ ID NO: 110830 - RNA, 19 nt, Artificial Sequence
  Description of Artificial Sequence: Synthetic oligonucleotide
ggggccccggucugagaga

SEQ ID NO: 110831 - RNA, 19 nt, Artificial Sequence
  Description of Artificial Sequence: Synthetic oligonucleotide
cgaccgcagucacuccagc

SEQ ID NO: 110832 - RNA, 19 nt, Artificial Sequence
  Description of Artificial Sequence: Synthetic oligonucleotide
agccgcgaccgcagucacu

SEQ ID NO: 110833 - RNA, 19 nt, Artificial Sequence
  Description of Artificial Sequence: Synthetic oligonucleotide
gggccccggucugagagaa

SEQ ID NO: 110834 - RNA, 19 nt, Artificial Sequence
  Description of Artificial Sequence: Synthetic oligonucleotide
ggccaguagccagggcgca

SEQ ID NO: 110835 - RNA, 19 nt, Artificial Sequence
  Description of Artificial Sequence: Synthetic oligonucleotide
cgcgaccgcagucacucca

SEQ ID NO: 110836 - RNA, 19 nt, Artificial Sequence
  Description of Artificial Sequence: Synthetic oligonucleotide
cuccgccgacucggugccc

SEQ ID NO: 110837 - RNA, 19 nt, Artificial Sequence
  Description of Artificial Sequence: Synthetic oligonucleotide
cgacucggugcccgccggg

SEQ ID NO: 110838 - RNA, 19 nt, Artificial Sequence
  Description of Artificial Sequence: Synthetic oligonucleotide
gggcacccuccgccgacuc

SEQ ID NO: 110839 - RNA, 19 nt, Artificial Sequence
  Description of Artificial Sequence: Synthetic oligonucleotide
ccgccagugcgucgucauc

SEQ ID NO: 110840 - RNA, 19 nt, Artificial Sequence
  Description of Artificial Sequence: Synthetic oligonucleotide
ccgcgaccgcagucacucc

SEQ ID NO: 110841 - RNA, 19 nt, Artificial Sequence
  Description of Artificial Sequence: Synthetic oligonucleotide
cacccuccgccgacucggu

SEQ ID NO: 110842 - RNA, 19 nt, Artificial Sequence
  Description of Artificial Sequence: Synthetic oligonucleotide
ccaccaaguguggucuccu

SEQ ID NO: 110843 - RNA, 19 nt, Artificial Sequence
  Description of Artificial Sequence: Synthetic oligonucleotide
ggaugacguuguggguccu

SEQ ID NO: 110844 - RNA, 19 nt, Artificial Sequence
  Description of Artificial Sequence: Synthetic oligonucleotide
cgcuggccuaaguguaacu

SEQ ID NO: 110845 - RNA, 19 nt, Artificial Sequence
  Description of Artificial Sequence: Synthetic oligonucleotide
ggggcacccuccgccgacu

SEQ ID NO: 110846 - RNA, 19 nt, Artificial Sequence
  Description of Artificial Sequence: Synthetic oligonucleotide
ccgcaaccggagggguucu

SEQ ID NO: 110847 - RNA, 19 nt, Artificial Sequence
  Description of Artificial Sequence: Synthetic oligonucleotide
cuaauuaugacucauaucc

SEQ ID NO: 110848 - RNA, 19 nt, Artificial Sequence
  Description of Artificial Sequence: Synthetic oligonucleotide
aaacauaacaguaacauac

SEQ ID NO: 110849 - RNA, 19 nt, Artificial Sequence
  Description of Artificial Sequence: Synthetic oligonucleotide
cuuaugauugcaaugaugg

SEQ ID NO: 110850 - RNA, 19 nt, Artificial Sequence
  Description of Artificial Sequence: Synthetic oligonucleotide
aaccuuagaaauuaacuac

SEQ ID NO: 110851 - RNA, 19 nt, Artificial Sequence
  Description of Artificial Sequence: Synthetic oligonucleotide
uuuuaaaugaguaggaggu

SEQ ID NO: 110852 - RNA, 19 nt, Artificial Sequence
  Description of Artificial Sequence: Synthetic oligonucleotide
auaauaaugauuuucugug

SEQ ID NO: 110853 - RNA, 19 nt, Artificial Sequence
  Description of Artificial Sequence: Synthetic oligonucleotide
agaacuagacuuuagacag

SEQ ID NO: 110854 - RNA, 19 nt, Artificial Sequence
  Description of Artificial Sequence: Synthetic oligonucleotide
uuagaaauuaacuacgggu

SEQ ID NO: 110855 - RNA, 19 nt, Artificial Sequence
  Description of Artificial Sequence: Synthetic oligonucleotide
aagauaauugcugucacuc

SEQ ID NO: 110856 - RNA, 19 nt, Artificial Sequence
  Description of Artificial Sequence: Synthetic oligonucleotide
ugaguuggaauguaguugg

SEQ ID NO: 110857 - RNA, 19 nt, Artificial Sequence
  Description of Artificial Sequence: Synthetic oligonucleotide
acagacaagacucaaagug

SEQ ID NO: 110858 - RNA, 19 nt, Artificial Sequence
  Description of Artificial Sequence: Synthetic oligonucleotide
aacauacuaacuaaggauc

SEQ ID NO: 110859 - RNA, 19 nt, Artificial Sequence
  Description of Artificial Sequence: Synthetic oligonucleotide
aagaacuagacuuuagaca

SEQ ID NO: 110860 - RNA, 19 nt, Artificial Sequence
  Description of Artificial Sequence: Synthetic oligonucleotide
uuuacuaaugccauccucu

SEQ ID NO: 110861 - RNA, 19 nt, Artificial Sequence
  Description of Artificial Sequence: Synthetic oligonucleotide
agcuauauuaacguagucc

SEQ ID NO: 110862 - RNA, 19 nt, Artificial Sequence
  Description of Artificial Sequence: Synthetic oligonucleotide
aauuaugacucauaucccu

SEQ ID NO: 110863 - RNA, 19 nt, Artificial Sequence
  Description of Artificial Sequence: Synthetic oligonucleotide
aggauuuccagaaaggacc

SEQ ID NO: 110864 - RNA, 19 nt, Artificial Sequence
  Description of Artificial Sequence: Synthetic oligonucleotide
uucacuaguaauuugguaa

SEQ ID NO: 110865 - RNA, 19 nt, Artificial Sequence
  Description of Artificial Sequence: Synthetic oligonucleotide
auccaaaucauuuagguaa

SEQ ID NO: 110866 - RNA, 19 nt, Artificial Sequence
  Description of Artificial Sequence: Synthetic oligonucleotide
aacggauccaaucugaaaa

SEQ ID NO: 110867 - RNA, 19 nt, Artificial Sequence
  Description of Artificial Sequence: Synthetic oligonucleotide
uuagguaauaggaagcaga

SEQ ID NO: 110868 - RNA, 19 nt, Artificial Sequence
  Description of Artificial Sequence: Synthetic oligonucleotide
aagauugugcuaaagagug

SEQ ID NO: 110869 - RNA, 19 nt, Artificial Sequence
  Description of Artificial Sequence: Synthetic oligonucleotide
acagauuaaaaucuguaca

SEQ ID NO: 110870 - RNA, 19 nt, Artificial Sequence
  Description of Artificial Sequence: Synthetic oligonucleotide
aagacuuaggaaccccuac

SEQ ID NO: 110871 - RNA, 19 nt, Artificial Sequence
  Description of Artificial Sequence: Synthetic oligonucleotide
agcauaaacaagguuaaac

SEQ ID NO: 110872 - RNA, 19 nt, Artificial Sequence
  Description of Artificial Sequence: Synthetic oligonucleotide
uauuacgucaguauucacu

SEQ ID NO: 110873 - RNA, 19 nt, Artificial Sequence
  Description of Artificial Sequence: Synthetic oligonucleotide
agauaauaguuauacuguc

SEQ ID NO: 110874 - RNA, 19 nt, Artificial Sequence
  Description of Artificial Sequence: Synthetic oligonucleotide
aauaguuauacugucugca

SEQ ID NO: 110875 - RNA, 19 nt, Artificial Sequence
  Description of Artificial Sequence: Synthetic oligonucleotide
gauaauugcugucacuccc

SEQ ID NO: 110876 - RNA, 19 nt, Artificial Sequence
  Description of Artificial Sequence: Synthetic oligonucleotide
augccaacuaaacauuccc

SEQ ID NO: 110877 - RNA, 19 nt, Artificial Sequence
  Description of Artificial Sequence: Synthetic oligonucleotide
uaacguagucccaauaacc

SEQ ID NO: 110878 - RNA, 19 nt, Artificial Sequence
  Description of Artificial Sequence: Synthetic oligonucleotide
agacgaauaacugucgggc

SEQ ID NO: 110879 - RNA, 19 nt, Artificial Sequence
  Description of Artificial Sequence: Synthetic oligonucleotide
ucagaagcuaauuaugacu

SEQ ID NO: 110880 - RNA, 19 nt, Artificial Sequence
  Description of Artificial Sequence: Synthetic oligonucleotide
uguagcugacccaagagac

SEQ ID NO: 110881 - RNA, 19 nt, Artificial Sequence
  Description of Artificial Sequence: Synthetic oligonucleotide
caugcuuucaugcauccgg

SEQ ID NO: 110882 - RNA, 19 nt, Artificial Sequence
  Description of Artificial Sequence: Synthetic oligonucleotide
uaguaauuugguaaucagc

SEQ ID NO: 110883 - RNA, 19 nt, Artificial Sequence
  Description of Artificial Sequence: Synthetic oligonucleotide
cuacaauuagcauugcuac

SEQ ID NO: 110884 - RNA, 19 nt, Artificial Sequence
  Description of Artificial Sequence: Synthetic oligonucleotide
aguuuaucauauuacguca

SEQ ID NO: 110885 - RNA, 19 nt, Artificial Sequence
  Description of Artificial Sequence: Synthetic oligonucleotide
gcuauauuaacguaguccc

SEQ ID NO: 110886 - RNA, 19 nt, Artificial Sequence
  Description of Artificial Sequence: Synthetic oligonucleotide
agaugaaacggauccaauc

SEQ ID NO: 110887 - RNA, 19 nt, Artificial Sequence
  Description of Artificial Sequence: Synthetic oligonucleotide
uugacagcuauccugggug

SEQ ID NO: 110888 - RNA, 19 nt, Artificial Sequence
  Description of Artificial Sequence: Synthetic oligonucleotide
uaugauugcaaugauggac

SEQ ID NO: 110889 - RNA, 19 nt, Artificial Sequence
  Description of Artificial Sequence: Synthetic oligonucleotide
augaguaggagguaacauc

SEQ ID NO: 110890 - RNA, 19 nt, Artificial Sequence
  Description of Artificial Sequence: Synthetic oligonucleotide
agaacauacuaacuaagga

SEQ ID NO: 110891 - RNA, 19 nt, Artificial Sequence
  Description of Artificial Sequence: Synthetic oligonucleotide
gagagcuaaacgcauacug

SEQ ID NO: 110892 - RNA, 19 nt, Artificial Sequence
  Description of Artificial Sequence: Synthetic oligonucleotide
guaacuuuuacuaaugcca

SEQ ID NO: 110893 - RNA, 19 nt, Artificial Sequence
  Description of Artificial Sequence: Synthetic oligonucleotide
ucuuguccgaagaacaucu

SEQ ID NO: 110894 - RNA, 19 nt, Artificial Sequence
  Description of Artificial Sequence: Synthetic oligonucleotide
uuugccaucccucagugau

SEQ ID NO: 110895 - RNA, 19 nt, Artificial Sequence
  Description of Artificial Sequence: Synthetic oligonucleotide
cuuagaaauuaacuacggg

SEQ ID NO: 110896 - RNA, 19 nt, Artificial Sequence
  Description of Artificial Sequence: Synthetic oligonucleotide
uuagcauugcuacaguaaa

SEQ ID NO: 110897 - RNA, 19 nt, Artificial Sequence
  Description of Artificial Sequence: Synthetic oligonucleotide
uaauuugguaaucagcaua

SEQ ID NO: 110898 - RNA, 19 nt, Artificial Sequence
  Description of Artificial Sequence: Synthetic oligonucleotide
ucaguauucacuaguaauu

SEQ ID NO: 110899 - RNA, 19 nt, Artificial Sequence
  Description of Artificial Sequence: Synthetic oligonucleotide
cuugagaugucucccaacc

SEQ ID NO: 110900 - RNA, 19 nt, Artificial Sequence
  Description of Artificial Sequence: Synthetic oligonucleotide
ugaaguauagcuccuugaa

SEQ ID NO: 110901 - RNA, 19 nt, Artificial Sequence
  Description of Artificial Sequence: Synthetic oligonucleotide
ucaguccuagauuugauaa

SEQ ID NO: 110902 - RNA, 19 nt, Artificial Sequence
  Description of Artificial Sequence: Synthetic oligonucleotide
uuaacguagucccaauaac

SEQ ID NO: 110903 - RNA, 19 nt, Artificial Sequence
  Description of Artificial Sequence: Synthetic oligonucleotide
cuucguacguauuggaacc

SEQ ID NO: 110904 - RNA, 19 nt, Artificial Sequence
  Description of Artificial Sequence: Synthetic oligonucleotide
ggauauucuauccaaauca

SEQ ID NO: 110905 - RNA, 19 nt, Artificial Sequence
  Description of Artificial Sequence: Synthetic oligonucleotide
ucuucguacguauuggaac

SEQ ID NO: 110906 - RNA, 19 nt, Artificial Sequence
  Description of Artificial Sequence: Synthetic oligonucleotide
agaaagaggaugauugacg

SEQ ID NO: 110907 - RNA, 19 nt, Artificial Sequence
  Description of Artificial Sequence: Synthetic oligonucleotide
ugguucucaauuuagcagu

SEQ ID NO: 110908 - RNA, 19 nt, Artificial Sequence
  Description of Artificial Sequence: Synthetic oligonucleotide
aaaucaaucuuuagccguc

SEQ ID NO: 110909 - RNA, 19 nt, Artificial Sequence
  Description of Artificial Sequence: Synthetic oligonucleotide
auuaacguagucccaauaa

SEQ ID NO: 110910 - RNA, 19 nt, Artificial Sequence
  Description of Artificial Sequence: Synthetic oligonucleotide
cuaguaauuugguaaucag

SEQ ID NO: 110911 - RNA, 19 nt, Artificial Sequence
  Description of Artificial Sequence: Synthetic oligonucleotide
uaacugucgggcaucaucu

SEQ ID NO: 110912 - RNA, 19 nt, Artificial Sequence
  Description of Artificial Sequence: Synthetic oligonucleotide
ugaaacggauccaaucuga

SEQ ID NO: 110913 - RNA, 19 nt, Artificial Sequence
  Description of Artificial Sequence: Synthetic oligonucleotide
aaauauugcgucugaccgu

SEQ ID NO: 110914 - RNA, 19 nt, Artificial Sequence
  Description of Artificial Sequence: Synthetic oligonucleotide
ucacuaaucccaaaguaua

SEQ ID NO: 110915 - RNA, 19 nt, Artificial Sequence
  Description of Artificial Sequence: Synthetic oligonucleotide
agacaacuacuuuauacug

SEQ ID NO: 110916 - RNA, 19 nt, Artificial Sequence
  Description of Artificial Sequence: Synthetic oligonucleotide
ugacucauaucccuuguac

SEQ ID NO: 110917 - RNA, 19 nt, Artificial Sequence
  Description of Artificial Sequence: Synthetic oligonucleotide
auuacgucaguauucacua

SEQ ID NO: 110918 - RNA, 19 nt, Artificial Sequence
  Description of Artificial Sequence: Synthetic oligonucleotide
aauuugguaaucagcauaa

SEQ ID NO: 110919 - RNA, 19 nt, Artificial Sequence
  Description of Artificial Sequence: Synthetic oligonucleotide
uguugaguuggaauguagu

SEQ ID NO: 110920 - RNA, 19 nt, Artificial Sequence
  Description of Artificial Sequence: Synthetic oligonucleotide
auuucacuaaucccaaagu

SEQ ID NO: 110921 - RNA, 19 nt, Artificial Sequence
  Description of Artificial Sequence: Synthetic oligonucleotide
uuuccgaugguauuuuccu

SEQ ID NO: 110922 - RNA, 19 nt, Artificial Sequence
  Description of Artificial Sequence: Synthetic oligonucleotide
uaauaguuauacugucugc

SEQ ID NO: 110923 - RNA, 19 nt, Artificial Sequence
  Description of Artificial Sequence: Synthetic oligonucleotide
uauauuaacguagucccaa

SEQ ID NO: 110924 - RNA, 19 nt, Artificial Sequence
  Description of Artificial Sequence: Synthetic oligonucleotide
agaaauuaacuacggguga

SEQ ID NO: 110925 - RNA, 19 nt, Artificial Sequence
  Description of Artificial Sequence: Synthetic oligonucleotide
accuuagaaauuaacuacg

SEQ ID NO: 110926 - RNA, 19 nt, Artificial Sequence
  Description of Artificial Sequence: Synthetic oligonucleotide
uaacuaaggaucacuacua

SEQ ID NO: 110927 - RNA, 19 nt, Artificial Sequence
  Description of Artificial Sequence: Synthetic oligonucleotide
uauucacuaguaauuuggu

SEQ ID NO: 110928 - RNA, 19 nt, Artificial Sequence
  Description of Artificial Sequence: Synthetic oligonucleotide
agugaugccuugaugaguc

SEQ ID NO: 110929 - RNA, 19 nt, Artificial Sequence
  Description of Artificial Sequence: Synthetic oligonucleotide
ugugcuaaagagugcuaag

SEQ ID NO: 110930 - RNA, 19 nt, Artificial Sequence
  Description of Artificial Sequence: Synthetic oligonucleotide
aacuaaacauucccuaaua

SEQ ID NO: 110931 - RNA, 19 nt, Artificial Sequence
  Description of Artificial Sequence: Synthetic oligonucleotide
uacgucaguauucacuagu

SEQ ID NO: 110932 - RNA, 19 nt, Artificial Sequence
  Description of Artificial Sequence: Synthetic oligonucleotide
aguauucacuaguaauuug

SEQ ID NO: 110933 - RNA, 19 nt, Artificial Sequence
  Description of Artificial Sequence: Synthetic oligonucleotide
gaugaaacggauccaaucu

SEQ ID NO: 110934 - RNA, 19 nt, Artificial Sequence
  Description of Artificial Sequence: Synthetic oligonucleotide
ucuaauugacagcuauccu

SEQ ID NO: 110935 - RNA, 19 nt, Artificial Sequence
  Description of Artificial Sequence: Synthetic oligonucleotide
cuuuccgaugguauuuucc

SEQ ID NO: 110936 - RNA, 19 nt, Artificial Sequence
  Description of Artificial Sequence: Synthetic oligonucleotide
augcuugucagauaauagu

SEQ ID NO: 110937 - RNA, 19 nt, Artificial Sequence
  Description of Artificial Sequence: Synthetic oligonucleotide
aaggaucacuacuacaauu

SEQ ID NO: 110938 - RNA, 19 nt, Artificial Sequence
  Description of Artificial Sequence: Synthetic oligonucleotide
aacaucucaugccaacuaa

SEQ ID NO: 110939 - RNA, 19 nt, Artificial Sequence
  Description of Artificial Sequence: Synthetic oligonucleotide
aacguagucccaauaacca

SEQ ID NO: 110940 - RNA, 19 nt, Artificial Sequence
  Description of Artificial Sequence: Synthetic oligonucleotide
ucugggauauucuauccaa

SEQ ID NO: 110941 - RNA, 19 nt, Artificial Sequence
  Description of Artificial Sequence: Synthetic oligonucleotide
agcuaagacgaauaacugu

SEQ ID NO: 110942 - RNA, 19 nt, Artificial Sequence
  Description of Artificial Sequence: Synthetic oligonucleotide
ugcuaaagagugcuaagau

SEQ ID NO: 110943 - RNA, 19 nt, Artificial Sequence
  Description of Artificial Sequence: Synthetic oligonucleotide
uuguugaguuggaauguag

SEQ ID NO: 110944 - RNA, 19 nt, Artificial Sequence
  Description of Artificial Sequence: Synthetic oligonucleotide
ugauugacgugucuguaaa

SEQ ID NO: 110945 - RNA, 19 nt, Artificial Sequence
  Description of Artificial Sequence: Synthetic oligonucleotide
aucauauuacgucaguauu

SEQ ID NO: 110946 - RNA, 19 nt, Artificial Sequence
  Description of Artificial Sequence: Synthetic oligonucleotide
caacgugcagcccaugacg

SEQ ID NO: 110947 - RNA, 19 nt, Artificial Sequence
  Description of Artificial Sequence: Synthetic oligonucleotide
uacguauuggaaccugugu

SEQ ID NO: 110948 - RNA, 19 nt, Artificial Sequence
  Description of Artificial Sequence: Synthetic oligonucleotide
uggaauguaguuggucugg

SEQ ID NO: 110949 - RNA, 19 nt, Artificial Sequence
  Description of Artificial Sequence: Synthetic oligonucleotide
acuaguaauuugguaauca

SEQ ID NO: 110950 - RNA, 19 nt, Artificial Sequence
  Description of Artificial Sequence: Synthetic oligonucleotide
uacuaacuaaggaucacua

SEQ ID NO: 110951 - RNA, 19 nt, Artificial Sequence
  Description of Artificial Sequence: Synthetic oligonucleotide
agagccguuuaaucacgcc

SEQ ID NO: 110952 - RNA, 19 nt, Artificial Sequence
  Description of Artificial Sequence: Synthetic oligonucleotide
auuaacuacgggugauuug

SEQ ID NO: 110953 - RNA, 19 nt, Artificial Sequence
  Description of Artificial Sequence: Synthetic oligonucleotide
uacaauuagcauugcuaca

SEQ ID NO: 110954 - RNA, 19 nt, Artificial Sequence
  Description of Artificial Sequence: Synthetic oligonucleotide
cucaugaaugauuuucauc

SEQ ID NO: 110955 - RNA, 19 nt, Artificial Sequence
  Description of Artificial Sequence: Synthetic oligonucleotide
caugccaacuaaacauucc

SEQ ID NO: 110956 - RNA, 19 nt, Artificial Sequence
  Description of Artificial Sequence: Synthetic oligonucleotide
augaaacggauccaaucug

SEQ ID NO: 110957 - RNA, 19 nt, Artificial Sequence
  Description of Artificial Sequence: Synthetic oligonucleotide
uccgaugucugauuugaac

SEQ ID NO: 110958 - RNA, 19 nt, Artificial Sequence
  Description of Artificial Sequence: Synthetic oligonucleotide
ucacuaguaauuugguaau

SEQ ID NO: 110959 - RNA, 19 nt, Artificial Sequence
  Description of Artificial Sequence: Synthetic oligonucleotide
uagcugacccaagagacag

SEQ ID NO: 110960 - RNA, 19 nt, Artificial Sequence
  Description of Artificial Sequence: Synthetic oligonucleotide
aauauugcgucugaccgua

SEQ ID NO: 110961 - RNA, 19 nt, Artificial Sequence
  Description of Artificial Sequence: Synthetic oligonucleotide
ucuuuagccgucccauggc

SEQ ID NO: 110962 - RNA, 19 nt, Artificial Sequence
  Description of Artificial Sequence: Synthetic oligonucleotide
uauugcgucugaccguacc

SEQ ID NO: 110963 - RNA, 19 nt, Artificial Sequence
  Description of Artificial Sequence: Synthetic oligonucleotide
uuaugauugcaaugaugga

SEQ ID NO: 110964 - RNA, 19 nt, Artificial Sequence
  Description of Artificial Sequence: Synthetic oligonucleotide
aguguuaaugacauuugcu

SEQ ID NO: 110965 - RNA, 19 nt, Artificial Sequence
  Description of Artificial Sequence: Synthetic oligonucleotide
agauuugauaauauuacua

SEQ ID NO: 110966 - RNA, 19 nt, Artificial Sequence
  Description of Artificial Sequence: Synthetic oligonucleotide
acuacaauuagcauugcua

SEQ ID NO: 110967 - RNA, 19 nt, Artificial Sequence
  Description of Artificial Sequence: Synthetic oligonucleotide
uacuacaauuagcauugcu

SEQ ID NO: 110968 - RNA, 19 nt, Artificial Sequence
  Description of Artificial Sequence: Synthetic oligonucleotide
augauugcaaugauggacu

SEQ ID NO: 110969 - RNA, 19 nt, Artificial Sequence
  Description of Artificial Sequence: Synthetic oligonucleotide
ucguucugaucuuuggcca

SEQ ID NO: 110970 - RNA, 19 nt, Artificial Sequence
  Description of Artificial Sequence: Synthetic oligonucleotide
uucaugcuuucaugcaucc

SEQ ID NO: 110971 - RNA, 19 nt, Artificial Sequence
  Description of Artificial Sequence: Synthetic oligonucleotide
ucaugccaacuaaacauuc

SEQ ID NO: 110972 - RNA, 19 nt, Artificial Sequence
  Description of Artificial Sequence: Synthetic oligonucleotide
auaguuauacugucugcau

SEQ ID NO: 110973 - RNA, 19 nt, Artificial Sequence
  Description of Artificial Sequence: Synthetic oligonucleotide
accggguccggacucacac

SEQ ID NO: 110974 - RNA, 19 nt, Artificial Sequence
  Description of Artificial Sequence: Synthetic oligonucleotide
cuaacuaaggaucacuacu

SEQ ID NO: 110975 - RNA, 19 nt, Artificial Sequence
  Description of Artificial Sequence: Synthetic oligonucleotide
aguuggaauguaguugguc

SEQ ID NO: 110976 - RNA, 19 nt, Artificial Sequence
  Description of Artificial Sequence: Synthetic oligonucleotide
uaguuauacugucugcaua

SEQ ID NO: 110977 - RNA, 19 nt, Artificial Sequence
  Description of Artificial Sequence: Synthetic oligonucleotide
uuaucauauuacgucagua

SEQ ID NO: 110978 - RNA, 19 nt, Artificial Sequence
  Description of Artificial Sequence: Synthetic oligonucleotide
ucaacgugcagcccaugac

SEQ ID NO: 110979 - RNA, 19 nt, Artificial Sequence
  Description of Artificial Sequence: Synthetic oligonucleotide
uauuaacguagucccaaua

SEQ ID NO: 110980 - RNA, 19 nt, Artificial Sequence
  Description of Artificial Sequence: Synthetic oligonucleotide
cggucaaucaucuugcucc

SEQ ID NO: 110981 - RNA, 19 nt, Artificial Sequence
  Description of Artificial Sequence: Synthetic oligonucleotide
aucguggcacauuaaacau

SEQ ID NO: 110982 - RNA, 19 nt, Artificial Sequence
  Description of Artificial Sequence: Synthetic oligonucleotide
acguagucccaauaaccag

SEQ ID NO: 110983 - RNA, 19 nt, Artificial Sequence
  Description of Artificial Sequence: Synthetic oligonucleotide
aaguccauugcugacugaa

SEQ ID NO: 110984 - RNA, 19 nt, Artificial Sequence
  Description of Artificial Sequence: Synthetic oligonucleotide
auaugcccuaaacauuuga

SEQ ID NO: 110985 - RNA, 19 nt, Artificial Sequence
  Description of Artificial Sequence: Synthetic oligonucleotide
uaaggaucacuacuacaau

SEQ ID NO: 110986 - RNA, 19 nt, Artificial Sequence
  Description of Artificial Sequence: Synthetic oligonucleotide
ccuuagaaauuaacuacgg

SEQ ID NO: 110987 - RNA, 19 nt, Artificial Sequence
  Description of Artificial Sequence: Synthetic oligonucleotide
acguauuggaaccugugua

SEQ ID NO: 110988 - RNA, 19 nt, Artificial Sequence
  Description of Artificial Sequence: Synthetic oligonucleotide
acuuuauacuguuuacauu

SEQ ID NO: 110989 - RNA, 19 nt, Artificial Sequence
  Description of Artificial Sequence: Synthetic oligonucleotide
uuagccgucccauggcucu

SEQ ID NO: 110990 - RNA, 19 nt, Artificial Sequence
  Description of Artificial Sequence: Synthetic oligonucleotide
auacuaacuaaggaucacu

SEQ ID NO: 110991 - RNA, 19 nt, Artificial Sequence
  Description of Artificial Sequence: Synthetic oligonucleotide
aaccccuacacugugggaa

SEQ ID NO: 110992 - RNA, 19 nt, Artificial Sequence
  Description of Artificial Sequence: Synthetic oligonucleotide
cauauuacgucaguauuca

SEQ ID NO: 110993 - RNA, 19 nt, Artificial Sequence
  Description of Artificial Sequence: Synthetic oligonucleotide
aaaggaccaguuacaagca

SEQ ID NO: 110994 - RNA, 19 nt, Artificial Sequence
  Description of Artificial Sequence: Synthetic oligonucleotide
agcccuaaagaaaugcuug

SEQ ID NO: 110995 - RNA, 19 nt, Artificial Sequence
  Description of Artificial Sequence: Synthetic oligonucleotide
aaacaugccugcaccccac

SEQ ID NO: 110996 - RNA, 19 nt, Artificial Sequence
  Description of Artificial Sequence: Synthetic oligonucleotide
acuacgggugauuuguuua

SEQ ID NO: 110997 - RNA, 19 nt, Artificial Sequence
  Description of Artificial Sequence: Synthetic oligonucleotide
caucaugugcauaguuaag

SEQ ID NO: 110998 - RNA, 19 nt, Artificial Sequence
  Description of Artificial Sequence: Synthetic oligonucleotide
uccacucaguguuaaugac

SEQ ID NO: 110999 - RNA, 19 nt, Artificial Sequence
  Description of Artificial Sequence: Synthetic oligonucleotide
ugcauucucuguuugccau

SEQ ID NO: 111000 - RNA, 19 nt, Artificial Sequence
  Description of Artificial Sequence: Synthetic oligonucleotide
auugcgucugaccguacca

SEQ ID NO: 111001 - RNA, 19 nt, Artificial Sequence
  Description of Artificial Sequence: Synthetic oligonucleotide
aggaagaauuuuaauuaug

SEQ ID NO: 111002 - RNA, 19 nt, Artificial Sequence
  Description of Artificial Sequence: Synthetic oligonucleotide
cagcuaagacgaauaacug

SEQ ID NO: 111003 - RNA, 19 nt, Artificial Sequence
  Description of Artificial Sequence: Synthetic oligonucleotide
ucaacacucauugcaguaa

SEQ ID NO: 111004 - RNA, 19 nt, Artificial Sequence
  Description of Artificial Sequence: Synthetic oligonucleotide
uaagacuuaggaaccccua

SEQ ID NO: 111005 - RNA, 19 nt, Artificial Sequence
  Description of Artificial Sequence: Synthetic oligonucleotide
cucaauuuagcaguuugca

SEQ ID NO: 111006 - RNA, 19 nt, Artificial Sequence
  Description of Artificial Sequence: Synthetic oligonucleotide
gugcuaagauucugcaugc

SEQ ID NO: 111007 - RNA, 19 nt, Artificial Sequence
  Description of Artificial Sequence: Synthetic oligonucleotide
gaagauugugcuaaagagu

SEQ ID NO: 111008 - RNA, 19 nt, Artificial Sequence
  Description of Artificial Sequence: Synthetic oligonucleotide
acauacuaacuaaggauca

SEQ ID NO: 111009 - RNA, 19 nt, Artificial Sequence
  Description of Artificial Sequence: Synthetic oligonucleotide
gcuaagacgaauaacuguc

SEQ ID NO: 111010 - RNA, 19 nt, Artificial Sequence
  Description of Artificial Sequence: Synthetic oligonucleotide
accucgacuucaauaugcc

SEQ ID NO: 111011 - RNA, 19 nt, Artificial Sequence
  Description of Artificial Sequence: Synthetic oligonucleotide
uugugcuaaagagugcuaa

SEQ ID NO: 111012 - RNA, 19 nt, Artificial Sequence
  Description of Artificial Sequence: Synthetic oligonucleotide
agagcuaaacgcauacugu

SEQ ID NO: 111013 - RNA, 19 nt, Artificial Sequence
  Description of Artificial Sequence: Synthetic oligonucleotide
uugcuguagacaacuacuu

SEQ ID NO: 111014 - RNA, 19 nt, Artificial Sequence
  Description of Artificial Sequence: Synthetic oligonucleotide
aacuacgggugauuuguuu

SEQ ID NO: 111015 - RNA, 19 nt, Artificial Sequence
  Description of Artificial Sequence: Synthetic oligonucleotide
acgaauaacugucgggcau

SEQ ID NO: 111016 - RNA, 19 nt, Artificial Sequence
  Description of Artificial Sequence: Synthetic oligonucleotide
agacuggacauaaagcccu

SEQ ID NO: 111017 - RNA, 19 nt, Artificial Sequence
  Description of Artificial Sequence: Synthetic oligonucleotide
cacucuuguccgaagaaca

SEQ ID NO: 111018 - RNA, 19 nt, Artificial Sequence
  Description of Artificial Sequence: Synthetic oligonucleotide
cucgacuucaauaugcccu

SEQ ID NO: 111019 - RNA, 19 nt, Artificial Sequence
  Description of Artificial Sequence: Synthetic oligonucleotide
cacuguuaauacacuugag

SEQ ID NO: 111020 - RNA, 19 nt, Artificial Sequence
  Description of Artificial Sequence: Synthetic oligonucleotide
gauugacgugucuguaaac

SEQ ID NO: 111021 - RNA, 19 nt, Artificial Sequence
  Description of Artificial Sequence: Synthetic oligonucleotide
gacgaauaacugucgggca

SEQ ID NO: 111022 - RNA, 19 nt, Artificial Sequence
  Description of Artificial Sequence: Synthetic oligonucleotide
gucaguauucacuaguaau

SEQ ID NO: 111023 - RNA, 19 nt, Artificial Sequence
  Description of Artificial Sequence: Synthetic oligonucleotide
uuccaauuccgaugucuga

SEQ ID NO: 111024 - RNA, 19 nt, Artificial Sequence
  Description of Artificial Sequence: Synthetic oligonucleotide
ggaucacuacuacaauuag

SEQ ID NO: 111025 - RNA, 19 nt, Artificial Sequence
  Description of Artificial Sequence: Synthetic oligonucleotide
ugcgucugaccguaccaag

SEQ ID NO: 111026 - RNA, 19 nt, Artificial Sequence
  Description of Artificial Sequence: Synthetic oligonucleotide
auauuaacguagucccaau

SEQ ID NO: 111027 - RNA, 19 nt, Artificial Sequence
  Description of Artificial Sequence: Synthetic oligonucleotide
cauacuaacuaaggaucac

SEQ ID NO: 111028 - RNA, 19 nt, Artificial Sequence
  Description of Artificial Sequence: Synthetic oligonucleotide
uuuagccgucccauggcuc

SEQ ID NO: 111029 - RNA, 19 nt, Artificial Sequence
  Description of Artificial Sequence: Synthetic oligonucleotide
aguuccuacuaagaggaau

SEQ ID NO: 111030 - RNA, 19 nt, Artificial Sequence
  Description of Artificial Sequence: Synthetic oligonucleotide
aggaucacuacuacaauua

SEQ ID NO: 111031 - RNA, 19 nt, Artificial Sequence
  Description of Artificial Sequence: Synthetic oligonucleotide
agcccucaguccuagauuu

SEQ ID NO: 111032 - RNA, 19 nt, Artificial Sequence
  Description of Artificial Sequence: Synthetic oligonucleotide
ugccgaaacaugccugcac

SEQ ID NO: 111033 - RNA, 19 nt, Artificial Sequence
  Description of Artificial Sequence: Synthetic oligonucleotide
auucccuaugacugagaca

SEQ ID NO: 111034 - RNA, 19 nt, Artificial Sequence
  Description of Artificial Sequence: Synthetic oligonucleotide
cuauauuaacguaguccca

SEQ ID NO: 111035 - RNA, 19 nt, Artificial Sequence
  Description of Artificial Sequence: Synthetic oligonucleotide
cuaaacgcauacuguagaa

SEQ ID NO: 111036 - RNA, 19 nt, Artificial Sequence
  Description of Artificial Sequence: Synthetic oligonucleotide
gcucuuaugauugcaauga

SEQ ID NO: 111037 - RNA, 19 nt, Artificial Sequence
  Description of Artificial Sequence: Synthetic oligonucleotide
ggcucuuaugauugcaaug

SEQ ID NO: 111038 - RNA, 19 nt, Artificial Sequence
  Description of Artificial Sequence: Synthetic oligonucleotide
ucggccagaacaaggucau

SEQ ID NO: 111039 - RNA, 19 nt, Artificial Sequence
  Description of Artificial Sequence: Synthetic oligonucleotide
gggauauucuauccaaauc

SEQ ID NO: 111040 - RNA, 19 nt, Artificial Sequence
  Description of Artificial Sequence: Synthetic oligonucleotide
gaauguaguuggucuggga

SEQ ID NO: 111041 - RNA, 19 nt, Artificial Sequence
  Description of Artificial Sequence: Synthetic oligonucleotide
gcuaauuaugacucauauc

SEQ ID NO: 111042 - RNA, 19 nt, Artificial Sequence
  Description of Artificial Sequence: Synthetic oligonucleotide
ugacagcuauccugggugu

SEQ ID NO: 111043 - RNA, 19 nt, Artificial Sequence
  Description of Artificial Sequence: Synthetic oligonucleotide
cuagacuuuagacaggauu

SEQ ID NO: 111044 - RNA, 19 nt, Artificial Sequence
  Description of Artificial Sequence: Synthetic oligonucleotide
guacauagacuggacauaa

SEQ ID NO: 111045 - RNA, 19 nt, Artificial Sequence
  Description of Artificial Sequence: Synthetic oligonucleotide
ggacugaauaguauugcug

SEQ ID NO: 111046 - RNA, 19 nt, Artificial Sequence
  Description of Artificial Sequence: Synthetic oligonucleotide
ucguggcacauuaaacaua

SEQ ID NO: 111047 - RNA, 19 nt, Artificial Sequence
  Description of Artificial Sequence: Synthetic oligonucleotide
gagccguuuaaucacgccu

SEQ ID NO: 111048 - RNA, 19 nt, Artificial Sequence
  Description of Artificial Sequence: Synthetic oligonucleotide
agccguuuaaucacgccug

SEQ ID NO: 111049 - RNA, 19 nt, Artificial Sequence
  Description of Artificial Sequence: Synthetic oligonucleotide
aagaugaaacggauccaau

SEQ ID NO: 111050 - RNA, 19 nt, Artificial Sequence
  Description of Artificial Sequence: Synthetic oligonucleotide
ugaccguaccaagagcuaa

SEQ ID NO: 111051 - RNA, 19 nt, Artificial Sequence
  Description of Artificial Sequence: Synthetic oligonucleotide
ggucugggauauucuaucc

SEQ ID NO: 111052 - RNA, 19 nt, Artificial Sequence
  Description of Artificial Sequence: Synthetic oligonucleotide
gcuaaacgcauacuguaga

SEQ ID NO: 111053 - RNA, 19 nt, Artificial Sequence
  Description of Artificial Sequence: Synthetic oligonucleotide
acgggugauuuguuuaaaa

SEQ ID NO: 111054 - RNA, 19 nt, Artificial Sequence
  Description of Artificial Sequence: Synthetic oligonucleotide
gagcugauacucccuggac

SEQ ID NO: 111055 - RNA, 19 nt, Artificial Sequence
  Description of Artificial Sequence: Synthetic oligonucleotide
ugguauuuuccuagcccua

SEQ ID NO: 111056 - RNA, 19 nt, Artificial Sequence
  Description of Artificial Sequence: Synthetic oligonucleotide
gccgaaacaugccugcacc

SEQ ID NO: 111057 - RNA, 19 nt, Artificial Sequence
  Description of Artificial Sequence: Synthetic oligonucleotide
gacaacuacuuuauacugu

SEQ ID NO: 111058 - RNA, 19 nt, Artificial Sequence
  Description of Artificial Sequence: Synthetic oligonucleotide
ggguaacagauuguuaaug

SEQ ID NO: 111059 - RNA, 19 nt, Artificial Sequence
  Description of Artificial Sequence: Synthetic oligonucleotide
ucgccagagccguuuaauc

SEQ ID NO: 111060 - RNA, 19 nt, Artificial Sequence
  Description of Artificial Sequence: Synthetic oligonucleotide
caugacggcggcgggagag

SEQ ID NO: 111061 - RNA, 19 nt, Artificial Sequence
  Description of Artificial Sequence: Synthetic oligonucleotide
auccucggccagaacaagg

SEQ ID NO: 111062 - RNA, 19 nt, Artificial Sequence
  Description of Artificial Sequence: Synthetic oligonucleotide
guugaguuggaauguaguu

SEQ ID NO: 111063 - RNA, 19 nt, Artificial Sequence
  Description of Artificial Sequence: Synthetic oligonucleotide
ggaauguaguuggucuggg

SEQ ID NO: 111064 - RNA, 19 nt, Artificial Sequence
  Description of Artificial Sequence: Synthetic oligonucleotide
uucguacguauuggaaccu

SEQ ID NO: 111065 - RNA, 19 nt, Artificial Sequence
  Description of Artificial Sequence: Synthetic oligonucleotide
auacucccuggaccugccg

SEQ ID NO: 111066 - RNA, 19 nt, Artificial Sequence
  Description of Artificial Sequence: Synthetic oligonucleotide
gauacucccuggaccugcc

SEQ ID NO: 111067 - RNA, 19 nt, Artificial Sequence
  Description of Artificial Sequence: Synthetic oligonucleotide
ccaucguggcacauuaaac

SEQ ID NO: 111068 - RNA, 19 nt, Artificial Sequence
  Description of Artificial Sequence: Synthetic oligonucleotide
cucuucguacguauuggaa

SEQ ID NO: 111069 - RNA, 19 nt, Artificial Sequence
  Description of Artificial Sequence: Synthetic oligonucleotide
uaaguccauugcugacuga

SEQ ID NO: 111070 - RNA, 19 nt, Artificial Sequence
  Description of Artificial Sequence: Synthetic oligonucleotide
augacucauaucccuugua

SEQ ID NO: 111071 - RNA, 19 nt, Artificial Sequence
  Description of Artificial Sequence: Synthetic oligonucleotide
cuacgggugauuuguuuaa

SEQ ID NO: 111072 - RNA, 19 nt, Artificial Sequence
  Description of Artificial Sequence: Synthetic oligonucleotide
cucaacgugcagcccauga

SEQ ID NO: 111073 - RNA, 19 nt, Artificial Sequence
  Description of Artificial Sequence: Synthetic oligonucleotide
guaauuugguaaucagcau

SEQ ID NO: 111074 - RNA, 19 nt, Artificial Sequence
  Description of Artificial Sequence: Synthetic oligonucleotide
cacuaguaauuugguaauc

SEQ ID NO: 111075 - RNA, 19 nt, Artificial Sequence
  Description of Artificial Sequence: Synthetic oligonucleotide
gcugauacucccuggaccu

SEQ ID NO: 111076 - RNA, 19 nt, Artificial Sequence
  Description of Artificial Sequence: Synthetic oligonucleotide
uaacuacgggugauuuguu

SEQ ID NO: 111077 - RNA, 19 nt, Artificial Sequence
  Description of Artificial Sequence: Synthetic oligonucleotide
uugcgucugaccguaccaa

SEQ ID NO: 111078 - RNA, 19 nt, Artificial Sequence
  Description of Artificial Sequence: Synthetic oligonucleotide
agagcaaaccuggacucuu

SEQ ID NO: 111079 - RNA, 19 nt, Artificial Sequence
  Description of Artificial Sequence: Synthetic oligonucleotide
ccuaugacugagacaaaca

SEQ ID NO: 111080 - RNA, 19 nt, Artificial Sequence
  Description of Artificial Sequence: Synthetic oligonucleotide
aagaggcaccuuauacaaa

SEQ ID NO: 111081 - RNA, 19 nt, Artificial Sequence
  Description of Artificial Sequence: Synthetic oligonucleotide
cuacuaagaggaauauuuu

SEQ ID NO: 111082 - RNA, 19 nt, Artificial Sequence
  Description of Artificial Sequence: Synthetic oligonucleotide
cuacuacaauuagcauugc

SEQ ID NO: 111083 - RNA, 19 nt, Artificial Sequence
  Description of Artificial Sequence: Synthetic oligonucleotide
guaagacuuaggaaccccu

SEQ ID NO: 111084 - RNA, 19 nt, Artificial Sequence
  Description of Artificial Sequence: Synthetic oligonucleotide
cgucccauggcucuuauga

SEQ ID NO: 111085 - RNA, 19 nt, Artificial Sequence
  Description of Artificial Sequence: Synthetic oligonucleotide
cauaaagcccucaguccua

SEQ ID NO: 111086 - RNA, 19 nt, Artificial Sequence
  Description of Artificial Sequence: Synthetic oligonucleotide
gaaccccuacacuguggga

SEQ ID NO: 111087 - RNA, 19 nt, Artificial Sequence
  Description of Artificial Sequence: Synthetic oligonucleotide
acgucaguauucacuagua

SEQ ID NO: 111088 - RNA, 19 nt, Artificial Sequence
  Description of Artificial Sequence: Synthetic oligonucleotide
gagugcuaagauucugcau

SEQ ID NO: 111089 - RNA, 19 nt, Artificial Sequence
  Description of Artificial Sequence: Synthetic oligonucleotide
ccgaugguauuuuccuagc

SEQ ID NO: 111090 - RNA, 19 nt, Artificial Sequence
  Description of Artificial Sequence: Synthetic oligonucleotide
cuuuuacuaaugccauccu

SEQ ID NO: 111091 - RNA, 19 nt, Artificial Sequence
  Description of Artificial Sequence: Synthetic oligonucleotide
gcuaaagagugcuaagauu

SEQ ID NO: 111092 - RNA, 19 nt, Artificial Sequence
  Description of Artificial Sequence: Synthetic oligonucleotide
auauugcgucugaccguac

SEQ ID NO: 111093 - RNA, 19 nt, Artificial Sequence
  Description of Artificial Sequence: Synthetic oligonucleotide
gaccguaccaagagcuaaa

SEQ ID NO: 111094 - RNA, 19 nt, Artificial Sequence
  Description of Artificial Sequence: Synthetic oligonucleotide
cucaugccaacuaaacauu

SEQ ID NO: 111095 - RNA, 19 nt, Artificial Sequence
  Description of Artificial Sequence: Synthetic oligonucleotide
accguaccaagagcuaaaa

SEQ ID NO: 111096 - RNA, 19 nt, Artificial Sequence
  Description of Artificial Sequence: Synthetic oligonucleotide
cuuuagccgucccauggcu

SEQ ID NO: 111097 - RNA, 19 nt, Artificial Sequence
  Description of Artificial Sequence: Synthetic oligonucleotide
cacuugagaugucucccaa

SEQ ID NO: 111098 - RNA, 19 nt, Artificial Sequence
  Description of Artificial Sequence: Synthetic oligonucleotide
gaguaggagguaacaucaa

SEQ ID NO: 111099 - RNA, 19 nt, Artificial Sequence
  Description of Artificial Sequence: Synthetic oligonucleotide
auugugcuaaagagugcua

SEQ ID NO: 111100 - RNA, 19 nt, Artificial Sequence
  Description of Artificial Sequence: Synthetic oligonucleotide
aguccauugcugacugaaa

SEQ ID NO: 111101 - RNA, 19 nt, Artificial Sequence
  Description of Artificial Sequence: Synthetic oligonucleotide
gcaaguugcggucaaucau

SEQ ID NO: 111102 - RNA, 19 nt, Artificial Sequence
  Description of Artificial Sequence: Synthetic oligonucleotide
cuguggcuugcuuuccaaa

SEQ ID NO: 111103 - RNA, 19 nt, Artificial Sequence
  Description of Artificial Sequence: Synthetic oligonucleotide
ccaaguaauugcuguuaga

SEQ ID NO: 111104 - RNA, 19 nt, Artificial Sequence
  Description of Artificial Sequence: Synthetic oligonucleotide
cugauacucccuggaccug

SEQ ID NO: 111105 - RNA, 19 nt, Artificial Sequence
  Description of Artificial Sequence: Synthetic oligonucleotide
gcaccucgacuucaauaug

SEQ ID NO: 111106 - RNA, 19 nt, Artificial Sequence
  Description of Artificial Sequence: Synthetic oligonucleotide
acuagacuuuagacaggau

SEQ ID NO: 111107 - RNA, 19 nt, Artificial Sequence
  Description of Artificial Sequence: Synthetic oligonucleotide
gcgcucaacgugcagccca

SEQ ID NO: 111108 - RNA, 19 nt, Artificial Sequence
  Description of Artificial Sequence: Synthetic oligonucleotide
acgugucuguaaaccauuu

SEQ ID NO: 111109 - RNA, 19 nt, Artificial Sequence
  Description of Artificial Sequence: Synthetic oligonucleotide
gcagcaagucauugguucu

SEQ ID NO: 111110 - RNA, 19 nt, Artificial Sequence
  Description of Artificial Sequence: Synthetic oligonucleotide
cucuuaugauugcaaugau

SEQ ID NO: 111111 - RNA, 19 nt, Artificial Sequence
  Description of Artificial Sequence: Synthetic oligonucleotide
gcccuaaagaaaugcuugu

SEQ ID NO: 111112 - RNA, 19 nt, Artificial Sequence
  Description of Artificial Sequence: Synthetic oligonucleotide
aucacgccugcaaguucug

SEQ ID NO: 111113 - RNA, 19 nt, Artificial Sequence
  Description of Artificial Sequence: Synthetic oligonucleotide
uuccaaccauaagcuuaaa

SEQ ID NO: 111114 - RNA, 19 nt, Artificial Sequence
  Description of Artificial Sequence: Synthetic oligonucleotide
cggguccggacucacacac

SEQ ID NO: 111115 - RNA, 19 nt, Artificial Sequence
  Description of Artificial Sequence: Synthetic oligonucleotide
gcgucugaccguaccaaga

SEQ ID NO: 111116 - RNA, 19 nt, Artificial Sequence
  Description of Artificial Sequence: Synthetic oligonucleotide
cguauuggaaccuguguau

SEQ ID NO: 111117 - RNA, 19 nt, Artificial Sequence
  Description of Artificial Sequence: Synthetic oligonucleotide
gaccggguccggacucaca

SEQ ID NO: 111118 - RNA, 19 nt, Artificial Sequence
  Description of Artificial Sequence: Synthetic oligonucleotide
ccguuuaaucacgccugca

SEQ ID NO: 111119 - RNA, 19 nt, Artificial Sequence
  Description of Artificial Sequence: Synthetic oligonucleotide
ccgucccauggcucuuaug

SEQ ID NO: 111120 - RNA, 19 nt, Artificial Sequence
  Description of Artificial Sequence: Synthetic oligonucleotide
gcucaacgugcagcccaug

SEQ ID NO: 111121 - RNA, 19 nt, Artificial Sequence
  Description of Artificial Sequence: Synthetic oligonucleotide
ggaccggguccggacucac

SEQ ID NO: 111122 - RNA, 19 nt, Artificial Sequence
  Description of Artificial Sequence: Synthetic oligonucleotide
ccucaguccuagauuugau

SEQ ID NO: 111123 - RNA, 19 nt, Artificial Sequence
  Description of Artificial Sequence: Synthetic oligonucleotide
gggaccggguccggacuca

SEQ ID NO: 111124 - RNA, 19 nt, Artificial Sequence
  Description of Artificial Sequence: Synthetic oligonucleotide
ccggguccggacucacaca

SEQ ID NO: 111125 - RNA, 19 nt, Artificial Sequence
  Description of Artificial Sequence: Synthetic oligonucleotide
cccuacacugugggaauua

SEQ ID NO: 111126 - RNA, 19 nt, Artificial Sequence
  Description of Artificial Sequence: Synthetic oligonucleotide
gccaucccucagugaucca

SEQ ID NO: 111127 - RNA, 19 nt, Artificial Sequence
  Description of Artificial Sequence: Synthetic oligonucleotide
gccgucccauggcucuuau

SEQ ID NO: 111128 - RNA, 19 nt, Artificial Sequence
  Description of Artificial Sequence: Synthetic oligonucleotide
cgcucaacgugcagcccau

SEQ ID NO: 111129 - RNA, 19 nt, Artificial Sequence
  Description of Artificial Sequence: Synthetic oligonucleotide
aauaaauaaggaucccgcc

SEQ ID NO: 111130 - RNA, 19 nt, Artificial Sequence
  Description of Artificial Sequence: Synthetic oligonucleotide
aauaugguaacaucaagug

SEQ ID NO: 111131 - RNA, 19 nt, Artificial Sequence
  Description of Artificial Sequence: Synthetic oligonucleotide
cauucaaacacccugaccc

SEQ ID NO: 111132 - RNA, 19 nt, Artificial Sequence
  Description of Artificial Sequence: Synthetic oligonucleotide
gaagauaacaaccucacac

SEQ ID NO: 111133 - RNA, 19 nt, Artificial Sequence
  Description of Artificial Sequence: Synthetic oligonucleotide
ucuacuauaccaaaaucug

SEQ ID NO: 111134 - RNA, 19 nt, Artificial Sequence
  Description of Artificial Sequence: Synthetic oligonucleotide
aaauaaucacuccaaauau

SEQ ID NO: 111135 - RNA, 19 nt, Artificial Sequence
  Description of Artificial Sequence: Synthetic oligonucleotide
gacguuaaugcucauacag

SEQ ID NO: 111136 - RNA, 19 nt, Artificial Sequence
  Description of Artificial Sequence: Synthetic oligonucleotide
uaaauaaggaucccgccag

SEQ ID NO: 111137 - RNA, 19 nt, Artificial Sequence
  Description of Artificial Sequence: Synthetic oligonucleotide
guaaacgucauuuuagcag

SEQ ID NO: 111138 - RNA, 19 nt, Artificial Sequence
  Description of Artificial Sequence: Synthetic oligonucleotide
auaugguaacaucaagugc

SEQ ID NO: 111139 - RNA, 19 nt, Artificial Sequence
  Description of Artificial Sequence: Synthetic oligonucleotide
ucucgaaacagaaugauau

SEQ ID NO: 111140 - RNA, 19 nt, Artificial Sequence
  Description of Artificial Sequence: Synthetic oligonucleotide
uggauaauugguuuguuug

SEQ ID NO: 111141 - RNA, 19 nt, Artificial Sequence
  Description of Artificial Sequence: Synthetic oligonucleotide
ugguuaacuagaaagccag

SEQ ID NO: 111142 - RNA, 19 nt, Artificial Sequence
  Description of Artificial Sequence: Synthetic oligonucleotide
uaacuagaaagccagcuca

SEQ ID NO: 111143 - RNA, 19 nt, Artificial Sequence
  Description of Artificial Sequence: Synthetic oligonucleotide
uuugccaaguccuugcucc

SEQ ID NO: 111144 - RNA, 19 nt, Artificial Sequence
  Description of Artificial Sequence: Synthetic oligonucleotide
auugugagugcauccacgc

SEQ ID NO: 111145 - RNA, 19 nt, Artificial Sequence
  Description of Artificial Sequence: Synthetic oligonucleotide
uuuagcagaagacaaacuu

SEQ ID NO: 111146 - RNA, 19 nt, Artificial Sequence
  Description of Artificial Sequence: Synthetic oligonucleotide
ugugugaacuuccuuagug

SEQ ID NO: 111147 - RNA, 19 nt, Artificial Sequence
  Description of Artificial Sequence: Synthetic oligonucleotide
uccaaauauguaaacguca

SEQ ID NO: 111148 - RNA, 19 nt, Artificial Sequence
  Description of Artificial Sequence: Synthetic oligonucleotide
ucacuuacgagucugguuc

SEQ ID NO: 111149 - RNA, 19 nt, Artificial Sequence
  Description of Artificial Sequence: Synthetic oligonucleotide
cuauaacugucaaagagac

SEQ ID NO: 111150 - RNA, 19 nt, Artificial Sequence
  Description of Artificial Sequence: Synthetic oligonucleotide
uaaacgucauuuuagcaga

SEQ ID NO: 111151 - RNA, 19 nt, Artificial Sequence
  Description of Artificial Sequence: Synthetic oligonucleotide
guuuaaugagcucucgccg

SEQ ID NO: 111152 - RNA, 19 nt, Artificial Sequence
  Description of Artificial Sequence: Synthetic oligonucleotide
uuuugcuccgggaacaacc

SEQ ID NO: 111153 - RNA, 19 nt, Artificial Sequence
  Description of Artificial Sequence: Synthetic oligonucleotide
uacuauaccaaaaucuguc

SEQ ID NO: 111154 - RNA, 19 nt, Artificial Sequence
  Description of Artificial Sequence: Synthetic oligonucleotide
acaaaugcccgaugguugc

SEQ ID NO: 111155 - RNA, 19 nt, Artificial Sequence
  Description of Artificial Sequence: Synthetic oligonucleotide
auaaauaaggaucccgcca

SEQ ID NO: 111156 - RNA, 19 nt, Artificial Sequence
  Description of Artificial Sequence: Synthetic oligonucleotide
acaugguuaacuagaaagc

SEQ ID NO: 111157 - RNA, 19 nt, Artificial Sequence
  Description of Artificial Sequence: Synthetic oligonucleotide
ggugaacugacuuuggccg

SEQ ID NO: 111158 - RNA, 19 nt, Artificial Sequence
  Description of Artificial Sequence: Synthetic oligonucleotide
agauaacaaccucacacuc

SEQ ID NO: 111159 - RNA, 19 nt, Artificial Sequence
  Description of Artificial Sequence: Synthetic oligonucleotide
agugguuauggauugugag

SEQ ID NO: 111160 - RNA, 19 nt, Artificial Sequence
  Description of Artificial Sequence: Synthetic oligonucleotide
uuuaggaccuguguacucg

SEQ ID NO: 111161 - RNA, 19 nt, Artificial Sequence
  Description of Artificial Sequence: Synthetic oligonucleotide
ugcggcucaaguuaucagg

SEQ ID NO: 111162 - RNA, 19 nt, Artificial Sequence
  Description of Artificial Sequence: Synthetic oligonucleotide
cuuagugaaguguucgggc

SEQ ID NO: 111163 - RNA, 19 nt, Artificial Sequence
  Description of Artificial Sequence: Synthetic oligonucleotide
aauaaucacuccaaauaug

SEQ ID NO: 111164 - RNA, 19 nt, Artificial Sequence
  Description of Artificial Sequence: Synthetic oligonucleotide
uuagugaaguguucgggcc

SEQ ID NO: 111165 - RNA, 19 nt, Artificial Sequence
  Description of Artificial Sequence: Synthetic oligonucleotide
ugggagaucuucaguauag

SEQ ID NO: 111166 - RNA, 19 nt, Artificial Sequence
  Description of Artificial Sequence: Synthetic oligonucleotide
cuguacaagugccacaucc

SEQ ID NO: 111167 - RNA, 19 nt, Artificial Sequence
  Description of Artificial Sequence: Synthetic oligonucleotide
aguaccagugaguuuguag

SEQ ID NO: 111168 - RNA, 19 nt, Artificial Sequence
  Description of Artificial Sequence: Synthetic oligonucleotide
auacgaacuccuuuuauga

SEQ ID NO: 111169 - RNA, 19 nt, Artificial Sequence
  Description of Artificial Sequence: Synthetic oligonucleotide
guugguagcaguaaagcgc

SEQ ID NO: 111170 - RNA, 19 nt, Artificial Sequence
  Description of Artificial Sequence: Synthetic oligonucleotide
caauagacaggucacacuc

SEQ ID NO: 111171 - RNA, 19 nt, Artificial Sequence
  Description of Artificial Sequence: Synthetic oligonucleotide
cuugcgucugucuaccugg

SEQ ID NO: 111172 - RNA, 19 nt, Artificial Sequence
  Description of Artificial Sequence: Synthetic oligonucleotide
auguuugcaucuuugcaag

SEQ ID NO: 111173 - RNA, 19 nt, Artificial Sequence
  Description of Artificial Sequence: Synthetic oligonucleotide
auaaggaucccgccagcgc

SEQ ID NO: 111174 - RNA, 19 nt, Artificial Sequence
  Description of Artificial Sequence: Synthetic oligonucleotide
cuaccaguaccccacaacc

SEQ ID NO: 111175 - RNA, 19 nt, Artificial Sequence
  Description of Artificial Sequence: Synthetic oligonucleotide
acgaacuccuuuuaugaag

SEQ ID NO: 111176 - RNA, 19 nt, Artificial Sequence
  Description of Artificial Sequence: Synthetic oligonucleotide
gaggacagaacaaaugccc

SEQ ID NO: 111177 - RNA, 19 nt, Artificial Sequence
  Description of Artificial Sequence: Synthetic oligonucleotide
cuucaguauagccugcugc

SEQ ID NO: 111178 - RNA, 19 nt, Artificial Sequence
  Description of Artificial Sequence: Synthetic oligonucleotide
agauuucccauacgaacuc

SEQ ID NO: 111179 - RNA, 19 nt, Artificial Sequence
  Description of Artificial Sequence: Synthetic oligonucleotide
acuuugcuugauuucagug

SEQ ID NO: 111180 - RNA, 19 nt, Artificial Sequence
  Description of Artificial Sequence: Synthetic oligonucleotide
uaccucaccaacacugucc

SEQ ID NO: 111181 - RNA, 19 nt, Artificial Sequence
  Description of Artificial Sequence: Synthetic oligonucleotide
uuaaugagcucucgccgag

SEQ ID NO: 111182 - RNA, 19 nt, Artificial Sequence
  Description of Artificial Sequence: Synthetic oligonucleotide
aacaaaugcccgaugguug

SEQ ID NO: 111183 - RNA, 19 nt, Artificial Sequence
  Description of Artificial Sequence: Synthetic oligonucleotide
auaaagguuggcaguagac

SEQ ID NO: 111184 - RNA, 19 nt, Artificial Sequence
  Description of Artificial Sequence: Synthetic oligonucleotide
cuaucacgcacgauuacag

SEQ ID NO: 111185 - RNA, 19 nt, Artificial Sequence
  Description of Artificial Sequence: Synthetic oligonucleotide
uguacaagugccacauccu

SEQ ID NO: 111186 - RNA, 19 nt, Artificial Sequence
  Description of Artificial Sequence: Synthetic oligonucleotide
gauugugagugcauccacg

SEQ ID NO: 111187 - RNA, 19 nt, Artificial Sequence
  Description of Artificial Sequence: Synthetic oligonucleotide
uuugcuccgggaacaaccc

SEQ ID NO: 111188 - RNA, 19 nt, Artificial Sequence
  Description of Artificial Sequence: Synthetic oligonucleotide
aguauagccugcugcagug

SEQ ID NO: 111189 - RNA, 19 nt, Artificial Sequence
  Description of Artificial Sequence: Synthetic oligonucleotide
acguuaaugcucauacagc

SEQ ID NO: 111190 - RNA, 19 nt, Artificial Sequence
  Description of Artificial Sequence: Synthetic oligonucleotide
agcucauugcuuuauuaca

SEQ ID NO: 111191 - RNA, 19 nt, Artificial Sequence
  Description of Artificial Sequence: Synthetic oligonucleotide
acgucauuuuagcagaaga

SEQ ID NO: 111192 - RNA, 19 nt, Artificial Sequence
  Description of Artificial Sequence: Synthetic oligonucleotide
ugugggaguguuuccauac

SEQ ID NO: 111193 - RNA, 19 nt, Artificial Sequence
  Description of Artificial Sequence: Synthetic oligonucleotide
gaaguugcgugcaaaagca

SEQ ID NO: 111194 - RNA, 19 nt, Artificial Sequence
  Description of Artificial Sequence: Synthetic oligonucleotide
aacuuugcuugauuucagu

SEQ ID NO: 111195 - RNA, 19 nt, Artificial Sequence
  Description of Artificial Sequence: Synthetic oligonucleotide
ucaauagacaggucacacu

SEQ ID NO: 111196 - RNA, 19 nt, Artificial Sequence
  Description of Artificial Sequence: Synthetic oligonucleotide
uucaauagacaggucacac

SEQ ID NO: 111197 - RNA, 19 nt, Artificial Sequence
  Description of Artificial Sequence: Synthetic oligonucleotide
aaaagauuucccauacgaa

SEQ ID NO: 111198 - RNA, 19 nt, Artificial Sequence
  Description of Artificial Sequence: Synthetic oligonucleotide
ucuaucacgcacgauuaca

SEQ ID NO: 111199 - RNA, 19 nt, Artificial Sequence
  Description of Artificial Sequence: Synthetic oligonucleotide
agaccuaaccagcgguggc

SEQ ID NO: 111200 - RNA, 19 nt, Artificial Sequence
  Description of Artificial Sequence: Synthetic oligonucleotide
agaguuuaggaccugugua

SEQ ID NO: 111201 - RNA, 19 nt, Artificial Sequence
  Description of Artificial Sequence: Synthetic oligonucleotide
ucacgcacgauuacagcug

SEQ ID NO: 111202 - RNA, 19 nt, Artificial Sequence
  Description of Artificial Sequence: Synthetic oligonucleotide
uauagugguuggcaucaca

SEQ ID NO: 111203 - RNA, 19 nt, Artificial Sequence
  Description of Artificial Sequence: Synthetic oligonucleotide
uuuucagacgcugccgugc

SEQ ID NO: 111204 - RNA, 19 nt, Artificial Sequence
  Description of Artificial Sequence: Synthetic oligonucleotide
aguggcucaacaaagugga

SEQ ID NO: 111205 - RNA, 19 nt, Artificial Sequence
  Description of Artificial Sequence: Synthetic oligonucleotide
agaacaaaugcccgauggu

SEQ ID NO: 111206 - RNA, 19 nt, Artificial Sequence
  Description of Artificial Sequence: Synthetic oligonucleotide
uaccaguaccccacaaccc

SEQ ID NO: 111207 - RNA, 19 nt, Artificial Sequence
  Description of Artificial Sequence: Synthetic oligonucleotide
accaguaccccacaacccu

SEQ ID NO: 111208 - RNA, 19 nt, Artificial Sequence
  Description of Artificial Sequence: Synthetic oligonucleotide
ugaugcagucucccaaucu

SEQ ID NO: 111209 - RNA, 19 nt, Artificial Sequence
  Description of Artificial Sequence: Synthetic oligonucleotide
uucuuugacaaggaacccu

SEQ ID NO: 111210 - RNA, 19 nt, Artificial Sequence
  Description of Artificial Sequence: Synthetic oligonucleotide
ucggugaacugacuuuggc

SEQ ID NO: 111211 - RNA, 19 nt, Artificial Sequence
  Description of Artificial Sequence: Synthetic oligonucleotide
gauauaaagguuggcagua

SEQ ID NO: 111212 - RNA, 19 nt, Artificial Sequence
  Description of Artificial Sequence: Synthetic oligonucleotide
uuucaauagacaggucaca

SEQ ID NO: 111213 - RNA, 19 nt, Artificial Sequence
  Description of Artificial Sequence: Synthetic oligonucleotide
ugcuuuuagugaacuggca

SEQ ID NO: 111214 - RNA, 19 nt, Artificial Sequence
  Description of Artificial Sequence: Synthetic oligonucleotide
uaucacgcacgauuacagc

SEQ ID NO: 111215 - RNA, 19 nt, Artificial Sequence
  Description of Artificial Sequence: Synthetic oligonucleotide
caaguuaucagggguggag

SEQ ID NO: 111216 - RNA, 19 nt, Artificial Sequence
  Description of Artificial Sequence: Synthetic oligonucleotide
aggacagaacaaaugcccg

SEQ ID NO: 111217 - RNA, 19 nt, Artificial Sequence
  Description of Artificial Sequence: Synthetic oligonucleotide
aacgucauuuuagcagaag

SEQ ID NO: 111218 - RNA, 19 nt, Artificial Sequence
  Description of Artificial Sequence: Synthetic oligonucleotide
uggcucaacaaaguggacu

SEQ ID NO: 111219 - RNA, 19 nt, Artificial Sequence
  Description of Artificial Sequence: Synthetic oligonucleotide
uuacgagucugguucuucu

SEQ ID NO: 111220 - RNA, 19 nt, Artificial Sequence
  Description of Artificial Sequence: Synthetic oligonucleotide
cagguugguagcaguaaag

SEQ ID NO: 111221 - RNA, 19 nt, Artificial Sequence
  Description of Artificial Sequence: Synthetic oligonucleotide
aaugcccgaugguugcucu

SEQ ID NO: 111222 - RNA, 19 nt, Artificial Sequence
  Description of Artificial Sequence: Synthetic oligonucleotide
uauggauugugagugcauc

SEQ ID NO: 111223 - RNA, 19 nt, Artificial Sequence
  Description of Artificial Sequence: Synthetic oligonucleotide
aagcgcccugaacuggcac

SEQ ID NO: 111224 - RNA, 19 nt, Artificial Sequence
  Description of Artificial Sequence: Synthetic oligonucleotide
acgauuacagcuggccaac

SEQ ID NO: 111225 - RNA, 19 nt, Artificial Sequence
  Description of Artificial Sequence: Synthetic oligonucleotide
uggauugugagugcaucca

SEQ ID NO: 111226 - RNA, 19 nt, Artificial Sequence
  Description of Artificial Sequence: Synthetic oligonucleotide
uagugaaguguucgggccu

SEQ ID NO: 111227 - RNA, 19 nt, Artificial Sequence
  Description of Artificial Sequence: Synthetic oligonucleotide
agagcagaucacauuuaac

SEQ ID NO: 111228 - RNA, 19 nt, Artificial Sequence
  Description of Artificial Sequence: Synthetic oligonucleotide
cauuuuagugcucucuuaa

SEQ ID NO: 111229 - RNA, 19 nt, Artificial Sequence
  Description of Artificial Sequence: Synthetic oligonucleotide
caauguuugcaucuuugca

SEQ ID NO: 111230 - RNA, 19 nt, Artificial Sequence
  Description of Artificial Sequence: Synthetic oligonucleotide
aaccucacacucucuaguu

SEQ ID NO: 111231 - RNA, 19 nt, Artificial Sequence
  Description of Artificial Sequence: Synthetic oligonucleotide
uuucagacgcugccgugca

SEQ ID NO: 111232 - RNA, 19 nt, Artificial Sequence
  Description of Artificial Sequence: Synthetic oligonucleotide
auauaaagguuggcaguag

SEQ ID NO: 111233 - RNA, 19 nt, Artificial Sequence
  Description of Artificial Sequence: Synthetic oligonucleotide
uuauggauugugagugcau

SEQ ID NO: 111234 - RNA, 19 nt, Artificial Sequence
  Description of Artificial Sequence: Synthetic oligonucleotide
cugcagacgccaaggagag

SEQ ID NO: 111235 - RNA, 19 nt, Artificial Sequence
  Description of Artificial Sequence: Synthetic oligonucleotide
uacgaacuccuuuuaugaa

SEQ ID NO: 111236 - RNA, 19 nt, Artificial Sequence
  Description of Artificial Sequence: Synthetic oligonucleotide
uuuuagcgccugguguugg

SEQ ID NO: 111237 - RNA, 19 nt, Artificial Sequence
  Description of Artificial Sequence: Synthetic oligonucleotide
ugugcuccuacugggguug

SEQ ID NO: 111238 - RNA, 19 nt, Artificial Sequence
  Description of Artificial Sequence: Synthetic oligonucleotide
cugacggacauggucuugg

SEQ ID NO: 111239 - RNA, 19 nt, Artificial Sequence
  Description of Artificial Sequence: Synthetic oligonucleotide
aucagcuaccaguacccca

SEQ ID NO: 111240 - RNA, 19 nt, Artificial Sequence
  Description of Artificial Sequence: Synthetic oligonucleotide
aaagaccgaggauguggga

SEQ ID NO: 111241 - RNA, 19 nt, Artificial Sequence
  Description of Artificial Sequence: Synthetic oligonucleotide
caguaaagcgcccugaacu

SEQ ID NO: 111242 - RNA, 19 nt, Artificial Sequence
  Description of Artificial Sequence: Synthetic oligonucleotide
agugaaguguucgggccuc

SEQ ID NO: 111243 - RNA, 19 nt, Artificial Sequence
  Description of Artificial Sequence: Synthetic oligonucleotide
aagugguuauggauuguga

SEQ ID NO: 111244 - RNA, 19 nt, Artificial Sequence
  Description of Artificial Sequence: Synthetic oligonucleotide
acggaguuccggccuggcc

SEQ ID NO: 111245 - RNA, 19 nt, Artificial Sequence
  Description of Artificial Sequence: Synthetic oligonucleotide
guuauggauugugagugca

SEQ ID NO: 111246 - RNA, 19 nt, Artificial Sequence
  Description of Artificial Sequence: Synthetic oligonucleotide
agaccgaggaugugggagu

SEQ ID NO: 111247 - RNA, 19 nt, Artificial Sequence
  Description of Artificial Sequence: Synthetic oligonucleotide
gaaggaguugugacaacca

SEQ ID NO: 111248 - RNA, 19 nt, Artificial Sequence
  Description of Artificial Sequence: Synthetic oligonucleotide
uuccggacggaguuccggc

SEQ ID NO: 111249 - RNA, 19 nt, Artificial Sequence
  Description of Artificial Sequence: Synthetic oligonucleotide
ugagugcggcucaaguuau

SEQ ID NO: 111250 - RNA, 19 nt, Artificial Sequence
  Description of Artificial Sequence: Synthetic oligonucleotide
agacguuaaugcucauaca

SEQ ID NO: 111251 - RNA, 19 nt, Artificial Sequence
  Description of Artificial Sequence: Synthetic oligonucleotide
cacgcugacggacaugguc

SEQ ID NO: 111252 - RNA, 19 nt, Artificial Sequence
  Description of Artificial Sequence: Synthetic oligonucleotide
caaucucggucugugcucc

SEQ ID NO: 111253 - RNA, 19 nt, Artificial Sequence
  Description of Artificial Sequence: Synthetic oligonucleotide
gaucggagggugaccgugg

SEQ ID NO: 111254 - RNA, 19 nt, Artificial Sequence
  Description of Artificial Sequence: Synthetic oligonucleotide
uccagugauuccacucggu

SEQ ID NO: 111255 - RNA, 19 nt, Artificial Sequence
  Description of Artificial Sequence: Synthetic oligonucleotide
cagaccuaaccagcggugg

SEQ ID NO: 111256 - RNA, 19 nt, Artificial Sequence
  Description of Artificial Sequence: Synthetic oligonucleotide
gauaacaaccucacacucu

SEQ ID NO: 111257 - RNA, 19 nt, Artificial Sequence
  Description of Artificial Sequence: Synthetic oligonucleotide
agugcggcucaaguuauca

SEQ ID NO: 111258 - RNA, 19 nt, Artificial Sequence
  Description of Artificial Sequence: Synthetic oligonucleotide
guuuucagacgcugccgug

SEQ ID NO: 111259 - RNA, 19 nt, Artificial Sequence
  Description of Artificial Sequence: Synthetic oligonucleotide
uccuguauucugagauggu

SEQ ID NO: 111260 - RNA, 19 nt, Artificial Sequence
  Description of Artificial Sequence: Synthetic oligonucleotide
ucucggucugugcuccuac

SEQ ID NO: 111261 - RNA, 19 nt, Artificial Sequence
  Description of Artificial Sequence: Synthetic oligonucleotide
gcgucugucuaccuggcag

SEQ ID NO: 111262 - RNA, 19 nt, Artificial Sequence
  Description of Artificial Sequence: Synthetic oligonucleotide
cacgauuacagcuggccaa

SEQ ID NO: 111263 - RNA, 19 nt, Artificial Sequence
  Description of Artificial Sequence: Synthetic oligonucleotide
ugacccgagagcgagccuc

SEQ ID NO: 111264 - RNA, 19 nt, Artificial Sequence
  Description of Artificial Sequence: Synthetic oligonucleotide
cuauaccaaaaucuguccu

SEQ ID NO: 111265 - RNA, 19 nt, Artificial Sequence
  Description of Artificial Sequence: Synthetic oligonucleotide
cuacuauaccaaaaucugu

SEQ ID NO: 111266 - RNA, 19 nt, Artificial Sequence
  Description of Artificial Sequence: Synthetic oligonucleotide
ggggccuuuaccuuugguc

SEQ ID NO: 111267 - RNA, 19 nt, Artificial Sequence
  Description of Artificial Sequence: Synthetic oligonucleotide
uugcggcucaagaugggua

SEQ ID NO: 111268 - RNA, 19 nt, Artificial Sequence
  Description of Artificial Sequence: Synthetic oligonucleotide
ucaaguuaucaggggugga

SEQ ID NO: 111269 - RNA, 19 nt, Artificial Sequence
  Description of Artificial Sequence: Synthetic oligonucleotide
gguuauggauugugagugc

SEQ ID NO: 111270 - RNA, 19 nt, Artificial Sequence
  Description of Artificial Sequence: Synthetic oligonucleotide
cuuacgccgggcuucaucu

SEQ ID NO: 111271 - RNA, 19 nt, Artificial Sequence
  Description of Artificial Sequence: Synthetic oligonucleotide
acgcugacggacauggucu

SEQ ID NO: 111272 - RNA, 19 nt, Artificial Sequence
  Description of Artificial Sequence: Synthetic oligonucleotide
accguggaugagugcuugg

SEQ ID NO: 111273 - RNA, 19 nt, Artificial Sequence
  Description of Artificial Sequence: Synthetic oligonucleotide
caacccucccgacugugug

SEQ ID NO: 111274 - RNA, 19 nt, Artificial Sequence
  Description of Artificial Sequence: Synthetic oligonucleotide
aucaggcaaugugcaaagg

SEQ ID NO: 111275 - RNA, 19 nt, Artificial Sequence
  Description of Artificial Sequence: Synthetic oligonucleotide
ccuuagugaaguguucggg

SEQ ID NO: 111276 - RNA, 19 nt, Artificial Sequence
  Description of Artificial Sequence: Synthetic oligonucleotide
cucuaucacgcacgauuac

SEQ ID NO: 111277 - RNA, 19 nt, Artificial Sequence
  Description of Artificial Sequence: Synthetic oligonucleotide
uucagacgcugccgugcag

SEQ ID NO: 111278 - RNA, 19 nt, Artificial Sequence
  Description of Artificial Sequence: Synthetic oligonucleotide
cacgugcuuacucaucaca

SEQ ID NO: 111279 - RNA, 19 nt, Artificial Sequence
  Description of Artificial Sequence: Synthetic oligonucleotide
gugcggcucaaguuaucag

SEQ ID NO: 111280 - RNA, 19 nt, Artificial Sequence
  Description of Artificial Sequence: Synthetic oligonucleotide
cauagggcaucaggcaaug

SEQ ID NO: 111281 - RNA, 19 nt, Artificial Sequence
  Description of Artificial Sequence: Synthetic oligonucleotide
gaacaaaugcccgaugguu

SEQ ID NO: 111282 - RNA, 19 nt, Artificial Sequence
  Description of Artificial Sequence: Synthetic oligonucleotide
uuagcgccugguguuggca

SEQ ID NO: 111283 - RNA, 19 nt, Artificial Sequence
  Description of Artificial Sequence: Synthetic oligonucleotide
cugugggccgcuugggcug

SEQ ID NO: 111284 - RNA, 19 nt, Artificial Sequence
  Description of Artificial Sequence: Synthetic oligonucleotide
cuuacgagucugguucuuc

SEQ ID NO: 111285 - RNA, 19 nt, Artificial Sequence
  Description of Artificial Sequence: Synthetic oligonucleotide
gcuaccaguaccccacaac

SEQ ID NO: 111286 - RNA, 19 nt, Artificial Sequence
  Description of Artificial Sequence: Synthetic oligonucleotide
ugcccgaugguugcucuca

SEQ ID NO: 111287 - RNA, 19 nt, Artificial Sequence
  Description of Artificial Sequence: Synthetic oligonucleotide
acgugcuuacucaucacau

SEQ ID NO: 111288 - RNA, 19 nt, Artificial Sequence
  Description of Artificial Sequence: Synthetic oligonucleotide
aaacgucauuuuagcagaa

SEQ ID NO: 111289 - RNA, 19 nt, Artificial Sequence
  Description of Artificial Sequence: Synthetic oligonucleotide
uguaugcuccgugcccagc

SEQ ID NO: 111290 - RNA, 19 nt, Artificial Sequence
  Description of Artificial Sequence: Synthetic oligonucleotide
cacucuacuauaccaaaau

SEQ ID NO: 111291 - RNA, 19 nt, Artificial Sequence
  Description of Artificial Sequence: Synthetic oligonucleotide
gaccguggaugagugcuug

SEQ ID NO: 111292 - RNA, 19 nt, Artificial Sequence
  Description of Artificial Sequence: Synthetic oligonucleotide
guaacaucaagugcacagu

SEQ ID NO: 111293 - RNA, 19 nt, Artificial Sequence
  Description of Artificial Sequence: Synthetic oligonucleotide
gauuacagcuggccaacau

SEQ ID NO: 111294 - RNA, 19 nt, Artificial Sequence
  Description of Artificial Sequence: Synthetic oligonucleotide
agcagccgugcccaggaaa

SEQ ID NO: 111295 - RNA, 19 nt, Artificial Sequence
  Description of Artificial Sequence: Synthetic oligonucleotide
gacccgagagcgagccucg

SEQ ID NO: 111296 - RNA, 19 nt, Artificial Sequence
  Description of Artificial Sequence: Synthetic oligonucleotide
augcccgaugguugcucuc

SEQ ID NO: 111297 - RNA, 19 nt, Artificial Sequence
  Description of Artificial Sequence: Synthetic oligonucleotide
aaguugcgugcaaaagcaa

SEQ ID NO: 111298 - RNA, 19 nt, Artificial Sequence
  Description of Artificial Sequence: Synthetic oligonucleotide
aggacucuucucggugaac

SEQ ID NO: 111299 - RNA, 19 nt, Artificial Sequence
  Description of Artificial Sequence: Synthetic oligonucleotide
agccucucugauacaaugu

SEQ ID NO: 111300 - RNA, 19 nt, Artificial Sequence
  Description of Artificial Sequence: Synthetic oligonucleotide
ggcucaagauggguaaggc

SEQ ID NO: 111301 - RNA, 19 nt, Artificial Sequence
  Description of Artificial Sequence: Synthetic oligonucleotide
accuaaccagcgguggcug

SEQ ID NO: 111302 - RNA, 19 nt, Artificial Sequence
  Description of Artificial Sequence: Synthetic oligonucleotide
ggcauuguggauaauuggu

SEQ ID NO: 111303 - RNA, 19 nt, Artificial Sequence
  Description of Artificial Sequence: Synthetic oligonucleotide
gcgugcaaaagcaaacuuc

SEQ ID NO: 111304 - RNA, 19 nt, Artificial Sequence
  Description of Artificial Sequence: Synthetic oligonucleotide
acagacguuaaugcucaua

SEQ ID NO: 111305 - RNA, 19 nt, Artificial Sequence
  Description of Artificial Sequence: Synthetic oligonucleotide
ugaccguggaugagugcuu

SEQ ID NO: 111306 - RNA, 19 nt, Artificial Sequence
  Description of Artificial Sequence: Synthetic oligonucleotide
gcagccgugcccaggaaag

SEQ ID NO: 111307 - RNA, 19 nt, Artificial Sequence
  Description of Artificial Sequence: Synthetic oligonucleotide
gcuccuacugggguugcgg

SEQ ID NO: 111308 - RNA, 19 nt, Artificial Sequence
  Description of Artificial Sequence: Synthetic oligonucleotide
ugcuccuacugggguugcg

SEQ ID NO: 111309 - RNA, 19 nt, Artificial Sequence
  Description of Artificial Sequence: Synthetic oligonucleotide
acugugugguagaaauaau

SEQ ID NO: 111310 - RNA, 19 nt, Artificial Sequence
  Description of Artificial Sequence: Synthetic oligonucleotide
gcacgauuacagcuggcca

SEQ ID NO: 111311 - RNA, 19 nt, Artificial Sequence
  Description of Artificial Sequence: Synthetic oligonucleotide
agcuaccaguaccccacaa

SEQ ID NO: 111312 - RNA, 19 nt, Artificial Sequence
  Description of Artificial Sequence: Synthetic oligonucleotide
ggagccagagugagugcgg

SEQ ID NO: 111313 - RNA, 19 nt, Artificial Sequence
  Description of Artificial Sequence: Synthetic oligonucleotide
cugggagaucuucaguaua

SEQ ID NO: 111314 - RNA, 19 nt, Artificial Sequence
  Description of Artificial Sequence: Synthetic oligonucleotide
ccaaucucggucugugcuc

SEQ ID NO: 111315 - RNA, 19 nt, Artificial Sequence
  Description of Artificial Sequence: Synthetic oligonucleotide
ugguccuggcagguuauuu

SEQ ID NO: 111316 - RNA, 19 nt, Artificial Sequence
  Description of Artificial Sequence: Synthetic oligonucleotide
uuacgccgggcuucaucuc

SEQ ID NO: 111317 - RNA, 19 nt, Artificial Sequence
  Description of Artificial Sequence: Synthetic oligonucleotide
gaacuggcacccagcaucu

SEQ ID NO: 111318 - RNA, 19 nt, Artificial Sequence
  Description of Artificial Sequence: Synthetic oligonucleotide
guuggagagaguggcucaa

SEQ ID NO: 111319 - RNA, 19 nt, Artificial Sequence
  Description of Artificial Sequence: Synthetic oligonucleotide
gaccuaaccagcgguggcu

SEQ ID NO: 111320 - RNA, 19 nt, Artificial Sequence
  Description of Artificial Sequence: Synthetic oligonucleotide
acccucccgacuguguggu

SEQ ID NO: 111321 - RNA, 19 nt, Artificial Sequence
  Description of Artificial Sequence: Synthetic oligonucleotide
ggugaccguggaugagugc

SEQ ID NO: 111322 - RNA, 19 nt, Artificial Sequence
  Description of Artificial Sequence: Synthetic oligonucleotide
ucccgccagcgcauccucu

SEQ ID NO: 111323 - RNA, 19 nt, Artificial Sequence
  Description of Artificial Sequence: Synthetic oligonucleotide
cuucucggugaacugacuu

SEQ ID NO: 111324 - RNA, 19 nt, Artificial Sequence
  Description of Artificial Sequence: Synthetic oligonucleotide
cgcacgauuacagcuggcc

SEQ ID NO: 111325 - RNA, 19 nt, Artificial Sequence
  Description of Artificial Sequence: Synthetic oligonucleotide
cacgguugccaagggaaga

SEQ ID NO: 111326 - RNA, 19 nt, Artificial Sequence
  Description of Artificial Sequence: Synthetic oligonucleotide
gacggaguuccggccuggc

SEQ ID NO: 111327 - RNA, 19 nt, Artificial Sequence
  Description of Artificial Sequence: Synthetic oligonucleotide
caucucgaaacagaaugau

SEQ ID NO: 111328 - RNA, 19 nt, Artificial Sequence
  Description of Artificial Sequence: Synthetic oligonucleotide
ccccugaaugaacacuuuc

SEQ ID NO: 111329 - RNA, 19 nt, Artificial Sequence
  Description of Artificial Sequence: Synthetic oligonucleotide
gguugcggcucaagauggg

SEQ ID NO: 111330 - RNA, 19 nt, Artificial Sequence
  Description of Artificial Sequence: Synthetic oligonucleotide
accuguguacucggccaca

SEQ ID NO: 111331 - RNA, 19 nt, Artificial Sequence
  Description of Artificial Sequence: Synthetic oligonucleotide
ccucuaucacgcacgauua

SEQ ID NO: 111332 - RNA, 19 nt, Artificial Sequence
  Description of Artificial Sequence: Synthetic oligonucleotide
ccgacugugugguagaaau

SEQ ID NO: 111333 - RNA, 19 nt, Artificial Sequence
  Description of Artificial Sequence: Synthetic oligonucleotide
acuuacgagucugguucuu

SEQ ID NO: 111334 - RNA, 19 nt, Artificial Sequence
  Description of Artificial Sequence: Synthetic oligonucleotide
gcaaguauuccuguuuaau

SEQ ID NO: 111335 - RNA, 19 nt, Artificial Sequence
  Description of Artificial Sequence: Synthetic oligonucleotide
cagccgugcccaggaaagc

SEQ ID NO: 111336 - RNA, 19 nt, Artificial Sequence
  Description of Artificial Sequence: Synthetic oligonucleotide
ccgggaacaacccugcugu

SEQ ID NO: 111337 - RNA, 19 nt, Artificial Sequence
  Description of Artificial Sequence: Synthetic oligonucleotide
ggggacuucaugagaagcu

SEQ ID NO: 111338 - RNA, 19 nt, Artificial Sequence
  Description of Artificial Sequence: Synthetic oligonucleotide
guugcggcucaagaugggu

SEQ ID NO: 111339 - RNA, 19 nt, Artificial Sequence
  Description of Artificial Sequence: Synthetic oligonucleotide
gguagcaguaaagcgcccu

SEQ ID NO: 111340 - RNA, 19 nt, Artificial Sequence
  Description of Artificial Sequence: Synthetic oligonucleotide
agccuuacgccgggcuuca

SEQ ID NO: 111341 - RNA, 19 nt, Artificial Sequence
  Description of Artificial Sequence: Synthetic oligonucleotide
ugcagacgccaaggagaga

SEQ ID NO: 111342 - RNA, 19 nt, Artificial Sequence
  Description of Artificial Sequence: Synthetic oligonucleotide
ccuuacgccgggcuucauc

SEQ ID NO: 111343 - RNA, 19 nt, Artificial Sequence
  Description of Artificial Sequence: Synthetic oligonucleotide
ccacaagugguuauggauu

SEQ ID NO: 111344 - RNA, 19 nt, Artificial Sequence
  Description of Artificial Sequence: Synthetic oligonucleotide
auccacgcugacggacaug

SEQ ID NO: 111345 - RNA, 19 nt, Artificial Sequence
  Description of Artificial Sequence: Synthetic oligonucleotide
gaucccgccagcgcauccu

SEQ ID NO: 111346 - RNA, 19 nt, Artificial Sequence
  Description of Artificial Sequence: Synthetic oligonucleotide
gagugcggcucaaguuauc

SEQ ID NO: 111347 - RNA, 19 nt, Artificial Sequence
  Description of Artificial Sequence: Synthetic oligonucleotide
cuacugggguugcggcuca

SEQ ID NO: 111348 - RNA, 19 nt, Artificial Sequence
  Description of Artificial Sequence: Synthetic oligonucleotide
cccucuaucacgcacgauu

SEQ ID NO: 111349 - RNA, 19 nt, Artificial Sequence
  Description of Artificial Sequence: Synthetic oligonucleotide
acccgagagcgagccucgg

SEQ ID NO: 111350 - RNA, 19 nt, Artificial Sequence
  Description of Artificial Sequence: Synthetic oligonucleotide
gugauuccacucggugaga

SEQ ID NO: 111351 - RNA, 19 nt, Artificial Sequence
  Description of Artificial Sequence: Synthetic oligonucleotide
cgagccucggcccucuauc

SEQ ID NO: 111352 - RNA, 19 nt, Artificial Sequence
  Description of Artificial Sequence: Synthetic oligonucleotide
ggagcaccgucagccuucc

SEQ ID NO: 111353 - RNA, 19 nt, Artificial Sequence
  Description of Artificial Sequence: Synthetic oligonucleotide
ccuggaucggagggugacc

SEQ ID NO: 111354 - RNA, 19 nt, Artificial Sequence
  Description of Artificial Sequence: Synthetic oligonucleotide
ggcccucuaucacgcacga

SEQ ID NO: 111355 - RNA, 19 nt, Artificial Sequence
  Description of Artificial Sequence: Synthetic oligonucleotide
gcggcucaagauggguaag

SEQ ID NO: 111356 - RNA, 19 nt, Artificial Sequence
  Description of Artificial Sequence: Synthetic oligonucleotide
cucgagccucucugauaca

SEQ ID NO: 111357 - RNA, 19 nt, Artificial Sequence
  Description of Artificial Sequence: Synthetic oligonucleotide
gugaaguguucgggccuca

SEQ ID NO: 111358 - RNA, 19 nt, Artificial Sequence
  Description of Artificial Sequence: Synthetic oligonucleotide
gagcaccgucagccuuccc

SEQ ID NO: 111359 - RNA, 19 nt, Artificial Sequence
  Description of Artificial Sequence: Synthetic oligonucleotide
ccgcaaguauuccuguuua

SEQ ID NO: 111360 - RNA, 19 nt, Artificial Sequence
  Description of Artificial Sequence: Synthetic oligonucleotide
cuuucggucugagcuguau

SEQ ID NO: 111361 - RNA, 19 nt, Artificial Sequence
  Description of Artificial Sequence: Synthetic oligonucleotide
gccgugcccaggaaagcac

SEQ ID NO: 111362 - RNA, 19 nt, Artificial Sequence
  Description of Artificial Sequence: Synthetic oligonucleotide
cucggucugugcuccuacu

SEQ ID NO: 111363 - RNA, 19 nt, Artificial Sequence
  Description of Artificial Sequence: Synthetic oligonucleotide
ggucacuuacgagucuggu

SEQ ID NO: 111364 - RNA, 19 nt, Artificial Sequence
  Description of Artificial Sequence: Synthetic oligonucleotide
uugcgugcucgagccucuc

SEQ ID NO: 111365 - RNA, 19 nt, Artificial Sequence
  Description of Artificial Sequence: Synthetic oligonucleotide
gugcucgagccucucugau

SEQ ID NO: 111366 - RNA, 19 nt, Artificial Sequence
  Description of Artificial Sequence: Synthetic oligonucleotide
cugugcuccuacugggguu

SEQ ID NO: 111367 - RNA, 19 nt, Artificial Sequence
  Description of Artificial Sequence: Synthetic oligonucleotide
ccgugcccaggaaagcaca

SEQ ID NO: 111368 - RNA, 19 nt, Artificial Sequence
  Description of Artificial Sequence: Synthetic oligonucleotide
cucggcccucuaucacgca

SEQ ID NO: 111369 - RNA, 19 nt, Artificial Sequence
  Description of Artificial Sequence: Synthetic oligonucleotide
caaaugcccgaugguugcu

SEQ ID NO: 111370 - RNA, 19 nt, Artificial Sequence
  Description of Artificial Sequence: Synthetic oligonucleotide
cuccgcaaguauuccuguu

SEQ ID NO: 111371 - RNA, 19 nt, Artificial Sequence
  Description of Artificial Sequence: Synthetic oligonucleotide
ccauacgaacuccuuuuau

SEQ ID NO: 111372 - RNA, 19 nt, Artificial Sequence
  Description of Artificial Sequence: Synthetic oligonucleotide
gcgccugguguuggcacug

SEQ ID NO: 111373 - RNA, 19 nt, Artificial Sequence
  Description of Artificial Sequence: Synthetic oligonucleotide
cgcaaguauuccuguuuaa

SEQ ID NO: 111374 - RNA, 19 nt, Artificial Sequence
  Description of Artificial Sequence: Synthetic oligonucleotide
caguaccagugaguuugua

SEQ ID NO: 111375 - RNA, 19 nt, Artificial Sequence
  Description of Artificial Sequence: Synthetic oligonucleotide
cacagacguuaaugcucau

SEQ ID NO: 111376 - RNA, 19 nt, Artificial Sequence
  Description of Artificial Sequence: Synthetic oligonucleotide
agcgagccucggcccucua

SEQ ID NO: 111377 - RNA, 19 nt, Artificial Sequence
  Description of Artificial Sequence: Synthetic oligonucleotide
cugacccgagagcgagccu

SEQ ID NO: 111378 - RNA, 19 nt, Artificial Sequence
  Description of Artificial Sequence: Synthetic oligonucleotide
ccgugcccagcauccaugu

SEQ ID NO: 111379 - RNA, 19 nt, Artificial Sequence
  Description of Artificial Sequence: Synthetic oligonucleotide
gcuuucggucugagcugua

SEQ ID NO: 111380 - RNA, 19 nt, Artificial Sequence
  Description of Artificial Sequence: Synthetic oligonucleotide
gccgggcuucaucucgcuu

SEQ ID NO: 111381 - RNA, 19 nt, Artificial Sequence
  Description of Artificial Sequence: Synthetic oligonucleotide
gcccucuaucacgcacgau

SEQ ID NO: 111382 - RNA, 19 nt, Artificial Sequence
  Description of Artificial Sequence: Synthetic oligonucleotide
cgcccugaacuggcaccca

SEQ ID NO: 111383 - RNA, 19 nt, Artificial Sequence
  Description of Artificial Sequence: Synthetic oligonucleotide
gccuuacgccgggcuucau

SEQ ID NO: 111384 - RNA, 19 nt, Artificial Sequence
  Description of Artificial Sequence: Synthetic oligonucleotide
aauccaaugagacagacac

SEQ ID NO: 111385 - RNA, 19 nt, Artificial Sequence
  Description of Artificial Sequence: Synthetic oligonucleotide
uauucuaugaucuucaggc

SEQ ID NO: 111386 - RNA, 19 nt, Artificial Sequence
  Description of Artificial Sequence: Synthetic oligonucleotide
aaaagugcgacaaugaugg

SEQ ID NO: 111387 - RNA, 19 nt, Artificial Sequence
  Description of Artificial Sequence: Synthetic oligonucleotide
aaaccagucgagcaguacc

SEQ ID NO: 111388 - RNA, 19 nt, Artificial Sequence
  Description of Artificial Sequence: Synthetic oligonucleotide
aauuacgaaguccaguaag

SEQ ID NO: 111389 - RNA, 19 nt, Artificial Sequence
  Description of Artificial Sequence: Synthetic oligonucleotide
aaugauaguaacgaaaggu

SEQ ID NO: 111390 - RNA, 19 nt, Artificial Sequence
  Description of Artificial Sequence: Synthetic oligonucleotide
aauguggagcauuacacag

SEQ ID NO: 111391 - RNA, 19 nt, Artificial Sequence
  Description of Artificial Sequence: Synthetic oligonucleotide
uuuacaauaggcaguguag

SEQ ID NO: 111392 - RNA, 19 nt, Artificial Sequence
  Description of Artificial Sequence: Synthetic oligonucleotide
uuuaaagucuuuuggacug

SEQ ID NO: 111393 - RNA, 19 nt, Artificial Sequence
  Description of Artificial Sequence: Synthetic oligonucleotide
cuuuagugcacaaauacag

SEQ ID NO: 111394 - RNA, 19 nt, Artificial Sequence
  Description of Artificial Sequence: Synthetic oligonucleotide
uauucuagaguauccauag

SEQ ID NO: 111395 - RNA, 19 nt, Artificial Sequence
  Description of Artificial Sequence: Synthetic oligonucleotide
ugugauuugaaacaccaac

SEQ ID NO: 111396 - RNA, 19 nt, Artificial Sequence
  Description of Artificial Sequence: Synthetic oligonucleotide
aaagucucgagaucucagc

SEQ ID NO: 111397 - RNA, 19 nt, Artificial Sequence
  Description of Artificial Sequence: Synthetic oligonucleotide
uauauggugcuaauaacag

SEQ ID NO: 111398 - RNA, 19 nt, Artificial Sequence
  Description of Artificial Sequence: Synthetic oligonucleotide
aaugguuugauaacaacag

SEQ ID NO: 111399 - RNA, 19 nt, Artificial Sequence
  Description of Artificial Sequence: Synthetic oligonucleotide
ugaggcuugacuuugugag

SEQ ID NO: 111400 - RNA, 19 nt, Artificial Sequence
  Description of Artificial Sequence: Synthetic oligonucleotide
uuuuagacuccgcagagug

SEQ ID NO: 111401 - RNA, 19 nt, Artificial Sequence
  Description of Artificial Sequence: Synthetic oligonucleotide
auacguaaaauccaaugag

SEQ ID NO: 111402 - RNA, 19 nt, Artificial Sequence
  Description of Artificial Sequence: Synthetic oligonucleotide
uuagugcacaaauacagcc

SEQ ID NO: 111403 - RNA, 19 nt, Artificial Sequence
  Description of Artificial Sequence: Synthetic oligonucleotide
uguuguauacugcggauag

SEQ ID NO: 111404 - RNA, 19 nt, Artificial Sequence
  Description of Artificial Sequence: Synthetic oligonucleotide
uacauaugaaccguguugg

SEQ ID NO: 111405 - RNA, 19 nt, Artificial Sequence
  Description of Artificial Sequence: Synthetic oligonucleotide
gaaauagucagccaaaugu

SEQ ID NO: 111406 - RNA, 19 nt, Artificial Sequence
  Description of Artificial Sequence: Synthetic oligonucleotide
ugguggauacauaugaacc

SEQ ID NO: 111407 - RNA, 19 nt, Artificial Sequence
  Description of Artificial Sequence: Synthetic oligonucleotide
gucaagauuuucuagcggg

SEQ ID NO: 111408 - RNA, 19 nt, Artificial Sequence
  Description of Artificial Sequence: Synthetic oligonucleotide
ucugcguuagauauucuag

SEQ ID NO: 111409 - RNA, 19 nt, Artificial Sequence
  Description of Artificial Sequence: Synthetic oligonucleotide
aacuaaaccagucgagcag

SEQ ID NO: 111410 - RNA, 19 nt, Artificial Sequence
  Description of Artificial Sequence: Synthetic oligonucleotide
gauacguaaaauccaauga

SEQ ID NO: 111411 - RNA, 19 nt, Artificial Sequence
  Description of Artificial Sequence: Synthetic oligonucleotide
aaacuuaaaccagcgcugc

SEQ ID NO: 111412 - RNA, 19 nt, Artificial Sequence
  Description of Artificial Sequence: Synthetic oligonucleotide
gacugauguaucuauacug

SEQ ID NO: 111413 - RNA, 19 nt, Artificial Sequence
  Description of Artificial Sequence: Synthetic oligonucleotide
uggagcauuacacaggcac

SEQ ID NO: 111414 - RNA, 19 nt, Artificial Sequence
  Description of Artificial Sequence: Synthetic oligonucleotide
aaauaguuuugccuuguca

SEQ ID NO: 111415 - RNA, 19 nt, Artificial Sequence
  Description of Artificial Sequence: Synthetic oligonucleotide
gauuauaccaaauucuucu

SEQ ID NO: 111416 - RNA, 19 nt, Artificial Sequence
  Description of Artificial Sequence: Synthetic oligonucleotide
aaucguuucagguguacca

SEQ ID NO: 111417 - RNA, 19 nt, Artificial Sequence
  Description of Artificial Sequence: Synthetic oligonucleotide
ucuuuagagagucccgccg

SEQ ID NO: 111418 - RNA, 19 nt, Artificial Sequence
  Description of Artificial Sequence: Synthetic oligonucleotide
auacauaugaaccguguug

SEQ ID NO: 111419 - RNA, 19 nt, Artificial Sequence
  Description of Artificial Sequence: Synthetic oligonucleotide
guaccaacagcacaggcgg

SEQ ID NO: 111420 - RNA, 19 nt, Artificial Sequence
  Description of Artificial Sequence: Synthetic oligonucleotide
gauaguaacgaaagguucc

SEQ ID NO: 111421 - RNA, 19 nt, Artificial Sequence
  Description of Artificial Sequence: Synthetic oligonucleotide
uguggagcauuacacaggc

SEQ ID NO: 111422 - RNA, 19 nt, Artificial Sequence
  Description of Artificial Sequence: Synthetic oligonucleotide
uaugggugaagcuucagcu

SEQ ID NO: 111423 - RNA, 19 nt, Artificial Sequence
  Description of Artificial Sequence: Synthetic oligonucleotide
gguggaacgauucaggaag

SEQ ID NO: 111424 - RNA, 19 nt, Artificial Sequence
  Description of Artificial Sequence: Synthetic oligonucleotide
auaaaagaggauauaagcu

SEQ ID NO: 111425 - RNA, 19 nt, Artificial Sequence
  Description of Artificial Sequence: Synthetic oligonucleotide
gaaugauaguaacgaaagg

SEQ ID NO: 111426 - RNA, 19 nt, Artificial Sequence
  Description of Artificial Sequence: Synthetic oligonucleotide
uuacuuguggaugcuagcg

SEQ ID NO: 111427 - RNA, 19 nt, Artificial Sequence
  Description of Artificial Sequence: Synthetic oligonucleotide
ugauaguaacgaaagguuc

SEQ ID NO: 111428 - RNA, 19 nt, Artificial Sequence
  Description of Artificial Sequence: Synthetic oligonucleotide
aauacgggccuuuucuuca

SEQ ID NO: 111429 - RNA, 19 nt, Artificial Sequence
  Description of Artificial Sequence: Synthetic oligonucleotide
ugcauuuacuuguggaugc

SEQ ID NO: 111430 - RNA, 19 nt, Artificial Sequence
  Description of Artificial Sequence: Synthetic oligonucleotide
ugaccugauuauauggugc

SEQ ID NO: 111431 - RNA, 19 nt, Artificial Sequence
  Description of Artificial Sequence: Synthetic oligonucleotide
ugcguuagauauucuagag

SEQ ID NO: 111432 - RNA, 19 nt, Artificial Sequence
  Description of Artificial Sequence: Synthetic oligonucleotide
cuuuguaagcauuaggaga

SEQ ID NO: 111433 - RNA, 19 nt, Artificial Sequence
  Description of Artificial Sequence: Synthetic oligonucleotide
auuuguuguauacugcgga

SEQ ID NO: 111434 - RNA, 19 nt, Artificial Sequence
  Description of Artificial Sequence: Synthetic oligonucleotide
aaaauacccuucuaggcuu

SEQ ID NO: 111435 - RNA, 19 nt, Artificial Sequence
  Description of Artificial Sequence: Synthetic oligonucleotide
uggaccaauaacauacugu

SEQ ID NO: 111436 - RNA, 19 nt, Artificial Sequence
  Description of Artificial Sequence: Synthetic oligonucleotide
uaaacuauguacagcgauc

SEQ ID NO: 111437 - RNA, 19 nt, Artificial Sequence
  Description of Artificial Sequence: Synthetic oligonucleotide
gguuauaaugguuugauaa

SEQ ID NO: 111438 - RNA, 19 nt, Artificial Sequence
  Description of Artificial Sequence: Synthetic oligonucleotide
acgugggacaccuuuuacc

SEQ ID NO: 111439 - RNA, 19 nt, Artificial Sequence
  Description of Artificial Sequence: Synthetic oligonucleotide
aacgaaagguuccagugau

SEQ ID NO: 111440 - RNA, 19 nt, Artificial Sequence
  Description of Artificial Sequence: Synthetic oligonucleotide
auuucugguggauacauau

SEQ ID NO: 111441 - RNA, 19 nt, Artificial Sequence
  Description of Artificial Sequence: Synthetic oligonucleotide
gacgguuuuacuuucccac

SEQ ID NO: 111442 - RNA, 19 nt, Artificial Sequence
  Description of Artificial Sequence: Synthetic oligonucleotide
guauaaaagaggauauaag

SEQ ID NO: 111443 - RNA, 19 nt, Artificial Sequence
  Description of Artificial Sequence: Synthetic oligonucleotide
aucaguuaugcgugguccc

SEQ ID NO: 111444 - RNA, 19 nt, Artificial Sequence
  Description of Artificial Sequence: Synthetic oligonucleotide
uuagauauucuagaguauc

SEQ ID NO: 111445 - RNA, 19 nt, Artificial Sequence
  Description of Artificial Sequence: Synthetic oligonucleotide
auauacauuccuaucugcg

SEQ ID NO: 111446 - RNA, 19 nt, Artificial Sequence
  Description of Artificial Sequence: Synthetic oligonucleotide
agcugaaugguucaguggu

SEQ ID NO: 111447 - RNA, 19 nt, Artificial Sequence
  Description of Artificial Sequence: Synthetic oligonucleotide
ugaacuaaaccagucgagc

SEQ ID NO: 111448 - RNA, 19 nt, Artificial Sequence
  Description of Artificial Sequence: Synthetic oligonucleotide
uaugccccaacaaauuuga

SEQ ID NO: 111449 - RNA, 19 nt, Artificial Sequence
  Description of Artificial Sequence: Synthetic oligonucleotide
auccauaguggauugaccu

SEQ ID NO: 111450 - RNA, 19 nt, Artificial Sequence
  Description of Artificial Sequence: Synthetic oligonucleotide
gguggauacauaugaaccg

SEQ ID NO: 111451 - RNA, 19 nt, Artificial Sequence
  Description of Artificial Sequence: Synthetic oligonucleotide
auaacauacugugacaagu

SEQ ID NO: 111452 - RNA, 19 nt, Artificial Sequence
  Description of Artificial Sequence: Synthetic oligonucleotide
uuguauacugcggauagca

SEQ ID NO: 111453 - RNA, 19 nt, Artificial Sequence
  Description of Artificial Sequence: Synthetic oligonucleotide
auguuaaacuauguacagc

SEQ ID NO: 111454 - RNA, 19 nt, Artificial Sequence
  Description of Artificial Sequence: Synthetic oligonucleotide
uuuagacuccgcagagugg

SEQ ID NO: 111455 - RNA, 19 nt, Artificial Sequence
  Description of Artificial Sequence: Synthetic oligonucleotide
acauguuaaacuauguaca

SEQ ID NO: 111456 - RNA, 19 nt, Artificial Sequence
  Description of Artificial Sequence: Synthetic oligonucleotide
ugaauuaugggugaagcuu

SEQ ID NO: 111457 - RNA, 19 nt, Artificial Sequence
  Description of Artificial Sequence: Synthetic oligonucleotide
ugauuauaccaaauucuuc

SEQ ID NO: 111458 - RNA, 19 nt, Artificial Sequence
  Description of Artificial Sequence: Synthetic oligonucleotide
aagugcgauuucuucauga

SEQ ID NO: 111459 - RNA, 19 nt, Artificial Sequence
  Description of Artificial Sequence: Synthetic oligonucleotide
aagucucgagaucucagcu

SEQ ID NO: 111460 - RNA, 19 nt, Artificial Sequence
  Description of Artificial Sequence: Synthetic oligonucleotide
uguaucuauacuguccugu

SEQ ID NO: 111461 - RNA, 19 nt, Artificial Sequence
  Description of Artificial Sequence: Synthetic oligonucleotide
ucuaaggcaguccuguaau

SEQ ID NO: 111462 - RNA, 19 nt, Artificial Sequence
  Description of Artificial Sequence: Synthetic oligonucleotide
uggauuugaacugacccug

SEQ ID NO: 111463 - RNA, 19 nt, Artificial Sequence
  Description of Artificial Sequence: Synthetic oligonucleotide
uuugugaguaggaggggug

SEQ ID NO: 111464 - RNA, 19 nt, Artificial Sequence
  Description of Artificial Sequence: Synthetic oligonucleotide
uauaccucuauguggcuac

SEQ ID NO: 111465 - RNA, 19 nt, Artificial Sequence
  Description of Artificial Sequence: Synthetic oligonucleotide
ucuagcgggaaguccacag

SEQ ID NO: 111466 - RNA, 19 nt, Artificial Sequence
  Description of Artificial Sequence: Synthetic oligonucleotide
gugaaggauacguaaaauc

SEQ ID NO: 111467 - RNA, 19 nt, Artificial Sequence
  Description of Artificial Sequence: Synthetic oligonucleotide
uggacugauguaucuauac

SEQ ID NO: 111468 - RNA, 19 nt, Artificial Sequence
  Description of Artificial Sequence: Synthetic oligonucleotide
uauccauaguggauugacc

SEQ ID NO: 111469 - RNA, 19 nt, Artificial Sequence
  Description of Artificial Sequence: Synthetic oligonucleotide
aggacgguuuuacuuuccc

SEQ ID NO: 111470 - RNA, 19 nt, Artificial Sequence
  Description of Artificial Sequence: Synthetic oligonucleotide
ugccgucguaggaaaaucg

SEQ ID NO: 111471 - RNA, 19 nt, Artificial Sequence
  Description of Artificial Sequence: Synthetic oligonucleotide
ugugcaagagugcaauaaa

SEQ ID NO: 111472 - RNA, 19 nt, Artificial Sequence
  Description of Artificial Sequence: Synthetic oligonucleotide
auuggcugaauuaugggug

SEQ ID NO: 111473 - RNA, 19 nt, Artificial Sequence
  Description of Artificial Sequence: Synthetic oligonucleotide
guaggugaaugauaguaac

SEQ ID NO: 111474 - RNA, 19 nt, Artificial Sequence
  Description of Artificial Sequence: Synthetic oligonucleotide
uccuguaaugugcauuuac

SEQ ID NO: 111475 - RNA, 19 nt, Artificial Sequence
  Description of Artificial Sequence: Synthetic oligonucleotide
aaauacaugaaagccucaa

SEQ ID NO: 111476 - RNA, 19 nt, Artificial Sequence
  Description of Artificial Sequence: Synthetic oligonucleotide
aggugaaugauaguaacga

SEQ ID NO: 111477 - RNA, 19 nt, Artificial Sequence
  Description of Artificial Sequence: Synthetic oligonucleotide
ggauacguaaaauccaaug

SEQ ID NO: 111478 - RNA, 19 nt, Artificial Sequence
  Description of Artificial Sequence: Synthetic oligonucleotide
uguaagcauuaggagaugc

SEQ ID NO: 111479 - RNA, 19 nt, Artificial Sequence
  Description of Artificial Sequence: Synthetic oligonucleotide
ucguucgcugaacuaaacc

SEQ ID NO: 111480 - RNA, 19 nt, Artificial Sequence
  Description of Artificial Sequence: Synthetic oligonucleotide
agggauuugaggcuugacu

SEQ ID NO: 111481 - RNA, 19 nt, Artificial Sequence
  Description of Artificial Sequence: Synthetic oligonucleotide
uccgaaucugagaagcaga

SEQ ID NO: 111482 - RNA, 19 nt, Artificial Sequence
  Description of Artificial Sequence: Synthetic oligonucleotide
aucgaggugaucguuguuc

SEQ ID NO: 111483 - RNA, 19 nt, Artificial Sequence
  Description of Artificial Sequence: Synthetic oligonucleotide
uacuucuauagguggaaga

SEQ ID NO: 111484 - RNA, 19 nt, Artificial Sequence
  Description of Artificial Sequence: Synthetic oligonucleotide
ugcguggucccacugaagu

SEQ ID NO: 111485 - RNA, 19 nt, Artificial Sequence
  Description of Artificial Sequence: Synthetic oligonucleotide
uuuagagagucccgccgag

SEQ ID NO: 111486 - RNA, 19 nt, Artificial Sequence
  Description of Artificial Sequence: Synthetic oligonucleotide
ugucaaagguucucguuga

SEQ ID NO: 111487 - RNA, 19 nt, Artificial Sequence
  Description of Artificial Sequence: Synthetic oligonucleotide
cugaacuaaaccagucgag

SEQ ID NO: 111488 - RNA, 19 nt, Artificial Sequence
  Description of Artificial Sequence: Synthetic oligonucleotide
uuacgaaguccaguaagag

SEQ ID NO: 111489 - RNA, 19 nt, Artificial Sequence
  Description of Artificial Sequence: Synthetic oligonucleotide
uaguccguccuuugguugg

SEQ ID NO: 111490 - RNA, 19 nt, Artificial Sequence
  Description of Artificial Sequence: Synthetic oligonucleotide
ugaggguuauaaugguuug

SEQ ID NO: 111491 - RNA, 19 nt, Artificial Sequence
  Description of Artificial Sequence: Synthetic oligonucleotide
caaauuacgaaguccagua

SEQ ID NO: 111492 - RNA, 19 nt, Artificial Sequence
  Description of Artificial Sequence: Synthetic oligonucleotide
uuucugguggauacauaug

SEQ ID NO: 111493 - RNA, 19 nt, Artificial Sequence
  Description of Artificial Sequence: Synthetic oligonucleotide
gagcugaaugguucagugg

SEQ ID NO: 111494 - RNA, 19 nt, Artificial Sequence
  Description of Artificial Sequence: Synthetic oligonucleotide
guaggagcgcuucaguuug

SEQ ID NO: 111495 - RNA, 19 nt, Artificial Sequence
  Description of Artificial Sequence: Synthetic oligonucleotide
acaucaguuaugcgugguc

SEQ ID NO: 111496 - RNA, 19 nt, Artificial Sequence
  Description of Artificial Sequence: Synthetic oligonucleotide
uagaguauccauaguggau

SEQ ID NO: 111497 - RNA, 19 nt, Artificial Sequence
  Description of Artificial Sequence: Synthetic oligonucleotide
uucgcugaacuaaaccagu

SEQ ID NO: 111498 - RNA, 19 nt, Artificial Sequence
  Description of Artificial Sequence: Synthetic oligonucleotide
gaaggauacguaaaaucca

SEQ ID NO: 111499 - RNA, 19 nt, Artificial Sequence
  Description of Artificial Sequence: Synthetic oligonucleotide
ugccccaacaaauuugauc

SEQ ID NO: 111500 - RNA, 19 nt, Artificial Sequence
  Description of Artificial Sequence: Synthetic oligonucleotide
agauuuucuagcgggaagu

SEQ ID NO: 111501 - RNA, 19 nt, Artificial Sequence
  Description of Artificial Sequence: Synthetic oligonucleotide
uuucccgguugacugucgg

SEQ ID NO: 111502 - RNA, 19 nt, Artificial Sequence
  Description of Artificial Sequence: Synthetic oligonucleotide
ucuuuuggacugauguauc

SEQ ID NO: 111503 - RNA, 19 nt, Artificial Sequence
  Description of Artificial Sequence: Synthetic oligonucleotide
acugauguaucuauacugu

SEQ ID NO: 111504 - RNA, 19 nt, Artificial Sequence
  Description of Artificial Sequence: Synthetic oligonucleotide
ucguaggaaaaucguuuca

SEQ ID NO: 111505 - RNA, 19 nt, Artificial Sequence
  Description of Artificial Sequence: Synthetic oligonucleotide
uuaugcguggucccacuga

SEQ ID NO: 111506 - RNA, 19 nt, Artificial Sequence
  Description of Artificial Sequence: Synthetic oligonucleotide
agauauucuagaguaucca

SEQ ID NO: 111507 - RNA, 19 nt, Artificial Sequence
  Description of Artificial Sequence: Synthetic oligonucleotide
uuccgaaucugagaagcag

SEQ ID NO: 111508 - RNA, 19 nt, Artificial Sequence
  Description of Artificial Sequence: Synthetic oligonucleotide
uuggcugaauuauggguga

SEQ ID NO: 111509 - RNA, 19 nt, Artificial Sequence
  Description of Artificial Sequence: Synthetic oligonucleotide
cuagaguauccauagugga

SEQ ID NO: 111510 - RNA, 19 nt, Artificial Sequence
  Description of Artificial Sequence: Synthetic oligonucleotide
ucugcacuccugacguggg

SEQ ID NO: 111511 - RNA, 19 nt, Artificial Sequence
  Description of Artificial Sequence: Synthetic oligonucleotide
cagcgauccauuaucuuug

SEQ ID NO: 111512 - RNA, 19 nt, Artificial Sequence
  Description of Artificial Sequence: Synthetic oligonucleotide
aagucaucgaggugaucgu

SEQ ID NO: 111513 - RNA, 19 nt, Artificial Sequence
  Description of Artificial Sequence: Synthetic oligonucleotide
ucacccuuaugccccaaca

SEQ ID NO: 111514 - RNA, 19 nt, Artificial Sequence
  Description of Artificial Sequence: Synthetic oligonucleotide
ucccgguugacugucgggg

SEQ ID NO: 111515 - RNA, 19 nt, Artificial Sequence
  Description of Artificial Sequence: Synthetic oligonucleotide
auuacgaaguccaguaaga

SEQ ID NO: 111516 - RNA, 19 nt, Artificial Sequence
  Description of Artificial Sequence: Synthetic oligonucleotide
agcagcaaaucguucgcug

SEQ ID NO: 111517 - RNA, 19 nt, Artificial Sequence
  Description of Artificial Sequence: Synthetic oligonucleotide
uaugcguggucccacugaa

SEQ ID NO: 111518 - RNA, 19 nt, Artificial Sequence
  Description of Artificial Sequence: Synthetic oligonucleotide
aagugcgacaaugauggau

SEQ ID NO: 111519 - RNA, 19 nt, Artificial Sequence
  Description of Artificial Sequence: Synthetic oligonucleotide
ugagugaugucuggggaug

SEQ ID NO: 111520 - RNA, 19 nt, Artificial Sequence
  Description of Artificial Sequence: Synthetic oligonucleotide
aagaggauauaagcugcug

SEQ ID NO: 111521 - RNA, 19 nt, Artificial Sequence
  Description of Artificial Sequence: Synthetic oligonucleotide
gucgagcaguaccacauag

SEQ ID NO: 111522 - RNA, 19 nt, Artificial Sequence
  Description of Artificial Sequence: Synthetic oligonucleotide
guauacugcggauagcaaa

SEQ ID NO: 111523 - RNA, 19 nt, Artificial Sequence
  Description of Artificial Sequence: Synthetic oligonucleotide
agaguauccauaguggauu

SEQ ID NO: 111524 - RNA, 19 nt, Artificial Sequence
  Description of Artificial Sequence: Synthetic oligonucleotide
uuugguugguucucaccga

SEQ ID NO: 111525 - RNA, 19 nt, Artificial Sequence
  Description of Artificial Sequence: Synthetic oligonucleotide
aguuccgguugaaauaguc

SEQ ID NO: 111526 - RNA, 19 nt, Artificial Sequence
  Description of Artificial Sequence: Synthetic oligonucleotide
uccccaaauuacgaagucc

SEQ ID NO: 111527 - RNA, 19 nt, Artificial Sequence
  Description of Artificial Sequence: Synthetic oligonucleotide
aaaaugagaaaaggcuaua

SEQ ID NO: 111528 - RNA, 19 nt, Artificial Sequence
  Description of Artificial Sequence: Synthetic oligonucleotide
augauuauaccaaauucuu

SEQ ID NO: 111529 - RNA, 19 nt, Artificial Sequence
  Description of Artificial Sequence: Synthetic oligonucleotide
aguaggagcgcuucaguuu

SEQ ID NO: 111530 - RNA, 19 nt, Artificial Sequence
  Description of Artificial Sequence: Synthetic oligonucleotide
ucaucgaggugaucguugu

SEQ ID NO: 111531 - RNA, 19 nt, Artificial Sequence
  Description of Artificial Sequence: Synthetic oligonucleotide
gguuccgaaucugagaagc

SEQ ID NO: 111532 - RNA, 19 nt, Artificial Sequence
  Description of Artificial Sequence: Synthetic oligonucleotide
cauaguggauugaccuggg

SEQ ID NO: 111533 - RNA, 19 nt, Artificial Sequence
  Description of Artificial Sequence: Synthetic oligonucleotide
auaguaacgaaagguucca

SEQ ID NO: 111534 - RNA, 19 nt, Artificial Sequence
  Description of Artificial Sequence: Synthetic oligonucleotide
ugcgaagugcgauuucuuc

SEQ ID NO: 111535 - RNA, 19 nt, Artificial Sequence
  Description of Artificial Sequence: Synthetic oligonucleotide
guauccauaguggauugac

SEQ ID NO: 111536 - RNA, 19 nt, Artificial Sequence
  Description of Artificial Sequence: Synthetic oligonucleotide
acuaaaccagucgagcagu

SEQ ID NO: 111537 - RNA, 19 nt, Artificial Sequence
  Description of Artificial Sequence: Synthetic oligonucleotide
cuugcacucagcucuccug

SEQ ID NO: 111538 - RNA, 19 nt, Artificial Sequence
  Description of Artificial Sequence: Synthetic oligonucleotide
ucgagcaguaccacauagu

SEQ ID NO: 111539 - RNA, 19 nt, Artificial Sequence
  Description of Artificial Sequence: Synthetic oligonucleotide
aacaggauugagguuccga

SEQ ID NO: 111540 - RNA, 19 nt, Artificial Sequence
  Description of Artificial Sequence: Synthetic oligonucleotide
cugauguaucuauacuguc

SEQ ID NO: 111541 - RNA, 19 nt, Artificial Sequence
  Description of Artificial Sequence: Synthetic oligonucleotide
agcagugaauaggaaauga

SEQ ID NO: 111542 - RNA, 19 nt, Artificial Sequence
  Description of Artificial Sequence: Synthetic oligonucleotide
agcgaucugaugugcaaga

SEQ ID NO: 111543 - RNA, 19 nt, Artificial Sequence
  Description of Artificial Sequence: Synthetic oligonucleotide
gcuacaucaguuaugcgug

SEQ ID NO: 111544 - RNA, 19 nt, Artificial Sequence
  Description of Artificial Sequence: Synthetic oligonucleotide
guaucuauacuguccuguc

SEQ ID NO: 111545 - RNA, 19 nt, Artificial Sequence
  Description of Artificial Sequence: Synthetic oligonucleotide
ucggccaguuaccaauucu

SEQ ID NO: 111546 - RNA, 19 nt, Artificial Sequence
  Description of Artificial Sequence: Synthetic oligonucleotide
gauauucuagaguauccau

SEQ ID NO: 111547 - RNA, 19 nt, Artificial Sequence
  Description of Artificial Sequence: Synthetic oligonucleotide
guagugaccuccauccagc

SEQ ID NO: 111548 - RNA, 19 nt, Artificial Sequence
  Description of Artificial Sequence: Synthetic oligonucleotide
agcaaaucguucgcugaac

SEQ ID NO: 111549 - RNA, 19 nt, Artificial Sequence
  Description of Artificial Sequence: Synthetic oligonucleotide
aucugaugugcaagagugc

SEQ ID NO: 111550 - RNA, 19 nt, Artificial Sequence
  Description of Artificial Sequence: Synthetic oligonucleotide
aggcuauagcagugaauag

SEQ ID NO: 111551 - RNA, 19 nt, Artificial Sequence
  Description of Artificial Sequence: Synthetic oligonucleotide
aaccagucgagcaguacca

SEQ ID NO: 111552 - RNA, 19 nt, Artificial Sequence
  Description of Artificial Sequence: Synthetic oligonucleotide
ugauuauauggugcuaaua

SEQ ID NO: 111553 - RNA, 19 nt, Artificial Sequence
  Description of Artificial Sequence: Synthetic oligonucleotide
acgguuuuacuuucccacu

SEQ ID NO: 111554 - RNA, 19 nt, Artificial Sequence
  Description of Artificial Sequence: Synthetic oligonucleotide
ucuuccgauugucagccuu

SEQ ID NO: 111555 - RNA, 19 nt, Artificial Sequence
  Description of Artificial Sequence: Synthetic oligonucleotide
aggguuauaaugguuugau

SEQ ID NO: 111556 - RNA, 19 nt, Artificial Sequence
  Description of Artificial Sequence: Synthetic oligonucleotide
uacugcggauagcaaagaa

SEQ ID NO: 111557 - RNA, 19 nt, Artificial Sequence
  Description of Artificial Sequence: Synthetic oligonucleotide
cucguugagccuugcuugc

SEQ ID NO: 111558 - RNA, 19 nt, Artificial Sequence
  Description of Artificial Sequence: Synthetic oligonucleotide
cuaguccguccuuugguug

SEQ ID NO: 111559 - RNA, 19 nt, Artificial Sequence
  Description of Artificial Sequence: Synthetic oligonucleotide
uuaaagucuuuuggacuga

SEQ ID NO: 111560 - RNA, 19 nt, Artificial Sequence
  Description of Artificial Sequence: Synthetic oligonucleotide
uugguugguucucaccgau

SEQ ID NO: 111561 - RNA, 19 nt, Artificial Sequence
  Description of Artificial Sequence: Synthetic oligonucleotide
ucuaguccguccuuugguu

SEQ ID NO: 111562 - RNA, 19 nt, Artificial Sequence
  Description of Artificial Sequence: Synthetic oligonucleotide
ugguggaacgauucaggaa

SEQ ID NO: 111563 - RNA, 19 nt, Artificial Sequence
  Description of Artificial Sequence: Synthetic oligonucleotide
gaaccguguugguagguga

SEQ ID NO: 111564 - RNA, 19 nt, Artificial Sequence
  Description of Artificial Sequence: Synthetic oligonucleotide
cuagcggcaaugauaaaua

SEQ ID NO: 111565 - RNA, 19 nt, Artificial Sequence
  Description of Artificial Sequence: Synthetic oligonucleotide
ucaguuaugcgugguccca

SEQ ID NO: 111566 - RNA, 19 nt, Artificial Sequence
  Description of Artificial Sequence: Synthetic oligonucleotide
auauucuagaguauccaua

SEQ ID NO: 111567 - RNA, 19 nt, Artificial Sequence
  Description of Artificial Sequence: Synthetic oligonucleotide
cuaaggcaguccuguaaug

SEQ ID NO: 111568 - RNA, 19 nt, Artificial Sequence
  Description of Artificial Sequence: Synthetic oligonucleotide
uagcggcaaugauaaauac

SEQ ID NO: 111569 - RNA, 19 nt, Artificial Sequence
  Description of Artificial Sequence: Synthetic oligonucleotide
acggucaaccuguggaaca

SEQ ID NO: 111570 - RNA, 19 nt, Artificial Sequence
  Description of Artificial Sequence: Synthetic oligonucleotide
cugcguuagauauucuaga

SEQ ID NO: 111571 - RNA, 19 nt, Artificial Sequence
  Description of Artificial Sequence: Synthetic oligonucleotide
auucuagaguauccauagu

SEQ ID NO: 111572 - RNA, 19 nt, Artificial Sequence
  Description of Artificial Sequence: Synthetic oligonucleotide
ucgcugaacuaaaccaguc

SEQ ID NO: 111573 - RNA, 19 nt, Artificial Sequence
  Description of Artificial Sequence: Synthetic oligonucleotide
gaagugcgauuucuucaug

SEQ ID NO: 111574 - RNA, 19 nt, Artificial Sequence
  Description of Artificial Sequence: Synthetic oligonucleotide
cauagccucccuccaacac

SEQ ID NO: 111575 - RNA, 19 nt, Artificial Sequence
  Description of Artificial Sequence: Synthetic oligonucleotide
augugcaagagugcaauaa

SEQ ID NO: 111576 - RNA, 19 nt, Artificial Sequence
  Description of Artificial Sequence: Synthetic oligonucleotide
ucguuucagguguaccaac

SEQ ID NO: 111577 - RNA, 19 nt, Artificial Sequence
  Description of Artificial Sequence: Synthetic oligonucleotide
guucugccgcuuuaaaguc

SEQ ID NO: 111578 - RNA, 19 nt, Artificial Sequence
  Description of Artificial Sequence: Synthetic oligonucleotide
auguaucuauacuguccug

SEQ ID NO: 111579 - RNA, 19 nt, Artificial Sequence
  Description of Artificial Sequence: Synthetic oligonucleotide
acauaugaaccguguuggu

SEQ ID NO: 111580 - RNA, 19 nt, Artificial Sequence
  Description of Artificial Sequence: Synthetic oligonucleotide
gcaguuccgguugaaauag

SEQ ID NO: 111581 - RNA, 19 nt, Artificial Sequence
  Description of Artificial Sequence: Synthetic oligonucleotide
uaguaacgaaagguuccag

SEQ ID NO: 111582 - RNA, 19 nt, Artificial Sequence
  Description of Artificial Sequence: Synthetic oligonucleotide
cuuuagagagucccgccga

SEQ ID NO: 111583 - RNA, 19 nt, Artificial Sequence
  Description of Artificial Sequence: Synthetic oligonucleotide
ccauaguggauugaccugg

SEQ ID NO: 111584 - RNA, 19 nt, Artificial Sequence
  Description of Artificial Sequence: Synthetic oligonucleotide
agcuaccuagaaaaggcca

SEQ ID NO: 111585 - RNA, 19 nt, Artificial Sequence
  Description of Artificial Sequence: Synthetic oligonucleotide
uuccuaucugcguuagaua

SEQ ID NO: 111586 - RNA, 19 nt, Artificial Sequence
  Description of Artificial Sequence: Synthetic oligonucleotide
uccuuaugccucuuccgau

SEQ ID NO: 111587 - RNA, 19 nt, Artificial Sequence
  Description of Artificial Sequence: Synthetic oligonucleotide
aguuaugcguggucccacu

SEQ ID NO: 111588 - RNA, 19 nt, Artificial Sequence
  Description of Artificial Sequence: Synthetic oligonucleotide
guauuccccaaauuacgaa

SEQ ID NO: 111589 - RNA, 19 nt, Artificial Sequence
  Description of Artificial Sequence: Synthetic oligonucleotide
auguggcuacaucaguuau

SEQ ID NO: 111590 - RNA, 19 nt, Artificial Sequence
  Description of Artificial Sequence: Synthetic oligonucleotide
cuacuucuauagguggaag

SEQ ID NO: 111591 - RNA, 19 nt, Artificial Sequence
  Description of Artificial Sequence: Synthetic oligonucleotide
gucaucgaggugaucguug

SEQ ID NO: 111592 - RNA, 19 nt, Artificial Sequence
  Description of Artificial Sequence: Synthetic oligonucleotide
accuuuuaccuuccacaga

SEQ ID NO: 111593 - RNA, 19 nt, Artificial Sequence
  Description of Artificial Sequence: Synthetic oligonucleotide
ugaguucauguaacaggua

SEQ ID NO: 111594 - RNA, 19 nt, Artificial Sequence
  Description of Artificial Sequence: Synthetic oligonucleotide
gucaaagguucucguugag

SEQ ID NO: 111595 - RNA, 19 nt, Artificial Sequence
  Description of Artificial Sequence: Synthetic oligonucleotide
guuaugcguggucccacug

SEQ ID NO: 111596 - RNA, 19 nt, Artificial Sequence
  Description of Artificial Sequence: Synthetic oligonucleotide
aaaccagcgcugccuugcu

SEQ ID NO: 111597 - RNA, 19 nt, Artificial Sequence
  Description of Artificial Sequence: Synthetic oligonucleotide
uaaaccagucgagcaguac

SEQ ID NO: 111598 - RNA, 19 nt, Artificial Sequence
  Description of Artificial Sequence: Synthetic oligonucleotide
ccgguugaaauagucagcc

SEQ ID NO: 111599 - RNA, 19 nt, Artificial Sequence
  Description of Artificial Sequence: Synthetic oligonucleotide
auuaugggugaagcuucag

SEQ ID NO: 111600 - RNA, 19 nt, Artificial Sequence
  Description of Artificial Sequence: Synthetic oligonucleotide
caguguagugaccuccauc

SEQ ID NO: 111601 - RNA, 19 nt, Artificial Sequence
  Description of Artificial Sequence: Synthetic oligonucleotide
uacaucaguuaugcguggu

SEQ ID NO: 111602 - RNA, 19 nt, Artificial Sequence
  Description of Artificial Sequence: Synthetic oligonucleotide
agguuccgaaucugagaag

SEQ ID NO: 111603 - RNA, 19 nt, Artificial Sequence
  Description of Artificial Sequence: Synthetic oligonucleotide
acgauucaggaagaacucu

SEQ ID NO: 111604 - RNA, 19 nt, Artificial Sequence
  Description of Artificial Sequence: Synthetic oligonucleotide
agucucgagaucucagcuu

SEQ ID NO: 111605 - RNA, 19 nt, Artificial Sequence
  Description of Artificial Sequence: Synthetic oligonucleotide
guuaaacuauguacagcga

SEQ ID NO: 111606 - RNA, 19 nt, Artificial Sequence
  Description of Artificial Sequence: Synthetic oligonucleotide
uaccuagaaaaggccaaaa

SEQ ID NO: 111607 - RNA, 19 nt, Artificial Sequence
  Description of Artificial Sequence: Synthetic oligonucleotide
aucguucgcugaacuaaac

SEQ ID NO: 111608 - RNA, 19 nt, Artificial Sequence
  Description of Artificial Sequence: Synthetic oligonucleotide
auaguggauugaccuggga

SEQ ID NO: 111609 - RNA, 19 nt, Artificial Sequence
  Description of Artificial Sequence: Synthetic oligonucleotide
cauuaggagaugcaccucu

SEQ ID NO: 111610 - RNA, 19 nt, Artificial Sequence
  Description of Artificial Sequence: Synthetic oligonucleotide
gaggguuauaaugguuuga

SEQ ID NO: 111611 - RNA, 19 nt, Artificial Sequence
  Description of Artificial Sequence: Synthetic oligonucleotide
gaggugaucguuguucucu

SEQ ID NO: 111612 - RNA, 19 nt, Artificial Sequence
  Description of Artificial Sequence: Synthetic oligonucleotide
guuguauacugcggauagc

SEQ ID NO: 111613 - RNA, 19 nt, Artificial Sequence
  Description of Artificial Sequence: Synthetic oligonucleotide
aucguuucagguguaccaa

SEQ ID NO: 111614 - RNA, 19 nt, Artificial Sequence
  Description of Artificial Sequence: Synthetic oligonucleotide
caggacgguuuuacuuucc

SEQ ID NO: 111615 - RNA, 19 nt, Artificial Sequence
  Description of Artificial Sequence: Synthetic oligonucleotide
cuuguggaugcuagcggca

SEQ ID NO: 111616 - RNA, 19 nt, Artificial Sequence
  Description of Artificial Sequence: Synthetic oligonucleotide
aucuucaggcaaccucacu

SEQ ID NO: 111617 - RNA, 19 nt, Artificial Sequence
  Description of Artificial Sequence: Synthetic oligonucleotide
gguauuccccaaauuacga

SEQ ID NO: 111618 - RNA, 19 nt, Artificial Sequence
  Description of Artificial Sequence: Synthetic oligonucleotide
ccucuacacagccagucgc

SEQ ID NO: 111619 - RNA, 19 nt, Artificial Sequence
  Description of Artificial Sequence: Synthetic oligonucleotide
ggaacgauucaggaagaac

SEQ ID NO: 111620 - RNA, 19 nt, Artificial Sequence
  Description of Artificial Sequence: Synthetic oligonucleotide
ggugaaugauaguaacgaa

SEQ ID NO: 111621 - RNA, 19 nt, Artificial Sequence
  Description of Artificial Sequence: Synthetic oligonucleotide
gauagcaaagaagccaguu

SEQ ID NO: 111622 - RNA, 19 nt, Artificial Sequence
  Description of Artificial Sequence: Synthetic oligonucleotide
aggcuugacuuugugagua

SEQ ID NO: 111623 - RNA, 19 nt, Artificial Sequence
  Description of Artificial Sequence: Synthetic oligonucleotide
ugguacaauucuccccauu

SEQ ID NO: 111624 - RNA, 19 nt, Artificial Sequence
  Description of Artificial Sequence: Synthetic oligonucleotide
cagcgaucugaugugcaag

SEQ ID NO: 111625 - RNA, 19 nt, Artificial Sequence
  Description of Artificial Sequence: Synthetic oligonucleotide
uccguccuuugguugguuc

SEQ ID NO: 111626 - RNA, 19 nt, Artificial Sequence
  Description of Artificial Sequence: Synthetic oligonucleotide
gcgaagugcgauuucuuca

SEQ ID NO: 111627 - RNA, 19 nt, Artificial Sequence
  Description of Artificial Sequence: Synthetic oligonucleotide
uccaugcgaagugcgauuu

SEQ ID NO: 111628 - RNA, 19 nt, Artificial Sequence
  Description of Artificial Sequence: Synthetic oligonucleotide
cauaugaaccguguuggua

SEQ ID NO: 111629 - RNA, 19 nt, Artificial Sequence
  Description of Artificial Sequence: Synthetic oligonucleotide
caaaucguucgcugaacua

SEQ ID NO: 111630 - RNA, 19 nt, Artificial Sequence
  Description of Artificial Sequence: Synthetic oligonucleotide
ggcggcaauuuccagaucu

SEQ ID NO: 111631 - RNA, 19 nt, Artificial Sequence
  Description of Artificial Sequence: Synthetic oligonucleotide
gggauuugaggcuugacuu

SEQ ID NO: 111632 - RNA, 19 nt, Artificial Sequence
  Description of Artificial Sequence: Synthetic oligonucleotide
cguucgcugaacuaaacca

SEQ ID NO: 111633 - RNA, 19 nt, Artificial Sequence
  Description of Artificial Sequence: Synthetic oligonucleotide
uggaacgauucaggaagaa

SEQ ID NO: 111634 - RNA, 19 nt, Artificial Sequence
  Description of Artificial Sequence: Synthetic oligonucleotide
ccaauaacauacugugaca

SEQ ID NO: 111635 - RNA, 19 nt, Artificial Sequence
  Description of Artificial Sequence: Synthetic oligonucleotide
agugaccuuagcauuuguu

SEQ ID NO: 111636 - RNA, 19 nt, Artificial Sequence
  Description of Artificial Sequence: Synthetic oligonucleotide
cccaguauucuggaauucc

SEQ ID NO: 111637 - RNA, 19 nt, Artificial Sequence
  Description of Artificial Sequence: Synthetic oligonucleotide
gaguaggagcgcuucaguu

SEQ ID NO: 111638 - RNA, 19 nt, Artificial Sequence
  Description of Artificial Sequence: Synthetic oligonucleotide
cacuucgagcucuugucaa

SEQ ID NO: 111639 - RNA, 19 nt, Artificial Sequence
  Description of Artificial Sequence: Synthetic oligonucleotide
cgccguagugguuugaaac

SEQ ID NO: 111640 - RNA, 19 nt, Artificial Sequence
  Description of Artificial Sequence: Synthetic oligonucleotide
ggcugaauuaugggugaag

SEQ ID NO: 111641 - RNA, 19 nt, Artificial Sequence
  Description of Artificial Sequence: Synthetic oligonucleotide
auacugcggauagcaaaga

SEQ ID NO: 111642 - RNA, 19 nt, Artificial Sequence
  Description of Artificial Sequence: Synthetic oligonucleotide
cccaaauuacgaaguccag

SEQ ID NO: 111643 - RNA, 19 nt, Artificial Sequence
  Description of Artificial Sequence: Synthetic oligonucleotide
ucccguucggcagggauuu

SEQ ID NO: 111644 - RNA, 19 nt, Artificial Sequence
  Description of Artificial Sequence: Synthetic oligonucleotide
aggugaucguuguucucuu

SEQ ID NO: 111645 - RNA, 19 nt, Artificial Sequence
  Description of Artificial Sequence: Synthetic oligonucleotide
gagagucccgccgagcucu

SEQ ID NO: 111646 - RNA, 19 nt, Artificial Sequence
  Description of Artificial Sequence: Synthetic oligonucleotide
ggccaguuaccaauucugc

SEQ ID NO: 111647 - RNA, 19 nt, Artificial Sequence
  Description of Artificial Sequence: Synthetic oligonucleotide
ucguugagccuugcuugca

SEQ ID NO: 111648 - RNA, 19 nt, Artificial Sequence
  Description of Artificial Sequence: Synthetic oligonucleotide
cuuccgauugucagccuua

SEQ ID NO: 111649 - RNA, 19 nt, Artificial Sequence
  Description of Artificial Sequence: Synthetic oligonucleotide
gguuugauaacaacagaau

SEQ ID NO: 111650 - RNA, 19 nt, Artificial Sequence
  Description of Artificial Sequence: Synthetic oligonucleotide
gaggcuugacuuugugagu

SEQ ID NO: 111651 - RNA, 19 nt, Artificial Sequence
  Description of Artificial Sequence: Synthetic oligonucleotide
ucucgagaucucagcuuuu

SEQ ID NO: 111652 - RNA, 19 nt, Artificial Sequence
  Description of Artificial Sequence: Synthetic oligonucleotide
aggauacguaaaauccaau

SEQ ID NO: 111653 - RNA, 19 nt, Artificial Sequence
  Description of Artificial Sequence: Synthetic oligonucleotide
caguuaugcguggucccac

SEQ ID NO: 111654 - RNA, 19 nt, Artificial Sequence
  Description of Artificial Sequence: Synthetic oligonucleotide
uccauccagcccgccguag

SEQ ID NO: 111655 - RNA, 19 nt, Artificial Sequence
  Description of Artificial Sequence: Synthetic oligonucleotide
ggacugauguaucuauacu

SEQ ID NO: 111656 - RNA, 19 nt, Artificial Sequence
  Description of Artificial Sequence: Synthetic oligonucleotide
guuccgaaucugagaagca

SEQ ID NO: 111657 - RNA, 19 nt, Artificial Sequence
  Description of Artificial Sequence: Synthetic oligonucleotide
cacccuuaugccccaacaa

SEQ ID NO: 111658 - RNA, 19 nt, Artificial Sequence
  Description of Artificial Sequence: Synthetic oligonucleotide
uuccgauugucagccuuau

SEQ ID NO: 111659 - RNA, 19 nt, Artificial Sequence
  Description of Artificial Sequence: Synthetic oligonucleotide
caugcgaagugcgauuucu

SEQ ID NO: 111660 - RNA, 19 nt, Artificial Sequence
  Description of Artificial Sequence: Synthetic oligonucleotide
augguucaguggucuuggu

SEQ ID NO: 111661 - RNA, 19 nt, Artificial Sequence
  Description of Artificial Sequence: Synthetic oligonucleotide
gauugaccugggacuaaaa

SEQ ID NO: 111662 - RNA, 19 nt, Artificial Sequence
  Description of Artificial Sequence: Synthetic oligonucleotide
ccguagugguuugaaacag

SEQ ID NO: 111663 - RNA, 19 nt, Artificial Sequence
  Description of Artificial Sequence: Synthetic oligonucleotide
ggagaugcaccucugugau

SEQ ID NO: 111664 - RNA, 19 nt, Artificial Sequence
  Description of Artificial Sequence: Synthetic oligonucleotide
cagucgagcaguaccacau

SEQ ID NO: 111665 - RNA, 19 nt, Artificial Sequence
  Description of Artificial Sequence: Synthetic oligonucleotide
gugauuggaucaagaaacu

SEQ ID NO: 111666 - RNA, 19 nt, Artificial Sequence
  Description of Artificial Sequence: Synthetic oligonucleotide
ggagugaccuuagcauuug

SEQ ID NO: 111667 - RNA, 19 nt, Artificial Sequence
  Description of Artificial Sequence: Synthetic oligonucleotide
cuaccuagaaaaggccaaa

SEQ ID NO: 111668 - RNA, 19 nt, Artificial Sequence
  Description of Artificial Sequence: Synthetic oligonucleotide
gcgggaaguccacagaugu

SEQ ID NO: 111669 - RNA, 19 nt, Artificial Sequence
  Description of Artificial Sequence: Synthetic oligonucleotide
cuaaaccagucgagcagua

SEQ ID NO: 111670 - RNA, 19 nt, Artificial Sequence
  Description of Artificial Sequence: Synthetic oligonucleotide
ggaugaguaggagcgcuuc

SEQ ID NO: 111671 - RNA, 19 nt, Artificial Sequence
  Description of Artificial Sequence: Synthetic oligonucleotide
ccugauuauauggugcuaa

SEQ ID NO: 111672 - RNA, 19 nt, Artificial Sequence
  Description of Artificial Sequence: Synthetic oligonucleotide
gcagcgauccauuaucuuu

SEQ ID NO: 111673 - RNA, 19 nt, Artificial Sequence
  Description of Artificial Sequence: Synthetic oligonucleotide
cugauuauauggugcuaau

SEQ ID NO: 111674 - RNA, 19 nt, Artificial Sequence
  Description of Artificial Sequence: Synthetic oligonucleotide
guggaacgauucaggaaga

SEQ ID NO: 111675 - RNA, 19 nt, Artificial Sequence
  Description of Artificial Sequence: Synthetic oligonucleotide
cugcaauggcugcaguaaa

SEQ ID NO: 111676 - RNA, 19 nt, Artificial Sequence
  Description of Artificial Sequence: Synthetic oligonucleotide
uggucccaagcagcaaauc

SEQ ID NO: 111677 - RNA, 19 nt, Artificial Sequence
  Description of Artificial Sequence: Synthetic oligonucleotide
ucccgccgagcucugcaau

SEQ ID NO: 111678 - RNA, 19 nt, Artificial Sequence
  Description of Artificial Sequence: Synthetic oligonucleotide
gcguuagauauucuagagu

SEQ ID NO: 111679 - RNA, 19 nt, Artificial Sequence
  Description of Artificial Sequence: Synthetic oligonucleotide
gcaaaucguucgcugaacu

SEQ ID NO: 111680 - RNA, 19 nt, Artificial Sequence
  Description of Artificial Sequence: Synthetic oligonucleotide
aaacugcucuuuggaccaa

SEQ ID NO: 111681 - RNA, 19 nt, Artificial Sequence
  Description of Artificial Sequence: Synthetic oligonucleotide
ugcuuccaccugccgucgu

SEQ ID NO: 111682 - RNA, 19 nt, Artificial Sequence
  Description of Artificial Sequence: Synthetic oligonucleotide
ccuugcuugcacucagcuc

SEQ ID NO: 111683 - RNA, 19 nt, Artificial Sequence
  Description of Artificial Sequence: Synthetic oligonucleotide
ggugaucguuguucucuuc

SEQ ID NO: 111684 - RNA, 19 nt, Artificial Sequence
  Description of Artificial Sequence: Synthetic oligonucleotide
accugauuauauggugcua

SEQ ID NO: 111685 - RNA, 19 nt, Artificial Sequence
  Description of Artificial Sequence: Synthetic oligonucleotide
caguuaccaauucugcauu

SEQ ID NO: 111686 - RNA, 19 nt, Artificial Sequence
  Description of Artificial Sequence: Synthetic oligonucleotide
aguccguccuuugguuggu

SEQ ID NO: 111687 - RNA, 19 nt, Artificial Sequence
  Description of Artificial Sequence: Synthetic oligonucleotide
caccgaugucauguucuuc

SEQ ID NO: 111688 - RNA, 19 nt, Artificial Sequence
  Description of Artificial Sequence: Synthetic oligonucleotide
cuuuuagacuccgcagagu

SEQ ID NO: 111689 - RNA, 19 nt, Artificial Sequence
  Description of Artificial Sequence: Synthetic oligonucleotide
cguuucagguguaccaaca

SEQ ID NO: 111690 - RNA, 19 nt, Artificial Sequence
  Description of Artificial Sequence: Synthetic oligonucleotide
ccgcagaguggucccaagc

SEQ ID NO: 111691 - RNA, 19 nt, Artificial Sequence
  Description of Artificial Sequence: Synthetic oligonucleotide
agguucucguugagccuug

SEQ ID NO: 111692 - RNA, 19 nt, Artificial Sequence
  Description of Artificial Sequence: Synthetic oligonucleotide
ggagcauuacacaggcacu

SEQ ID NO: 111693 - RNA, 19 nt, Artificial Sequence
  Description of Artificial Sequence: Synthetic oligonucleotide
ggauugaccugggacuaaa

SEQ ID NO: 111694 - RNA, 19 nt, Artificial Sequence
  Description of Artificial Sequence: Synthetic oligonucleotide
augcgaagugcgauuucuu

SEQ ID NO: 111695 - RNA, 19 nt, Artificial Sequence
  Description of Artificial Sequence: Synthetic oligonucleotide
agccagucgcagcgaucca

SEQ ID NO: 111696 - RNA, 19 nt, Artificial Sequence
  Description of Artificial Sequence: Synthetic oligonucleotide
cgugggacaccuuuuaccu

SEQ ID NO: 111697 - RNA, 19 nt, Artificial Sequence
  Description of Artificial Sequence: Synthetic oligonucleotide
agcccgccguagugguuug

SEQ ID NO: 111698 - RNA, 19 nt, Artificial Sequence
  Description of Artificial Sequence: Synthetic oligonucleotide
gccaaauguggagcauuac

SEQ ID NO: 111699 - RNA, 19 nt, Artificial Sequence
  Description of Artificial Sequence: Synthetic oligonucleotide
caccugccgucguaggaaa

SEQ ID NO: 111700 - RNA, 19 nt, Artificial Sequence
  Description of Artificial Sequence: Synthetic oligonucleotide
acgaaagguuccagugauu

SEQ ID NO: 111701 - RNA, 19 nt, Artificial Sequence
  Description of Artificial Sequence: Synthetic oligonucleotide
cggcaaugauaaauacaug

SEQ ID NO: 111702 - RNA, 19 nt, Artificial Sequence
  Description of Artificial Sequence: Synthetic oligonucleotide
ccgccgagcucugcaaugg

SEQ ID NO: 111703 - RNA, 19 nt, Artificial Sequence
  Description of Artificial Sequence: Synthetic oligonucleotide
cccgccgagcucugcaaug

SEQ ID NO: 111704 - RNA, 19 nt, Artificial Sequence
  Description of Artificial Sequence: Synthetic oligonucleotide
cccauaaccuauaccucua

SEQ ID NO: 111705 - RNA, 19 nt, Artificial Sequence
  Description of Artificial Sequence: Synthetic oligonucleotide
cugccgcuuuaaagucauc

SEQ ID NO: 111706 - RNA, 19 nt, Artificial Sequence
  Description of Artificial Sequence: Synthetic oligonucleotide
ccgguugacugucgggguc

SEQ ID NO: 111707 - RNA, 19 nt, Artificial Sequence
  Description of Artificial Sequence: Synthetic oligonucleotide
gucccgccgagcucugcaa

SEQ ID NO: 111708 - RNA, 19 nt, Artificial Sequence
  Description of Artificial Sequence: Synthetic oligonucleotide
cggucaaccuguggaacag

SEQ ID NO: 111709 - RNA, 19 nt, Artificial Sequence
  Description of Artificial Sequence: Synthetic oligonucleotide
gcggcaauuuccagaucuc

SEQ ID NO: 111710 - RNA, 19 nt, Artificial Sequence
  Description of Artificial Sequence: Synthetic oligonucleotide
cuccaugcgaagugcgauu

SEQ ID NO: 111711 - RNA, 19 nt, Artificial Sequence
  Description of Artificial Sequence: Synthetic oligonucleotide
gagucccgccgagcucugc

SEQ ID NO: 111712 - RNA, 19 nt, Artificial Sequence
  Description of Artificial Sequence: Synthetic oligonucleotide
ggcaaccucacuguugguu

SEQ ID NO: 111713 - RNA, 19 nt, Artificial Sequence
  Description of Artificial Sequence: Synthetic oligonucleotide
cgucguaggaaaaucguuu

SEQ ID NO: 111714 - RNA, 19 nt, Artificial Sequence
  Description of Artificial Sequence: Synthetic oligonucleotide
ggaugcuagcggcaaugau

SEQ ID NO: 111715 - RNA, 19 nt, Artificial Sequence
  Description of Artificial Sequence: Synthetic oligonucleotide
ccaugcgaagugcgauuuc

SEQ ID NO: 111716 - RNA, 19 nt, Artificial Sequence
  Description of Artificial Sequence: Synthetic oligonucleotide
uccugacgugggacaccuu

SEQ ID NO: 111717 - RNA, 19 nt, Artificial Sequence
  Description of Artificial Sequence: Synthetic oligonucleotide
gccgucguaggaaaaucgu

SEQ ID NO: 111718 - RNA, 19 nt, Artificial Sequence
  Description of Artificial Sequence: Synthetic oligonucleotide
agagucccgccgagcucug

SEQ ID NO: 111719 - RNA, 19 nt, Artificial Sequence
  Description of Artificial Sequence: Synthetic oligonucleotide
gcguggucccacugaagua

SEQ ID NO: 111720 - RNA, 19 nt, Artificial Sequence
  Description of Artificial Sequence: Synthetic oligonucleotide
gcauuuacuuguggaugcu

SEQ ID NO: 111721 - RNA, 19 nt, Artificial Sequence
  Description of Artificial Sequence: Synthetic oligonucleotide
caguuccgguugaaauagu

SEQ ID NO: 111722 - RNA, 19 nt, Artificial Sequence
  Description of Artificial Sequence: Synthetic oligonucleotide
ccugacgugggacaccuuu

SEQ ID NO: 111723 - RNA, 19 nt, Artificial Sequence
  Description of Artificial Sequence: Synthetic oligonucleotide
gcgauccauuaucuuugua

SEQ ID NO: 111724 - RNA, 19 nt, Artificial Sequence
  Description of Artificial Sequence: Synthetic oligonucleotide
auggcgcaggacgguuuua

SEQ ID NO: 111725 - RNA, 19 nt, Artificial Sequence
  Description of Artificial Sequence: Synthetic oligonucleotide
cgguugaaauagucagcca

SEQ ID NO: 111726 - RNA, 19 nt, Artificial Sequence
  Description of Artificial Sequence: Synthetic oligonucleotide
gucccguucggcagggauu

SEQ ID NO: 111727 - RNA, 19 nt, Artificial Sequence
  Description of Artificial Sequence: Synthetic oligonucleotide
ccguucggcagggauuuga

SEQ ID NO: 111728 - RNA, 19 nt, Artificial Sequence
  Description of Artificial Sequence: Synthetic oligonucleotide
gccgagcucugcaauggcu

SEQ ID NO: 111729 - RNA, 19 nt, Artificial Sequence
  Description of Artificial Sequence: Synthetic oligonucleotide
cucauggcgcaggacgguu

SEQ ID NO: 111730 - RNA, 19 nt, Artificial Sequence
  Description of Artificial Sequence: Synthetic oligonucleotide
ccuauaccucuauguggcu

SEQ ID NO: 111731 - RNA, 19 nt, Artificial Sequence
  Description of Artificial Sequence: Synthetic oligonucleotide
ccgucguaggaaaaucguu

SEQ ID NO: 111732 - RNA, 19 nt, Artificial Sequence
  Description of Artificial Sequence: Synthetic oligonucleotide
cgcaggacgguuuuacuuu

SEQ ID NO: 111733 - RNA, 19 nt, Artificial Sequence
  Description of Artificial Sequence: Synthetic oligonucleotide
ccauaaccuauaccucuau

SEQ ID NO: 111734 - RNA, 19 nt, Artificial Sequence
  Description of Artificial Sequence: Synthetic oligonucleotide
ccgccguagugguuugaaa

SEQ ID NO: 111735 - RNA, 19 nt, Artificial Sequence
  Description of Artificial Sequence: Synthetic oligonucleotide
ccagucgcagcgauccauu

SEQ ID NO: 111736 - RNA, 19 nt, Artificial Sequence
  Description of Artificial Sequence: Synthetic oligonucleotide
cugucccguucggcaggga

SEQ ID NO: 111737 - RNA, 19 nt, Artificial Sequence
  Description of Artificial Sequence: Synthetic oligonucleotide
cccguucggcagggauuug

SEQ ID NO: 111738 - RNA, 19 nt, Artificial Sequence
  Description of Artificial Sequence: Synthetic oligonucleotide
gcccgccguagugguuuga

SEQ ID NO: 111739 - RNA, 19 nt, Artificial Sequence
  Description of Artificial Sequence: Synthetic oligonucleotide
aaugagauuauauuggacc

SEQ ID NO: 111740 - RNA, 19 nt, Artificial Sequence
  Description of Artificial Sequence: Synthetic oligonucleotide
aaagauuaagauuuaaggc

SEQ ID NO: 111741 - RNA, 19 nt, Artificial Sequence
  Description of Artificial Sequence: Synthetic oligonucleotide
uguaauaacacuuaaguag

SEQ ID NO: 111742 - RNA, 19 nt, Artificial Sequence
  Description of Artificial Sequence: Synthetic oligonucleotide
aaauuuccgaaccaaaugc

SEQ ID NO: 111743 - RNA, 19 nt, Artificial Sequence
  Description of Artificial Sequence: Synthetic oligonucleotide
gaaagauuaagauuuaagg

SEQ ID NO: 111744 - RNA, 19 nt, Artificial Sequence
  Description of Artificial Sequence: Synthetic oligonucleotide
aauaaacucaucuaacuag

SEQ ID NO: 111745 - RNA, 19 nt, Artificial Sequence
  Description of Artificial Sequence: Synthetic oligonucleotide
aaacuaauaguaaauauac

SEQ ID NO: 111746 - RNA, 19 nt, Artificial Sequence
  Description of Artificial Sequence: Synthetic oligonucleotide
aacuauuuaugucugguuc

SEQ ID NO: 111747 - RNA, 19 nt, Artificial Sequence
  Description of Artificial Sequence: Synthetic oligonucleotide
aaugaaaacuuacggaaag

SEQ ID NO: 111748 - RNA, 19 nt, Artificial Sequence
  Description of Artificial Sequence: Synthetic oligonucleotide
aaaacgcacacuuacuggg

SEQ ID NO: 111749 - RNA, 19 nt, Artificial Sequence
  Description of Artificial Sequence: Synthetic oligonucleotide
aaaacgaaacuuucucagc

SEQ ID NO: 111750 - RNA, 19 nt, Artificial Sequence
  Description of Artificial Sequence: Synthetic oligonucleotide
ucauacgucacuuauuuag

SEQ ID NO: 111751 - RNA, 19 nt, Artificial Sequence
  Description of Artificial Sequence: Synthetic oligonucleotide
aauaucuauucacuaguuc

SEQ ID NO: 111752 - RNA, 19 nt, Artificial Sequence
  Description of Artificial Sequence: Synthetic oligonucleotide
aauuaagaaaccuggacau

SEQ ID NO: 111753 - RNA, 19 nt, Artificial Sequence
  Description of Artificial Sequence: Synthetic oligonucleotide
uaagcuaacguuaaugcug

SEQ ID NO: 111754 - RNA, 19 nt, Artificial Sequence
  Description of Artificial Sequence: Synthetic oligonucleotide
uuaguuucuaucugggugg

SEQ ID NO: 111755 - RNA, 19 nt, Artificial Sequence
  Description of Artificial Sequence: Synthetic oligonucleotide
acuauuuaugucugguucc

SEQ ID NO: 111756 - RNA, 19 nt, Artificial Sequence
  Description of Artificial Sequence: Synthetic oligonucleotide
uauuuagucaccaaaacuu

SEQ ID NO: 111757 - RNA, 19 nt, Artificial Sequence
  Description of Artificial Sequence: Synthetic oligonucleotide
acuuaaguagauuauaagu

SEQ ID NO: 111758 - RNA, 19 nt, Artificial Sequence
  Description of Artificial Sequence: Synthetic oligonucleotide
aguauuaucagucuacaga

SEQ ID NO: 111759 - RNA, 19 nt, Artificial Sequence
  Description of Artificial Sequence: Synthetic oligonucleotide
uuauuaacuaugaccaaag

SEQ ID NO: 111760 - RNA, 19 nt, Artificial Sequence
  Description of Artificial Sequence: Synthetic oligonucleotide
cuuaagcuaacguuaaugc

SEQ ID NO: 111761 - RNA, 19 nt, Artificial Sequence
  Description of Artificial Sequence: Synthetic oligonucleotide
ucuaucacagucuaauacc

SEQ ID NO: 111762 - RNA, 19 nt, Artificial Sequence
  Description of Artificial Sequence: Synthetic oligonucleotide
ucacuuuaagacuuuagcc

SEQ ID NO: 111763 - RNA, 19 nt, Artificial Sequence
  Description of Artificial Sequence: Synthetic oligonucleotide
ugcacuuagaaacugccag

SEQ ID NO: 111764 - RNA, 19 nt, Artificial Sequence
  Description of Artificial Sequence: Synthetic oligonucleotide
cacuuuaagacuuuagccc

SEQ ID NO: 111765 - RNA, 19 nt, Artificial Sequence
  Description of Artificial Sequence: Synthetic oligonucleotide
uaggauaaaauguaugaca

SEQ ID NO: 111766 - RNA, 19 nt, Artificial Sequence
  Description of Artificial Sequence: Synthetic oligonucleotide
acagcuuaggaguaaugcc

SEQ ID NO: 111767 - RNA, 19 nt, Artificial Sequence
  Description of Artificial Sequence: Synthetic oligonucleotide
ugcgguaugaacuagcaga

SEQ ID NO: 111768 - RNA, 19 nt, Artificial Sequence
  Description of Artificial Sequence: Synthetic oligonucleotide
aaacgaaacuuucucagcu

SEQ ID NO: 111769 - RNA, 19 nt, Artificial Sequence
  Description of Artificial Sequence: Synthetic oligonucleotide
auuacuaugaagaugauuu

SEQ ID NO: 111770 - RNA, 19 nt, Artificial Sequence
  Description of Artificial Sequence: Synthetic oligonucleotide
cuggacauacucuuuaugg

SEQ ID NO: 111771 - RNA, 19 nt, Artificial Sequence
  Description of Artificial Sequence: Synthetic oligonucleotide
aauacuggcaguguagaag

SEQ ID NO: 111772 - RNA, 19 nt, Artificial Sequence
  Description of Artificial Sequence: Synthetic oligonucleotide
aagaaaccuggacauacuc

SEQ ID NO: 111773 - RNA, 19 nt, Artificial Sequence
  Description of Artificial Sequence: Synthetic oligonucleotide
auuaucagucuacagaaca

SEQ ID NO: 111774 - RNA, 19 nt, Artificial Sequence
  Description of Artificial Sequence: Synthetic oligonucleotide
uaagcguaauguaauaaca

SEQ ID NO: 111775 - RNA, 19 nt, Artificial Sequence
  Description of Artificial Sequence: Synthetic oligonucleotide
uuagugaucucaaacaaua

SEQ ID NO: 111776 - RNA, 19 nt, Artificial Sequence
  Description of Artificial Sequence: Synthetic oligonucleotide
uacuaauucacuacucuug

SEQ ID NO: 111777 - RNA, 19 nt, Artificial Sequence
  Description of Artificial Sequence: Synthetic oligonucleotide
gaaacaucugccuuggaac

SEQ ID NO: 111778 - RNA, 19 nt, Artificial Sequence
  Description of Artificial Sequence: Synthetic oligonucleotide
aaauaccuugguuagcuca

SEQ ID NO: 111779 - RNA, 19 nt, Artificial Sequence
  Description of Artificial Sequence: Synthetic oligonucleotide
auauuggaccaucaaaguc

SEQ ID NO: 111780 - RNA, 19 nt, Artificial Sequence
  Description of Artificial Sequence: Synthetic oligonucleotide
aacuguuagugaaaguagc

SEQ ID NO: 111781 - RNA, 19 nt, Artificial Sequence
  Description of Artificial Sequence: Synthetic oligonucleotide
aacucuuaccaccauauau

SEQ ID NO: 111782 - RNA, 19 nt, Artificial Sequence
  Description of Artificial Sequence: Synthetic oligonucleotide
aaauaaagcacagagggua

SEQ ID NO: 111783 - RNA, 19 nt, Artificial Sequence
  Description of Artificial Sequence: Synthetic oligonucleotide
uggcauuuaggauaaaaug

SEQ ID NO: 111784 - RNA, 19 nt, Artificial Sequence
  Description of Artificial Sequence: Synthetic oligonucleotide
cagauaacuccccagauag

SEQ ID NO: 111785 - RNA, 19 nt, Artificial Sequence
  Description of Artificial Sequence: Synthetic oligonucleotide
guagccauucuuuaguuag

SEQ ID NO: 111786 - RNA, 19 nt, Artificial Sequence
  Description of Artificial Sequence: Synthetic oligonucleotide
ucuacuaauucacuacucu

SEQ ID NO: 111787 - RNA, 19 nt, Artificial Sequence
  Description of Artificial Sequence: Synthetic oligonucleotide
aucacagucuaauacccac

SEQ ID NO: 111788 - RNA, 19 nt, Artificial Sequence
  Description of Artificial Sequence: Synthetic oligonucleotide
gauuauaaguccugcuucc

SEQ ID NO: 111789 - RNA, 19 nt, Artificial Sequence
  Description of Artificial Sequence: Synthetic oligonucleotide
uuaagcguaauguaauaac

SEQ ID NO: 111790 - RNA, 19 nt, Artificial Sequence
  Description of Artificial Sequence: Synthetic oligonucleotide
agguaguucaucuuuaagu

SEQ ID NO: 111791 - RNA, 19 nt, Artificial Sequence
  Description of Artificial Sequence: Synthetic oligonucleotide
uuucuuaagcguaauguaa

SEQ ID NO: 111792 - RNA, 19 nt, Artificial Sequence
  Description of Artificial Sequence: Synthetic oligonucleotide
gaggguaagaaacucuucc

SEQ ID NO: 111793 - RNA, 19 nt, Artificial Sequence
  Description of Artificial Sequence: Synthetic oligonucleotide
cacccaauagaacugauag

SEQ ID NO: 111794 - RNA, 19 nt, Artificial Sequence
  Description of Artificial Sequence: Synthetic oligonucleotide
uagaauauacucuacucuc

SEQ ID NO: 111795 - RNA, 19 nt, Artificial Sequence
  Description of Artificial Sequence: Synthetic oligonucleotide
ugauagaauauacucuacu

SEQ ID NO: 111796 - RNA, 19 nt, Artificial Sequence
  Description of Artificial Sequence: Synthetic oligonucleotide
aagcguaauguaauaacac

SEQ ID NO: 111797 - RNA, 19 nt, Artificial Sequence
  Description of Artificial Sequence: Synthetic oligonucleotide
uuaaaccaguacaagcacc

SEQ ID NO: 111798 - RNA, 19 nt, Artificial Sequence
  Description of Artificial Sequence: Synthetic oligonucleotide
uguagaagucuuaagcuaa

SEQ ID NO: 111799 - RNA, 19 nt, Artificial Sequence
  Description of Artificial Sequence: Synthetic oligonucleotide
aaauuagucacaaggguga

SEQ ID NO: 111800 - RNA, 19 nt, Artificial Sequence
  Description of Artificial Sequence: Synthetic oligonucleotide
acaagggugacaaaccacc

SEQ ID NO: 111801 - RNA, 19 nt, Artificial Sequence
  Description of Artificial Sequence: Synthetic oligonucleotide
ugaaaugucaaauggccuc

SEQ ID NO: 111802 - RNA, 19 nt, Artificial Sequence
  Description of Artificial Sequence: Synthetic oligonucleotide
acgucacuuauuuagucac

SEQ ID NO: 111803 - RNA, 19 nt, Artificial Sequence
  Description of Artificial Sequence: Synthetic oligonucleotide
ucuuaagcuaacguuaaug

SEQ ID NO: 111804 - RNA, 19 nt, Artificial Sequence
  Description of Artificial Sequence: Synthetic oligonucleotide
aauacccaccuuucaacag

SEQ ID NO: 111805 - RNA, 19 nt, Artificial Sequence
  Description of Artificial Sequence: Synthetic oligonucleotide
auuuuagcuaaagggaaac

SEQ ID NO: 111806 - RNA, 19 nt, Artificial Sequence
  Description of Artificial Sequence: Synthetic oligonucleotide
acaaaacgcacacuuacug

SEQ ID NO: 111807 - RNA, 19 nt, Artificial Sequence
  Description of Artificial Sequence: Synthetic oligonucleotide
auguuuagcugcauuaggc

SEQ ID NO: 111808 - RNA, 19 nt, Artificial Sequence
  Description of Artificial Sequence: Synthetic oligonucleotide
ugaaccucgaugaugugac

SEQ ID NO: 111809 - RNA, 19 nt, Artificial Sequence
  Description of Artificial Sequence: Synthetic oligonucleotide
ugaaugagauuauauugga

SEQ ID NO: 111810 - RNA, 19 nt, Artificial Sequence
  Description of Artificial Sequence: Synthetic oligonucleotide
uagcuaaagggaaacuucc

SEQ ID NO: 111811 - RNA, 19 nt, Artificial Sequence
  Description of Artificial Sequence: Synthetic oligonucleotide
uacucuacucucuacuucc

SEQ ID NO: 111812 - RNA, 19 nt, Artificial Sequence
  Description of Artificial Sequence: Synthetic oligonucleotide
ugccguaggaucuacucgg

SEQ ID NO: 111813 - RNA, 19 nt, Artificial Sequence
  Description of Artificial Sequence: Synthetic oligonucleotide
aaacuguuagugaaaguag

SEQ ID NO: 111814 - RNA, 19 nt, Artificial Sequence
  Description of Artificial Sequence: Synthetic oligonucleotide
uuuauggcuaaguuuggcu

SEQ ID NO: 111815 - RNA, 19 nt, Artificial Sequence
  Description of Artificial Sequence: Synthetic oligonucleotide
aacuagaaacuguuaguga

SEQ ID NO: 111816 - RNA, 19 nt, Artificial Sequence
  Description of Artificial Sequence: Synthetic oligonucleotide
aaauccaaguuucucccgu

SEQ ID NO: 111817 - RNA, 19 nt, Artificial Sequence
  Description of Artificial Sequence: Synthetic oligonucleotide
ugggauaagagccaaguuu

SEQ ID NO: 111818 - RNA, 19 nt, Artificial Sequence
  Description of Artificial Sequence: Synthetic oligonucleotide
uuaagcuaacguuaaugcu

SEQ ID NO: 111819 - RNA, 19 nt, Artificial Sequence
  Description of Artificial Sequence: Synthetic oligonucleotide
aauuaacuauuuaugucug

SEQ ID NO: 111820 - RNA, 19 nt, Artificial Sequence
  Description of Artificial Sequence: Synthetic oligonucleotide
ucuaacaugacuggcuuug

SEQ ID NO: 111821 - RNA, 19 nt, Artificial Sequence
  Description of Artificial Sequence: Synthetic oligonucleotide
aaucggucacuuuaagacu

SEQ ID NO: 111822 - RNA, 19 nt, Artificial Sequence
  Description of Artificial Sequence: Synthetic oligonucleotide
auaagagccaaguuuaauu

SEQ ID NO: 111823 - RNA, 19 nt, Artificial Sequence
  Description of Artificial Sequence: Synthetic oligonucleotide
caaaacgcacacuuacugg

SEQ ID NO: 111824 - RNA, 19 nt, Artificial Sequence
  Description of Artificial Sequence: Synthetic oligonucleotide
auauacucuacucucuacu

SEQ ID NO: 111825 - RNA, 19 nt, Artificial Sequence
  Description of Artificial Sequence: Synthetic oligonucleotide
ugauuacuguucaaaacuc

SEQ ID NO: 111826 - RNA, 19 nt, Artificial Sequence
  Description of Artificial Sequence: Synthetic oligonucleotide
uguuuagcugcauuaggca

SEQ ID NO: 111827 - RNA, 19 nt, Artificial Sequence
  Description of Artificial Sequence: Synthetic oligonucleotide
gaaacuguuagugaaagua

SEQ ID NO: 111828 - RNA, 19 nt, Artificial Sequence
  Description of Artificial Sequence: Synthetic oligonucleotide
uuauaauggcagcauugug

SEQ ID NO: 111829 - RNA, 19 nt, Artificial Sequence
  Description of Artificial Sequence: Synthetic oligonucleotide
uucgaaaacgaaacuuucu

SEQ ID NO: 111830 - RNA, 19 nt, Artificial Sequence
  Description of Artificial Sequence: Synthetic oligonucleotide
acaguaaccugagaacacc

SEQ ID NO: 111831 - RNA, 19 nt, Artificial Sequence
  Description of Artificial Sequence: Synthetic oligonucleotide
caaacuuuauggauuccag

SEQ ID NO: 111832 - RNA, 19 nt, Artificial Sequence
  Description of Artificial Sequence: Synthetic oligonucleotide
agaagucuuaagcuaacgu

SEQ ID NO: 111833 - RNA, 19 nt, Artificial Sequence
  Description of Artificial Sequence: Synthetic oligonucleotide
accaccauauauucacgac

SEQ ID NO: 111834 - RNA, 19 nt, Artificial Sequence
  Description of Artificial Sequence: Synthetic oligonucleotide
auacgucacuuauuuaguc

SEQ ID NO: 111835 - RNA, 19 nt, Artificial Sequence
  Description of Artificial Sequence: Synthetic oligonucleotide
uuauggcuaaguuuggcuc

SEQ ID NO: 111836 - RNA, 19 nt, Artificial Sequence
  Description of Artificial Sequence: Synthetic oligonucleotide
uugccguaggaucuacucg

SEQ ID NO: 111837 - RNA, 19 nt, Artificial Sequence
  Description of Artificial Sequence: Synthetic oligonucleotide
ugaacuagcagagacugaa

SEQ ID NO: 111838 - RNA, 19 nt, Artificial Sequence
  Description of Artificial Sequence: Synthetic oligonucleotide
gcugcuaagaauuggaaac

SEQ ID NO: 111839 - RNA, 19 nt, Artificial Sequence
  Description of Artificial Sequence: Synthetic oligonucleotide
aacuuacggaaagugcaac

SEQ ID NO: 111840 - RNA, 19 nt, Artificial Sequence
  Description of Artificial Sequence: Synthetic oligonucleotide
aaagggaggcaaaaugcuc

SEQ ID NO: 111841 - RNA, 19 nt, Artificial Sequence
  Description of Artificial Sequence: Synthetic oligonucleotide
aauuagucacaagggugac

SEQ ID NO: 111842 - RNA, 19 nt, Artificial Sequence
  Description of Artificial Sequence: Synthetic oligonucleotide
uuuagcugcauuaggcauc

SEQ ID NO: 111843 - RNA, 19 nt, Artificial Sequence
  Description of Artificial Sequence: Synthetic oligonucleotide
agaguuuagaagucaauua

SEQ ID NO: 111844 - RNA, 19 nt, Artificial Sequence
  Description of Artificial Sequence: Synthetic oligonucleotide
uuaccaccauauauucacg

SEQ ID NO: 111845 - RNA, 19 nt, Artificial Sequence
  Description of Artificial Sequence: Synthetic oligonucleotide
uaacuccccagauagacaa

SEQ ID NO: 111846 - RNA, 19 nt, Artificial Sequence
  Description of Artificial Sequence: Synthetic oligonucleotide
uguccaccuaauaaugaca

SEQ ID NO: 111847 - RNA, 19 nt, Artificial Sequence
  Description of Artificial Sequence: Synthetic oligonucleotide
uggacauacucuuuaugga

SEQ ID NO: 111848 - RNA, 19 nt, Artificial Sequence
  Description of Artificial Sequence: Synthetic oligonucleotide
uaucuauucacuaguucau

SEQ ID NO: 111849 - RNA, 19 nt, Artificial Sequence
  Description of Artificial Sequence: Synthetic oligonucleotide
uacgucacuuauuuaguca

SEQ ID NO: 111850 - RNA, 19 nt, Artificial Sequence
  Description of Artificial Sequence: Synthetic oligonucleotide
uguuguuauuaacuaugac

SEQ ID NO: 111851 - RNA, 19 nt, Artificial Sequence
  Description of Artificial Sequence: Synthetic oligonucleotide
aaagcugcuaagaauugga

SEQ ID NO: 111852 - RNA, 19 nt, Artificial Sequence
  Description of Artificial Sequence: Synthetic oligonucleotide
ucuauucacuaguucauau

SEQ ID NO: 111853 - RNA, 19 nt, Artificial Sequence
  Description of Artificial Sequence: Synthetic oligonucleotide
ugccuuacaaaacgcacac

SEQ ID NO: 111854 - RNA, 19 nt, Artificial Sequence
  Description of Artificial Sequence: Synthetic oligonucleotide
uauggauuccaguauuauc

SEQ ID NO: 111855 - RNA, 19 nt, Artificial Sequence
  Description of Artificial Sequence: Synthetic oligonucleotide
gugaaaguagcagaccagg

SEQ ID NO: 111856 - RNA, 19 nt, Artificial Sequence
  Description of Artificial Sequence: Synthetic oligonucleotide
ugccuuggaaccaucagaa

SEQ ID NO: 111857 - RNA, 19 nt, Artificial Sequence
  Description of Artificial Sequence: Synthetic oligonucleotide
auuuaugucugguuccagu

SEQ ID NO: 111858 - RNA, 19 nt, Artificial Sequence
  Description of Artificial Sequence: Synthetic oligonucleotide
caaaugcuaaagagguucc

SEQ ID NO: 111859 - RNA, 19 nt, Artificial Sequence
  Description of Artificial Sequence: Synthetic oligonucleotide
acuuuagccccaaaugaac

SEQ ID NO: 111860 - RNA, 19 nt, Artificial Sequence
  Description of Artificial Sequence: Synthetic oligonucleotide
ggaauuaagaaaccuggac

SEQ ID NO: 111861 - RNA, 19 nt, Artificial Sequence
  Description of Artificial Sequence: Synthetic oligonucleotide
aagucuuaagcuaacguua

SEQ ID NO: 111862 - RNA, 19 nt, Artificial Sequence
  Description of Artificial Sequence: Synthetic oligonucleotide
uacaguuuauggcuaaguu

SEQ ID NO: 111863 - RNA, 19 nt, Artificial Sequence
  Description of Artificial Sequence: Synthetic oligonucleotide
uaagaauuggaaacuucua

SEQ ID NO: 111864 - RNA, 19 nt, Artificial Sequence
  Description of Artificial Sequence: Synthetic oligonucleotide
aaacaugcgguaugaacua

SEQ ID NO: 111865 - RNA, 19 nt, Artificial Sequence
  Description of Artificial Sequence: Synthetic oligonucleotide
aggccuaagagauauuuau

SEQ ID NO: 111866 - RNA, 19 nt, Artificial Sequence
  Description of Artificial Sequence: Synthetic oligonucleotide
uuuauggauuccaguauua

SEQ ID NO: 111867 - RNA, 19 nt, Artificial Sequence
  Description of Artificial Sequence: Synthetic oligonucleotide
uuacggaaagugcaacaga

SEQ ID NO: 111868 - RNA, 19 nt, Artificial Sequence
  Description of Artificial Sequence: Synthetic oligonucleotide
cuucacguaagguaagcuc

SEQ ID NO: 111869 - RNA, 19 nt, Artificial Sequence
  Description of Artificial Sequence: Synthetic oligonucleotide
cuuacggaaagugcaacag

SEQ ID NO: 111870 - RNA, 19 nt, Artificial Sequence
  Description of Artificial Sequence: Synthetic oligonucleotide
auuauaacucuuaccacca

SEQ ID NO: 111871 - RNA, 19 nt, Artificial Sequence
  Description of Artificial Sequence: Synthetic oligonucleotide
accaucuaacaugacuggc

SEQ ID NO: 111872 - RNA, 19 nt, Artificial Sequence
  Description of Artificial Sequence: Synthetic oligonucleotide
cacagcuuaggaguaaugc

SEQ ID NO: 111873 - RNA, 19 nt, Artificial Sequence
  Description of Artificial Sequence: Synthetic oligonucleotide
uauuaucagucuacagaac

SEQ ID NO: 111874 - RNA, 19 nt, Artificial Sequence
  Description of Artificial Sequence: Synthetic oligonucleotide
ucuuaccaccauauauuca

SEQ ID NO: 111875 - RNA, 19 nt, Artificial Sequence
  Description of Artificial Sequence: Synthetic oligonucleotide
agaauagaaagguucuguu

SEQ ID NO: 111876 - RNA, 19 nt, Artificial Sequence
  Description of Artificial Sequence: Synthetic oligonucleotide
uuuagucaccaaaacuuuu

SEQ ID NO: 111877 - RNA, 19 nt, Artificial Sequence
  Description of Artificial Sequence: Synthetic oligonucleotide
ugguuguuccagaaagaca

SEQ ID NO: 111878 - RNA, 19 nt, Artificial Sequence
  Description of Artificial Sequence: Synthetic oligonucleotide
acuaugaccaaaguuuuaa

SEQ ID NO: 111879 - RNA, 19 nt, Artificial Sequence
  Description of Artificial Sequence: Synthetic oligonucleotide
ugggauuugccuuggcaug

SEQ ID NO: 111880 - RNA, 19 nt, Artificial Sequence
  Description of Artificial Sequence: Synthetic oligonucleotide
cuaagaauuggaaacuucu

SEQ ID NO: 111881 - RNA, 19 nt, Artificial Sequence
  Description of Artificial Sequence: Synthetic oligonucleotide
uggacuagcuuguucuuac

SEQ ID NO: 111882 - RNA, 19 nt, Artificial Sequence
  Description of Artificial Sequence: Synthetic oligonucleotide
uuuaaggcugaaugggaau

SEQ ID NO: 111883 - RNA, 19 nt, Artificial Sequence
  Description of Artificial Sequence: Synthetic oligonucleotide
uguugucuaucacagucua

SEQ ID NO: 111884 - RNA, 19 nt, Artificial Sequence
  Description of Artificial Sequence: Synthetic oligonucleotide
uaagaaaccuggacauacu

SEQ ID NO: 111885 - RNA, 19 nt, Artificial Sequence
  Description of Artificial Sequence: Synthetic oligonucleotide
uuagcugcauuaggcaucc

SEQ ID NO: 111886 - RNA, 19 nt, Artificial Sequence
  Description of Artificial Sequence: Synthetic oligonucleotide
uuugccuuggcauguuagu

SEQ ID NO: 111887 - RNA, 19 nt, Artificial Sequence
  Description of Artificial Sequence: Synthetic oligonucleotide
cuguuagugaaaguagcag

SEQ ID NO: 111888 - RNA, 19 nt, Artificial Sequence
  Description of Artificial Sequence: Synthetic oligonucleotide
ugccuaaggacagacagaa

SEQ ID NO: 111889 - RNA, 19 nt, Artificial Sequence
  Description of Artificial Sequence: Synthetic oligonucleotide
uggucagguuaauacauaa

SEQ ID NO: 111890 - RNA, 19 nt, Artificial Sequence
  Description of Artificial Sequence: Synthetic oligonucleotide
uuacuaugaagaugauuuc

SEQ ID NO: 111891 - RNA, 19 nt, Artificial Sequence
  Description of Artificial Sequence: Synthetic oligonucleotide
ugcugacaagucaaaggca

SEQ ID NO: 111892 - RNA, 19 nt, Artificial Sequence
  Description of Artificial Sequence: Synthetic oligonucleotide
aagcuaacguuaaugcuga

SEQ ID NO: 111893 - RNA, 19 nt, Artificial Sequence
  Description of Artificial Sequence: Synthetic oligonucleotide
aggguaagaaacucuucca

SEQ ID NO: 111894 - RNA, 19 nt, Artificial Sequence
  Description of Artificial Sequence: Synthetic oligonucleotide
auaacucuuaccaccauau

SEQ ID NO: 111895 - RNA, 19 nt, Artificial Sequence
  Description of Artificial Sequence: Synthetic oligonucleotide
aucuagaauacuggcagug

SEQ ID NO: 111896 - RNA, 19 nt, Artificial Sequence
  Description of Artificial Sequence: Synthetic oligonucleotide
ucgggccccuuuaagaaug

SEQ ID NO: 111897 - RNA, 19 nt, Artificial Sequence
  Description of Artificial Sequence: Synthetic oligonucleotide
auacccaccuuucaacagu

SEQ ID NO: 111898 - RNA, 19 nt, Artificial Sequence
  Description of Artificial Sequence: Synthetic oligonucleotide
ugcuaaagagguuccugga

SEQ ID NO: 111899 - RNA, 19 nt, Artificial Sequence
  Description of Artificial Sequence: Synthetic oligonucleotide
aggcauuuauccuugucaa

SEQ ID NO: 111900 - RNA, 19 nt, Artificial Sequence
  Description of Artificial Sequence: Synthetic oligonucleotide
uguuauuaacuaugaccaa

SEQ ID NO: 111901 - RNA, 19 nt, Artificial Sequence
  Description of Artificial Sequence: Synthetic oligonucleotide
gaaugagauuauauuggac

SEQ ID NO: 111902 - RNA, 19 nt, Artificial Sequence
  Description of Artificial Sequence: Synthetic oligonucleotide
gauuuaaggcugaauggga

SEQ ID NO: 111903 - RNA, 19 nt, Artificial Sequence
  Description of Artificial Sequence: Synthetic oligonucleotide
gaagucuuaagcuaacguu

SEQ ID NO: 111904 - RNA, 19 nt, Artificial Sequence
  Description of Artificial Sequence: Synthetic oligonucleotide
cucaucuaacuagaaacug

SEQ ID NO: 111905 - RNA, 19 nt, Artificial Sequence
  Description of Artificial Sequence: Synthetic oligonucleotide
ucuuaagcguaauguaaua

SEQ ID NO: 111906 - RNA, 19 nt, Artificial Sequence
  Description of Artificial Sequence: Synthetic oligonucleotide
cuuacugggaagguuggac

SEQ ID NO: 111907 - RNA, 19 nt, Artificial Sequence
  Description of Artificial Sequence: Synthetic oligonucleotide
uguaaguaacagugcauuu

SEQ ID NO: 111908 - RNA, 19 nt, Artificial Sequence
  Description of Artificial Sequence: Synthetic oligonucleotide
uacucgggccccuuuaaga

SEQ ID NO: 111909 - RNA, 19 nt, Artificial Sequence
  Description of Artificial Sequence: Synthetic oligonucleotide
aacgaaacuuucucagcuu

SEQ ID NO: 111910 - RNA, 19 nt, Artificial Sequence
  Description of Artificial Sequence: Synthetic oligonucleotide
caguauuaucagucuacag

SEQ ID NO: 111911 - RNA, 19 nt, Artificial Sequence
  Description of Artificial Sequence: Synthetic oligonucleotide
cagcuuaggaguaaugcca

SEQ ID NO: 111912 - RNA, 19 nt, Artificial Sequence
  Description of Artificial Sequence: Synthetic oligonucleotide
uccgaaccaaaugcuaaag

SEQ ID NO: 111913 - RNA, 19 nt, Artificial Sequence
  Description of Artificial Sequence: Synthetic oligonucleotide
agcugcuaagaauuggaaa

SEQ ID NO: 111914 - RNA, 19 nt, Artificial Sequence
  Description of Artificial Sequence: Synthetic oligonucleotide
acuuacaaagcugccuaag

SEQ ID NO: 111915 - RNA, 19 nt, Artificial Sequence
  Description of Artificial Sequence: Synthetic oligonucleotide
acaugcgguaugaacuagc

SEQ ID NO: 111916 - RNA, 19 nt, Artificial Sequence
  Description of Artificial Sequence: Synthetic oligonucleotide
gaugccccaguccaaugug

SEQ ID NO: 111917 - RNA, 19 nt, Artificial Sequence
  Description of Artificial Sequence: Synthetic oligonucleotide
gacaucuauugauguguug

SEQ ID NO: 111918 - RNA, 19 nt, Artificial Sequence
  Description of Artificial Sequence: Synthetic oligonucleotide
aacgcacacuuacugggaa

SEQ ID NO: 111919 - RNA, 19 nt, Artificial Sequence
  Description of Artificial Sequence: Synthetic oligonucleotide
acauauuuucuuaagcgua

SEQ ID NO: 111920 - RNA, 19 nt, Artificial Sequence
  Description of Artificial Sequence: Synthetic oligonucleotide
guguccaccuaauaaugac

SEQ ID NO: 111921 - RNA, 19 nt, Artificial Sequence
  Description of Artificial Sequence: Synthetic oligonucleotide
aaaugcuaaagagguuccu

SEQ ID NO: 111922 - RNA, 19 nt, Artificial Sequence
  Description of Artificial Sequence: Synthetic oligonucleotide
auacacaaugaagcgaggu

SEQ ID NO: 111923 - RNA, 19 nt, Artificial Sequence
  Description of Artificial Sequence: Synthetic oligonucleotide
uuacugcaggaaacaaacu

SEQ ID NO: 111924 - RNA, 19 nt, Artificial Sequence
  Description of Artificial Sequence: Synthetic oligonucleotide
agaauauacucuacucucu

SEQ ID NO: 111925 - RNA, 19 nt, Artificial Sequence
  Description of Artificial Sequence: Synthetic oligonucleotide
acucaucuaacuagaaacu

SEQ ID NO: 111926 - RNA, 19 nt, Artificial Sequence
  Description of Artificial Sequence: Synthetic oligonucleotide
caagggugacaaaccaccc

SEQ ID NO: 111927 - RNA, 19 nt, Artificial Sequence
  Description of Artificial Sequence: Synthetic oligonucleotide
aacaugcgguaugaacuag

SEQ ID NO: 111928 - RNA, 19 nt, Artificial Sequence
  Description of Artificial Sequence: Synthetic oligonucleotide
cacuuacugggaagguugg

SEQ ID NO: 111929 - RNA, 19 nt, Artificial Sequence
  Description of Artificial Sequence: Synthetic oligonucleotide
auagaaagguucuguugau

SEQ ID NO: 111930 - RNA, 19 nt, Artificial Sequence
  Description of Artificial Sequence: Synthetic oligonucleotide
uuguugguuuugacauuag

SEQ ID NO: 111931 - RNA, 19 nt, Artificial Sequence
  Description of Artificial Sequence: Synthetic oligonucleotide
aaacuuacggaaagugcaa

SEQ ID NO: 111932 - RNA, 19 nt, Artificial Sequence
  Description of Artificial Sequence: Synthetic oligonucleotide
cuaaagggaaacuuccaua

SEQ ID NO: 111933 - RNA, 19 nt, Artificial Sequence
  Description of Artificial Sequence: Synthetic oligonucleotide
ucccguagccauucuuuag

SEQ ID NO: 111934 - RNA, 19 nt, Artificial Sequence
  Description of Artificial Sequence: Synthetic oligonucleotide
cuaacuagaaacuguuagu

SEQ ID NO: 111935 - RNA, 19 nt, Artificial Sequence
  Description of Artificial Sequence: Synthetic oligonucleotide
guaagguaagcucaaacuu

SEQ ID NO: 111936 - RNA, 19 nt, Artificial Sequence
  Description of Artificial Sequence: Synthetic oligonucleotide
agguucuacuaauucacua

SEQ ID NO: 111937 - RNA, 19 nt, Artificial Sequence
  Description of Artificial Sequence: Synthetic oligonucleotide
cagguaguucaucuuuaag

SEQ ID NO: 111938 - RNA, 19 nt, Artificial Sequence
  Description of Artificial Sequence: Synthetic oligonucleotide
ucuucacguaagguaagcu

SEQ ID NO: 111939 - RNA, 19 nt, Artificial Sequence
  Description of Artificial Sequence: Synthetic oligonucleotide
ccaaaugcuaaagagguuc

SEQ ID NO: 111940 - RNA, 19 nt, Artificial Sequence
  Description of Artificial Sequence: Synthetic oligonucleotide
uaccuugguuagcucagcu

SEQ ID NO: 111941 - RNA, 19 nt, Artificial Sequence
  Description of Artificial Sequence: Synthetic oligonucleotide
auagaacugauagaauaua

SEQ ID NO: 111942 - RNA, 19 nt, Artificial Sequence
  Description of Artificial Sequence: Synthetic oligonucleotide
agcagaccaggauacaguu

SEQ ID NO: 111943 - RNA, 19 nt, Artificial Sequence
  Description of Artificial Sequence: Synthetic oligonucleotide
ugagauuauauuggaccau

SEQ ID NO: 111944 - RNA, 19 nt, Artificial Sequence
  Description of Artificial Sequence: Synthetic oligonucleotide
auuuaaggcugaaugggaa

SEQ ID NO: 111945 - RNA, 19 nt, Artificial Sequence
  Description of Artificial Sequence: Synthetic oligonucleotide
agcuuaggaguaaugccag

SEQ ID NO: 111946 - RNA, 19 nt, Artificial Sequence
  Description of Artificial Sequence: Synthetic oligonucleotide
augcgguaugaacuagcag

SEQ ID NO: 111947 - RNA, 19 nt, Artificial Sequence
  Description of Artificial Sequence: Synthetic oligonucleotide
ucuacucgggccccuuuaa

SEQ ID NO: 111948 - RNA, 19 nt, Artificial Sequence
  Description of Artificial Sequence: Synthetic oligonucleotide
auuauaaguccugcuuccu

SEQ ID NO: 111949 - RNA, 19 nt, Artificial Sequence
  Description of Artificial Sequence: Synthetic oligonucleotide
ggcauuuaggauaaaaugu

SEQ ID NO: 111950 - RNA, 19 nt, Artificial Sequence
  Description of Artificial Sequence: Synthetic oligonucleotide
ugacaucuauugauguguu

SEQ ID NO: 111951 - RNA, 19 nt, Artificial Sequence
  Description of Artificial Sequence: Synthetic oligonucleotide
uuucaacccuuaugaaaau

SEQ ID NO: 111952 - RNA, 19 nt, Artificial Sequence
  Description of Artificial Sequence: Synthetic oligonucleotide
auuuagucaccaaaacuuu

SEQ ID NO: 111953 - RNA, 19 nt, Artificial Sequence
  Description of Artificial Sequence: Synthetic oligonucleotide
caugcgguaugaacuagca

SEQ ID NO: 111954 - RNA, 19 nt, Artificial Sequence
  Description of Artificial Sequence: Synthetic oligonucleotide
acucgggccccuuuaagaa

SEQ ID NO: 111955 - RNA, 19 nt, Artificial Sequence
  Description of Artificial Sequence: Synthetic oligonucleotide
cugccuuacaaaacgcaca

SEQ ID NO: 111956 - RNA, 19 nt, Artificial Sequence
  Description of Artificial Sequence: Synthetic oligonucleotide
agaggccuaagagauauuu

SEQ ID NO: 111957 - RNA, 19 nt, Artificial Sequence
  Description of Artificial Sequence: Synthetic oligonucleotide
uugguuagcucagcugucu

SEQ ID NO: 111958 - RNA, 19 nt, Artificial Sequence
  Description of Artificial Sequence: Synthetic oligonucleotide
cauuaggcauccagauaac

SEQ ID NO: 111959 - RNA, 19 nt, Artificial Sequence
  Description of Artificial Sequence: Synthetic oligonucleotide
cuuaagcguaauguaauaa

SEQ ID NO: 111960 - RNA, 19 nt, Artificial Sequence
  Description of Artificial Sequence: Synthetic oligonucleotide
gcugacaagucaaaggcac

SEQ ID NO: 111961 - RNA, 19 nt, Artificial Sequence
  Description of Artificial Sequence: Synthetic oligonucleotide
gcuuacauacugcacaaaa

SEQ ID NO: 111962 - RNA, 19 nt, Artificial Sequence
  Description of Artificial Sequence: Synthetic oligonucleotide
gguuaauacauaaauacuu

SEQ ID NO: 111963 - RNA, 19 nt, Artificial Sequence
  Description of Artificial Sequence: Synthetic oligonucleotide
agauuauauuggaccauca

SEQ ID NO: 111964 - RNA, 19 nt, Artificial Sequence
  Description of Artificial Sequence: Synthetic oligonucleotide
aaacgcacacuuacuggga

SEQ ID NO: 111965 - RNA, 19 nt, Artificial Sequence
  Description of Artificial Sequence: Synthetic oligonucleotide
gguuguuccagaaagacau

SEQ ID NO: 111966 - RNA, 19 nt, Artificial Sequence
  Description of Artificial Sequence: Synthetic oligonucleotide
acgcacacuuacugggaag

SEQ ID NO: 111967 - RNA, 19 nt, Artificial Sequence
  Description of Artificial Sequence: Synthetic oligonucleotide
ggacauacucuuuauggaa

SEQ ID NO: 111968 - RNA, 19 nt, Artificial Sequence
  Description of Artificial Sequence: Synthetic oligonucleotide
uuucuaucugggugggaua

SEQ ID NO: 111969 - RNA, 19 nt, Artificial Sequence
  Description of Artificial Sequence: Synthetic oligonucleotide
uaacucuuaccaccauaua

SEQ ID NO: 111970 - RNA, 19 nt, Artificial Sequence
  Description of Artificial Sequence: Synthetic oligonucleotide
gaauacuggcaguguagaa

SEQ ID NO: 111971 - RNA, 19 nt, Artificial Sequence
  Description of Artificial Sequence: Synthetic oligonucleotide
cuauucacuaguucauaua

SEQ ID NO: 111972 - RNA, 19 nt, Artificial Sequence
  Description of Artificial Sequence: Synthetic oligonucleotide
cuucauacgucacuuauuu

SEQ ID NO: 111973 - RNA, 19 nt, Artificial Sequence
  Description of Artificial Sequence: Synthetic oligonucleotide
aguguccaccuaauaauga

SEQ ID NO: 111974 - RNA, 19 nt, Artificial Sequence
  Description of Artificial Sequence: Synthetic oligonucleotide
aagaauggcucgacagcca

SEQ ID NO: 111975 - RNA, 19 nt, Artificial Sequence
  Description of Artificial Sequence: Synthetic oligonucleotide
acagaacaaauaaggagua

SEQ ID NO: 111976 - RNA, 19 nt, Artificial Sequence
  Description of Artificial Sequence: Synthetic oligonucleotide
ccccaaaugaaccucgaug

SEQ ID NO: 111977 - RNA, 19 nt, Artificial Sequence
  Description of Artificial Sequence: Synthetic oligonucleotide
uucaacccuuaugaaaaua

SEQ ID NO: 111978 - RNA, 19 nt, Artificial Sequence
  Description of Artificial Sequence: Synthetic oligonucleotide
gcuaugcacaacuuaaaua

SEQ ID NO: 111979 - RNA, 19 nt, Artificial Sequence
  Description of Artificial Sequence: Synthetic oligonucleotide
uucauacgucacuuauuua

SEQ ID NO: 111980 - RNA, 19 nt, Artificial Sequence
  Description of Artificial Sequence: Synthetic oligonucleotide
ucuaucugggugggauaag

SEQ ID NO: 111981 - RNA, 19 nt, Artificial Sequence
  Description of Artificial Sequence: Synthetic oligonucleotide
agucuuaagcuaacguuaa

SEQ ID NO: 111982 - RNA, 19 nt, Artificial Sequence
  Description of Artificial Sequence: Synthetic oligonucleotide
accucgaugaugugacaaa

SEQ ID NO: 111983 - RNA, 19 nt, Artificial Sequence
  Description of Artificial Sequence: Synthetic oligonucleotide
aggaaagauuaagauuuaa

SEQ ID NO: 111984 - RNA, 19 nt, Artificial Sequence
  Description of Artificial Sequence: Synthetic oligonucleotide
aggcuugcacccaacagga

SEQ ID NO: 111985 - RNA, 19 nt, Artificial Sequence
  Description of Artificial Sequence: Synthetic oligonucleotide
agcuaacguuaaugcugac

SEQ ID NO: 111986 - RNA, 19 nt, Artificial Sequence
  Description of Artificial Sequence: Synthetic oligonucleotide
cugaaaugucaaauggccu

SEQ ID NO: 111987 - RNA, 19 nt, Artificial Sequence
  Description of Artificial Sequence: Synthetic oligonucleotide
cauacgucacuuauuuagu

SEQ ID NO: 111988 - RNA, 19 nt, Artificial Sequence
  Description of Artificial Sequence: Synthetic oligonucleotide
cuacucgggccccuuuaag

SEQ ID NO: 111989 - RNA, 19 nt, Artificial Sequence
  Description of Artificial Sequence: Synthetic oligonucleotide
auuuccgaaccaaaugcua

SEQ ID NO: 111990 - RNA, 19 nt, Artificial Sequence
  Description of Artificial Sequence: Synthetic oligonucleotide
ccccuuuaagaauggcucg

SEQ ID NO: 111991 - RNA, 19 nt, Artificial Sequence
  Description of Artificial Sequence: Synthetic oligonucleotide
gcauuuaggauaaaaugua

SEQ ID NO: 111992 - RNA, 19 nt, Artificial Sequence
  Description of Artificial Sequence: Synthetic oligonucleotide
acuaguucauauacagauu

SEQ ID NO: 111993 - RNA, 19 nt, Artificial Sequence
  Description of Artificial Sequence: Synthetic oligonucleotide
gauaagagccaaguuuaau

SEQ ID NO: 111994 - RNA, 19 nt, Artificial Sequence
  Description of Artificial Sequence: Synthetic oligonucleotide
acgacuuugggcagauagu

SEQ ID NO: 111995 - RNA, 19 nt, Artificial Sequence
  Description of Artificial Sequence: Synthetic oligonucleotide
cagaauagaaagguucugu

SEQ ID NO: 111996 - RNA, 19 nt, Artificial Sequence
  Description of Artificial Sequence: Synthetic oligonucleotide
aucuauucacuaguucaua

SEQ ID NO: 111997 - RNA, 19 nt, Artificial Sequence
  Description of Artificial Sequence: Synthetic oligonucleotide
agaaagacauggaguguaa

SEQ ID NO: 111998 - RNA, 19 nt, Artificial Sequence
  Description of Artificial Sequence: Synthetic oligonucleotide
cuacuaauucacuacucuu

SEQ ID NO: 111999 - RNA, 19 nt, Artificial Sequence
  Description of Artificial Sequence: Synthetic oligonucleotide
gccccuuuaagaauggcuc

SEQ ID NO: 112000 - RNA, 19 nt, Artificial Sequence
  Description of Artificial Sequence: Synthetic oligonucleotide
ucccaaauauuggcauuuc

SEQ ID NO: 112001 - RNA, 19 nt, Artificial Sequence
  Description of Artificial Sequence: Synthetic oligonucleotide
aucuacucgggccccuuua

SEQ ID NO: 112002 - RNA, 19 nt, Artificial Sequence
  Description of Artificial Sequence: Synthetic oligonucleotide
acagucuaauacccaccuu

SEQ ID NO: 112003 - RNA, 19 nt, Artificial Sequence
  Description of Artificial Sequence: Synthetic oligonucleotide
gcuaacguuaaugcugaca

SEQ ID NO: 112004 - RNA, 19 nt, Artificial Sequence
  Description of Artificial Sequence: Synthetic oligonucleotide
cugccuaaggacagacaga

SEQ ID NO: 112005 - RNA, 19 nt, Artificial Sequence
  Description of Artificial Sequence: Synthetic oligonucleotide
ggccucacaagaaacaucu

SEQ ID NO: 112006 - RNA, 19 nt, Artificial Sequence
  Description of Artificial Sequence: Synthetic oligonucleotide
auucacgacuuugggcaga

SEQ ID NO: 112007 - RNA, 19 nt, Artificial Sequence
  Description of Artificial Sequence: Synthetic oligonucleotide
acuuacugggaagguugga

SEQ ID NO: 112008 - RNA, 19 nt, Artificial Sequence
  Description of Artificial Sequence: Synthetic oligonucleotide
gaggccuaagagauauuua

SEQ ID NO: 112009 - RNA, 19 nt, Artificial Sequence
  Description of Artificial Sequence: Synthetic oligonucleotide
cguaauguaauaacacuua

SEQ ID NO: 112010 - RNA, 19 nt, Artificial Sequence
  Description of Artificial Sequence: Synthetic oligonucleotide
agauaacuccccagauaga

SEQ ID NO: 112011 - RNA, 19 nt, Artificial Sequence
  Description of Artificial Sequence: Synthetic oligonucleotide
gccaccaucuaacaugacu

SEQ ID NO: 112012 - RNA, 19 nt, Artificial Sequence
  Description of Artificial Sequence: Synthetic oligonucleotide
auggaguguaaaagcugga

SEQ ID NO: 112013 - RNA, 19 nt, Artificial Sequence
  Description of Artificial Sequence: Synthetic oligonucleotide
gcuugcacccaacaggacu

SEQ ID NO: 112014 - RNA, 19 nt, Artificial Sequence
  Description of Artificial Sequence: Synthetic oligonucleotide
cuguaaguaacagugcauu

SEQ ID NO: 112015 - RNA, 19 nt, Artificial Sequence
  Description of Artificial Sequence: Synthetic oligonucleotide
ccaaguuuaauuuggcaau

SEQ ID NO: 112016 - RNA, 19 nt, Artificial Sequence
  Description of Artificial Sequence: Synthetic oligonucleotide
uuggaccaucaaagucagu

SEQ ID NO: 112017 - RNA, 19 nt, Artificial Sequence
  Description of Artificial Sequence: Synthetic oligonucleotide
ggugggauaagagccaagu

SEQ ID NO: 112018 - RNA, 19 nt, Artificial Sequence
  Description of Artificial Sequence: Synthetic oligonucleotide
ggguaagaaacucuuccau

SEQ ID NO: 112019 - RNA, 19 nt, Artificial Sequence
  Description of Artificial Sequence: Synthetic oligonucleotide
ggcaguguagaagucuuaa

SEQ ID NO: 112020 - RNA, 19 nt, Artificial Sequence
  Description of Artificial Sequence: Synthetic oligonucleotide
ggcccguugccguaggauc

SEQ ID NO: 112021 - RNA, 19 nt, Artificial Sequence
  Description of Artificial Sequence: Synthetic oligonucleotide
acaaaccaccaaagacuca

SEQ ID NO: 112022 - RNA, 19 nt, Artificial Sequence
  Description of Artificial Sequence: Synthetic oligonucleotide
ugcacccaacaggacugga

SEQ ID NO: 112023 - RNA, 19 nt, Artificial Sequence
  Description of Artificial Sequence: Synthetic oligonucleotide
cgucacuuauuuagucacc

SEQ ID NO: 112024 - RNA, 19 nt, Artificial Sequence
  Description of Artificial Sequence: Synthetic oligonucleotide
gccgucagcggcccguugc

SEQ ID NO: 112025 - RNA, 19 nt, Artificial Sequence
  Description of Artificial Sequence: Synthetic oligonucleotide
guugccgcucagguaguuc

SEQ ID NO: 112026 - RNA, 19 nt, Artificial Sequence
  Description of Artificial Sequence: Synthetic oligonucleotide
agcggcccguugccguagg

SEQ ID NO: 112027 - RNA, 19 nt, Artificial Sequence
  Description of Artificial Sequence: Synthetic oligonucleotide
cucccguagccauucuuua

SEQ ID NO: 112028 - RNA, 19 nt, Artificial Sequence
  Description of Artificial Sequence: Synthetic oligonucleotide
ccaaugugcugccuuacaa

SEQ ID NO: 112029 - RNA, 19 nt, Artificial Sequence
  Description of Artificial Sequence: Synthetic oligonucleotide
ggcauguuagugaucucaa

SEQ ID NO: 112030 - RNA, 19 nt, Artificial Sequence
  Description of Artificial Sequence: Synthetic oligonucleotide
ccgaaccaaaugcuaaaga

SEQ ID NO: 112031 - RNA, 19 nt, Artificial Sequence
  Description of Artificial Sequence: Synthetic oligonucleotide
cuuuggaccaugggacuua

SEQ ID NO: 112032 - RNA, 19 nt, Artificial Sequence
  Description of Artificial Sequence: Synthetic oligonucleotide
gccguaggaucuacucggg

SEQ ID NO: 112033 - RNA, 19 nt, Artificial Sequence
  Description of Artificial Sequence: Synthetic oligonucleotide
ccguaggaucuacucgggc

SEQ ID NO: 112034 - RNA, 19 nt, Artificial Sequence
  Description of Artificial Sequence: Synthetic oligonucleotide
gugggauaagagccaaguu

SEQ ID NO: 112035 - RNA, 19 nt, Artificial Sequence
  Description of Artificial Sequence: Synthetic oligonucleotide
ggauaagagccaaguuuaa

SEQ ID NO: 112036 - RNA, 19 nt, Artificial Sequence
  Description of Artificial Sequence: Synthetic oligonucleotide
cuggacuagcuuguucuua

SEQ ID NO: 112037 - RNA, 19 nt, Artificial Sequence
  Description of Artificial Sequence: Synthetic oligonucleotide
gucuuaagcuaacguuaau

SEQ ID NO: 112038 - RNA, 19 nt, Artificial Sequence
  Description of Artificial Sequence: Synthetic oligonucleotide
ccagauaacuccccagaua

SEQ ID NO: 112039 - RNA, 19 nt, Artificial Sequence
  Description of Artificial Sequence: Synthetic oligonucleotide
cuuccaucgucauguugau

SEQ ID NO: 112040 - RNA, 19 nt, Artificial Sequence
  Description of Artificial Sequence: Synthetic oligonucleotide
gucagcggcccguugccgu

SEQ ID NO: 112041 - RNA, 19 nt, Artificial Sequence
  Description of Artificial Sequence: Synthetic oligonucleotide
guaaugccaguuguugguu

SEQ ID NO: 112042 - RNA, 19 nt, Artificial Sequence
  Description of Artificial Sequence: Synthetic oligonucleotide
caucaaagucagugggauu

SEQ ID NO: 112043 - RNA, 19 nt, Artificial Sequence
  Description of Artificial Sequence: Synthetic oligonucleotide
ccgucagcggcccguugcc

SEQ ID NO: 112044 - RNA, 19 nt, Artificial Sequence
  Description of Artificial Sequence: Synthetic oligonucleotide
cccguagccauucuuuagu

SEQ ID NO: 112045 - RNA, 19 nt, Artificial Sequence
  Description of Artificial Sequence: Synthetic oligonucleotide
cucgggccccuuuaagaau

SEQ ID NO: 112046 - RNA, 19 nt, Artificial Sequence
  Description of Artificial Sequence: Synthetic oligonucleotide
uucuggcauuuaggauaaa

SEQ ID NO: 112047 - RNA, 19 nt, Artificial Sequence
  Description of Artificial Sequence: Synthetic oligonucleotide
gcuuaggaguaaugccagu

SEQ ID NO: 112048 - RNA, 19 nt, Artificial Sequence
  Description of Artificial Sequence: Synthetic oligonucleotide
cagcggcccguugccguag

SEQ ID NO: 112049 - RNA, 19 nt, Artificial Sequence
  Description of Artificial Sequence: Synthetic oligonucleotide
cguagccauucuuuaguua

SEQ ID NO: 112050 - RNA, 19 nt, Artificial Sequence
  Description of Artificial Sequence: Synthetic oligonucleotide
ggccgucagcggcccguug

SEQ ID NO: 112051 - RNA, 19 nt, Artificial Sequence
  Description of Artificial Sequence: Synthetic oligonucleotide
gccuuacaaaacgcacacu

SEQ ID NO: 112052 - RNA, 19 nt, Artificial Sequence
  Description of Artificial Sequence: Synthetic oligonucleotide
cgucagcggcccguugccg

SEQ ID NO: 112053 - RNA, 19 nt, Artificial Sequence
  Description of Artificial Sequence: Synthetic oligonucleotide
ccguagccauucuuuaguu

SEQ ID NO: 112054 - RNA, 19 nt, Artificial Sequence
  Description of Artificial Sequence: Synthetic oligonucleotide
gccuccugaaugagauuau

SEQ ID NO: 112055 - RNA, 19 nt, Artificial Sequence
  Description of Artificial Sequence: Synthetic oligonucleotide
cccguugccguaggaucua

SEQ ID NO: 112056 - RNA, 19 nt, Artificial Sequence
  Description of Artificial Sequence: Synthetic oligonucleotide
cggccgucagcggcccguu

SEQ ID NO: 112057 - RNA, 19 nt, Artificial Sequence
  Description of Artificial Sequence: Synthetic oligonucleotide
uguauauauauauauauuc

SEQ ID NO: 112058 - RNA, 19 nt, Artificial Sequence
  Description of Artificial Sequence: Synthetic oligonucleotide
aaauuaaccauggagauga

SEQ ID NO: 112059 - RNA, 19 nt, Artificial Sequence
  Description of Artificial Sequence: Synthetic oligonucleotide
ucaaccuacuccuagaugc

SEQ ID NO: 112060 - RNA, 19 nt, Artificial Sequence
  Description of Artificial Sequence: Synthetic oligonucleotide
aaugaauguuguuugaaca

SEQ ID NO: 112061 - RNA, 19 nt, Artificial Sequence
  Description of Artificial Sequence: Synthetic oligonucleotide
augaaacacagauagugcc

SEQ ID NO: 112062 - RNA, 19 nt, Artificial Sequence
  Description of Artificial Sequence: Synthetic oligonucleotide
uauaaucugguucaagugc

SEQ ID NO: 112063 - RNA, 19 nt, Artificial Sequence
  Description of Artificial Sequence: Synthetic oligonucleotide
ucaacuaugccccguaagg

SEQ ID NO: 112064 - RNA, 19 nt, Artificial Sequence
  Description of Artificial Sequence: Synthetic oligonucleotide
uauauauauauauauucgu

SEQ ID NO: 112065 - RNA, 19 nt, Artificial Sequence
  Description of Artificial Sequence: Synthetic oligonucleotide
ucugagacgaacauaggag

SEQ ID NO: 112066 - RNA, 19 nt, Artificial Sequence
  Description of Artificial Sequence: Synthetic oligonucleotide
uguacgaagaggcccaugg

SEQ ID NO: 112067 - RNA, 19 nt, Artificial Sequence
  Description of Artificial Sequence: Synthetic oligonucleotide
aguguuauccucuaacauc

SEQ ID NO: 112068 - RNA, 19 nt, Artificial Sequence
  Description of Artificial Sequence: Synthetic oligonucleotide
uauauauauauauucguaa

SEQ ID NO: 112069 - RNA, 19 nt, Artificial Sequence
  Description of Artificial Sequence: Synthetic oligonucleotide
guauauauauauauauucg

SEQ ID NO: 112070 - RNA, 19 nt, Artificial Sequence
  Description of Artificial Sequence: Synthetic oligonucleotide
uaggauaauuauaagguac

SEQ ID NO: 112071 - RNA, 19 nt, Artificial Sequence
  Description of Artificial Sequence: Synthetic oligonucleotide
uguggguugacauucaugu

SEQ ID NO: 112072 - RNA, 19 nt, Artificial Sequence
  Description of Artificial Sequence: Synthetic oligonucleotide
ucuauaaucugguucaagu

SEQ ID NO: 112073 - RNA, 19 nt, Artificial Sequence
  Description of Artificial Sequence: Synthetic oligonucleotide
auauauucguaauaaccuc

SEQ ID NO: 112074 - RNA, 19 nt, Artificial Sequence
  Description of Artificial Sequence: Synthetic oligonucleotide
auucguaauaaccucucac

SEQ ID NO: 112075 - RNA, 19 nt, Artificial Sequence
  Description of Artificial Sequence: Synthetic oligonucleotide
ucuaacaucgcucucuuaa

SEQ ID NO: 112076 - RNA, 19 nt, Artificial Sequence
  Description of Artificial Sequence: Synthetic oligonucleotide
gaacauaggaguuccuugg

SEQ ID NO: 112077 - RNA, 19 nt, Artificial Sequence
  Description of Artificial Sequence: Synthetic oligonucleotide
aacuaugccccguaagggg

SEQ ID NO: 112078 - RNA, 19 nt, Artificial Sequence
  Description of Artificial Sequence: Synthetic oligonucleotide
uucguaauaaccucucacc

SEQ ID NO: 112079 - RNA, 19 nt, Artificial Sequence
  Description of Artificial Sequence: Synthetic oligonucleotide
ucguagauuacccuugcag

SEQ ID NO: 112080 - RNA, 19 nt, Artificial Sequence
  Description of Artificial Sequence: Synthetic oligonucleotide
uuuuguguagagauggccu

SEQ ID NO: 112081 - RNA, 19 nt, Artificial Sequence
  Description of Artificial Sequence: Synthetic oligonucleotide
ucauuugacuaucauguga

SEQ ID NO: 112082 - RNA, 19 nt, Artificial Sequence
  Description of Artificial Sequence: Synthetic oligonucleotide
uuagagaagacuacuucca

SEQ ID NO: 112083 - RNA, 19 nt, Artificial Sequence
  Description of Artificial Sequence: Synthetic oligonucleotide
uggauguauauauauauau

SEQ ID NO: 112084 - RNA, 19 nt, Artificial Sequence
  Description of Artificial Sequence: Synthetic oligonucleotide
aaugagaacuaaugggcca

SEQ ID NO: 112085 - RNA, 19 nt, Artificial Sequence
  Description of Artificial Sequence: Synthetic oligonucleotide
gauguauauauauauauau

SEQ ID NO: 112086 - RNA, 19 nt, Artificial Sequence
  Description of Artificial Sequence: Synthetic oligonucleotide
aguaguggggucuaguuca

SEQ ID NO: 112087 - RNA, 19 nt, Artificial Sequence
  Description of Artificial Sequence: Synthetic oligonucleotide
auauauauauauucguaau

SEQ ID NO: 112088 - RNA, 19 nt, Artificial Sequence
  Description of Artificial Sequence: Synthetic oligonucleotide
guaauaaccucucaccuac

SEQ ID NO: 112089 - RNA, 19 nt, Artificial Sequence
  Description of Artificial Sequence: Synthetic oligonucleotide
cagcccgugacucagaacg

SEQ ID NO: 112090 - RNA, 19 nt, Artificial Sequence
  Description of Artificial Sequence: Synthetic oligonucleotide
guauuaacauaucagcuuc

SEQ ID NO: 112091 - RNA, 19 nt, Artificial Sequence
  Description of Artificial Sequence: Synthetic oligonucleotide
auaaguccaaaccucugag

SEQ ID NO: 112092 - RNA, 19 nt, Artificial Sequence
  Description of Artificial Sequence: Synthetic oligonucleotide
auggugauugcauaauuug

SEQ ID NO: 112093 - RNA, 19 nt, Artificial Sequence
  Description of Artificial Sequence: Synthetic oligonucleotide
uuuugaagcuuaaaauuau

SEQ ID NO: 112094 - RNA, 19 nt, Artificial Sequence
  Description of Artificial Sequence: Synthetic oligonucleotide
aacaucgcucucuuaaaga

SEQ ID NO: 112095 - RNA, 19 nt, Artificial Sequence
  Description of Artificial Sequence: Synthetic oligonucleotide
aaaacgugguucuuucaga

SEQ ID NO: 112096 - RNA, 19 nt, Artificial Sequence
  Description of Artificial Sequence: Synthetic oligonucleotide
ucguaauaaccucucaccu

SEQ ID NO: 112097 - RNA, 19 nt, Artificial Sequence
  Description of Artificial Sequence: Synthetic oligonucleotide
gaaacaggaacuauggcga

SEQ ID NO: 112098 - RNA, 19 nt, Artificial Sequence
  Description of Artificial Sequence: Synthetic oligonucleotide
agaaacucgcuauuaauau

SEQ ID NO: 112099 - RNA, 19 nt, Artificial Sequence
  Description of Artificial Sequence: Synthetic oligonucleotide
gaugaaacacagauagugc

SEQ ID NO: 112100 - RNA, 19 nt, Artificial Sequence
  Description of Artificial Sequence: Synthetic oligonucleotide
cuauaaucugguucaagug

SEQ ID NO: 112101 - RNA, 19 nt, Artificial Sequence
  Description of Artificial Sequence: Synthetic oligonucleotide
gaugguacccuuuuccaac

SEQ ID NO: 112102 - RNA, 19 nt, Artificial Sequence
  Description of Artificial Sequence: Synthetic oligonucleotide
auaaccguaggauaauuau

SEQ ID NO: 112103 - RNA, 19 nt, Artificial Sequence
  Description of Artificial Sequence: Synthetic oligonucleotide
uuauccucuaacaucgcuc

SEQ ID NO: 112104 - RNA, 19 nt, Artificial Sequence
  Description of Artificial Sequence: Synthetic oligonucleotide
aaacucgcuauuaauauaa

SEQ ID NO: 112105 - RNA, 19 nt, Artificial Sequence
  Description of Artificial Sequence: Synthetic oligonucleotide
uucaacuaugccccguaag

SEQ ID NO: 112106 - RNA, 19 nt, Artificial Sequence
  Description of Artificial Sequence: Synthetic oligonucleotide
aacagcauaaccguaggau

SEQ ID NO: 112107 - RNA, 19 nt, Artificial Sequence
  Description of Artificial Sequence: Synthetic oligonucleotide
cauaaguauuaacauauca

SEQ ID NO: 112108 - RNA, 19 nt, Artificial Sequence
  Description of Artificial Sequence: Synthetic oligonucleotide
gcgaaugagaacuaauggg

SEQ ID NO: 112109 - RNA, 19 nt, Artificial Sequence
  Description of Artificial Sequence: Synthetic oligonucleotide
caaaacgugguucuuucag

SEQ ID NO: 112110 - RNA, 19 nt, Artificial Sequence
  Description of Artificial Sequence: Synthetic oligonucleotide
ucauguacgaagaggccca

SEQ ID NO: 112111 - RNA, 19 nt, Artificial Sequence
  Description of Artificial Sequence: Synthetic oligonucleotide
cucagaacggugacaaugc

SEQ ID NO: 112112 - RNA, 19 nt, Artificial Sequence
  Description of Artificial Sequence: Synthetic oligonucleotide
ggaguuaucacuaggagac

SEQ ID NO: 112113 - RNA, 19 nt, Artificial Sequence
  Description of Artificial Sequence: Synthetic oligonucleotide
agacgaacauaggaguucc

SEQ ID NO: 112114 - RNA, 19 nt, Artificial Sequence
  Description of Artificial Sequence: Synthetic oligonucleotide
uacacagaugucugagacg

SEQ ID NO: 112115 - RNA, 19 nt, Artificial Sequence
  Description of Artificial Sequence: Synthetic oligonucleotide
uuuaaagagggugaguaua

SEQ ID NO: 112116 - RNA, 19 nt, Artificial Sequence
  Description of Artificial Sequence: Synthetic oligonucleotide
uguuguuucgaugaagaaa

SEQ ID NO: 112117 - RNA, 19 nt, Artificial Sequence
  Description of Artificial Sequence: Synthetic oligonucleotide
aaacgugguucuuucagaa

SEQ ID NO: 112118 - RNA, 19 nt, Artificial Sequence
  Description of Artificial Sequence: Synthetic oligonucleotide
acaguaucauguuguuucg

SEQ ID NO: 112119 - RNA, 19 nt, Artificial Sequence
  Description of Artificial Sequence: Synthetic oligonucleotide
aaccguaggauaauuauaa

SEQ ID NO: 112120 - RNA, 19 nt, Artificial Sequence
  Description of Artificial Sequence: Synthetic oligonucleotide
cugucaagaugauggaccg

SEQ ID NO: 112121 - RNA, 19 nt, Artificial Sequence
  Description of Artificial Sequence: Synthetic oligonucleotide
uggugauugcauaauuugu

SEQ ID NO: 112122 - RNA, 19 nt, Artificial Sequence
  Description of Artificial Sequence: Synthetic oligonucleotide
gaagacuacuuccagcaca

SEQ ID NO: 112123 - RNA, 19 nt, Artificial Sequence
  Description of Artificial Sequence: Synthetic oligonucleotide
caaacuauagaagaacuca

SEQ ID NO: 112124 - RNA, 19 nt, Artificial Sequence
  Description of Artificial Sequence: Synthetic oligonucleotide
uugacuaucaugugacauc

SEQ ID NO: 112125 - RNA, 19 nt, Artificial Sequence
  Description of Artificial Sequence: Synthetic oligonucleotide
ugacaaaguagaccaaguc

SEQ ID NO: 112126 - RNA, 19 nt, Artificial Sequence
  Description of Artificial Sequence: Synthetic oligonucleotide
ugacuaucaugugacauca

SEQ ID NO: 112127 - RNA, 19 nt, Artificial Sequence
  Description of Artificial Sequence: Synthetic oligonucleotide
aacagauagcccacuauug

SEQ ID NO: 112128 - RNA, 19 nt, Artificial Sequence
  Description of Artificial Sequence: Synthetic oligonucleotide
ggcgaaugagaacuaaugg

SEQ ID NO: 112129 - RNA, 19 nt, Artificial Sequence
  Description of Artificial Sequence: Synthetic oligonucleotide
auaugcuguaucccaaaug

SEQ ID NO: 112130 - RNA, 19 nt, Artificial Sequence
  Description of Artificial Sequence: Synthetic oligonucleotide
aaggccauagcuccuacuu

SEQ ID NO: 112131 - RNA, 19 nt, Artificial Sequence
  Description of Artificial Sequence: Synthetic oligonucleotide
uagugggcgaaugagaacu

SEQ ID NO: 112132 - RNA, 19 nt, Artificial Sequence
  Description of Artificial Sequence: Synthetic oligonucleotide
guuucgaugaagaaaaucu

SEQ ID NO: 112133 - RNA, 19 nt, Artificial Sequence
  Description of Artificial Sequence: Synthetic oligonucleotide
ucgcuauuaauauaauuuu

SEQ ID NO: 112134 - RNA, 19 nt, Artificial Sequence
  Description of Artificial Sequence: Synthetic oligonucleotide
aguuaucacuaggagacag

SEQ ID NO: 112135 - RNA, 19 nt, Artificial Sequence
  Description of Artificial Sequence: Synthetic oligonucleotide
uuugacuaucaugugacau

SEQ ID NO: 112136 - RNA, 19 nt, Artificial Sequence
  Description of Artificial Sequence: Synthetic oligonucleotide
guagauuacccuugcagca

SEQ ID NO: 112137 - RNA, 19 nt, Artificial Sequence
  Description of Artificial Sequence: Synthetic oligonucleotide
cuuuuguguagagauggcc

SEQ ID NO: 112138 - RNA, 19 nt, Artificial Sequence
  Description of Artificial Sequence: Synthetic oligonucleotide
cagauagugccacauguug

SEQ ID NO: 112139 - RNA, 19 nt, Artificial Sequence
  Description of Artificial Sequence: Synthetic oligonucleotide
aguuauggugauugcauaa

SEQ ID NO: 112140 - RNA, 19 nt, Artificial Sequence
  Description of Artificial Sequence: Synthetic oligonucleotide
ccguaggauaauuauaagg

SEQ ID NO: 112141 - RNA, 19 nt, Artificial Sequence
  Description of Artificial Sequence: Synthetic oligonucleotide
cucuuaaagaaauaccuua

SEQ ID NO: 112142 - RNA, 19 nt, Artificial Sequence
  Description of Artificial Sequence: Synthetic oligonucleotide
acacuuaauggccagcaau

SEQ ID NO: 112143 - RNA, 19 nt, Artificial Sequence
  Description of Artificial Sequence: Synthetic oligonucleotide
uggggucuaguucaaagau

SEQ ID NO: 112144 - RNA, 19 nt, Artificial Sequence
  Description of Artificial Sequence: Synthetic oligonucleotide
auauauauauauauucgua

SEQ ID NO: 112145 - RNA, 19 nt, Artificial Sequence
  Description of Artificial Sequence: Synthetic oligonucleotide
auauucguaauaaccucuc

SEQ ID NO: 112146 - RNA, 19 nt, Artificial Sequence
  Description of Artificial Sequence: Synthetic oligonucleotide
uacuuugcacccauccaga

SEQ ID NO: 112147 - RNA, 19 nt, Artificial Sequence
  Description of Artificial Sequence: Synthetic oligonucleotide
uaaccguaggauaauuaua

SEQ ID NO: 112148 - RNA, 19 nt, Artificial Sequence
  Description of Artificial Sequence: Synthetic oligonucleotide
cauuaagcaaagucucuuc

SEQ ID NO: 112149 - RNA, 19 nt, Artificial Sequence
  Description of Artificial Sequence: Synthetic oligonucleotide
acaucgcucucuuaaagaa

SEQ ID NO: 112150 - RNA, 19 nt, Artificial Sequence
  Description of Artificial Sequence: Synthetic oligonucleotide
aaguuauggugauugcaua

SEQ ID NO: 112151 - RNA, 19 nt, Artificial Sequence
  Description of Artificial Sequence: Synthetic oligonucleotide
uggaccgguguacucagug

SEQ ID NO: 112152 - RNA, 19 nt, Artificial Sequence
  Description of Artificial Sequence: Synthetic oligonucleotide
acuaaugggccauacccaa

SEQ ID NO: 112153 - RNA, 19 nt, Artificial Sequence
  Description of Artificial Sequence: Synthetic oligonucleotide
ccuguuauacuuugcaccc

SEQ ID NO: 112154 - RNA, 19 nt, Artificial Sequence
  Description of Artificial Sequence: Synthetic oligonucleotide
ggagagguacaguucaucc

SEQ ID NO: 112155 - RNA, 19 nt, Artificial Sequence
  Description of Artificial Sequence: Synthetic oligonucleotide
uuuguguagagauggccua

SEQ ID NO: 112156 - RNA, 19 nt, Artificial Sequence
  Description of Artificial Sequence: Synthetic oligonucleotide
cucgcuauuaauauaauuu

SEQ ID NO: 112157 - RNA, 19 nt, Artificial Sequence
  Description of Artificial Sequence: Synthetic oligonucleotide
uucaagugcaaaucaggua

SEQ ID NO: 112158 - RNA, 19 nt, Artificial Sequence
  Description of Artificial Sequence: Synthetic oligonucleotide
gguucaagugcaaaucagg

SEQ ID NO: 112159 - RNA, 19 nt, Artificial Sequence
  Description of Artificial Sequence: Synthetic oligonucleotide
auaggaguuccuugggaca

SEQ ID NO: 112160 - RNA, 19 nt, Artificial Sequence
  Description of Artificial Sequence: Synthetic oligonucleotide
ugguccuuuaguuccgaca

SEQ ID NO: 112161 - RNA, 19 nt, Artificial Sequence
  Description of Artificial Sequence: Synthetic oligonucleotide
aacacagauagugccacau

SEQ ID NO: 112162 - RNA, 19 nt, Artificial Sequence
  Description of Artificial Sequence: Synthetic oligonucleotide
guuaucacuaggagacagg

SEQ ID NO: 112163 - RNA, 19 nt, Artificial Sequence
  Description of Artificial Sequence: Synthetic oligonucleotide
uucucaaccuacuccuaga

SEQ ID NO: 112164 - RNA, 19 nt, Artificial Sequence
  Description of Artificial Sequence: Synthetic oligonucleotide
gcgggugacacuuuuaaug

SEQ ID NO: 112165 - RNA, 19 nt, Artificial Sequence
  Description of Artificial Sequence: Synthetic oligonucleotide
agguacaaaauugcccagg

SEQ ID NO: 112166 - RNA, 19 nt, Artificial Sequence
  Description of Artificial Sequence: Synthetic oligonucleotide
aggauguccuagaaggccg

SEQ ID NO: 112167 - RNA, 19 nt, Artificial Sequence
  Description of Artificial Sequence: Synthetic oligonucleotide
caaccuacuccuagaugcg

SEQ ID NO: 112168 - RNA, 19 nt, Artificial Sequence
  Description of Artificial Sequence: Synthetic oligonucleotide
caacuaugccccguaaggg

SEQ ID NO: 112169 - RNA, 19 nt, Artificial Sequence
  Description of Artificial Sequence: Synthetic oligonucleotide
ugagacgaacauaggaguu

SEQ ID NO: 112170 - RNA, 19 nt, Artificial Sequence
  Description of Artificial Sequence: Synthetic oligonucleotide
cuauugagaagagguaaac

SEQ ID NO: 112171 - RNA, 19 nt, Artificial Sequence
  Description of Artificial Sequence: Synthetic oligonucleotide
auaaccucucaccuacagu

SEQ ID NO: 112172 - RNA, 19 nt, Artificial Sequence
  Description of Artificial Sequence: Synthetic oligonucleotide
uucauugggcaaccugucu

SEQ ID NO: 112173 - RNA, 19 nt, Artificial Sequence
  Description of Artificial Sequence: Synthetic oligonucleotide
cuagcaaaacgagacccag

SEQ ID NO: 112174 - RNA, 19 nt, Artificial Sequence
  Description of Artificial Sequence: Synthetic oligonucleotide
agagucggcaaaugugucu

SEQ ID NO: 112175 - RNA, 19 nt, Artificial Sequence
  Description of Artificial Sequence: Synthetic oligonucleotide
ucucaaccuacuccuagau

SEQ ID NO: 112176 - RNA, 19 nt, Artificial Sequence
  Description of Artificial Sequence: Synthetic oligonucleotide
accguaggauaauuauaag

SEQ ID NO: 112177 - RNA, 19 nt, Artificial Sequence
  Description of Artificial Sequence: Synthetic oligonucleotide
agaacagauagcccacuau

SEQ ID NO: 112178 - RNA, 19 nt, Artificial Sequence
  Description of Artificial Sequence: Synthetic oligonucleotide
cauaaguccaaaccucuga

SEQ ID NO: 112179 - RNA, 19 nt, Artificial Sequence
  Description of Artificial Sequence: Synthetic oligonucleotide
uugcgggugacacuuuuaa

SEQ ID NO: 112180 - RNA, 19 nt, Artificial Sequence
  Description of Artificial Sequence: Synthetic oligonucleotide
auaauuuuggcagcagcau

SEQ ID NO: 112181 - RNA, 19 nt, Artificial Sequence
  Description of Artificial Sequence: Synthetic oligonucleotide
uuggcacuaguagacaagu

SEQ ID NO: 112182 - RNA, 19 nt, Artificial Sequence
  Description of Artificial Sequence: Synthetic oligonucleotide
ugaugguacccuuuuccaa

SEQ ID NO: 112183 - RNA, 19 nt, Artificial Sequence
  Description of Artificial Sequence: Synthetic oligonucleotide
aggaccgcugucaagauga

SEQ ID NO: 112184 - RNA, 19 nt, Artificial Sequence
  Description of Artificial Sequence: Synthetic oligonucleotide
aucauuugccaaacucucg

SEQ ID NO: 112185 - RNA, 19 nt, Artificial Sequence
  Description of Artificial Sequence: Synthetic oligonucleotide
caaaguagaccaagucuuc

SEQ ID NO: 112186 - RNA, 19 nt, Artificial Sequence
  Description of Artificial Sequence: Synthetic oligonucleotide
gagucggcaaaugugucug

SEQ ID NO: 112187 - RNA, 19 nt, Artificial Sequence
  Description of Artificial Sequence: Synthetic oligonucleotide
uguucaacuaugccccgua

SEQ ID NO: 112188 - RNA, 19 nt, Artificial Sequence
  Description of Artificial Sequence: Synthetic oligonucleotide
ucagaacggugacaaugca

SEQ ID NO: 112189 - RNA, 19 nt, Artificial Sequence
  Description of Artificial Sequence: Synthetic oligonucleotide
gaguaguggggucuaguuc

SEQ ID NO: 112190 - RNA, 19 nt, Artificial Sequence
  Description of Artificial Sequence: Synthetic oligonucleotide
gucaagaugauggaccguc

SEQ ID NO: 112191 - RNA, 19 nt, Artificial Sequence
  Description of Artificial Sequence: Synthetic oligonucleotide
aaaccucugagaguagcaa

SEQ ID NO: 112192 - RNA, 19 nt, Artificial Sequence
  Description of Artificial Sequence: Synthetic oligonucleotide
uuuccaagcuaaaguguua

SEQ ID NO: 112193 - RNA, 19 nt, Artificial Sequence
  Description of Artificial Sequence: Synthetic oligonucleotide
aaacaggaacuauggcgaa

SEQ ID NO: 112194 - RNA, 19 nt, Artificial Sequence
  Description of Artificial Sequence: Synthetic oligonucleotide
gaaacucgcuauuaauaua

SEQ ID NO: 112195 - RNA, 19 nt, Artificial Sequence
  Description of Artificial Sequence: Synthetic oligonucleotide
auggcgaaugccuccuuug

SEQ ID NO: 112196 - RNA, 19 nt, Artificial Sequence
  Description of Artificial Sequence: Synthetic oligonucleotide
auuugacuaucaugugaca

SEQ ID NO: 112197 - RNA, 19 nt, Artificial Sequence
  Description of Artificial Sequence: Synthetic oligonucleotide
acgagacccagguacaaaa

SEQ ID NO: 112198 - RNA, 19 nt, Artificial Sequence
  Description of Artificial Sequence: Synthetic oligonucleotide
auguauauauauauauauu

SEQ ID NO: 112199 - RNA, 19 nt, Artificial Sequence
  Description of Artificial Sequence: Synthetic oligonucleotide
uguuauccucuaacaucgc

SEQ ID NO: 112200 - RNA, 19 nt, Artificial Sequence
  Description of Artificial Sequence: Synthetic oligonucleotide
uuguguagagauggccuag

SEQ ID NO: 112201 - RNA, 19 nt, Artificial Sequence
  Description of Artificial Sequence: Synthetic oligonucleotide
gacgcgcacucccuguagg

SEQ ID NO: 112202 - RNA, 19 nt, Artificial Sequence
  Description of Artificial Sequence: Synthetic oligonucleotide
cguagauuacccuugcagc

SEQ ID NO: 112203 - RNA, 19 nt, Artificial Sequence
  Description of Artificial Sequence: Synthetic oligonucleotide
aauuaaccauggagaugac

SEQ ID NO: 112204 - RNA, 19 nt, Artificial Sequence
  Description of Artificial Sequence: Synthetic oligonucleotide
gaccgguguacucagugga

SEQ ID NO: 112205 - RNA, 19 nt, Artificial Sequence
  Description of Artificial Sequence: Synthetic oligonucleotide
gagacgaacauaggaguuc

SEQ ID NO: 112206 - RNA, 19 nt, Artificial Sequence
  Description of Artificial Sequence: Synthetic oligonucleotide
caucgggccauccccacag

SEQ ID NO: 112207 - RNA, 19 nt, Artificial Sequence
  Description of Artificial Sequence: Synthetic oligonucleotide
auuaaccauggagaugaca

SEQ ID NO: 112208 - RNA, 19 nt, Artificial Sequence
  Description of Artificial Sequence: Synthetic oligonucleotide
uacuccuagaugcguccug

SEQ ID NO: 112209 - RNA, 19 nt, Artificial Sequence
  Description of Artificial Sequence: Synthetic oligonucleotide
agauagugccacauguugu

SEQ ID NO: 112210 - RNA, 19 nt, Artificial Sequence
  Description of Artificial Sequence: Synthetic oligonucleotide
acuucgcagcccgugacuc

SEQ ID NO: 112211 - RNA, 19 nt, Artificial Sequence
  Description of Artificial Sequence: Synthetic oligonucleotide
ggccauagcuccuacuuug

SEQ ID NO: 112212 - RNA, 19 nt, Artificial Sequence
  Description of Artificial Sequence: Synthetic oligonucleotide
uucacagaccuggaguuau

SEQ ID NO: 112213 - RNA, 19 nt, Artificial Sequence
  Description of Artificial Sequence: Synthetic oligonucleotide
ugggcgaaugagaacuaau

SEQ ID NO: 112214 - RNA, 19 nt, Artificial Sequence
  Description of Artificial Sequence: Synthetic oligonucleotide
auagcccacuauugagaag

SEQ ID NO: 112215 - RNA, 19 nt, Artificial Sequence
  Description of Artificial Sequence: Synthetic oligonucleotide
gaaaggggccugcaacaac

SEQ ID NO: 112216 - RNA, 19 nt, Artificial Sequence
  Description of Artificial Sequence: Synthetic oligonucleotide
auggaccguccauugcggg

SEQ ID NO: 112217 - RNA, 19 nt, Artificial Sequence
  Description of Artificial Sequence: Synthetic oligonucleotide
uagauuacccuugcagcaa

SEQ ID NO: 112218 - RNA, 19 nt, Artificial Sequence
  Description of Artificial Sequence: Synthetic oligonucleotide
uauggcgaaugccuccuuu

SEQ ID NO: 112219 - RNA, 19 nt, Artificial Sequence
  Description of Artificial Sequence: Synthetic oligonucleotide
ccuggggaaccaaucaagg

SEQ ID NO: 112220 - RNA, 19 nt, Artificial Sequence
  Description of Artificial Sequence: Synthetic oligonucleotide
aaaucacgugacauagaaa

SEQ ID NO: 112221 - RNA, 19 nt, Artificial Sequence
  Description of Artificial Sequence: Synthetic oligonucleotide
cccgugacaaaguagacca

SEQ ID NO: 112222 - RNA, 19 nt, Artificial Sequence
  Description of Artificial Sequence: Synthetic oligonucleotide
cagcauaaccguaggauaa

SEQ ID NO: 112223 - RNA, 19 nt, Artificial Sequence
  Description of Artificial Sequence: Synthetic oligonucleotide
auguuguuucgaugaagaa

SEQ ID NO: 112224 - RNA, 19 nt, Artificial Sequence
  Description of Artificial Sequence: Synthetic oligonucleotide
cacuauugagaagagguaa

SEQ ID NO: 112225 - RNA, 19 nt, Artificial Sequence
  Description of Artificial Sequence: Synthetic oligonucleotide
agaaggccgauucuuuguu

SEQ ID NO: 112226 - RNA, 19 nt, Artificial Sequence
  Description of Artificial Sequence: Synthetic oligonucleotide
cauaaccguaggauaauua

SEQ ID NO: 112227 - RNA, 19 nt, Artificial Sequence
  Description of Artificial Sequence: Synthetic oligonucleotide
caaaucagguacuuucugu

SEQ ID NO: 112228 - RNA, 19 nt, Artificial Sequence
  Description of Artificial Sequence: Synthetic oligonucleotide
agauuacccuugcagcaaa

SEQ ID NO: 112229 - RNA, 19 nt, Artificial Sequence
  Description of Artificial Sequence: Synthetic oligonucleotide
uccuagaaggccgauucuu

SEQ ID NO: 112230 - RNA, 19 nt, Artificial Sequence
  Description of Artificial Sequence: Synthetic oligonucleotide
cguaggauaauuauaaggu

SEQ ID NO: 112231 - RNA, 19 nt, Artificial Sequence
  Description of Artificial Sequence: Synthetic oligonucleotide
gaacuauggcgaaugccuc

SEQ ID NO: 112232 - RNA, 19 nt, Artificial Sequence
  Description of Artificial Sequence: Synthetic oligonucleotide
uggaccguccauugcgggu

SEQ ID NO: 112233 - RNA, 19 nt, Artificial Sequence
  Description of Artificial Sequence: Synthetic oligonucleotide
aaccuacuccuagaugcgu

SEQ ID NO: 112234 - RNA, 19 nt, Artificial Sequence
  Description of Artificial Sequence: Synthetic oligonucleotide
acauaaguccaaaccucug

SEQ ID NO: 112235 - RNA, 19 nt, Artificial Sequence
  Description of Artificial Sequence: Synthetic oligonucleotide
acggagaccagagaguaua

SEQ ID NO: 112236 - RNA, 19 nt, Artificial Sequence
  Description of Artificial Sequence: Synthetic oligonucleotide
cucuuucuaagccacagau

SEQ ID NO: 112237 - RNA, 19 nt, Artificial Sequence
  Description of Artificial Sequence: Synthetic oligonucleotide
cuaacaucgcucucuuaaa

SEQ ID NO: 112238 - RNA, 19 nt, Artificial Sequence
  Description of Artificial Sequence: Synthetic oligonucleotide
cugagacgaacauaggagu

SEQ ID NO: 112239 - RNA, 19 nt, Artificial Sequence
  Description of Artificial Sequence: Synthetic oligonucleotide
acccaaugcugauaauaau

SEQ ID NO: 112240 - RNA, 19 nt, Artificial Sequence
  Description of Artificial Sequence: Synthetic oligonucleotide
acauaacucucuggaccgg

SEQ ID NO: 112241 - RNA, 19 nt, Artificial Sequence
  Description of Artificial Sequence: Synthetic oligonucleotide
ggaccgguguacucagugg

SEQ ID NO: 112242 - RNA, 19 nt, Artificial Sequence
  Description of Artificial Sequence: Synthetic oligonucleotide
gcacuaguagacaagucac

SEQ ID NO: 112243 - RNA, 19 nt, Artificial Sequence
  Description of Artificial Sequence: Synthetic oligonucleotide
guucaagugcaaaucaggu

SEQ ID NO: 112244 - RNA, 19 nt, Artificial Sequence
  Description of Artificial Sequence: Synthetic oligonucleotide
gggcgaaugagaacuaaug

SEQ ID NO: 112245 - RNA, 19 nt, Artificial Sequence
  Description of Artificial Sequence: Synthetic oligonucleotide
uccuaaggccauagcuccu

SEQ ID NO: 112246 - RNA, 19 nt, Artificial Sequence
  Description of Artificial Sequence: Synthetic oligonucleotide
guuauccucuaacaucgcu

SEQ ID NO: 112247 - RNA, 19 nt, Artificial Sequence
  Description of Artificial Sequence: Synthetic oligonucleotide
uuccacccgugacaaagua

SEQ ID NO: 112248 - RNA, 19 nt, Artificial Sequence
  Description of Artificial Sequence: Synthetic oligonucleotide
aacgagacccagguacaaa

SEQ ID NO: 112249 - RNA, 19 nt, Artificial Sequence
  Description of Artificial Sequence: Synthetic oligonucleotide
ccagaguucguuccacccg

SEQ ID NO: 112250 - RNA, 19 nt, Artificial Sequence
  Description of Artificial Sequence: Synthetic oligonucleotide
cauccgaguacaggaaauc

SEQ ID NO: 112251 - RNA, 19 nt, Artificial Sequence
  Description of Artificial Sequence: Synthetic oligonucleotide
agacgcgcacucccuguag

SEQ ID NO: 112252 - RNA, 19 nt, Artificial Sequence
  Description of Artificial Sequence: Synthetic oligonucleotide
gugacggucuuguugucaa

SEQ ID NO: 112253 - RNA, 19 nt, Artificial Sequence
  Description of Artificial Sequence: Synthetic oligonucleotide
ccuacuccuagaugcgucc

SEQ ID NO: 112254 - RNA, 19 nt, Artificial Sequence
  Description of Artificial Sequence: Synthetic oligonucleotide
acgugacauagaaauaaaa

SEQ ID NO: 112255 - RNA, 19 nt, Artificial Sequence
  Description of Artificial Sequence: Synthetic oligonucleotide
ggugauugcauaauuugua

SEQ ID NO: 112256 - RNA, 19 nt, Artificial Sequence
  Description of Artificial Sequence: Synthetic oligonucleotide
ggauguauauauauauaua

SEQ ID NO: 112257 - RNA, 19 nt, Artificial Sequence
  Description of Artificial Sequence: Synthetic oligonucleotide
caaaauugcccaggggcca

SEQ ID NO: 112258 - RNA, 19 nt, Artificial Sequence
  Description of Artificial Sequence: Synthetic oligonucleotide
auaacucucuggaccggug

SEQ ID NO: 112259 - RNA, 19 nt, Artificial Sequence
  Description of Artificial Sequence: Synthetic oligonucleotide
gauuacccuugcagcaaac

SEQ ID NO: 112260 - RNA, 19 nt, Artificial Sequence
  Description of Artificial Sequence: Synthetic oligonucleotide
guggauguauauauauaua

SEQ ID NO: 112261 - RNA, 19 nt, Artificial Sequence
  Description of Artificial Sequence: Synthetic oligonucleotide
agaaaucacgugacauaga

SEQ ID NO: 112262 - RNA, 19 nt, Artificial Sequence
  Description of Artificial Sequence: Synthetic oligonucleotide
cacgugacauagaaauaaa

SEQ ID NO: 112263 - RNA, 19 nt, Artificial Sequence
  Description of Artificial Sequence: Synthetic oligonucleotide
cugcuuacaguucaguuuu

SEQ ID NO: 112264 - RNA, 19 nt, Artificial Sequence
  Description of Artificial Sequence: Synthetic oligonucleotide
caucgcucucuuaaagaaa

SEQ ID NO: 112265 - RNA, 19 nt, Artificial Sequence
  Description of Artificial Sequence: Synthetic oligonucleotide
agcauaaccguaggauaau

SEQ ID NO: 112266 - RNA, 19 nt, Artificial Sequence
  Description of Artificial Sequence: Synthetic oligonucleotide
aagcaucgggccaucccca

SEQ ID NO: 112267 - RNA, 19 nt, Artificial Sequence
  Description of Artificial Sequence: Synthetic oligonucleotide
ucgcucucuuaaagaaaua

SEQ ID NO: 112268 - RNA, 19 nt, Artificial Sequence
  Description of Artificial Sequence: Synthetic oligonucleotide
accagagaguauaccauuu

SEQ ID NO: 112269 - RNA, 19 nt, Artificial Sequence
  Description of Artificial Sequence: Synthetic oligonucleotide
gacuugcuucagaacucug

SEQ ID NO: 112270 - RNA, 19 nt, Artificial Sequence
  Description of Artificial Sequence: Synthetic oligonucleotide
ggauaauuauaagguacaa

SEQ ID NO: 112271 - RNA, 19 nt, Artificial Sequence
  Description of Artificial Sequence: Synthetic oligonucleotide
aggccauagcuccuacuuu

SEQ ID NO: 112272 - RNA, 19 nt, Artificial Sequence
  Description of Artificial Sequence: Synthetic oligonucleotide
auguaaccuuagugggcga

SEQ ID NO: 112273 - RNA, 19 nt, Artificial Sequence
  Description of Artificial Sequence: Synthetic oligonucleotide
ggagaccagagaguauacc

SEQ ID NO: 112274 - RNA, 19 nt, Artificial Sequence
  Description of Artificial Sequence: Synthetic oligonucleotide
acgcgcacucccuguagga

SEQ ID NO: 112275 - RNA, 19 nt, Artificial Sequence
  Description of Artificial Sequence: Synthetic oligonucleotide
gaguuaucacuaggagaca

SEQ ID NO: 112276 - RNA, 19 nt, Artificial Sequence
  Description of Artificial Sequence: Synthetic oligonucleotide
guuauggugauugcauaau

SEQ ID NO: 112277 - RNA, 19 nt, Artificial Sequence
  Description of Artificial Sequence: Synthetic oligonucleotide
uucaugugaggaggauguc

SEQ ID NO: 112278 - RNA, 19 nt, Artificial Sequence
  Description of Artificial Sequence: Synthetic oligonucleotide
gucguagauuacccuugca

SEQ ID NO: 112279 - RNA, 19 nt, Artificial Sequence
  Description of Artificial Sequence: Synthetic oligonucleotide
ggaccguccauugcgggug

SEQ ID NO: 112280 - RNA, 19 nt, Artificial Sequence
  Description of Artificial Sequence: Synthetic oligonucleotide
agguaccaaucuucagcau

SEQ ID NO: 112281 - RNA, 19 nt, Artificial Sequence
  Description of Artificial Sequence: Synthetic oligonucleotide
ggcgaaugccuccuuuguc

SEQ ID NO: 112282 - RNA, 19 nt, Artificial Sequence
  Description of Artificial Sequence: Synthetic oligonucleotide
cagaguucguuccacccgu

SEQ ID NO: 112283 - RNA, 19 nt, Artificial Sequence
  Description of Artificial Sequence: Synthetic oligonucleotide
auguacgaagaggcccaug

SEQ ID NO: 112284 - RNA, 19 nt, Artificial Sequence
  Description of Artificial Sequence: Synthetic oligonucleotide
ccucucaccuacaguauca

SEQ ID NO: 112285 - RNA, 19 nt, Artificial Sequence
  Description of Artificial Sequence: Synthetic oligonucleotide
cgggugacacuuuuaauga

SEQ ID NO: 112286 - RNA, 19 nt, Artificial Sequence
  Description of Artificial Sequence: Synthetic oligonucleotide
ccagguauuuguacacaga

SEQ ID NO: 112287 - RNA, 19 nt, Artificial Sequence
  Description of Artificial Sequence: Synthetic oligonucleotide
cccgugacucagaacggug

SEQ ID NO: 112288 - RNA, 19 nt, Artificial Sequence
  Description of Artificial Sequence: Synthetic oligonucleotide
auguccuagaaggccgauu

SEQ ID NO: 112289 - RNA, 19 nt, Artificial Sequence
  Description of Artificial Sequence: Synthetic oligonucleotide
agaguucguuccacccgug

SEQ ID NO: 112290 - RNA, 19 nt, Artificial Sequence
  Description of Artificial Sequence: Synthetic oligonucleotide
auugcgggugacacuuuua

SEQ ID NO: 112291 - RNA, 19 nt, Artificial Sequence
  Description of Artificial Sequence: Synthetic oligonucleotide
ggugacggucuuguuguca

SEQ ID NO: 112292 - RNA, 19 nt, Artificial Sequence
  Description of Artificial Sequence: Synthetic oligonucleotide
cagccguuucauugggcaa

SEQ ID NO: 112293 - RNA, 19 nt, Artificial Sequence
  Description of Artificial Sequence: Synthetic oligonucleotide
gacuaucaugugacaucaa

SEQ ID NO: 112294 - RNA, 19 nt, Artificial Sequence
  Description of Artificial Sequence: Synthetic oligonucleotide
cauaacucucuggaccggu

SEQ ID NO: 112295 - RNA, 19 nt, Artificial Sequence
  Description of Artificial Sequence: Synthetic oligonucleotide
guucacagaccuggaguua

SEQ ID NO: 112296 - RNA, 19 nt, Artificial Sequence
  Description of Artificial Sequence: Synthetic oligonucleotide
cuaaugggccauacccaau

SEQ ID NO: 112297 - RNA, 19 nt, Artificial Sequence
  Description of Artificial Sequence: Synthetic oligonucleotide
ccaaaacgugguucuuuca

SEQ ID NO: 112298 - RNA, 19 nt, Artificial Sequence
  Description of Artificial Sequence: Synthetic oligonucleotide
gugggcgaaugagaacuaa

SEQ ID NO: 112299 - RNA, 19 nt, Artificial Sequence
  Description of Artificial Sequence: Synthetic oligonucleotide
guccuagaaggccgauucu

SEQ ID NO: 112300 - RNA, 19 nt, Artificial Sequence
  Description of Artificial Sequence: Synthetic oligonucleotide
agugggcgaaugagaacua

SEQ ID NO: 112301 - RNA, 19 nt, Artificial Sequence
  Description of Artificial Sequence: Synthetic oligonucleotide
ucguuccacccgugacaaa

SEQ ID NO: 112302 - RNA, 19 nt, Artificial Sequence
  Description of Artificial Sequence: Synthetic oligonucleotide
cccuugcagcaaacagagg

SEQ ID NO: 112303 - RNA, 19 nt, Artificial Sequence
  Description of Artificial Sequence: Synthetic oligonucleotide
cucacacgugugcuccuua

SEQ ID NO: 112304 - RNA, 19 nt, Artificial Sequence
  Description of Artificial Sequence: Synthetic oligonucleotide
ggcaaccugucuacuucca

SEQ ID NO: 112305 - RNA, 19 nt, Artificial Sequence
  Description of Artificial Sequence: Synthetic oligonucleotide
cacuucgcagcccgugacu

SEQ ID NO: 112306 - RNA, 19 nt, Artificial Sequence
  Description of Artificial Sequence: Synthetic oligonucleotide
cauacccaaugcugauaau

SEQ ID NO: 112307 - RNA, 19 nt, Artificial Sequence
  Description of Artificial Sequence: Synthetic oligonucleotide
cucucuggaccgguguacu

SEQ ID NO: 112308 - RNA, 19 nt, Artificial Sequence
  Description of Artificial Sequence: Synthetic oligonucleotide
cuacuccuagaugcguccu

SEQ ID NO: 112309 - RNA, 19 nt, Artificial Sequence
  Description of Artificial Sequence: Synthetic oligonucleotide
gagcagcgucucacacgug

SEQ ID NO: 112310 - RNA, 19 nt, Artificial Sequence
  Description of Artificial Sequence: Synthetic oligonucleotide
ccuagaaggccgauucuuu

SEQ ID NO: 112311 - RNA, 19 nt, Artificial Sequence
  Description of Artificial Sequence: Synthetic oligonucleotide
ccuacaguaucauguuguu

SEQ ID NO: 112312 - RNA, 19 nt, Artificial Sequence
  Description of Artificial Sequence: Synthetic oligonucleotide
cacggagaccagagaguau

SEQ ID NO: 112313 - RNA, 19 nt, Artificial Sequence
  Description of Artificial Sequence: Synthetic oligonucleotide
ccuaaggccauagcuccua

SEQ ID NO: 112314 - RNA, 19 nt, Artificial Sequence
  Description of Artificial Sequence: Synthetic oligonucleotide
gcauaaccguaggauaauu

SEQ ID NO: 112315 - RNA, 19 nt, Artificial Sequence
  Description of Artificial Sequence: Synthetic oligonucleotide
cauugccuucaggcacgga

SEQ ID NO: 112316 - RNA, 19 nt, Artificial Sequence
  Description of Artificial Sequence: Synthetic oligonucleotide
ccgugacaaaguagaccaa

SEQ ID NO: 112317 - RNA, 19 nt, Artificial Sequence
  Description of Artificial Sequence: Synthetic oligonucleotide
cauguacgaagaggcccau

SEQ ID NO: 112318 - RNA, 19 nt, Artificial Sequence
  Description of Artificial Sequence: Synthetic oligonucleotide
ccucuaacaucgcucucuu

SEQ ID NO: 112319 - RNA, 19 nt, Artificial Sequence
  Description of Artificial Sequence: Synthetic oligonucleotide
ccgguguacucaguggagu

SEQ ID NO: 112320 - RNA, 19 nt, Artificial Sequence
  Description of Artificial Sequence: Synthetic oligonucleotide
gcuuggugacagaccuucu

SEQ ID NO: 112321 - RNA, 19 nt, Artificial Sequence
  Description of Artificial Sequence: Synthetic oligonucleotide
ggaccgcugucaagaugau

SEQ ID NO: 112322 - RNA, 19 nt, Artificial Sequence
  Description of Artificial Sequence: Synthetic oligonucleotide
ccguuucauugggcaaccu

SEQ ID NO: 112323 - RNA, 19 nt, Artificial Sequence
  Description of Artificial Sequence: Synthetic oligonucleotide
auauaaaaccauuacauac

SEQ ID NO: 112324 - RNA, 19 nt, Artificial Sequence
  Description of Artificial Sequence: Synthetic oligonucleotide
uauauauauauauacuugg

SEQ ID NO: 112325 - RNA, 19 nt, Artificial Sequence
  Description of Artificial Sequence: Synthetic oligonucleotide
aaauaucaagacuaaaggg

SEQ ID NO: 112326 - RNA, 19 nt, Artificial Sequence
  Description of Artificial Sequence: Synthetic oligonucleotide
auugauaaggcauagacug

SEQ ID NO: 112327 - RNA, 19 nt, Artificial Sequence
  Description of Artificial Sequence: Synthetic oligonucleotide
uaaauauauauauauauac

SEQ ID NO: 112328 - RNA, 19 nt, Artificial Sequence
  Description of Artificial Sequence: Synthetic oligonucleotide
uuuaaauauauauauauau

SEQ ID NO: 112329 - RNA, 19 nt, Artificial Sequence
  Description of Artificial Sequence: Synthetic oligonucleotide
aauauauauauauauacuu

SEQ ID NO: 112330 - RNA, 19 nt, Artificial Sequence
  Description of Artificial Sequence: Synthetic oligonucleotide
aagaguaugagcuauauuu

SEQ ID NO: 112331 - RNA, 19 nt, Artificial Sequence
  Description of Artificial Sequence: Synthetic oligonucleotide
uuuaacauggagcuagugg

SEQ ID NO: 112332 - RNA, 19 nt, Artificial Sequence
  Description of Artificial Sequence: Synthetic oligonucleotide
cauucuaguaaacagaagg

SEQ ID NO: 112333 - RNA, 19 nt, Artificial Sequence
  Description of Artificial Sequence: Synthetic oligonucleotide
aaugguaccccauugacug

SEQ ID NO: 112334 - RNA, 19 nt, Artificial Sequence
  Description of Artificial Sequence: Synthetic oligonucleotide
uauuuaaauauauauauau

SEQ ID NO: 112335 - RNA, 19 nt, Artificial Sequence
  Description of Artificial Sequence: Synthetic oligonucleotide
aaagugauauccuguagac

SEQ ID NO: 112336 - RNA, 19 nt, Artificial Sequence
  Description of Artificial Sequence: Synthetic oligonucleotide
uauuaguuuguauagacug

SEQ ID NO: 112337 - RNA, 19 nt, Artificial Sequence
  Description of Artificial Sequence: Synthetic oligonucleotide
uuuuauaaagaguaugagc

SEQ ID NO: 112338 - RNA, 19 nt, Artificial Sequence
  Description of Artificial Sequence: Synthetic oligonucleotide
auaacugagaaccaacuuc

SEQ ID NO: 112339 - RNA, 19 nt, Artificial Sequence
  Description of Artificial Sequence: Synthetic oligonucleotide
ugggcaauagaccagaccc

SEQ ID NO: 112340 - RNA, 19 nt, Artificial Sequence
  Description of Artificial Sequence: Synthetic oligonucleotide
gacaguauguaauagguug

SEQ ID NO: 112341 - RNA, 19 nt, Artificial Sequence
  Description of Artificial Sequence: Synthetic oligonucleotide
aauccuaccuuugaaauuc

SEQ ID NO: 112342 - RNA, 19 nt, Artificial Sequence
  Description of Artificial Sequence: Synthetic oligonucleotide
uauauauauauacuuggga

SEQ ID NO: 112343 - RNA, 19 nt, Artificial Sequence
  Description of Artificial Sequence: Synthetic oligonucleotide
uuaacauggagcuagugga

SEQ ID NO: 112344 - RNA, 19 nt, Artificial Sequence
  Description of Artificial Sequence: Synthetic oligonucleotide
uacauauuaguuuguauag

SEQ ID NO: 112345 - RNA, 19 nt, Artificial Sequence
  Description of Artificial Sequence: Synthetic oligonucleotide
uuuguauagacugauagga

SEQ ID NO: 112346 - RNA, 19 nt, Artificial Sequence
  Description of Artificial Sequence: Synthetic oligonucleotide
aacuacccaagcuaaaauc

SEQ ID NO: 112347 - RNA, 19 nt, Artificial Sequence
  Description of Artificial Sequence: Synthetic oligonucleotide
ugggauagaaucauugcgg

SEQ ID NO: 112348 - RNA, 19 nt, Artificial Sequence
  Description of Artificial Sequence: Synthetic oligonucleotide
uccuaugaaucuaugaaag

SEQ ID NO: 112349 - RNA, 19 nt, Artificial Sequence
  Description of Artificial Sequence: Synthetic oligonucleotide
uuuacccuuuaccugaggg

SEQ ID NO: 112350 - RNA, 19 nt, Artificial Sequence
  Description of Artificial Sequence: Synthetic oligonucleotide
aauuacuaauccuagcuau

SEQ ID NO: 112351 - RNA, 19 nt, Artificial Sequence
  Description of Artificial Sequence: Synthetic oligonucleotide
uuaaauauauauauauaua

SEQ ID NO: 112352 - RNA, 19 nt, Artificial Sequence
  Description of Artificial Sequence: Synthetic oligonucleotide
agaaugaaaugguauuggc

SEQ ID NO: 112353 - RNA, 19 nt, Artificial Sequence
  Description of Artificial Sequence: Synthetic oligonucleotide
aaagcauuucuaaugcuac

SEQ ID NO: 112354 - RNA, 19 nt, Artificial Sequence
  Description of Artificial Sequence: Synthetic oligonucleotide
aaauauauauauauauacu

SEQ ID NO: 112355 - RNA, 19 nt, Artificial Sequence
  Description of Artificial Sequence: Synthetic oligonucleotide
aggcaucaaaauuuggugc

SEQ ID NO: 112356 - RNA, 19 nt, Artificial Sequence
  Description of Artificial Sequence: Synthetic oligonucleotide
cuuacaugaaagcuuauac

SEQ ID NO: 112357 - RNA, 19 nt, Artificial Sequence
  Description of Artificial Sequence: Synthetic oligonucleotide
gaaucaguaugucuuaccc

SEQ ID NO: 112358 - RNA, 19 nt, Artificial Sequence
  Description of Artificial Sequence: Synthetic oligonucleotide
aauuuaccuaacauuguac

SEQ ID NO: 112359 - RNA, 19 nt, Artificial Sequence
  Description of Artificial Sequence: Synthetic oligonucleotide
gauaggaagaccccauagg

SEQ ID NO: 112360 - RNA, 19 nt, Artificial Sequence
  Description of Artificial Sequence: Synthetic oligonucleotide
augggauagaaucauugcg

SEQ ID NO: 112361 - RNA, 19 nt, Artificial Sequence
  Description of Artificial Sequence: Synthetic oligonucleotide
cauauuaguuuguauagac

SEQ ID NO: 112362 - RNA, 19 nt, Artificial Sequence
  Description of Artificial Sequence: Synthetic oligonucleotide
aaauuuggaaaagauccag

SEQ ID NO: 112363 - RNA, 19 nt, Artificial Sequence
  Description of Artificial Sequence: Synthetic oligonucleotide
agauuaacagcccaugucu

SEQ ID NO: 112364 - RNA, 19 nt, Artificial Sequence
  Description of Artificial Sequence: Synthetic oligonucleotide
aaagcuuauacaaagcuaa

SEQ ID NO: 112365 - RNA, 19 nt, Artificial Sequence
  Description of Artificial Sequence: Synthetic oligonucleotide
acuacccaagcuaaaaucc

SEQ ID NO: 112366 - RNA, 19 nt, Artificial Sequence
  Description of Artificial Sequence: Synthetic oligonucleotide
guuuguauagacugauagg

SEQ ID NO: 112367 - RNA, 19 nt, Artificial Sequence
  Description of Artificial Sequence: Synthetic oligonucleotide
aagacuaaagggcucuuca

SEQ ID NO: 112368 - RNA, 19 nt, Artificial Sequence
  Description of Artificial Sequence: Synthetic oligonucleotide
acaaugguaccccauugac

SEQ ID NO: 112369 - RNA, 19 nt, Artificial Sequence
  Description of Artificial Sequence: Synthetic oligonucleotide
auauauauauauauacuug

SEQ ID NO: 112370 - RNA, 19 nt, Artificial Sequence
  Description of Artificial Sequence: Synthetic oligonucleotide
augagaagaaggcugaccu

SEQ ID NO: 112371 - RNA, 19 nt, Artificial Sequence
  Description of Artificial Sequence: Synthetic oligonucleotide
auauauauauauacuuggg

SEQ ID NO: 112372 - RNA, 19 nt, Artificial Sequence
  Description of Artificial Sequence: Synthetic oligonucleotide
ugauguagccuuaguaaag

SEQ ID NO: 112373 - RNA, 19 nt, Artificial Sequence
  Description of Artificial Sequence: Synthetic oligonucleotide
uaugugcuaguaaaugccc

SEQ ID NO: 112374 - RNA, 19 nt, Artificial Sequence
  Description of Artificial Sequence: Synthetic oligonucleotide
acgaucuaaaguuacaaaa

SEQ ID NO: 112375 - RNA, 19 nt, Artificial Sequence
  Description of Artificial Sequence: Synthetic oligonucleotide
aaaucugggacaugucucu

SEQ ID NO: 112376 - RNA, 19 nt, Artificial Sequence
  Description of Artificial Sequence: Synthetic oligonucleotide
aaauaggguaccuccuuug

SEQ ID NO: 112377 - RNA, 19 nt, Artificial Sequence
  Description of Artificial Sequence: Synthetic oligonucleotide
aaauuacuaauccuagcua

SEQ ID NO: 112378 - RNA, 19 nt, Artificial Sequence
  Description of Artificial Sequence: Synthetic oligonucleotide
ucugaaauagagagccugc

SEQ ID NO: 112379 - RNA, 19 nt, Artificial Sequence
  Description of Artificial Sequence: Synthetic oligonucleotide
uguuugaacaaugguaccc

SEQ ID NO: 112380 - RNA, 19 nt, Artificial Sequence
  Description of Artificial Sequence: Synthetic oligonucleotide
ucuaacuaguuucauguua

SEQ ID NO: 112381 - RNA, 19 nt, Artificial Sequence
  Description of Artificial Sequence: Synthetic oligonucleotide
aaccaugggcccuaaagca

SEQ ID NO: 112382 - RNA, 19 nt, Artificial Sequence
  Description of Artificial Sequence: Synthetic oligonucleotide
aguaugagcuauauuuggc

SEQ ID NO: 112383 - RNA, 19 nt, Artificial Sequence
  Description of Artificial Sequence: Synthetic oligonucleotide
uuacccuuuaccugagggg

SEQ ID NO: 112384 - RNA, 19 nt, Artificial Sequence
  Description of Artificial Sequence: Synthetic oligonucleotide
cuaagagauguccuguugc

SEQ ID NO: 112385 - RNA, 19 nt, Artificial Sequence
  Description of Artificial Sequence: Synthetic oligonucleotide
uauccuguagaccaauggu

SEQ ID NO: 112386 - RNA, 19 nt, Artificial Sequence
  Description of Artificial Sequence: Synthetic oligonucleotide
agcuaggagauugauaagg

SEQ ID NO: 112387 - RNA, 19 nt, Artificial Sequence
  Description of Artificial Sequence: Synthetic oligonucleotide
aagugauauccuguagacc

SEQ ID NO: 112388 - RNA, 19 nt, Artificial Sequence
  Description of Artificial Sequence: Synthetic oligonucleotide
cuguuuauuauuucagcac

SEQ ID NO: 112389 - RNA, 19 nt, Artificial Sequence
  Description of Artificial Sequence: Synthetic oligonucleotide
acugugacauacuaaagau

SEQ ID NO: 112390 - RNA, 19 nt, Artificial Sequence
  Description of Artificial Sequence: Synthetic oligonucleotide
agcuuuaacauggagcuag

SEQ ID NO: 112391 - RNA, 19 nt, Artificial Sequence
  Description of Artificial Sequence: Synthetic oligonucleotide
ugaaugugcuaagagaugu

SEQ ID NO: 112392 - RNA, 19 nt, Artificial Sequence
  Description of Artificial Sequence: Synthetic oligonucleotide
aguugcucagugcugcuac

SEQ ID NO: 112393 - RNA, 19 nt, Artificial Sequence
  Description of Artificial Sequence: Synthetic oligonucleotide
acauguugguccauuauac

SEQ ID NO: 112394 - RNA, 19 nt, Artificial Sequence
  Description of Artificial Sequence: Synthetic oligonucleotide
aaauucuugacuagaggca

SEQ ID NO: 112395 - RNA, 19 nt, Artificial Sequence
  Description of Artificial Sequence: Synthetic oligonucleotide
ugcaaaguuagguuccuga

SEQ ID NO: 112396 - RNA, 19 nt, Artificial Sequence
  Description of Artificial Sequence: Synthetic oligonucleotide
uagauuaacagcccauguc

SEQ ID NO: 112397 - RNA, 19 nt, Artificial Sequence
  Description of Artificial Sequence: Synthetic oligonucleotide
uggguuaugauagggagga

SEQ ID NO: 112398 - RNA, 19 nt, Artificial Sequence
  Description of Artificial Sequence: Synthetic oligonucleotide
ucaauuuaccuaacauugu

SEQ ID NO: 112399 - RNA, 19 nt, Artificial Sequence
  Description of Artificial Sequence: Synthetic oligonucleotide
cuagaggcaggguucauag

SEQ ID NO: 112400 - RNA, 19 nt, Artificial Sequence
  Description of Artificial Sequence: Synthetic oligonucleotide
uuuugaucgucacuguuua

SEQ ID NO: 112401 - RNA, 19 nt, Artificial Sequence
  Description of Artificial Sequence: Synthetic oligonucleotide
gaggguagaagcaaauuug

SEQ ID NO: 112402 - RNA, 19 nt, Artificial Sequence
  Description of Artificial Sequence: Synthetic oligonucleotide
aagcccuaccaucaaaggu

SEQ ID NO: 112403 - RNA, 19 nt, Artificial Sequence
  Description of Artificial Sequence: Synthetic oligonucleotide
ucguucacaucaucuaaag

SEQ ID NO: 112404 - RNA, 19 nt, Artificial Sequence
  Description of Artificial Sequence: Synthetic oligonucleotide
ucuagauuaacagcccaug

SEQ ID NO: 112405 - RNA, 19 nt, Artificial Sequence
  Description of Artificial Sequence: Synthetic oligonucleotide
guaugugcuaguaaaugcc

SEQ ID NO: 112406 - RNA, 19 nt, Artificial Sequence
  Description of Artificial Sequence: Synthetic oligonucleotide
auaaacauacuucccuuau

SEQ ID NO: 112407 - RNA, 19 nt, Artificial Sequence
  Description of Artificial Sequence: Synthetic oligonucleotide
guauuggcgacagagguug

SEQ ID NO: 112408 - RNA, 19 nt, Artificial Sequence
  Description of Artificial Sequence: Synthetic oligonucleotide
aaauccuaccuuugaaauu

SEQ ID NO: 112409 - RNA, 19 nt, Artificial Sequence
  Description of Artificial Sequence: Synthetic oligonucleotide
agaggguagaagcaaauuu

SEQ ID NO: 112410 - RNA, 19 nt, Artificial Sequence
  Description of Artificial Sequence: Synthetic oligonucleotide
aggugaaugugcuaagaga

SEQ ID NO: 112411 - RNA, 19 nt, Artificial Sequence
  Description of Artificial Sequence: Synthetic oligonucleotide
caaccaugggcccuaaagc

SEQ ID NO: 112412 - RNA, 19 nt, Artificial Sequence
  Description of Artificial Sequence: Synthetic oligonucleotide
uaaaacguugagacuggcu

SEQ ID NO: 112413 - RNA, 19 nt, Artificial Sequence
  Description of Artificial Sequence: Synthetic oligonucleotide
uuaggucauacagucagga

SEQ ID NO: 112414 - RNA, 19 nt, Artificial Sequence
  Description of Artificial Sequence: Synthetic oligonucleotide
ugugauggacaguauguaa

SEQ ID NO: 112415 - RNA, 19 nt, Artificial Sequence
  Description of Artificial Sequence: Synthetic oligonucleotide
uuagguuccugaucuucag

SEQ ID NO: 112416 - RNA, 19 nt, Artificial Sequence
  Description of Artificial Sequence: Synthetic oligonucleotide
ugcuaaguuucugaggucu

SEQ ID NO: 112417 - RNA, 19 nt, Artificial Sequence
  Description of Artificial Sequence: Synthetic oligonucleotide
cagugucucacuuguaggc

SEQ ID NO: 112418 - RNA, 19 nt, Artificial Sequence
  Description of Artificial Sequence: Synthetic oligonucleotide
aucauugcggcuguaaaca

SEQ ID NO: 112419 - RNA, 19 nt, Artificial Sequence
  Description of Artificial Sequence: Synthetic oligonucleotide
aauccuagcuaugcaacca

SEQ ID NO: 112420 - RNA, 19 nt, Artificial Sequence
  Description of Artificial Sequence: Synthetic oligonucleotide
auugcggcuguaaacagag

SEQ ID NO: 112421 - RNA, 19 nt, Artificial Sequence
  Description of Artificial Sequence: Synthetic oligonucleotide
agaaagcggugaauuagcc

SEQ ID NO: 112422 - RNA, 19 nt, Artificial Sequence
  Description of Artificial Sequence: Synthetic oligonucleotide
aaaggguaugugcuaguaa

SEQ ID NO: 112423 - RNA, 19 nt, Artificial Sequence
  Description of Artificial Sequence: Synthetic oligonucleotide
gaugacgaucuaaaguuac

SEQ ID NO: 112424 - RNA, 19 nt, Artificial Sequence
  Description of Artificial Sequence: Synthetic oligonucleotide
ugaggucuaagugugggcu

SEQ ID NO: 112425 - RNA, 19 nt, Artificial Sequence
  Description of Artificial Sequence: Synthetic oligonucleotide
ugccauugcaaagauaaaa

SEQ ID NO: 112426 - RNA, 19 nt, Artificial Sequence
  Description of Artificial Sequence: Synthetic oligonucleotide
uacuaauccuagcuaugca

SEQ ID NO: 112427 - RNA, 19 nt, Artificial Sequence
  Description of Artificial Sequence: Synthetic oligonucleotide
aguccaauggaugugugcu

SEQ ID NO: 112428 - RNA, 19 nt, Artificial Sequence
  Description of Artificial Sequence: Synthetic oligonucleotide
auuuaaauauauauauaua

SEQ ID NO: 112429 - RNA, 19 nt, Artificial Sequence
  Description of Artificial Sequence: Synthetic oligonucleotide
aggaaaccagcuuuaacau

SEQ ID NO: 112430 - RNA, 19 nt, Artificial Sequence
  Description of Artificial Sequence: Synthetic oligonucleotide
ugggcuuaggauuaauuuu

SEQ ID NO: 112431 - RNA, 19 nt, Artificial Sequence
  Description of Artificial Sequence: Synthetic oligonucleotide
aaagaguaugagcuauauu

SEQ ID NO: 112432 - RNA, 19 nt, Artificial Sequence
  Description of Artificial Sequence: Synthetic oligonucleotide
gaaaucugggacaugucuc

SEQ ID NO: 112433 - RNA, 19 nt, Artificial Sequence
  Description of Artificial Sequence: Synthetic oligonucleotide
aguaaaacguugagacugg

SEQ ID NO: 112434 - RNA, 19 nt, Artificial Sequence
  Description of Artificial Sequence: Synthetic oligonucleotide
ugaucgucacuguuuauua

SEQ ID NO: 112435 - RNA, 19 nt, Artificial Sequence
  Description of Artificial Sequence: Synthetic oligonucleotide
uuuuacccuuuaccugagg

SEQ ID NO: 112436 - RNA, 19 nt, Artificial Sequence
  Description of Artificial Sequence: Synthetic oligonucleotide
ucucccaauuaucucguuc

SEQ ID NO: 112437 - RNA, 19 nt, Artificial Sequence
  Description of Artificial Sequence: Synthetic oligonucleotide
aaacaacuacccaagcuaa

SEQ ID NO: 112438 - RNA, 19 nt, Artificial Sequence
  Description of Artificial Sequence: Synthetic oligonucleotide
ucauugcggcuguaaacag

SEQ ID NO: 112439 - RNA, 19 nt, Artificial Sequence
  Description of Artificial Sequence: Synthetic oligonucleotide
ugagugcugcccagaaugc

SEQ ID NO: 112440 - RNA, 19 nt, Artificial Sequence
  Description of Artificial Sequence: Synthetic oligonucleotide
gauguagccuuaguaaaga

SEQ ID NO: 112441 - RNA, 19 nt, Artificial Sequence
  Description of Artificial Sequence: Synthetic oligonucleotide
gaaagcggugaauuagcca

SEQ ID NO: 112442 - RNA, 19 nt, Artificial Sequence
  Description of Artificial Sequence: Synthetic oligonucleotide
ugacgaucuaaaguuacaa

SEQ ID NO: 112443 - RNA, 19 nt, Artificial Sequence
  Description of Artificial Sequence: Synthetic oligonucleotide
uaaagaguaugagcuauau

SEQ ID NO: 112444 - RNA, 19 nt, Artificial Sequence
  Description of Artificial Sequence: Synthetic oligonucleotide
ugcacuccuauaaaagauu

SEQ ID NO: 112445 - RNA, 19 nt, Artificial Sequence
  Description of Artificial Sequence: Synthetic oligonucleotide
uaguccaauggaugugugc

SEQ ID NO: 112446 - RNA, 19 nt, Artificial Sequence
  Description of Artificial Sequence: Synthetic oligonucleotide
uaucaagacuaaagggcuc

SEQ ID NO: 112447 - RNA, 19 nt, Artificial Sequence
  Description of Artificial Sequence: Synthetic oligonucleotide
ucauacagucaggacacca

SEQ ID NO: 112448 - RNA, 19 nt, Artificial Sequence
  Description of Artificial Sequence: Synthetic oligonucleotide
auccuagcuaugcaaccag

SEQ ID NO: 112449 - RNA, 19 nt, Artificial Sequence
  Description of Artificial Sequence: Synthetic oligonucleotide
auauuaguuuguauagacu

SEQ ID NO: 112450 - RNA, 19 nt, Artificial Sequence
  Description of Artificial Sequence: Synthetic oligonucleotide
gacauguugguccauuaua

SEQ ID NO: 112451 - RNA, 19 nt, Artificial Sequence
  Description of Artificial Sequence: Synthetic oligonucleotide
auuaguuuguauagacuga

SEQ ID NO: 112452 - RNA, 19 nt, Artificial Sequence
  Description of Artificial Sequence: Synthetic oligonucleotide
ggacauaagccucaccagc

SEQ ID NO: 112453 - RNA, 19 nt, Artificial Sequence
  Description of Artificial Sequence: Synthetic oligonucleotide
aggguaccuccuuugguag

SEQ ID NO: 112454 - RNA, 19 nt, Artificial Sequence
  Description of Artificial Sequence: Synthetic oligonucleotide
auaugacucuuacaugaaa

SEQ ID NO: 112455 - RNA, 19 nt, Artificial Sequence
  Description of Artificial Sequence: Synthetic oligonucleotide
auagaaucauugcggcugu

SEQ ID NO: 112456 - RNA, 19 nt, Artificial Sequence
  Description of Artificial Sequence: Synthetic oligonucleotide
agacugauaggaagacccc

SEQ ID NO: 112457 - RNA, 19 nt, Artificial Sequence
  Description of Artificial Sequence: Synthetic oligonucleotide
uacccugcucacuagaguu

SEQ ID NO: 112458 - RNA, 19 nt, Artificial Sequence
  Description of Artificial Sequence: Synthetic oligonucleotide
gaaagcuuauacaaagcua

SEQ ID NO: 112459 - RNA, 19 nt, Artificial Sequence
  Description of Artificial Sequence: Synthetic oligonucleotide
ucgucacuguuuauuauuu

SEQ ID NO: 112460 - RNA, 19 nt, Artificial Sequence
  Description of Artificial Sequence: Synthetic oligonucleotide
aucgucacuguuuauuauu

SEQ ID NO: 112461 - RNA, 19 nt, Artificial Sequence
  Description of Artificial Sequence: Synthetic oligonucleotide
gggauagaaucauugcggc

SEQ ID NO: 112462 - RNA, 19 nt, Artificial Sequence
  Description of Artificial Sequence: Synthetic oligonucleotide
ugaugacgaucuaaaguua

SEQ ID NO: 112463 - RNA, 19 nt, Artificial Sequence
  Description of Artificial Sequence: Synthetic oligonucleotide
aagacauguugguccauua

SEQ ID NO: 112464 - RNA, 19 nt, Artificial Sequence
  Description of Artificial Sequence: Synthetic oligonucleotide
aauaugacucuuacaugaa

SEQ ID NO: 112465 - RNA, 19 nt, Artificial Sequence
  Description of Artificial Sequence: Synthetic oligonucleotide
caacccaaggucuaauaca

SEQ ID NO: 112466 - RNA, 19 nt, Artificial Sequence
  Description of Artificial Sequence: Synthetic oligonucleotide
ggcccauucuaguaaacag

SEQ ID NO: 112467 - RNA, 19 nt, Artificial Sequence
  Description of Artificial Sequence: Synthetic oligonucleotide
acccaagcuaaaauccuac

SEQ ID NO: 112468 - RNA, 19 nt, Artificial Sequence
  Description of Artificial Sequence: Synthetic oligonucleotide
uugaucgucacuguuuauu

SEQ ID NO: 112469 - RNA, 19 nt, Artificial Sequence
  Description of Artificial Sequence: Synthetic oligonucleotide
aucaagacuaaagggcucu

SEQ ID NO: 112470 - RNA, 19 nt, Artificial Sequence
  Description of Artificial Sequence: Synthetic oligonucleotide
aauagaccagacccugcuu

SEQ ID NO: 112471 - RNA, 19 nt, Artificial Sequence
  Description of Artificial Sequence: Synthetic oligonucleotide
aaaaggguaugugcuagua

SEQ ID NO: 112472 - RNA, 19 nt, Artificial Sequence
  Description of Artificial Sequence: Synthetic oligonucleotide
aaggucuaauacaggugag

SEQ ID NO: 112473 - RNA, 19 nt, Artificial Sequence
  Description of Artificial Sequence: Synthetic oligonucleotide
agauguugauguaacuuga

SEQ ID NO: 112474 - RNA, 19 nt, Artificial Sequence
  Description of Artificial Sequence: Synthetic oligonucleotide
caauuuaccuaacauugua

SEQ ID NO: 112475 - RNA, 19 nt, Artificial Sequence
  Description of Artificial Sequence: Synthetic oligonucleotide
uucuaaugcuacaggcaau

SEQ ID NO: 112476 - RNA, 19 nt, Artificial Sequence
  Description of Artificial Sequence: Synthetic oligonucleotide
acaacuacccaagcuaaaa

SEQ ID NO: 112477 - RNA, 19 nt, Artificial Sequence
  Description of Artificial Sequence: Synthetic oligonucleotide
gauugauaaggcauagacu

SEQ ID NO: 112478 - RNA, 19 nt, Artificial Sequence
  Description of Artificial Sequence: Synthetic oligonucleotide
aggacgcaugcuaaguuuc

SEQ ID NO: 112479 - RNA, 19 nt, Artificial Sequence
  Description of Artificial Sequence: Synthetic oligonucleotide
acaguauguaauagguugu

SEQ ID NO: 112480 - RNA, 19 nt, Artificial Sequence
  Description of Artificial Sequence: Synthetic oligonucleotide
cucacuagaguuggugggc

SEQ ID NO: 112481 - RNA, 19 nt, Artificial Sequence
  Description of Artificial Sequence: Synthetic oligonucleotide
gguuaugauagggaggaac

SEQ ID NO: 112482 - RNA, 19 nt, Artificial Sequence
  Description of Artificial Sequence: Synthetic oligonucleotide
acgcaugcuaaguuucuga

SEQ ID NO: 112483 - RNA, 19 nt, Artificial Sequence
  Description of Artificial Sequence: Synthetic oligonucleotide
gcacccaucauauaaaagu

SEQ ID NO: 112484 - RNA, 19 nt, Artificial Sequence
  Description of Artificial Sequence: Synthetic oligonucleotide
caguacccaaauaggguac

SEQ ID NO: 112485 - RNA, 19 nt, Artificial Sequence
  Description of Artificial Sequence: Synthetic oligonucleotide
gcuaguaaaugcccaguug

SEQ ID NO: 112486 - RNA, 19 nt, Artificial Sequence
  Description of Artificial Sequence: Synthetic oligonucleotide
ggucauacagucaggacac

SEQ ID NO: 112487 - RNA, 19 nt, Artificial Sequence
  Description of Artificial Sequence: Synthetic oligonucleotide
cuacaggcaaucaagguau

SEQ ID NO: 112488 - RNA, 19 nt, Artificial Sequence
  Description of Artificial Sequence: Synthetic oligonucleotide
agacauguugguccauuau

SEQ ID NO: 112489 - RNA, 19 nt, Artificial Sequence
  Description of Artificial Sequence: Synthetic oligonucleotide
cuaagaguagacagagcaa

SEQ ID NO: 112490 - RNA, 19 nt, Artificial Sequence
  Description of Artificial Sequence: Synthetic oligonucleotide
aagcggugaauuagccagg

SEQ ID NO: 112491 - RNA, 19 nt, Artificial Sequence
  Description of Artificial Sequence: Synthetic oligonucleotide
ugcucagugcugcuacuaa

SEQ ID NO: 112492 - RNA, 19 nt, Artificial Sequence
  Description of Artificial Sequence: Synthetic oligonucleotide
uccuaccuuugaaauucac

SEQ ID NO: 112493 - RNA, 19 nt, Artificial Sequence
  Description of Artificial Sequence: Synthetic oligonucleotide
aacguugagacuggcuuuu

SEQ ID NO: 112494 - RNA, 19 nt, Artificial Sequence
  Description of Artificial Sequence: Synthetic oligonucleotide
agcacugcacuccuauaaa

SEQ ID NO: 112495 - RNA, 19 nt, Artificial Sequence
  Description of Artificial Sequence: Synthetic oligonucleotide
ccauuuuacccuuuaccug

SEQ ID NO: 112496 - RNA, 19 nt, Artificial Sequence
  Description of Artificial Sequence: Synthetic oligonucleotide
ugauagggaggaacuucaa

SEQ ID NO: 112497 - RNA, 19 nt, Artificial Sequence
  Description of Artificial Sequence: Synthetic oligonucleotide
gacugauaggaagacccca

SEQ ID NO: 112498 - RNA, 19 nt, Artificial Sequence
  Description of Artificial Sequence: Synthetic oligonucleotide
uuaugauagggaggaacuu

SEQ ID NO: 112499 - RNA, 19 nt, Artificial Sequence
  Description of Artificial Sequence: Synthetic oligonucleotide
ggagauugauaaggcauag

SEQ ID NO: 112500 - RNA, 19 nt, Artificial Sequence
  Description of Artificial Sequence: Synthetic oligonucleotide
cacccaucauauaaaagua

SEQ ID NO: 112501 - RNA, 19 nt, Artificial Sequence
  Description of Artificial Sequence: Synthetic oligonucleotide
aggucuaauacaggugaga

SEQ ID NO: 112502 - RNA, 19 nt, Artificial Sequence
  Description of Artificial Sequence: Synthetic oligonucleotide
cauaggaagacauguuggu

SEQ ID NO: 112503 - RNA, 19 nt, Artificial Sequence
  Description of Artificial Sequence: Synthetic oligonucleotide
gcuaggagauugauaaggc

SEQ ID NO: 112504 - RNA, 19 nt, Artificial Sequence
  Description of Artificial Sequence: Synthetic oligonucleotide
agaaucauugcggcuguaa

SEQ ID NO: 112505 - RNA, 19 nt, Artificial Sequence
  Description of Artificial Sequence: Synthetic oligonucleotide
gcuacaggcaaucaaggua

SEQ ID NO: 112506 - RNA, 19 nt, Artificial Sequence
  Description of Artificial Sequence: Synthetic oligonucleotide
gaugguauuaugugcuguu

SEQ ID NO: 112507 - RNA, 19 nt, Artificial Sequence
  Description of Artificial Sequence: Synthetic oligonucleotide
agcaacucuggaugauaga

SEQ ID NO: 112508 - RNA, 19 nt, Artificial Sequence
  Description of Artificial Sequence: Synthetic oligonucleotide
gauguugauguaacuugaa

SEQ ID NO: 112509 - RNA, 19 nt, Artificial Sequence
  Description of Artificial Sequence: Synthetic oligonucleotide
gacgcaugcuaaguuucug

SEQ ID NO: 112510 - RNA, 19 nt, Artificial Sequence
  Description of Artificial Sequence: Synthetic oligonucleotide
acuugggcccauucuagua

SEQ ID NO: 112511 - RNA, 19 nt, Artificial Sequence
  Description of Artificial Sequence: Synthetic oligonucleotide
agggcucuucaaaugacca

SEQ ID NO: 112512 - RNA, 19 nt, Artificial Sequence
  Description of Artificial Sequence: Synthetic oligonucleotide
ugauauccuguagaccaau

SEQ ID NO: 112513 - RNA, 19 nt, Artificial Sequence
  Description of Artificial Sequence: Synthetic oligonucleotide
uuugaucgucacuguuuau

SEQ ID NO: 112514 - RNA, 19 nt, Artificial Sequence
  Description of Artificial Sequence: Synthetic oligonucleotide
augacgaucuaaaguuaca

SEQ ID NO: 112515 - RNA, 19 nt, Artificial Sequence
  Description of Artificial Sequence: Synthetic oligonucleotide
aguauccuauuuaaauaua

SEQ ID NO: 112516 - RNA, 19 nt, Artificial Sequence
  Description of Artificial Sequence: Synthetic oligonucleotide
ggagagacuguuugaugac

SEQ ID NO: 112517 - RNA, 19 nt, Artificial Sequence
  Description of Artificial Sequence: Synthetic oligonucleotide
gagauugauaaggcauaga

SEQ ID NO: 112518 - RNA, 19 nt, Artificial Sequence
  Description of Artificial Sequence: Synthetic oligonucleotide
cuagauuaacagcccaugu

SEQ ID NO: 112519 - RNA, 19 nt, Artificial Sequence
  Description of Artificial Sequence: Synthetic oligonucleotide
cauugcggcuguaaacaga

SEQ ID NO: 112520 - RNA, 19 nt, Artificial Sequence
  Description of Artificial Sequence: Synthetic oligonucleotide
gacucuuacaugaaagcuu

SEQ ID NO: 112521 - RNA, 19 nt, Artificial Sequence
  Description of Artificial Sequence: Synthetic oligonucleotide
aggucacaauccucuagau

SEQ ID NO: 112522 - RNA, 19 nt, Artificial Sequence
  Description of Artificial Sequence: Synthetic oligonucleotide
uacccaaauaggguaccuc

SEQ ID NO: 112523 - RNA, 19 nt, Artificial Sequence
  Description of Artificial Sequence: Synthetic oligonucleotide
cuugacuagaggcaggguu

SEQ ID NO: 112524 - RNA, 19 nt, Artificial Sequence
  Description of Artificial Sequence: Synthetic oligonucleotide
gggaggaacuucaaggaca

SEQ ID NO: 112525 - RNA, 19 nt, Artificial Sequence
  Description of Artificial Sequence: Synthetic oligonucleotide
uggaugauagaggcuuuua

SEQ ID NO: 112526 - RNA, 19 nt, Artificial Sequence
  Description of Artificial Sequence: Synthetic oligonucleotide
ggcccuaaagcaaaucuca

SEQ ID NO: 112527 - RNA, 19 nt, Artificial Sequence
  Description of Artificial Sequence: Synthetic oligonucleotide
uggaugugauggacaguau

SEQ ID NO: 112528 - RNA, 19 nt, Artificial Sequence
  Description of Artificial Sequence: Synthetic oligonucleotide
cuccuuugguagacagcag

SEQ ID NO: 112529 - RNA, 19 nt, Artificial Sequence
  Description of Artificial Sequence: Synthetic oligonucleotide
auaaagaguaugagcuaua

SEQ ID NO: 112530 - RNA, 19 nt, Artificial Sequence
  Description of Artificial Sequence: Synthetic oligonucleotide
gucuaagugugggcuuagg

SEQ ID NO: 112531 - RNA, 19 nt, Artificial Sequence
  Description of Artificial Sequence: Synthetic oligonucleotide
cuacccaagcuaaaauccu

SEQ ID NO: 112532 - RNA, 19 nt, Artificial Sequence
  Description of Artificial Sequence: Synthetic oligonucleotide
gggcuaccaaccaugggcc

SEQ ID NO: 112533 - RNA, 19 nt, Artificial Sequence
  Description of Artificial Sequence: Synthetic oligonucleotide
agcuaguggagagacuguu

SEQ ID NO: 112534 - RNA, 19 nt, Artificial Sequence
  Description of Artificial Sequence: Synthetic oligonucleotide
gaucgucacuguuuauuau

SEQ ID NO: 112535 - RNA, 19 nt, Artificial Sequence
  Description of Artificial Sequence: Synthetic oligonucleotide
aggguaugugcuaguaaau

SEQ ID NO: 112536 - RNA, 19 nt, Artificial Sequence
  Description of Artificial Sequence: Synthetic oligonucleotide
uugcucagugcugcuacua

SEQ ID NO: 112537 - RNA, 19 nt, Artificial Sequence
  Description of Artificial Sequence: Synthetic oligonucleotide
gguuugggaacaguaccca

SEQ ID NO: 112538 - RNA, 19 nt, Artificial Sequence
  Description of Artificial Sequence: Synthetic oligonucleotide
cucuagauuaacagcccau

SEQ ID NO: 112539 - RNA, 19 nt, Artificial Sequence
  Description of Artificial Sequence: Synthetic oligonucleotide
aggucuaagugugggcuua

SEQ ID NO: 112540 - RNA, 19 nt, Artificial Sequence
  Description of Artificial Sequence: Synthetic oligonucleotide
cugaaauagagagccugcu

SEQ ID NO: 112541 - RNA, 19 nt, Artificial Sequence
  Description of Artificial Sequence: Synthetic oligonucleotide
guaccccauugacuguaga

SEQ ID NO: 112542 - RNA, 19 nt, Artificial Sequence
  Description of Artificial Sequence: Synthetic oligonucleotide
guggaaggacaggucuaug

SEQ ID NO: 112543 - RNA, 19 nt, Artificial Sequence
  Description of Artificial Sequence: Synthetic oligonucleotide
gucauacagucaggacacc

SEQ ID NO: 112544 - RNA, 19 nt, Artificial Sequence
  Description of Artificial Sequence: Synthetic oligonucleotide
guauuaugugcuguucuuu

SEQ ID NO: 112545 - RNA, 19 nt, Artificial Sequence
  Description of Artificial Sequence: Synthetic oligonucleotide
gcggugaauuagccagggg

SEQ ID NO: 112546 - RNA, 19 nt, Artificial Sequence
  Description of Artificial Sequence: Synthetic oligonucleotide
caaauaggguaccuccuuu

SEQ ID NO: 112547 - RNA, 19 nt, Artificial Sequence
  Description of Artificial Sequence: Synthetic oligonucleotide
ggcuaccaaccaugggccc

SEQ ID NO: 112548 - RNA, 19 nt, Artificial Sequence
  Description of Artificial Sequence: Synthetic oligonucleotide
gaggucuaagugugggcuu

SEQ ID NO: 112549 - RNA, 19 nt, Artificial Sequence
  Description of Artificial Sequence: Synthetic oligonucleotide
ggucuaagugugggcuuag

SEQ ID NO: 112550 - RNA, 19 nt, Artificial Sequence
  Description of Artificial Sequence: Synthetic oligonucleotide
cacuagaguuggugggcaa

SEQ ID NO: 112551 - RNA, 19 nt, Artificial Sequence
  Description of Artificial Sequence: Synthetic oligonucleotide
caggacgcaugcuaaguuu

SEQ ID NO: 112552 - RNA, 19 nt, Artificial Sequence
  Description of Artificial Sequence: Synthetic oligonucleotide
uagaaucauugcggcugua

SEQ ID NO: 112553 - RNA, 19 nt, Artificial Sequence
  Description of Artificial Sequence: Synthetic oligonucleotide
ccuagcuaugcaaccaggu

SEQ ID NO: 112554 - RNA, 19 nt, Artificial Sequence
  Description of Artificial Sequence: Synthetic oligonucleotide
cuuuaccugaggggaggaa

SEQ ID NO: 112555 - RNA, 19 nt, Artificial Sequence
  Description of Artificial Sequence: Synthetic oligonucleotide
ggguaccuccuuugguaga

SEQ ID NO: 112556 - RNA, 19 nt, Artificial Sequence
  Description of Artificial Sequence: Synthetic oligonucleotide
guacccaaauaggguaccu

SEQ ID NO: 112557 - RNA, 19 nt, Artificial Sequence
  Description of Artificial Sequence: Synthetic oligonucleotide
cccaauuaucucguucaca

SEQ ID NO: 112558 - RNA, 19 nt, Artificial Sequence
  Description of Artificial Sequence: Synthetic oligonucleotide
gccuuggacauaagccuca

SEQ ID NO: 112559 - RNA, 19 nt, Artificial Sequence
  Description of Artificial Sequence: Synthetic oligonucleotide
guccaauggaugugugcuu

SEQ ID NO: 112560 - RNA, 19 nt, Artificial Sequence
  Description of Artificial Sequence: Synthetic oligonucleotide
gcacuccuauaaaagauuu

SEQ ID NO: 112561 - RNA, 19 nt, Artificial Sequence
  Description of Artificial Sequence: Synthetic oligonucleotide
cucuuacaugaaagcuuau

SEQ ID NO: 112562 - RNA, 19 nt, Artificial Sequence
  Description of Artificial Sequence: Synthetic oligonucleotide
gguauuggcgacagagguu

SEQ ID NO: 112563 - RNA, 19 nt, Artificial Sequence
  Description of Artificial Sequence: Synthetic oligonucleotide
caugggcccuaaagcaaau

SEQ ID NO: 112564 - RNA, 19 nt, Artificial Sequence
  Description of Artificial Sequence: Synthetic oligonucleotide
cagcuuuaacauggagcua

SEQ ID NO: 112565 - RNA, 19 nt, Artificial Sequence
  Description of Artificial Sequence: Synthetic oligonucleotide
gugcaugacugaagauggu

SEQ ID NO: 112566 - RNA, 19 nt, Artificial Sequence
  Description of Artificial Sequence: Synthetic oligonucleotide
ggacgcaugcuaaguuucu

SEQ ID NO: 112567 - RNA, 19 nt, Artificial Sequence
  Description of Artificial Sequence: Synthetic oligonucleotide
ccaaauaggguaccuccuu

SEQ ID NO: 112568 - RNA, 19 nt, Artificial Sequence
  Description of Artificial Sequence: Synthetic oligonucleotide
gguugacagccaagguuua

SEQ ID NO: 112569 - RNA, 19 nt, Artificial Sequence
  Description of Artificial Sequence: Synthetic oligonucleotide
guuucaacuugggcccauu

SEQ ID NO: 112570 - RNA, 19 nt, Artificial Sequence
  Description of Artificial Sequence: Synthetic oligonucleotide
gcuaguggagagacuguuu

SEQ ID NO: 112571 - RNA, 19 nt, Artificial Sequence
  Description of Artificial Sequence: Synthetic oligonucleotide
cucucccaauuaucucguu

SEQ ID NO: 112572 - RNA, 19 nt, Artificial Sequence
  Description of Artificial Sequence: Synthetic oligonucleotide
gguuucaacuugggcccau

SEQ ID NO: 112573 - RNA, 19 nt, Artificial Sequence
  Description of Artificial Sequence: Synthetic oligonucleotide
ccugagcuaggagauugau

SEQ ID NO: 112574 - RNA, 19 nt, Artificial Sequence
  Description of Artificial Sequence: Synthetic oligonucleotide
aaugaaagaacaaagcagg

SEQ ID NO: 112575 - RNA, 19 nt, Artificial Sequence
  Description of Artificial Sequence: Synthetic oligonucleotide
aauaccacacaccaccacc

SEQ ID NO: 112576 - RNA, 19 nt, Artificial Sequence
  Description of Artificial Sequence: Synthetic oligonucleotide
ucuaguaacaagcaauagg

SEQ ID NO: 112577 - RNA, 19 nt, Artificial Sequence
  Description of Artificial Sequence: Synthetic oligonucleotide
aaaucuaaggcaaaaguac

SEQ ID NO: 112578 - RNA, 19 nt, Artificial Sequence
  Description of Artificial Sequence: Synthetic oligonucleotide
aauaauucucagcuccucc

SEQ ID NO: 112579 - RNA, 19 nt, Artificial Sequence
  Description of Artificial Sequence: Synthetic oligonucleotide
ugagucauuacacucaaag

SEQ ID NO: 112580 - RNA, 19 nt, Artificial Sequence
  Description of Artificial Sequence: Synthetic oligonucleotide
aaggguaauucucaaauag

SEQ ID NO: 112581 - RNA, 19 nt, Artificial Sequence
  Description of Artificial Sequence: Synthetic oligonucleotide
aaagacggccuucagugcc

SEQ ID NO: 112582 - RNA, 19 nt, Artificial Sequence
  Description of Artificial Sequence: Synthetic oligonucleotide
ugggauuuauaaauaauag

SEQ ID NO: 112583 - RNA, 19 nt, Artificial Sequence
  Description of Artificial Sequence: Synthetic oligonucleotide
ucaaagacggccuucagug

SEQ ID NO: 112584 - RNA, 19 nt, Artificial Sequence
  Description of Artificial Sequence: Synthetic oligonucleotide
acugcuaauaggcagcugg

SEQ ID NO: 112585 - RNA, 19 nt, Artificial Sequence
  Description of Artificial Sequence: Synthetic oligonucleotide
aauagaaaccuuuaauaau

SEQ ID NO: 112586 - RNA, 19 nt, Artificial Sequence
  Description of Artificial Sequence: Synthetic oligonucleotide
aaucuaaggcaaaaguacc

SEQ ID NO: 112587 - RNA, 19 nt, Artificial Sequence
  Description of Artificial Sequence: Synthetic oligonucleotide
caagauaguagcuagauga

SEQ ID NO: 112588 - RNA, 19 nt, Artificial Sequence
  Description of Artificial Sequence: Synthetic oligonucleotide
aguaccacgagguauauga

SEQ ID NO: 112589 - RNA, 19 nt, Artificial Sequence
  Description of Artificial Sequence: Synthetic oligonucleotide
agcaaacccaucuuuagac

SEQ ID NO: 112590 - RNA, 19 nt, Artificial Sequence
  Description of Artificial Sequence: Synthetic oligonucleotide
uguuauuggcaucaaagac

SEQ ID NO: 112591 - RNA, 19 nt, Artificial Sequence
  Description of Artificial Sequence: Synthetic oligonucleotide
ugauuuucacuccaaagac

SEQ ID NO: 112592 - RNA, 19 nt, Artificial Sequence
  Description of Artificial Sequence: Synthetic oligonucleotide
accuuuaauaauucucagc

SEQ ID NO: 112593 - RNA, 19 nt, Artificial Sequence
  Description of Artificial Sequence: Synthetic oligonucleotide
cacgcaaagguacagaggg

SEQ ID NO: 112594 - RNA, 19 nt, Artificial Sequence
  Description of Artificial Sequence: Synthetic oligonucleotide
gagaaaugaaagaacaaag

SEQ ID NO: 112595 - RNA, 19 nt, Artificial Sequence
  Description of Artificial Sequence: Synthetic oligonucleotide
uccauaccaacuuauuagg

SEQ ID NO: 112596 - RNA, 19 nt, Artificial Sequence
  Description of Artificial Sequence: Synthetic oligonucleotide
agcacggagcaucagauac

SEQ ID NO: 112597 - RNA, 19 nt, Artificial Sequence
  Description of Artificial Sequence: Synthetic oligonucleotide
cauaccaacuuauuagggg

SEQ ID NO: 112598 - RNA, 19 nt, Artificial Sequence
  Description of Artificial Sequence: Synthetic oligonucleotide
uauaugagguuccagguuc

SEQ ID NO: 112599 - RNA, 19 nt, Artificial Sequence
  Description of Artificial Sequence: Synthetic oligonucleotide
uuuaaccuguuugagacag

SEQ ID NO: 112600 - RNA, 19 nt, Artificial Sequence
  Description of Artificial Sequence: Synthetic oligonucleotide
uaacauuucccucucacgu

SEQ ID NO: 112601 - RNA, 19 nt, Artificial Sequence
  Description of Artificial Sequence: Synthetic oligonucleotide
uaaacugcuaauaggcagc

SEQ ID NO: 112602 - RNA, 19 nt, Artificial Sequence
  Description of Artificial Sequence: Synthetic oligonucleotide
aauaauucucuuucuagua

SEQ ID NO: 112603 - RNA, 19 nt, Artificial Sequence
  Description of Artificial Sequence: Synthetic oligonucleotide
aaauaauagaaaccuuuaa

SEQ ID NO: 112604 - RNA, 19 nt, Artificial Sequence
  Description of Artificial Sequence: Synthetic oligonucleotide
aaaguguugggagaaauga

SEQ ID NO: 112605 - RNA, 19 nt, Artificial Sequence
  Description of Artificial Sequence: Synthetic oligonucleotide
aguaaaguaggaccuggac

SEQ ID NO: 112606 - RNA, 19 nt, Artificial Sequence
  Description of Artificial Sequence: Synthetic oligonucleotide
aucagauacacgcaaaggu

SEQ ID NO: 112607 - RNA, 19 nt, Artificial Sequence
  Description of Artificial Sequence: Synthetic oligonucleotide
acaauucuuggacagcacg

SEQ ID NO: 112608 - RNA, 19 nt, Artificial Sequence
  Description of Artificial Sequence: Synthetic oligonucleotide
uuuguugggcccuagcugc

SEQ ID NO: 112609 - RNA, 19 nt, Artificial Sequence
  Description of Artificial Sequence: Synthetic oligonucleotide
cuggauaccugauuuagcc

SEQ ID NO: 112610 - RNA, 19 nt, Artificial Sequence
  Description of Artificial Sequence: Synthetic oligonucleotide
auuccaguuggguugugcc

SEQ ID NO: 112611 - RNA, 19 nt, Artificial Sequence
  Description of Artificial Sequence: Synthetic oligonucleotide
gaacuuuccaaugaugaag

SEQ ID NO: 112612 - RNA, 19 nt, Artificial Sequence
  Description of Artificial Sequence: Synthetic oligonucleotide
ucaggcuacacaucugugg

SEQ ID NO: 112613 - RNA, 19 nt, Artificial Sequence
  Description of Artificial Sequence: Synthetic oligonucleotide
ccugauauccuguagaugc

SEQ ID NO: 112614 - RNA, 19 nt, Artificial Sequence
  Description of Artificial Sequence: Synthetic oligonucleotide
augguaauguggcugcccc

SEQ ID NO: 112615 - RNA, 19 nt, Artificial Sequence
  Description of Artificial Sequence: Synthetic oligonucleotide
cuuuggaagaauaccacac

SEQ ID NO: 112616 - RNA, 19 nt, Artificial Sequence
  Description of Artificial Sequence: Synthetic oligonucleotide
ugucgcaggagaaacacca

SEQ ID NO: 112617 - RNA, 19 nt, Artificial Sequence
  Description of Artificial Sequence: Synthetic oligonucleotide
aaccuuuaauaauucucag

SEQ ID NO: 112618 - RNA, 19 nt, Artificial Sequence
  Description of Artificial Sequence: Synthetic oligonucleotide
acaucaugggaccagauau

SEQ ID NO: 112619 - RNA, 19 nt, Artificial Sequence
  Description of Artificial Sequence: Synthetic oligonucleotide
gugaccucuauacucacgg

SEQ ID NO: 112620 - RNA, 19 nt, Artificial Sequence
  Description of Artificial Sequence: Synthetic oligonucleotide
aacuguaccguucugucaa

SEQ ID NO: 112621 - RNA, 19 nt, Artificial Sequence
  Description of Artificial Sequence: Synthetic oligonucleotide
aaagcaggcgugcuuccac

SEQ ID NO: 112622 - RNA, 19 nt, Artificial Sequence
  Description of Artificial Sequence: Synthetic oligonucleotide
uucuauacacugccguacg

SEQ ID NO: 112623 - RNA, 19 nt, Artificial Sequence
  Description of Artificial Sequence: Synthetic oligonucleotide
uccgcgaaggaaaugggag

SEQ ID NO: 112624 - RNA, 19 nt, Artificial Sequence
  Description of Artificial Sequence: Synthetic oligonucleotide
uacacgcaaagguacagag

SEQ ID NO: 112625 - RNA, 19 nt, Artificial Sequence
  Description of Artificial Sequence: Synthetic oligonucleotide
uuuggaagaauaccacaca

SEQ ID NO: 112626 - RNA, 19 nt, Artificial Sequence
  Description of Artificial Sequence: Synthetic oligonucleotide
uguuacacugccuaagcaa

SEQ ID NO: 112627 - RNA, 19 nt, Artificial Sequence
  Description of Artificial Sequence: Synthetic oligonucleotide
cuaauaggcagcugggaag

SEQ ID NO: 112628 - RNA, 19 nt, Artificial Sequence
  Description of Artificial Sequence: Synthetic oligonucleotide
uggaagaauaccacacacc

SEQ ID NO: 112629 - RNA, 19 nt, Artificial Sequence
  Description of Artificial Sequence: Synthetic oligonucleotide
aguagcuagaugaugugac

SEQ ID NO: 112630 - RNA, 19 nt, Artificial Sequence
  Description of Artificial Sequence: Synthetic oligonucleotide
aaggcaaaaguaccacgag

SEQ ID NO: 112631 - RNA, 19 nt, Artificial Sequence
  Description of Artificial Sequence: Synthetic oligonucleotide
aguuccgcgaaggaaaugg

SEQ ID NO: 112632 - RNA, 19 nt, Artificial Sequence
  Description of Artificial Sequence: Synthetic oligonucleotide
cuaguaacaagcaauaggu

SEQ ID NO: 112633 - RNA, 19 nt, Artificial Sequence
  Description of Artificial Sequence: Synthetic oligonucleotide
gguaaagucggucugugag

SEQ ID NO: 112634 - RNA, 19 nt, Artificial Sequence
  Description of Artificial Sequence: Synthetic oligonucleotide
uagaagauaacaggaagcu

SEQ ID NO: 112635 - RNA, 19 nt, Artificial Sequence
  Description of Artificial Sequence: Synthetic oligonucleotide
ugugcuaagcuucggauua

SEQ ID NO: 112636 - RNA, 19 nt, Artificial Sequence
  Description of Artificial Sequence: Synthetic oligonucleotide
ugggauuacccacagggcu

SEQ ID NO: 112637 - RNA, 19 nt, Artificial Sequence
  Description of Artificial Sequence: Synthetic oligonucleotide
ugccguacgauguagggca

SEQ ID NO: 112638 - RNA, 19 nt, Artificial Sequence
  Description of Artificial Sequence: Synthetic oligonucleotide
gacucgucgauguauggcc

SEQ ID NO: 112639 - RNA, 19 nt, Artificial Sequence
  Description of Artificial Sequence: Synthetic oligonucleotide
uuccucuaugcacaaacug

SEQ ID NO: 112640 - RNA, 19 nt, Artificial Sequence
  Description of Artificial Sequence: Synthetic oligonucleotide
cuaaggcaaaaguaccacg

SEQ ID NO: 112641 - RNA, 19 nt, Artificial Sequence
  Description of Artificial Sequence: Synthetic oligonucleotide
aagucggucugugaggagg

SEQ ID NO: 112642 - RNA, 19 nt, Artificial Sequence
  Description of Artificial Sequence: Synthetic oligonucleotide
aggcaaaaguaccacgagg

SEQ ID NO: 112643 - RNA, 19 nt, Artificial Sequence
  Description of Artificial Sequence: Synthetic oligonucleotide
cauugcuaggcucuggagc

SEQ ID NO: 112644 - RNA, 19 nt, Artificial Sequence
  Description of Artificial Sequence: Synthetic oligonucleotide
acaagcaauagguugcaga

SEQ ID NO: 112645 - RNA, 19 nt, Artificial Sequence
  Description of Artificial Sequence: Synthetic oligonucleotide
uauacacugccguacgaug

SEQ ID NO: 112646 - RNA, 19 nt, Artificial Sequence
  Description of Artificial Sequence: Synthetic oligonucleotide
agggccaagaaucaacucu

SEQ ID NO: 112647 - RNA, 19 nt, Artificial Sequence
  Description of Artificial Sequence: Synthetic oligonucleotide
gauguauggccccuucugc

SEQ ID NO: 112648 - RNA, 19 nt, Artificial Sequence
  Description of Artificial Sequence: Synthetic oligonucleotide
acaaguuccaguucuugga

SEQ ID NO: 112649 - RNA, 19 nt, Artificial Sequence
  Description of Artificial Sequence: Synthetic oligonucleotide
cacaaguuccaguucuugg

SEQ ID NO: 112650 - RNA, 19 nt, Artificial Sequence
  Description of Artificial Sequence: Synthetic oligonucleotide
gaccucuauacucacgggc

SEQ ID NO: 112651 - RNA, 19 nt, Artificial Sequence
  Description of Artificial Sequence: Synthetic oligonucleotide
ggaagaauaccacacacca

SEQ ID NO: 112652 - RNA, 19 nt, Artificial Sequence
  Description of Artificial Sequence: Synthetic oligonucleotide
ugccuaagcaaccugggaa

SEQ ID NO: 112653 - RNA, 19 nt, Artificial Sequence
  Description of Artificial Sequence: Synthetic oligonucleotide
aaagacgccggucugcuuu

SEQ ID NO: 112654 - RNA, 19 nt, Artificial Sequence
  Description of Artificial Sequence: Synthetic oligonucleotide
gaaaggguaauucucaaau

SEQ ID NO: 112655 - RNA, 19 nt, Artificial Sequence
  Description of Artificial Sequence: Synthetic oligonucleotide
uauccuguagaugccaacc

SEQ ID NO: 112656 - RNA, 19 nt, Artificial Sequence
  Description of Artificial Sequence: Synthetic oligonucleotide
ugguaguugcuccucagac

SEQ ID NO: 112657 - RNA, 19 nt, Artificial Sequence
  Description of Artificial Sequence: Synthetic oligonucleotide
gguugcagaacugagaaug

SEQ ID NO: 112658 - RNA, 19 nt, Artificial Sequence
  Description of Artificial Sequence: Synthetic oligonucleotide
aguaacguggggccgaaca

SEQ ID NO: 112659 - RNA, 19 nt, Artificial Sequence
  Description of Artificial Sequence: Synthetic oligonucleotide
cauucacugcccaagcaag

SEQ ID NO: 112660 - RNA, 19 nt, Artificial Sequence
  Description of Artificial Sequence: Synthetic oligonucleotide
aguguaaaaucuaaggcaa

SEQ ID NO: 112661 - RNA, 19 nt, Artificial Sequence
  Description of Artificial Sequence: Synthetic oligonucleotide
uuuagaagcugaagcagua

SEQ ID NO: 112662 - RNA, 19 nt, Artificial Sequence
  Description of Artificial Sequence: Synthetic oligonucleotide
aauucagcaguagaagaaa

SEQ ID NO: 112663 - RNA, 19 nt, Artificial Sequence
  Description of Artificial Sequence: Synthetic oligonucleotide
ucuggauaccugauuuagc

SEQ ID NO: 112664 - RNA, 19 nt, Artificial Sequence
  Description of Artificial Sequence: Synthetic oligonucleotide
acaugcaugcagcaggcug

SEQ ID NO: 112665 - RNA, 19 nt, Artificial Sequence
  Description of Artificial Sequence: Synthetic oligonucleotide
acaaugagagcuggucucc

SEQ ID NO: 112666 - RNA, 19 nt, Artificial Sequence
  Description of Artificial Sequence: Synthetic oligonucleotide
gauaguagcuagaugaugu

SEQ ID NO: 112667 - RNA, 19 nt, Artificial Sequence
  Description of Artificial Sequence: Synthetic oligonucleotide
uaccguucugucaaagaca

SEQ ID NO: 112668 - RNA, 19 nt, Artificial Sequence
  Description of Artificial Sequence: Synthetic oligonucleotide
guaccguucugucaaagac

SEQ ID NO: 112669 - RNA, 19 nt, Artificial Sequence
  Description of Artificial Sequence: Synthetic oligonucleotide
cacgcagcccaucagacag

SEQ ID NO: 112670 - RNA, 19 nt, Artificial Sequence
  Description of Artificial Sequence: Synthetic oligonucleotide
acagaacaugcaaaggagg

SEQ ID NO: 112671 - RNA, 19 nt, Artificial Sequence
  Description of Artificial Sequence: Synthetic oligonucleotide
aguguguuccguuucaguu

SEQ ID NO: 112672 - RNA, 19 nt, Artificial Sequence
  Description of Artificial Sequence: Synthetic oligonucleotide
aaaaguaccacgagguaua

SEQ ID NO: 112673 - RNA, 19 nt, Artificial Sequence
  Description of Artificial Sequence: Synthetic oligonucleotide
ccagauacuuccuuggugc

SEQ ID NO: 112674 - RNA, 19 nt, Artificial Sequence
  Description of Artificial Sequence: Synthetic oligonucleotide
gcaggagauaaacaaaccc

SEQ ID NO: 112675 - RNA, 19 nt, Artificial Sequence
  Description of Artificial Sequence: Synthetic oligonucleotide
ugaugugagaugugcuuug

SEQ ID NO: 112676 - RNA, 19 nt, Artificial Sequence
  Description of Artificial Sequence: Synthetic oligonucleotide
caagcaaguacaggcaugc

SEQ ID NO: 112677 - RNA, 19 nt, Artificial Sequence
  Description of Artificial Sequence: Synthetic oligonucleotide
uuacacugccuaagcaacc

SEQ ID NO: 112678 - RNA, 19 nt, Artificial Sequence
  Description of Artificial Sequence: Synthetic oligonucleotide
cacugccuaagcaaccugg

SEQ ID NO: 112679 - RNA, 19 nt, Artificial Sequence
  Description of Artificial Sequence: Synthetic oligonucleotide
cuuuguugggcccuagcug

SEQ ID NO: 112680 - RNA, 19 nt, Artificial Sequence
  Description of Artificial Sequence: Synthetic oligonucleotide
cuaggauagccucugcaug

SEQ ID NO: 112681 - RNA, 19 nt, Artificial Sequence
  Description of Artificial Sequence: Synthetic oligonucleotide
ugcacaaacuguaccguuc

SEQ ID NO: 112682 - RNA, 19 nt, Artificial Sequence
  Description of Artificial Sequence: Synthetic oligonucleotide
uucuaguaacaagcaauag

SEQ ID NO: 112683 - RNA, 19 nt, Artificial Sequence
  Description of Artificial Sequence: Synthetic oligonucleotide
gauacacgcaaagguacag

SEQ ID NO: 112684 - RNA, 19 nt, Artificial Sequence
  Description of Artificial Sequence: Synthetic oligonucleotide
ugguuuacaucaauuuaua

SEQ ID NO: 112685 - RNA, 19 nt, Artificial Sequence
  Description of Artificial Sequence: Synthetic oligonucleotide
uguaccguucugucaaaga

SEQ ID NO: 112686 - RNA, 19 nt, Artificial Sequence
  Description of Artificial Sequence: Synthetic oligonucleotide
ucuccuuauucaacauuug

SEQ ID NO: 112687 - RNA, 19 nt, Artificial Sequence
  Description of Artificial Sequence: Synthetic oligonucleotide
accagauacuuccuuggug

SEQ ID NO: 112688 - RNA, 19 nt, Artificial Sequence
  Description of Artificial Sequence: Synthetic oligonucleotide
aggugcaucaugcaguuuu

SEQ ID NO: 112689 - RNA, 19 nt, Artificial Sequence
  Description of Artificial Sequence: Synthetic oligonucleotide
cucgaaagagcucugccuc

SEQ ID NO: 112690 - RNA, 19 nt, Artificial Sequence
  Description of Artificial Sequence: Synthetic oligonucleotide
ggauaccugauuuagccac

SEQ ID NO: 112691 - RNA, 19 nt, Artificial Sequence
  Description of Artificial Sequence: Synthetic oligonucleotide
gugccaagauaguagcuag

SEQ ID NO: 112692 - RNA, 19 nt, Artificial Sequence
  Description of Artificial Sequence: Synthetic oligonucleotide
ucuauacacugccguacga

SEQ ID NO: 112693 - RNA, 19 nt, Artificial Sequence
  Description of Artificial Sequence: Synthetic oligonucleotide
uaauaggcagcugggaagu

SEQ ID NO: 112694 - RNA, 19 nt, Artificial Sequence
  Description of Artificial Sequence: Synthetic oligonucleotide
caagcaauagguugcagaa

SEQ ID NO: 112695 - RNA, 19 nt, Artificial Sequence
  Description of Artificial Sequence: Synthetic oligonucleotide
cuugacagcaggacacuug

SEQ ID NO: 112696 - RNA, 19 nt, Artificial Sequence
  Description of Artificial Sequence: Synthetic oligonucleotide
guagcuagaugaugugacc

SEQ ID NO: 112697 - RNA, 19 nt, Artificial Sequence
  Description of Artificial Sequence: Synthetic oligonucleotide
aggagauaaacaaacccca

SEQ ID NO: 112698 - RNA, 19 nt, Artificial Sequence
  Description of Artificial Sequence: Synthetic oligonucleotide
gaccucucuugacagcagg

SEQ ID NO: 112699 - RNA, 19 nt, Artificial Sequence
  Description of Artificial Sequence: Synthetic oligonucleotide
uaguaaaguaggaccugga

SEQ ID NO: 112700 - RNA, 19 nt, Artificial Sequence
  Description of Artificial Sequence: Synthetic oligonucleotide
ucuucuauacacugccgua

SEQ ID NO: 112701 - RNA, 19 nt, Artificial Sequence
  Description of Artificial Sequence: Synthetic oligonucleotide
cugcuaauaggcagcuggg

SEQ ID NO: 112702 - RNA, 19 nt, Artificial Sequence
  Description of Artificial Sequence: Synthetic oligonucleotide
gacauguuccagcaggaaa

SEQ ID NO: 112703 - RNA, 19 nt, Artificial Sequence
  Description of Artificial Sequence: Synthetic oligonucleotide
aacccaucuuuagacuuag

SEQ ID NO: 112704 - RNA, 19 nt, Artificial Sequence
  Description of Artificial Sequence: Synthetic oligonucleotide
ugcuguuacacugccuaag

SEQ ID NO: 112705 - RNA, 19 nt, Artificial Sequence
  Description of Artificial Sequence: Synthetic oligonucleotide
cuuggugcaccucaguuga

SEQ ID NO: 112706 - RNA, 19 nt, Artificial Sequence
  Description of Artificial Sequence: Synthetic oligonucleotide
cuucuauacacugccguac

SEQ ID NO: 112707 - RNA, 19 nt, Artificial Sequence
  Description of Artificial Sequence: Synthetic oligonucleotide
ucgcaggagaaacaccaga

SEQ ID NO: 112708 - RNA, 19 nt, Artificial Sequence
  Description of Artificial Sequence: Synthetic oligonucleotide
caaagguacagaggguggg

SEQ ID NO: 112709 - RNA, 19 nt, Artificial Sequence
  Description of Artificial Sequence: Synthetic oligonucleotide
auaugagguuccagguucc

SEQ ID NO: 112710 - RNA, 19 nt, Artificial Sequence
  Description of Artificial Sequence: Synthetic oligonucleotide
uaugcacaaacuguaccgu

SEQ ID NO: 112711 - RNA, 19 nt, Artificial Sequence
  Description of Artificial Sequence: Synthetic oligonucleotide
aagaaucaacucugccaca

SEQ ID NO: 112712 - RNA, 19 nt, Artificial Sequence
  Description of Artificial Sequence: Synthetic oligonucleotide
cugaaaaugccucauggua

SEQ ID NO: 112713 - RNA, 19 nt, Artificial Sequence
  Description of Artificial Sequence: Synthetic oligonucleotide
uucggauuagugugcgucu

SEQ ID NO: 112714 - RNA, 19 nt, Artificial Sequence
  Description of Artificial Sequence: Synthetic oligonucleotide
uccguuucaguuccgcgaa

SEQ ID NO: 112715 - RNA, 19 nt, Artificial Sequence
  Description of Artificial Sequence: Synthetic oligonucleotide
aagcaaguacaggcaugcc

SEQ ID NO: 112716 - RNA, 19 nt, Artificial Sequence
  Description of Artificial Sequence: Synthetic oligonucleotide
uaguagcuagaugauguga

SEQ ID NO: 112717 - RNA, 19 nt, Artificial Sequence
  Description of Artificial Sequence: Synthetic oligonucleotide
uccgagggucucaguaacg

SEQ ID NO: 112718 - RNA, 19 nt, Artificial Sequence
  Description of Artificial Sequence: Synthetic oligonucleotide
uuccgcgaaggaaauggga

SEQ ID NO: 112719 - RNA, 19 nt, Artificial Sequence
  Description of Artificial Sequence: Synthetic oligonucleotide
agguaguaaaguaggaccu

SEQ ID NO: 112720 - RNA, 19 nt, Artificial Sequence
  Description of Artificial Sequence: Synthetic oligonucleotide
auguauggccccuucugcu

SEQ ID NO: 112721 - RNA, 19 nt, Artificial Sequence
  Description of Artificial Sequence: Synthetic oligonucleotide
acacaccaccaccugagug

SEQ ID NO: 112722 - RNA, 19 nt, Artificial Sequence
  Description of Artificial Sequence: Synthetic oligonucleotide
aaagguacagaggguggga

SEQ ID NO: 112723 - RNA, 19 nt, Artificial Sequence
  Description of Artificial Sequence: Synthetic oligonucleotide
uuccgagggucucaguaac

SEQ ID NO: 112724 - RNA, 19 nt, Artificial Sequence
  Description of Artificial Sequence: Synthetic oligonucleotide
ugguaauguggcugccccg

SEQ ID NO: 112725 - RNA, 19 nt, Artificial Sequence
  Description of Artificial Sequence: Synthetic oligonucleotide
aucaugggaccagauaucu

SEQ ID NO: 112726 - RNA, 19 nt, Artificial Sequence
  Description of Artificial Sequence: Synthetic oligonucleotide
agacuuagcccugagcaca

SEQ ID NO: 112727 - RNA, 19 nt, Artificial Sequence
  Description of Artificial Sequence: Synthetic oligonucleotide
gugggauuuauaaauaaua

SEQ ID NO: 112728 - RNA, 19 nt, Artificial Sequence
  Description of Artificial Sequence: Synthetic oligonucleotide
caaguacaggcaugccugg

SEQ ID NO: 112729 - RNA, 19 nt, Artificial Sequence
  Description of Artificial Sequence: Synthetic oligonucleotide
aagauaguagcuagaugau

SEQ ID NO: 112730 - RNA, 19 nt, Artificial Sequence
  Description of Artificial Sequence: Synthetic oligonucleotide
ugacucgucgauguauggc

SEQ ID NO: 112731 - RNA, 19 nt, Artificial Sequence
  Description of Artificial Sequence: Synthetic oligonucleotide
uggugcuuugggaauaauu

SEQ ID NO: 112732 - RNA, 19 nt, Artificial Sequence
  Description of Artificial Sequence: Synthetic oligonucleotide
cuucggauuagugugcguc

SEQ ID NO: 112733 - RNA, 19 nt, Artificial Sequence
  Description of Artificial Sequence: Synthetic oligonucleotide
aaaugggagggugcugcag

SEQ ID NO: 112734 - RNA, 19 nt, Artificial Sequence
  Description of Artificial Sequence: Synthetic oligonucleotide
aacguggggccgaacacag

SEQ ID NO: 112735 - RNA, 19 nt, Artificial Sequence
  Description of Artificial Sequence: Synthetic oligonucleotide
ccuuuaauaauucucagcu

SEQ ID NO: 112736 - RNA, 19 nt, Artificial Sequence
  Description of Artificial Sequence: Synthetic oligonucleotide
gaauaccacacaccaccac

SEQ ID NO: 112737 - RNA, 19 nt, Artificial Sequence
  Description of Artificial Sequence: Synthetic oligonucleotide
uacgagggcaggaccauuc

SEQ ID NO: 112738 - RNA, 19 nt, Artificial Sequence
  Description of Artificial Sequence: Synthetic oligonucleotide
uggagcaugcaugguaaug

SEQ ID NO: 112739 - RNA, 19 nt, Artificial Sequence
  Description of Artificial Sequence: Synthetic oligonucleotide
augcaugguaauguggcug

SEQ ID NO: 112740 - RNA, 19 nt, Artificial Sequence
  Description of Artificial Sequence: Synthetic oligonucleotide
cuuagcccugagcacacac

SEQ ID NO: 112741 - RNA, 19 nt, Artificial Sequence
  Description of Artificial Sequence: Synthetic oligonucleotide
guagcugugguagcgcaag

SEQ ID NO: 112742 - RNA, 19 nt, Artificial Sequence
  Description of Artificial Sequence: Synthetic oligonucleotide
augacacccaccaauccug

SEQ ID NO: 112743 - RNA, 19 nt, Artificial Sequence
  Description of Artificial Sequence: Synthetic oligonucleotide
agcgcucccgcuuggucac

SEQ ID NO: 112744 - RNA, 19 nt, Artificial Sequence
  Description of Artificial Sequence: Synthetic oligonucleotide
gaugugagaugugcuuugc

SEQ ID NO: 112745 - RNA, 19 nt, Artificial Sequence
  Description of Artificial Sequence: Synthetic oligonucleotide
uccugagggccaagaauca

SEQ ID NO: 112746 - RNA, 19 nt, Artificial Sequence
  Description of Artificial Sequence: Synthetic oligonucleotide
gguaauucucaaauagaac

SEQ ID NO: 112747 - RNA, 19 nt, Artificial Sequence
  Description of Artificial Sequence: Synthetic oligonucleotide
gcaaucugggagcagggcc

SEQ ID NO: 112748 - RNA, 19 nt, Artificial Sequence
  Description of Artificial Sequence: Synthetic oligonucleotide
caaagacggccuucagugc

SEQ ID NO: 112749 - RNA, 19 nt, Artificial Sequence
  Description of Artificial Sequence: Synthetic oligonucleotide
ugccccacuaggauagccu

SEQ ID NO: 112750 - RNA, 19 nt, Artificial Sequence
  Description of Artificial Sequence: Synthetic oligonucleotide
ucagcggccacuaccuuuu

SEQ ID NO: 112751 - RNA, 19 nt, Artificial Sequence
  Description of Artificial Sequence: Synthetic oligonucleotide
acucgucgauguauggccc

SEQ ID NO: 112752 - RNA, 19 nt, Artificial Sequence
  Description of Artificial Sequence: Synthetic oligonucleotide
ucuauacucacgggcauuu

SEQ ID NO: 112753 - RNA, 19 nt, Artificial Sequence
  Description of Artificial Sequence: Synthetic oligonucleotide
uguuccguuucaguuccgc

SEQ ID NO: 112754 - RNA, 19 nt, Artificial Sequence
  Description of Artificial Sequence: Synthetic oligonucleotide
caucaugggaccagauauc

SEQ ID NO: 112755 - RNA, 19 nt, Artificial Sequence
  Description of Artificial Sequence: Synthetic oligonucleotide
cagacacuacagcuugggg

SEQ ID NO: 112756 - RNA, 19 nt, Artificial Sequence
  Description of Artificial Sequence: Synthetic oligonucleotide
guaacguggggccgaacac

SEQ ID NO: 112757 - RNA, 19 nt, Artificial Sequence
  Description of Artificial Sequence: Synthetic oligonucleotide
auacucacgggcauuuucu

SEQ ID NO: 112758 - RNA, 19 nt, Artificial Sequence
  Description of Artificial Sequence: Synthetic oligonucleotide
aggguaauucucaaauaga

SEQ ID NO: 112759 - RNA, 19 nt, Artificial Sequence
  Description of Artificial Sequence: Synthetic oligonucleotide
ccauaccaacuuauuaggg

SEQ ID NO: 112760 - RNA, 19 nt, Artificial Sequence
  Description of Artificial Sequence: Synthetic oligonucleotide
ccaagaaucaacucugcca

SEQ ID NO: 112761 - RNA, 19 nt, Artificial Sequence
  Description of Artificial Sequence: Synthetic oligonucleotide
gugacucgucgauguaugg

SEQ ID NO: 112762 - RNA, 19 nt, Artificial Sequence
  Description of Artificial Sequence: Synthetic oligonucleotide
acugccuaagcaaccuggg

SEQ ID NO: 112763 - RNA, 19 nt, Artificial Sequence
  Description of Artificial Sequence: Synthetic oligonucleotide
cugcaaucugggagcaggg

SEQ ID NO: 112764 - RNA, 19 nt, Artificial Sequence
  Description of Artificial Sequence: Synthetic oligonucleotide
acuugggauuacccacagg

SEQ ID NO: 112765 - RNA, 19 nt, Artificial Sequence
  Description of Artificial Sequence: Synthetic oligonucleotide
ucaguuccgcgaaggaaau

SEQ ID NO: 112766 - RNA, 19 nt, Artificial Sequence
  Description of Artificial Sequence: Synthetic oligonucleotide
uccccaauccugagggcca

SEQ ID NO: 112767 - RNA, 19 nt, Artificial Sequence
  Description of Artificial Sequence: Synthetic oligonucleotide
uaacguggggccgaacaca

SEQ ID NO: 112768 - RNA, 19 nt, Artificial Sequence
  Description of Artificial Sequence: Synthetic oligonucleotide
uccaaagacgccggucugc

SEQ ID NO: 112769 - RNA, 19 nt, Artificial Sequence
  Description of Artificial Sequence: Synthetic oligonucleotide
accucuauacucacgggca

SEQ ID NO: 112770 - RNA, 19 nt, Artificial Sequence
  Description of Artificial Sequence: Synthetic oligonucleotide
ugaccucucuugacagcag

SEQ ID NO: 112771 - RNA, 19 nt, Artificial Sequence
  Description of Artificial Sequence: Synthetic oligonucleotide
agccuuccugcuguuacac

SEQ ID NO: 112772 - RNA, 19 nt, Artificial Sequence
  Description of Artificial Sequence: Synthetic oligonucleotide
caggcuacacaucugugga

SEQ ID NO: 112773 - RNA, 19 nt, Artificial Sequence
  Description of Artificial Sequence: Synthetic oligonucleotide
gcuguuacacugccuaagc

SEQ ID NO: 112774 - RNA, 19 nt, Artificial Sequence
  Description of Artificial Sequence: Synthetic oligonucleotide
ugcuaauaggcagcuggga

SEQ ID NO: 112775 - RNA, 19 nt, Artificial Sequence
  Description of Artificial Sequence: Synthetic oligonucleotide
gugagaugugcuuugcucu

SEQ ID NO: 112776 - RNA, 19 nt, Artificial Sequence
  Description of Artificial Sequence: Synthetic oligonucleotide
acacgcaaagguacagagg

SEQ ID NO: 112777 - RNA, 19 nt, Artificial Sequence
  Description of Artificial Sequence: Synthetic oligonucleotide
agaacaaagcaggcugucu

SEQ ID NO: 112778 - RNA, 19 nt, Artificial Sequence
  Description of Artificial Sequence: Synthetic oligonucleotide
gacaucaugggaccagaua

SEQ ID NO: 112779 - RNA, 19 nt, Artificial Sequence
  Description of Artificial Sequence: Synthetic oligonucleotide
uugcagaacugagaaugac

SEQ ID NO: 112780 - RNA, 19 nt, Artificial Sequence
  Description of Artificial Sequence: Synthetic oligonucleotide
aggcuacacaucuguggag

SEQ ID NO: 112781 - RNA, 19 nt, Artificial Sequence
  Description of Artificial Sequence: Synthetic oligonucleotide
uggguaaagucggucugug

SEQ ID NO: 112782 - RNA, 19 nt, Artificial Sequence
  Description of Artificial Sequence: Synthetic oligonucleotide
cucgucgauguauggcccc

SEQ ID NO: 112783 - RNA, 19 nt, Artificial Sequence
  Description of Artificial Sequence: Synthetic oligonucleotide
aauggugcuuugggaauaa

SEQ ID NO: 112784 - RNA, 19 nt, Artificial Sequence
  Description of Artificial Sequence: Synthetic oligonucleotide
gcugugguagcgcaagccc

SEQ ID NO: 112785 - RNA, 19 nt, Artificial Sequence
  Description of Artificial Sequence: Synthetic oligonucleotide
agcgcaagccccucugaca

SEQ ID NO: 112786 - RNA, 19 nt, Artificial Sequence
  Description of Artificial Sequence: Synthetic oligonucleotide
uuggguugugccuuccauu

SEQ ID NO: 112787 - RNA, 19 nt, Artificial Sequence
  Description of Artificial Sequence: Synthetic oligonucleotide
ucggauuagugugcgucug

SEQ ID NO: 112788 - RNA, 19 nt, Artificial Sequence
  Description of Artificial Sequence: Synthetic oligonucleotide
ggucucaguaacguggggc

SEQ ID NO: 112789 - RNA, 19 nt, Artificial Sequence
  Description of Artificial Sequence: Synthetic oligonucleotide
agggucucaguaacguggg

SEQ ID NO: 112790 - RNA, 19 nt, Artificial Sequence
  Description of Artificial Sequence: Synthetic oligonucleotide
auaccacacaccaccaccu

SEQ ID NO: 112791 - RNA, 19 nt, Artificial Sequence
  Description of Artificial Sequence: Synthetic oligonucleotide
caauagguugcagaacuga

SEQ ID NO: 112792 - RNA, 19 nt, Artificial Sequence
  Description of Artificial Sequence: Synthetic oligonucleotide
ucacgugguuuacaucaau

SEQ ID NO: 112793 - RNA, 19 nt, Artificial Sequence
  Description of Artificial Sequence: Synthetic oligonucleotide
uccuaccuugucagcaaaa

SEQ ID NO: 112794 - RNA, 19 nt, Artificial Sequence
  Description of Artificial Sequence: Synthetic oligonucleotide
augccccacuaggauagcc

SEQ ID NO: 112795 - RNA, 19 nt, Artificial Sequence
  Description of Artificial Sequence: Synthetic oligonucleotide
gaccagauaucugcagcug

SEQ ID NO: 112796 - RNA, 19 nt, Artificial Sequence
  Description of Artificial Sequence: Synthetic oligonucleotide
gugguuuacaucaauuuau

SEQ ID NO: 112797 - RNA, 19 nt, Artificial Sequence
  Description of Artificial Sequence: Synthetic oligonucleotide
guuucaguuccgcgaagga

SEQ ID NO: 112798 - RNA, 19 nt, Artificial Sequence
  Description of Artificial Sequence: Synthetic oligonucleotide
ugacacccaccaauccugu

SEQ ID NO: 112799 - RNA, 19 nt, Artificial Sequence
  Description of Artificial Sequence: Synthetic oligonucleotide
aggaccauuccaguugggu

SEQ ID NO: 112800 - RNA, 19 nt, Artificial Sequence
  Description of Artificial Sequence: Synthetic oligonucleotide
aguaggaccuggaccuggg

SEQ ID NO: 112801 - RNA, 19 nt, Artificial Sequence
  Description of Artificial Sequence: Synthetic oligonucleotide
agucggucugugaggaggg

SEQ ID NO: 112802 - RNA, 19 nt, Artificial Sequence
  Description of Artificial Sequence: Synthetic oligonucleotide
gagcgcucccgcuugguca

SEQ ID NO: 112803 - RNA, 19 nt, Artificial Sequence
  Description of Artificial Sequence: Synthetic oligonucleotide
auacuugggauuacccaca

SEQ ID NO: 112804 - RNA, 19 nt, Artificial Sequence
  Description of Artificial Sequence: Synthetic oligonucleotide
aaaguaccacgagguauau

SEQ ID NO: 112805 - RNA, 19 nt, Artificial Sequence
  Description of Artificial Sequence: Synthetic oligonucleotide
cuaagcaaccugggaacug

SEQ ID NO: 112806 - RNA, 19 nt, Artificial Sequence
  Description of Artificial Sequence: Synthetic oligonucleotide
agauacacgcaaagguaca

SEQ ID NO: 112807 - RNA, 19 nt, Artificial Sequence
  Description of Artificial Sequence: Synthetic oligonucleotide
caccaauccugucgucugg

SEQ ID NO: 112808 - RNA, 19 nt, Artificial Sequence
  Description of Artificial Sequence: Synthetic oligonucleotide
ccugcaaucugggagcagg

SEQ ID NO: 112809 - RNA, 19 nt, Artificial Sequence
  Description of Artificial Sequence: Synthetic oligonucleotide
ggcguugauguccauguca

SEQ ID NO: 112810 - RNA, 19 nt, Artificial Sequence
  Description of Artificial Sequence: Synthetic oligonucleotide
aggugcauuccugaccucu

SEQ ID NO: 112811 - RNA, 19 nt, Artificial Sequence
  Description of Artificial Sequence: Synthetic oligonucleotide
cuuuaaccuguuugagaca

SEQ ID NO: 112812 - RNA, 19 nt, Artificial Sequence
  Description of Artificial Sequence: Synthetic oligonucleotide
gauuagugugcgucugucu

SEQ ID NO: 112813 - RNA, 19 nt, Artificial Sequence
  Description of Artificial Sequence: Synthetic oligonucleotide
ugccccguggcagugcuug

SEQ ID NO: 112814 - RNA, 19 nt, Artificial Sequence
  Description of Artificial Sequence: Synthetic oligonucleotide
uucacugcccaagcaagua

SEQ ID NO: 112815 - RNA, 19 nt, Artificial Sequence
  Description of Artificial Sequence: Synthetic oligonucleotide
ccaugccccacuaggauag

SEQ ID NO: 112816 - RNA, 19 nt, Artificial Sequence
  Description of Artificial Sequence: Synthetic oligonucleotide
auacacgcaaagguacaga

SEQ ID NO: 112817 - RNA, 19 nt, Artificial Sequence
  Description of Artificial Sequence: Synthetic oligonucleotide
guuccgcgaaggaaauggg

SEQ ID NO: 112818 - RNA, 19 nt, Artificial Sequence
  Description of Artificial Sequence: Synthetic oligonucleotide
uggugggugacucgucgau

SEQ ID NO: 112819 - RNA, 19 nt, Artificial Sequence
  Description of Artificial Sequence: Synthetic oligonucleotide
gauauccuguagaugccaa

SEQ ID NO: 112820 - RNA, 19 nt, Artificial Sequence
  Description of Artificial Sequence: Synthetic oligonucleotide
cacugcccaagcaaguaca

SEQ ID NO: 112821 - RNA, 19 nt, Artificial Sequence
  Description of Artificial Sequence: Synthetic oligonucleotide
gagcggaguaggugcauca

SEQ ID NO: 112822 - RNA, 19 nt, Artificial Sequence
  Description of Artificial Sequence: Synthetic oligonucleotide
guugagaguguaaaaucua

SEQ ID NO: 112823 - RNA, 19 nt, Artificial Sequence
  Description of Artificial Sequence: Synthetic oligonucleotide
gucuuuguugggcccuagc

SEQ ID NO: 112824 - RNA, 19 nt, Artificial Sequence
  Description of Artificial Sequence: Synthetic oligonucleotide
uuggagcgcucccgcuugg

SEQ ID NO: 112825 - RNA, 19 nt, Artificial Sequence
  Description of Artificial Sequence: Synthetic oligonucleotide
caguacgagggcaggacca

SEQ ID NO: 112826 - RNA, 19 nt, Artificial Sequence
  Description of Artificial Sequence: Synthetic oligonucleotide
augcacaaacuguaccguu

SEQ ID NO: 112827 - RNA, 19 nt, Artificial Sequence
  Description of Artificial Sequence: Synthetic oligonucleotide
cuucuagaauacuugggau

SEQ ID NO: 112828 - RNA, 19 nt, Artificial Sequence
  Description of Artificial Sequence: Synthetic oligonucleotide
cugccguacgauguagggc

SEQ ID NO: 112829 - RNA, 19 nt, Artificial Sequence
  Description of Artificial Sequence: Synthetic oligonucleotide
ggauuacccacagggcugg

SEQ ID NO: 112830 - RNA, 19 nt, Artificial Sequence
  Description of Artificial Sequence: Synthetic oligonucleotide
cuguuacacugccuaagca

SEQ ID NO: 112831 - RNA, 19 nt, Artificial Sequence
  Description of Artificial Sequence: Synthetic oligonucleotide
aagcaguacgagggcagga

SEQ ID NO: 112832 - RNA, 19 nt, Artificial Sequence
  Description of Artificial Sequence: Synthetic oligonucleotide
gagggccaagaaucaacuc

SEQ ID NO: 112833 - RNA, 19 nt, Artificial Sequence
  Description of Artificial Sequence: Synthetic oligonucleotide
aguuggguugugccuucca

SEQ ID NO: 112834 - RNA, 19 nt, Artificial Sequence
  Description of Artificial Sequence: Synthetic oligonucleotide
accaccugagugccaagau

SEQ ID NO: 112835 - RNA, 19 nt, Artificial Sequence
  Description of Artificial Sequence: Synthetic oligonucleotide
guaccacgagguauaugag

SEQ ID NO: 112836 - RNA, 19 nt, Artificial Sequence
  Description of Artificial Sequence: Synthetic oligonucleotide
caaugagagcuggucuccc

SEQ ID NO: 112837 - RNA, 19 nt, Artificial Sequence
  Description of Artificial Sequence: Synthetic oligonucleotide
agacagcaagguuccuugu

SEQ ID NO: 112838 - RNA, 19 nt, Artificial Sequence
  Description of Artificial Sequence: Synthetic oligonucleotide
gggcagacacugcagggag

SEQ ID NO: 112839 - RNA, 19 nt, Artificial Sequence
  Description of Artificial Sequence: Synthetic oligonucleotide
acaggacucgaaagagcuc

SEQ ID NO: 112840 - RNA, 19 nt, Artificial Sequence
  Description of Artificial Sequence: Synthetic oligonucleotide
caugcccucugcgucguag

SEQ ID NO: 112841 - RNA, 19 nt, Artificial Sequence
  Description of Artificial Sequence: Synthetic oligonucleotide
caaaaguaccacgagguau

SEQ ID NO: 112842 - RNA, 19 nt, Artificial Sequence
  Description of Artificial Sequence: Synthetic oligonucleotide
ggugacucgucgauguaug

SEQ ID NO: 112843 - RNA, 19 nt, Artificial Sequence
  Description of Artificial Sequence: Synthetic oligonucleotide
ccuuggugcaccucaguug

SEQ ID NO: 112844 - RNA, 19 nt, Artificial Sequence
  Description of Artificial Sequence: Synthetic oligonucleotide
cagaaaggguaauucucaa

SEQ ID NO: 112845 - RNA, 19 nt, Artificial Sequence
  Description of Artificial Sequence: Synthetic oligonucleotide
gguagcgcaagccccucug

SEQ ID NO: 112846 - RNA, 19 nt, Artificial Sequence
  Description of Artificial Sequence: Synthetic oligonucleotide
aagacgccggucugcuuuu

SEQ ID NO: 112847 - RNA, 19 nt, Artificial Sequence
  Description of Artificial Sequence: Synthetic oligonucleotide
ugccuuccauugcuaggcu

SEQ ID NO: 112848 - RNA, 19 nt, Artificial Sequence
  Description of Artificial Sequence: Synthetic oligonucleotide
gggauuacccacagggcug

SEQ ID NO: 112849 - RNA, 19 nt, Artificial Sequence
  Description of Artificial Sequence: Synthetic oligonucleotide
auucacugcccaagcaagu

SEQ ID NO: 112850 - RNA, 19 nt, Artificial Sequence
  Description of Artificial Sequence: Synthetic oligonucleotide
ccgcgaaggaaaugggagg

SEQ ID NO: 112851 - RNA, 19 nt, Artificial Sequence
  Description of Artificial Sequence: Synthetic oligonucleotide
cucucacgugguuuacauc

SEQ ID NO: 112852 - RNA, 19 nt, Artificial Sequence
  Description of Artificial Sequence: Synthetic oligonucleotide
ugucgucuggagccccaac

SEQ ID NO: 112853 - RNA, 19 nt, Artificial Sequence
  Description of Artificial Sequence: Synthetic oligonucleotide
acacugccguacgauguag

SEQ ID NO: 112854 - RNA, 19 nt, Artificial Sequence
  Description of Artificial Sequence: Synthetic oligonucleotide
cuugccccacuuggggugg

SEQ ID NO: 112855 - RNA, 19 nt, Artificial Sequence
  Description of Artificial Sequence: Synthetic oligonucleotide
cuguaccguucugucaaag

SEQ ID NO: 112856 - RNA, 19 nt, Artificial Sequence
  Description of Artificial Sequence: Synthetic oligonucleotide
gcaguacgagggcaggacc

SEQ ID NO: 112857 - RNA, 19 nt, Artificial Sequence
  Description of Artificial Sequence: Synthetic oligonucleotide
ccucaugcccucugcgucg

SEQ ID NO: 112858 - RNA, 19 nt, Artificial Sequence
  Description of Artificial Sequence: Synthetic oligonucleotide
ccaagcaaguacaggcaug

SEQ ID NO: 112859 - RNA, 19 nt, Artificial Sequence
  Description of Artificial Sequence: Synthetic oligonucleotide
agguugcagaacugagaau

SEQ ID NO: 112860 - RNA, 19 nt, Artificial Sequence
  Description of Artificial Sequence: Synthetic oligonucleotide
caccccugauauccuguag

SEQ ID NO: 112861 - RNA, 19 nt, Artificial Sequence
  Description of Artificial Sequence: Synthetic oligonucleotide
agcaaccugggaacugcag

SEQ ID NO: 112862 - RNA, 19 nt, Artificial Sequence
  Description of Artificial Sequence: Synthetic oligonucleotide
guauaugagguuccagguu

SEQ ID NO: 112863 - RNA, 19 nt, Artificial Sequence
  Description of Artificial Sequence: Synthetic oligonucleotide
ggaaagcaggcgugcuucc

SEQ ID NO: 112864 - RNA, 19 nt, Artificial Sequence
  Description of Artificial Sequence: Synthetic oligonucleotide
gucgcaggagaaacaccag

SEQ ID NO: 112865 - RNA, 19 nt, Artificial Sequence
  Description of Artificial Sequence: Synthetic oligonucleotide
cuccuggugcccugcuggc

SEQ ID NO: 112866 - RNA, 19 nt, Artificial Sequence
  Description of Artificial Sequence: Synthetic oligonucleotide
gcaaggaaagcaggcgugc

SEQ ID NO: 112867 - RNA, 19 nt, Artificial Sequence
  Description of Artificial Sequence: Synthetic oligonucleotide
gugguagcugugguagcgc

SEQ ID NO: 112868 - RNA, 19 nt, Artificial Sequence
  Description of Artificial Sequence: Synthetic oligonucleotide
augcccucugcgucguagu

SEQ ID NO: 112869 - RNA, 19 nt, Artificial Sequence
  Description of Artificial Sequence: Synthetic oligonucleotide
caaugccccucuucuccac

SEQ ID NO: 112870 - RNA, 19 nt, Artificial Sequence
  Description of Artificial Sequence: Synthetic oligonucleotide
agccccaacagaacaugca

SEQ ID NO: 112871 - RNA, 19 nt, Artificial Sequence
  Description of Artificial Sequence: Synthetic oligonucleotide
ucgucgauguauggccccu

SEQ ID NO: 112872 - RNA, 19 nt, Artificial Sequence
  Description of Artificial Sequence: Synthetic oligonucleotide
caggaccauuccaguuggg

SEQ ID NO: 112873 - RNA, 19 nt, Artificial Sequence
  Description of Artificial Sequence: Synthetic oligonucleotide
gcuaagcuucggauuagug

SEQ ID NO: 112874 - RNA, 19 nt, Artificial Sequence
  Description of Artificial Sequence: Synthetic oligonucleotide
cagacuggacucaggcaga

SEQ ID NO: 112875 - RNA, 19 nt, Artificial Sequence
  Description of Artificial Sequence: Synthetic oligonucleotide
acuguaccguucugucaaa

SEQ ID NO: 112876 - RNA, 19 nt, Artificial Sequence
  Description of Artificial Sequence: Synthetic oligonucleotide
cacuccaaagacgccgguc

SEQ ID NO: 112877 - RNA, 19 nt, Artificial Sequence
  Description of Artificial Sequence: Synthetic oligonucleotide
guaccagcgauggcguuga

SEQ ID NO: 112878 - RNA, 19 nt, Artificial Sequence
  Description of Artificial Sequence: Synthetic oligonucleotide
aguacgagggcaggaccau

SEQ ID NO: 112879 - RNA, 19 nt, Artificial Sequence
  Description of Artificial Sequence: Synthetic oligonucleotide
gguaguugcuccucagacu

SEQ ID NO: 112880 - RNA, 19 nt, Artificial Sequence
  Description of Artificial Sequence: Synthetic oligonucleotide
gguugugccuuccauugcu

SEQ ID NO: 112881 - RNA, 19 nt, Artificial Sequence
  Description of Artificial Sequence: Synthetic oligonucleotide
gcugaaaaugccucauggu

SEQ ID NO: 112882 - RNA, 19 nt, Artificial Sequence
  Description of Artificial Sequence: Synthetic oligonucleotide
caauccugagggccaagaa

SEQ ID NO: 112883 - RNA, 19 nt, Artificial Sequence
  Description of Artificial Sequence: Synthetic oligonucleotide
agccccucugacaggagca

SEQ ID NO: 112884 - RNA, 19 nt, Artificial Sequence
  Description of Artificial Sequence: Synthetic oligonucleotide
guagcgcaagccccucuga

SEQ ID NO: 112885 - RNA, 19 nt, Artificial Sequence
  Description of Artificial Sequence: Synthetic oligonucleotide
cugccuaagcaaccuggga

SEQ ID NO: 112886 - RNA, 19 nt, Artificial Sequence
  Description of Artificial Sequence: Synthetic oligonucleotide
ccaccaauccugucgucug

SEQ ID NO: 112887 - RNA, 19 nt, Artificial Sequence
  Description of Artificial Sequence: Synthetic oligonucleotide
ggauuagugugcgucuguc

SEQ ID NO: 112888 - RNA, 19 nt, Artificial Sequence
  Description of Artificial Sequence: Synthetic oligonucleotide
cucaguaacguggggccga

SEQ ID NO: 112889 - RNA, 19 nt, Artificial Sequence
  Description of Artificial Sequence: Synthetic oligonucleotide
gcaauagguugcagaacug

SEQ ID NO: 112890 - RNA, 19 nt, Artificial Sequence
  Description of Artificial Sequence: Synthetic oligonucleotide
cguuucaguuccgcgaagg

SEQ ID NO: 112891 - RNA, 19 nt, Artificial Sequence
  Description of Artificial Sequence: Synthetic oligonucleotide
ccugauuuagccacagacu

SEQ ID NO: 112892 - RNA, 19 nt, Artificial Sequence
  Description of Artificial Sequence: Synthetic oligonucleotide
ccucuaugcacaaacugua

SEQ ID NO: 112893 - RNA, 19 nt, Artificial Sequence
  Description of Artificial Sequence: Synthetic oligonucleotide
guuggguugugccuuccau

SEQ ID NO: 112894 - RNA, 19 nt, Artificial Sequence
  Description of Artificial Sequence: Synthetic oligonucleotide
cucacgugguuuacaucaa

SEQ ID NO: 112895 - RNA, 19 nt, Artificial Sequence
  Description of Artificial Sequence: Synthetic oligonucleotide
caguuacacagcacaaaau

SEQ ID NO: 112896 - RNA, 19 nt, Artificial Sequence
  Description of Artificial Sequence: Synthetic oligonucleotide
gggucucaguaacgugggg

SEQ ID NO: 112897 - RNA, 19 nt, Artificial Sequence
  Description of Artificial Sequence: Synthetic oligonucleotide
gauguccguggccaccccu

SEQ ID NO: 112898 - RNA, 19 nt, Artificial Sequence
  Description of Artificial Sequence: Synthetic oligonucleotide
ggguugugccuuccauugc

SEQ ID NO: 112899 - RNA, 19 nt, Artificial Sequence
  Description of Artificial Sequence: Synthetic oligonucleotide
acacacaaugagagcuggu

SEQ ID NO: 112900 - RNA, 19 nt, Artificial Sequence
  Description of Artificial Sequence: Synthetic oligonucleotide
gauagccucugcaugucuu

SEQ ID NO: 112901 - RNA, 19 nt, Artificial Sequence
  Description of Artificial Sequence: Synthetic oligonucleotide
ggacacuugugagucauua

SEQ ID NO: 112902 - RNA, 19 nt, Artificial Sequence
  Description of Artificial Sequence: Synthetic oligonucleotide
ggcuggguaaagucggucu

SEQ ID NO: 112903 - RNA, 19 nt, Artificial Sequence
  Description of Artificial Sequence: Synthetic oligonucleotide
cuauacacugccguacgau

SEQ ID NO: 112904 - RNA, 19 nt, Artificial Sequence
  Description of Artificial Sequence: Synthetic oligonucleotide
gcaggagaaacaccagaua

SEQ ID NO: 112905 - RNA, 19 nt, Artificial Sequence
  Description of Artificial Sequence: Synthetic oligonucleotide
ggccgaacacaguggccag

SEQ ID NO: 112906 - RNA, 19 nt, Artificial Sequence
  Description of Artificial Sequence: Synthetic oligonucleotide
ggugggugacucgucgaug

SEQ ID NO: 112907 - RNA, 19 nt, Artificial Sequence
  Description of Artificial Sequence: Synthetic oligonucleotide
acgcaaagguacagagggu

SEQ ID NO: 112908 - RNA, 19 nt, Artificial Sequence
  Description of Artificial Sequence: Synthetic oligonucleotide
agcggaguaggugcaucau

SEQ ID NO: 112909 - RNA, 19 nt, Artificial Sequence
  Description of Artificial Sequence: Synthetic oligonucleotide
gguaauguggcugccccgu

SEQ ID NO: 112910 - RNA, 19 nt, Artificial Sequence
  Description of Artificial Sequence: Synthetic oligonucleotide
cugcuguuacacugccuaa

SEQ ID NO: 112911 - RNA, 19 nt, Artificial Sequence
  Description of Artificial Sequence: Synthetic oligonucleotide
gcuacacaucuguggagaa

SEQ ID NO: 112912 - RNA, 19 nt, Artificial Sequence
  Description of Artificial Sequence: Synthetic oligonucleotide
gcuagaugaugugaccucu

SEQ ID NO: 112913 - RNA, 19 nt, Artificial Sequence
  Description of Artificial Sequence: Synthetic oligonucleotide
ggugcauuccugaccucuc

SEQ ID NO: 112914 - RNA, 19 nt, Artificial Sequence
  Description of Artificial Sequence: Synthetic oligonucleotide
gcuaggcucuggagcaugc

SEQ ID NO: 112915 - RNA, 19 nt, Artificial Sequence
  Description of Artificial Sequence: Synthetic oligonucleotide
caguuccgcgaaggaaaug

SEQ ID NO: 112916 - RNA, 19 nt, Artificial Sequence
  Description of Artificial Sequence: Synthetic oligonucleotide
cccauccuaccuugucagc

SEQ ID NO: 112917 - RNA, 19 nt, Artificial Sequence
  Description of Artificial Sequence: Synthetic oligonucleotide
gggaugaacaggacucgaa

SEQ ID NO: 112918 - RNA, 19 nt, Artificial Sequence
  Description of Artificial Sequence: Synthetic oligonucleotide
ccaugaaggcuggguaaag

SEQ ID NO: 112919 - RNA, 19 nt, Artificial Sequence
  Description of Artificial Sequence: Synthetic oligonucleotide
gccacuaccuuuucugcau

SEQ ID NO: 112920 - RNA, 19 nt, Artificial Sequence
  Description of Artificial Sequence: Synthetic oligonucleotide
acuuagcccugagcacaca

SEQ ID NO: 112921 - RNA, 19 nt, Artificial Sequence
  Description of Artificial Sequence: Synthetic oligonucleotide
cuaggcucuggagcaugca

SEQ ID NO: 112922 - RNA, 19 nt, Artificial Sequence
  Description of Artificial Sequence: Synthetic oligonucleotide
cccugagcacacacaauga

SEQ ID NO: 112923 - RNA, 19 nt, Artificial Sequence
  Description of Artificial Sequence: Synthetic oligonucleotide
uggagcgcucccgcuuggu

SEQ ID NO: 112924 - RNA, 19 nt, Artificial Sequence
  Description of Artificial Sequence: Synthetic oligonucleotide
guagggcaccuuggagcgc

SEQ ID NO: 112925 - RNA, 19 nt, Artificial Sequence
  Description of Artificial Sequence: Synthetic oligonucleotide
ggagcgcucccgcuugguc

SEQ ID NO: 112926 - RNA, 19 nt, Artificial Sequence
  Description of Artificial Sequence: Synthetic oligonucleotide
ggcaugccugggguuacug

SEQ ID NO: 112927 - RNA, 19 nt, Artificial Sequence
  Description of Artificial Sequence: Synthetic oligonucleotide
cggccacuaccuuuucugc

SEQ ID NO: 112928 - RNA, 19 nt, Artificial Sequence
  Description of Artificial Sequence: Synthetic oligonucleotide
cucagcggccacuaccuuu

SEQ ID NO: 112929 - RNA, 19 nt, Artificial Sequence
  Description of Artificial Sequence: Synthetic oligonucleotide
ggcuaccacugcccagggc

SEQ ID NO: 112930 - RNA, 19 nt, Artificial Sequence
  Description of Artificial Sequence: Synthetic oligonucleotide
cgagggucucaguaacgug

SEQ ID NO: 112931 - RNA, 19 nt, Artificial Sequence
  Description of Artificial Sequence: Synthetic oligonucleotide
gauuacccacagggcugga

SEQ ID NO: 112932 - RNA, 19 nt, Artificial Sequence
  Description of Artificial Sequence: Synthetic oligonucleotide
gcacggagcaucagauaca

SEQ ID NO: 112933 - RNA, 19 nt, Artificial Sequence
  Description of Artificial Sequence: Synthetic oligonucleotide
ccugagugccaagauagua

SEQ ID NO: 112934 - RNA, 19 nt, Artificial Sequence
  Description of Artificial Sequence: Synthetic oligonucleotide
ggauagccucugcaugucu

SEQ ID NO: 112935 - RNA, 19 nt, Artificial Sequence
  Description of Artificial Sequence: Synthetic oligonucleotide
uaggugcaucaugcaguuu

SEQ ID NO: 112936 - RNA, 19 nt, Artificial Sequence
  Description of Artificial Sequence: Synthetic oligonucleotide
ccaauccugagggccaaga

SEQ ID NO: 112937 - RNA, 19 nt, Artificial Sequence
  Description of Artificial Sequence: Synthetic oligonucleotide
ccguuucaguuccgcgaag

SEQ ID NO: 112938 - RNA, 19 nt, Artificial Sequence
  Description of Artificial Sequence: Synthetic oligonucleotide
ggacagcacggagcaucag

SEQ ID NO: 112939 - RNA, 19 nt, Artificial Sequence
  Description of Artificial Sequence: Synthetic oligonucleotide
ccguacgauguagggcacc

SEQ ID NO: 112940 - RNA, 19 nt, Artificial Sequence
  Description of Artificial Sequence: Synthetic oligonucleotide
cagacuggaaauggugcuu

SEQ ID NO: 112941 - RNA, 19 nt, Artificial Sequence
  Description of Artificial Sequence: Synthetic oligonucleotide
caguaacguggggccgaac

SEQ ID NO: 112942 - RNA, 19 nt, Artificial Sequence
  Description of Artificial Sequence: Synthetic oligonucleotide
ccagguugugaagugacau

SEQ ID NO: 112943 - RNA, 19 nt, Artificial Sequence
  Description of Artificial Sequence: Synthetic oligonucleotide
cccucugcgucguaguccu

SEQ ID NO: 112944 - RNA, 19 nt, Artificial Sequence
  Description of Artificial Sequence: Synthetic oligonucleotide
uaccagcgauggcguugau

SEQ ID NO: 112945 - RNA, 19 nt, Artificial Sequence
  Description of Artificial Sequence: Synthetic oligonucleotide
cucuauacucacgggcauu

SEQ ID NO: 112946 - RNA, 19 nt, Artificial Sequence
  Description of Artificial Sequence: Synthetic oligonucleotide
cuggagcaugcaugguaau

SEQ ID NO: 112947 - RNA, 19 nt, Artificial Sequence
  Description of Artificial Sequence: Synthetic oligonucleotide
ccccugauauccuguagau

SEQ ID NO: 112948 - RNA, 19 nt, Artificial Sequence
  Description of Artificial Sequence: Synthetic oligonucleotide
ccaugacaucaugggacca

SEQ ID NO: 112949 - RNA, 19 nt, Artificial Sequence
  Description of Artificial Sequence: Synthetic oligonucleotide
ccugggcgcccaccauacc

SEQ ID NO: 112950 - RNA, 19 nt, Artificial Sequence
  Description of Artificial Sequence: Synthetic oligonucleotide
cugucgucuggagccccaa

SEQ ID NO: 112951 - RNA, 19 nt, Artificial Sequence
  Description of Artificial Sequence: Synthetic oligonucleotide
caccucacuugccccacuu

SEQ ID NO: 112952 - RNA, 19 nt, Artificial Sequence
  Description of Artificial Sequence: Synthetic oligonucleotide
gccguacgauguagggcac

SEQ ID NO: 112953 - RNA, 19 nt, Artificial Sequence
  Description of Artificial Sequence: Synthetic oligonucleotide
gcucccgcuuggucaccac

SEQ ID NO: 112954 - RNA, 19 nt, Artificial Sequence
  Description of Artificial Sequence: Synthetic oligonucleotide
cuauacucacgggcauuuu

SEQ ID NO: 112955 - RNA, 19 nt, Artificial Sequence
  Description of Artificial Sequence: Synthetic oligonucleotide
ccucuauacucacgggcau

SEQ ID NO: 112956 - RNA, 19 nt, Artificial Sequence
  Description of Artificial Sequence: Synthetic oligonucleotide
caaagacgccggucugcuu

SEQ ID NO: 112957 - RNA, 19 nt, Artificial Sequence
  Description of Artificial Sequence: Synthetic oligonucleotide
gccucucaccuagcagaca

SEQ ID NO: 112958 - RNA, 19 nt, Artificial Sequence
  Description of Artificial Sequence: Synthetic oligonucleotide
cacuuggggugggauuuau

SEQ ID NO: 112959 - RNA, 19 nt, Artificial Sequence
  Description of Artificial Sequence: Synthetic oligonucleotide
guacgagggcaggaccauu

SEQ ID NO: 112960 - RNA, 19 nt, Artificial Sequence
  Description of Artificial Sequence: Synthetic oligonucleotide
guacgauguagggcaccuu

SEQ ID NO: 112961 - RNA, 19 nt, Artificial Sequence
  Description of Artificial Sequence: Synthetic oligonucleotide
cguacgauguagggcaccu

SEQ ID NO: 112962 - RNA, 19 nt, Artificial Sequence
  Description of Artificial Sequence: Synthetic oligonucleotide
ccguggccaccccugauau

SEQ ID NO: 112963 - RNA, 19 nt, Artificial Sequence
  Description of Artificial Sequence: Synthetic oligonucleotide
ccacgagguauaugagguu

SEQ ID NO: 112964 - RNA, 19 nt, Artificial Sequence
  Description of Artificial Sequence: Synthetic oligonucleotide
cggauuagugugcgucugu

SEQ ID NO: 112965 - RNA, 19 nt, Artificial Sequence
  Description of Artificial Sequence: Synthetic oligonucleotide
ggguaccagcgauggcguu

SEQ ID NO: 112966 - RNA, 19 nt, Artificial Sequence
  Description of Artificial Sequence: Synthetic oligonucleotide
gcucagcggccacuaccuu

SEQ ID NO: 112967 - RNA, 19 nt, Artificial Sequence
  Description of Artificial Sequence: Synthetic oligonucleotide
ccacuuggggugggauuua

SEQ ID NO: 112968 - RNA, 19 nt, Artificial Sequence
  Description of Artificial Sequence: Synthetic oligonucleotide
cugccccguggcagugcuu

SEQ ID NO: 112969 - RNA, 19 nt, Artificial Sequence
  Description of Artificial Sequence: Synthetic oligonucleotide
cgucgauguauggccccuu

SEQ ID NO: 112970 - RNA, 19 nt, Artificial Sequence
  Description of Artificial Sequence: Synthetic oligonucleotide
aauagaauagaauugcucc

SEQ ID NO: 112971 - RNA, 19 nt, Artificial Sequence
  Description of Artificial Sequence: Synthetic oligonucleotide
aaaucauuaacauguacac

SEQ ID NO: 112972 - RNA, 19 nt, Artificial Sequence
  Description of Artificial Sequence: Synthetic oligonucleotide
agaacucuaauucaugccc

SEQ ID NO: 112973 - RNA, 19 nt, Artificial Sequence
  Description of Artificial Sequence: Synthetic oligonucleotide
auuuggaccaaacagacag

SEQ ID NO: 112974 - RNA, 19 nt, Artificial Sequence
  Description of Artificial Sequence: Synthetic oligonucleotide
uauacguacacacacacac

SEQ ID NO: 112975 - RNA, 19 nt, Artificial Sequence
  Description of Artificial Sequence: Synthetic oligonucleotide
auacugauaaaucauuaac

SEQ ID NO: 112976 - RNA, 19 nt, Artificial Sequence
  Description of Artificial Sequence: Synthetic oligonucleotide
ucuuuauagcccaaaaugc

SEQ ID NO: 112977 - RNA, 19 nt, Artificial Sequence
  Description of Artificial Sequence: Synthetic oligonucleotide
acugcacuaaaacugggcc

SEQ ID NO: 112978 - RNA, 19 nt, Artificial Sequence
  Description of Artificial Sequence: Synthetic oligonucleotide
uuuauagcccaaaaugcag

SEQ ID NO: 112979 - RNA, 19 nt, Artificial Sequence
  Description of Artificial Sequence: Synthetic oligonucleotide
augcuuguuauguagacuc

SEQ ID NO: 112980 - RNA, 19 nt, Artificial Sequence
  Description of Artificial Sequence: Synthetic oligonucleotide
aaagauugugccaaauccg

SEQ ID NO: 112981 - RNA, 19 nt, Artificial Sequence
  Description of Artificial Sequence: Synthetic oligonucleotide
uuauguagacuccacggag

SEQ ID NO: 112982 - RNA, 19 nt, Artificial Sequence
  Description of Artificial Sequence: Synthetic oligonucleotide
aaaucgacuguguaggaga

SEQ ID NO: 112983 - RNA, 19 nt, Artificial Sequence
  Description of Artificial Sequence: Synthetic oligonucleotide
aguagcacgcagcaagucc

SEQ ID NO: 112984 - RNA, 19 nt, Artificial Sequence
  Description of Artificial Sequence: Synthetic oligonucleotide
ugaaaaguagcacgcagca

SEQ ID NO: 112985 - RNA, 19 nt, Artificial Sequence
  Description of Artificial Sequence: Synthetic oligonucleotide
cuuacuguuacgaugcaug

SEQ ID NO: 112986 - RNA, 19 nt, Artificial Sequence
  Description of Artificial Sequence: Synthetic oligonucleotide
cauauggcaaaucuuaaac

SEQ ID NO: 112987 - RNA, 19 nt, Artificial Sequence
  Description of Artificial Sequence: Synthetic oligonucleotide
ucggugaauucccagaugc

SEQ ID NO: 112988 - RNA, 19 nt, Artificial Sequence
  Description of Artificial Sequence: Synthetic oligonucleotide
aaacuugauaaucccaccu

SEQ ID NO: 112989 - RNA, 19 nt, Artificial Sequence
  Description of Artificial Sequence: Synthetic oligonucleotide
ucgacaugcaugaacacca

SEQ ID NO: 112990 - RNA, 19 nt, Artificial Sequence
  Description of Artificial Sequence: Synthetic oligonucleotide
aggaugguauaauaguggg

SEQ ID NO: 112991 - RNA, 19 nt, Artificial Sequence
  Description of Artificial Sequence: Synthetic oligonucleotide
uacacacacacacacacac

SEQ ID NO: 112992 - RNA, 19 nt, Artificial Sequence
  Description of Artificial Sequence: Synthetic oligonucleotide
gugauagaaaauuugagaa

SEQ ID NO: 112993 - RNA, 19 nt, Artificial Sequence
  Description of Artificial Sequence: Synthetic oligonucleotide
aagauugugccaaauccgg

SEQ ID NO: 112994 - RNA, 19 nt, Artificial Sequence
  Description of Artificial Sequence: Synthetic oligonucleotide
gauacguggauccuucuug

SEQ ID NO: 112995 - RNA, 19 nt, Artificial Sequence
  Description of Artificial Sequence: Synthetic oligonucleotide
uuacuguuacgaugcaugg

SEQ ID NO: 112996 - RNA, 19 nt, Artificial Sequence
  Description of Artificial Sequence: Synthetic oligonucleotide
aaguuagugcuccaauucu

SEQ ID NO: 112997 - RNA, 19 nt, Artificial Sequence
  Description of Artificial Sequence: Synthetic oligonucleotide
uguuacgaugcauggaacc

SEQ ID NO: 112998 - RNA, 19 nt, Artificial Sequence
  Description of Artificial Sequence: Synthetic oligonucleotide
guaagaagcaugaauauga

SEQ ID NO: 112999 - RNA, 19 nt, Artificial Sequence
  Description of Artificial Sequence: Synthetic oligonucleotide
aaggaacggccccaagacc

SEQ ID NO: 113000 - RNA, 19 nt, Artificial Sequence
  Description of Artificial Sequence: Synthetic oligonucleotide
aaauccgguaucuccaggu

SEQ ID NO: 113001 - RNA, 19 nt, Artificial Sequence
  Description of Artificial Sequence: Synthetic oligonucleotide
uacguacacacacacacac

SEQ ID NO: 113002 - RNA, 19 nt, Artificial Sequence
  Description of Artificial Sequence: Synthetic oligonucleotide
ugcuugccaacucugggcg

SEQ ID NO: 113003 - RNA, 19 nt, Artificial Sequence
  Description of Artificial Sequence: Synthetic oligonucleotide
uaucgguggaccaggaacc

SEQ ID NO: 113004 - RNA, 19 nt, Artificial Sequence
  Description of Artificial Sequence: Synthetic oligonucleotide
uacuagugugaaaaguagc

SEQ ID NO: 113005 - RNA, 19 nt, Artificial Sequence
  Description of Artificial Sequence: Synthetic oligonucleotide
uuuucuggacggaaguagc

SEQ ID NO: 113006 - RNA, 19 nt, Artificial Sequence
  Description of Artificial Sequence: Synthetic oligonucleotide
caugauagccgcuuuuagc

SEQ ID NO: 113007 - RNA, 19 nt, Artificial Sequence
  Description of Artificial Sequence: Synthetic oligonucleotide
acuguuacgaugcauggaa

SEQ ID NO: 113008 - RNA, 19 nt, Artificial Sequence
  Description of Artificial Sequence: Synthetic oligonucleotide
uguaagaagcaugaauaug

SEQ ID NO: 113009 - RNA, 19 nt, Artificial Sequence
  Description of Artificial Sequence: Synthetic oligonucleotide
ggagaacuuaaucacauug

SEQ ID NO: 113010 - RNA, 19 nt, Artificial Sequence
  Description of Artificial Sequence: Synthetic oligonucleotide
acacuauacaguuuauaca

SEQ ID NO: 113011 - RNA, 19 nt, Artificial Sequence
  Description of Artificial Sequence: Synthetic oligonucleotide
aauaugaaggcugcacuca

SEQ ID NO: 113012 - RNA, 19 nt, Artificial Sequence
  Description of Artificial Sequence: Synthetic oligonucleotide
acuuaaucacauugauagg

SEQ ID NO: 113013 - RNA, 19 nt, Artificial Sequence
  Description of Artificial Sequence: Synthetic oligonucleotide
cacacacacacacacacag

SEQ ID NO: 113014 - RNA, 19 nt, Artificial Sequence
  Description of Artificial Sequence: Synthetic oligonucleotide
ccaagaaucaaccugcacc

SEQ ID NO: 113015 - RNA, 19 nt, Artificial Sequence
  Description of Artificial Sequence: Synthetic oligonucleotide
gacggaaguagccaaaguc

SEQ ID NO: 113016 - RNA, 19 nt, Artificial Sequence
  Description of Artificial Sequence: Synthetic oligonucleotide
ugggguucaagaaauugcu

SEQ ID NO: 113017 - RNA, 19 nt, Artificial Sequence
  Description of Artificial Sequence: Synthetic oligonucleotide
aaugccuccggaaucuagg

SEQ ID NO: 113018 - RNA, 19 nt, Artificial Sequence
  Description of Artificial Sequence: Synthetic oligonucleotide
ucccacgcuaccaugagca

SEQ ID NO: 113019 - RNA, 19 nt, Artificial Sequence
  Description of Artificial Sequence: Synthetic oligonucleotide
ucggucuagagacuuggag

SEQ ID NO: 113020 - RNA, 19 nt, Artificial Sequence
  Description of Artificial Sequence: Synthetic oligonucleotide
ucgaucaucagagguaaag

SEQ ID NO: 113021 - RNA, 19 nt, Artificial Sequence
  Description of Artificial Sequence: Synthetic oligonucleotide
aucaguuaggguuccccac

SEQ ID NO: 113022 - RNA, 19 nt, Artificial Sequence
  Description of Artificial Sequence: Synthetic oligonucleotide
ugguauaauaguggggucc

SEQ ID NO: 113023 - RNA, 19 nt, Artificial Sequence
  Description of Artificial Sequence: Synthetic oligonucleotide
cacacacacacacagguac

SEQ ID NO: 113024 - RNA, 19 nt, Artificial Sequence
  Description of Artificial Sequence: Synthetic oligonucleotide
ggugauagaaaauuugaga

SEQ ID NO: 113025 - RNA, 19 nt, Artificial Sequence
  Description of Artificial Sequence: Synthetic oligonucleotide
uccauaauuccagugcacc

SEQ ID NO: 113026 - RNA, 19 nt, Artificial Sequence
  Description of Artificial Sequence: Synthetic oligonucleotide
agaucaguuaggguucccc

SEQ ID NO: 113027 - RNA, 19 nt, Artificial Sequence
  Description of Artificial Sequence: Synthetic oligonucleotide
gaaagacucggugaauucc

SEQ ID NO: 113028 - RNA, 19 nt, Artificial Sequence
  Description of Artificial Sequence: Synthetic oligonucleotide
uuguuguauccuuaucagc

SEQ ID NO: 113029 - RNA, 19 nt, Artificial Sequence
  Description of Artificial Sequence: Synthetic oligonucleotide
cuuucguagccguaggaac

SEQ ID NO: 113030 - RNA, 19 nt, Artificial Sequence
  Description of Artificial Sequence: Synthetic oligonucleotide
caaguuagugcuccaauuc

SEQ ID NO: 113031 - RNA, 19 nt, Artificial Sequence
  Description of Artificial Sequence: Synthetic oligonucleotide
agaauaucgguggaccagg

SEQ ID NO: 113032 - RNA, 19 nt, Artificial Sequence
  Description of Artificial Sequence: Synthetic oligonucleotide
cagaacucuaauucaugcc

SEQ ID NO: 113033 - RNA, 19 nt, Artificial Sequence
  Description of Artificial Sequence: Synthetic oligonucleotide
ugcacuaaaacugggccca

SEQ ID NO: 113034 - RNA, 19 nt, Artificial Sequence
  Description of Artificial Sequence: Synthetic oligonucleotide
uacgaugcauggaaccaag

SEQ ID NO: 113035 - RNA, 19 nt, Artificial Sequence
  Description of Artificial Sequence: Synthetic oligonucleotide
uguucauagagcgggcucc

SEQ ID NO: 113036 - RNA, 19 nt, Artificial Sequence
  Description of Artificial Sequence: Synthetic oligonucleotide
agaaucaaccugcaccugu

SEQ ID NO: 113037 - RNA, 19 nt, Artificial Sequence
  Description of Artificial Sequence: Synthetic oligonucleotide
gauagccgcuuuuagcaug

SEQ ID NO: 113038 - RNA, 19 nt, Artificial Sequence
  Description of Artificial Sequence: Synthetic oligonucleotide
ugacuuucguagccguagg

SEQ ID NO: 113039 - RNA, 19 nt, Artificial Sequence
  Description of Artificial Sequence: Synthetic oligonucleotide
ucuuugaaaucgacugugu

SEQ ID NO: 113040 - RNA, 19 nt, Artificial Sequence
  Description of Artificial Sequence: Synthetic oligonucleotide
guagacgaugccucgauca

SEQ ID NO: 113041 - RNA, 19 nt, Artificial Sequence
  Description of Artificial Sequence: Synthetic oligonucleotide
uugugggauuucauauggg

SEQ ID NO: 113042 - RNA, 19 nt, Artificial Sequence
  Description of Artificial Sequence: Synthetic oligonucleotide
uauaauugacacaggucuu

SEQ ID NO: 113043 - RNA, 19 nt, Artificial Sequence
  Description of Artificial Sequence: Synthetic oligonucleotide
ugucggucuagagacuugg

SEQ ID NO: 113044 - RNA, 19 nt, Artificial Sequence
  Description of Artificial Sequence: Synthetic oligonucleotide
guacuagugugaaaaguag

SEQ ID NO: 113045 - RNA, 19 nt, Artificial Sequence
  Description of Artificial Sequence: Synthetic oligonucleotide
cacgcuaccaugagcaaug

SEQ ID NO: 113046 - RNA, 19 nt, Artificial Sequence
  Description of Artificial Sequence: Synthetic oligonucleotide
agaauugcuccugucccac

SEQ ID NO: 113047 - RNA, 19 nt, Artificial Sequence
  Description of Artificial Sequence: Synthetic oligonucleotide
ucugugcaugaggauaagg

SEQ ID NO: 113048 - RNA, 19 nt, Artificial Sequence
  Description of Artificial Sequence: Synthetic oligonucleotide
caauguucugucccaagug

SEQ ID NO: 113049 - RNA, 19 nt, Artificial Sequence
  Description of Artificial Sequence: Synthetic oligonucleotide
auagucucgaccauucuga

SEQ ID NO: 113050 - RNA, 19 nt, Artificial Sequence
  Description of Artificial Sequence: Synthetic oligonucleotide
augacuuucguagccguag

SEQ ID NO: 113051 - RNA, 19 nt, Artificial Sequence
  Description of Artificial Sequence: Synthetic oligonucleotide
uccgguacccguuugucgu

SEQ ID NO: 113052 - RNA, 19 nt, Artificial Sequence
  Description of Artificial Sequence: Synthetic oligonucleotide
uuagugcuccaauucuuac

SEQ ID NO: 113053 - RNA, 19 nt, Artificial Sequence
  Description of Artificial Sequence: Synthetic oligonucleotide
uuuagguaccaaaguuuaa

SEQ ID NO: 113054 - RNA, 19 nt, Artificial Sequence
  Description of Artificial Sequence: Synthetic oligonucleotide
gugaaaaguagcacgcagc

SEQ ID NO: 113055 - RNA, 19 nt, Artificial Sequence
  Description of Artificial Sequence: Synthetic oligonucleotide
acgauaaugccuccggaau

SEQ ID NO: 113056 - RNA, 19 nt, Artificial Sequence
  Description of Artificial Sequence: Synthetic oligonucleotide
ugauguucauagagcgggc

SEQ ID NO: 113057 - RNA, 19 nt, Artificial Sequence
  Description of Artificial Sequence: Synthetic oligonucleotide
acagaauaucgguggacca

SEQ ID NO: 113058 - RNA, 19 nt, Artificial Sequence
  Description of Artificial Sequence: Synthetic oligonucleotide
aguagacgaugccucgauc

SEQ ID NO: 113059 - RNA, 19 nt, Artificial Sequence
  Description of Artificial Sequence: Synthetic oligonucleotide
caaugagcacuccugcuac

SEQ ID NO: 113060 - RNA, 19 nt, Artificial Sequence
  Description of Artificial Sequence: Synthetic oligonucleotide
gagauguacacgucuggga

SEQ ID NO: 113061 - RNA, 19 nt, Artificial Sequence
  Description of Artificial Sequence: Synthetic oligonucleotide
gaucaguuaggguucccca

SEQ ID NO: 113062 - RNA, 19 nt, Artificial Sequence
  Description of Artificial Sequence: Synthetic oligonucleotide
cuuugccguagcaucacac

SEQ ID NO: 113063 - RNA, 19 nt, Artificial Sequence
  Description of Artificial Sequence: Synthetic oligonucleotide
gauugugccaaauccggua

SEQ ID NO: 113064 - RNA, 19 nt, Artificial Sequence
  Description of Artificial Sequence: Synthetic oligonucleotide
auugugccaaauccgguau

SEQ ID NO: 113065 - RNA, 19 nt, Artificial Sequence
  Description of Artificial Sequence: Synthetic oligonucleotide
aguguaggagguacugugg

SEQ ID NO: 113066 - RNA, 19 nt, Artificial Sequence
  Description of Artificial Sequence: Synthetic oligonucleotide
gagauggcgucucccacgc

SEQ ID NO: 113067 - RNA, 19 nt, Artificial Sequence
  Description of Artificial Sequence: Synthetic oligonucleotide
ggucacguugguaaagucg

SEQ ID NO: 113068 - RNA, 19 nt, Artificial Sequence
  Description of Artificial Sequence: Synthetic oligonucleotide
ugcuacaacugugaccagc

SEQ ID NO: 113069 - RNA, 19 nt, Artificial Sequence
  Description of Artificial Sequence: Synthetic oligonucleotide
auacguggauccuucuugu

SEQ ID NO: 113070 - RNA, 19 nt, Artificial Sequence
  Description of Artificial Sequence: Synthetic oligonucleotide
cuuuaguguagguccuuug

SEQ ID NO: 113071 - RNA, 19 nt, Artificial Sequence
  Description of Artificial Sequence: Synthetic oligonucleotide
aagucggucucuccaccug

SEQ ID NO: 113072 - RNA, 19 nt, Artificial Sequence
  Description of Artificial Sequence: Synthetic oligonucleotide
ugggauuuuccgguacccg

SEQ ID NO: 113073 - RNA, 19 nt, Artificial Sequence
  Description of Artificial Sequence: Synthetic oligonucleotide
gacagacagaugacuuucg

SEQ ID NO: 113074 - RNA, 19 nt, Artificial Sequence
  Description of Artificial Sequence: Synthetic oligonucleotide
cuaccaugagcaaugacua

SEQ ID NO: 113075 - RNA, 19 nt, Artificial Sequence
  Description of Artificial Sequence: Synthetic oligonucleotide
agacaguuucaaguuagug

SEQ ID NO: 113076 - RNA, 19 nt, Artificial Sequence
  Description of Artificial Sequence: Synthetic oligonucleotide
gaaucaaccugcaccugug

SEQ ID NO: 113077 - RNA, 19 nt, Artificial Sequence
  Description of Artificial Sequence: Synthetic oligonucleotide
acgucugggaccaucacug

SEQ ID NO: 113078 - RNA, 19 nt, Artificial Sequence
  Description of Artificial Sequence: Synthetic oligonucleotide
acagaaaccuaaagcccac

SEQ ID NO: 113079 - RNA, 19 nt, Artificial Sequence
  Description of Artificial Sequence: Synthetic oligonucleotide
cagaauaucgguggaccag

SEQ ID NO: 113080 - RNA, 19 nt, Artificial Sequence
  Description of Artificial Sequence: Synthetic oligonucleotide
ggagccauucacauaagug

SEQ ID NO: 113081 - RNA, 19 nt, Artificial Sequence
  Description of Artificial Sequence: Synthetic oligonucleotide
uggacggaaguagccaaag

SEQ ID NO: 113082 - RNA, 19 nt, Artificial Sequence
  Description of Artificial Sequence: Synthetic oligonucleotide
guuacgaugcauggaacca

SEQ ID NO: 113083 - RNA, 19 nt, Artificial Sequence
  Description of Artificial Sequence: Synthetic oligonucleotide
auaugaaggcugcacucau

SEQ ID NO: 113084 - RNA, 19 nt, Artificial Sequence
  Description of Artificial Sequence: Synthetic oligonucleotide
acggagggaggucacguug

SEQ ID NO: 113085 - RNA, 19 nt, Artificial Sequence
  Description of Artificial Sequence: Synthetic oligonucleotide
aauccgguaucuccagguu

SEQ ID NO: 113086 - RNA, 19 nt, Artificial Sequence
  Description of Artificial Sequence: Synthetic oligonucleotide
caaauccgguaucuccagg

SEQ ID NO: 113087 - RNA, 19 nt, Artificial Sequence
  Description of Artificial Sequence: Synthetic oligonucleotide
gccgcuuuuagcaugggag

SEQ ID NO: 113088 - RNA, 19 nt, Artificial Sequence
  Description of Artificial Sequence: Synthetic oligonucleotide
uugccguagcaucacacuu

SEQ ID NO: 113089 - RNA, 19 nt, Artificial Sequence
  Description of Artificial Sequence: Synthetic oligonucleotide
cacguggggacccugagca

SEQ ID NO: 113090 - RNA, 19 nt, Artificial Sequence
  Description of Artificial Sequence: Synthetic oligonucleotide
cuggguccgacgcaauggg

SEQ ID NO: 113091 - RNA, 19 nt, Artificial Sequence
  Description of Artificial Sequence: Synthetic oligonucleotide
ugauacguggauccuucuu

SEQ ID NO: 113092 - RNA, 19 nt, Artificial Sequence
  Description of Artificial Sequence: Synthetic oligonucleotide
auaauugacacaggucuuu

SEQ ID NO: 113093 - RNA, 19 nt, Artificial Sequence
  Description of Artificial Sequence: Synthetic oligonucleotide
uuugucgucaagugcucuu

SEQ ID NO: 113094 - RNA, 19 nt, Artificial Sequence
  Description of Artificial Sequence: Synthetic oligonucleotide
caugcaauguucuguccca

SEQ ID NO: 113095 - RNA, 19 nt, Artificial Sequence
  Description of Artificial Sequence: Synthetic oligonucleotide
acccguuugucgucaagug

SEQ ID NO: 113096 - RNA, 19 nt, Artificial Sequence
  Description of Artificial Sequence: Synthetic oligonucleotide
gcuguaagaagcaugaaua

SEQ ID NO: 113097 - RNA, 19 nt, Artificial Sequence
  Description of Artificial Sequence: Synthetic oligonucleotide
uagacgaugccucgaucau

SEQ ID NO: 113098 - RNA, 19 nt, Artificial Sequence
  Description of Artificial Sequence: Synthetic oligonucleotide
uacccguuugucgucaagu

SEQ ID NO: 113099 - RNA, 19 nt, Artificial Sequence
  Description of Artificial Sequence: Synthetic oligonucleotide
acacauagcuuugccagca

SEQ ID NO: 113100 - RNA, 19 nt, Artificial Sequence
  Description of Artificial Sequence: Synthetic oligonucleotide
uacuguuacgaugcaugga

SEQ ID NO: 113101 - RNA, 19 nt, Artificial Sequence
  Description of Artificial Sequence: Synthetic oligonucleotide
gaacuuaaucacauugaua

SEQ ID NO: 113102 - RNA, 19 nt, Artificial Sequence
  Description of Artificial Sequence: Synthetic oligonucleotide
aggacgguugcugugcuca

SEQ ID NO: 113103 - RNA, 19 nt, Artificial Sequence
  Description of Artificial Sequence: Synthetic oligonucleotide
gccuccggaaucuaggaug

SEQ ID NO: 113104 - RNA, 19 nt, Artificial Sequence
  Description of Artificial Sequence: Synthetic oligonucleotide
agaauguacuagugugaaa

SEQ ID NO: 113105 - RNA, 19 nt, Artificial Sequence
  Description of Artificial Sequence: Synthetic oligonucleotide
cuguuacgaugcauggaac

SEQ ID NO: 113106 - RNA, 19 nt, Artificial Sequence
  Description of Artificial Sequence: Synthetic oligonucleotide
aagacaguuucaaguuagu

SEQ ID NO: 113107 - RNA, 19 nt, Artificial Sequence
  Description of Artificial Sequence: Synthetic oligonucleotide
cguacacacacacacacac

SEQ ID NO: 113108 - RNA, 19 nt, Artificial Sequence
  Description of Artificial Sequence: Synthetic oligonucleotide
uucuuacuguuacgaugca

SEQ ID NO: 113109 - RNA, 19 nt, Artificial Sequence
  Description of Artificial Sequence: Synthetic oligonucleotide
acuuucguagccguaggaa

SEQ ID NO: 113110 - RNA, 19 nt, Artificial Sequence
  Description of Artificial Sequence: Synthetic oligonucleotide
cacacacacacagguacag

SEQ ID NO: 113111 - RNA, 19 nt, Artificial Sequence
  Description of Artificial Sequence: Synthetic oligonucleotide
ucaugccccuucaguuccg

SEQ ID NO: 113112 - RNA, 19 nt, Artificial Sequence
  Description of Artificial Sequence: Synthetic oligonucleotide
gccauuggaacauuuagcu

SEQ ID NO: 113113 - RNA, 19 nt, Artificial Sequence
  Description of Artificial Sequence: Synthetic oligonucleotide
aucgacuguguaggagacc

SEQ ID NO: 113114 - RNA, 19 nt, Artificial Sequence
  Description of Artificial Sequence: Synthetic oligonucleotide
ucuuacuguuacgaugcau

SEQ ID NO: 113115 - RNA, 19 nt, Artificial Sequence
  Description of Artificial Sequence: Synthetic oligonucleotide
ugauagccgcuuuuagcau

SEQ ID NO: 113116 - RNA, 19 nt, Artificial Sequence
  Description of Artificial Sequence: Synthetic oligonucleotide
auuuuccgguacccguuug

SEQ ID NO: 113117 - RNA, 19 nt, Artificial Sequence
  Description of Artificial Sequence: Synthetic oligonucleotide
gccacgauaaugccuccgg

SEQ ID NO: 113118 - RNA, 19 nt, Artificial Sequence
  Description of Artificial Sequence: Synthetic oligonucleotide
gacgcaaugggaaauuuau

SEQ ID NO: 113119 - RNA, 19 nt, Artificial Sequence
  Description of Artificial Sequence: Synthetic oligonucleotide
uuuacuucucgagcuggau

SEQ ID NO: 113120 - RNA, 19 nt, Artificial Sequence
  Description of Artificial Sequence: Synthetic oligonucleotide
cacacacacacacacaggu

SEQ ID NO: 113121 - RNA, 19 nt, Artificial Sequence
  Description of Artificial Sequence: Synthetic oligonucleotide
agacgaugccucgaucauc

SEQ ID NO: 113122 - RNA, 19 nt, Artificial Sequence
  Description of Artificial Sequence: Synthetic oligonucleotide
uccgaggcauuuucuggac

SEQ ID NO: 113123 - RNA, 19 nt, Artificial Sequence
  Description of Artificial Sequence: Synthetic oligonucleotide
uagucucgaccauucugac

SEQ ID NO: 113124 - RNA, 19 nt, Artificial Sequence
  Description of Artificial Sequence: Synthetic oligonucleotide
uguugauacguggauccuu

SEQ ID NO: 113125 - RNA, 19 nt, Artificial Sequence
  Description of Artificial Sequence: Synthetic oligonucleotide
gacuuucguagccguagga

SEQ ID NO: 113126 - RNA, 19 nt, Artificial Sequence
  Description of Artificial Sequence: Synthetic oligonucleotide
agagcaugcuuguuaugua

SEQ ID NO: 113127 - RNA, 19 nt, Artificial Sequence
  Description of Artificial Sequence: Synthetic oligonucleotide
ugcaccccauccuauuuua

SEQ ID NO: 113128 - RNA, 19 nt, Artificial Sequence
  Description of Artificial Sequence: Synthetic oligonucleotide
ccuccggaaucuaggaugg

SEQ ID NO: 113129 - RNA, 19 nt, Artificial Sequence
  Description of Artificial Sequence: Synthetic oligonucleotide
uugauacguggauccuucu

SEQ ID NO: 113130 - RNA, 19 nt, Artificial Sequence
  Description of Artificial Sequence: Synthetic oligonucleotide
caucgacaugcaugaacac

SEQ ID NO: 113131 - RNA, 19 nt, Artificial Sequence
  Description of Artificial Sequence: Synthetic oligonucleotide
acacacacacacacacagg

SEQ ID NO: 113132 - RNA, 19 nt, Artificial Sequence
  Description of Artificial Sequence: Synthetic oligonucleotide
acuggcggguuaugaaaga

SEQ ID NO: 113133 - RNA, 19 nt, Artificial Sequence
  Description of Artificial Sequence: Synthetic oligonucleotide
cacgauaaugccuccggaa

SEQ ID NO: 113134 - RNA, 19 nt, Artificial Sequence
  Description of Artificial Sequence: Synthetic oligonucleotide
aucauauggcaaaucuuaa

SEQ ID NO: 113135 - RNA, 19 nt, Artificial Sequence
  Description of Artificial Sequence: Synthetic oligonucleotide
aaccaagaaucaaccugca

SEQ ID NO: 113136 - RNA, 19 nt, Artificial Sequence
  Description of Artificial Sequence: Synthetic oligonucleotide
agauuagcuuguguuacua

SEQ ID NO: 113137 - RNA, 19 nt, Artificial Sequence
  Description of Artificial Sequence: Synthetic oligonucleotide
ggccauuggaacauuuagc

SEQ ID NO: 113138 - RNA, 19 nt, Artificial Sequence
  Description of Artificial Sequence: Synthetic oligonucleotide
ucagugcaggagccauuca

SEQ ID NO: 113139 - RNA, 19 nt, Artificial Sequence
  Description of Artificial Sequence: Synthetic oligonucleotide
uuuccgguacccguuuguc

SEQ ID NO: 113140 - RNA, 19 nt, Artificial Sequence
  Description of Artificial Sequence: Synthetic oligonucleotide
agcuauuccaggagguccu

SEQ ID NO: 113141 - RNA, 19 nt, Artificial Sequence
  Description of Artificial Sequence: Synthetic oligonucleotide
caaugacuaugcccacggc

SEQ ID NO: 113142 - RNA, 19 nt, Artificial Sequence
  Description of Artificial Sequence: Synthetic oligonucleotide
aagacucggugaauuccca

SEQ ID NO: 113143 - RNA, 19 nt, Artificial Sequence
  Description of Artificial Sequence: Synthetic oligonucleotide
cuccgaggcauuuucugga

SEQ ID NO: 113144 - RNA, 19 nt, Artificial Sequence
  Description of Artificial Sequence: Synthetic oligonucleotide
auagagcgggcuccaggcu

SEQ ID NO: 113145 - RNA, 19 nt, Artificial Sequence
  Description of Artificial Sequence: Synthetic oligonucleotide
aggauaucuuugaaaucga

SEQ ID NO: 113146 - RNA, 19 nt, Artificial Sequence
  Description of Artificial Sequence: Synthetic oligonucleotide
cugagagaugcuguaagaa

SEQ ID NO: 113147 - RNA, 19 nt, Artificial Sequence
  Description of Artificial Sequence: Synthetic oligonucleotide
auacguacacacacacaca

SEQ ID NO: 113148 - RNA, 19 nt, Artificial Sequence
  Description of Artificial Sequence: Synthetic oligonucleotide
cucugggcgucccugucac

SEQ ID NO: 113149 - RNA, 19 nt, Artificial Sequence
  Description of Artificial Sequence: Synthetic oligonucleotide
cuugccaacucugggcguc

SEQ ID NO: 113150 - RNA, 19 nt, Artificial Sequence
  Description of Artificial Sequence: Synthetic oligonucleotide
guagccguaggaacuguuc

SEQ ID NO: 113151 - RNA, 19 nt, Artificial Sequence
  Description of Artificial Sequence: Synthetic oligonucleotide
ggcggguuaugaaagacuc

SEQ ID NO: 113152 - RNA, 19 nt, Artificial Sequence
  Description of Artificial Sequence: Synthetic oligonucleotide
gccguagcaucacacuugc

SEQ ID NO: 113153 - RNA, 19 nt, Artificial Sequence
  Description of Artificial Sequence: Synthetic oligonucleotide
agccgcuuuuagcauggga

SEQ ID NO: 113154 - RNA, 19 nt, Artificial Sequence
  Description of Artificial Sequence: Synthetic oligonucleotide
gcuggguccgacgcaaugg

SEQ ID NO: 113155 - RNA, 19 nt, Artificial Sequence
  Description of Artificial Sequence: Synthetic oligonucleotide
uggccgcaacauagucucg

SEQ ID NO: 113156 - RNA, 19 nt, Artificial Sequence
  Description of Artificial Sequence: Synthetic oligonucleotide
cuguaagaagcaugaauau

SEQ ID NO: 113157 - RNA, 19 nt, Artificial Sequence
  Description of Artificial Sequence: Synthetic oligonucleotide
ggauaucuuugaaaucgac

SEQ ID NO: 113158 - RNA, 19 nt, Artificial Sequence
  Description of Artificial Sequence: Synthetic oligonucleotide
agguaaagauugugccaaa

SEQ ID NO: 113159 - RNA, 19 nt, Artificial Sequence
  Description of Artificial Sequence: Synthetic oligonucleotide
gauguucauagagcgggcu

SEQ ID NO: 113160 - RNA, 19 nt, Artificial Sequence
  Description of Artificial Sequence: Synthetic oligonucleotide
gaauaucgguggaccagga

SEQ ID NO: 113161 - RNA, 19 nt, Artificial Sequence
  Description of Artificial Sequence: Synthetic oligonucleotide
acacacacacacagguaca

SEQ ID NO: 113162 - RNA, 19 nt, Artificial Sequence
  Description of Artificial Sequence: Synthetic oligonucleotide
guacacuauacaguuuaua

SEQ ID NO: 113163 - RNA, 19 nt, Artificial Sequence
  Description of Artificial Sequence: Synthetic oligonucleotide
cacauagcuuugccagcac

SEQ ID NO: 113164 - RNA, 19 nt, Artificial Sequence
  Description of Artificial Sequence: Synthetic oligonucleotide
cccguuugucgucaagugc

SEQ ID NO: 113165 - RNA, 19 nt, Artificial Sequence
  Description of Artificial Sequence: Synthetic oligonucleotide
guagcacgcagcaaguccu

SEQ ID NO: 113166 - RNA, 19 nt, Artificial Sequence
  Description of Artificial Sequence: Synthetic oligonucleotide
gcuccauguguccccuugg

SEQ ID NO: 113167 - RNA, 19 nt, Artificial Sequence
  Description of Artificial Sequence: Synthetic oligonucleotide
aacggccccaagaccaaau

SEQ ID NO: 113168 - RNA, 19 nt, Artificial Sequence
  Description of Artificial Sequence: Synthetic oligonucleotide
guacacacacacacacaca

SEQ ID NO: 113169 - RNA, 19 nt, Artificial Sequence
  Description of Artificial Sequence: Synthetic oligonucleotide
gcuuguuauguagacucca

SEQ ID NO: 113170 - RNA, 19 nt, Artificial Sequence
  Description of Artificial Sequence: Synthetic oligonucleotide
acacacacacacacacaca

SEQ ID NO: 113171 - RNA, 19 nt, Artificial Sequence
  Description of Artificial Sequence: Synthetic oligonucleotide
caacaggcacguggggacc

SEQ ID NO: 113172 - RNA, 19 nt, Artificial Sequence
  Description of Artificial Sequence: Synthetic oligonucleotide
gaguagacgaugccucgau

SEQ ID NO: 113173 - RNA, 19 nt, Artificial Sequence
  Description of Artificial Sequence: Synthetic oligonucleotide
acguacacacacacacaca

SEQ ID NO: 113174 - RNA, 19 nt, Artificial Sequence
  Description of Artificial Sequence: Synthetic oligonucleotide
uccgacgcaaugggaaauu

SEQ ID NO: 113175 - RNA, 19 nt, Artificial Sequence
  Description of Artificial Sequence: Synthetic oligonucleotide
gauuuuccgguacccguuu

SEQ ID NO: 113176 - RNA, 19 nt, Artificial Sequence
  Description of Artificial Sequence: Synthetic oligonucleotide
ccauguguccccuuggucu

SEQ ID NO: 113177 - RNA, 19 nt, Artificial Sequence
  Description of Artificial Sequence: Synthetic oligonucleotide
gguauaauagugggguccu

SEQ ID NO: 113178 - RNA, 19 nt, Artificial Sequence
  Description of Artificial Sequence: Synthetic oligonucleotide
gcggguuaugaaagacucg

SEQ ID NO: 113179 - RNA, 19 nt, Artificial Sequence
  Description of Artificial Sequence: Synthetic oligonucleotide
guucauagagcgggcucca

SEQ ID NO: 113180 - RNA, 19 nt, Artificial Sequence
  Description of Artificial Sequence: Synthetic oligonucleotide
gggauuuuccgguacccgu

SEQ ID NO: 113181 - RNA, 19 nt, Artificial Sequence
  Description of Artificial Sequence: Synthetic oligonucleotide
cccuuggucuguugauacg

SEQ ID NO: 113182 - RNA, 19 nt, Artificial Sequence
  Description of Artificial Sequence: Synthetic oligonucleotide
uaggacgguugcugugcuc

SEQ ID NO: 113183 - RNA, 19 nt, Artificial Sequence
  Description of Artificial Sequence: Synthetic oligonucleotide
guacacgucugggaccauc

SEQ ID NO: 113184 - RNA, 19 nt, Artificial Sequence
  Description of Artificial Sequence: Synthetic oligonucleotide
ccguuugucgucaagugcu

SEQ ID NO: 113185 - RNA, 19 nt, Artificial Sequence
  Description of Artificial Sequence: Synthetic oligonucleotide
ccgaggcauuuucuggacg

SEQ ID NO: 113186 - RNA, 19 nt, Artificial Sequence
  Description of Artificial Sequence: Synthetic oligonucleotide
agacuccacggagggaggu

SEQ ID NO: 113187 - RNA, 19 nt, Artificial Sequence
  Description of Artificial Sequence: Synthetic oligonucleotide
augucggucuagagacuug

SEQ ID NO: 113188 - RNA, 19 nt, Artificial Sequence
  Description of Artificial Sequence: Synthetic oligonucleotide
ccgcaacauagucucgacc

SEQ ID NO: 113189 - RNA, 19 nt, Artificial Sequence
  Description of Artificial Sequence: Synthetic oligonucleotide
cuggacggaaguagccaaa

SEQ ID NO: 113190 - RNA, 19 nt, Artificial Sequence
  Description of Artificial Sequence: Synthetic oligonucleotide
acgaugcauggaaccaaga

SEQ ID NO: 113191 - RNA, 19 nt, Artificial Sequence
  Description of Artificial Sequence: Synthetic oligonucleotide
gacuccacggagggagguc

SEQ ID NO: 113192 - RNA, 19 nt, Artificial Sequence
  Description of Artificial Sequence: Synthetic oligonucleotide
uagccgcuuuuagcauggg

SEQ ID NO: 113193 - RNA, 19 nt, Artificial Sequence
  Description of Artificial Sequence: Synthetic oligonucleotide
acacacacacacacaggua

SEQ ID NO: 113194 - RNA, 19 nt, Artificial Sequence
  Description of Artificial Sequence: Synthetic oligonucleotide
acgcaaugggaaauuuauu

SEQ ID NO: 113195 - RNA, 19 nt, Artificial Sequence
  Description of Artificial Sequence: Synthetic oligonucleotide
gcacagaauaucgguggac

SEQ ID NO: 113196 - RNA, 19 nt, Artificial Sequence
  Description of Artificial Sequence: Synthetic oligonucleotide
ggucaugauccugcuuuac

SEQ ID NO: 113197 - RNA, 19 nt, Artificial Sequence
  Description of Artificial Sequence: Synthetic oligonucleotide
gguccgacgcaaugggaaa

SEQ ID NO: 113198 - RNA, 19 nt, Artificial Sequence
  Description of Artificial Sequence: Synthetic oligonucleotide
gccgcaacauagucucgac

SEQ ID NO: 113199 - RNA, 19 nt, Artificial Sequence
  Description of Artificial Sequence: Synthetic oligonucleotide
gcacguggggacccugagc

SEQ ID NO: 113200 - RNA, 19 nt, Artificial Sequence
  Description of Artificial Sequence: Synthetic oligonucleotide
gggaggaaggugauagaaa

SEQ ID NO: 113201 - RNA, 19 nt, Artificial Sequence
  Description of Artificial Sequence: Synthetic oligonucleotide
cugugugaacacauagcuu

SEQ ID NO: 113202 - RNA, 19 nt, Artificial Sequence
  Description of Artificial Sequence: Synthetic oligonucleotide
cgcaaugggaaauuuauuu

SEQ ID NO: 113203 - RNA, 19 nt, Artificial Sequence
  Description of Artificial Sequence: Synthetic oligonucleotide
ggguccgacgcaaugggaa

SEQ ID NO: 113204 - RNA, 19 nt, Artificial Sequence
  Description of Artificial Sequence: Synthetic oligonucleotide
gugccaaauccgguaucuc

SEQ ID NO: 113205 - RNA, 19 nt, Artificial Sequence
  Description of Artificial Sequence: Synthetic oligonucleotide
ggucuguugauacguggau

SEQ ID NO: 113206 - RNA, 19 nt, Artificial Sequence
  Description of Artificial Sequence: Synthetic oligonucleotide
cgaugcauggaaccaagaa

SEQ ID NO: 113207 - RNA, 19 nt, Artificial Sequence
  Description of Artificial Sequence: Synthetic oligonucleotide
acgcuaccaugagcaauga

SEQ ID NO: 113208 - RNA, 19 nt, Artificial Sequence
  Description of Artificial Sequence: Synthetic oligonucleotide
gucggucuagagacuugga

SEQ ID NO: 113209 - RNA, 19 nt, Artificial Sequence
  Description of Artificial Sequence: Synthetic oligonucleotide
acguggggacccugagcau

SEQ ID NO: 113210 - RNA, 19 nt, Artificial Sequence
  Description of Artificial Sequence: Synthetic oligonucleotide
gggugagaacugcacuaaa

SEQ ID NO: 113211 - RNA, 19 nt, Artificial Sequence
  Description of Artificial Sequence: Synthetic oligonucleotide
gacccacuggcggguuaug

SEQ ID NO: 113212 - RNA, 19 nt, Artificial Sequence
  Description of Artificial Sequence: Synthetic oligonucleotide
ccucgaucaucagagguaa

SEQ ID NO: 113213 - RNA, 19 nt, Artificial Sequence
  Description of Artificial Sequence: Synthetic oligonucleotide
cucgaucaucagagguaaa

SEQ ID NO: 113214 - RNA, 19 nt, Artificial Sequence
  Description of Artificial Sequence: Synthetic oligonucleotide
ggacggaaguagccaaagu

SEQ ID NO: 113215 - RNA, 19 nt, Artificial Sequence
  Description of Artificial Sequence: Synthetic oligonucleotide
ccacgauaaugccuccgga

SEQ ID NO: 113216 - RNA, 19 nt, Artificial Sequence
  Description of Artificial Sequence: Synthetic oligonucleotide
ccaggauaauaggaacaga

SEQ ID NO: 113217 - RNA, 19 nt, Artificial Sequence
  Description of Artificial Sequence: Synthetic oligonucleotide
uggggacccugagcauuuc

SEQ ID NO: 113218 - RNA, 19 nt, Artificial Sequence
  Description of Artificial Sequence: Synthetic oligonucleotide
cuguugauacguggauccu

SEQ ID NO: 113219 - RNA, 19 nt, Artificial Sequence
  Description of Artificial Sequence: Synthetic oligonucleotide
ggauuuuccgguacccguu

SEQ ID NO: 113220 - RNA, 19 nt, Artificial Sequence
  Description of Artificial Sequence: Synthetic oligonucleotide
ggguuaugaaagacucggu

SEQ ID NO: 113221 - RNA, 19 nt, Artificial Sequence
  Description of Artificial Sequence: Synthetic oligonucleotide
caguuccguuccaggauau

SEQ ID NO: 113222 - RNA, 19 nt, Artificial Sequence
  Description of Artificial Sequence: Synthetic oligonucleotide
cgagggcauauggagggug

SEQ ID NO: 113223 - RNA, 19 nt, Artificial Sequence
  Description of Artificial Sequence: Synthetic oligonucleotide
ggaacggccccaagaccaa

SEQ ID NO: 113224 - RNA, 19 nt, Artificial Sequence
  Description of Artificial Sequence: Synthetic oligonucleotide
ccgguacccguuugucguc

SEQ ID NO: 113225 - RNA, 19 nt, Artificial Sequence
  Description of Artificial Sequence: Synthetic oligonucleotide
cgcuaccaugagcaaugac

SEQ ID NO: 113226 - RNA, 19 nt, Artificial Sequence
  Description of Artificial Sequence: Synthetic oligonucleotide
guauaauagugggguccuu

SEQ ID NO: 113227 - RNA, 19 nt, Artificial Sequence
  Description of Artificial Sequence: Synthetic oligonucleotide
gcugcaccccauccuauuu

SEQ ID NO: 113228 - RNA, 19 nt, Artificial Sequence
  Description of Artificial Sequence: Synthetic oligonucleotide
cgacgcaaugggaaauuua

SEQ ID NO: 113229 - RNA, 19 nt, Artificial Sequence
  Description of Artificial Sequence: Synthetic oligonucleotide
ccguaggaacuguucuuua

SEQ ID NO: 113230 - RNA, 19 nt, Artificial Sequence
  Description of Artificial Sequence: Synthetic oligonucleotide
cacggagggaggucacguu

SEQ ID NO: 113231 - RNA, 19 nt, Artificial Sequence
  Description of Artificial Sequence: Synthetic oligonucleotide
ccaaacccucaucccugga

SEQ ID NO: 113232 - RNA, 19 nt, Artificial Sequence
  Description of Artificial Sequence: Synthetic oligonucleotide
cggugaauucccagaugcu

SEQ ID NO: 113233 - RNA, 19 nt, Artificial Sequence
  Description of Artificial Sequence: Synthetic oligonucleotide
cuccggaaucuaggauggu

SEQ ID NO: 113234 - RNA, 19 nt, Artificial Sequence
  Description of Artificial Sequence: Synthetic oligonucleotide
ccacgcuaccaugagcaau

SEQ ID NO: 113235 - RNA, 19 nt, Artificial Sequence
  Description of Artificial Sequence: Synthetic oligonucleotide
cccacggcauugggcucug

SEQ ID NO: 113236 - RNA, 19 nt, Artificial Sequence
  Description of Artificial Sequence: Synthetic oligonucleotide
gcgagggcauauggagggu

SEQ ID NO: 113237 - RNA, 19 nt, Artificial Sequence
  Description of Artificial Sequence: Synthetic oligonucleotide
ccguagcaucacacuugcu

SEQ ID NO: 113238 - RNA, 19 nt, Artificial Sequence
  Description of Artificial Sequence: Synthetic oligonucleotide
ccgacgcaaugggaaauuu

SEQ ID NO: 113239 - RNA, 19 nt, Artificial Sequence
  Description of Artificial Sequence: Synthetic oligonucleotide
auacagauagucuauaccc

SEQ ID NO: 113240 - RNA, 19 nt, Artificial Sequence
  Description of Artificial Sequence: Synthetic oligonucleotide
aacuagaggaaacaugugc

SEQ ID NO: 113241 - RNA, 19 nt, Artificial Sequence
  Description of Artificial Sequence: Synthetic oligonucleotide
aagacucucacucuuuggg

SEQ ID NO: 113242 - RNA, 19 nt, Artificial Sequence
  Description of Artificial Sequence: Synthetic oligonucleotide
aacccauuggauuaaguag

SEQ ID NO: 113243 - RNA, 19 nt, Artificial Sequence
  Description of Artificial Sequence: Synthetic oligonucleotide
uguagauuagggaagcgag

SEQ ID NO: 113244 - RNA, 19 nt, Artificial Sequence
  Description of Artificial Sequence: Synthetic oligonucleotide
aaagucuuaagugaccccg

SEQ ID NO: 113245 - RNA, 19 nt, Artificial Sequence
  Description of Artificial Sequence: Synthetic oligonucleotide
uggagaauacaacuggagg

SEQ ID NO: 113246 - RNA, 19 nt, Artificial Sequence
  Description of Artificial Sequence: Synthetic oligonucleotide
uagagucucaguuaaacca

SEQ ID NO: 113247 - RNA, 19 nt, Artificial Sequence
  Description of Artificial Sequence: Synthetic oligonucleotide
uugagcuaaauaagcaagg

SEQ ID NO: 113248 - RNA, 19 nt, Artificial Sequence
  Description of Artificial Sequence: Synthetic oligonucleotide
aacacagugguagggaggc

SEQ ID NO: 113249 - RNA, 19 nt, Artificial Sequence
  Description of Artificial Sequence: Synthetic oligonucleotide
gauuaaguagcguuuugcc

SEQ ID NO: 113250 - RNA, 19 nt, Artificial Sequence
  Description of Artificial Sequence: Synthetic oligonucleotide
uuaaguagcguuuugccaa

SEQ ID NO: 113251 - RNA, 19 nt, Artificial Sequence
  Description of Artificial Sequence: Synthetic oligonucleotide
agugcuauggcacgucagc

SEQ ID NO: 113252 - RNA, 19 nt, Artificial Sequence
  Description of Artificial Sequence: Synthetic oligonucleotide
ugagcgacaaacuuagaga

SEQ ID NO: 113253 - RNA, 19 nt, Artificial Sequence
  Description of Artificial Sequence: Synthetic oligonucleotide
aaaguggaagaagucugcc

SEQ ID NO: 113254 - RNA, 19 nt, Artificial Sequence
  Description of Artificial Sequence: Synthetic oligonucleotide
augagcgacaaacuuagag

SEQ ID NO: 113255 - RNA, 19 nt, Artificial Sequence
  Description of Artificial Sequence: Synthetic oligonucleotide
uugauugguagcuccaucc

SEQ ID NO: 113256 - RNA, 19 nt, Artificial Sequence
  Description of Artificial Sequence: Synthetic oligonucleotide
aaagacucucacucuuugg

SEQ ID NO: 113257 - RNA, 19 nt, Artificial Sequence
  Description of Artificial Sequence: Synthetic oligonucleotide
aacccuagcggucucaaug

SEQ ID NO: 113258 - RNA, 19 nt, Artificial Sequence
  Description of Artificial Sequence: Synthetic oligonucleotide
uagcguuuugccaaaagca

SEQ ID NO: 113259 - RNA, 19 nt, Artificial Sequence
  Description of Artificial Sequence: Synthetic oligonucleotide
aaaagacucucacucuuug

SEQ ID NO: 113260 - RNA, 19 nt, Artificial Sequence
  Description of Artificial Sequence: Synthetic oligonucleotide
uaucuaaaguagaauuccc

SEQ ID NO: 113261 - RNA, 19 nt, Artificial Sequence
  Description of Artificial Sequence: Synthetic oligonucleotide
agcgcgcagagccagagcc

SEQ ID NO: 113262 - RNA, 19 nt, Artificial Sequence
  Description of Artificial Sequence: Synthetic oligonucleotide
aucacauccagccauuaug

SEQ ID NO: 113263 - RNA, 19 nt, Artificial Sequence
  Description of Artificial Sequence: Synthetic oligonucleotide
agcuaaauaagcaaggagu

SEQ ID NO: 113264 - RNA, 19 nt, Artificial Sequence
  Description of Artificial Sequence: Synthetic oligonucleotide
ggagaauacaacuggaggc

SEQ ID NO: 113265 - RNA, 19 nt, Artificial Sequence
  Description of Artificial Sequence: Synthetic oligonucleotide
acccauuggauuaaguagc

SEQ ID NO: 113266 - RNA, 19 nt, Artificial Sequence
  Description of Artificial Sequence: Synthetic oligonucleotide
aacgaaagcaguagaguuc

SEQ ID NO: 113267 - RNA, 19 nt, Artificial Sequence
  Description of Artificial Sequence: Synthetic oligonucleotide
caugaaacccaccaggcac

SEQ ID NO: 113268 - RNA, 19 nt, Artificial Sequence
  Description of Artificial Sequence: Synthetic oligonucleotide
auuaaguagcguuuugcca

SEQ ID NO: 113269 - RNA, 19 nt, Artificial Sequence
  Description of Artificial Sequence: Synthetic oligonucleotide
gacagccauaauuugcggg

SEQ ID NO: 113270 - RNA, 19 nt, Artificial Sequence
  Description of Artificial Sequence: Synthetic oligonucleotide
gucuauacccuguugcacg

SEQ ID NO: 113271 - RNA, 19 nt, Artificial Sequence
  Description of Artificial Sequence: Synthetic oligonucleotide
ugcaagaaacccuuugcgc

SEQ ID NO: 113272 - RNA, 19 nt, Artificial Sequence
  Description of Artificial Sequence: Synthetic oligonucleotide
gagcgacaaacuuagagac

SEQ ID NO: 113273 - RNA, 19 nt, Artificial Sequence
  Description of Artificial Sequence: Synthetic oligonucleotide
aauuugcgggaggacaggc

SEQ ID NO: 113274 - RNA, 19 nt, Artificial Sequence
  Description of Artificial Sequence: Synthetic oligonucleotide
auuauguccuggcagcaag

SEQ ID NO: 113275 - RNA, 19 nt, Artificial Sequence
  Description of Artificial Sequence: Synthetic oligonucleotide
auuccaaggagcccuggac

SEQ ID NO: 113276 - RNA, 19 nt, Artificial Sequence
  Description of Artificial Sequence: Synthetic oligonucleotide
ucucuugucuagcugggcc

SEQ ID NO: 113277 - RNA, 19 nt, Artificial Sequence
  Description of Artificial Sequence: Synthetic oligonucleotide
aagaguaaguucucacaca

SEQ ID NO: 113278 - RNA, 19 nt, Artificial Sequence
  Description of Artificial Sequence: Synthetic oligonucleotide
uaccccagaaguaaagucu

SEQ ID NO: 113279 - RNA, 19 nt, Artificial Sequence
  Description of Artificial Sequence: Synthetic oligonucleotide
guacucaagauguaucuug

SEQ ID NO: 113280 - RNA, 19 nt, Artificial Sequence
  Description of Artificial Sequence: Synthetic oligonucleotide
aggauuugguucuucuagg

SEQ ID NO: 113281 - RNA, 19 nt, Artificial Sequence
  Description of Artificial Sequence: Synthetic oligonucleotide
guagcguuuugccaaaagc

SEQ ID NO: 113282 - RNA, 19 nt, Artificial Sequence
  Description of Artificial Sequence: Synthetic oligonucleotide
uuugcgggaggacaggcug

SEQ ID NO: 113283 - RNA, 19 nt, Artificial Sequence
  Description of Artificial Sequence: Synthetic oligonucleotide
uaagccuacguuuuggcau

SEQ ID NO: 113284 - RNA, 19 nt, Artificial Sequence
  Description of Artificial Sequence: Synthetic oligonucleotide
uccgguacagcaugaaacc

SEQ ID NO: 113285 - RNA, 19 nt, Artificial Sequence
  Description of Artificial Sequence: Synthetic oligonucleotide
gaaccuaccaacuuucaaa

SEQ ID NO: 113286 - RNA, 19 nt, Artificial Sequence
  Description of Artificial Sequence: Synthetic oligonucleotide
ucguugagcuaaauaagca

SEQ ID NO: 113287 - RNA, 19 nt, Artificial Sequence
  Description of Artificial Sequence: Synthetic oligonucleotide
cuagccagccuacuuacgg

SEQ ID NO: 113288 - RNA, 19 nt, Artificial Sequence
  Description of Artificial Sequence: Synthetic oligonucleotide
auguaucuugucaacuucc

SEQ ID NO: 113289 - RNA, 19 nt, Artificial Sequence
  Description of Artificial Sequence: Synthetic oligonucleotide
caucguugagcuaaauaag

SEQ ID NO: 113290 - RNA, 19 nt, Artificial Sequence
  Description of Artificial Sequence: Synthetic oligonucleotide
uaagugaccccgaugcugu

SEQ ID NO: 113291 - RNA, 19 nt, Artificial Sequence
  Description of Artificial Sequence: Synthetic oligonucleotide
acucuagugaccccagguc

SEQ ID NO: 113292 - RNA, 19 nt, Artificial Sequence
  Description of Artificial Sequence: Synthetic oligonucleotide
auccgguacagcaugaaac

SEQ ID NO: 113293 - RNA, 19 nt, Artificial Sequence
  Description of Artificial Sequence: Synthetic oligonucleotide
uguugagacccgaugggug

SEQ ID NO: 113294 - RNA, 19 nt, Artificial Sequence
  Description of Artificial Sequence: Synthetic oligonucleotide
uuaagugaccccgaugcug

SEQ ID NO: 113295 - RNA, 19 nt, Artificial Sequence
  Description of Artificial Sequence: Synthetic oligonucleotide
aaaggcgggagagucuugg

SEQ ID NO: 113296 - RNA, 19 nt, Artificial Sequence
  Description of Artificial Sequence: Synthetic oligonucleotide
cagcaugaaacccaccagg

SEQ ID NO: 113297 - RNA, 19 nt, Artificial Sequence
  Description of Artificial Sequence: Synthetic oligonucleotide
ugcuauggcacgucagccg

SEQ ID NO: 113298 - RNA, 19 nt, Artificial Sequence
  Description of Artificial Sequence: Synthetic oligonucleotide
aacaucguugagcuaaaua

SEQ ID NO: 113299 - RNA, 19 nt, Artificial Sequence
  Description of Artificial Sequence: Synthetic oligonucleotide
ugauaaagugaugucuggc

SEQ ID NO: 113300 - RNA, 19 nt, Artificial Sequence
  Description of Artificial Sequence: Synthetic oligonucleotide
agcgugacucuagugaccc

SEQ ID NO: 113301 - RNA, 19 nt, Artificial Sequence
  Description of Artificial Sequence: Synthetic oligonucleotide
agcaugaaacccaccaggc

SEQ ID NO: 113302 - RNA, 19 nt, Artificial Sequence
  Description of Artificial Sequence: Synthetic oligonucleotide
agccauuauguccuggcag

SEQ ID NO: 113303 - RNA, 19 nt, Artificial Sequence
  Description of Artificial Sequence: Synthetic oligonucleotide
gugauaaagugaugucugg

SEQ ID NO: 113304 - RNA, 19 nt, Artificial Sequence
  Description of Artificial Sequence: Synthetic oligonucleotide
uuugcgcccaagcuucuag

SEQ ID NO: 113305 - RNA, 19 nt, Artificial Sequence
  Description of Artificial Sequence: Synthetic oligonucleotide
uuacggaccaccagaaaau

SEQ ID NO: 113306 - RNA, 19 nt, Artificial Sequence
  Description of Artificial Sequence: Synthetic oligonucleotide
auaggacuccuuuauauua

SEQ ID NO: 113307 - RNA, 19 nt, Artificial Sequence
  Description of Artificial Sequence: Synthetic oligonucleotide
uagauuagggaagcgaggu

SEQ ID NO: 113308 - RNA, 19 nt, Artificial Sequence
  Description of Artificial Sequence: Synthetic oligonucleotide
aaguuuggccaaaagaaaa

SEQ ID NO: 113309 - RNA, 19 nt, Artificial Sequence
  Description of Artificial Sequence: Synthetic oligonucleotide
ucugggacuagccagccua

SEQ ID NO: 113310 - RNA, 19 nt, Artificial Sequence
  Description of Artificial Sequence: Synthetic oligonucleotide
aaauaagcaaggaguccuc

SEQ ID NO: 113311 - RNA, 19 nt, Artificial Sequence
  Description of Artificial Sequence: Synthetic oligonucleotide
auaagcaaggaguccucag

SEQ ID NO: 113312 - RNA, 19 nt, Artificial Sequence
  Description of Artificial Sequence: Synthetic oligonucleotide
ugagcuaaauaagcaagga

SEQ ID NO: 113313 - RNA, 19 nt, Artificial Sequence
  Description of Artificial Sequence: Synthetic oligonucleotide
auaauuugcgggaggacag

SEQ ID NO: 113314 - RNA, 19 nt, Artificial Sequence
  Description of Artificial Sequence: Synthetic oligonucleotide
uacacgaaugggcccagcc

SEQ ID NO: 113315 - RNA, 19 nt, Artificial Sequence
  Description of Artificial Sequence: Synthetic oligonucleotide
gauccuaccccuuggagaa

SEQ ID NO: 113316 - RNA, 19 nt, Artificial Sequence
  Description of Artificial Sequence: Synthetic oligonucleotide
aguuacacuagagucucag

SEQ ID NO: 113317 - RNA, 19 nt, Artificial Sequence
  Description of Artificial Sequence: Synthetic oligonucleotide
uacacuagagucucaguua

SEQ ID NO: 113318 - RNA, 19 nt, Artificial Sequence
  Description of Artificial Sequence: Synthetic oligonucleotide
acacaaacuaagccuacgu

SEQ ID NO: 113319 - RNA, 19 nt, Artificial Sequence
  Description of Artificial Sequence: Synthetic oligonucleotide
acccuagcggucucaaugg

SEQ ID NO: 113320 - RNA, 19 nt, Artificial Sequence
  Description of Artificial Sequence: Synthetic oligonucleotide
uuaccccagaaguaaaguc

SEQ ID NO: 113321 - RNA, 19 nt, Artificial Sequence
  Description of Artificial Sequence: Synthetic oligonucleotide
gagaauacaacuggaggca

SEQ ID NO: 113322 - RNA, 19 nt, Artificial Sequence
  Description of Artificial Sequence: Synthetic oligonucleotide
ugucuggcaaagcaccugu

SEQ ID NO: 113323 - RNA, 19 nt, Artificial Sequence
  Description of Artificial Sequence: Synthetic oligonucleotide
ccuguugcacgcaugagcg

SEQ ID NO: 113324 - RNA, 19 nt, Artificial Sequence
  Description of Artificial Sequence: Synthetic oligonucleotide
ugaaccuaccaacuuucaa

SEQ ID NO: 113325 - RNA, 19 nt, Artificial Sequence
  Description of Artificial Sequence: Synthetic oligonucleotide
uccugagugagcgagggcu

SEQ ID NO: 113326 - RNA, 19 nt, Artificial Sequence
  Description of Artificial Sequence: Synthetic oligonucleotide
aagucugccgugauaaagu

SEQ ID NO: 113327 - RNA, 19 nt, Artificial Sequence
  Description of Artificial Sequence: Synthetic oligonucleotide
aauaagcaaggaguccuca

SEQ ID NO: 113328 - RNA, 19 nt, Artificial Sequence
  Description of Artificial Sequence: Synthetic oligonucleotide
agaauacaacuggaggcac

SEQ ID NO: 113329 - RNA, 19 nt, Artificial Sequence
  Description of Artificial Sequence: Synthetic oligonucleotide
aggcgggagagucuugggc

SEQ ID NO: 113330 - RNA, 19 nt, Artificial Sequence
  Description of Artificial Sequence: Synthetic oligonucleotide
ugauugguagcuccauccu

SEQ ID NO: 113331 - RNA, 19 nt, Artificial Sequence
  Description of Artificial Sequence: Synthetic oligonucleotide
guagauuagggaagcgagg

SEQ ID NO: 113332 - RNA, 19 nt, Artificial Sequence
  Description of Artificial Sequence: Synthetic oligonucleotide
aggccggcuacgucuaugc

SEQ ID NO: 113333 - RNA, 19 nt, Artificial Sequence
  Description of Artificial Sequence: Synthetic oligonucleotide
cuuacggaccaccagaaaa

SEQ ID NO: 113334 - RNA, 19 nt, Artificial Sequence
  Description of Artificial Sequence: Synthetic oligonucleotide
ggcaugacuggucaagagg

SEQ ID NO: 113335 - RNA, 19 nt, Artificial Sequence
  Description of Artificial Sequence: Synthetic oligonucleotide
uacguuuuggcaucaggau

SEQ ID NO: 113336 - RNA, 19 nt, Artificial Sequence
  Description of Artificial Sequence: Synthetic oligonucleotide
caauuacacgaaugggccc

SEQ ID NO: 113337 - RNA, 19 nt, Artificial Sequence
  Description of Artificial Sequence: Synthetic oligonucleotide
uaagugcuauggcacguca

SEQ ID NO: 113338 - RNA, 19 nt, Artificial Sequence
  Description of Artificial Sequence: Synthetic oligonucleotide
ugacagccauaauuugcgg

SEQ ID NO: 113339 - RNA, 19 nt, Artificial Sequence
  Description of Artificial Sequence: Synthetic oligonucleotide
uacccuguugcacgcauga

SEQ ID NO: 113340 - RNA, 19 nt, Artificial Sequence
  Description of Artificial Sequence: Synthetic oligonucleotide
aagguuuauuacaucugca

SEQ ID NO: 113341 - RNA, 19 nt, Artificial Sequence
  Description of Artificial Sequence: Synthetic oligonucleotide
cauaauuugcgggaggaca

SEQ ID NO: 113342 - RNA, 19 nt, Artificial Sequence
  Description of Artificial Sequence: Synthetic oligonucleotide
uguugcacgcaugagcgac

SEQ ID NO: 113343 - RNA, 19 nt, Artificial Sequence
  Description of Artificial Sequence: Synthetic oligonucleotide
ugaccccaggucaaguuac

SEQ ID NO: 113344 - RNA, 19 nt, Artificial Sequence
  Description of Artificial Sequence: Synthetic oligonucleotide
aaaccaagcgugacucuag

SEQ ID NO: 113345 - RNA, 19 nt, Artificial Sequence
  Description of Artificial Sequence: Synthetic oligonucleotide
uacuuacggaccaccagaa

SEQ ID NO: 113346 - RNA, 19 nt, Artificial Sequence
  Description of Artificial Sequence: Synthetic oligonucleotide
cacgaaugggcccagccug

SEQ ID NO: 113347 - RNA, 19 nt, Artificial Sequence
  Description of Artificial Sequence: Synthetic oligonucleotide
uaauuugcgggaggacagg

SEQ ID NO: 113348 - RNA, 19 nt, Artificial Sequence
  Description of Artificial Sequence: Synthetic oligonucleotide
gaugacagaaguaccucca

SEQ ID NO: 113349 - RNA, 19 nt, Artificial Sequence
  Description of Artificial Sequence: Synthetic oligonucleotide
ucggaguugcggauugagc

SEQ ID NO: 113350 - RNA, 19 nt, Artificial Sequence
  Description of Artificial Sequence: Synthetic oligonucleotide
uguaaaaccuuggcugaac

SEQ ID NO: 113351 - RNA, 19 nt, Artificial Sequence
  Description of Artificial Sequence: Synthetic oligonucleotide
caacacacaaacuaagccu

SEQ ID NO: 113352 - RNA, 19 nt, Artificial Sequence
  Description of Artificial Sequence: Synthetic oligonucleotide
cuugccuuaccccagaagu

SEQ ID NO: 113353 - RNA, 19 nt, Artificial Sequence
  Description of Artificial Sequence: Synthetic oligonucleotide
cuacuuacggaccaccaga

SEQ ID NO: 113354 - RNA, 19 nt, Artificial Sequence
  Description of Artificial Sequence: Synthetic oligonucleotide
ucuuccgaugucgcagugg

SEQ ID NO: 113355 - RNA, 19 nt, Artificial Sequence
  Description of Artificial Sequence: Synthetic oligonucleotide
aaccaagcgugacucuagu

SEQ ID NO: 113356 - RNA, 19 nt, Artificial Sequence
  Description of Artificial Sequence: Synthetic oligonucleotide
uggcacgucagccgaagac

SEQ ID NO: 113357 - RNA, 19 nt, Artificial Sequence
  Description of Artificial Sequence: Synthetic oligonucleotide
uccucggcaaccucuuuga

SEQ ID NO: 113358 - RNA, 19 nt, Artificial Sequence
  Description of Artificial Sequence: Synthetic oligonucleotide
ucaauggguaagugcuaug

SEQ ID NO: 113359 - RNA, 19 nt, Artificial Sequence
  Description of Artificial Sequence: Synthetic oligonucleotide
uggccaccgucucacaagc

SEQ ID NO: 113360 - RNA, 19 nt, Artificial Sequence
  Description of Artificial Sequence: Synthetic oligonucleotide
gagccuagugaguggcagg

SEQ ID NO: 113361 - RNA, 19 nt, Artificial Sequence
  Description of Artificial Sequence: Synthetic oligonucleotide
uugcggauugagcggagcu

SEQ ID NO: 113362 - RNA, 19 nt, Artificial Sequence
  Description of Artificial Sequence: Synthetic oligonucleotide
ggauuaaguagcguuuugc

SEQ ID NO: 113363 - RNA, 19 nt, Artificial Sequence
  Description of Artificial Sequence: Synthetic oligonucleotide
ggaguugcggauugagcgg

SEQ ID NO: 113364 - RNA, 19 nt, Artificial Sequence
  Description of Artificial Sequence: Synthetic oligonucleotide
uugcgcccaagcuucuagg

SEQ ID NO: 113365 - RNA, 19 nt, Artificial Sequence
  Description of Artificial Sequence: Synthetic oligonucleotide
ucccugaacuaccaggguu

SEQ ID NO: 113366 - RNA, 19 nt, Artificial Sequence
  Description of Artificial Sequence: Synthetic oligonucleotide
agagaaggccggcuacguc

SEQ ID NO: 113367 - RNA, 19 nt, Artificial Sequence
  Description of Artificial Sequence: Synthetic oligonucleotide
guugagacccgauggguga

SEQ ID NO: 113368 - RNA, 19 nt, Artificial Sequence
  Description of Artificial Sequence: Synthetic oligonucleotide
acugugcuauaagaguaag

SEQ ID NO: 113369 - RNA, 19 nt, Artificial Sequence
  Description of Artificial Sequence: Synthetic oligonucleotide
gcuaaauaagcaaggaguc

SEQ ID NO: 113370 - RNA, 19 nt, Artificial Sequence
  Description of Artificial Sequence: Synthetic oligonucleotide
cuggacuccauccccuacc

SEQ ID NO: 113371 - RNA, 19 nt, Artificial Sequence
  Description of Artificial Sequence: Synthetic oligonucleotide
gaaacgaaagcaguagagu

SEQ ID NO: 113372 - RNA, 19 nt, Artificial Sequence
  Description of Artificial Sequence: Synthetic oligonucleotide
gcaugagcgacaaacuuag

SEQ ID NO: 113373 - RNA, 19 nt, Artificial Sequence
  Description of Artificial Sequence: Synthetic oligonucleotide
cacacaaacuaagccuacg

SEQ ID NO: 113374 - RNA, 19 nt, Artificial Sequence
  Description of Artificial Sequence: Synthetic oligonucleotide
uccaucaggcguagaacuc

SEQ ID NO: 113375 - RNA, 19 nt, Artificial Sequence
  Description of Artificial Sequence: Synthetic oligonucleotide
cggaguugcggauugagcg

SEQ ID NO: 113376 - RNA, 19 nt, Artificial Sequence
  Description of Artificial Sequence: Synthetic oligonucleotide
gagaaggccggcuacgucu

SEQ ID NO: 113377 - RNA, 19 nt, Artificial Sequence
  Description of Artificial Sequence: Synthetic oligonucleotide
auuggauuaaguagcguuu

SEQ ID NO: 113378 - RNA, 19 nt, Artificial Sequence
  Description of Artificial Sequence: Synthetic oligonucleotide
aggcaugacuggucaagag

SEQ ID NO: 113379 - RNA, 19 nt, Artificial Sequence
  Description of Artificial Sequence: Synthetic oligonucleotide
agcuucuaggcagaaguca

SEQ ID NO: 113380 - RNA, 19 nt, Artificial Sequence
  Description of Artificial Sequence: Synthetic oligonucleotide
ucgcccaaauguagauuag

SEQ ID NO: 113381 - RNA, 19 nt, Artificial Sequence
  Description of Artificial Sequence: Synthetic oligonucleotide
ccagauuccuuccuuugcg

SEQ ID NO: 113382 - RNA, 19 nt, Artificial Sequence
  Description of Artificial Sequence: Synthetic oligonucleotide
agccuacuuacggaccacc

SEQ ID NO: 113383 - RNA, 19 nt, Artificial Sequence
  Description of Artificial Sequence: Synthetic oligonucleotide
cucuagugaccccagguca

SEQ ID NO: 113384 - RNA, 19 nt, Artificial Sequence
  Description of Artificial Sequence: Synthetic oligonucleotide
gucgcccaaauguagauua

SEQ ID NO: 113385 - RNA, 19 nt, Artificial Sequence
  Description of Artificial Sequence: Synthetic oligonucleotide
aagugcuauggcacgucag

SEQ ID NO: 113386 - RNA, 19 nt, Artificial Sequence
  Description of Artificial Sequence: Synthetic oligonucleotide
gucuuaagugaccccgaug

SEQ ID NO: 113387 - RNA, 19 nt, Artificial Sequence
  Description of Artificial Sequence: Synthetic oligonucleotide
cgugauaaagugaugucug

SEQ ID NO: 113388 - RNA, 19 nt, Artificial Sequence
  Description of Artificial Sequence: Synthetic oligonucleotide
uugccuuaccccagaagua

SEQ ID NO: 113389 - RNA, 19 nt, Artificial Sequence
  Description of Artificial Sequence: Synthetic oligonucleotide
uagccagccuacuuacgga

SEQ ID NO: 113390 - RNA, 19 nt, Artificial Sequence
  Description of Artificial Sequence: Synthetic oligonucleotide
aggucaaguuacacuagag

SEQ ID NO: 113391 - RNA, 19 nt, Artificial Sequence
  Description of Artificial Sequence: Synthetic oligonucleotide
cuaagccuacguuuuggca

SEQ ID NO: 113392 - RNA, 19 nt, Artificial Sequence
  Description of Artificial Sequence: Synthetic oligonucleotide
uuggauuaaguagcguuuu

SEQ ID NO: 113393 - RNA, 19 nt, Artificial Sequence
  Description of Artificial Sequence: Synthetic oligonucleotide
cauuggauuaaguagcguu

SEQ ID NO: 113394 - RNA, 19 nt, Artificial Sequence
  Description of Artificial Sequence: Synthetic oligonucleotide
acacacaaacuaagccuac

SEQ ID NO: 113395 - RNA, 19 nt, Artificial Sequence
  Description of Artificial Sequence: Synthetic oligonucleotide
ugggagccuagugaguggc

SEQ ID NO: 113396 - RNA, 19 nt, Artificial Sequence
  Description of Artificial Sequence: Synthetic oligonucleotide
ggugaaauccugcucucca

SEQ ID NO: 113397 - RNA, 19 nt, Artificial Sequence
  Description of Artificial Sequence: Synthetic oligonucleotide
accgagugcugucucagau

SEQ ID NO: 113398 - RNA, 19 nt, Artificial Sequence
  Description of Artificial Sequence: Synthetic oligonucleotide
accaagcgugacucuagug

SEQ ID NO: 113399 - RNA, 19 nt, Artificial Sequence
  Description of Artificial Sequence: Synthetic oligonucleotide
cuagcggucucaaugggua

SEQ ID NO: 113400 - RNA, 19 nt, Artificial Sequence
  Description of Artificial Sequence: Synthetic oligonucleotide
acggaccaccagaaaaugg

SEQ ID NO: 113401 - RNA, 19 nt, Artificial Sequence
  Description of Artificial Sequence: Synthetic oligonucleotide
aagucuuaagugaccccga

SEQ ID NO: 113402 - RNA, 19 nt, Artificial Sequence
  Description of Artificial Sequence: Synthetic oligonucleotide
gacucuagugaccccaggu

SEQ ID NO: 113403 - RNA, 19 nt, Artificial Sequence
  Description of Artificial Sequence: Synthetic oligonucleotide
gcacgcaugagcgacaaac

SEQ ID NO: 113404 - RNA, 19 nt, Artificial Sequence
  Description of Artificial Sequence: Synthetic oligonucleotide
agucuuaagugaccccgau

SEQ ID NO: 113405 - RNA, 19 nt, Artificial Sequence
  Description of Artificial Sequence: Synthetic oligonucleotide
cccauuggauuaaguagcg

SEQ ID NO: 113406 - RNA, 19 nt, Artificial Sequence
  Description of Artificial Sequence: Synthetic oligonucleotide
acgcaugagcgacaaacuu

SEQ ID NO: 113407 - RNA, 19 nt, Artificial Sequence
  Description of Artificial Sequence: Synthetic oligonucleotide
agcggucucaauggguaag

SEQ ID NO: 113408 - RNA, 19 nt, Artificial Sequence
  Description of Artificial Sequence: Synthetic oligonucleotide
ccuacguuuuggcaucagg

SEQ ID NO: 113409 - RNA, 19 nt, Artificial Sequence
  Description of Artificial Sequence: Synthetic oligonucleotide
uggagcuaguguccacuuc

SEQ ID NO: 113410 - RNA, 19 nt, Artificial Sequence
  Description of Artificial Sequence: Synthetic oligonucleotide
gucggaguugcggauugag

SEQ ID NO: 113411 - RNA, 19 nt, Artificial Sequence
  Description of Artificial Sequence: Synthetic oligonucleotide
gugcuauggcacgucagcc

SEQ ID NO: 113412 - RNA, 19 nt, Artificial Sequence
  Description of Artificial Sequence: Synthetic oligonucleotide
cacauagccuugagccaag

SEQ ID NO: 113413 - RNA, 19 nt, Artificial Sequence
  Description of Artificial Sequence: Synthetic oligonucleotide
ggcacgucagccgaagacc

SEQ ID NO: 113414 - RNA, 19 nt, Artificial Sequence
  Description of Artificial Sequence: Synthetic oligonucleotide
gcgacaaacuuagagacaa

SEQ ID NO: 113415 - RNA, 19 nt, Artificial Sequence
  Description of Artificial Sequence: Synthetic oligonucleotide
auggccaacccuagcgguc

SEQ ID NO: 113416 - RNA, 19 nt, Artificial Sequence
  Description of Artificial Sequence: Synthetic oligonucleotide
aaggccggcuacgucuaug

SEQ ID NO: 113417 - RNA, 19 nt, Artificial Sequence
  Description of Artificial Sequence: Synthetic oligonucleotide
auuacacgaaugggcccag

SEQ ID NO: 113418 - RNA, 19 nt, Artificial Sequence
  Description of Artificial Sequence: Synthetic oligonucleotide
uggcugaaccuaccaacuu

SEQ ID NO: 113419 - RNA, 19 nt, Artificial Sequence
  Description of Artificial Sequence: Synthetic oligonucleotide
gaguugcggauugagcgga

SEQ ID NO: 113420 - RNA, 19 nt, Artificial Sequence
  Description of Artificial Sequence: Synthetic oligonucleotide
ucugguaggcaccgccauu

SEQ ID NO: 113421 - RNA, 19 nt, Artificial Sequence
  Description of Artificial Sequence: Synthetic oligonucleotide
gagaaacuagaggaaacau

SEQ ID NO: 113422 - RNA, 19 nt, Artificial Sequence
  Description of Artificial Sequence: Synthetic oligonucleotide
acuagccagccuacuuacg

SEQ ID NO: 113423 - RNA, 19 nt, Artificial Sequence
  Description of Artificial Sequence: Synthetic oligonucleotide
ggcgggagagucuugggca

SEQ ID NO: 113424 - RNA, 19 nt, Artificial Sequence
  Description of Artificial Sequence: Synthetic oligonucleotide
gcuauggcacgucagccga

SEQ ID NO: 113425 - RNA, 19 nt, Artificial Sequence
  Description of Artificial Sequence: Synthetic oligonucleotide
ucucacucuuugggaagca

SEQ ID NO: 113426 - RNA, 19 nt, Artificial Sequence
  Description of Artificial Sequence: Synthetic oligonucleotide
agcgacaaacuuagagaca

SEQ ID NO: 113427 - RNA, 19 nt, Artificial Sequence
  Description of Artificial Sequence: Synthetic oligonucleotide
caaggaguagcugccuuca

SEQ ID NO: 113428 - RNA, 19 nt, Artificial Sequence
  Description of Artificial Sequence: Synthetic oligonucleotide
cugagugagcgagggcugc

SEQ ID NO: 113429 - RNA, 19 nt, Artificial Sequence
  Description of Artificial Sequence: Synthetic oligonucleotide
cugaaccuaccaacuuuca

SEQ ID NO: 113430 - RNA, 19 nt, Artificial Sequence
  Description of Artificial Sequence: Synthetic oligonucleotide
ccaagcuucccugaacuac

SEQ ID NO: 113431 - RNA, 19 nt, Artificial Sequence
  Description of Artificial Sequence: Synthetic oligonucleotide
gggccgacucugcugauug

SEQ ID NO: 113432 - RNA, 19 nt, Artificial Sequence
  Description of Artificial Sequence: Synthetic oligonucleotide
guaagugcuauggcacguc

SEQ ID NO: 113433 - RNA, 19 nt, Artificial Sequence
  Description of Artificial Sequence: Synthetic oligonucleotide
ggauugagcggagcugcgg

SEQ ID NO: 113434 - RNA, 19 nt, Artificial Sequence
  Description of Artificial Sequence: Synthetic oligonucleotide
uugagacccgaugggugac

SEQ ID NO: 113435 - RNA, 19 nt, Artificial Sequence
  Description of Artificial Sequence: Synthetic oligonucleotide
gagcuccgcgggcugcgcg

SEQ ID NO: 113436 - RNA, 19 nt, Artificial Sequence
  Description of Artificial Sequence: Synthetic oligonucleotide
agccguacucaagauguau

SEQ ID NO: 113437 - RNA, 19 nt, Artificial Sequence
  Description of Artificial Sequence: Synthetic oligonucleotide
ccgaugggugaccaggagc

SEQ ID NO: 113438 - RNA, 19 nt, Artificial Sequence
  Description of Artificial Sequence: Synthetic oligonucleotide
uccuaccccuuggagaaua

SEQ ID NO: 113439 - RNA, 19 nt, Artificial Sequence
  Description of Artificial Sequence: Synthetic oligonucleotide
guugcggauugagcggagc

SEQ ID NO: 113440 - RNA, 19 nt, Artificial Sequence
  Description of Artificial Sequence: Synthetic oligonucleotide
uagcggucucaauggguaa

SEQ ID NO: 113441 - RNA, 19 nt, Artificial Sequence
  Description of Artificial Sequence: Synthetic oligonucleotide
acagaacccauuggauuaa

SEQ ID NO: 113442 - RNA, 19 nt, Artificial Sequence
  Description of Artificial Sequence: Synthetic oligonucleotide
cagcccagagaagaaacga

SEQ ID NO: 113443 - RNA, 19 nt, Artificial Sequence
  Description of Artificial Sequence: Synthetic oligonucleotide
gaggccggguugcacaucu

SEQ ID NO: 113444 - RNA, 19 nt, Artificial Sequence
  Description of Artificial Sequence: Synthetic oligonucleotide
gcggauugagcggagcugc

SEQ ID NO: 113445 - RNA, 19 nt, Artificial Sequence
  Description of Artificial Sequence: Synthetic oligonucleotide
gaugggugaccaggagcug

SEQ ID NO: 113446 - RNA, 19 nt, Artificial Sequence
  Description of Artificial Sequence: Synthetic oligonucleotide
ggugaacuugguucuugga

SEQ ID NO: 113447 - RNA, 19 nt, Artificial Sequence
  Description of Artificial Sequence: Synthetic oligonucleotide
agacccgaugggugaccag

SEQ ID NO: 113448 - RNA, 19 nt, Artificial Sequence
  Description of Artificial Sequence: Synthetic oligonucleotide
ggucaagagguggcuaccc

SEQ ID NO: 113449 - RNA, 19 nt, Artificial Sequence
  Description of Artificial Sequence: Synthetic oligonucleotide
gcaugaaacccaccaggca

SEQ ID NO: 113450 - RNA, 19 nt, Artificial Sequence
  Description of Artificial Sequence: Synthetic oligonucleotide
ugucgcccaaauguagauu

SEQ ID NO: 113451 - RNA, 19 nt, Artificial Sequence
  Description of Artificial Sequence: Synthetic oligonucleotide
gccggcuacgucuaugcca

SEQ ID NO: 113452 - RNA, 19 nt, Artificial Sequence
  Description of Artificial Sequence: Synthetic oligonucleotide
uccaccggcuggagucagc

SEQ ID NO: 113453 - RNA, 19 nt, Artificial Sequence
  Description of Artificial Sequence: Synthetic oligonucleotide
cagaacccauuggauuaag

SEQ ID NO: 113454 - RNA, 19 nt, Artificial Sequence
  Description of Artificial Sequence: Synthetic oligonucleotide
gccgugauaaagugauguc

SEQ ID NO: 113455 - RNA, 19 nt, Artificial Sequence
  Description of Artificial Sequence: Synthetic oligonucleotide
gccauaauuugcgggagga

SEQ ID NO: 113456 - RNA, 19 nt, Artificial Sequence
  Description of Artificial Sequence: Synthetic oligonucleotide
aucugggacuagccagccu

SEQ ID NO: 113457 - RNA, 19 nt, Artificial Sequence
  Description of Artificial Sequence: Synthetic oligonucleotide
auggcacgucagccgaaga

SEQ ID NO: 113458 - RNA, 19 nt, Artificial Sequence
  Description of Artificial Sequence: Synthetic oligonucleotide
agguuccaccggcuggagu

SEQ ID NO: 113459 - RNA, 19 nt, Artificial Sequence
  Description of Artificial Sequence: Synthetic oligonucleotide
gcacgucagccgaagaccc

SEQ ID NO: 113460 - RNA, 19 nt, Artificial Sequence
  Description of Artificial Sequence: Synthetic oligonucleotide
cugccgugauaaagugaug

SEQ ID NO: 113461 - RNA, 19 nt, Artificial Sequence
  Description of Artificial Sequence: Synthetic oligonucleotide
caucccuagacugugcuau

SEQ ID NO: 113462 - RNA, 19 nt, Artificial Sequence
  Description of Artificial Sequence: Synthetic oligonucleotide
gagacccgaugggugacca

SEQ ID NO: 113463 - RNA, 19 nt, Artificial Sequence
  Description of Artificial Sequence: Synthetic oligonucleotide
ggcgagugggagccuagug

SEQ ID NO: 113464 - RNA, 19 nt, Artificial Sequence
  Description of Artificial Sequence: Synthetic oligonucleotide
cugugcuauaagaguaagu

SEQ ID NO: 113465 - RNA, 19 nt, Artificial Sequence
  Description of Artificial Sequence: Synthetic oligonucleotide
cucuuccgaugucgcagug

SEQ ID NO: 113466 - RNA, 19 nt, Artificial Sequence
  Description of Artificial Sequence: Synthetic oligonucleotide
aucaggcguagaacuccuc

SEQ ID NO: 113467 - RNA, 19 nt, Artificial Sequence
  Description of Artificial Sequence: Synthetic oligonucleotide
cacgcaugagcgacaaacu

SEQ ID NO: 113468 - RNA, 19 nt, Artificial Sequence
  Description of Artificial Sequence: Synthetic oligonucleotide
cguugagcuaaauaagcaa

SEQ ID NO: 113469 - RNA, 19 nt, Artificial Sequence
  Description of Artificial Sequence: Synthetic oligonucleotide
uuccaccggcuggagucag

SEQ ID NO: 113470 - RNA, 19 nt, Artificial Sequence
  Description of Artificial Sequence: Synthetic oligonucleotide
ggucaggcucuauggcagc

SEQ ID NO: 113471 - RNA, 19 nt, Artificial Sequence
  Description of Artificial Sequence: Synthetic oligonucleotide
guacagcaugaaacccacc

SEQ ID NO: 113472 - RNA, 19 nt, Artificial Sequence
  Description of Artificial Sequence: Synthetic oligonucleotide
cacagucucuugucuagcu

SEQ ID NO: 113473 - RNA, 19 nt, Artificial Sequence
  Description of Artificial Sequence: Synthetic oligonucleotide
uggcuaccccaugguaucu

SEQ ID NO: 113474 - RNA, 19 nt, Artificial Sequence
  Description of Artificial Sequence: Synthetic oligonucleotide
cauuauguccuggcagcaa

SEQ ID NO: 113475 - RNA, 19 nt, Artificial Sequence
  Description of Artificial Sequence: Synthetic oligonucleotide
aguugcggauugagcggag

SEQ ID NO: 113476 - RNA, 19 nt, Artificial Sequence
  Description of Artificial Sequence: Synthetic oligonucleotide
acccuguugcacgcaugag

SEQ ID NO: 113477 - RNA, 19 nt, Artificial Sequence
  Description of Artificial Sequence: Synthetic oligonucleotide
acgaaugggcccagccuga

SEQ ID NO: 113478 - RNA, 19 nt, Artificial Sequence
  Description of Artificial Sequence: Synthetic oligonucleotide
guugcacgcaugagcgaca

SEQ ID NO: 113479 - RNA, 19 nt, Artificial Sequence
  Description of Artificial Sequence: Synthetic oligonucleotide
guuugagagaaggccggcu

SEQ ID NO: 113480 - RNA, 19 nt, Artificial Sequence
  Description of Artificial Sequence: Synthetic oligonucleotide
aggcaccgccauuggcuug

SEQ ID NO: 113481 - RNA, 19 nt, Artificial Sequence
  Description of Artificial Sequence: Synthetic oligonucleotide
gccguacucaagauguauc

SEQ ID NO: 113482 - RNA, 19 nt, Artificial Sequence
  Description of Artificial Sequence: Synthetic oligonucleotide
caugagcgacaaacuuaga

SEQ ID NO: 113483 - RNA, 19 nt, Artificial Sequence
  Description of Artificial Sequence: Synthetic oligonucleotide
caucaggcguagaacuccu

SEQ ID NO: 113484 - RNA, 19 nt, Artificial Sequence
  Description of Artificial Sequence: Synthetic oligonucleotide
ugcacgcaugagcgacaaa

SEQ ID NO: 113485 - RNA, 19 nt, Artificial Sequence
  Description of Artificial Sequence: Synthetic oligonucleotide
gaggcacauugacagccau

SEQ ID NO: 113486 - RNA, 19 nt, Artificial Sequence
  Description of Artificial Sequence: Synthetic oligonucleotide
cgcccaaauguagauuagg

SEQ ID NO: 113487 - RNA, 19 nt, Artificial Sequence
  Description of Artificial Sequence: Synthetic oligonucleotide
cacuagagucucaguuaaa

SEQ ID NO: 113488 - RNA, 19 nt, Artificial Sequence
  Description of Artificial Sequence: Synthetic oligonucleotide
gagcccuccccuguaggaa

SEQ ID NO: 113489 - RNA, 19 nt, Artificial Sequence
  Description of Artificial Sequence: Synthetic oligonucleotide
ccauaauuugcgggaggac

SEQ ID NO: 113490 - RNA, 19 nt, Artificial Sequence
  Description of Artificial Sequence: Synthetic oligonucleotide
gcgggagagucuugggcac

SEQ ID NO: 113491 - RNA, 19 nt, Artificial Sequence
  Description of Artificial Sequence: Synthetic oligonucleotide
cccuagcggucucaauggg

SEQ ID NO: 113492 - RNA, 19 nt, Artificial Sequence
  Description of Artificial Sequence: Synthetic oligonucleotide
cagcgcgcagagccagagc

SEQ ID NO: 113493 - RNA, 19 nt, Artificial Sequence
  Description of Artificial Sequence: Synthetic oligonucleotide
agaggcgagugggagccua

SEQ ID NO: 113494 - RNA, 19 nt, Artificial Sequence
  Description of Artificial Sequence: Synthetic oligonucleotide
agaaggccggcuacgucua

SEQ ID NO: 113495 - RNA, 19 nt, Artificial Sequence
  Description of Artificial Sequence: Synthetic oligonucleotide
ccguacucaagauguaucu

SEQ ID NO: 113496 - RNA, 19 nt, Artificial Sequence
  Description of Artificial Sequence: Synthetic oligonucleotide
cagccuacuuacggaccac

SEQ ID NO: 113497 - RNA, 19 nt, Artificial Sequence
  Description of Artificial Sequence: Synthetic oligonucleotide
gguggcuaccccaugguau

SEQ ID NO: 113498 - RNA, 19 nt, Artificial Sequence
  Description of Artificial Sequence: Synthetic oligonucleotide
cuauggcacgucagccgaa

SEQ ID NO: 113499 - RNA, 19 nt, Artificial Sequence
  Description of Artificial Sequence: Synthetic oligonucleotide
ccuaccccuuggagaauac

SEQ ID NO: 113500 - RNA, 19 nt, Artificial Sequence
  Description of Artificial Sequence: Synthetic oligonucleotide
agccuacguuuuggcauca

SEQ ID NO: 113501 - RNA, 19 nt, Artificial Sequence
  Description of Artificial Sequence: Synthetic oligonucleotide
ggcuaccccaugguaucug

SEQ ID NO: 113502 - RNA, 19 nt, Artificial Sequence
  Description of Artificial Sequence: Synthetic oligonucleotide
caccgagugcugucucaga

SEQ ID NO: 113503 - RNA, 19 nt, Artificial Sequence
  Description of Artificial Sequence: Synthetic oligonucleotide
ccgugauaaagugaugucu

SEQ ID NO: 113504 - RNA, 19 nt, Artificial Sequence
  Description of Artificial Sequence: Synthetic oligonucleotide
ggccggcuacgucuaugcc

SEQ ID NO: 113505 - RNA, 19 nt, Artificial Sequence
  Description of Artificial Sequence: Synthetic oligonucleotide
gccuacuuacggaccacca

SEQ ID NO: 113506 - RNA, 19 nt, Artificial Sequence
  Description of Artificial Sequence: Synthetic oligonucleotide
ggaacaucguugagcuaaa

SEQ ID NO: 113507 - RNA, 19 nt, Artificial Sequence
  Description of Artificial Sequence: Synthetic oligonucleotide
caccggcuggagucagcuc

SEQ ID NO: 113508 - RNA, 19 nt, Artificial Sequence
  Description of Artificial Sequence: Synthetic oligonucleotide
cggauugagcggagcugcg

SEQ ID NO: 113509 - RNA, 19 nt, Artificial Sequence
  Description of Artificial Sequence: Synthetic oligonucleotide
ccuuggcugaaccuaccaa

SEQ ID NO: 113510 - RNA, 19 nt, Artificial Sequence
  Description of Artificial Sequence: Synthetic oligonucleotide
uccucuggucaggcucuau

SEQ ID NO: 113511 - RNA, 19 nt, Artificial Sequence
  Description of Artificial Sequence: Synthetic oligonucleotide
cgacaaacuuagagacaac

SEQ ID NO: 113512 - RNA, 19 nt, Artificial Sequence
  Description of Artificial Sequence: Synthetic oligonucleotide
gaacaucguugagcuaaau

SEQ ID NO: 113513 - RNA, 19 nt, Artificial Sequence
  Description of Artificial Sequence: Synthetic oligonucleotide
ccauuauguccuggcagca

SEQ ID NO: 113514 - RNA, 19 nt, Artificial Sequence
  Description of Artificial Sequence: Synthetic oligonucleotide
ccggcuacgucuaugccau

SEQ ID NO: 113515 - RNA, 19 nt, Artificial Sequence
  Description of Artificial Sequence: Synthetic oligonucleotide
ccaccgucucacaagcucu

SEQ ID NO: 113516 - RNA, 19 nt, Artificial Sequence
  Description of Artificial Sequence: Synthetic oligonucleotide
gcucuuccgaugucgcagu

SEQ ID NO: 113517 - RNA, 19 nt, Artificial Sequence
  Description of Artificial Sequence: Synthetic oligonucleotide
cagccguacucaagaugua

SEQ ID NO: 113518 - RNA, 19 nt, Artificial Sequence
  Description of Artificial Sequence: Synthetic oligonucleotide
cacgucagccgaagacccu

SEQ ID NO: 113519 - RNA, 19 nt, Artificial Sequence
  Description of Artificial Sequence: Synthetic oligonucleotide
auccuaccccuuggagaau

SEQ ID NO: 113520 - RNA, 19 nt, Artificial Sequence
  Description of Artificial Sequence: Synthetic oligonucleotide
gccuacguuuuggcaucag

SEQ ID NO: 113521 - RNA, 19 nt, Artificial Sequence
  Description of Artificial Sequence: Synthetic oligonucleotide
agcucccgacugccagauu

SEQ ID NO: 113522 - RNA, 19 nt, Artificial Sequence
  Description of Artificial Sequence: Synthetic oligonucleotide
gaaggccggcuacgucuau

SEQ ID NO: 113523 - RNA, 19 nt, Artificial Sequence
  Description of Artificial Sequence: Synthetic oligonucleotide
caacccuagcggucucaau

SEQ ID NO: 113524 - RNA, 19 nt, Artificial Sequence
  Description of Artificial Sequence: Synthetic oligonucleotide
gcggucucaauggguaagu

SEQ ID NO: 113525 - RNA, 19 nt, Artificial Sequence
  Description of Artificial Sequence: Synthetic oligonucleotide
ggucggaguugcggauuga

SEQ ID NO: 113526 - RNA, 19 nt, Artificial Sequence
  Description of Artificial Sequence: Synthetic oligonucleotide
cagcucccgacugccagau

SEQ ID NO: 113527 - RNA, 19 nt, Artificial Sequence
  Description of Artificial Sequence: Synthetic oligonucleotide
ccauuggauuaaguagcgu

SEQ ID NO: 113528 - RNA, 19 nt, Artificial Sequence
  Description of Artificial Sequence: Synthetic oligonucleotide
ccgcaccucucccgccgag

SEQ ID NO: 113529 - RNA, 19 nt, Artificial Sequence
  Description of Artificial Sequence: Synthetic oligonucleotide
cgccagcgcgcagagccag

SEQ ID NO: 113530 - RNA, 19 nt, Artificial Sequence
  Description of Artificial Sequence: Synthetic oligonucleotide
gcgggucggaguugcggau

SEQ ID NO: 113531 - RNA, 19 nt, Artificial Sequence
  Description of Artificial Sequence: Synthetic oligonucleotide
ggaccccagucaacugacu

SEQ ID NO: 113532 - RNA, 19 nt, Artificial Sequence
  Description of Artificial Sequence: Synthetic oligonucleotide
gccagcgcgcagagccaga

SEQ ID NO: 113533 - RNA, 19 nt, Artificial Sequence
  Description of Artificial Sequence: Synthetic oligonucleotide
cccgcaccucucccgccga

SEQ ID NO: 113534 - RNA, 19 nt, Artificial Sequence
  Description of Artificial Sequence: Synthetic oligonucleotide
ggccaccgucucacaagcu

SEQ ID NO: 113535 - RNA, 19 nt, Artificial Sequence
  Description of Artificial Sequence: Synthetic oligonucleotide
ccgaugcugucgcccaaau

SEQ ID NO: 113536 - RNA, 19 nt, Artificial Sequence
  Description of Artificial Sequence: Synthetic oligonucleotide
cccgacugccagauuccuu

SEQ ID NO: 113537 - RNA, 19 nt, Artificial Sequence
  Description of Artificial Sequence: Synthetic oligonucleotide
cggcuacgucuaugccauc

SEQ ID NO: 113538 - RNA, 19 nt, Artificial Sequence
  Description of Artificial Sequence: Synthetic oligonucleotide
gcgggccgacucugcugau

SEQ ID NO: 113539 - RNA, 19 nt, Artificial Sequence
  Description of Artificial Sequence: Synthetic oligonucleotide
cgggucggaguugcggauu

SEQ ID NO: 113540 - RNA, 19 nt, Artificial Sequence
  Description of Artificial Sequence: Synthetic oligonucleotide
cgggccgacucugcugauu

SEQ ID NO: 113541 - RNA, 19 nt, Artificial Sequence
  Description of Artificial Sequence: Synthetic oligonucleotide
aauauuaggcucuagaugc

SEQ ID NO: 113542 - RNA, 19 nt, Artificial Sequence
  Description of Artificial Sequence: Synthetic oligonucleotide
auuuuaacgaaguacaagc

SEQ ID NO: 113543 - RNA, 19 nt, Artificial Sequence
  Description of Artificial Sequence: Synthetic oligonucleotide
uauaauaaagguuuaaggc

SEQ ID NO: 113544 - RNA, 19 nt, Artificial Sequence
  Description of Artificial Sequence: Synthetic oligonucleotide
auuuagacuacuuuuaauc

SEQ ID NO: 113545 - RNA, 19 nt, Artificial Sequence
  Description of Artificial Sequence: Synthetic oligonucleotide
cuuacaacacugaagaucc

SEQ ID NO: 113546 - RNA, 19 nt, Artificial Sequence
  Description of Artificial Sequence: Synthetic oligonucleotide
cuuguaucaaccuaaagac

SEQ ID NO: 113547 - RNA, 19 nt, Artificial Sequence
  Description of Artificial Sequence: Synthetic oligonucleotide
uguaucaaccuaaagacga

SEQ ID NO: 113548 - RNA, 19 nt, Artificial Sequence
  Description of Artificial Sequence: Synthetic oligonucleotide
acucaguucagauacauuc

SEQ ID NO: 113549 - RNA, 19 nt, Artificial Sequence
  Description of Artificial Sequence: Synthetic oligonucleotide
aauugcagcgaacacgacg

SEQ ID NO: 113550 - RNA, 19 nt, Artificial Sequence
  Description of Artificial Sequence: Synthetic oligonucleotide
auaguaagauguuaguaac

SEQ ID NO: 113551 - RNA, 19 nt, Artificial Sequence
  Description of Artificial Sequence: Synthetic oligonucleotide
uauaauauuaggcucuaga

SEQ ID NO: 113552 - RNA, 19 nt, Artificial Sequence
  Description of Artificial Sequence: Synthetic oligonucleotide
gaagucaaauacuugagug

SEQ ID NO: 113553 - RNA, 19 nt, Artificial Sequence
  Description of Artificial Sequence: Synthetic oligonucleotide
uuugucacgauccaugaug

SEQ ID NO: 113554 - RNA, 19 nt, Artificial Sequence
  Description of Artificial Sequence: Synthetic oligonucleotide
uaauauuaggcucuagaug

SEQ ID NO: 113555 - RNA, 19 nt, Artificial Sequence
  Description of Artificial Sequence: Synthetic oligonucleotide
aacccauaaacucaguuca

SEQ ID NO: 113556 - RNA, 19 nt, Artificial Sequence
  Description of Artificial Sequence: Synthetic oligonucleotide
gaacuuauuaugaagggag

SEQ ID NO: 113557 - RNA, 19 nt, Artificial Sequence
  Description of Artificial Sequence: Synthetic oligonucleotide
uaacuaauugaucuggugu

SEQ ID NO: 113558 - RNA, 19 nt, Artificial Sequence
  Description of Artificial Sequence: Synthetic oligonucleotide
uaaaagucaaaacucggcu

SEQ ID NO: 113559 - RNA, 19 nt, Artificial Sequence
  Description of Artificial Sequence: Synthetic oligonucleotide
acuguaauuaaauguguag

SEQ ID NO: 113560 - RNA, 19 nt, Artificial Sequence
  Description of Artificial Sequence: Synthetic oligonucleotide
aauacuccuauguaguuau

SEQ ID NO: 113561 - RNA, 19 nt, Artificial Sequence
  Description of Artificial Sequence: Synthetic oligonucleotide
uucacuaagauguuacaca

SEQ ID NO: 113562 - RNA, 19 nt, Artificial Sequence
  Description of Artificial Sequence: Synthetic oligonucleotide
cuaaauacgcaguggaccc

SEQ ID NO: 113563 - RNA, 19 nt, Artificial Sequence
  Description of Artificial Sequence: Synthetic oligonucleotide
aaucauuacacaugaacuu

SEQ ID NO: 113564 - RNA, 19 nt, Artificial Sequence
  Description of Artificial Sequence: Synthetic oligonucleotide
guugcaaagcaguaaagcc

SEQ ID NO: 113565 - RNA, 19 nt, Artificial Sequence
  Description of Artificial Sequence: Synthetic oligonucleotide
uguguaugcuaacagcugc

SEQ ID NO: 113566 - RNA, 19 nt, Artificial Sequence
  Description of Artificial Sequence: Synthetic oligonucleotide
uuguaucaaccuaaagacg

SEQ ID NO: 113567 - RNA, 19 nt, Artificial Sequence
  Description of Artificial Sequence: Synthetic oligonucleotide
uacaauacuccuauguagu

SEQ ID NO: 113568 - RNA, 19 nt, Artificial Sequence
  Description of Artificial Sequence: Synthetic oligonucleotide
ugaguuaguugcaaagcag

SEQ ID NO: 113569 - RNA, 19 nt, Artificial Sequence
  Description of Artificial Sequence: Synthetic oligonucleotide
uguguagucagccaugguc

SEQ ID NO: 113570 - RNA, 19 nt, Artificial Sequence
  Description of Artificial Sequence: Synthetic oligonucleotide
uggauaacccauaaacuca

SEQ ID NO: 113571 - RNA, 19 nt, Artificial Sequence
  Description of Artificial Sequence: Synthetic oligonucleotide
auaauauuaggcucuagau

SEQ ID NO: 113572 - RNA, 19 nt, Artificial Sequence
  Description of Artificial Sequence: Synthetic oligonucleotide
augauguauuucuacacag

SEQ ID NO: 113573 - RNA, 19 nt, Artificial Sequence
  Description of Artificial Sequence: Synthetic oligonucleotide
acaccagucauauagggcu

SEQ ID NO: 113574 - RNA, 19 nt, Artificial Sequence
  Description of Artificial Sequence: Synthetic oligonucleotide
ucauauaaucuuugucacg

SEQ ID NO: 113575 - RNA, 19 nt, Artificial Sequence
  Description of Artificial Sequence: Synthetic oligonucleotide
uauuggccuauuuuaacag

SEQ ID NO: 113576 - RNA, 19 nt, Artificial Sequence
  Description of Artificial Sequence: Synthetic oligonucleotide
uuuuaacgaaguacaagca

SEQ ID NO: 113577 - RNA, 19 nt, Artificial Sequence
  Description of Artificial Sequence: Synthetic oligonucleotide
uuaacgaaguacaagcaua

SEQ ID NO: 113578 - RNA, 19 nt, Artificial Sequence
  Description of Artificial Sequence: Synthetic oligonucleotide
aacuuauuaugaagggagc

SEQ ID NO: 113579 - RNA, 19 nt, Artificial Sequence
  Description of Artificial Sequence: Synthetic oligonucleotide
agucucaugaucagaaccc

SEQ ID NO: 113580 - RNA, 19 nt, Artificial Sequence
  Description of Artificial Sequence: Synthetic oligonucleotide
agauguuacacaaaggugu

SEQ ID NO: 113581 - RNA, 19 nt, Artificial Sequence
  Description of Artificial Sequence: Synthetic oligonucleotide
uuuauuucggacacauccu

SEQ ID NO: 113582 - RNA, 19 nt, Artificial Sequence
  Description of Artificial Sequence: Synthetic oligonucleotide
cuagaauguaguaauucac

SEQ ID NO: 113583 - RNA, 19 nt, Artificial Sequence
  Description of Artificial Sequence: Synthetic oligonucleotide
aacuaauuuagacuacuuu

SEQ ID NO: 113584 - RNA, 19 nt, Artificial Sequence
  Description of Artificial Sequence: Synthetic oligonucleotide
ucuuucuaacaauugcagc

SEQ ID NO: 113585 - RNA, 19 nt, Artificial Sequence
  Description of Artificial Sequence: Synthetic oligonucleotide
uuguuuagcuaugacaccc

SEQ ID NO: 113586 - RNA, 19 nt, Artificial Sequence
  Description of Artificial Sequence: Synthetic oligonucleotide
aacacgacgagaacaacag

SEQ ID NO: 113587 - RNA, 19 nt, Artificial Sequence
  Description of Artificial Sequence: Synthetic oligonucleotide
auauggggaagacugaaca

SEQ ID NO: 113588 - RNA, 19 nt, Artificial Sequence
  Description of Artificial Sequence: Synthetic oligonucleotide
ucuuuguguaucucagcgg

SEQ ID NO: 113589 - RNA, 19 nt, Artificial Sequence
  Description of Artificial Sequence: Synthetic oligonucleotide
gacgagaacaacaggaagc

SEQ ID NO: 113590 - RNA, 19 nt, Artificial Sequence
  Description of Artificial Sequence: Synthetic oligonucleotide
aacuccccuacaauguucc

SEQ ID NO: 113591 - RNA, 19 nt, Artificial Sequence
  Description of Artificial Sequence: Synthetic oligonucleotide
aaucuauuaccgcuccaug

SEQ ID NO: 113592 - RNA, 19 nt, Artificial Sequence
  Description of Artificial Sequence: Synthetic oligonucleotide
ucuauuaccgcuccauguc

SEQ ID NO: 113593 - RNA, 19 nt, Artificial Sequence
  Description of Artificial Sequence: Synthetic oligonucleotide
auauauaauauuaggcucu

SEQ ID NO: 113594 - RNA, 19 nt, Artificial Sequence
  Description of Artificial Sequence: Synthetic oligonucleotide
ucacuaagauguuacacaa

SEQ ID NO: 113595 - RNA, 19 nt, Artificial Sequence
  Description of Artificial Sequence: Synthetic oligonucleotide
uuuguguaagaaauuuaaa

SEQ ID NO: 113596 - RNA, 19 nt, Artificial Sequence
  Description of Artificial Sequence: Synthetic oligonucleotide
ugcacgaguauauaguaaa

SEQ ID NO: 113597 - RNA, 19 nt, Artificial Sequence
  Description of Artificial Sequence: Synthetic oligonucleotide
cauaguaagauguuaguaa

SEQ ID NO: 113598 - RNA, 19 nt, Artificial Sequence
  Description of Artificial Sequence: Synthetic oligonucleotide
uaacccauaaacucaguuc

SEQ ID NO: 113599 - RNA, 19 nt, Artificial Sequence
  Description of Artificial Sequence: Synthetic oligonucleotide
uuauuaugaagggagcugu

SEQ ID NO: 113600 - RNA, 19 nt, Artificial Sequence
  Description of Artificial Sequence: Synthetic oligonucleotide
ugccaggcauuuuagaggc

SEQ ID NO: 113601 - RNA, 19 nt, Artificial Sequence
  Description of Artificial Sequence: Synthetic oligonucleotide
uuuucggcuauacauugaa

SEQ ID NO: 113602 - RNA, 19 nt, Artificial Sequence
  Description of Artificial Sequence: Synthetic oligonucleotide
ucucaugaucagaaccccg

SEQ ID NO: 113603 - RNA, 19 nt, Artificial Sequence
  Description of Artificial Sequence: Synthetic oligonucleotide
ugaacuuauuaugaaggga

SEQ ID NO: 113604 - RNA, 19 nt, Artificial Sequence
  Description of Artificial Sequence: Synthetic oligonucleotide
uuauacaccaugacucuuc

SEQ ID NO: 113605 - RNA, 19 nt, Artificial Sequence
  Description of Artificial Sequence: Synthetic oligonucleotide
acugaugcggucucuguag

SEQ ID NO: 113606 - RNA, 19 nt, Artificial Sequence
  Description of Artificial Sequence: Synthetic oligonucleotide
acgaguauauaguaaagua

SEQ ID NO: 113607 - RNA, 19 nt, Artificial Sequence
  Description of Artificial Sequence: Synthetic oligonucleotide
ugcuggaggcuaaauacgc

SEQ ID NO: 113608 - RNA, 19 nt, Artificial Sequence
  Description of Artificial Sequence: Synthetic oligonucleotide
cauauaaucuuugucacga

SEQ ID NO: 113609 - RNA, 19 nt, Artificial Sequence
  Description of Artificial Sequence: Synthetic oligonucleotide
gccauaaaaguguuuaugc

SEQ ID NO: 113610 - RNA, 19 nt, Artificial Sequence
  Description of Artificial Sequence: Synthetic oligonucleotide
auaugugucuguuguuuag

SEQ ID NO: 113611 - RNA, 19 nt, Artificial Sequence
  Description of Artificial Sequence: Synthetic oligonucleotide
aaaaguguuuaugccgcag

SEQ ID NO: 113612 - RNA, 19 nt, Artificial Sequence
  Description of Artificial Sequence: Synthetic oligonucleotide
guaacuaauugaucuggug

SEQ ID NO: 113613 - RNA, 19 nt, Artificial Sequence
  Description of Artificial Sequence: Synthetic oligonucleotide
uaacgaaguacaagcauau

SEQ ID NO: 113614 - RNA, 19 nt, Artificial Sequence
  Description of Artificial Sequence: Synthetic oligonucleotide
uggacuggcucuaauagua

SEQ ID NO: 113615 - RNA, 19 nt, Artificial Sequence
  Description of Artificial Sequence: Synthetic oligonucleotide
uaaacgcuguucuggaaca

SEQ ID NO: 113616 - RNA, 19 nt, Artificial Sequence
  Description of Artificial Sequence: Synthetic oligonucleotide
aggaaugcauaguaagaug

SEQ ID NO: 113617 - RNA, 19 nt, Artificial Sequence
  Description of Artificial Sequence: Synthetic oligonucleotide
guaaacgcuguucuggaac

SEQ ID NO: 113618 - RNA, 19 nt, Artificial Sequence
  Description of Artificial Sequence: Synthetic oligonucleotide
aucuauuaccgcuccaugu

SEQ ID NO: 113619 - RNA, 19 nt, Artificial Sequence
  Description of Artificial Sequence: Synthetic oligonucleotide
aguaagauguuaguaacau

SEQ ID NO: 113620 - RNA, 19 nt, Artificial Sequence
  Description of Artificial Sequence: Synthetic oligonucleotide
cuuauuaugaagggagcug

SEQ ID NO: 113621 - RNA, 19 nt, Artificial Sequence
  Description of Artificial Sequence: Synthetic oligonucleotide
uuaucacuuuauuucggac

SEQ ID NO: 113622 - RNA, 19 nt, Artificial Sequence
  Description of Artificial Sequence: Synthetic oligonucleotide
uugucacgauccaugaugu

SEQ ID NO: 113623 - RNA, 19 nt, Artificial Sequence
  Description of Artificial Sequence: Synthetic oligonucleotide
cuauuaccgcuccaugucg

SEQ ID NO: 113624 - RNA, 19 nt, Artificial Sequence
  Description of Artificial Sequence: Synthetic oligonucleotide
ggaaguauuacccagcucu

SEQ ID NO: 113625 - RNA, 19 nt, Artificial Sequence
  Description of Artificial Sequence: Synthetic oligonucleotide
uugaguguaacaguuccac

SEQ ID NO: 113626 - RNA, 19 nt, Artificial Sequence
  Description of Artificial Sequence: Synthetic oligonucleotide
uguuuagcuaugacacccc

SEQ ID NO: 113627 - RNA, 19 nt, Artificial Sequence
  Description of Artificial Sequence: Synthetic oligonucleotide
acgagauagcauuuauuug

SEQ ID NO: 113628 - RNA, 19 nt, Artificial Sequence
  Description of Artificial Sequence: Synthetic oligonucleotide
ugccaucacacacaugugu

SEQ ID NO: 113629 - RNA, 19 nt, Artificial Sequence
  Description of Artificial Sequence: Synthetic oligonucleotide
agugaagugaggcuuggaa

SEQ ID NO: 113630 - RNA, 19 nt, Artificial Sequence
  Description of Artificial Sequence: Synthetic oligonucleotide
uauuaccgcuccaugucgc

SEQ ID NO: 113631 - RNA, 19 nt, Artificial Sequence
  Description of Artificial Sequence: Synthetic oligonucleotide
cuuuguguaucucagcgga

SEQ ID NO: 113632 - RNA, 19 nt, Artificial Sequence
  Description of Artificial Sequence: Synthetic oligonucleotide
acaauugcagcgaacacga

SEQ ID NO: 113633 - RNA, 19 nt, Artificial Sequence
  Description of Artificial Sequence: Synthetic oligonucleotide
aauugacauugcugccaac

SEQ ID NO: 113634 - RNA, 19 nt, Artificial Sequence
  Description of Artificial Sequence: Synthetic oligonucleotide
aucuuucuaacaauugcag

SEQ ID NO: 113635 - RNA, 19 nt, Artificial Sequence
  Description of Artificial Sequence: Synthetic oligonucleotide
uuaucaaagacaggcaauu

SEQ ID NO: 113636 - RNA, 19 nt, Artificial Sequence
  Description of Artificial Sequence: Synthetic oligonucleotide
aggcuaaauacgcagugga

SEQ ID NO: 113637 - RNA, 19 nt, Artificial Sequence
  Description of Artificial Sequence: Synthetic oligonucleotide
auugcagcgaacacgacga

SEQ ID NO: 113638 - RNA, 19 nt, Artificial Sequence
  Description of Artificial Sequence: Synthetic oligonucleotide
aaaacucggcugcacgagu

SEQ ID NO: 113639 - RNA, 19 nt, Artificial Sequence
  Description of Artificial Sequence: Synthetic oligonucleotide
ugcuauuggccuauuuuaa

SEQ ID NO: 113640 - RNA, 19 nt, Artificial Sequence
  Description of Artificial Sequence: Synthetic oligonucleotide
cacgacgagaacaacagga

SEQ ID NO: 113641 - RNA, 19 nt, Artificial Sequence
  Description of Artificial Sequence: Synthetic oligonucleotide
gacgagauagcauuuauuu

SEQ ID NO: 113642 - RNA, 19 nt, Artificial Sequence
  Description of Artificial Sequence: Synthetic oligonucleotide
ugguggaguuacauuaaga

SEQ ID NO: 113643 - RNA, 19 nt, Artificial Sequence
  Description of Artificial Sequence: Synthetic oligonucleotide
acuuauuaugaagggagcu

SEQ ID NO: 113644 - RNA, 19 nt, Artificial Sequence
  Description of Artificial Sequence: Synthetic oligonucleotide
uacuccuauguaguuauca

SEQ ID NO: 113645 - RNA, 19 nt, Artificial Sequence
  Description of Artificial Sequence: Synthetic oligonucleotide
uggguuuguagguuugcug

SEQ ID NO: 113646 - RNA, 19 nt, Artificial Sequence
  Description of Artificial Sequence: Synthetic oligonucleotide
aaaauaccuaacugcugua

SEQ ID NO: 113647 - RNA, 19 nt, Artificial Sequence
  Description of Artificial Sequence: Synthetic oligonucleotide
aguauuacccagcucuuuu

SEQ ID NO: 113648 - RNA, 19 nt, Artificial Sequence
  Description of Artificial Sequence: Synthetic oligonucleotide
aagauguuaguaacauuga

SEQ ID NO: 113649 - RNA, 19 nt, Artificial Sequence
  Description of Artificial Sequence: Synthetic oligonucleotide
uguaugcuaacagcugcag

SEQ ID NO: 113650 - RNA, 19 nt, Artificial Sequence
  Description of Artificial Sequence: Synthetic oligonucleotide
ggaaugacaaucccugggc

SEQ ID NO: 113651 - RNA, 19 nt, Artificial Sequence
  Description of Artificial Sequence: Synthetic oligonucleotide
aguuaucacuuuauuucgg

SEQ ID NO: 113652 - RNA, 19 nt, Artificial Sequence
  Description of Artificial Sequence: Synthetic oligonucleotide
ugggaaugacaaucccugg

SEQ ID NO: 113653 - RNA, 19 nt, Artificial Sequence
  Description of Artificial Sequence: Synthetic oligonucleotide
uaucacuaauaaucuuucu

SEQ ID NO: 113654 - RNA, 19 nt, Artificial Sequence
  Description of Artificial Sequence: Synthetic oligonucleotide
cacaccagucauauagggc

SEQ ID NO: 113655 - RNA, 19 nt, Artificial Sequence
  Description of Artificial Sequence: Synthetic oligonucleotide
augcuauuggccuauuuua

SEQ ID NO: 113656 - RNA, 19 nt, Artificial Sequence
  Description of Artificial Sequence: Synthetic oligonucleotide
gcuaaauacgcaguggacc

SEQ ID NO: 113657 - RNA, 19 nt, Artificial Sequence
  Description of Artificial Sequence: Synthetic oligonucleotide
uguuccaagcugacuugcc

SEQ ID NO: 113658 - RNA, 19 nt, Artificial Sequence
  Description of Artificial Sequence: Synthetic oligonucleotide
aggacaauccacacugagg

SEQ ID NO: 113659 - RNA, 19 nt, Artificial Sequence
  Description of Artificial Sequence: Synthetic oligonucleotide
ugggguugucuaaaauagc

SEQ ID NO: 113660 - RNA, 19 nt, Artificial Sequence
  Description of Artificial Sequence: Synthetic oligonucleotide
agcuacacagaaucuauua

SEQ ID NO: 113661 - RNA, 19 nt, Artificial Sequence
  Description of Artificial Sequence: Synthetic oligonucleotide
ugaguguaacaguuccaca

SEQ ID NO: 113662 - RNA, 19 nt, Artificial Sequence
  Description of Artificial Sequence: Synthetic oligonucleotide
cuaaagacgagauagcauu

SEQ ID NO: 113663 - RNA, 19 nt, Artificial Sequence
  Description of Artificial Sequence: Synthetic oligonucleotide
uaaaaguguuuaugccgca

SEQ ID NO: 113664 - RNA, 19 nt, Artificial Sequence
  Description of Artificial Sequence: Synthetic oligonucleotide
ugauccauucuaugaguuc

SEQ ID NO: 113665 - RNA, 19 nt, Artificial Sequence
  Description of Artificial Sequence: Synthetic oligonucleotide
gaacacgacgagaacaaca

SEQ ID NO: 113666 - RNA, 19 nt, Artificial Sequence
  Description of Artificial Sequence: Synthetic oligonucleotide
uaaagacgagauagcauuu

SEQ ID NO: 113667 - RNA, 19 nt, Artificial Sequence
  Description of Artificial Sequence: Synthetic oligonucleotide
acauugaguuccaaacauc

SEQ ID NO: 113668 - RNA, 19 nt, Artificial Sequence
  Description of Artificial Sequence: Synthetic oligonucleotide
gaguguaacaguuccacau

SEQ ID NO: 113669 - RNA, 19 nt, Artificial Sequence
  Description of Artificial Sequence: Synthetic oligonucleotide
guagguuugcugaaccuug

SEQ ID NO: 113670 - RNA, 19 nt, Artificial Sequence
  Description of Artificial Sequence: Synthetic oligonucleotide
ugaggacucaggucucaag

SEQ ID NO: 113671 - RNA, 19 nt, Artificial Sequence
  Description of Artificial Sequence: Synthetic oligonucleotide
auuucggacacauccuuuu

SEQ ID NO: 113672 - RNA, 19 nt, Artificial Sequence
  Description of Artificial Sequence: Synthetic oligonucleotide
uucggacacauccuuuuau

SEQ ID NO: 113673 - RNA, 19 nt, Artificial Sequence
  Description of Artificial Sequence: Synthetic oligonucleotide
gggguugucuaaaauagcc

SEQ ID NO: 113674 - RNA, 19 nt, Artificial Sequence
  Description of Artificial Sequence: Synthetic oligonucleotide
aaacgcuguucuggaacac

SEQ ID NO: 113675 - RNA, 19 nt, Artificial Sequence
  Description of Artificial Sequence: Synthetic oligonucleotide
agcgaacacgacgagaaca

SEQ ID NO: 113676 - RNA, 19 nt, Artificial Sequence
  Description of Artificial Sequence: Synthetic oligonucleotide
ugguagaccaacucuccau

SEQ ID NO: 113677 - RNA, 19 nt, Artificial Sequence
  Description of Artificial Sequence: Synthetic oligonucleotide
aguguaacaguuccacaua

SEQ ID NO: 113678 - RNA, 19 nt, Artificial Sequence
  Description of Artificial Sequence: Synthetic oligonucleotide
uuuaugccgcagagcacug

SEQ ID NO: 113679 - RNA, 19 nt, Artificial Sequence
  Description of Artificial Sequence: Synthetic oligonucleotide
agcugacuugccuaaaaua

SEQ ID NO: 113680 - RNA, 19 nt, Artificial Sequence
  Description of Artificial Sequence: Synthetic oligonucleotide
acacgacgagaacaacagg

SEQ ID NO: 113681 - RNA, 19 nt, Artificial Sequence
  Description of Artificial Sequence: Synthetic oligonucleotide
uacaacacugaagauccau

SEQ ID NO: 113682 - RNA, 19 nt, Artificial Sequence
  Description of Artificial Sequence: Synthetic oligonucleotide
uguagguuugcugaaccuu

SEQ ID NO: 113683 - RNA, 19 nt, Artificial Sequence
  Description of Artificial Sequence: Synthetic oligonucleotide
cucuauucauauauaauau

SEQ ID NO: 113684 - RNA, 19 nt, Artificial Sequence
  Description of Artificial Sequence: Synthetic oligonucleotide
gguagaccaacucuccaug

SEQ ID NO: 113685 - RNA, 19 nt, Artificial Sequence
  Description of Artificial Sequence: Synthetic oligonucleotide
guaucaaccuaaagacgag

SEQ ID NO: 113686 - RNA, 19 nt, Artificial Sequence
  Description of Artificial Sequence: Synthetic oligonucleotide
ggauaacccauaaacucag

SEQ ID NO: 113687 - RNA, 19 nt, Artificial Sequence
  Description of Artificial Sequence: Synthetic oligonucleotide
ugaugcggucucuguagcc

SEQ ID NO: 113688 - RNA, 19 nt, Artificial Sequence
  Description of Artificial Sequence: Synthetic oligonucleotide
gugcuggaggcuaaauacg

SEQ ID NO: 113689 - RNA, 19 nt, Artificial Sequence
  Description of Artificial Sequence: Synthetic oligonucleotide
uuacugaugcggucucugu

SEQ ID NO: 113690 - RNA, 19 nt, Artificial Sequence
  Description of Artificial Sequence: Synthetic oligonucleotide
ggaggcuaaauacgcagug

SEQ ID NO: 113691 - RNA, 19 nt, Artificial Sequence
  Description of Artificial Sequence: Synthetic oligonucleotide
auauaauauuaggcucuag

SEQ ID NO: 113692 - RNA, 19 nt, Artificial Sequence
  Description of Artificial Sequence: Synthetic oligonucleotide
cgagauagcauuuauuuga

SEQ ID NO: 113693 - RNA, 19 nt, Artificial Sequence
  Description of Artificial Sequence: Synthetic oligonucleotide
uaaauacgcaguggacccc

SEQ ID NO: 113694 - RNA, 19 nt, Artificial Sequence
  Description of Artificial Sequence: Synthetic oligonucleotide
aguaacuaauugaucuggu

SEQ ID NO: 113695 - RNA, 19 nt, Artificial Sequence
  Description of Artificial Sequence: Synthetic oligonucleotide
uguaaacgcuguucuggaa

SEQ ID NO: 113696 - RNA, 19 nt, Artificial Sequence
  Description of Artificial Sequence: Synthetic oligonucleotide
acaccaugacucuucuaga

SEQ ID NO: 113697 - RNA, 19 nt, Artificial Sequence
  Description of Artificial Sequence: Synthetic oligonucleotide
cugguggaguuacauuaag

SEQ ID NO: 113698 - RNA, 19 nt, Artificial Sequence
  Description of Artificial Sequence: Synthetic oligonucleotide
gacuugccuaaaauacaag

SEQ ID NO: 113699 - RNA, 19 nt, Artificial Sequence
  Description of Artificial Sequence: Synthetic oligonucleotide
ugugagcaucaucugcaau

SEQ ID NO: 113700 - RNA, 19 nt, Artificial Sequence
  Description of Artificial Sequence: Synthetic oligonucleotide
cuguaauuaaauguguagu

SEQ ID NO: 113701 - RNA, 19 nt, Artificial Sequence
  Description of Artificial Sequence: Synthetic oligonucleotide
aucagccugugguuaauaa

SEQ ID NO: 113702 - RNA, 19 nt, Artificial Sequence
  Description of Artificial Sequence: Synthetic oligonucleotide
agagaagacuguaauuaaa

SEQ ID NO: 113703 - RNA, 19 nt, Artificial Sequence
  Description of Artificial Sequence: Synthetic oligonucleotide
uuucggacacauccuuuua

SEQ ID NO: 113704 - RNA, 19 nt, Artificial Sequence
  Description of Artificial Sequence: Synthetic oligonucleotide
gucgccauaaaaguguuua

SEQ ID NO: 113705 - RNA, 19 nt, Artificial Sequence
  Description of Artificial Sequence: Synthetic oligonucleotide
acuaauugaucugguguaa

SEQ ID NO: 113706 - RNA, 19 nt, Artificial Sequence
  Description of Artificial Sequence: Synthetic oligonucleotide
cuugaguguaacaguucca

SEQ ID NO: 113707 - RNA, 19 nt, Artificial Sequence
  Description of Artificial Sequence: Synthetic oligonucleotide
gcuauuggccuauuuuaac

SEQ ID NO: 113708 - RNA, 19 nt, Artificial Sequence
  Description of Artificial Sequence: Synthetic oligonucleotide
uauuaggcucuagaugcau

SEQ ID NO: 113709 - RNA, 19 nt, Artificial Sequence
  Description of Artificial Sequence: Synthetic oligonucleotide
guuuagcuaugacacccca

SEQ ID NO: 113710 - RNA, 19 nt, Artificial Sequence
  Description of Artificial Sequence: Synthetic oligonucleotide
gacucaggucucaaggaca

SEQ ID NO: 113711 - RNA, 19 nt, Artificial Sequence
  Description of Artificial Sequence: Synthetic oligonucleotide
agauagcauuuauuugaaa

SEQ ID NO: 113712 - RNA, 19 nt, Artificial Sequence
  Description of Artificial Sequence: Synthetic oligonucleotide
acucauuugcauagcaaau

SEQ ID NO: 113713 - RNA, 19 nt, Artificial Sequence
  Description of Artificial Sequence: Synthetic oligonucleotide
cugaugcggucucuguagc

SEQ ID NO: 113714 - RNA, 19 nt, Artificial Sequence
  Description of Artificial Sequence: Synthetic oligonucleotide
aacucggcugcacgaguau

SEQ ID NO: 113715 - RNA, 19 nt, Artificial Sequence
  Description of Artificial Sequence: Synthetic oligonucleotide
ccauucuaugaguucuucc

SEQ ID NO: 113716 - RNA, 19 nt, Artificial Sequence
  Description of Artificial Sequence: Synthetic oligonucleotide
auguggacuggcucuaaua

SEQ ID NO: 113717 - RNA, 19 nt, Artificial Sequence
  Description of Artificial Sequence: Synthetic oligonucleotide
ggaaugcauaguaagaugu

SEQ ID NO: 113718 - RNA, 19 nt, Artificial Sequence
  Description of Artificial Sequence: Synthetic oligonucleotide
gguuaauaaagagaagacu

SEQ ID NO: 113719 - RNA, 19 nt, Artificial Sequence
  Description of Artificial Sequence: Synthetic oligonucleotide
ccggaaaccaucccugagg

SEQ ID NO: 113720 - RNA, 19 nt, Artificial Sequence
  Description of Artificial Sequence: Synthetic oligonucleotide
ugcagcgaacacgacgaga

SEQ ID NO: 113721 - RNA, 19 nt, Artificial Sequence
  Description of Artificial Sequence: Synthetic oligonucleotide
aaguauuacccagcucuuu

SEQ ID NO: 113722 - RNA, 19 nt, Artificial Sequence
  Description of Artificial Sequence: Synthetic oligonucleotide
uagcuaugacaccccacau

SEQ ID NO: 113723 - RNA, 19 nt, Artificial Sequence
  Description of Artificial Sequence: Synthetic oligonucleotide
aaguugccaaugugagcau

SEQ ID NO: 113724 - RNA, 19 nt, Artificial Sequence
  Description of Artificial Sequence: Synthetic oligonucleotide
ucgccauaaaaguguuuau

SEQ ID NO: 113725 - RNA, 19 nt, Artificial Sequence
  Description of Artificial Sequence: Synthetic oligonucleotide
cuguagccggugcacgccg

SEQ ID NO: 113726 - RNA, 19 nt, Artificial Sequence
  Description of Artificial Sequence: Synthetic oligonucleotide
auacucauuugcauagcaa

SEQ ID NO: 113727 - RNA, 19 nt, Artificial Sequence
  Description of Artificial Sequence: Synthetic oligonucleotide
acgauccaugauguauuuc

SEQ ID NO: 113728 - RNA, 19 nt, Artificial Sequence
  Description of Artificial Sequence: Synthetic oligonucleotide
acuggcucuaauaguauuu

SEQ ID NO: 113729 - RNA, 19 nt, Artificial Sequence
  Description of Artificial Sequence: Synthetic oligonucleotide
uguagccggugcacgccgc

SEQ ID NO: 113730 - RNA, 19 nt, Artificial Sequence
  Description of Artificial Sequence: Synthetic oligonucleotide
cuuuucggcuauacauuga

SEQ ID NO: 113731 - RNA, 19 nt, Artificial Sequence
  Description of Artificial Sequence: Synthetic oligonucleotide
uugcagcgaacacgacgag

SEQ ID NO: 113732 - RNA, 19 nt, Artificial Sequence
  Description of Artificial Sequence: Synthetic oligonucleotide
augaucaaguugguguuuu

SEQ ID NO: 113733 - RNA, 19 nt, Artificial Sequence
  Description of Artificial Sequence: Synthetic oligonucleotide
aguuaguugcaaagcagua

SEQ ID NO: 113734 - RNA, 19 nt, Artificial Sequence
  Description of Artificial Sequence: Synthetic oligonucleotide
aacgaaguacaagcauaua

SEQ ID NO: 113735 - RNA, 19 nt, Artificial Sequence
  Description of Artificial Sequence: Synthetic oligonucleotide
aaacucggcugcacgagua

SEQ ID NO: 113736 - RNA, 19 nt, Artificial Sequence
  Description of Artificial Sequence: Synthetic oligonucleotide
auguguggugucaggaaga

SEQ ID NO: 113737 - RNA, 19 nt, Artificial Sequence
  Description of Artificial Sequence: Synthetic oligonucleotide
agagcaugguagaccaacu

SEQ ID NO: 113738 - RNA, 19 nt, Artificial Sequence
  Description of Artificial Sequence: Synthetic oligonucleotide
cuccuauguaguuaucacu

SEQ ID NO: 113739 - RNA, 19 nt, Artificial Sequence
  Description of Artificial Sequence: Synthetic oligonucleotide
ucacuuuauuucggacaca

SEQ ID NO: 113740 - RNA, 19 nt, Artificial Sequence
  Description of Artificial Sequence: Synthetic oligonucleotide
aaucagccugugguuaaua

SEQ ID NO: 113741 - RNA, 19 nt, Artificial Sequence
  Description of Artificial Sequence: Synthetic oligonucleotide
acccauaaacucaguucag

SEQ ID NO: 113742 - RNA, 19 nt, Artificial Sequence
  Description of Artificial Sequence: Synthetic oligonucleotide
acgacgagaacaacaggaa

SEQ ID NO: 113743 - RNA, 19 nt, Artificial Sequence
  Description of Artificial Sequence: Synthetic oligonucleotide
agcauaccccaaauaauua

SEQ ID NO: 113744 - RNA, 19 nt, Artificial Sequence
  Description of Artificial Sequence: Synthetic oligonucleotide
guguaugcuaacagcugca

SEQ ID NO: 113745 - RNA, 19 nt, Artificial Sequence
  Description of Artificial Sequence: Synthetic oligonucleotide
gugggugguucaccacggg

SEQ ID NO: 113746 - RNA, 19 nt, Artificial Sequence
  Description of Artificial Sequence: Synthetic oligonucleotide
agccugugguuaauaaaga

SEQ ID NO: 113747 - RNA, 19 nt, Artificial Sequence
  Description of Artificial Sequence: Synthetic oligonucleotide
cugcacgaguauauaguaa

SEQ ID NO: 113748 - RNA, 19 nt, Artificial Sequence
  Description of Artificial Sequence: Synthetic oligonucleotide
cacgaguauauaguaaagu

SEQ ID NO: 113749 - RNA, 19 nt, Artificial Sequence
  Description of Artificial Sequence: Synthetic oligonucleotide
ugucgccauaaaaguguuu

SEQ ID NO: 113750 - RNA, 19 nt, Artificial Sequence
  Description of Artificial Sequence: Synthetic oligonucleotide
gcagcgaacacgacgagaa

SEQ ID NO: 113751 - RNA, 19 nt, Artificial Sequence
  Description of Artificial Sequence: Synthetic oligonucleotide
agacgagauagcauuuauu

SEQ ID NO: 113752 - RNA, 19 nt, Artificial Sequence
  Description of Artificial Sequence: Synthetic oligonucleotide
gugcacgccgcagucauuc

SEQ ID NO: 113753 - RNA, 19 nt, Artificial Sequence
  Description of Artificial Sequence: Synthetic oligonucleotide
gcugcacgaguauauagua

SEQ ID NO: 113754 - RNA, 19 nt, Artificial Sequence
  Description of Artificial Sequence: Synthetic oligonucleotide
caauugcagcgaacacgac

SEQ ID NO: 113755 - RNA, 19 nt, Artificial Sequence
  Description of Artificial Sequence: Synthetic oligonucleotide
auacuccuauguaguuauc

SEQ ID NO: 113756 - RNA, 19 nt, Artificial Sequence
  Description of Artificial Sequence: Synthetic oligonucleotide
ggcuaaauacgcaguggac

SEQ ID NO: 113757 - RNA, 19 nt, Artificial Sequence
  Description of Artificial Sequence: Synthetic oligonucleotide
guaagauguuaguaacauu

SEQ ID NO: 113758 - RNA, 19 nt, Artificial Sequence
  Description of Artificial Sequence: Synthetic oligonucleotide
cgaaguacaagcauauacu

SEQ ID NO: 113759 - RNA, 19 nt, Artificial Sequence
  Description of Artificial Sequence: Synthetic oligonucleotide
guggacuggcucuaauagu

SEQ ID NO: 113760 - RNA, 19 nt, Artificial Sequence
  Description of Artificial Sequence: Synthetic oligonucleotide
cgacgagaacaacaggaag

SEQ ID NO: 113761 - RNA, 19 nt, Artificial Sequence
  Description of Artificial Sequence: Synthetic oligonucleotide
gacuggcucuaauaguauu

SEQ ID NO: 113762 - RNA, 19 nt, Artificial Sequence
  Description of Artificial Sequence: Synthetic oligonucleotide
cuuauaugugucuguuguu

SEQ ID NO: 113763 - RNA, 19 nt, Artificial Sequence
  Description of Artificial Sequence: Synthetic oligonucleotide
cagcgaacacgacgagaac

SEQ ID NO: 113764 - RNA, 19 nt, Artificial Sequence
  Description of Artificial Sequence: Synthetic oligonucleotide
ggcauuuuagaggcuuauc

SEQ ID NO: 113765 - RNA, 19 nt, Artificial Sequence
  Description of Artificial Sequence: Synthetic oligonucleotide
ucggcugcacgaguauaua

SEQ ID NO: 113766 - RNA, 19 nt, Artificial Sequence
  Description of Artificial Sequence: Synthetic oligonucleotide
cacgggccggagagcagag

SEQ ID NO: 113767 - RNA, 19 nt, Artificial Sequence
  Description of Artificial Sequence: Synthetic oligonucleotide
ggcaccggaaaccaucccu

SEQ ID NO: 113768 - RNA, 19 nt, Artificial Sequence
  Description of Artificial Sequence: Synthetic oligonucleotide
gguuaaucagccugugguu

SEQ ID NO: 113769 - RNA, 19 nt, Artificial Sequence
  Description of Artificial Sequence: Synthetic oligonucleotide
gcgaacacgacgagaacaa

SEQ ID NO: 113770 - RNA, 19 nt, Artificial Sequence
  Description of Artificial Sequence: Synthetic oligonucleotide
augucgccauaaaaguguu

SEQ ID NO: 113771 - RNA, 19 nt, Artificial Sequence
  Description of Artificial Sequence: Synthetic oligonucleotide
guagccggugcacgccgca

SEQ ID NO: 113772 - RNA, 19 nt, Artificial Sequence
  Description of Artificial Sequence: Synthetic oligonucleotide
gccgcagucauucuuugau

SEQ ID NO: 113773 - RNA, 19 nt, Artificial Sequence
  Description of Artificial Sequence: Synthetic oligonucleotide
ccauuacugaugcggucuc

SEQ ID NO: 113774 - RNA, 19 nt, Artificial Sequence
  Description of Artificial Sequence: Synthetic oligonucleotide
cucggcugcacgaguauau

SEQ ID NO: 113775 - RNA, 19 nt, Artificial Sequence
  Description of Artificial Sequence: Synthetic oligonucleotide
cggcugcacgaguauauag

SEQ ID NO: 113776 - RNA, 19 nt, Artificial Sequence
  Description of Artificial Sequence: Synthetic oligonucleotide
gaaccccgagggcugugua

SEQ ID NO: 113777 - RNA, 19 nt, Artificial Sequence
  Description of Artificial Sequence: Synthetic oligonucleotide
cuuugucacgauccaugau

SEQ ID NO: 113778 - RNA, 19 nt, Artificial Sequence
  Description of Artificial Sequence: Synthetic oligonucleotide
cuuauacaccaugacucuu

SEQ ID NO: 113779 - RNA, 19 nt, Artificial Sequence
  Description of Artificial Sequence: Synthetic oligonucleotide
cacgccgcagucauucuuu

SEQ ID NO: 113780 - RNA, 19 nt, Artificial Sequence
  Description of Artificial Sequence: Synthetic oligonucleotide
cugaggacucaggucucaa

SEQ ID NO: 113781 - RNA, 19 nt, Artificial Sequence
  Description of Artificial Sequence: Synthetic oligonucleotide
cagcuacacagaaucuauu

SEQ ID NO: 113782 - RNA, 19 nt, Artificial Sequence
  Description of Artificial Sequence: Synthetic oligonucleotide
cccacauaucacuaauaau

SEQ ID NO: 113783 - RNA, 19 nt, Artificial Sequence
  Description of Artificial Sequence: Synthetic oligonucleotide
caugaucaaguugguguuu

SEQ ID NO: 113784 - RNA, 19 nt, Artificial Sequence
  Description of Artificial Sequence: Synthetic oligonucleotide
gccggugcacgccgcaguc

SEQ ID NO: 113785 - RNA, 19 nt, Artificial Sequence
  Description of Artificial Sequence: Synthetic oligonucleotide
cgaacacgacgagaacaac

SEQ ID NO: 113786 - RNA, 19 nt, Artificial Sequence
  Description of Artificial Sequence: Synthetic oligonucleotide
gcgucugguuuugugcugu

SEQ ID NO: 113787 - RNA, 19 nt, Artificial Sequence
  Description of Artificial Sequence: Synthetic oligonucleotide
ccacgggccggagagcaga

SEQ ID NO: 113788 - RNA, 19 nt, Artificial Sequence
  Description of Artificial Sequence: Synthetic oligonucleotide
gccgcagagcacugcuccu

SEQ ID NO: 113789 - RNA, 19 nt, Artificial Sequence
  Description of Artificial Sequence: Synthetic oligonucleotide
gcacgccgcagucauucuu

SEQ ID NO: 113790 - RNA, 19 nt, Artificial Sequence
  Description of Artificial Sequence: Synthetic oligonucleotide
cggugcacgccgcagucau

SEQ ID NO: 113791 - RNA, 19 nt, Artificial Sequence
  Description of Artificial Sequence: Synthetic oligonucleotide
aauugaguuaauuggauac

SEQ ID NO: 113792 - RNA, 19 nt, Artificial Sequence
  Description of Artificial Sequence: Synthetic oligonucleotide
cauucuaaguuuaagaagg

SEQ ID NO: 113793 - RNA, 19 nt, Artificial Sequence
  Description of Artificial Sequence: Synthetic oligonucleotide
aacuacgucuuccagaaac

SEQ ID NO: 113794 - RNA, 19 nt, Artificial Sequence
  Description of Artificial Sequence: Synthetic oligonucleotide
uauuggaugauaagcaggg

SEQ ID NO: 113795 - RNA, 19 nt, Artificial Sequence
  Description of Artificial Sequence: Synthetic oligonucleotide
agugaaauggcaaagacuc

SEQ ID NO: 113796 - RNA, 19 nt, Artificial Sequence
  Description of Artificial Sequence: Synthetic oligonucleotide
uaacccuucacccuuauag

SEQ ID NO: 113797 - RNA, 19 nt, Artificial Sequence
  Description of Artificial Sequence: Synthetic oligonucleotide
aaguugauaaccaacccgc

SEQ ID NO: 113798 - RNA, 19 nt, Artificial Sequence
  Description of Artificial Sequence: Synthetic oligonucleotide
uaaaacagacguaaggugc

SEQ ID NO: 113799 - RNA, 19 nt, Artificial Sequence
  Description of Artificial Sequence: Synthetic oligonucleotide
aaggaagucgaucucaaag

SEQ ID NO: 113800 - RNA, 19 nt, Artificial Sequence
  Description of Artificial Sequence: Synthetic oligonucleotide
uuagucaccaguuaauaag

SEQ ID NO: 113801 - RNA, 19 nt, Artificial Sequence
  Description of Artificial Sequence: Synthetic oligonucleotide
aaggaugauaacugcgugc

SEQ ID NO: 113802 - RNA, 19 nt, Artificial Sequence
  Description of Artificial Sequence: Synthetic oligonucleotide
aauauuagucaccaguuaa

SEQ ID NO: 113803 - RNA, 19 nt, Artificial Sequence
  Description of Artificial Sequence: Synthetic oligonucleotide
gaaguugauaaccaacccg

SEQ ID NO: 113804 - RNA, 19 nt, Artificial Sequence
  Description of Artificial Sequence: Synthetic oligonucleotide
aaugcuaacaagcacuaaa

SEQ ID NO: 113805 - RNA, 19 nt, Artificial Sequence
  Description of Artificial Sequence: Synthetic oligonucleotide
uucuauuucagucacuccu

SEQ ID NO: 113806 - RNA, 19 nt, Artificial Sequence
  Description of Artificial Sequence: Synthetic oligonucleotide
gaguuaauuggauaccgcg

SEQ ID NO: 113807 - RNA, 19 nt, Artificial Sequence
  Description of Artificial Sequence: Synthetic oligonucleotide
aaugucccggucuucuucc

SEQ ID NO: 113808 - RNA, 19 nt, Artificial Sequence
  Description of Artificial Sequence: Synthetic oligonucleotide
ucauucuaaguuuaagaag

SEQ ID NO: 113809 - RNA, 19 nt, Artificial Sequence
  Description of Artificial Sequence: Synthetic oligonucleotide
uugacuuaacccuucaccc

SEQ ID NO: 113810 - RNA, 19 nt, Artificial Sequence
  Description of Artificial Sequence: Synthetic oligonucleotide
uuaaaacagacguaaggug

SEQ ID NO: 113811 - RNA, 19 nt, Artificial Sequence
  Description of Artificial Sequence: Synthetic oligonucleotide
uccuuguuagaaaacauga

SEQ ID NO: 113812 - RNA, 19 nt, Artificial Sequence
  Description of Artificial Sequence: Synthetic oligonucleotide
aagcauaugaugguguuuc

SEQ ID NO: 113813 - RNA, 19 nt, Artificial Sequence
  Description of Artificial Sequence: Synthetic oligonucleotide
ucuaggaaguaccacgucc

SEQ ID NO: 113814 - RNA, 19 nt, Artificial Sequence
  Description of Artificial Sequence: Synthetic oligonucleotide
agaagguaaaagcauauga

SEQ ID NO: 113815 - RNA, 19 nt, Artificial Sequence
  Description of Artificial Sequence: Synthetic oligonucleotide
uugauaaccaacccgcuca

SEQ ID NO: 113816 - RNA, 19 nt, Artificial Sequence
  Description of Artificial Sequence: Synthetic oligonucleotide
agugagaagggaaaugugc

SEQ ID NO: 113817 - RNA, 19 nt, Artificial Sequence
  Description of Artificial Sequence: Synthetic oligonucleotide
uguauuggaugauaagcag

SEQ ID NO: 113818 - RNA, 19 nt, Artificial Sequence
  Description of Artificial Sequence: Synthetic oligonucleotide
agguaaaagcauaugaugg

SEQ ID NO: 113819 - RNA, 19 nt, Artificial Sequence
  Description of Artificial Sequence: Synthetic oligonucleotide
uuaauauuagucaccaguu

SEQ ID NO: 113820 - RNA, 19 nt, Artificial Sequence
  Description of Artificial Sequence: Synthetic oligonucleotide
uguaugaacucaaggauuc

SEQ ID NO: 113821 - RNA, 19 nt, Artificial Sequence
  Description of Artificial Sequence: Synthetic oligonucleotide
ugguuaaggaugauaacug

SEQ ID NO: 113822 - RNA, 19 nt, Artificial Sequence
  Description of Artificial Sequence: Synthetic oligonucleotide
aaggccgccucuuggaggc

SEQ ID NO: 113823 - RNA, 19 nt, Artificial Sequence
  Description of Artificial Sequence: Synthetic oligonucleotide
uuagugaaauggcaaagac

SEQ ID NO: 113824 - RNA, 19 nt, Artificial Sequence
  Description of Artificial Sequence: Synthetic oligonucleotide
uugugguuaaggaugauaa

SEQ ID NO: 113825 - RNA, 19 nt, Artificial Sequence
  Description of Artificial Sequence: Synthetic oligonucleotide
uugaguuaauuggauaccg

SEQ ID NO: 113826 - RNA, 19 nt, Artificial Sequence
  Description of Artificial Sequence: Synthetic oligonucleotide
uuaagaagggagagcagcc

SEQ ID NO: 113827 - RNA, 19 nt, Artificial Sequence
  Description of Artificial Sequence: Synthetic oligonucleotide
gaauacacccuucugcuug

SEQ ID NO: 113828 - RNA, 19 nt, Artificial Sequence
  Description of Artificial Sequence: Synthetic oligonucleotide
aaaacgcccaggacgaagc

SEQ ID NO: 113829 - RNA, 19 nt, Artificial Sequence
  Description of Artificial Sequence: Synthetic oligonucleotide
aguuuaagaagggagagca

SEQ ID NO: 113830 - RNA, 19 nt, Artificial Sequence
  Description of Artificial Sequence: Synthetic oligonucleotide
acucaaggauuccacauuc

SEQ ID NO: 113831 - RNA, 19 nt, Artificial Sequence
  Description of Artificial Sequence: Synthetic oligonucleotide
auaaauucuaaugcuaaca

SEQ ID NO: 113832 - RNA, 19 nt, Artificial Sequence
  Description of Artificial Sequence: Synthetic oligonucleotide
uuaauugaguuaauuggau

SEQ ID NO: 113833 - RNA, 19 nt, Artificial Sequence
  Description of Artificial Sequence: Synthetic oligonucleotide
uuccuuguuagaaaacaug

SEQ ID NO: 113834 - RNA, 19 nt, Artificial Sequence
  Description of Artificial Sequence: Synthetic oligonucleotide
ugcuaacaagcacuaaaag

SEQ ID NO: 113835 - RNA, 19 nt, Artificial Sequence
  Description of Artificial Sequence: Synthetic oligonucleotide
aaaccacauguauucuggg

SEQ ID NO: 113836 - RNA, 19 nt, Artificial Sequence
  Description of Artificial Sequence: Synthetic oligonucleotide
ugccagaaagaauacccgg

SEQ ID NO: 113837 - RNA, 19 nt, Artificial Sequence
  Description of Artificial Sequence: Synthetic oligonucleotide
cucaacacucagcugaucc

SEQ ID NO: 113838 - RNA, 19 nt, Artificial Sequence
  Description of Artificial Sequence: Synthetic oligonucleotide
acccuucacccuuauaggc

SEQ ID NO: 113839 - RNA, 19 nt, Artificial Sequence
  Description of Artificial Sequence: Synthetic oligonucleotide
aauuggauaccgcgucagg

SEQ ID NO: 113840 - RNA, 19 nt, Artificial Sequence
  Description of Artificial Sequence: Synthetic oligonucleotide
uucuuacucccucugaagu

SEQ ID NO: 113841 - RNA, 19 nt, Artificial Sequence
  Description of Artificial Sequence: Synthetic oligonucleotide
agucuucggacuccgaagg

SEQ ID NO: 113842 - RNA, 19 nt, Artificial Sequence
  Description of Artificial Sequence: Synthetic oligonucleotide
gaagucagaggcauuagug

SEQ ID NO: 113843 - RNA, 19 nt, Artificial Sequence
  Description of Artificial Sequence: Synthetic oligonucleotide
uaaggaugauaacugcgug

SEQ ID NO: 113844 - RNA, 19 nt, Artificial Sequence
  Description of Artificial Sequence: Synthetic oligonucleotide
aagucgaucucaaaguugu

SEQ ID NO: 113845 - RNA, 19 nt, Artificial Sequence
  Description of Artificial Sequence: Synthetic oligonucleotide
auaaccaacccgcucacca

SEQ ID NO: 113846 - RNA, 19 nt, Artificial Sequence
  Description of Artificial Sequence: Synthetic oligonucleotide
gacguaaggugcuuuagac

SEQ ID NO: 113847 - RNA, 19 nt, Artificial Sequence
  Description of Artificial Sequence: Synthetic oligonucleotide
agcacuaaaagugucugag

SEQ ID NO: 113848 - RNA, 19 nt, Artificial Sequence
  Description of Artificial Sequence: Synthetic oligonucleotide
cuuauaggcagcgugugcc

SEQ ID NO: 113849 - RNA, 19 nt, Artificial Sequence
  Description of Artificial Sequence: Synthetic oligonucleotide
agauaagaaacaaaagccu

SEQ ID NO: 113850 - RNA, 19 nt, Artificial Sequence
  Description of Artificial Sequence: Synthetic oligonucleotide
aucuacauucagugugugc

SEQ ID NO: 113851 - RNA, 19 nt, Artificial Sequence
  Description of Artificial Sequence: Synthetic oligonucleotide
ugaguuaauuggauaccgc

SEQ ID NO: 113852 - RNA, 19 nt, Artificial Sequence
  Description of Artificial Sequence: Synthetic oligonucleotide
uuuccauagaggaucccca

SEQ ID NO: 113853 - RNA, 19 nt, Artificial Sequence
  Description of Artificial Sequence: Synthetic oligonucleotide
aagacgaucucuaggaagu

SEQ ID NO: 113854 - RNA, 19 nt, Artificial Sequence
  Description of Artificial Sequence: Synthetic oligonucleotide
ugagugagaagggaaaugu

SEQ ID NO: 113855 - RNA, 19 nt, Artificial Sequence
  Description of Artificial Sequence: Synthetic oligonucleotide
gaugcgacgguagagcugc

SEQ ID NO: 113856 - RNA, 19 nt, Artificial Sequence
  Description of Artificial Sequence: Synthetic oligonucleotide
uucuaaugcuaacaagcac

SEQ ID NO: 113857 - RNA, 19 nt, Artificial Sequence
  Description of Artificial Sequence: Synthetic oligonucleotide
gagcgaguaggccaggcgg

SEQ ID NO: 113858 - RNA, 19 nt, Artificial Sequence
  Description of Artificial Sequence: Synthetic oligonucleotide
gauagcugcaacugucccc

SEQ ID NO: 113859 - RNA, 19 nt, Artificial Sequence
  Description of Artificial Sequence: Synthetic oligonucleotide
guuaauuggauaccgcguc

SEQ ID NO: 113860 - RNA, 19 nt, Artificial Sequence
  Description of Artificial Sequence: Synthetic oligonucleotide
aagugucucuuucccucgc

SEQ ID NO: 113861 - RNA, 19 nt, Artificial Sequence
  Description of Artificial Sequence: Synthetic oligonucleotide
agaagcgcuguauuggaug

SEQ ID NO: 113862 - RNA, 19 nt, Artificial Sequence
  Description of Artificial Sequence: Synthetic oligonucleotide
gacagggacaagcugcgag

SEQ ID NO: 113863 - RNA, 19 nt, Artificial Sequence
  Description of Artificial Sequence: Synthetic oligonucleotide
aaccacauguauucugggu

SEQ ID NO: 113864 - RNA, 19 nt, Artificial Sequence
  Description of Artificial Sequence: Synthetic oligonucleotide
gugaagagagugcacuccg

SEQ ID NO: 113865 - RNA, 19 nt, Artificial Sequence
  Description of Artificial Sequence: Synthetic oligonucleotide
ucaacacucagcugauccc

SEQ ID NO: 113866 - RNA, 19 nt, Artificial Sequence
  Description of Artificial Sequence: Synthetic oligonucleotide
gugaauuagggaaggacag

SEQ ID NO: 113867 - RNA, 19 nt, Artificial Sequence
  Description of Artificial Sequence: Synthetic oligonucleotide
ugccuuuacuuuuaacucu

SEQ ID NO: 113868 - RNA, 19 nt, Artificial Sequence
  Description of Artificial Sequence: Synthetic oligonucleotide
cuguauuggaugauaagca

SEQ ID NO: 113869 - RNA, 19 nt, Artificial Sequence
  Description of Artificial Sequence: Synthetic oligonucleotide
agaaagaauacccgguuuu

SEQ ID NO: 113870 - RNA, 19 nt, Artificial Sequence
  Description of Artificial Sequence: Synthetic oligonucleotide
ugggugaaguugauaacca

SEQ ID NO: 113871 - RNA, 19 nt, Artificial Sequence
  Description of Artificial Sequence: Synthetic oligonucleotide
uaauugaguuaauuggaua

SEQ ID NO: 113872 - RNA, 19 nt, Artificial Sequence
  Description of Artificial Sequence: Synthetic oligonucleotide
uccuucgcaguacaggaga

SEQ ID NO: 113873 - RNA, 19 nt, Artificial Sequence
  Description of Artificial Sequence: Synthetic oligonucleotide
cugggugaaguugauaacc

SEQ ID NO: 113874 - RNA, 19 nt, Artificial Sequence
  Description of Artificial Sequence: Synthetic oligonucleotide
cugcgggcaggcuugaucg

SEQ ID NO: 113875 - RNA, 19 nt, Artificial Sequence
  Description of Artificial Sequence: Synthetic oligonucleotide
augguguuucccaaggaac

SEQ ID NO: 113876 - RNA, 19 nt, Artificial Sequence
  Description of Artificial Sequence: Synthetic oligonucleotide
uacggguguucaaucacag

SEQ ID NO: 113877 - RNA, 19 nt, Artificial Sequence
  Description of Artificial Sequence: Synthetic oligonucleotide
cuuuccauagaggaucccc

SEQ ID NO: 113878 - RNA, 19 nt, Artificial Sequence
  Description of Artificial Sequence: Synthetic oligonucleotide
aggccuaugagggcaaagc

SEQ ID NO: 113879 - RNA, 19 nt, Artificial Sequence
  Description of Artificial Sequence: Synthetic oligonucleotide
uuacggguguucaaucaca

SEQ ID NO: 113880 - RNA, 19 nt, Artificial Sequence
  Description of Artificial Sequence: Synthetic oligonucleotide
ugacaagcacugcagcccc

SEQ ID NO: 113881 - RNA, 19 nt, Artificial Sequence
  Description of Artificial Sequence: Synthetic oligonucleotide
uauugcucucagaagcgcu

SEQ ID NO: 113882 - RNA, 19 nt, Artificial Sequence
  Description of Artificial Sequence: Synthetic oligonucleotide
auuagugaaauggcaaaga

SEQ ID NO: 113883 - RNA, 19 nt, Artificial Sequence
  Description of Artificial Sequence: Synthetic oligonucleotide
uuucuauuucagucacucc

SEQ ID NO: 113884 - RNA, 19 nt, Artificial Sequence
  Description of Artificial Sequence: Synthetic oligonucleotide
ugagaagggaaaugugccu

SEQ ID NO: 113885 - RNA, 19 nt, Artificial Sequence
  Description of Artificial Sequence: Synthetic oligonucleotide
aucguagauagcugcaacu

SEQ ID NO: 113886 - RNA, 19 nt, Artificial Sequence
  Description of Artificial Sequence: Synthetic oligonucleotide
augacacuugccuggguag

SEQ ID NO: 113887 - RNA, 19 nt, Artificial Sequence
  Description of Artificial Sequence: Synthetic oligonucleotide
ucuaagugucucuuucccu

SEQ ID NO: 113888 - RNA, 19 nt, Artificial Sequence
  Description of Artificial Sequence: Synthetic oligonucleotide
uucgcaguacaggagaaac

SEQ ID NO: 113889 - RNA, 19 nt, Artificial Sequence
  Description of Artificial Sequence: Synthetic oligonucleotide
aacucaaggauuccacauu

SEQ ID NO: 113890 - RNA, 19 nt, Artificial Sequence
  Description of Artificial Sequence: Synthetic oligonucleotide
gauaacugcgugcuccuuc

SEQ ID NO: 113891 - RNA, 19 nt, Artificial Sequence
  Description of Artificial Sequence: Synthetic oligonucleotide
uaauuggauaccgcgucag

SEQ ID NO: 113892 - RNA, 19 nt, Artificial Sequence
  Description of Artificial Sequence: Synthetic oligonucleotide
augacuuuaaaagggccug

SEQ ID NO: 113893 - RNA, 19 nt, Artificial Sequence
  Description of Artificial Sequence: Synthetic oligonucleotide
gugagaagggaaaugugcc

SEQ ID NO: 113894 - RNA, 19 nt, Artificial Sequence
  Description of Artificial Sequence: Synthetic oligonucleotide
cuuaugucauugagguggc

SEQ ID NO: 113895 - RNA, 19 nt, Artificial Sequence
  Description of Artificial Sequence: Synthetic oligonucleotide
auggaggcgcuguaugaac

SEQ ID NO: 113896 - RNA, 19 nt, Artificial Sequence
  Description of Artificial Sequence: Synthetic oligonucleotide
gugugcuuaucucuaagac

SEQ ID NO: 113897 - RNA, 19 nt, Artificial Sequence
  Description of Artificial Sequence: Synthetic oligonucleotide
uggguagucugacaagcac

SEQ ID NO: 113898 - RNA, 19 nt, Artificial Sequence
  Description of Artificial Sequence: Synthetic oligonucleotide
uaccgcgucagguuacggg

SEQ ID NO: 113899 - RNA, 19 nt, Artificial Sequence
  Description of Artificial Sequence: Synthetic oligonucleotide
gaagucgaucucaaaguug

SEQ ID NO: 113900 - RNA, 19 nt, Artificial Sequence
  Description of Artificial Sequence: Synthetic oligonucleotide
ugacuuaacccuucacccu

SEQ ID NO: 113901 - RNA, 19 nt, Artificial Sequence
  Description of Artificial Sequence: Synthetic oligonucleotide
ugugaagccacugggccgc

SEQ ID NO: 113902 - RNA, 19 nt, Artificial Sequence
  Description of Artificial Sequence: Synthetic oligonucleotide
uuccauagaggauccccag

SEQ ID NO: 113903 - RNA, 19 nt, Artificial Sequence
  Description of Artificial Sequence: Synthetic oligonucleotide
cuccaugcugauucggugc

SEQ ID NO: 113904 - RNA, 19 nt, Artificial Sequence
  Description of Artificial Sequence: Synthetic oligonucleotide
auucuaaugcuaacaagca

SEQ ID NO: 113905 - RNA, 19 nt, Artificial Sequence
  Description of Artificial Sequence: Synthetic oligonucleotide
uuauaggcagcgugugccc

SEQ ID NO: 113906 - RNA, 19 nt, Artificial Sequence
  Description of Artificial Sequence: Synthetic oligonucleotide
cagauuugugaggugacag

SEQ ID NO: 113907 - RNA, 19 nt, Artificial Sequence
  Description of Artificial Sequence: Synthetic oligonucleotide
aggcacgcacagcagcucc

SEQ ID NO: 113908 - RNA, 19 nt, Artificial Sequence
  Description of Artificial Sequence: Synthetic oligonucleotide
agagcgaguaggccaggcg

SEQ ID NO: 113909 - RNA, 19 nt, Artificial Sequence
  Description of Artificial Sequence: Synthetic oligonucleotide
gguuaaggaugauaacugc

SEQ ID NO: 113910 - RNA, 19 nt, Artificial Sequence
  Description of Artificial Sequence: Synthetic oligonucleotide
guuccuucgcaguacagga

SEQ ID NO: 113911 - RNA, 19 nt, Artificial Sequence
  Description of Artificial Sequence: Synthetic oligonucleotide
ucgcaguacaggagaaacc

SEQ ID NO: 113912 - RNA, 19 nt, Artificial Sequence
  Description of Artificial Sequence: Synthetic oligonucleotide
cguaaggugcuuuagacac

SEQ ID NO: 113913 - RNA, 19 nt, Artificial Sequence
  Description of Artificial Sequence: Synthetic oligonucleotide
aggaaguaccacguccagc

SEQ ID NO: 113914 - RNA, 19 nt, Artificial Sequence
  Description of Artificial Sequence: Synthetic oligonucleotide
ugguccacccacaaaggaa

SEQ ID NO: 113915 - RNA, 19 nt, Artificial Sequence
  Description of Artificial Sequence: Synthetic oligonucleotide
uuauugcucucagaagcgc

SEQ ID NO: 113916 - RNA, 19 nt, Artificial Sequence
  Description of Artificial Sequence: Synthetic oligonucleotide
agcggcacccaugaagagc

SEQ ID NO: 113917 - RNA, 19 nt, Artificial Sequence
  Description of Artificial Sequence: Synthetic oligonucleotide
agcgugugcccuaugaauc

SEQ ID NO: 113918 - RNA, 19 nt, Artificial Sequence
  Description of Artificial Sequence: Synthetic oligonucleotide
agcucuugguugccguagc

SEQ ID NO: 113919 - RNA, 19 nt, Artificial Sequence
  Description of Artificial Sequence: Synthetic oligonucleotide
agagauucagugucucagu

SEQ ID NO: 113920 - RNA, 19 nt, Artificial Sequence
  Description of Artificial Sequence: Synthetic oligonucleotide
agguuacggguguucaauc

SEQ ID NO: 113921 - RNA, 19 nt, Artificial Sequence
  Description of Artificial Sequence: Synthetic oligonucleotide
aguuaauuggauaccgcgu

SEQ ID NO: 113922 - RNA, 19 nt, Artificial Sequence
  Description of Artificial Sequence: Synthetic oligonucleotide
guuacggguguucaaucac

SEQ ID NO: 113923 - RNA, 19 nt, Artificial Sequence
  Description of Artificial Sequence: Synthetic oligonucleotide
acguaaggugcuuuagaca

SEQ ID NO: 113924 - RNA, 19 nt, Artificial Sequence
  Description of Artificial Sequence: Synthetic oligonucleotide
acggguguucaaucacagc

SEQ ID NO: 113925 - RNA, 19 nt, Artificial Sequence
  Description of Artificial Sequence: Synthetic oligonucleotide
aaccguguuccuucgcagu

SEQ ID NO: 113926 - RNA, 19 nt, Artificial Sequence
  Description of Artificial Sequence: Synthetic oligonucleotide
agacguaaggugcuuuaga

SEQ ID NO: 113927 - RNA, 19 nt, Artificial Sequence
  Description of Artificial Sequence: Synthetic oligonucleotide
ugaauuagggaaggacaga

SEQ ID NO: 113928 - RNA, 19 nt, Artificial Sequence
  Description of Artificial Sequence: Synthetic oligonucleotide
guugauaaccaacccgcuc

SEQ ID NO: 113929 - RNA, 19 nt, Artificial Sequence
  Description of Artificial Sequence: Synthetic oligonucleotide
auuggauaccgcgucaggu

SEQ ID NO: 113930 - RNA, 19 nt, Artificial Sequence
  Description of Artificial Sequence: Synthetic oligonucleotide
ugauaaccaacccgcucac

SEQ ID NO: 113931 - RNA, 19 nt, Artificial Sequence
  Description of Artificial Sequence: Synthetic oligonucleotide
uuugcucuuggcucaaguu

SEQ ID NO: 113932 - RNA, 19 nt, Artificial Sequence
  Description of Artificial Sequence: Synthetic oligonucleotide
gaaagaauacccgguuuuc

SEQ ID NO: 113933 - RNA, 19 nt, Artificial Sequence
  Description of Artificial Sequence: Synthetic oligonucleotide
acauguauucuggguaguc

SEQ ID NO: 113934 - RNA, 19 nt, Artificial Sequence
  Description of Artificial Sequence: Synthetic oligonucleotide
ucccucuuagccagcaccu

SEQ ID NO: 113935 - RNA, 19 nt, Artificial Sequence
  Description of Artificial Sequence: Synthetic oligonucleotide
cagucuucggacuccgaag

SEQ ID NO: 113936 - RNA, 19 nt, Artificial Sequence
  Description of Artificial Sequence: Synthetic oligonucleotide
caagaaugucaggaugagg

SEQ ID NO: 113937 - RNA, 19 nt, Artificial Sequence
  Description of Artificial Sequence: Synthetic oligonucleotide
ggaacuacgucuuccagaa

SEQ ID NO: 113938 - RNA, 19 nt, Artificial Sequence
  Description of Artificial Sequence: Synthetic oligonucleotide
uccgaaggaagcugcuccc

SEQ ID NO: 113939 - RNA, 19 nt, Artificial Sequence
  Description of Artificial Sequence: Synthetic oligonucleotide
cuuacucccucugaaguuc

SEQ ID NO: 113940 - RNA, 19 nt, Artificial Sequence
  Description of Artificial Sequence: Synthetic oligonucleotide
ucuuacucccucugaaguu

SEQ ID NO: 113941 - RNA, 19 nt, Artificial Sequence
  Description of Artificial Sequence: Synthetic oligonucleotide
ugaagagagugcacuccgu

SEQ ID NO: 113942 - RNA, 19 nt, Artificial Sequence
  Description of Artificial Sequence: Synthetic oligonucleotide
accgcgucagguuacgggu

SEQ ID NO: 113943 - RNA, 19 nt, Artificial Sequence
  Description of Artificial Sequence: Synthetic oligonucleotide
ugaucggcuccccugggaa

SEQ ID NO: 113944 - RNA, 19 nt, Artificial Sequence
  Description of Artificial Sequence: Synthetic oligonucleotide
caucguagauagcugcaac

SEQ ID NO: 113945 - RNA, 19 nt, Artificial Sequence
  Description of Artificial Sequence: Synthetic oligonucleotide
ggggaagagauucaguguc

SEQ ID NO: 113946 - RNA, 19 nt, Artificial Sequence
  Description of Artificial Sequence: Synthetic oligonucleotide
cacccuuauaggcagcgug

SEQ ID NO: 113947 - RNA, 19 nt, Artificial Sequence
  Description of Artificial Sequence: Synthetic oligonucleotide
uccuaucagucuucggacu

SEQ ID NO: 113948 - RNA, 19 nt, Artificial Sequence
  Description of Artificial Sequence: Synthetic oligonucleotide
uggauaccgcgucagguua

SEQ ID NO: 113949 - RNA, 19 nt, Artificial Sequence
  Description of Artificial Sequence: Synthetic oligonucleotide
ucugacccuuugcaggacu

SEQ ID NO: 113950 - RNA, 19 nt, Artificial Sequence
  Description of Artificial Sequence: Synthetic oligonucleotide
acaagcacuaaaagugucu

SEQ ID NO: 113951 - RNA, 19 nt, Artificial Sequence
  Description of Artificial Sequence: Synthetic oligonucleotide
gugguuaaggaugauaacu

SEQ ID NO: 113952 - RNA, 19 nt, Artificial Sequence
  Description of Artificial Sequence: Synthetic oligonucleotide
caacccgcucaccacaaag

SEQ ID NO: 113953 - RNA, 19 nt, Artificial Sequence
  Description of Artificial Sequence: Synthetic oligonucleotide
uuacucccucugaaguuca

SEQ ID NO: 113954 - RNA, 19 nt, Artificial Sequence
  Description of Artificial Sequence: Synthetic oligonucleotide
ugcagccccuccuugacaa

SEQ ID NO: 113955 - RNA, 19 nt, Artificial Sequence
  Description of Artificial Sequence: Synthetic oligonucleotide
auauuagucaccaguuaau

SEQ ID NO: 113956 - RNA, 19 nt, Artificial Sequence
  Description of Artificial Sequence: Synthetic oligonucleotide
aaaguaggggccagguuaa

SEQ ID NO: 113957 - RNA, 19 nt, Artificial Sequence
  Description of Artificial Sequence: Synthetic oligonucleotide
cauagaggauccccagcag

SEQ ID NO: 113958 - RNA, 19 nt, Artificial Sequence
  Description of Artificial Sequence: Synthetic oligonucleotide
uacaucucuugcagggcgu

SEQ ID NO: 113959 - RNA, 19 nt, Artificial Sequence
  Description of Artificial Sequence: Synthetic oligonucleotide
gauaccgcgucagguuacg

SEQ ID NO: 113960 - RNA, 19 nt, Artificial Sequence
  Description of Artificial Sequence: Synthetic oligonucleotide
ggacaaaggggccagaucu

SEQ ID NO: 113961 - RNA, 19 nt, Artificial Sequence
  Description of Artificial Sequence: Synthetic oligonucleotide
uaaccaacccgcucaccac

SEQ ID NO: 113962 - RNA, 19 nt, Artificial Sequence
  Description of Artificial Sequence: Synthetic oligonucleotide
caaggccgccucuuggagg

SEQ ID NO: 113963 - RNA, 19 nt, Artificial Sequence
  Description of Artificial Sequence: Synthetic oligonucleotide
agaucuacauucagugugu

SEQ ID NO: 113964 - RNA, 19 nt, Artificial Sequence
  Description of Artificial Sequence: Synthetic oligonucleotide
agaauacccgguuuuccuu

SEQ ID NO: 113965 - RNA, 19 nt, Artificial Sequence
  Description of Artificial Sequence: Synthetic oligonucleotide
agcgaguaggccaggcggc

SEQ ID NO: 113966 - RNA, 19 nt, Artificial Sequence
  Description of Artificial Sequence: Synthetic oligonucleotide
aagcaaaaucugaccccac

SEQ ID NO: 113967 - RNA, 19 nt, Artificial Sequence
  Description of Artificial Sequence: Synthetic oligonucleotide
agauucagugucucaguuu

SEQ ID NO: 113968 - RNA, 19 nt, Artificial Sequence
  Description of Artificial Sequence: Synthetic oligonucleotide
agacagaagguaaaagcau

SEQ ID NO: 113969 - RNA, 19 nt, Artificial Sequence
  Description of Artificial Sequence: Synthetic oligonucleotide
augaggagcggggauccac

SEQ ID NO: 113970 - RNA, 19 nt, Artificial Sequence
  Description of Artificial Sequence: Synthetic oligonucleotide
ucuuggcucaaguuuuguu

SEQ ID NO: 113971 - RNA, 19 nt, Artificial Sequence
  Description of Artificial Sequence: Synthetic oligonucleotide
aacuagggaggacuuccuu

SEQ ID NO: 113972 - RNA, 19 nt, Artificial Sequence
  Description of Artificial Sequence: Synthetic oligonucleotide
uuaacucuggcugcagcau

SEQ ID NO: 113973 - RNA, 19 nt, Artificial Sequence
  Description of Artificial Sequence: Synthetic oligonucleotide
ucuucggacuccgaaggaa

SEQ ID NO: 113974 - RNA, 19 nt, Artificial Sequence
  Description of Artificial Sequence: Synthetic oligonucleotide
gaccccuguucucugccag

SEQ ID NO: 113975 - RNA, 19 nt, Artificial Sequence
  Description of Artificial Sequence: Synthetic oligonucleotide
cacguccagccgaugagag

SEQ ID NO: 113976 - RNA, 19 nt, Artificial Sequence
  Description of Artificial Sequence: Synthetic oligonucleotide
aggagcggggauccacugg

SEQ ID NO: 113977 - RNA, 19 nt, Artificial Sequence
  Description of Artificial Sequence: Synthetic oligonucleotide
aaacgcccaggacgaagcu

SEQ ID NO: 113978 - RNA, 19 nt, Artificial Sequence
  Description of Artificial Sequence: Synthetic oligonucleotide
agaagacgaucucuaggaa

SEQ ID NO: 113979 - RNA, 19 nt, Artificial Sequence
  Description of Artificial Sequence: Synthetic oligonucleotide
uugaucggcuccccuggga

SEQ ID NO: 113980 - RNA, 19 nt, Artificial Sequence
  Description of Artificial Sequence: Synthetic oligonucleotide
gacgaucucuaggaaguac

SEQ ID NO: 113981 - RNA, 19 nt, Artificial Sequence
  Description of Artificial Sequence: Synthetic oligonucleotide
aguacaggagaaaccacau

SEQ ID NO: 113982 - RNA, 19 nt, Artificial Sequence
  Description of Artificial Sequence: Synthetic oligonucleotide
cuaugagggcaaagccugc

SEQ ID NO: 113983 - RNA, 19 nt, Artificial Sequence
  Description of Artificial Sequence: Synthetic oligonucleotide
aacccgcucaccacaaaga

SEQ ID NO: 113984 - RNA, 19 nt, Artificial Sequence
  Description of Artificial Sequence: Synthetic oligonucleotide
cagaagguaaaagcauaug

SEQ ID NO: 113985 - RNA, 19 nt, Artificial Sequence
  Description of Artificial Sequence: Synthetic oligonucleotide
ggcguucacuuuuaaaaca

SEQ ID NO: 113986 - RNA, 19 nt, Artificial Sequence
  Description of Artificial Sequence: Synthetic oligonucleotide
accgcucacacauggucca

SEQ ID NO: 113987 - RNA, 19 nt, Artificial Sequence
  Description of Artificial Sequence: Synthetic oligonucleotide
augucccggucuucuuccc

SEQ ID NO: 113988 - RNA, 19 nt, Artificial Sequence
  Description of Artificial Sequence: Synthetic oligonucleotide
gccgaugggacccugggug

SEQ ID NO: 113989 - RNA, 19 nt, Artificial Sequence
  Description of Artificial Sequence: Synthetic oligonucleotide
uaggggccagguuaaguuc

SEQ ID NO: 113990 - RNA, 19 nt, Artificial Sequence
  Description of Artificial Sequence: Synthetic oligonucleotide
uuucaggugcaugcauggc

SEQ ID NO: 113991 - RNA, 19 nt, Artificial Sequence
  Description of Artificial Sequence: Synthetic oligonucleotide
caaaaucugaccccaccaa

SEQ ID NO: 113992 - RNA, 19 nt, Artificial Sequence
  Description of Artificial Sequence: Synthetic oligonucleotide
cuaugaaucuucucugccu

SEQ ID NO: 113993 - RNA, 19 nt, Artificial Sequence
  Description of Artificial Sequence: Synthetic oligonucleotide
acccuggcaaggcaccaag

SEQ ID NO: 113994 - RNA, 19 nt, Artificial Sequence
  Description of Artificial Sequence: Synthetic oligonucleotide
caaaguugugguuaaggau

SEQ ID NO: 113995 - RNA, 19 nt, Artificial Sequence
  Description of Artificial Sequence: Synthetic oligonucleotide
ucagguuacggguguucaa

SEQ ID NO: 113996 - RNA, 19 nt, Artificial Sequence
  Description of Artificial Sequence: Synthetic oligonucleotide
acuacgucuuccagaaacu

SEQ ID NO: 113997 - RNA, 19 nt, Artificial Sequence
  Description of Artificial Sequence: Synthetic oligonucleotide
acagacguaaggugcuuua

SEQ ID NO: 113998 - RNA, 19 nt, Artificial Sequence
  Description of Artificial Sequence: Synthetic oligonucleotide
cauggucgcugcucagggg

SEQ ID NO: 113999 - RNA, 19 nt, Artificial Sequence
  Description of Artificial Sequence: Synthetic oligonucleotide
gggcguucacuuuuaaaac

SEQ ID NO: 114000 - RNA, 19 nt, Artificial Sequence
  Description of Artificial Sequence: Synthetic oligonucleotide
aaacuagggaggacuuccu

SEQ ID NO: 114001 - RNA, 19 nt, Artificial Sequence
  Description of Artificial Sequence: Synthetic oligonucleotide
acugggccgcgucauucuc

SEQ ID NO: 114002 - RNA, 19 nt, Artificial Sequence
  Description of Artificial Sequence: Synthetic oligonucleotide
cucaagcagacagaaagaa

SEQ ID NO: 114003 - RNA, 19 nt, Artificial Sequence
  Description of Artificial Sequence: Synthetic oligonucleotide
gcgcuguaugaacucaagg

SEQ ID NO: 114004 - RNA, 19 nt, Artificial Sequence
  Description of Artificial Sequence: Synthetic oligonucleotide
acuccgaaggaagcugcuc

SEQ ID NO: 114005 - RNA, 19 nt, Artificial Sequence
  Description of Artificial Sequence: Synthetic oligonucleotide
acacuugccuggguagagg

SEQ ID NO: 114006 - RNA, 19 nt, Artificial Sequence
  Description of Artificial Sequence: Synthetic oligonucleotide
gauaaccaacccgcucacc

SEQ ID NO: 114007 - RNA, 19 nt, Artificial Sequence
  Description of Artificial Sequence: Synthetic oligonucleotide
caaaggaagucgaucucaa

SEQ ID NO: 114008 - RNA, 19 nt, Artificial Sequence
  Description of Artificial Sequence: Synthetic oligonucleotide
caucauggagggagcuggc

SEQ ID NO: 114009 - RNA, 19 nt, Artificial Sequence
  Description of Artificial Sequence: Synthetic oligonucleotide
cagagggccgaugggaccc

SEQ ID NO: 114010 - RNA, 19 nt, Artificial Sequence
  Description of Artificial Sequence: Synthetic oligonucleotide
uacagaggaugaggggacc

SEQ ID NO: 114011 - RNA, 19 nt, Artificial Sequence
  Description of Artificial Sequence: Synthetic oligonucleotide
agaguucucgggcgggcgu

SEQ ID NO: 114012 - RNA, 19 nt, Artificial Sequence
  Description of Artificial Sequence: Synthetic oligonucleotide
acaagcugcgagccagcca

SEQ ID NO: 114013 - RNA, 19 nt, Artificial Sequence
  Description of Artificial Sequence: Synthetic oligonucleotide
gguuacggguguucaauca

SEQ ID NO: 114014 - RNA, 19 nt, Artificial Sequence
  Description of Artificial Sequence: Synthetic oligonucleotide
aacagacguaaggugcuuu

SEQ ID NO: 114015 - RNA, 19 nt, Artificial Sequence
  Description of Artificial Sequence: Synthetic oligonucleotide
cagacguaaggugcuuuag

SEQ ID NO: 114016 - RNA, 19 nt, Artificial Sequence
  Description of Artificial Sequence: Synthetic oligonucleotide
gacaaggauccagcugacc

SEQ ID NO: 114017 - RNA, 19 nt, Artificial Sequence
  Description of Artificial Sequence: Synthetic oligonucleotide
ucggacuccgaaggaagcu

SEQ ID NO: 114018 - RNA, 19 nt, Artificial Sequence
  Description of Artificial Sequence: Synthetic oligonucleotide
gagauugcuuucaggugca

SEQ ID NO: 114019 - RNA, 19 nt, Artificial Sequence
  Description of Artificial Sequence: Synthetic oligonucleotide
gacaagcugcgagccagcc

SEQ ID NO: 114020 - RNA, 19 nt, Artificial Sequence
  Description of Artificial Sequence: Synthetic oligonucleotide
uuaacccuucacccuuaua

SEQ ID NO: 114021 - RNA, 19 nt, Artificial Sequence
  Description of Artificial Sequence: Synthetic oligonucleotide
cucuugguugccguagcug

SEQ ID NO: 114022 - RNA, 19 nt, Artificial Sequence
  Description of Artificial Sequence: Synthetic oligonucleotide
ugacccuuugcaggacugc

SEQ ID NO: 114023 - RNA, 19 nt, Artificial Sequence
  Description of Artificial Sequence: Synthetic oligonucleotide
aguaggggccagguuaagu

SEQ ID NO: 114024 - RNA, 19 nt, Artificial Sequence
  Description of Artificial Sequence: Synthetic oligonucleotide
uaacugcgugcuccuuccc

SEQ ID NO: 114025 - RNA, 19 nt, Artificial Sequence
  Description of Artificial Sequence: Synthetic oligonucleotide
ugcgggcaggcuugaucgg

SEQ ID NO: 114026 - RNA, 19 nt, Artificial Sequence
  Description of Artificial Sequence: Synthetic oligonucleotide
gacuuaacccuucacccuu

SEQ ID NO: 114027 - RNA, 19 nt, Artificial Sequence
  Description of Artificial Sequence: Synthetic oligonucleotide
ggcauuagugaaauggcaa

SEQ ID NO: 114028 - RNA, 19 nt, Artificial Sequence
  Description of Artificial Sequence: Synthetic oligonucleotide
acgguccuucacugagaac

SEQ ID NO: 114029 - RNA, 19 nt, Artificial Sequence
  Description of Artificial Sequence: Synthetic oligonucleotide
acccuuauaggcagcgugu

SEQ ID NO: 114030 - RNA, 19 nt, Artificial Sequence
  Description of Artificial Sequence: Synthetic oligonucleotide
agaggcacgcacagcagcu

SEQ ID NO: 114031 - RNA, 19 nt, Artificial Sequence
  Description of Artificial Sequence: Synthetic oligonucleotide
uccagaaacuagggaggac

SEQ ID NO: 114032 - RNA, 19 nt, Artificial Sequence
  Description of Artificial Sequence: Synthetic oligonucleotide
aaugugccuccagggccag

SEQ ID NO: 114033 - RNA, 19 nt, Artificial Sequence
  Description of Artificial Sequence: Synthetic oligonucleotide
gcgacgguagagcugcuug

SEQ ID NO: 114034 - RNA, 19 nt, Artificial Sequence
  Description of Artificial Sequence: Synthetic oligonucleotide
accguguuccuucgcagua

SEQ ID NO: 114035 - RNA, 19 nt, Artificial Sequence
  Description of Artificial Sequence: Synthetic oligonucleotide
cgcuguaugaacucaagga

SEQ ID NO: 114036 - RNA, 19 nt, Artificial Sequence
  Description of Artificial Sequence: Synthetic oligonucleotide
gagauucagugucucaguu

SEQ ID NO: 114037 - RNA, 19 nt, Artificial Sequence
  Description of Artificial Sequence: Synthetic oligonucleotide
gcggcaguugaugcgacgg

SEQ ID NO: 114038 - RNA, 19 nt, Artificial Sequence
  Description of Artificial Sequence: Synthetic oligonucleotide
cuucacugagaacagccgu

SEQ ID NO: 114039 - RNA, 19 nt, Artificial Sequence
  Description of Artificial Sequence: Synthetic oligonucleotide
aaacagacguaaggugcuu

SEQ ID NO: 114040 - RNA, 19 nt, Artificial Sequence
  Description of Artificial Sequence: Synthetic oligonucleotide
aaguaggggccagguuaag

SEQ ID NO: 114041 - RNA, 19 nt, Artificial Sequence
  Description of Artificial Sequence: Synthetic oligonucleotide
acgccaaaccgcucacaca

SEQ ID NO: 114042 - RNA, 19 nt, Artificial Sequence
  Description of Artificial Sequence: Synthetic oligonucleotide
ugagaacaaggaggccuga

SEQ ID NO: 114043 - RNA, 19 nt, Artificial Sequence
  Description of Artificial Sequence: Synthetic oligonucleotide
gacccuuugcaggacugca

SEQ ID NO: 114044 - RNA, 19 nt, Artificial Sequence
  Description of Artificial Sequence: Synthetic oligonucleotide
uucggugcuuggucucugu

SEQ ID NO: 114045 - RNA, 19 nt, Artificial Sequence
  Description of Artificial Sequence: Synthetic oligonucleotide
aggggcgggcacacggucc

SEQ ID NO: 114046 - RNA, 19 nt, Artificial Sequence
  Description of Artificial Sequence: Synthetic oligonucleotide
gucagguuacggguguuca

SEQ ID NO: 114047 - RNA, 19 nt, Artificial Sequence
  Description of Artificial Sequence: Synthetic oligonucleotide
acucaacacucagcugauc

SEQ ID NO: 114048 - RNA, 19 nt, Artificial Sequence
  Description of Artificial Sequence: Synthetic oligonucleotide
ccauggucgcugcucaggg

SEQ ID NO: 114049 - RNA, 19 nt, Artificial Sequence
  Description of Artificial Sequence: Synthetic oligonucleotide
ccuaucagucuucggacuc

SEQ ID NO: 114050 - RNA, 19 nt, Artificial Sequence
  Description of Artificial Sequence: Synthetic oligonucleotide
cuugguugccguagcugga

SEQ ID NO: 114051 - RNA, 19 nt, Artificial Sequence
  Description of Artificial Sequence: Synthetic oligonucleotide
ugggccgcgucauucucau

SEQ ID NO: 114052 - RNA, 19 nt, Artificial Sequence
  Description of Artificial Sequence: Synthetic oligonucleotide
gccucauucuaaguuuaag

SEQ ID NO: 114053 - RNA, 19 nt, Artificial Sequence
  Description of Artificial Sequence: Synthetic oligonucleotide
uuaugucauugagguggca

SEQ ID NO: 114054 - RNA, 19 nt, Artificial Sequence
  Description of Artificial Sequence: Synthetic oligonucleotide
ccuuauaggcagcgugugc

SEQ ID NO: 114055 - RNA, 19 nt, Artificial Sequence
  Description of Artificial Sequence: Synthetic oligonucleotide
ggccgcgucauucucaucu

SEQ ID NO: 114056 - RNA, 19 nt, Artificial Sequence
  Description of Artificial Sequence: Synthetic oligonucleotide
agcgcuguauuggaugaua

SEQ ID NO: 114057 - RNA, 19 nt, Artificial Sequence
  Description of Artificial Sequence: Synthetic oligonucleotide
auaccgcgucagguuacgg

SEQ ID NO: 114058 - RNA, 19 nt, Artificial Sequence
  Description of Artificial Sequence: Synthetic oligonucleotide
cagcacgccaaaccgcuca

SEQ ID NO: 114059 - RNA, 19 nt, Artificial Sequence
  Description of Artificial Sequence: Synthetic oligonucleotide
guaaggugcuuuagacaca

SEQ ID NO: 114060 - RNA, 19 nt, Artificial Sequence
  Description of Artificial Sequence: Synthetic oligonucleotide
gcaugccagaaagaauacc

SEQ ID NO: 114061 - RNA, 19 nt, Artificial Sequence
  Description of Artificial Sequence: Synthetic oligonucleotide
uccagccgaugagaggcac

SEQ ID NO: 114062 - RNA, 19 nt, Artificial Sequence
  Description of Artificial Sequence: Synthetic oligonucleotide
cgggcguucacuuuuaaaa

SEQ ID NO: 114063 - RNA, 19 nt, Artificial Sequence
  Description of Artificial Sequence: Synthetic oligonucleotide
aguucucgggcgggcguuc

SEQ ID NO: 114064 - RNA, 19 nt, Artificial Sequence
  Description of Artificial Sequence: Synthetic oligonucleotide
cacgguccuucacugagaa

SEQ ID NO: 114065 - RNA, 19 nt, Artificial Sequence
  Description of Artificial Sequence: Synthetic oligonucleotide
guagagcugcuugcugaug

SEQ ID NO: 114066 - RNA, 19 nt, Artificial Sequence
  Description of Artificial Sequence: Synthetic oligonucleotide
ucacccuuauaggcagcgu

SEQ ID NO: 114067 - RNA, 19 nt, Artificial Sequence
  Description of Artificial Sequence: Synthetic oligonucleotide
gucuucggacuccgaagga

SEQ ID NO: 114068 - RNA, 19 nt, Artificial Sequence
  Description of Artificial Sequence: Synthetic oligonucleotide
cauuggccuguuuccuuca

SEQ ID NO: 114069 - RNA, 19 nt, Artificial Sequence
  Description of Artificial Sequence: Synthetic oligonucleotide
ggacuccgaaggaagcugc

SEQ ID NO: 114070 - RNA, 19 nt, Artificial Sequence
  Description of Artificial Sequence: Synthetic oligonucleotide
gggccgaugggacccuggg

SEQ ID NO: 114071 - RNA, 19 nt, Artificial Sequence
  Description of Artificial Sequence: Synthetic oligonucleotide
gacaaaggggccagaucua

SEQ ID NO: 114072 - RNA, 19 nt, Artificial Sequence
  Description of Artificial Sequence: Synthetic oligonucleotide
auucggugcuuggucucug

SEQ ID NO: 114073 - RNA, 19 nt, Artificial Sequence
  Description of Artificial Sequence: Synthetic oligonucleotide
gcaaggcaccaagugcagg

SEQ ID NO: 114074 - RNA, 19 nt, Artificial Sequence
  Description of Artificial Sequence: Synthetic oligonucleotide
uucucgggcgggcguucac

SEQ ID NO: 114075 - RNA, 19 nt, Artificial Sequence
  Description of Artificial Sequence: Synthetic oligonucleotide
ggcguccuucuccugguac

SEQ ID NO: 114076 - RNA, 19 nt, Artificial Sequence
  Description of Artificial Sequence: Synthetic oligonucleotide
gacgguagagcugcuugcu

SEQ ID NO: 114077 - RNA, 19 nt, Artificial Sequence
  Description of Artificial Sequence: Synthetic oligonucleotide
ggcgcuguaugaacucaag

SEQ ID NO: 114078 - RNA, 19 nt, Artificial Sequence
  Description of Artificial Sequence: Synthetic oligonucleotide
ccucaagcagacagaaaga

SEQ ID NO: 114079 - RNA, 19 nt, Artificial Sequence
  Description of Artificial Sequence: Synthetic oligonucleotide
ucgcucuguguguucgguu

SEQ ID NO: 114080 - RNA, 19 nt, Artificial Sequence
  Description of Artificial Sequence: Synthetic oligonucleotide
aagcgcuguauuggaugau

SEQ ID NO: 114081 - RNA, 19 nt, Artificial Sequence
  Description of Artificial Sequence: Synthetic oligonucleotide
cgcuguauuggaugauaag

SEQ ID NO: 114082 - RNA, 19 nt, Artificial Sequence
  Description of Artificial Sequence: Synthetic oligonucleotide
ccagccgaugagaggcacg

SEQ ID NO: 114083 - RNA, 19 nt, Artificial Sequence
  Description of Artificial Sequence: Synthetic oligonucleotide
guaggcaagcaggcccaug

SEQ ID NO: 114084 - RNA, 19 nt, Artificial Sequence
  Description of Artificial Sequence: Synthetic oligonucleotide
gugugcccuaugaaucuuc

SEQ ID NO: 114085 - RNA, 19 nt, Artificial Sequence
  Description of Artificial Sequence: Synthetic oligonucleotide
gauucggugcuuggucucu

SEQ ID NO: 114086 - RNA, 19 nt, Artificial Sequence
  Description of Artificial Sequence: Synthetic oligonucleotide
caaaggcucagggcuucuc

SEQ ID NO: 114087 - RNA, 19 nt, Artificial Sequence
  Description of Artificial Sequence: Synthetic oligonucleotide
cuacgucuuccagaaacua

SEQ ID NO: 114088 - RNA, 19 nt, Artificial Sequence
  Description of Artificial Sequence: Synthetic oligonucleotide
ugauaacugcgugcuccuu

SEQ ID NO: 114089 - RNA, 19 nt, Artificial Sequence
  Description of Artificial Sequence: Synthetic oligonucleotide
gaacuacgucuuccagaaa

SEQ ID NO: 114090 - RNA, 19 nt, Artificial Sequence
  Description of Artificial Sequence: Synthetic oligonucleotide
caaagacucugagauugcu

SEQ ID NO: 114091 - RNA, 19 nt, Artificial Sequence
  Description of Artificial Sequence: Synthetic oligonucleotide
cugggccgcgucauucuca

SEQ ID NO: 114092 - RNA, 19 nt, Artificial Sequence
  Description of Artificial Sequence: Synthetic oligonucleotide
ccaaggccgccucuuggag

SEQ ID NO: 114093 - RNA, 19 nt, Artificial Sequence
  Description of Artificial Sequence: Synthetic oligonucleotide
agggccgaugggacccugg

SEQ ID NO: 114094 - RNA, 19 nt, Artificial Sequence
  Description of Artificial Sequence: Synthetic oligonucleotide
ggccagguuaaguucccaa

SEQ ID NO: 114095 - RNA, 19 nt, Artificial Sequence
  Description of Artificial Sequence: Synthetic oligonucleotide
ugccguagcuggagccuuu

SEQ ID NO: 114096 - RNA, 19 nt, Artificial Sequence
  Description of Artificial Sequence: Synthetic oligonucleotide
agacgaucucuaggaagua

SEQ ID NO: 114097 - RNA, 19 nt, Artificial Sequence
  Description of Artificial Sequence: Synthetic oligonucleotide
cagaaacuagggaggacuu

SEQ ID NO: 114098 - RNA, 19 nt, Artificial Sequence
  Description of Artificial Sequence: Synthetic oligonucleotide
cgacgguagagcugcuugc

SEQ ID NO: 114099 - RNA, 19 nt, Artificial Sequence
  Description of Artificial Sequence: Synthetic oligonucleotide
gaugaggagcggggaucca

SEQ ID NO: 114100 - RNA, 19 nt, Artificial Sequence
  Description of Artificial Sequence: Synthetic oligonucleotide
ccugcgggcaggcuugauc

SEQ ID NO: 114101 - RNA, 19 nt, Artificial Sequence
  Description of Artificial Sequence: Synthetic oligonucleotide
ggauaccgcgucagguuac

SEQ ID NO: 114102 - RNA, 19 nt, Artificial Sequence
  Description of Artificial Sequence: Synthetic oligonucleotide
ugcgacgguagagcugcuu

SEQ ID NO: 114103 - RNA, 19 nt, Artificial Sequence
  Description of Artificial Sequence: Synthetic oligonucleotide
cccuuauaggcagcgugug

SEQ ID NO: 114104 - RNA, 19 nt, Artificial Sequence
  Description of Artificial Sequence: Synthetic oligonucleotide
gcagcgugugcccuaugaa

SEQ ID NO: 114105 - RNA, 19 nt, Artificial Sequence
  Description of Artificial Sequence: Synthetic oligonucleotide
aggcgcuguaugaacucaa

SEQ ID NO: 114106 - RNA, 19 nt, Artificial Sequence
  Description of Artificial Sequence: Synthetic oligonucleotide
cagguuacggguguucaau

SEQ ID NO: 114107 - RNA, 19 nt, Artificial Sequence
  Description of Artificial Sequence: Synthetic oligonucleotide
gaucggcuccccugggaau

SEQ ID NO: 114108 - RNA, 19 nt, Artificial Sequence
  Description of Artificial Sequence: Synthetic oligonucleotide
ccgcgucauucucaucugc

SEQ ID NO: 114109 - RNA, 19 nt, Artificial Sequence
  Description of Artificial Sequence: Synthetic oligonucleotide
ccucgcucuguguguucgg

SEQ ID NO: 114110 - RNA, 19 nt, Artificial Sequence
  Description of Artificial Sequence: Synthetic oligonucleotide
ggcuccccugggaauacac

SEQ ID NO: 114111 - RNA, 19 nt, Artificial Sequence
  Description of Artificial Sequence: Synthetic oligonucleotide
gacuccgaaggaagcugcu

SEQ ID NO: 114112 - RNA, 19 nt, Artificial Sequence
  Description of Artificial Sequence: Synthetic oligonucleotide
gcgugugcccuaugaaucu

SEQ ID NO: 114113 - RNA, 19 nt, Artificial Sequence
  Description of Artificial Sequence: Synthetic oligonucleotide
ggccgccucuuggaggcgg

SEQ ID NO: 114114 - RNA, 19 nt, Artificial Sequence
  Description of Artificial Sequence: Synthetic oligonucleotide
ccagaucuacauucagugu

SEQ ID NO: 114115 - RNA, 19 nt, Artificial Sequence
  Description of Artificial Sequence: Synthetic oligonucleotide
ccggucuucuucccacuuc

SEQ ID NO: 114116 - RNA, 19 nt, Artificial Sequence
  Description of Artificial Sequence: Synthetic oligonucleotide
gcccucaggagugcccaag

SEQ ID NO: 114117 - RNA, 19 nt, Artificial Sequence
  Description of Artificial Sequence: Synthetic oligonucleotide
cuuaacccuucacccuuau

SEQ ID NO: 114118 - RNA, 19 nt, Artificial Sequence
  Description of Artificial Sequence: Synthetic oligonucleotide
ggaauacacccuucugcuu

SEQ ID NO: 114119 - RNA, 19 nt, Artificial Sequence
  Description of Artificial Sequence: Synthetic oligonucleotide
agagggccgaugggacccu

SEQ ID NO: 114120 - RNA, 19 nt, Artificial Sequence
  Description of Artificial Sequence: Synthetic oligonucleotide
gcgcuguauuggaugauaa

SEQ ID NO: 114121 - RNA, 19 nt, Artificial Sequence
  Description of Artificial Sequence: Synthetic oligonucleotide
gcgggcguucacuuuuaaa

SEQ ID NO: 114122 - RNA, 19 nt, Artificial Sequence
  Description of Artificial Sequence: Synthetic oligonucleotide
gagggccgaugggacccug

SEQ ID NO: 114123 - RNA, 19 nt, Artificial Sequence
  Description of Artificial Sequence: Synthetic oligonucleotide
ccgcgucagguuacgggug

SEQ ID NO: 114124 - RNA, 19 nt, Artificial Sequence
  Description of Artificial Sequence: Synthetic oligonucleotide
ccagaaagaauacccgguu

SEQ ID NO: 114125 - RNA, 19 nt, Artificial Sequence
  Description of Artificial Sequence: Synthetic oligonucleotide
guucucgggcgggcguuca

SEQ ID NO: 114126 - RNA, 19 nt, Artificial Sequence
  Description of Artificial Sequence: Synthetic oligonucleotide
cggacuccgaaggaagcug

SEQ ID NO: 114127 - RNA, 19 nt, Artificial Sequence
  Description of Artificial Sequence: Synthetic oligonucleotide
guccagccgaugagaggca

SEQ ID NO: 114128 - RNA, 19 nt, Artificial Sequence
  Description of Artificial Sequence: Synthetic oligonucleotide
cccugggaauacacccuuc

SEQ ID NO: 114129 - RNA, 19 nt, Artificial Sequence
  Description of Artificial Sequence: Synthetic oligonucleotide
cguguuccuucgcaguaca

SEQ ID NO: 114130 - RNA, 19 nt, Artificial Sequence
  Description of Artificial Sequence: Synthetic oligonucleotide
ccggccauucacagacuca

SEQ ID NO: 114131 - RNA, 19 nt, Artificial Sequence
  Description of Artificial Sequence: Synthetic oligonucleotide
gacaagcacugcagccccu

SEQ ID NO: 114132 - RNA, 19 nt, Artificial Sequence
  Description of Artificial Sequence: Synthetic oligonucleotide
aggccgccucuuggaggcg

SEQ ID NO: 114133 - RNA, 19 nt, Artificial Sequence
  Description of Artificial Sequence: Synthetic oligonucleotide
caggacagcuuaugucauu

SEQ ID NO: 114134 - RNA, 19 nt, Artificial Sequence
  Description of Artificial Sequence: Synthetic oligonucleotide
cagaggaugaggggaccau

SEQ ID NO: 114135 - RNA, 19 nt, Artificial Sequence
  Description of Artificial Sequence: Synthetic oligonucleotide
caggcagaggaccccuguu

SEQ ID NO: 114136 - RNA, 19 nt, Artificial Sequence
  Description of Artificial Sequence: Synthetic oligonucleotide
cucgggcgggcguucacuu

SEQ ID NO: 114137 - RNA, 19 nt, Artificial Sequence
  Description of Artificial Sequence: Synthetic oligonucleotide
ccacauuccuaguguaguu

SEQ ID NO: 114138 - RNA, 19 nt, Artificial Sequence
  Description of Artificial Sequence: Synthetic oligonucleotide
gcucaggggcgggcacacg

SEQ ID NO: 114139 - RNA, 19 nt, Artificial Sequence
  Description of Artificial Sequence: Synthetic oligonucleotide
ggcgggcguucacuuuuaa

SEQ ID NO: 114140 - RNA, 19 nt, Artificial Sequence
  Description of Artificial Sequence: Synthetic oligonucleotide
ggccgaugggacccugggu

SEQ ID NO: 114141 - RNA, 19 nt, Artificial Sequence
  Description of Artificial Sequence: Synthetic oligonucleotide
cuguaguggugaagcccuu

SEQ ID NO: 114142 - RNA, 19 nt, Artificial Sequence
  Description of Artificial Sequence: Synthetic oligonucleotide
gcccauuggccuguuuccu

SEQ ID NO: 114143 - RNA, 19 nt, Artificial Sequence
  Description of Artificial Sequence: Synthetic oligonucleotide
cuccggccauucacagacu

SEQ ID NO: 114144 - RNA, 19 nt, Artificial Sequence
  Description of Artificial Sequence: Synthetic oligonucleotide
augcgacgguagagcugcu

SEQ ID NO: 114145 - RNA, 19 nt, Artificial Sequence
  Description of Artificial Sequence: Synthetic oligonucleotide
ggaggccuaugagggcaaa

SEQ ID NO: 114146 - RNA, 19 nt, Artificial Sequence
  Description of Artificial Sequence: Synthetic oligonucleotide
gggccgcgucauucucauc

SEQ ID NO: 114147 - RNA, 19 nt, Artificial Sequence
  Description of Artificial Sequence: Synthetic oligonucleotide
ccccugggaauacacccuu

SEQ ID NO: 114148 - RNA, 19 nt, Artificial Sequence
  Description of Artificial Sequence: Synthetic oligonucleotide
cgcgucagguuacgggugu

SEQ ID NO: 114149 - RNA, 19 nt, Artificial Sequence
  Description of Artificial Sequence: Synthetic oligonucleotide
gggcgggcguucacuuuua

SEQ ID NO: 114150 - RNA, 19 nt, Artificial Sequence
  Description of Artificial Sequence: Synthetic oligonucleotide
ggccugcgggcaggcuuga

SEQ ID NO: 114151 - RNA, 19 nt, Artificial Sequence
  Description of Artificial Sequence: Synthetic oligonucleotide
cgggcgggcguucacuuuu

SEQ ID NO: 114152 - RNA, 19 nt, Artificial Sequence
  Description of Artificial Sequence: Synthetic oligonucleotide
gcgucagguuacggguguu

SEQ ID NO: 114153 - RNA, 19 nt, Artificial Sequence
  Description of Artificial Sequence: Synthetic oligonucleotide
ccacgguggccuggucggu

SEQ ID NO: 114154 - RNA, 19 nt, Artificial Sequence
  Description of Artificial Sequence: Synthetic oligonucleotide
uguucuuagauucucaagg

SEQ ID NO: 114155 - RNA, 19 nt, Artificial Sequence
  Description of Artificial Sequence: Synthetic oligonucleotide
uuaaagaccugacugaagg

SEQ ID NO: 114156 - RNA, 19 nt, Artificial Sequence
  Description of Artificial Sequence: Synthetic oligonucleotide
ugaauauugagguaaauca

SEQ ID NO: 114157 - RNA, 19 nt, Artificial Sequence
  Description of Artificial Sequence: Synthetic oligonucleotide
aauacuagugcuuggagug

SEQ ID NO: 114158 - RNA, 19 nt, Artificial Sequence
  Description of Artificial Sequence: Synthetic oligonucleotide
aaagaaucaaccaagguca

SEQ ID NO: 114159 - RNA, 19 nt, Artificial Sequence
  Description of Artificial Sequence: Synthetic oligonucleotide
aaguaaacccuacccaugc

SEQ ID NO: 114160 - RNA, 19 nt, Artificial Sequence
  Description of Artificial Sequence: Synthetic oligonucleotide
auaaaggaaacugagacuc

SEQ ID NO: 114161 - RNA, 19 nt, Artificial Sequence
  Description of Artificial Sequence: Synthetic oligonucleotide
agcuaaaggacacacauuc

SEQ ID NO: 114162 - RNA, 19 nt, Artificial Sequence
  Description of Artificial Sequence: Synthetic oligonucleotide
ugucuuaggcauuugaagg

SEQ ID NO: 114163 - RNA, 19 nt, Artificial Sequence
  Description of Artificial Sequence: Synthetic oligonucleotide
uguuucauaaccaaccaca

SEQ ID NO: 114164 - RNA, 19 nt, Artificial Sequence
  Description of Artificial Sequence: Synthetic oligonucleotide
uguuguguaacguugagcu

SEQ ID NO: 114165 - RNA, 19 nt, Artificial Sequence
  Description of Artificial Sequence: Synthetic oligonucleotide
uuaaucaugguguucaaca

SEQ ID NO: 114166 - RNA, 19 nt, Artificial Sequence
  Description of Artificial Sequence: Synthetic oligonucleotide
aaagcuaaaggacacacau

SEQ ID NO: 114167 - RNA, 19 nt, Artificial Sequence
  Description of Artificial Sequence: Synthetic oligonucleotide
ugagauagcaccauccuug

SEQ ID NO: 114168 - RNA, 19 nt, Artificial Sequence
  Description of Artificial Sequence: Synthetic oligonucleotide
uuuaguaaugacucuaugu

SEQ ID NO: 114169 - RNA, 19 nt, Artificial Sequence
  Description of Artificial Sequence: Synthetic oligonucleotide
uguacuuauucucuuggag

SEQ ID NO: 114170 - RNA, 19 nt, Artificial Sequence
  Description of Artificial Sequence: Synthetic oligonucleotide
uuggaaauuaggaaaacuc

SEQ ID NO: 114171 - RNA, 19 nt, Artificial Sequence
  Description of Artificial Sequence: Synthetic oligonucleotide
ugucaugcaacgaagagaa

SEQ ID NO: 114172 - RNA, 19 nt, Artificial Sequence
  Description of Artificial Sequence: Synthetic oligonucleotide
gauguaaagaacaucacca

SEQ ID NO: 114173 - RNA, 19 nt, Artificial Sequence
  Description of Artificial Sequence: Synthetic oligonucleotide
ugaaugcaggacuuuaggg

SEQ ID NO: 114174 - RNA, 19 nt, Artificial Sequence
  Description of Artificial Sequence: Synthetic oligonucleotide
aguacauugggauguaaag

SEQ ID NO: 114175 - RNA, 19 nt, Artificial Sequence
  Description of Artificial Sequence: Synthetic oligonucleotide
uaguaaugacucuaugugg

SEQ ID NO: 114176 - RNA, 19 nt, Artificial Sequence
  Description of Artificial Sequence: Synthetic oligonucleotide
aguaaggaccaccagagug

SEQ ID NO: 114177 - RNA, 19 nt, Artificial Sequence
  Description of Artificial Sequence: Synthetic oligonucleotide
ugcauaugcacacauguac

SEQ ID NO: 114178 - RNA, 19 nt, Artificial Sequence
  Description of Artificial Sequence: Synthetic oligonucleotide
auagcagucaccuggcagg

SEQ ID NO: 114179 - RNA, 19 nt, Artificial Sequence
  Description of Artificial Sequence: Synthetic oligonucleotide
uggaaauuaggaaaacucu

SEQ ID NO: 114180 - RNA, 19 nt, Artificial Sequence
  Description of Artificial Sequence: Synthetic oligonucleotide
uaauccagcaacccugagg

SEQ ID NO: 114181 - RNA, 19 nt, Artificial Sequence
  Description of Artificial Sequence: Synthetic oligonucleotide
ucuauguauggcuugaguc

SEQ ID NO: 114182 - RNA, 19 nt, Artificial Sequence
  Description of Artificial Sequence: Synthetic oligonucleotide
ucuaauugucuccaaggca

SEQ ID NO: 114183 - RNA, 19 nt, Artificial Sequence
  Description of Artificial Sequence: Synthetic oligonucleotide
uugucuuaggcauuugaag

SEQ ID NO: 114184 - RNA, 19 nt, Artificial Sequence
  Description of Artificial Sequence: Synthetic oligonucleotide
guuguaacggccuuuaauc

SEQ ID NO: 114185 - RNA, 19 nt, Artificial Sequence
  Description of Artificial Sequence: Synthetic oligonucleotide
acaccuaccccaucuaggc

SEQ ID NO: 114186 - RNA, 19 nt, Artificial Sequence
  Description of Artificial Sequence: Synthetic oligonucleotide
ucaacgaagcauguggacg

SEQ ID NO: 114187 - RNA, 19 nt, Artificial Sequence
  Description of Artificial Sequence: Synthetic oligonucleotide
uccccuugaaagcuaaagg

SEQ ID NO: 114188 - RNA, 19 nt, Artificial Sequence
  Description of Artificial Sequence: Synthetic oligonucleotide
uucucuuagggguaggagc

SEQ ID NO: 114189 - RNA, 19 nt, Artificial Sequence
  Description of Artificial Sequence: Synthetic oligonucleotide
ucauucuggcaccacaacc

SEQ ID NO: 114190 - RNA, 19 nt, Artificial Sequence
  Description of Artificial Sequence: Synthetic oligonucleotide
aaaacucucguagucagga

SEQ ID NO: 114191 - RNA, 19 nt, Artificial Sequence
  Description of Artificial Sequence: Synthetic oligonucleotide
uuguguaacguugagcugc

SEQ ID NO: 114192 - RNA, 19 nt, Artificial Sequence
  Description of Artificial Sequence: Synthetic oligonucleotide
auagcuaccaacagaaaag

SEQ ID NO: 114193 - RNA, 19 nt, Artificial Sequence
  Description of Artificial Sequence: Synthetic oligonucleotide
ugucaucuagugaugagcu

SEQ ID NO: 114194 - RNA, 19 nt, Artificial Sequence
  Description of Artificial Sequence: Synthetic oligonucleotide
uuaagugcuugccaggcac

SEQ ID NO: 114195 - RNA, 19 nt, Artificial Sequence
  Description of Artificial Sequence: Synthetic oligonucleotide
uuaccuucuauguauggcu

SEQ ID NO: 114196 - RNA, 19 nt, Artificial Sequence
  Description of Artificial Sequence: Synthetic oligonucleotide
aaguaaagacaggaacggc

SEQ ID NO: 114197 - RNA, 19 nt, Artificial Sequence
  Description of Artificial Sequence: Synthetic oligonucleotide
aaguccguuaccucucuag

SEQ ID NO: 114198 - RNA, 19 nt, Artificial Sequence
  Description of Artificial Sequence: Synthetic oligonucleotide
uagauauuuucacacccca

SEQ ID NO: 114199 - RNA, 19 nt, Artificial Sequence
  Description of Artificial Sequence: Synthetic oligonucleotide
uccguuaccucucuaggcc

SEQ ID NO: 114200 - RNA, 19 nt, Artificial Sequence
  Description of Artificial Sequence: Synthetic oligonucleotide
cauuuuggaaauuaggaaa

SEQ ID NO: 114201 - RNA, 19 nt, Artificial Sequence
  Description of Artificial Sequence: Synthetic oligonucleotide
uguaacguugagcugccca

SEQ ID NO: 114202 - RNA, 19 nt, Artificial Sequence
  Description of Artificial Sequence: Synthetic oligonucleotide
uauugucuuaggcauuuga

SEQ ID NO: 114203 - RNA, 19 nt, Artificial Sequence
  Description of Artificial Sequence: Synthetic oligonucleotide
ugggaucuaaggaacacac

SEQ ID NO: 114204 - RNA, 19 nt, Artificial Sequence
  Description of Artificial Sequence: Synthetic oligonucleotide
acauuuuggaaauuaggaa

SEQ ID NO: 114205 - RNA, 19 nt, Artificial Sequence
  Description of Artificial Sequence: Synthetic oligonucleotide
uagggaacuuaccaaggag

SEQ ID NO: 114206 - RNA, 19 nt, Artificial Sequence
  Description of Artificial Sequence: Synthetic oligonucleotide
agguuaaaagaaucaacca

SEQ ID NO: 114207 - RNA, 19 nt, Artificial Sequence
  Description of Artificial Sequence: Synthetic oligonucleotide
uaaacccuacccaugcucu

SEQ ID NO: 114208 - RNA, 19 nt, Artificial Sequence
  Description of Artificial Sequence: Synthetic oligonucleotide
auguggacgagauagcagu

SEQ ID NO: 114209 - RNA, 19 nt, Artificial Sequence
  Description of Artificial Sequence: Synthetic oligonucleotide
aucaacgaagcauguggac

SEQ ID NO: 114210 - RNA, 19 nt, Artificial Sequence
  Description of Artificial Sequence: Synthetic oligonucleotide
agguagggaacuuaccaag

SEQ ID NO: 114211 - RNA, 19 nt, Artificial Sequence
  Description of Artificial Sequence: Synthetic oligonucleotide
uuaggaaaacucucguagu

SEQ ID NO: 114212 - RNA, 19 nt, Artificial Sequence
  Description of Artificial Sequence: Synthetic oligonucleotide
cugaaugcaggacuuuagg

SEQ ID NO: 114213 - RNA, 19 nt, Artificial Sequence
  Description of Artificial Sequence: Synthetic oligonucleotide
ucuaguguccccacuggga

SEQ ID NO: 114214 - RNA, 19 nt, Artificial Sequence
  Description of Artificial Sequence: Synthetic oligonucleotide
ucaugcaacgaagagaaua

SEQ ID NO: 114215 - RNA, 19 nt, Artificial Sequence
  Description of Artificial Sequence: Synthetic oligonucleotide
aguaaugacucuauguggu

SEQ ID NO: 114216 - RNA, 19 nt, Artificial Sequence
  Description of Artificial Sequence: Synthetic oligonucleotide
aauauugucuuaggcauuu

SEQ ID NO: 114217 - RNA, 19 nt, Artificial Sequence
  Description of Artificial Sequence: Synthetic oligonucleotide
ucuguuguguaacguugag

SEQ ID NO: 114218 - RNA, 19 nt, Artificial Sequence
  Description of Artificial Sequence: Synthetic oligonucleotide
aguccguuaccucucuagg

SEQ ID NO: 114219 - RNA, 19 nt, Artificial Sequence
  Description of Artificial Sequence: Synthetic oligonucleotide
uaggaaaacucucguaguc

SEQ ID NO: 114220 - RNA, 19 nt, Artificial Sequence
  Description of Artificial Sequence: Synthetic oligonucleotide
guaacguugagcugcccag

SEQ ID NO: 114221 - RNA, 19 nt, Artificial Sequence
  Description of Artificial Sequence: Synthetic oligonucleotide
uuguaacggccuuuaauca

SEQ ID NO: 114222 - RNA, 19 nt, Artificial Sequence
  Description of Artificial Sequence: Synthetic oligonucleotide
uugagguaaguggacacag

SEQ ID NO: 114223 - RNA, 19 nt, Artificial Sequence
  Description of Artificial Sequence: Synthetic oligonucleotide
gacaggauauggauagagg

SEQ ID NO: 114224 - RNA, 19 nt, Artificial Sequence
  Description of Artificial Sequence: Synthetic oligonucleotide
uuaggcauuugaaggggca

SEQ ID NO: 114225 - RNA, 19 nt, Artificial Sequence
  Description of Artificial Sequence: Synthetic oligonucleotide
cagguuaguuguaacggcc

SEQ ID NO: 114226 - RNA, 19 nt, Artificial Sequence
  Description of Artificial Sequence: Synthetic oligonucleotide
cuaucuaauccucuuccac

SEQ ID NO: 114227 - RNA, 19 nt, Artificial Sequence
  Description of Artificial Sequence: Synthetic oligonucleotide
uaaugacucuauguggugc

SEQ ID NO: 114228 - RNA, 19 nt, Artificial Sequence
  Description of Artificial Sequence: Synthetic oligonucleotide
uagauucucaagguuaccu

SEQ ID NO: 114229 - RNA, 19 nt, Artificial Sequence
  Description of Artificial Sequence: Synthetic oligonucleotide
aguuguaacggccuuuaau

SEQ ID NO: 114230 - RNA, 19 nt, Artificial Sequence
  Description of Artificial Sequence: Synthetic oligonucleotide
agauacaugcaugugugug

SEQ ID NO: 114231 - RNA, 19 nt, Artificial Sequence
  Description of Artificial Sequence: Synthetic oligonucleotide
cagaugugaacgauggcac

SEQ ID NO: 114232 - RNA, 19 nt, Artificial Sequence
  Description of Artificial Sequence: Synthetic oligonucleotide
agacuaaccagggaaaagu

SEQ ID NO: 114233 - RNA, 19 nt, Artificial Sequence
  Description of Artificial Sequence: Synthetic oligonucleotide
guaccaaagguaucagacc

SEQ ID NO: 114234 - RNA, 19 nt, Artificial Sequence
  Description of Artificial Sequence: Synthetic oligonucleotide
gauucauucuggcaccaca

SEQ ID NO: 114235 - RNA, 19 nt, Artificial Sequence
  Description of Artificial Sequence: Synthetic oligonucleotide
  modified_base (5)..(5): a, c, u, g, unknown or other
ucccnguugcuuauuaauc

SEQ ID NO: 114236 - RNA, 19 nt, Artificial Sequence
  Description of Artificial Sequence: Synthetic oligonucleotide
ucgcuuauggccuuuuauc

SEQ ID NO: 114237 - RNA, 19 nt, Artificial Sequence
  Description of Artificial Sequence: Synthetic oligonucleotide
aacucucguagucaggauu

SEQ ID NO: 114238 - RNA, 19 nt, Artificial Sequence
  Description of Artificial Sequence: Synthetic oligonucleotide
uagcugucaugcaacgaag

SEQ ID NO: 114239 - RNA, 19 nt, Artificial Sequence
  Description of Artificial Sequence: Synthetic oligonucleotide
uguaacggccuuuaaucau

SEQ ID NO: 114240 - RNA, 19 nt, Artificial Sequence
  Description of Artificial Sequence: Synthetic oligonucleotide
guuaccuucuauguauggc

SEQ ID NO: 114241 - RNA, 19 nt, Artificial Sequence
  Description of Artificial Sequence: Synthetic oligonucleotide
aggugucacguuuccuucc

SEQ ID NO: 114242 - RNA, 19 nt, Artificial Sequence
  Description of Artificial Sequence: Synthetic oligonucleotide
accagccuacucaauaagc

SEQ ID NO: 114243 - RNA, 19 nt, Artificial Sequence
  Description of Artificial Sequence: Synthetic oligonucleotide
caagcuagaauguguacca

SEQ ID NO: 114244 - RNA, 19 nt, Artificial Sequence
  Description of Artificial Sequence: Synthetic oligonucleotide
uuaagugcagcgugcaaua

SEQ ID NO: 114245 - RNA, 19 nt, Artificial Sequence
  Description of Artificial Sequence: Synthetic oligonucleotide
  modified_base (2)..(2): a, c, u, g, unknown or other
cnguugcuuauuaauccag

SEQ ID NO: 114246 - RNA, 19 nt, Artificial Sequence
  Description of Artificial Sequence: Synthetic oligonucleotide
auguguaccaaagguauca

SEQ ID NO: 114247 - RNA, 19 nt, Artificial Sequence
  Description of Artificial Sequence: Synthetic oligonucleotide
cauguggacgagauagcag

SEQ ID NO: 114248 - RNA, 19 nt, Artificial Sequence
  Description of Artificial Sequence: Synthetic oligonucleotide
aacccuacccaugcucuac

SEQ ID NO: 114249 - RNA, 19 nt, Artificial Sequence
  Description of Artificial Sequence: Synthetic oligonucleotide
ugucacguuuccuuccaug

SEQ ID NO: 114250 - RNA, 19 nt, Artificial Sequence
  Description of Artificial Sequence: Synthetic oligonucleotide
uuuaaucaugguguucaac

SEQ ID NO: 114251 - RNA, 19 nt, Artificial Sequence
  Description of Artificial Sequence: Synthetic oligonucleotide
uggacgagauagcagucac

SEQ ID NO: 114252 - RNA, 19 nt, Artificial Sequence
  Description of Artificial Sequence: Synthetic oligonucleotide
  modified_base (6)..(6): a, c, u, g, unknown or other
uucccnguugcuuauuaau

SEQ ID NO: 114253 - RNA, 19 nt, Artificial Sequence
  Description of Artificial Sequence: Synthetic oligonucleotide
guccauuaagugcagcgug

SEQ ID NO: 114254 - RNA, 19 nt, Artificial Sequence
  Description of Artificial Sequence: Synthetic oligonucleotide
auugagucguuuguugcag

SEQ ID NO: 114255 - RNA, 19 nt, Artificial Sequence
  Description of Artificial Sequence: Synthetic oligonucleotide
uucccauaaauagcuacca

SEQ ID NO: 114256 - RNA, 19 nt, Artificial Sequence
  Description of Artificial Sequence: Synthetic oligonucleotide
ccucuaauugucuccaagg

SEQ ID NO: 114257 - RNA, 19 nt, Artificial Sequence
  Description of Artificial Sequence: Synthetic oligonucleotide
guucccauaaauagcuacc

SEQ ID NO: 114258 - RNA, 19 nt, Artificial Sequence
  Description of Artificial Sequence: Synthetic oligonucleotide
cagcgugcaauacuagugc

SEQ ID NO: 114259 - RNA, 19 nt, Artificial Sequence
  Description of Artificial Sequence: Synthetic oligonucleotide
agggugaauauugagguaa

SEQ ID NO: 114260 - RNA, 19 nt, Artificial Sequence
  Description of Artificial Sequence: Synthetic oligonucleotide
gucaaacccagcugguaag

SEQ ID NO: 114261 - RNA, 19 nt, Artificial Sequence
  Description of Artificial Sequence: Synthetic oligonucleotide
cuucuaguguccccacugg

SEQ ID NO: 114262 - RNA, 19 nt, Artificial Sequence
  Description of Artificial Sequence: Synthetic oligonucleotide
cuagcaaccucuggaacgc

SEQ ID NO: 114263 - RNA, 19 nt, Artificial Sequence
  Description of Artificial Sequence: Synthetic oligonucleotide
cagcugguaaguagcaagc

SEQ ID NO: 114264 - RNA, 19 nt, Artificial Sequence
  Description of Artificial Sequence: Synthetic oligonucleotide
gaauaagaugcaucgcuua

SEQ ID NO: 114265 - RNA, 19 nt, Artificial Sequence
  Description of Artificial Sequence: Synthetic oligonucleotide
  modified_base (4)..(4): a, c, u, g, unknown or other
cccnguugcuuauuaaucc

SEQ ID NO: 114266 - RNA, 19 nt, Artificial Sequence
  Description of Artificial Sequence: Synthetic oligonucleotide
guaaugacucuauguggug

SEQ ID NO: 114267 - RNA, 19 nt, Artificial Sequence
  Description of Artificial Sequence: Synthetic oligonucleotide
uagcaagcuagaaugugua

SEQ ID NO: 114268 - RNA, 19 nt, Artificial Sequence
  Description of Artificial Sequence: Synthetic oligonucleotide
aggacacacauuccuucuc

SEQ ID NO: 114269 - RNA, 19 nt, Artificial Sequence
  Description of Artificial Sequence: Synthetic oligonucleotide
ugagucuguaguucucaac

SEQ ID NO: 114270 - RNA, 19 nt, Artificial Sequence
  Description of Artificial Sequence: Synthetic oligonucleotide
ggaucuaaggaacacacua

SEQ ID NO: 114271 - RNA, 19 nt, Artificial Sequence
  Description of Artificial Sequence: Synthetic oligonucleotide
cuuggaacagauacaugca

SEQ ID NO: 114272 - RNA, 19 nt, Artificial Sequence
  Description of Artificial Sequence: Synthetic oligonucleotide
ugcagcgugcaauacuagu

SEQ ID NO: 114273 - RNA, 19 nt, Artificial Sequence
  Description of Artificial Sequence: Synthetic oligonucleotide
  modified_base (7)..(7): a, c, u, g, unknown or other
uuucccnguugcuuauuaa

SEQ ID NO: 114274 - RNA, 19 nt, Artificial Sequence
  Description of Artificial Sequence: Synthetic oligonucleotide
cccauaaauagcuaccaac

SEQ ID NO: 114275 - RNA, 19 nt, Artificial Sequence
  Description of Artificial Sequence: Synthetic oligonucleotide
  modified_base (8)..(8): a, c, u, g, unknown or other
uuuucccnguugcuuauua

SEQ ID NO: 114276 - RNA, 19 nt, Artificial Sequence
  Description of Artificial Sequence: Synthetic oligonucleotide
guaacggccuuuaaucaug

SEQ ID NO: 114277 - RNA, 19 nt, Artificial Sequence
  Description of Artificial Sequence: Synthetic oligonucleotide
ggaaauuaggaaaacucuc

SEQ ID NO: 114278 - RNA, 19 nt, Artificial Sequence
  Description of Artificial Sequence: Synthetic oligonucleotide
ugaggacaccaauuucuga

SEQ ID NO: 114279 - RNA, 19 nt, Artificial Sequence
  Description of Artificial Sequence: Synthetic oligonucleotide
agggaacuuaccaaggagu

SEQ ID NO: 114280 - RNA, 19 nt, Artificial Sequence
  Description of Artificial Sequence: Synthetic oligonucleotide
cuauguauggcuugagucu

SEQ ID NO: 114281 - RNA, 19 nt, Artificial Sequence
  Description of Artificial Sequence: Synthetic oligonucleotide
aucgcuuauggccuuuuau

SEQ ID NO: 114282 - RNA, 19 nt, Artificial Sequence
  Description of Artificial Sequence: Synthetic oligonucleotide
acucuguuguguaacguug

SEQ ID NO: 114283 - RNA, 19 nt, Artificial Sequence
  Description of Artificial Sequence: Synthetic oligonucleotide
acacuagaccauuuccccu

SEQ ID NO: 114284 - RNA, 19 nt, Artificial Sequence
  Description of Artificial Sequence: Synthetic oligonucleotide
acucucguagucaggauug

SEQ ID NO: 114285 - RNA, 19 nt, Artificial Sequence
  Description of Artificial Sequence: Synthetic oligonucleotide
auuaagugcuugccaggca

SEQ ID NO: 114286 - RNA, 19 nt, Artificial Sequence
  Description of Artificial Sequence: Synthetic oligonucleotide
auucucuuagggguaggag

SEQ ID NO: 114287 - RNA, 19 nt, Artificial Sequence
  Description of Artificial Sequence: Synthetic oligonucleotide
ggauucucgaauaaaauua

SEQ ID NO: 114288 - RNA, 19 nt, Artificial Sequence
  Description of Artificial Sequence: Synthetic oligonucleotide
gcuauugcuaccuggccug

SEQ ID NO: 114289 - RNA, 19 nt, Artificial Sequence
  Description of Artificial Sequence: Synthetic oligonucleotide
guccguuaccucucuaggc

SEQ ID NO: 114290 - RNA, 19 nt, Artificial Sequence
  Description of Artificial Sequence: Synthetic oligonucleotide
gaacagugucaucuaguga

SEQ ID NO: 114291 - RNA, 19 nt, Artificial Sequence
  Description of Artificial Sequence: Synthetic oligonucleotide
ugugaacgauggcacucug

SEQ ID NO: 114292 - RNA, 19 nt, Artificial Sequence
  Description of Artificial Sequence: Synthetic oligonucleotide
guuguguaacguugagcug

SEQ ID NO: 114293 - RNA, 19 nt, Artificial Sequence
  Description of Artificial Sequence: Synthetic oligonucleotide
guagggaacuuaccaagga

SEQ ID NO: 114294 - RNA, 19 nt, Artificial Sequence
  Description of Artificial Sequence: Synthetic oligonucleotide
gacgagauagcagucaccu

SEQ ID NO: 114295 - RNA, 19 nt, Artificial Sequence
  Description of Artificial Sequence: Synthetic oligonucleotide
gaucuaaggaacacacuaa

SEQ ID NO: 114296 - RNA, 19 nt, Artificial Sequence
  Description of Artificial Sequence: Synthetic oligonucleotide
cuguuguguaacguugagc

SEQ ID NO: 114297 - RNA, 19 nt, Artificial Sequence
  Description of Artificial Sequence: Synthetic oligonucleotide
agcauguggacgagauagc

SEQ ID NO: 114298 - RNA, 19 nt, Artificial Sequence
  Description of Artificial Sequence: Synthetic oligonucleotide
uguggacgagauagcaguc

SEQ ID NO: 114299 - RNA, 19 nt, Artificial Sequence
  Description of Artificial Sequence: Synthetic oligonucleotide
gcugucaugcaacgaagag

SEQ ID NO: 114300 - RNA, 19 nt, Artificial Sequence
  Description of Artificial Sequence: Synthetic oligonucleotide
agcgugcaauacuagugcu

SEQ ID NO: 114301 - RNA, 19 nt, Artificial Sequence
  Description of Artificial Sequence: Synthetic oligonucleotide
aaacucucguagucaggau

SEQ ID NO: 114302 - RNA, 19 nt, Artificial Sequence
  Description of Artificial Sequence: Synthetic oligonucleotide
cagagguagggaacuuacc

SEQ ID NO: 114303 - RNA, 19 nt, Artificial Sequence
  Description of Artificial Sequence: Synthetic oligonucleotide
gaugcaucgcuuauggccu

SEQ ID NO: 114304 - RNA, 19 nt, Artificial Sequence
  Description of Artificial Sequence: Synthetic oligonucleotide
aguaaacccuacccaugcu

SEQ ID NO: 114305 - RNA, 19 nt, Artificial Sequence
  Description of Artificial Sequence: Synthetic oligonucleotide
uugcuaccuggccuguagc

SEQ ID NO: 114306 - RNA, 19 nt, Artificial Sequence
  Description of Artificial Sequence: Synthetic oligonucleotide
uugggauguaaagaacauc

SEQ ID NO: 114307 - RNA, 19 nt, Artificial Sequence
  Description of Artificial Sequence: Synthetic oligonucleotide
cacaauccucuguucuuag

SEQ ID NO: 114308 - RNA, 19 nt, Artificial Sequence
  Description of Artificial Sequence: Synthetic oligonucleotide
gcaauacuagugcuuggag

SEQ ID NO: 114309 - RNA, 19 nt, Artificial Sequence
  Description of Artificial Sequence: Synthetic oligonucleotide
gagcagauucauucuggca

SEQ ID NO: 114310 - RNA, 19 nt, Artificial Sequence
  Description of Artificial Sequence: Synthetic oligonucleotide
ucagacgcugugacacuga

SEQ ID NO: 114311 - RNA, 19 nt, Artificial Sequence
  Description of Artificial Sequence: Synthetic oligonucleotide
cacacuaaggaugaggacu

SEQ ID NO: 114312 - RNA, 19 nt, Artificial Sequence
  Description of Artificial Sequence: Synthetic oligonucleotide
agacugaugagcagauuca

SEQ ID NO: 114313 - RNA, 19 nt, Artificial Sequence
  Description of Artificial Sequence: Synthetic oligonucleotide
ggacaggauauggauagag

SEQ ID NO: 114314 - RNA, 19 nt, Artificial Sequence
  Description of Artificial Sequence: Synthetic oligonucleotide
aucaaggauauuggaagau

SEQ ID NO: 114315 - RNA, 19 nt, Artificial Sequence
  Description of Artificial Sequence: Synthetic oligonucleotide
uaguucucaaccggacccc

SEQ ID NO: 114316 - RNA, 19 nt, Artificial Sequence
  Description of Artificial Sequence: Synthetic oligonucleotide
uugagucguuuguugcaga

SEQ ID NO: 114317 - RNA, 19 nt, Artificial Sequence
  Description of Artificial Sequence: Synthetic oligonucleotide
gcagguuaguuguaacggc

SEQ ID NO: 114318 - RNA, 19 nt, Artificial Sequence
  Description of Artificial Sequence: Synthetic oligonucleotide
cuuggaguguccuguccuc

SEQ ID NO: 114319 - RNA, 19 nt, Artificial Sequence
  Description of Artificial Sequence: Synthetic oligonucleotide
ggcacucuguuguguaacg

SEQ ID NO: 114320 - RNA, 19 nt, Artificial Sequence
  Description of Artificial Sequence: Synthetic oligonucleotide
caauacuagugcuuggagu

SEQ ID NO: 114321 - RNA, 19 nt, Artificial Sequence
  Description of Artificial Sequence: Synthetic oligonucleotide
ggugcagauuaauauuguc

SEQ ID NO: 114322 - RNA, 19 nt, Artificial Sequence
  Description of Artificial Sequence: Synthetic oligonucleotide
uaacguugagcugcccagc

SEQ ID NO: 114323 - RNA, 19 nt, Artificial Sequence
  Description of Artificial Sequence: Synthetic oligonucleotide
aacugaucuggagggaaua

SEQ ID NO: 114324 - RNA, 19 nt, Artificial Sequence
  Description of Artificial Sequence: Synthetic oligonucleotide
cagcuauugcuaccuggcc

SEQ ID NO: 114325 - RNA, 19 nt, Artificial Sequence
  Description of Artificial Sequence: Synthetic oligonucleotide
acguugagcugcccagcuc

SEQ ID NO: 114326 - RNA, 19 nt, Artificial Sequence
  Description of Artificial Sequence: Synthetic oligonucleotide
aaacccuacccaugcucua

SEQ ID NO: 114327 - RNA, 19 nt, Artificial Sequence
  Description of Artificial Sequence: Synthetic oligonucleotide
uccuucuaguguccccacu

SEQ ID NO: 114328 - RNA, 19 nt, Artificial Sequence
  Description of Artificial Sequence: Synthetic oligonucleotide
caucuacccugccucgccc

SEQ ID NO: 114329 - RNA, 19 nt, Artificial Sequence
  Description of Artificial Sequence: Synthetic oligonucleotide
gcagcuauugcuaccuggc

SEQ ID NO: 114330 - RNA, 19 nt, Artificial Sequence
  Description of Artificial Sequence: Synthetic oligonucleotide
augugaacgauggcacucu

SEQ ID NO: 114331 - RNA, 19 nt, Artificial Sequence
  Description of Artificial Sequence: Synthetic oligonucleotide
agguuaguuguaacggccu

SEQ ID NO: 114332 - RNA, 19 nt, Artificial Sequence
  Description of Artificial Sequence: Synthetic oligonucleotide
cuuauaccagaaguucaca

SEQ ID NO: 114333 - RNA, 19 nt, Artificial Sequence
  Description of Artificial Sequence: Synthetic oligonucleotide
ugacucuauguggugccac

SEQ ID NO: 114334 - RNA, 19 nt, Artificial Sequence
  Description of Artificial Sequence: Synthetic oligonucleotide
uggccuguagccugacuau

SEQ ID NO: 114335 - RNA, 19 nt, Artificial Sequence
  Description of Artificial Sequence: Synthetic oligonucleotide
acacuaaggaugaggacua

SEQ ID NO: 114336 - RNA, 19 nt, Artificial Sequence
  Description of Artificial Sequence: Synthetic oligonucleotide
  modified_base (15)..(15): a, c, u, g, unknown or other
agccacguuuucccnguug

SEQ ID NO: 114337 - RNA, 19 nt, Artificial Sequence
  Description of Artificial Sequence: Synthetic oligonucleotide
gcagcgugcaauacuagug

SEQ ID NO: 114338 - RNA, 19 nt, Artificial Sequence
  Description of Artificial Sequence: Synthetic oligonucleotide
guagcaagcuagaaugugu

SEQ ID NO: 114339 - RNA, 19 nt, Artificial Sequence
  Description of Artificial Sequence: Synthetic oligonucleotide
ugaggacuacuuggugcag

SEQ ID NO: 114340 - RNA, 19 nt, Artificial Sequence
  Description of Artificial Sequence: Synthetic oligonucleotide
acgauggcacucuguugug

SEQ ID NO: 114341 - RNA, 19 nt, Artificial Sequence
  Description of Artificial Sequence: Synthetic oligonucleotide
gcaacccugagguagauau

SEQ ID NO: 114342 - RNA, 19 nt, Artificial Sequence
  Description of Artificial Sequence: Synthetic oligonucleotide
gucagacgcugugacacug

SEQ ID NO: 114343 - RNA, 19 nt, Artificial Sequence
  Description of Artificial Sequence: Synthetic oligonucleotide
aagcuagaauguguaccaa

SEQ ID NO: 114344 - RNA, 19 nt, Artificial Sequence
  Description of Artificial Sequence: Synthetic oligonucleotide
uaguuguaacggccuuuaa

SEQ ID NO: 114345 - RNA, 19 nt, Artificial Sequence
  Description of Artificial Sequence: Synthetic oligonucleotide
cuggccuguagccugacua

SEQ ID NO: 114346 - RNA, 19 nt, Artificial Sequence
  Description of Artificial Sequence: Synthetic oligonucleotide
uggagggaauaagaugcau

SEQ ID NO: 114347 - RNA, 19 nt, Artificial Sequence
  Description of Artificial Sequence: Synthetic oligonucleotide
caauucucuuagggguagg

SEQ ID NO: 114348 - RNA, 19 nt, Artificial Sequence
  Description of Artificial Sequence: Synthetic oligonucleotide
acugaucuggagggaauaa

SEQ ID NO: 114349 - RNA, 19 nt, Artificial Sequence
  Description of Artificial Sequence: Synthetic oligonucleotide
ucucaaccggaccccuauc

SEQ ID NO: 114350 - RNA, 19 nt, Artificial Sequence
  Description of Artificial Sequence: Synthetic oligonucleotide
uggaguguccuguccucau

SEQ ID NO: 114351 - RNA, 19 nt, Artificial Sequence
  Description of Artificial Sequence: Synthetic oligonucleotide
cacggugucauugagucgu

SEQ ID NO: 114352 - RNA, 19 nt, Artificial Sequence
  Description of Artificial Sequence: Synthetic oligonucleotide
gggugagaaaucuuuccaa

SEQ ID NO: 114353 - RNA, 19 nt, Artificial Sequence
  Description of Artificial Sequence: Synthetic oligonucleotide
acagacuaacacagacaug

SEQ ID NO: 114354 - RNA, 19 nt, Artificial Sequence
  Description of Artificial Sequence: Synthetic oligonucleotide
auauugucuuaggcauuug

SEQ ID NO: 114355 - RNA, 19 nt, Artificial Sequence
  Description of Artificial Sequence: Synthetic oligonucleotide
agcugucaugcaacgaaga

SEQ ID NO: 114356 - RNA, 19 nt, Artificial Sequence
  Description of Artificial Sequence: Synthetic oligonucleotide
agacuuuagggaggaggga

SEQ ID NO: 114357 - RNA, 19 nt, Artificial Sequence
  Description of Artificial Sequence: Synthetic oligonucleotide
  modified_base (3)..(3): a, c, u, g, unknown or other
ccnguugcuuauuaaucca

SEQ ID NO: 114358 - RNA, 19 nt, Artificial Sequence
  Description of Artificial Sequence: Synthetic oligonucleotide
uggccuacucuagcuguca

SEQ ID NO: 114359 - RNA, 19 nt, Artificial Sequence
  Description of Artificial Sequence: Synthetic oligonucleotide
ggacaagcaguaaggacca

SEQ ID NO: 114360 - RNA, 19 nt, Artificial Sequence
  Description of Artificial Sequence: Synthetic oligonucleotide
aguucucaaccggaccccu

SEQ ID NO: 114361 - RNA, 19 nt, Artificial Sequence
  Description of Artificial Sequence: Synthetic oligonucleotide
cuggccuacucuagcuguc

SEQ ID NO: 114362 - RNA, 19 nt, Artificial Sequence
  Description of Artificial Sequence: Synthetic oligonucleotide
cucuuagggguaggagccc

SEQ ID NO: 114363 - RNA, 19 nt, Artificial Sequence
  Description of Artificial Sequence: Synthetic oligonucleotide
guggacgagauagcaguca

SEQ ID NO: 114364 - RNA, 19 nt, Artificial Sequence
  Description of Artificial Sequence: Synthetic oligonucleotide
gggauguaaagaacaucac

SEQ ID NO: 114365 - RNA, 19 nt, Artificial Sequence
  Description of Artificial Sequence: Synthetic oligonucleotide
gacucccugaggucagaaa

SEQ ID NO: 114366 - RNA, 19 nt, Artificial Sequence
  Description of Artificial Sequence: Synthetic oligonucleotide
cuccuucuaguguccccac

SEQ ID NO: 114367 - RNA, 19 nt, Artificial Sequence
  Description of Artificial Sequence: Synthetic oligonucleotide
ccguuaccucucuaggccc

SEQ ID NO: 114368 - RNA, 19 nt, Artificial Sequence
  Description of Artificial Sequence: Synthetic oligonucleotide
ccggaccccuaucuaaucc

SEQ ID NO: 114369 - RNA, 19 nt, Artificial Sequence
  Description of Artificial Sequence: Synthetic oligonucleotide
ggauacaggagcaucuccu

SEQ ID NO: 114370 - RNA, 19 nt, Artificial Sequence
  Description of Artificial Sequence: Synthetic oligonucleotide
cacauuugaaagggucaga

SEQ ID NO: 114371 - RNA, 19 nt, Artificial Sequence
  Description of Artificial Sequence: Synthetic oligonucleotide
gcauguggacgagauagca

SEQ ID NO: 114372 - RNA, 19 nt, Artificial Sequence
  Description of Artificial Sequence: Synthetic oligonucleotide
gccuguagccugacuaugc

SEQ ID NO: 114373 - RNA, 19 nt, Artificial Sequence
  Description of Artificial Sequence: Synthetic oligonucleotide
agacuaacacagacaugau

SEQ ID NO: 114374 - RNA, 19 nt, Artificial Sequence
  Description of Artificial Sequence: Synthetic oligonucleotide
acgaagcauguggacgaga

SEQ ID NO: 114375 - RNA, 19 nt, Artificial Sequence
  Description of Artificial Sequence: Synthetic oligonucleotide
cacugaaugcaggacuuua

SEQ ID NO: 114376 - RNA, 19 nt, Artificial Sequence
  Description of Artificial Sequence: Synthetic oligonucleotide
acgcugugacacugagcca

SEQ ID NO: 114377 - RNA, 19 nt, Artificial Sequence
  Description of Artificial Sequence: Synthetic oligonucleotide
ggacgagauagcagucacc

SEQ ID NO: 114378 - RNA, 19 nt, Artificial Sequence
  Description of Artificial Sequence: Synthetic oligonucleotide
  modified_base (18)..(18): a, c, u, g, unknown or other
cccagccacguuuucccng

SEQ ID NO: 114379 - RNA, 19 nt, Artificial Sequence
  Description of Artificial Sequence: Synthetic oligonucleotide
cagggugaauauugaggua

SEQ ID NO: 114380 - RNA, 19 nt, Artificial Sequence
  Description of Artificial Sequence: Synthetic oligonucleotide
cguuaccucucuaggcccc

SEQ ID NO: 114381 - RNA, 19 nt, Artificial Sequence
  Description of Artificial Sequence: Synthetic oligonucleotide
ccacggugucauugagucg

SEQ ID NO: 114382 - RNA, 19 nt, Artificial Sequence
  Description of Artificial Sequence: Synthetic oligonucleotide
caccuaccccaucuaggca

SEQ ID NO: 114383 - RNA, 19 nt, Artificial Sequence
  Description of Artificial Sequence: Synthetic oligonucleotide
ggaacgcaggggucuguca

SEQ ID NO: 114384 - RNA, 19 nt, Artificial Sequence
  Description of Artificial Sequence: Synthetic oligonucleotide
gucguuuguugcagauaca

SEQ ID NO: 114385 - RNA, 19 nt, Artificial Sequence
  Description of Artificial Sequence: Synthetic oligonucleotide
ggaauaagaugcaucgcuu

SEQ ID NO: 114386 - RNA, 19 nt, Artificial Sequence
  Description of Artificial Sequence: Synthetic oligonucleotide
gccuuuuaucugggcaaag

SEQ ID NO: 114387 - RNA, 19 nt, Artificial Sequence
  Description of Artificial Sequence: Synthetic oligonucleotide
uuaccucucuaggccccuc

SEQ ID NO: 114388 - RNA, 19 nt, Artificial Sequence
  Description of Artificial Sequence: Synthetic oligonucleotide
cugaacagaugugaacgau

SEQ ID NO: 114389 - RNA, 19 nt, Artificial Sequence
  Description of Artificial Sequence: Synthetic oligonucleotide
cacucucgacaccagccua

SEQ ID NO: 114390 - RNA, 19 nt, Artificial Sequence
  Description of Artificial Sequence: Synthetic oligonucleotide
ccucaucuggccucaaucu

SEQ ID NO: 114391 - RNA, 19 nt, Artificial Sequence
  Description of Artificial Sequence: Synthetic oligonucleotide
ggaccccuaucuaauccuc

SEQ ID NO: 114392 - RNA, 19 nt, Artificial Sequence
  Description of Artificial Sequence: Synthetic oligonucleotide
gccuuuaaucaugguguuc

SEQ ID NO: 114393 - RNA, 19 nt, Artificial Sequence
  Description of Artificial Sequence: Synthetic oligonucleotide
guguaacguugagcugccc

SEQ ID NO: 114394 - RNA, 19 nt, Artificial Sequence
  Description of Artificial Sequence: Synthetic oligonucleotide
gggugaauauugagguaaa

SEQ ID NO: 114395 - RNA, 19 nt, Artificial Sequence
  Description of Artificial Sequence: Synthetic oligonucleotide
agcaacccugagguagaua

SEQ ID NO: 114396 - RNA, 19 nt, Artificial Sequence
  Description of Artificial Sequence: Synthetic oligonucleotide
caucgcuuauggccuuuua

SEQ ID NO: 114397 - RNA, 19 nt, Artificial Sequence
  Description of Artificial Sequence: Synthetic oligonucleotide
gguuaguuguaacggccuu

SEQ ID NO: 114398 - RNA, 19 nt, Artificial Sequence
  Description of Artificial Sequence: Synthetic oligonucleotide
cucuucucaccaaguccgu

SEQ ID NO: 114399 - RNA, 19 nt, Artificial Sequence
  Description of Artificial Sequence: Synthetic oligonucleotide
ggugaauauugagguaaau

SEQ ID NO: 114400 - RNA, 19 nt, Artificial Sequence
  Description of Artificial Sequence: Synthetic oligonucleotide
ccccuguaucuuuaauuaa

SEQ ID NO: 114401 - RNA, 19 nt, Artificial Sequence
  Description of Artificial Sequence: Synthetic oligonucleotide
ccuacucaauaagcugcuc

SEQ ID NO: 114402 - RNA, 19 nt, Artificial Sequence
  Description of Artificial Sequence: Synthetic oligonucleotide
caaguccguuaccucucua

SEQ ID NO: 114403 - RNA, 19 nt, Artificial Sequence
  Description of Artificial Sequence: Synthetic oligonucleotide
guuaccucucuaggccccu

SEQ ID NO: 114404 - RNA, 19 nt, Artificial Sequence
  Description of Artificial Sequence: Synthetic oligonucleotide
ccccaccucuuguggauuc

SEQ ID NO: 114405 - RNA, 19 nt, Artificial Sequence
  Description of Artificial Sequence: Synthetic oligonucleotide
ggcgaagagggaagguucu

SEQ ID NO: 114406 - RNA, 19 nt, Artificial Sequence
  Description of Artificial Sequence: Synthetic oligonucleotide
ggauauggauagaggcacu

SEQ ID NO: 114407 - RNA, 19 nt, Artificial Sequence
  Description of Artificial Sequence: Synthetic oligonucleotide
guucucaaccggaccccua

SEQ ID NO: 114408 - RNA, 19 nt, Artificial Sequence
  Description of Artificial Sequence: Synthetic oligonucleotide
gggaucuaaggaacacacu

SEQ ID NO: 114409 - RNA, 19 nt, Artificial Sequence
  Description of Artificial Sequence: Synthetic oligonucleotide
cugguagcccuugcuaaau

SEQ ID NO: 114410 - RNA, 19 nt, Artificial Sequence
  Description of Artificial Sequence: Synthetic oligonucleotide
ccuaccccaucuaggcaaa

SEQ ID NO: 114411 - RNA, 19 nt, Artificial Sequence
  Description of Artificial Sequence: Synthetic oligonucleotide
cccuacccaugcucuacca

SEQ ID NO: 114412 - RNA, 19 nt, Artificial Sequence
  Description of Artificial Sequence: Synthetic oligonucleotide
gugucacguuuccuuccau

SEQ ID NO: 114413 - RNA, 19 nt, Artificial Sequence
  Description of Artificial Sequence: Synthetic oligonucleotide
acggugucauugagucguu

SEQ ID NO: 114414 - RNA, 19 nt, Artificial Sequence
  Description of Artificial Sequence: Synthetic oligonucleotide
gcauuugaaggggcagggu

SEQ ID NO: 114415 - RNA, 19 nt, Artificial Sequence
  Description of Artificial Sequence: Synthetic oligonucleotide
ccacucucgacaccagccu

SEQ ID NO: 114416 - RNA, 19 nt, Artificial Sequence
  Description of Artificial Sequence: Synthetic oligonucleotide
ggccuacucuagcugucau

SEQ ID NO: 114417 - RNA, 19 nt, Artificial Sequence
  Description of Artificial Sequence: Synthetic oligonucleotide
gucaugcaacgaagagaau

SEQ ID NO: 114418 - RNA, 19 nt, Artificial Sequence
  Description of Artificial Sequence: Synthetic oligonucleotide
cggaccccuaucuaauccu

SEQ ID NO: 114419 - RNA, 19 nt, Artificial Sequence
  Description of Artificial Sequence: Synthetic oligonucleotide
  modified_base (16)..(16): a, c, u, g, unknown or other
cagccacguuuucccnguu

SEQ ID NO: 114420 - RNA, 19 nt, Artificial Sequence
  Description of Artificial Sequence: Synthetic oligonucleotide
cagcaacccugagguagau

SEQ ID NO: 114421 - RNA, 19 nt, Artificial Sequence
  Description of Artificial Sequence: Synthetic oligonucleotide
gcaucgcuuauggccuuuu

SEQ ID NO: 114422 - RNA, 19 nt, Artificial Sequence
  Description of Artificial Sequence: Synthetic oligonucleotide
cguuuccuuccaugccgau

SEQ ID NO: 114423 - RNA, 19 nt, Artificial Sequence
  Description of Artificial Sequence: Synthetic oligonucleotide
cggugucauugagucguuu

SEQ ID NO: 114424 - RNA, 19 nt, Artificial Sequence
  Description of Artificial Sequence: Synthetic oligonucleotide
aauauauauauauaucacg

SEQ ID NO: 114425 - RNA, 19 nt, Artificial Sequence
  Description of Artificial Sequence: Synthetic oligonucleotide
aaaauauauauauauauca

SEQ ID NO: 114426 - RNA, 19 nt, Artificial Sequence
  Description of Artificial Sequence: Synthetic oligonucleotide
uauauauauauauauauaa

SEQ ID NO: 114427 - RNA, 19 nt, Artificial Sequence
  Description of Artificial Sequence: Synthetic oligonucleotide
aaugaguauauauauauau

SEQ ID NO: 114428 - RNA, 19 nt, Artificial Sequence
  Description of Artificial Sequence: Synthetic oligonucleotide
uauauauauauauauauau

SEQ ID NO: 114429 - RNA, 19 nt, Artificial Sequence
  Description of Artificial Sequence: Synthetic oligonucleotide
aaauauauauauauaucac

SEQ ID NO: 114430 - RNA, 19 nt, Artificial Sequence
  Description of Artificial Sequence: Synthetic oligonucleotide
auagauacacuauacauug

SEQ ID NO: 114431 - RNA, 19 nt, Artificial Sequence
  Description of Artificial Sequence: Synthetic oligonucleotide
uauauauauauauauaaua

SEQ ID NO: 114432 - RNA, 19 nt, Artificial Sequence
  Description of Artificial Sequence: Synthetic oligonucleotide
aguauauauauauauauau

SEQ ID NO: 114433 - RNA, 19 nt, Artificial Sequence
  Description of Artificial Sequence: Synthetic oligonucleotide
gaguauuauauuuuccucg

SEQ ID NO: 114434 - RNA, 19 nt, Artificial Sequence
  Description of Artificial Sequence: Synthetic oligonucleotide
uauaucacgugaacgaggg

SEQ ID NO: 114435 - RNA, 19 nt, Artificial Sequence
  Description of Artificial Sequence: Synthetic oligonucleotide
ugauauaccacaccaaaug

SEQ ID NO: 114436 - RNA, 19 nt, Artificial Sequence
  Description of Artificial Sequence: Synthetic oligonucleotide
uccgagucaaugaagaagg

SEQ ID NO: 114437 - RNA, 19 nt, Artificial Sequence
  Description of Artificial Sequence: Synthetic oligonucleotide
uauauauaucacgugaacg

SEQ ID NO: 114438 - RNA, 19 nt, Artificial Sequence
  Description of Artificial Sequence: Synthetic oligonucleotide
aagcuaaccccuuauguac

SEQ ID NO: 114439 - RNA, 19 nt, Artificial Sequence
  Description of Artificial Sequence: Synthetic oligonucleotide
uuuuaauacagcuguauca

SEQ ID NO: 114440 - RNA, 19 nt, Artificial Sequence
  Description of Artificial Sequence: Synthetic oligonucleotide
agaguuaaaacuauauggc

SEQ ID NO: 114441 - RNA, 19 nt, Artificial Sequence
  Description of Artificial Sequence: Synthetic oligonucleotide
auauauauauaucacguga

SEQ ID NO: 114442 - RNA, 19 nt, Artificial Sequence
  Description of Artificial Sequence: Synthetic oligonucleotide
aacaacucagccaauacac

SEQ ID NO: 114443 - RNA, 19 nt, Artificial Sequence
  Description of Artificial Sequence: Synthetic oligonucleotide
uguauacuccaguagacgg

SEQ ID NO: 114444 - RNA, 19 nt, Artificial Sequence
  Description of Artificial Sequence: Synthetic oligonucleotide
uauauauauauaauaaauu

SEQ ID NO: 114445 - RNA, 19 nt, Artificial Sequence
  Description of Artificial Sequence: Synthetic oligonucleotide
aguagugugaguaggagcc

SEQ ID NO: 114446 - RNA, 19 nt, Artificial Sequence
  Description of Artificial Sequence: Synthetic oligonucleotide
aguauuauauuuuccucgg

SEQ ID NO: 114447 - RNA, 19 nt, Artificial Sequence
  Description of Artificial Sequence: Synthetic oligonucleotide
aggaucacgagccucacgc

SEQ ID NO: 114448 - RNA, 19 nt, Artificial Sequence
  Description of Artificial Sequence: Synthetic oligonucleotide
ugaguauauauauauauau

SEQ ID NO: 114449 - RNA, 19 nt, Artificial Sequence
  Description of Artificial Sequence: Synthetic oligonucleotide
ugugauuagaacaaucagu

SEQ ID NO: 114450 - RNA, 19 nt, Artificial Sequence
  Description of Artificial Sequence: Synthetic oligonucleotide
uauauauauauauaauaaa

SEQ ID NO: 114451 - RNA, 19 nt, Artificial Sequence
  Description of Artificial Sequence: Synthetic oligonucleotide
auauauaucacgugaacga

SEQ ID NO: 114452 - RNA, 19 nt, Artificial Sequence
  Description of Artificial Sequence: Synthetic oligonucleotide
gaagaaauaccgcaaucgg

SEQ ID NO: 114453 - RNA, 19 nt, Artificial Sequence
  Description of Artificial Sequence: Synthetic oligonucleotide
auuguuacaauaauacagg

SEQ ID NO: 114454 - RNA, 19 nt, Artificial Sequence
  Description of Artificial Sequence: Synthetic oligonucleotide
uguuacaauaauacaggcc

SEQ ID NO: 114455 - RNA, 19 nt, Artificial Sequence
  Description of Artificial Sequence: Synthetic oligonucleotide
agaagaaauaccgcaaucg

SEQ ID NO: 114456 - RNA, 19 nt, Artificial Sequence
  Description of Artificial Sequence: Synthetic oligonucleotide
agaaauaccgcaaucggac

SEQ ID NO: 114457 - RNA, 19 nt, Artificial Sequence
  Description of Artificial Sequence: Synthetic oligonucleotide
uauauauauauaucacgug

SEQ ID NO: 114458 - RNA, 19 nt, Artificial Sequence
  Description of Artificial Sequence: Synthetic oligonucleotide
auuggguucuccucggacc

SEQ ID NO: 114459 - RNA, 19 nt, Artificial Sequence
  Description of Artificial Sequence: Synthetic oligonucleotide
auaggcuaaacuucugaac

SEQ ID NO: 114460 - RNA, 19 nt, Artificial Sequence
  Description of Artificial Sequence: Synthetic oligonucleotide
auauauauauauaucacgu

SEQ ID NO: 114461 - RNA, 19 nt, Artificial Sequence
  Description of Artificial Sequence: Synthetic oligonucleotide
auauauauauauaauaaau

SEQ ID NO: 114462 - RNA, 19 nt, Artificial Sequence
  Description of Artificial Sequence: Synthetic oligonucleotide
uguauuguggagauauaca

SEQ ID NO: 114463 - RNA, 19 nt, Artificial Sequence
  Description of Artificial Sequence: Synthetic oligonucleotide
auuugaggaaauuugaauu

SEQ ID NO: 114464 - RNA, 19 nt, Artificial Sequence
  Description of Artificial Sequence: Synthetic oligonucleotide
auauauauauauauaauaa

SEQ ID NO: 114465 - RNA, 19 nt, Artificial Sequence
  Description of Artificial Sequence: Synthetic oligonucleotide
uaguuugacauuugggucc

SEQ ID NO: 114466 - RNA, 19 nt, Artificial Sequence
  Description of Artificial Sequence: Synthetic oligonucleotide
uuugaggaaauuugaauuc

SEQ ID NO: 114467 - RNA, 19 nt, Artificial Sequence
  Description of Artificial Sequence: Synthetic oligonucleotide
aauauugguuguccuagca

SEQ ID NO: 114468 - RNA, 19 nt, Artificial Sequence
  Description of Artificial Sequence: Synthetic oligonucleotide
ucaaugaagaagggaagcg

SEQ ID NO: 114469 - RNA, 19 nt, Artificial Sequence
  Description of Artificial Sequence: Synthetic oligonucleotide
agugguguuaaucgggcgg

SEQ ID NO: 114470 - RNA, 19 nt, Artificial Sequence
  Description of Artificial Sequence: Synthetic oligonucleotide
acagaguuaaaacuauaug

SEQ ID NO: 114471 - RNA, 19 nt, Artificial Sequence
  Description of Artificial Sequence: Synthetic oligonucleotide
ucaagcuaaccccuuaugu

SEQ ID NO: 114472 - RNA, 19 nt, Artificial Sequence
  Description of Artificial Sequence: Synthetic oligonucleotide
aacgagggcaaauacuuga

SEQ ID NO: 114473 - RNA, 19 nt, Artificial Sequence
  Description of Artificial Sequence: Synthetic oligonucleotide
cuauguuacaaugaucuag

SEQ ID NO: 114474 - RNA, 19 nt, Artificial Sequence
  Description of Artificial Sequence: Synthetic oligonucleotide
auacaucuaugcuagaggu

SEQ ID NO: 114475 - RNA, 19 nt, Artificial Sequence
  Description of Artificial Sequence: Synthetic oligonucleotide
uacauugcuagaguuauug

SEQ ID NO: 114476 - RNA, 19 nt, Artificial Sequence
  Description of Artificial Sequence: Synthetic oligonucleotide
ugguguauacuccaguaga

SEQ ID NO: 114477 - RNA, 19 nt, Artificial Sequence
  Description of Artificial Sequence: Synthetic oligonucleotide
agguuaaugauaaaugcag

SEQ ID NO: 114478 - RNA, 19 nt, Artificial Sequence
  Description of Artificial Sequence: Synthetic oligonucleotide
gaagucgcgagucagcggc

SEQ ID NO: 114479 - RNA, 19 nt, Artificial Sequence
  Description of Artificial Sequence: Synthetic oligonucleotide
aguuucuaccagaaaaggc

SEQ ID NO: 114480 - RNA, 19 nt, Artificial Sequence
  Description of Artificial Sequence: Synthetic oligonucleotide
guuacaaugaucuagcuuu

SEQ ID NO: 114481 - RNA, 19 nt, Artificial Sequence
  Description of Artificial Sequence: Synthetic oligonucleotide
ugaacgagggcaaauacuu

SEQ ID NO: 114482 - RNA, 19 nt, Artificial Sequence
  Description of Artificial Sequence: Synthetic oligonucleotide
uauauaucacgugaacgag

SEQ ID NO: 114483 - RNA, 19 nt, Artificial Sequence
  Description of Artificial Sequence: Synthetic oligonucleotide
auaucucgauggcagauuc

SEQ ID NO: 114484 - RNA, 19 nt, Artificial Sequence
  Description of Artificial Sequence: Synthetic oligonucleotide
ugucugguuauuaaacaga

SEQ ID NO: 114485 - RNA, 19 nt, Artificial Sequence
  Description of Artificial Sequence: Synthetic oligonucleotide
ucuggugcccuauaguacc

SEQ ID NO: 114486 - RNA, 19 nt, Artificial Sequence
  Description of Artificial Sequence: Synthetic oligonucleotide
ucacgcuugaagagaaggg

SEQ ID NO: 114487 - RNA, 19 nt, Artificial Sequence
  Description of Artificial Sequence: Synthetic oligonucleotide
uguagacagauaauaguaa

SEQ ID NO: 114488 - RNA, 19 nt, Artificial Sequence
  Description of Artificial Sequence: Synthetic oligonucleotide
cuaugcuagagguauaauc

SEQ ID NO: 114489 - RNA, 19 nt, Artificial Sequence
  Description of Artificial Sequence: Synthetic oligonucleotide
uggaguggaauccuuaaaa

SEQ ID NO: 114490 - RNA, 19 nt, Artificial Sequence
  Description of Artificial Sequence: Synthetic oligonucleotide
uagaacaaucaguagugug

SEQ ID NO: 114491 - RNA, 19 nt, Artificial Sequence
  Description of Artificial Sequence: Synthetic oligonucleotide
accgcacacaugcacacgc

SEQ ID NO: 114492 - RNA, 19 nt, Artificial Sequence
  Description of Artificial Sequence: Synthetic oligonucleotide
uguacagaguuaaaacuau

SEQ ID NO: 114493 - RNA, 19 nt, Artificial Sequence
  Description of Artificial Sequence: Synthetic oligonucleotide
cacacacacacacacacgc

SEQ ID NO: 114494 - RNA, 19 nt, Artificial Sequence
  Description of Artificial Sequence: Synthetic oligonucleotide
aauaaguacucugaguauu

SEQ ID NO: 114495 - RNA, 19 nt, Artificial Sequence
  Description of Artificial Sequence: Synthetic oligonucleotide
acucuauacacuguuuccg

SEQ ID NO: 114496 - RNA, 19 nt, Artificial Sequence
  Description of Artificial Sequence: Synthetic oligonucleotide
aaggaugugccuugauuug

SEQ ID NO: 114497 - RNA, 19 nt, Artificial Sequence
  Description of Artificial Sequence: Synthetic oligonucleotide
aauacagcuguaucaggau

SEQ ID NO: 114498 - RNA, 19 nt, Artificial Sequence
  Description of Artificial Sequence: Synthetic oligonucleotide
ugucucgcccauuugguag

SEQ ID NO: 114499 - RNA, 19 nt, Artificial Sequence
  Description of Artificial Sequence: Synthetic oligonucleotide
ugcccuauaguaccgagaa

SEQ ID NO: 114500 - RNA, 19 nt, Artificial Sequence
  Description of Artificial Sequence: Synthetic oligonucleotide
auauaggcuaaacuucuga

SEQ ID NO: 114501 - RNA, 19 nt, Artificial Sequence
  Description of Artificial Sequence: Synthetic oligonucleotide
uuguauuguggagauauac

SEQ ID NO: 114502 - RNA, 19 nt, Artificial Sequence
  Description of Artificial Sequence: Synthetic oligonucleotide
uaacccagugaaaaggauc

SEQ ID NO: 114503 - RNA, 19 nt, Artificial Sequence
  Description of Artificial Sequence: Synthetic oligonucleotide
uguuacaaugaucuagcuu

SEQ ID NO: 114504 - RNA, 19 nt, Artificial Sequence
  Description of Artificial Sequence: Synthetic oligonucleotide
cacacacacacacacacac

SEQ ID NO: 114505 - RNA, 19 nt, Artificial Sequence
  Description of Artificial Sequence: Synthetic oligonucleotide
auauauauauauauauaau

SEQ ID NO: 114506 - RNA, 19 nt, Artificial Sequence
  Description of Artificial Sequence: Synthetic oligonucleotide
cuuaaaucgcuuguccugc

SEQ ID NO: 114507 - RNA, 19 nt, Artificial Sequence
  Description of Artificial Sequence: Synthetic oligonucleotide
uguucguagggguggaagc

SEQ ID NO: 114508 - RNA, 19 nt, Artificial Sequence
  Description of Artificial Sequence: Synthetic oligonucleotide
aaucggacuauguuacaau

SEQ ID NO: 114509 - RNA, 19 nt, Artificial Sequence
  Description of Artificial Sequence: Synthetic oligonucleotide
aucggacuauguuacaaug

SEQ ID NO: 114510 - RNA, 19 nt, Artificial Sequence
  Description of Artificial Sequence: Synthetic oligonucleotide
ugcuugaauccgagcaugg

SEQ ID NO: 114511 - RNA, 19 nt, Artificial Sequence
  Description of Artificial Sequence: Synthetic oligonucleotide
ucggacuauguuacaauga

SEQ ID NO: 114512 - RNA, 19 nt, Artificial Sequence
  Description of Artificial Sequence: Synthetic oligonucleotide
acuugauugaaaauaagua

SEQ ID NO: 114513 - RNA, 19 nt, Artificial Sequence
  Description of Artificial Sequence: Synthetic oligonucleotide
acuauacauugcuagaguu

SEQ ID NO: 114514 - RNA, 19 nt, Artificial Sequence
  Description of Artificial Sequence: Synthetic oligonucleotide
uuaauaucucgauggcaga

SEQ ID NO: 114515 - RNA, 19 nt, Artificial Sequence
  Description of Artificial Sequence: Synthetic oligonucleotide
aaauaccgcaaucggacua

SEQ ID NO: 114516 - RNA, 19 nt, Artificial Sequence
  Description of Artificial Sequence: Synthetic oligonucleotide
acaucuaugcuagagguau

SEQ ID NO: 114517 - RNA, 19 nt, Artificial Sequence
  Description of Artificial Sequence: Synthetic oligonucleotide
auauaucacgugaacgagg

SEQ ID NO: 114518 - RNA, 19 nt, Artificial Sequence
  Description of Artificial Sequence: Synthetic oligonucleotide
ugcuagguuaaugauaaau

SEQ ID NO: 114519 - RNA, 19 nt, Artificial Sequence
  Description of Artificial Sequence: Synthetic oligonucleotide
guguuaaucgggcgguugg

SEQ ID NO: 114520 - RNA, 19 nt, Artificial Sequence
  Description of Artificial Sequence: Synthetic oligonucleotide
uauuaggguugcuagguua

SEQ ID NO: 114521 - RNA, 19 nt, Artificial Sequence
  Description of Artificial Sequence: Synthetic oligonucleotide
ucuauacacuguuuccgga

SEQ ID NO: 114522 - RNA, 19 nt, Artificial Sequence
  Description of Artificial Sequence: Synthetic oligonucleotide
ugcuagagguauaaucagu

SEQ ID NO: 114523 - RNA, 19 nt, Artificial Sequence
  Description of Artificial Sequence: Synthetic oligonucleotide
gaggcggguuacuugacag

SEQ ID NO: 114524 - RNA, 19 nt, Artificial Sequence
  Description of Artificial Sequence: Synthetic oligonucleotide
cuugauauaccacaccaaa

SEQ ID NO: 114525 - RNA, 19 nt, Artificial Sequence
  Description of Artificial Sequence: Synthetic oligonucleotide
ucucgguucuuaaaucgcu

SEQ ID NO: 114526 - RNA, 19 nt, Artificial Sequence
  Description of Artificial Sequence: Synthetic oligonucleotide
cacacacacacacacgcgc

SEQ ID NO: 114527 - RNA, 19 nt, Artificial Sequence
  Description of Artificial Sequence: Synthetic oligonucleotide
aacucuggugcccuauagu

SEQ ID NO: 114528 - RNA, 19 nt, Artificial Sequence
  Description of Artificial Sequence: Synthetic oligonucleotide
auauauauauauauauaua

SEQ ID NO: 114529 - RNA, 19 nt, Artificial Sequence
  Description of Artificial Sequence: Synthetic oligonucleotide
uuaaucgggcgguuggugu

SEQ ID NO: 114530 - RNA, 19 nt, Artificial Sequence
  Description of Artificial Sequence: Synthetic oligonucleotide
cucacgcuugaagagaagg

SEQ ID NO: 114531 - RNA, 19 nt, Artificial Sequence
  Description of Artificial Sequence: Synthetic oligonucleotide
aaaucgcuuguccugcaaa

SEQ ID NO: 114532 - RNA, 19 nt, Artificial Sequence
  Description of Artificial Sequence: Synthetic oligonucleotide
ucgguucuuaaaucgcuug

SEQ ID NO: 114533 - RNA, 19 nt, Artificial Sequence
  Description of Artificial Sequence: Synthetic oligonucleotide
aaauggcauaacccaguga

SEQ ID NO: 114534 - RNA, 19 nt, Artificial Sequence
  Description of Artificial Sequence: Synthetic oligonucleotide
ucaguagugugaguaggag

SEQ ID NO: 114535 - RNA, 19 nt, Artificial Sequence
  Description of Artificial Sequence: Synthetic oligonucleotide
uauacuccaguagacggcu

SEQ ID NO: 114536 - RNA, 19 nt, Artificial Sequence
  Description of Artificial Sequence: Synthetic oligonucleotide
cacgcuugaagagaagggg

SEQ ID NO: 114537 - RNA, 19 nt, Artificial Sequence
  Description of Artificial Sequence: Synthetic oligonucleotide
caguagugugaguaggagc

SEQ ID NO: 114538 - RNA, 19 nt, Artificial Sequence
  Description of Artificial Sequence: Synthetic oligonucleotide
ggauccggcggucugaagg

SEQ ID NO: 114539 - RNA, 19 nt, Artificial Sequence
  Description of Artificial Sequence: Synthetic oligonucleotide
ucacuuuagugucuguaua

SEQ ID NO: 114540 - RNA, 19 nt, Artificial Sequence
  Description of Artificial Sequence: Synthetic oligonucleotide
guguauacuccaguagacg

SEQ ID NO: 114541 - RNA, 19 nt, Artificial Sequence
  Description of Artificial Sequence: Synthetic oligonucleotide
cuauuuuaaguccaggggu

SEQ ID NO: 114542 - RNA, 19 nt, Artificial Sequence
  Description of Artificial Sequence: Synthetic oligonucleotide
gcuagguuaaugauaaaug

SEQ ID NO: 114543 - RNA, 19 nt, Artificial Sequence
  Description of Artificial Sequence: Synthetic oligonucleotide
ucuuuaucucugcuaacuu

SEQ ID NO: 114544 - RNA, 19 nt, Artificial Sequence
  Description of Artificial Sequence: Synthetic oligonucleotide
uucucggucgccccgacau

SEQ ID NO: 114545 - RNA, 19 nt, Artificial Sequence
  Description of Artificial Sequence: Synthetic oligonucleotide
cugaaucacaaaguuuggc

SEQ ID NO: 114546 - RNA, 19 nt, Artificial Sequence
  Description of Artificial Sequence: Synthetic oligonucleotide
guauauauauauauauaua

SEQ ID NO: 114547 - RNA, 19 nt, Artificial Sequence
  Description of Artificial Sequence: Synthetic oligonucleotide
agaugcgacggcuaacgcu

SEQ ID NO: 114548 - RNA, 19 nt, Artificial Sequence
  Description of Artificial Sequence: Synthetic oligonucleotide
auaucacgugaacgagggc

SEQ ID NO: 114549 - RNA, 19 nt, Artificial Sequence
  Description of Artificial Sequence: Synthetic oligonucleotide
cucucgguucuuaaaucgc

SEQ ID NO: 114550 - RNA, 19 nt, Artificial Sequence
  Description of Artificial Sequence: Synthetic oligonucleotide
gaauaaggaugguggccag

SEQ ID NO: 114551 - RNA, 19 nt, Artificial Sequence
  Description of Artificial Sequence: Synthetic oligonucleotide
ucgcccauuugguaguuug

SEQ ID NO: 114552 - RNA, 19 nt, Artificial Sequence
  Description of Artificial Sequence: Synthetic oligonucleotide
aacugucccuuucaggguu

SEQ ID NO: 114553 - RNA, 19 nt, Artificial Sequence
  Description of Artificial Sequence: Synthetic oligonucleotide
agcuauuuaaaagggugga

SEQ ID NO: 114554 - RNA, 19 nt, Artificial Sequence
  Description of Artificial Sequence: Synthetic oligonucleotide
gaguauauauauauauaua

SEQ ID NO: 114555 - RNA, 19 nt, Artificial Sequence
  Description of Artificial Sequence: Synthetic oligonucleotide
aauaccgcaaucggacuau

SEQ ID NO: 114556 - RNA, 19 nt, Artificial Sequence
  Description of Artificial Sequence: Synthetic oligonucleotide
cuguuuccggaacauaguc

SEQ ID NO: 114557 - RNA, 19 nt, Artificial Sequence
  Description of Artificial Sequence: Synthetic oligonucleotide
uggcuugauauaccacacc

SEQ ID NO: 114558 - RNA, 19 nt, Artificial Sequence
  Description of Artificial Sequence: Synthetic oligonucleotide
acacacacacacacgcgcc

SEQ ID NO: 114559 - RNA, 19 nt, Artificial Sequence
  Description of Artificial Sequence: Synthetic oligonucleotide
uaucucgauggcagauucc

SEQ ID NO: 114560 - RNA, 19 nt, Artificial Sequence
  Description of Artificial Sequence: Synthetic oligonucleotide
uucucccgcaagaaagaga

SEQ ID NO: 114561 - RNA, 19 nt, Artificial Sequence
  Description of Artificial Sequence: Synthetic oligonucleotide
gauauaggcuaaacuucug

SEQ ID NO: 114562 - RNA, 19 nt, Artificial Sequence
  Description of Artificial Sequence: Synthetic oligonucleotide
auacuugauugaaaauaag

SEQ ID NO: 114563 - RNA, 19 nt, Artificial Sequence
  Description of Artificial Sequence: Synthetic oligonucleotide
aauaucucgauggcagauu

SEQ ID NO: 114564 - RNA, 19 nt, Artificial Sequence
  Description of Artificial Sequence: Synthetic oligonucleotide
uaauaucucgauggcagau

SEQ ID NO: 114565 - RNA, 19 nt, Artificial Sequence
  Description of Artificial Sequence: Synthetic oligonucleotide
cagauuaagguagaccuca

SEQ ID NO: 114566 - RNA, 19 nt, Artificial Sequence
  Description of Artificial Sequence: Synthetic oligonucleotide
guauacuccaguagacggc

SEQ ID NO: 114567 - RNA, 19 nt, Artificial Sequence
  Description of Artificial Sequence: Synthetic oligonucleotide
acgagccucacgcuugaag

SEQ ID NO: 114568 - RNA, 19 nt, Artificial Sequence
  Description of Artificial Sequence: Synthetic oligonucleotide
uacaucuaugcuagaggua

SEQ ID NO: 114569 - RNA, 19 nt, Artificial Sequence
  Description of Artificial Sequence: Synthetic oligonucleotide
augaguauauauauauaua

SEQ ID NO: 114570 - RNA, 19 nt, Artificial Sequence
  Description of Artificial Sequence: Synthetic oligonucleotide
auauacaauggaacaacaa

SEQ ID NO: 114571 - RNA, 19 nt, Artificial Sequence
  Description of Artificial Sequence: Synthetic oligonucleotide
uuauguacuggcugucauu

SEQ ID NO: 114572 - RNA, 19 nt, Artificial Sequence
  Description of Artificial Sequence: Synthetic oligonucleotide
auggcucggagaugcgacg

SEQ ID NO: 114573 - RNA, 19 nt, Artificial Sequence
  Description of Artificial Sequence: Synthetic oligonucleotide
uaaaucgcuuguccugcaa

SEQ ID NO: 114574 - RNA, 19 nt, Artificial Sequence
  Description of Artificial Sequence: Synthetic oligonucleotide
guaggagccagacaaauuu

SEQ ID NO: 114575 - RNA, 19 nt, Artificial Sequence
  Description of Artificial Sequence: Synthetic oligonucleotide
uaggguugcuagguuaaug

SEQ ID NO: 114576 - RNA, 19 nt, Artificial Sequence
  Description of Artificial Sequence: Synthetic oligonucleotide
uccggcggucugaaggcgg

SEQ ID NO: 114577 - RNA, 19 nt, Artificial Sequence
  Description of Artificial Sequence: Synthetic oligonucleotide
uguauaauuuggguucauu

SEQ ID NO: 114578 - RNA, 19 nt, Artificial Sequence
  Description of Artificial Sequence: Synthetic oligonucleotide
caagcuaaccccuuaugua

SEQ ID NO: 114579 - RNA, 19 nt, Artificial Sequence
  Description of Artificial Sequence: Synthetic oligonucleotide
cauaagggaugcuagauuu

SEQ ID NO: 114580 - RNA, 19 nt, Artificial Sequence
  Description of Artificial Sequence: Synthetic oligonucleotide
ugaagagugcagguguguc

SEQ ID NO: 114581 - RNA, 19 nt, Artificial Sequence
  Description of Artificial Sequence: Synthetic oligonucleotide
agggugaaacauguucauc

SEQ ID NO: 114582 - RNA, 19 nt, Artificial Sequence
  Description of Artificial Sequence: Synthetic oligonucleotide
ggcggaaggaucacgagcc

SEQ ID NO: 114583 - RNA, 19 nt, Artificial Sequence
  Description of Artificial Sequence: Synthetic oligonucleotide
uuggcucgacuauaguguc

SEQ ID NO: 114584 - RNA, 19 nt, Artificial Sequence
  Description of Artificial Sequence: Synthetic oligonucleotide
gaaugaguauauauauaua

SEQ ID NO: 114585 - RNA, 19 nt, Artificial Sequence
  Description of Artificial Sequence: Synthetic oligonucleotide
gggugaaacauguucaucu

SEQ ID NO: 114586 - RNA, 19 nt, Artificial Sequence
  Description of Artificial Sequence: Synthetic oligonucleotide
acuauguuacaaugaucua

SEQ ID NO: 114587 - RNA, 19 nt, Artificial Sequence
  Description of Artificial Sequence: Synthetic oligonucleotide
cagugguguuaaucgggcg

SEQ ID NO: 114588 - RNA, 19 nt, Artificial Sequence
  Description of Artificial Sequence: Synthetic oligonucleotide
ucggagaugcgacggcuaa

SEQ ID NO: 114589 - RNA, 19 nt, Artificial Sequence
  Description of Artificial Sequence: Synthetic oligonucleotide
agcgaagucgcgagucagc

SEQ ID NO: 114590 - RNA, 19 nt, Artificial Sequence
  Description of Artificial Sequence: Synthetic oligonucleotide
accauaagggaugcuagau

SEQ ID NO: 114591 - RNA, 19 nt, Artificial Sequence
  Description of Artificial Sequence: Synthetic oligonucleotide
uggcucggagaugcgacgg

SEQ ID NO: 114592 - RNA, 19 nt, Artificial Sequence
  Description of Artificial Sequence: Synthetic oligonucleotide
cuggugcccuauaguaccg

SEQ ID NO: 114593 - RNA, 19 nt, Artificial Sequence
  Description of Artificial Sequence: Synthetic oligonucleotide
uguuaaucgggcgguuggu

SEQ ID NO: 114594 - RNA, 19 nt, Artificial Sequence
  Description of Artificial Sequence: Synthetic oligonucleotide
gaacgagggcaaauacuug

SEQ ID NO: 114595 - RNA, 19 nt, Artificial Sequence
  Description of Artificial Sequence: Synthetic oligonucleotide
uggucacgcuaauugguau

SEQ ID NO: 114596 - RNA, 19 nt, Artificial Sequence
  Description of Artificial Sequence: Synthetic oligonucleotide
guuaaucgggcgguuggug

SEQ ID NO: 114597 - RNA, 19 nt, Artificial Sequence
  Description of Artificial Sequence: Synthetic oligonucleotide
ugcgacggcuaacgcugcg

SEQ ID NO: 114598 - RNA, 19 nt, Artificial Sequence
  Description of Artificial Sequence: Synthetic oligonucleotide
acacacacacacacacacg

SEQ ID NO: 114599 - RNA, 19 nt, Artificial Sequence
  Description of Artificial Sequence: Synthetic oligonucleotide
cuggaucucacuuguguaa

SEQ ID NO: 114600 - RNA, 19 nt, Artificial Sequence
  Description of Artificial Sequence: Synthetic oligonucleotide
gagaugcgacggcuaacgc

SEQ ID NO: 114601 - RNA, 19 nt, Artificial Sequence
  Description of Artificial Sequence: Synthetic oligonucleotide
guguucguagggguggaag

SEQ ID NO: 114602 - RNA, 19 nt, Artificial Sequence
  Description of Artificial Sequence: Synthetic oligonucleotide
agaggcggguuacuugaca

SEQ ID NO: 114603 - RNA, 19 nt, Artificial Sequence
  Description of Artificial Sequence: Synthetic oligonucleotide
acacacacacacacacgcg

SEQ ID NO: 114604 - RNA, 19 nt, Artificial Sequence
  Description of Artificial Sequence: Synthetic oligonucleotide
gaaauaccgcaaucggacu

SEQ ID NO: 114605 - RNA, 19 nt, Artificial Sequence
  Description of Artificial Sequence: Synthetic oligonucleotide
cccuauaguaccgagaaca

SEQ ID NO: 114606 - RNA, 19 nt, Artificial Sequence
  Description of Artificial Sequence: Synthetic oligonucleotide
acauuugggucccguaauu

SEQ ID NO: 114607 - RNA, 19 nt, Artificial Sequence
  Description of Artificial Sequence: Synthetic oligonucleotide
aucaguagugugaguagga

SEQ ID NO: 114608 - RNA, 19 nt, Artificial Sequence
  Description of Artificial Sequence: Synthetic oligonucleotide
uaccgcaaucggacuaugu

SEQ ID NO: 114609 - RNA, 19 nt, Artificial Sequence
  Description of Artificial Sequence: Synthetic oligonucleotide
gcaacaacucagccaauac

SEQ ID NO: 114610 - RNA, 19 nt, Artificial Sequence
  Description of Artificial Sequence: Synthetic oligonucleotide
agauggaaguggucacgcu

SEQ ID NO: 114611 - RNA, 19 nt, Artificial Sequence
  Description of Artificial Sequence: Synthetic oligonucleotide
cugcuugaauccgagcaug

SEQ ID NO: 114612 - RNA, 19 nt, Artificial Sequence
  Description of Artificial Sequence: Synthetic oligonucleotide
ccauacaucuaugcuagag

SEQ ID NO: 114613 - RNA, 19 nt, Artificial Sequence
  Description of Artificial Sequence: Synthetic oligonucleotide
gccgguaccuacuguacag

SEQ ID NO: 114614 - RNA, 19 nt, Artificial Sequence
  Description of Artificial Sequence: Synthetic oligonucleotide
aaccccuuauguacuggcu

SEQ ID NO: 114615 - RNA, 19 nt, Artificial Sequence
  Description of Artificial Sequence: Synthetic oligonucleotide
aggaugugccuugauuuga

SEQ ID NO: 114616 - RNA, 19 nt, Artificial Sequence
  Description of Artificial Sequence: Synthetic oligonucleotide
cuuugucaagcuaaccccu

SEQ ID NO: 114617 - RNA, 19 nt, Artificial Sequence
  Description of Artificial Sequence: Synthetic oligonucleotide
ccaggaguugccaccacag

SEQ ID NO: 114618 - RNA, 19 nt, Artificial Sequence
  Description of Artificial Sequence: Synthetic oligonucleotide
uggcucgacuauagugucu

SEQ ID NO: 114619 - RNA, 19 nt, Artificial Sequence
  Description of Artificial Sequence: Synthetic oligonucleotide
agugucuggcaacucuaua

SEQ ID NO: 114620 - RNA, 19 nt, Artificial Sequence
  Description of Artificial Sequence: Synthetic oligonucleotide
cgcaaucggacuauguuac

SEQ ID NO: 114621 - RNA, 19 nt, Artificial Sequence
  Description of Artificial Sequence: Synthetic oligonucleotide
ggugcccuauaguaccgag

SEQ ID NO: 114622 - RNA, 19 nt, Artificial Sequence
  Description of Artificial Sequence: Synthetic oligonucleotide
ugcccugaacaguaacuuu

SEQ ID NO: 114623 - RNA, 19 nt, Artificial Sequence
  Description of Artificial Sequence: Synthetic oligonucleotide
acaauaauacaggccggua

SEQ ID NO: 114624 - RNA, 19 nt, Artificial Sequence
  Description of Artificial Sequence: Synthetic oligonucleotide
ggcucgacuauagugucug

SEQ ID NO: 114625 - RNA, 19 nt, Artificial Sequence
  Description of Artificial Sequence: Synthetic oligonucleotide
acgcuaauugguaugugua

SEQ ID NO: 114626 - RNA, 19 nt, Artificial Sequence
  Description of Artificial Sequence: Synthetic oligonucleotide
aagucgcgagucagcggcg

SEQ ID NO: 114627 - RNA, 19 nt, Artificial Sequence
  Description of Artificial Sequence: Synthetic oligonucleotide
gcgaagucgcgagucagcg

SEQ ID NO: 114628 - RNA, 19 nt, Artificial Sequence
  Description of Artificial Sequence: Synthetic oligonucleotide
ucacgcuaauugguaugug

SEQ ID NO: 114629 - RNA, 19 nt, Artificial Sequence
  Description of Artificial Sequence: Synthetic oligonucleotide
cacgcuaauugguaugugu

SEQ ID NO: 114630 - RNA, 19 nt, Artificial Sequence
  Description of Artificial Sequence: Synthetic oligonucleotide
caacucagccaauacacau

SEQ ID NO: 114631 - RNA, 19 nt, Artificial Sequence
  Description of Artificial Sequence: Synthetic oligonucleotide
caccauaagggaugcuaga

SEQ ID NO: 114632 - RNA, 19 nt, Artificial Sequence
  Description of Artificial Sequence: Synthetic oligonucleotide
ucucggucgccccgacaug

SEQ ID NO: 114633 - RNA, 19 nt, Artificial Sequence
  Description of Artificial Sequence: Synthetic oligonucleotide
cgcacacacacacacacac

SEQ ID NO: 114634 - RNA, 19 nt, Artificial Sequence
  Description of Artificial Sequence: Synthetic oligonucleotide
aggcggguuacuugacagu

SEQ ID NO: 114635 - RNA, 19 nt, Artificial Sequence
  Description of Artificial Sequence: Synthetic oligonucleotide
ucauugcgccaggagcagc

SEQ ID NO: 114636 - RNA, 19 nt, Artificial Sequence
  Description of Artificial Sequence: Synthetic oligonucleotide
gcuaaccccuuauguacug

SEQ ID NO: 114637 - RNA, 19 nt, Artificial Sequence
  Description of Artificial Sequence: Synthetic oligonucleotide
ggauauaggcuaaacuucu

SEQ ID NO: 114638 - RNA, 19 nt, Artificial Sequence
  Description of Artificial Sequence: Synthetic oligonucleotide
agccucacgcuugaagaga

SEQ ID NO: 114639 - RNA, 19 nt, Artificial Sequence
  Description of Artificial Sequence: Synthetic oligonucleotide
agucgcgagucagcggcgg

SEQ ID NO: 114640 - RNA, 19 nt, Artificial Sequence
  Description of Artificial Sequence: Synthetic oligonucleotide
cucauugcgccaggagcag

SEQ ID NO: 114641 - RNA, 19 nt, Artificial Sequence
  Description of Artificial Sequence: Synthetic oligonucleotide
guacaggcccaagugccug

SEQ ID NO: 114642 - RNA, 19 nt, Artificial Sequence
  Description of Artificial Sequence: Synthetic oligonucleotide
gguguuaaucgggcgguug

SEQ ID NO: 114643 - RNA, 19 nt, Artificial Sequence
  Description of Artificial Sequence: Synthetic oligonucleotide
gcuaacuuucaugcuacca

SEQ ID NO: 114644 - RNA, 19 nt, Artificial Sequence
  Description of Artificial Sequence: Synthetic oligonucleotide
gacuccguccucuuggcuu

SEQ ID NO: 114645 - RNA, 19 nt, Artificial Sequence
  Description of Artificial Sequence: Synthetic oligonucleotide
gucgccccgacaugauggc

SEQ ID NO: 114646 - RNA, 19 nt, Artificial Sequence
  Description of Artificial Sequence: Synthetic oligonucleotide
ccagauuaagguagaccuc

SEQ ID NO: 114647 - RNA, 19 nt, Artificial Sequence
  Description of Artificial Sequence: Synthetic oligonucleotide
gagauggcucggagaugcg

SEQ ID NO: 114648 - RNA, 19 nt, Artificial Sequence
  Description of Artificial Sequence: Synthetic oligonucleotide
gagggcagcgaagucgcga

SEQ ID NO: 114649 - RNA, 19 nt, Artificial Sequence
  Description of Artificial Sequence: Synthetic oligonucleotide
gaguucggggccggaagac

SEQ ID NO: 114650 - RNA, 19 nt, Artificial Sequence
  Description of Artificial Sequence: Synthetic oligonucleotide
cagcgaagucgcgagucag

SEQ ID NO: 114651 - RNA, 19 nt, Artificial Sequence
  Description of Artificial Sequence: Synthetic oligonucleotide
uuaggguugcuagguuaau

SEQ ID NO: 114652 - RNA, 19 nt, Artificial Sequence
  Description of Artificial Sequence: Synthetic oligonucleotide
auaagggaugcuagauuuu

SEQ ID NO: 114653 - RNA, 19 nt, Artificial Sequence
  Description of Artificial Sequence: Synthetic oligonucleotide
acacacacacacacacaca

SEQ ID NO: 114654 - RNA, 19 nt, Artificial Sequence
  Description of Artificial Sequence: Synthetic oligonucleotide
cuuauguacuggcugucau

SEQ ID NO: 114655 - RNA, 19 nt, Artificial Sequence
  Description of Artificial Sequence: Synthetic oligonucleotide
gucgcgagucagcggcggg

SEQ ID NO: 114656 - RNA, 19 nt, Artificial Sequence
  Description of Artificial Sequence: Synthetic oligonucleotide
cgcuaauugguauguguac

SEQ ID NO: 114657 - RNA, 19 nt, Artificial Sequence
  Description of Artificial Sequence: Synthetic oligonucleotide
gacggcuacacagugcaau

SEQ ID NO: 114658 - RNA, 19 nt, Artificial Sequence
  Description of Artificial Sequence: Synthetic oligonucleotide
acgugaacgagggcaaaua

SEQ ID NO: 114659 - RNA, 19 nt, Artificial Sequence
  Description of Artificial Sequence: Synthetic oligonucleotide
ccuguagacagauaauagu

SEQ ID NO: 114660 - RNA, 19 nt, Artificial Sequence
  Description of Artificial Sequence: Synthetic oligonucleotide
agugugaguaggagccaga

SEQ ID NO: 114661 - RNA, 19 nt, Artificial Sequence
  Description of Artificial Sequence: Synthetic oligonucleotide
auacaggccgguaccuacu

SEQ ID NO: 114662 - RNA, 19 nt, Artificial Sequence
  Description of Artificial Sequence: Synthetic oligonucleotide
ggaagcggcggaaggauca

SEQ ID NO: 114663 - RNA, 19 nt, Artificial Sequence
  Description of Artificial Sequence: Synthetic oligonucleotide
aggcaggcuucaccauaag

SEQ ID NO: 114664 - RNA, 19 nt, Artificial Sequence
  Description of Artificial Sequence: Synthetic oligonucleotide
aggcuucaccauaagggau

SEQ ID NO: 114665 - RNA, 19 nt, Artificial Sequence
  Description of Artificial Sequence: Synthetic oligonucleotide
ggugaaccggagggcagcg

SEQ ID NO: 114666 - RNA, 19 nt, Artificial Sequence
  Description of Artificial Sequence: Synthetic oligonucleotide
gucugaaggcggcggcggc

SEQ ID NO: 114667 - RNA, 19 nt, Artificial Sequence
  Description of Artificial Sequence: Synthetic oligonucleotide
agauuaagguagaccucau

SEQ ID NO: 114668 - RNA, 19 nt, Artificial Sequence
  Description of Artificial Sequence: Synthetic oligonucleotide
guaaccaagacagcagcuu

SEQ ID NO: 114669 - RNA, 19 nt, Artificial Sequence
  Description of Artificial Sequence: Synthetic oligonucleotide
caggccgguaccuacugua

SEQ ID NO: 114670 - RNA, 19 nt, Artificial Sequence
  Description of Artificial Sequence: Synthetic oligonucleotide
gucacgcuaauugguaugu

SEQ ID NO: 114671 - RNA, 19 nt, Artificial Sequence
  Description of Artificial Sequence: Synthetic oligonucleotide
cgugaacgagggcaaauac

SEQ ID NO: 114672 - RNA, 19 nt, Artificial Sequence
  Description of Artificial Sequence: Synthetic oligonucleotide
cgcgcacacacacacacac

SEQ ID NO: 114673 - RNA, 19 nt, Artificial Sequence
  Description of Artificial Sequence: Synthetic oligonucleotide
gcgguugguguauacucca

SEQ ID NO: 114674 - RNA, 19 nt, Artificial Sequence
  Description of Artificial Sequence: Synthetic oligonucleotide
cagaggcggguuacuugac

SEQ ID NO: 114675 - RNA, 19 nt, Artificial Sequence
  Description of Artificial Sequence: Synthetic oligonucleotide
guagugugaguaggagcca

SEQ ID NO: 114676 - RNA, 19 nt, Artificial Sequence
  Description of Artificial Sequence: Synthetic oligonucleotide
caccgcacacaugcacacg

SEQ ID NO: 114677 - RNA, 19 nt, Artificial Sequence
  Description of Artificial Sequence: Synthetic oligonucleotide
ggaguucggggccggaaga

SEQ ID NO: 114678 - RNA, 19 nt, Artificial Sequence
  Description of Artificial Sequence: Synthetic oligonucleotide
auaccgcaaucggacuaug

SEQ ID NO: 114679 - RNA, 19 nt, Artificial Sequence
  Description of Artificial Sequence: Synthetic oligonucleotide
gaggugguucucggucgcc

SEQ ID NO: 114680 - RNA, 19 nt, Artificial Sequence
  Description of Artificial Sequence: Synthetic oligonucleotide
guggucacgcuaauuggua

SEQ ID NO: 114681 - RNA, 19 nt, Artificial Sequence
  Description of Artificial Sequence: Synthetic oligonucleotide
ucacgugaacgagggcaaa

SEQ ID NO: 114682 - RNA, 19 nt, Artificial Sequence
  Description of Artificial Sequence: Synthetic oligonucleotide
ggcaacucuauacacuguu

SEQ ID NO: 114683 - RNA, 19 nt, Artificial Sequence
  Description of Artificial Sequence: Synthetic oligonucleotide
gguugguguauacuccagu

SEQ ID NO: 114684 - RNA, 19 nt, Artificial Sequence
  Description of Artificial Sequence: Synthetic oligonucleotide
cucggucgccccgacauga

SEQ ID NO: 114685 - RNA, 19 nt, Artificial Sequence
  Description of Artificial Sequence: Synthetic oligonucleotide
gagucagcggcgggcggug

SEQ ID NO: 114686 - RNA, 19 nt, Artificial Sequence
  Description of Artificial Sequence: Synthetic oligonucleotide
gugcccuauaguaccgaga

SEQ ID NO: 114687 - RNA, 19 nt, Artificial Sequence
  Description of Artificial Sequence: Synthetic oligonucleotide
gugucucgcccauuuggua

SEQ ID NO: 114688 - RNA, 19 nt, Artificial Sequence
  Description of Artificial Sequence: Synthetic oligonucleotide
ggcagcgaagucgcgaguc

SEQ ID NO: 114689 - RNA, 19 nt, Artificial Sequence
  Description of Artificial Sequence: Synthetic oligonucleotide
gugguguuaaucgggcggu

SEQ ID NO: 114690 - RNA, 19 nt, Artificial Sequence
  Description of Artificial Sequence: Synthetic oligonucleotide
ucggucgccccgacaugau

SEQ ID NO: 114691 - RNA, 19 nt, Artificial Sequence
  Description of Artificial Sequence: Synthetic oligonucleotide
acacacacacacgcgccuu

SEQ ID NO: 114692 - RNA, 19 nt, Artificial Sequence
  Description of Artificial Sequence: Synthetic oligonucleotide
gacggcuaacgcugcggcu

SEQ ID NO: 114693 - RNA, 19 nt, Artificial Sequence
  Description of Artificial Sequence: Synthetic oligonucleotide
gcaaucggacuauguuaca

SEQ ID NO: 114694 - RNA, 19 nt, Artificial Sequence
  Description of Artificial Sequence: Synthetic oligonucleotide
cgcgcgcacacacacacac

SEQ ID NO: 114695 - RNA, 19 nt, Artificial Sequence
  Description of Artificial Sequence: Synthetic oligonucleotide
ggcucggagaugcgacggc

SEQ ID NO: 114696 - RNA, 19 nt, Artificial Sequence
  Description of Artificial Sequence: Synthetic oligonucleotide
ggccgguaccuacuguaca

SEQ ID NO: 114697 - RNA, 19 nt, Artificial Sequence
  Description of Artificial Sequence: Synthetic oligonucleotide
cucggagaugcgacggcua

SEQ ID NO: 114698 - RNA, 19 nt, Artificial Sequence
  Description of Artificial Sequence: Synthetic oligonucleotide
ccgcaaucggacuauguua

SEQ ID NO: 114699 - RNA, 19 nt, Artificial Sequence
  Description of Artificial Sequence: Synthetic oligonucleotide
cucgguucuuaaaucgcuu

SEQ ID NO: 114700 - RNA, 19 nt, Artificial Sequence
  Description of Artificial Sequence: Synthetic oligonucleotide
cacacacacacacgcgccu

SEQ ID NO: 114701 - RNA, 19 nt, Artificial Sequence
  Description of Artificial Sequence: Synthetic oligonucleotide
ucgccccgacaugauggcu

SEQ ID NO: 114702 - RNA, 19 nt, Artificial Sequence
  Description of Artificial Sequence: Synthetic oligonucleotide
gguaccuacuguacagagu

SEQ ID NO: 114703 - RNA, 19 nt, Artificial Sequence
  Description of Artificial Sequence: Synthetic oligonucleotide
cacaagcuuccaguggugu

SEQ ID NO: 114704 - RNA, 19 nt, Artificial Sequence
  Description of Artificial Sequence: Synthetic oligonucleotide
gcccuauaguaccgagaac

SEQ ID NO: 114705 - RNA, 19 nt, Artificial Sequence
  Description of Artificial Sequence: Synthetic oligonucleotide
ccucacgcuugaagagaag

SEQ ID NO: 114706 - RNA, 19 nt, Artificial Sequence
  Description of Artificial Sequence: Synthetic oligonucleotide
ucucgcccauuugguaguu

SEQ ID NO: 114707 - RNA, 19 nt, Artificial Sequence
  Description of Artificial Sequence: Synthetic oligonucleotide
ccggcggucugaaggcggc

SEQ ID NO: 114708 - RNA, 19 nt, Artificial Sequence
  Description of Artificial Sequence: Synthetic oligonucleotide
cgguugguguauacuccag

SEQ ID NO: 114709 - RNA, 19 nt, Artificial Sequence
  Description of Artificial Sequence: Synthetic oligonucleotide
gcacacacacacacacaca

SEQ ID NO: 114710 - RNA, 19 nt, Artificial Sequence
  Description of Artificial Sequence: Synthetic oligonucleotide
guggaguucggggccggaa

SEQ ID NO: 114711 - RNA, 19 nt, Artificial Sequence
  Description of Artificial Sequence: Synthetic oligonucleotide
cugcccugaacaguaacuu

SEQ ID NO: 114712 - RNA, 19 nt, Artificial Sequence
  Description of Artificial Sequence: Synthetic oligonucleotide
cgccccgacaugauggcuc

SEQ ID NO: 114713 - RNA, 19 nt, Artificial Sequence
  Description of Artificial Sequence: Synthetic oligonucleotide
gacaucagucugggacucu

SEQ ID NO: 114714 - RNA, 19 nt, Artificial Sequence
  Description of Artificial Sequence: Synthetic oligonucleotide
gccucacgcuugaagagaa

SEQ ID NO: 114715 - RNA, 19 nt, Artificial Sequence
  Description of Artificial Sequence: Synthetic oligonucleotide
ggaucacgagccucacgcu

SEQ ID NO: 114716 - RNA, 19 nt, Artificial Sequence
  Description of Artificial Sequence: Synthetic oligonucleotide
gggauccggcggucugaag

SEQ ID NO: 114717 - RNA, 19 nt, Artificial Sequence
  Description of Artificial Sequence: Synthetic oligonucleotide
ccccuuauguacuggcugu

SEQ ID NO: 114718 - RNA, 19 nt, Artificial Sequence
  Description of Artificial Sequence: Synthetic oligonucleotide
ggcggguuacuugacaguu

SEQ ID NO: 114719 - RNA, 19 nt, Artificial Sequence
  Description of Artificial Sequence: Synthetic oligonucleotide
gcggguuacuugacaguuc

SEQ ID NO: 114720 - RNA, 19 nt, Artificial Sequence
  Description of Artificial Sequence: Synthetic oligonucleotide
cggguuacuugacaguucu

SEQ ID NO: 114721 - RNA, 19 nt, Artificial Sequence
  Description of Artificial Sequence: Synthetic oligonucleotide
cacgugaacgagggcaaau

SEQ ID NO: 114722 - RNA, 19 nt, Artificial Sequence
  Description of Artificial Sequence: Synthetic oligonucleotide
cggcuaacgcugcggcucc

SEQ ID NO: 114723 - RNA, 19 nt, Artificial Sequence
  Description of Artificial Sequence: Synthetic oligonucleotide
gcaacucuauacacuguuu

SEQ ID NO: 114724 - RNA, 19 nt, Artificial Sequence
  Description of Artificial Sequence: Synthetic oligonucleotide
acgcgcgcacacacacaca

SEQ ID NO: 114725 - RNA, 19 nt, Artificial Sequence
  Description of Artificial Sequence: Synthetic oligonucleotide
ccgggugaaccggagggca

SEQ ID NO: 114726 - RNA, 19 nt, Artificial Sequence
  Description of Artificial Sequence: Synthetic oligonucleotide
gcgcacacacacacacaca

SEQ ID NO: 114727 - RNA, 19 nt, Artificial Sequence
  Description of Artificial Sequence: Synthetic oligonucleotide
aucgggcgguugguguaua

SEQ ID NO: 114728 - RNA, 19 nt, Artificial Sequence
  Description of Artificial Sequence: Synthetic oligonucleotide
gccccgacaugauggcucu

SEQ ID NO: 114729 - RNA, 19 nt, Artificial Sequence
  Description of Artificial Sequence: Synthetic oligonucleotide
ccgguaccuacuguacaga

SEQ ID NO: 114730 - RNA, 19 nt, Artificial Sequence
  Description of Artificial Sequence: Synthetic oligonucleotide
gcucggagaugcgacggcu

SEQ ID NO: 114731 - RNA, 19 nt, Artificial Sequence
  Description of Artificial Sequence: Synthetic oligonucleotide
gguguucguagggguggaa

SEQ ID NO: 114732 - RNA, 19 nt, Artificial Sequence
  Description of Artificial Sequence: Synthetic oligonucleotide
gcgggauccggcggucuga

SEQ ID NO: 114733 - RNA, 19 nt, Artificial Sequence
  Description of Artificial Sequence: Synthetic oligonucleotide
cggagaugcgacggcuaac

SEQ ID NO: 114734 - RNA, 19 nt, Artificial Sequence
  Description of Artificial Sequence: Synthetic oligonucleotide
gcgcgcacacacacacaca

SEQ ID NO: 114735 - RNA, 19 nt, Artificial Sequence
  Description of Artificial Sequence: Synthetic oligonucleotide
cgacaugauggcucuuccu

SEQ ID NO: 114736 - RNA, 19 nt, Artificial Sequence
  Description of Artificial Sequence: Synthetic oligonucleotide
gcagcgggauccggcgguc

SEQ ID NO: 114737 - RNA, 19 nt, Artificial Sequence
  Description of Artificial Sequence: Synthetic oligonucleotide
cacgagccucacgcuugaa

SEQ ID NO: 114738 - RNA, 19 nt, Artificial Sequence
  Description of Artificial Sequence: Synthetic oligonucleotide
gggcagcgaagucgcgagu

SEQ ID NO: 114739 - RNA, 19 nt, Artificial Sequence
  Description of Artificial Sequence: Synthetic oligonucleotide
ggguuacuugacaguucuu

SEQ ID NO: 114740 - RNA, 19 nt, Artificial Sequence
  Description of Artificial Sequence: Synthetic oligonucleotide
cagcgggauccggcggucu

SEQ ID NO: 114741 - RNA, 19 nt, Artificial Sequence
  Description of Artificial Sequence: Synthetic oligonucleotide
cgggcgguugguguauacu

SEQ ID NO: 114742 - RNA, 19 nt, Artificial Sequence
  Description of Artificial Sequence: Synthetic oligonucleotide
cgggauccggcggucugaa

SEQ ID NO: 114743 - RNA, 19 nt, Artificial Sequence
  Description of Artificial Sequence: Synthetic oligonucleotide
cuccguccucuuggcuuuu

SEQ ID NO: 114744 - RNA, 19 nt, Artificial Sequence
  Description of Artificial Sequence: Synthetic oligonucleotide
aaucgauucauguaccacc

SEQ ID NO: 114745 - RNA, 19 nt, Artificial Sequence
  Description of Artificial Sequence: Synthetic oligonucleotide
aaauacaccaugacgaugc

SEQ ID NO: 114746 - RNA, 19 nt, Artificial Sequence
  Description of Artificial Sequence: Synthetic oligonucleotide
aagauugagagguucauug

SEQ ID NO: 114747 - RNA, 19 nt, Artificial Sequence
  Description of Artificial Sequence: Synthetic oligonucleotide
uuagguaagugucccaucg

SEQ ID NO: 114748 - RNA, 19 nt, Artificial Sequence
  Description of Artificial Sequence: Synthetic oligonucleotide
agcaauucaacacaaagca

SEQ ID NO: 114749 - RNA, 19 nt, Artificial Sequence
  Description of Artificial Sequence: Synthetic oligonucleotide
gaguuaaugauagaaaacc

SEQ ID NO: 114750 - RNA, 19 nt, Artificial Sequence
  Description of Artificial Sequence: Synthetic oligonucleotide
uuguagguuaucuugcugg

SEQ ID NO: 114751 - RNA, 19 nt, Artificial Sequence
  Description of Artificial Sequence: Synthetic oligonucleotide
uuccgaaccacauacacag

SEQ ID NO: 114752 - RNA, 19 nt, Artificial Sequence
  Description of Artificial Sequence: Synthetic oligonucleotide
uggggaaucaccucgaagc

SEQ ID NO: 114753 - RNA, 19 nt, Artificial Sequence
  Description of Artificial Sequence: Synthetic oligonucleotide
aguugauuggcgcuacucc

SEQ ID NO: 114754 - RNA, 19 nt, Artificial Sequence
  Description of Artificial Sequence: Synthetic oligonucleotide
agguucauugauuugacug

SEQ ID NO: 114755 - RNA, 19 nt, Artificial Sequence
  Description of Artificial Sequence: Synthetic oligonucleotide
auucauguaccaccguugc

SEQ ID NO: 114756 - RNA, 19 nt, Artificial Sequence
  Description of Artificial Sequence: Synthetic oligonucleotide
aguauaaaugcugagguca

SEQ ID NO: 114757 - RNA, 19 nt, Artificial Sequence
  Description of Artificial Sequence: Synthetic oligonucleotide
cuuaaucucuacugggucg

SEQ ID NO: 114758 - RNA, 19 nt, Artificial Sequence
  Description of Artificial Sequence: Synthetic oligonucleotide
aacaguucaccgcaggucu

SEQ ID NO: 114759 - RNA, 19 nt, Artificial Sequence
  Description of Artificial Sequence: Synthetic oligonucleotide
agagcaauccaacuuaccu

SEQ ID NO: 114760 - RNA, 19 nt, Artificial Sequence
  Description of Artificial Sequence: Synthetic oligonucleotide
guuaaugauagaaaaccag

SEQ ID NO: 114761 - RNA, 19 nt, Artificial Sequence
  Description of Artificial Sequence: Synthetic oligonucleotide
gagacgaggaaauuccucc

SEQ ID NO: 114762 - RNA, 19 nt, Artificial Sequence
  Description of Artificial Sequence: Synthetic oligonucleotide
cuaaggacugggaaaagag

SEQ ID NO: 114763 - RNA, 19 nt, Artificial Sequence
  Description of Artificial Sequence: Synthetic oligonucleotide
ucagaguucgguagagacg

SEQ ID NO: 114764 - RNA, 19 nt, Artificial Sequence
  Description of Artificial Sequence: Synthetic oligonucleotide
ugcacaagcuuccacccgg

SEQ ID NO: 114765 - RNA, 19 nt, Artificial Sequence
  Description of Artificial Sequence: Synthetic oligonucleotide
agguacauuagccuccuuc

SEQ ID NO: 114766 - RNA, 19 nt, Artificial Sequence
  Description of Artificial Sequence: Synthetic oligonucleotide
agcgucgccguacagaagg

SEQ ID NO: 114767 - RNA, 19 nt, Artificial Sequence
  Description of Artificial Sequence: Synthetic oligonucleotide
ucuggaaacacuuggcccu

SEQ ID NO: 114768 - RNA, 19 nt, Artificial Sequence
  Description of Artificial Sequence: Synthetic oligonucleotide
aaggcgacaacaucccaag

SEQ ID NO: 114769 - RNA, 19 nt, Artificial Sequence
  Description of Artificial Sequence: Synthetic oligonucleotide
aguaguacucguaaggaag

SEQ ID NO: 114770 - RNA, 19 nt, Artificial Sequence
  Description of Artificial Sequence: Synthetic oligonucleotide
aguugguacccucugguag

SEQ ID NO: 114771 - RNA, 19 nt, Artificial Sequence
  Description of Artificial Sequence: Synthetic oligonucleotide
uaaggacugggaaaagagc

SEQ ID NO: 114772 - RNA, 19 nt, Artificial Sequence
  Description of Artificial Sequence: Synthetic oligonucleotide
uccaacuuaccuuccaucu

SEQ ID NO: 114773 - RNA, 19 nt, Artificial Sequence
  Description of Artificial Sequence: Synthetic oligonucleotide
ucacucaugguuagguaag

SEQ ID NO: 114774 - RNA, 19 nt, Artificial Sequence
  Description of Artificial Sequence: Synthetic oligonucleotide
accacgacagaguuaauga

SEQ ID NO: 114775 - RNA, 19 nt, Artificial Sequence
  Description of Artificial Sequence: Synthetic oligonucleotide
uucuugccuauuccuaagg

SEQ ID NO: 114776 - RNA, 19 nt, Artificial Sequence
  Description of Artificial Sequence: Synthetic oligonucleotide
ggacguagaaugcagaccc

SEQ ID NO: 114777 - RNA, 19 nt, Artificial Sequence
  Description of Artificial Sequence: Synthetic oligonucleotide
agaucuugcggacaaacau

SEQ ID NO: 114778 - RNA, 19 nt, Artificial Sequence
  Description of Artificial Sequence: Synthetic oligonucleotide
guacucguaaggaagcugg

SEQ ID NO: 114779 - RNA, 19 nt, Artificial Sequence
  Description of Artificial Sequence: Synthetic oligonucleotide
guugguacccucugguagg

SEQ ID NO: 114780 - RNA, 19 nt, Artificial Sequence
  Description of Artificial Sequence: Synthetic oligonucleotide
gaccccuacacccagggug

SEQ ID NO: 114781 - RNA, 19 nt, Artificial Sequence
  Description of Artificial Sequence: Synthetic oligonucleotide
aacguaguagucuucugua

SEQ ID NO: 114782 - RNA, 19 nt, Artificial Sequence
  Description of Artificial Sequence: Synthetic oligonucleotide
uugacaauguuugaacccu

SEQ ID NO: 114783 - RNA, 19 nt, Artificial Sequence
  Description of Artificial Sequence: Synthetic oligonucleotide
acggccuuaaucucuacug

SEQ ID NO: 114784 - RNA, 19 nt, Artificial Sequence
  Description of Artificial Sequence: Synthetic oligonucleotide
uugauuggcgcuacuccag

SEQ ID NO: 114785 - RNA, 19 nt, Artificial Sequence
  Description of Artificial Sequence: Synthetic oligonucleotide
gaagaguugaaugccugag

SEQ ID NO: 114786 - RNA, 19 nt, Artificial Sequence
  Description of Artificial Sequence: Synthetic oligonucleotide
gucagcaaugaggugaacg

SEQ ID NO: 114787 - RNA, 19 nt, Artificial Sequence
  Description of Artificial Sequence: Synthetic oligonucleotide
gauucauguaccaccguug

SEQ ID NO: 114788 - RNA, 19 nt, Artificial Sequence
  Description of Artificial Sequence: Synthetic oligonucleotide
ucuugccuauuccuaagga

SEQ ID NO: 114789 - RNA, 19 nt, Artificial Sequence
  Description of Artificial Sequence: Synthetic oligonucleotide
uguaccaccguugcucagg

SEQ ID NO: 114790 - RNA, 19 nt, Artificial Sequence
  Description of Artificial Sequence: Synthetic oligonucleotide
uccaacuuggggagacugg

SEQ ID NO: 114791 - RNA, 19 nt, Artificial Sequence
  Description of Artificial Sequence: Synthetic oligonucleotide
gaguggcuguuauugaccc

SEQ ID NO: 114792 - RNA, 19 nt, Artificial Sequence
  Description of Artificial Sequence: Synthetic oligonucleotide
aagggguguugacaauccg

SEQ ID NO: 114793 - RNA, 19 nt, Artificial Sequence
  Description of Artificial Sequence: Synthetic oligonucleotide
agcugguaagcuucacggc

SEQ ID NO: 114794 - RNA, 19 nt, Artificial Sequence
  Description of Artificial Sequence: Synthetic oligonucleotide
aguugaaugccugagccca

SEQ ID NO: 114795 - RNA, 19 nt, Artificial Sequence
  Description of Artificial Sequence: Synthetic oligonucleotide
aggacguagaaugcagacc

SEQ ID NO: 114796 - RNA, 19 nt, Artificial Sequence
  Description of Artificial Sequence: Synthetic oligonucleotide
uagguuaucuugcuggguu

SEQ ID NO: 114797 - RNA, 19 nt, Artificial Sequence
  Description of Artificial Sequence: Synthetic oligonucleotide
guaggcugcauagaagccg

SEQ ID NO: 114798 - RNA, 19 nt, Artificial Sequence
  Description of Artificial Sequence: Synthetic oligonucleotide
acgaugcugauuugugaac

SEQ ID NO: 114799 - RNA, 19 nt, Artificial Sequence
  Description of Artificial Sequence: Synthetic oligonucleotide
uguccccaaaagaacuugc

SEQ ID NO: 114800 - RNA, 19 nt, Artificial Sequence
  Description of Artificial Sequence: Synthetic oligonucleotide
gaucuugcggacaaacaug

SEQ ID NO: 114801 - RNA, 19 nt, Artificial Sequence
  Description of Artificial Sequence: Synthetic oligonucleotide
aaucaccucgaagcggacg

SEQ ID NO: 114802 - RNA, 19 nt, Artificial Sequence
  Description of Artificial Sequence: Synthetic oligonucleotide
aucgauucauguaccaccg

SEQ ID NO: 114803 - RNA, 19 nt, Artificial Sequence
  Description of Artificial Sequence: Synthetic oligonucleotide
cucgaagcggacgacacgg

SEQ ID NO: 114804 - RNA, 19 nt, Artificial Sequence
  Description of Artificial Sequence: Synthetic oligonucleotide
cacgagaacaguucaccgc

SEQ ID NO: 114805 - RNA, 19 nt, Artificial Sequence
  Description of Artificial Sequence: Synthetic oligonucleotide
caggguccgaauaauaauc

SEQ ID NO: 114806 - RNA, 19 nt, Artificial Sequence
  Description of Artificial Sequence: Synthetic oligonucleotide
accaggauagagcgucgcc

SEQ ID NO: 114807 - RNA, 19 nt, Artificial Sequence
  Description of Artificial Sequence: Synthetic oligonucleotide
aaccgaagagguaauagaa

SEQ ID NO: 114808 - RNA, 19 nt, Artificial Sequence
  Description of Artificial Sequence: Synthetic oligonucleotide
agaacugaguauaaaugcu

SEQ ID NO: 114809 - RNA, 19 nt, Artificial Sequence
  Description of Artificial Sequence: Synthetic oligonucleotide
uuaaucucuacugggucgu

SEQ ID NO: 114810 - RNA, 19 nt, Artificial Sequence
  Description of Artificial Sequence: Synthetic oligonucleotide
uacucguaaggaagcuggg

SEQ ID NO: 114811 - RNA, 19 nt, Artificial Sequence
  Description of Artificial Sequence: Synthetic oligonucleotide
aagcggacgacacgguaug

SEQ ID NO: 114812 - RNA, 19 nt, Artificial Sequence
  Description of Artificial Sequence: Synthetic oligonucleotide
ccgaauaauaaucaugcug

SEQ ID NO: 114813 - RNA, 19 nt, Artificial Sequence
  Description of Artificial Sequence: Synthetic oligonucleotide
gacgaugcugauuugugaa

SEQ ID NO: 114814 - RNA, 19 nt, Artificial Sequence
  Description of Artificial Sequence: Synthetic oligonucleotide
cacccuaguggccuuagcc

SEQ ID NO: 114815 - RNA, 19 nt, Artificial Sequence
  Description of Artificial Sequence: Synthetic oligonucleotide
cuugcggaagccgaaguag

SEQ ID NO: 114816 - RNA, 19 nt, Artificial Sequence
  Description of Artificial Sequence: Synthetic oligonucleotide
gaucucaggacuccacaac

SEQ ID NO: 114817 - RNA, 19 nt, Artificial Sequence
  Description of Artificial Sequence: Synthetic oligonucleotide
ugugcguacaggguuguca

SEQ ID NO: 114818 - RNA, 19 nt, Artificial Sequence
  Description of Artificial Sequence: Synthetic oligonucleotide
uaggaugcaugaauucuuc

SEQ ID NO: 114819 - RNA, 19 nt, Artificial Sequence
  Description of Artificial Sequence: Synthetic oligonucleotide
agcgguaauccucugcaca

SEQ ID NO: 114820 - RNA, 19 nt, Artificial Sequence
  Description of Artificial Sequence: Synthetic oligonucleotide
gauuggcgcuacuccaggg

SEQ ID NO: 114821 - RNA, 19 nt, Artificial Sequence
  Description of Artificial Sequence: Synthetic oligonucleotide
ugacgaugcugauuuguga

SEQ ID NO: 114822 - RNA, 19 nt, Artificial Sequence
  Description of Artificial Sequence: Synthetic oligonucleotide
agguaauagaacugguuuu

SEQ ID NO: 114823 - RNA, 19 nt, Artificial Sequence
  Description of Artificial Sequence: Synthetic oligonucleotide
guguugacaauccgguccc

SEQ ID NO: 114824 - RNA, 19 nt, Artificial Sequence
  Description of Artificial Sequence: Synthetic oligonucleotide
guugauuggcgcuacucca

SEQ ID NO: 114825 - RNA, 19 nt, Artificial Sequence
  Description of Artificial Sequence: Synthetic oligonucleotide
ucguaaggaagcuggguuc

SEQ ID NO: 114826 - RNA, 19 nt, Artificial Sequence
  Description of Artificial Sequence: Synthetic oligonucleotide
guaaccaagauuccuaaau

SEQ ID NO: 114827 - RNA, 19 nt, Artificial Sequence
  Description of Artificial Sequence: Synthetic oligonucleotide
ugacaauccgguccccucu

SEQ ID NO: 114828 - RNA, 19 nt, Artificial Sequence
  Description of Artificial Sequence: Synthetic oligonucleotide
agagcgguguccccugagg

SEQ ID NO: 114829 - RNA, 19 nt, Artificial Sequence
  Description of Artificial Sequence: Synthetic oligonucleotide
gguaaaaugcaagauuuga

SEQ ID NO: 114830 - RNA, 19 nt, Artificial Sequence
  Description of Artificial Sequence: Synthetic oligonucleotide
ucgagaggcccauuugaug

SEQ ID NO: 114831 - RNA, 19 nt, Artificial Sequence
  Description of Artificial Sequence: Synthetic oligonucleotide
aagaccaccacgacagagu

SEQ ID NO: 114832 - RNA, 19 nt, Artificial Sequence
  Description of Artificial Sequence: Synthetic oligonucleotide
gucguuuugguggaaguug

SEQ ID NO: 114833 - RNA, 19 nt, Artificial Sequence
  Description of Artificial Sequence: Synthetic oligonucleotide
guaauagaacugguuuucc

SEQ ID NO: 114834 - RNA, 19 nt, Artificial Sequence
  Description of Artificial Sequence: Synthetic oligonucleotide
uccgaauaauaaucaugcu

SEQ ID NO: 114835 - RNA, 19 nt, Artificial Sequence
  Description of Artificial Sequence: Synthetic oligonucleotide
ugauucuccuuaguggggu

SEQ ID NO: 114836 - RNA, 19 nt, Artificial Sequence
  Description of Artificial Sequence: Synthetic oligonucleotide
uaaaugagcaggaguuauu

SEQ ID NO: 114837 - RNA, 19 nt, Artificial Sequence
  Description of Artificial Sequence: Synthetic oligonucleotide
agagacggccagcagaaaa

SEQ ID NO: 114838 - RNA, 19 nt, Artificial Sequence
  Description of Artificial Sequence: Synthetic oligonucleotide
agagcgucgccguacagaa

SEQ ID NO: 114839 - RNA, 19 nt, Artificial Sequence
  Description of Artificial Sequence: Synthetic oligonucleotide
ugaacguaguagucuucug

SEQ ID NO: 114840 - RNA, 19 nt, Artificial Sequence
  Description of Artificial Sequence: Synthetic oligonucleotide
ggccuuaaucucuacuggg

SEQ ID NO: 114841 - RNA, 19 nt, Artificial Sequence
  Description of Artificial Sequence: Synthetic oligonucleotide
acaucacucaugguuaggu

SEQ ID NO: 114842 - RNA, 19 nt, Artificial Sequence
  Description of Artificial Sequence: Synthetic oligonucleotide
ucgccguacagaaggcucc

SEQ ID NO: 114843 - RNA, 19 nt, Artificial Sequence
  Description of Artificial Sequence: Synthetic oligonucleotide
agucaucauugucacggug

SEQ ID NO: 114844 - RNA, 19 nt, Artificial Sequence
  Description of Artificial Sequence: Synthetic oligonucleotide
uguaguuggcaaugucccu

SEQ ID NO: 114845 - RNA, 19 nt, Artificial Sequence
  Description of Artificial Sequence: Synthetic oligonucleotide
uugucagcaaugaggugaa

SEQ ID NO: 114846 - RNA, 19 nt, Artificial Sequence
  Description of Artificial Sequence: Synthetic oligonucleotide
gaacguaguagucuucugu

SEQ ID NO: 114847 - RNA, 19 nt, Artificial Sequence
  Description of Artificial Sequence: Synthetic oligonucleotide
auuggcgcuacuccaggga

SEQ ID NO: 114848 - RNA, 19 nt, Artificial Sequence
  Description of Artificial Sequence: Synthetic oligonucleotide
uucauguaccaccguugcu

SEQ ID NO: 114849 - RNA, 19 nt, Artificial Sequence
  Description of Artificial Sequence: Synthetic oligonucleotide
cuuagccaccucuucccag

SEQ ID NO: 114850 - RNA, 19 nt, Artificial Sequence
  Description of Artificial Sequence: Synthetic oligonucleotide
aggcaaugaguaguacucg

SEQ ID NO: 114851 - RNA, 19 nt, Artificial Sequence
  Description of Artificial Sequence: Synthetic oligonucleotide
gaggggauaggucuggcua

SEQ ID NO: 114852 - RNA, 19 nt, Artificial Sequence
  Description of Artificial Sequence: Synthetic oligonucleotide
gguccgaauaauaaucaug

SEQ ID NO: 114853 - RNA, 19 nt, Artificial Sequence
  Description of Artificial Sequence: Synthetic oligonucleotide
augcccacaaaucgauuca

SEQ ID NO: 114854 - RNA, 19 nt, Artificial Sequence
  Description of Artificial Sequence: Synthetic oligonucleotide
gguaauagaacugguuuuc

SEQ ID NO: 114855 - RNA, 19 nt, Artificial Sequence
  Description of Artificial Sequence: Synthetic oligonucleotide
uccuagcauaagcagcauc

SEQ ID NO: 114856 - RNA, 19 nt, Artificial Sequence
  Description of Artificial Sequence: Synthetic oligonucleotide
guaccaccguugcucaggg

SEQ ID NO: 114857 - RNA, 19 nt, Artificial Sequence
  Description of Artificial Sequence: Synthetic oligonucleotide
ggggaaucaccucgaagcg

SEQ ID NO: 114858 - RNA, 19 nt, Artificial Sequence
  Description of Artificial Sequence: Synthetic oligonucleotide
aaggggcaaggagauuccg

SEQ ID NO: 114859 - RNA, 19 nt, Artificial Sequence
  Description of Artificial Sequence: Synthetic oligonucleotide
gauagagcgucgccguaca

SEQ ID NO: 114860 - RNA, 19 nt, Artificial Sequence
  Description of Artificial Sequence: Synthetic oligonucleotide
aggcgacaacaucccaagc

SEQ ID NO: 114861 - RNA, 19 nt, Artificial Sequence
  Description of Artificial Sequence: Synthetic oligonucleotide
caaggggcaaggagauucc

SEQ ID NO: 114862 - RNA, 19 nt, Artificial Sequence
  Description of Artificial Sequence: Synthetic oligonucleotide
guuugugcguacaggguug

SEQ ID NO: 114863 - RNA, 19 nt, Artificial Sequence
  Description of Artificial Sequence: Synthetic oligonucleotide
aggugaacguaguagucuu

SEQ ID NO: 114864 - RNA, 19 nt, Artificial Sequence
  Description of Artificial Sequence: Synthetic oligonucleotide
guuggaguagagcguccag

SEQ ID NO: 114865 - RNA, 19 nt, Artificial Sequence
  Description of Artificial Sequence: Synthetic oligonucleotide
gaaucugguuugugcguac

SEQ ID NO: 114866 - RNA, 19 nt, Artificial Sequence
  Description of Artificial Sequence: Synthetic oligonucleotide
uagagcgucgccguacaga

SEQ ID NO: 114867 - RNA, 19 nt, Artificial Sequence
  Description of Artificial Sequence: Synthetic oligonucleotide
uucacggccuuaaucucua

SEQ ID NO: 114868 - RNA, 19 nt, Artificial Sequence
  Description of Artificial Sequence: Synthetic oligonucleotide
cauugucacgguguuggag

SEQ ID NO: 114869 - RNA, 19 nt, Artificial Sequence
  Description of Artificial Sequence: Synthetic oligonucleotide
gcacgagaacaguucaccg

SEQ ID NO: 114870 - RNA, 19 nt, Artificial Sequence
  Description of Artificial Sequence: Synthetic oligonucleotide
uuccgcaggguccgaauaa

SEQ ID NO: 114871 - RNA, 19 nt, Artificial Sequence
  Description of Artificial Sequence: Synthetic oligonucleotide
ucgguagagacggccagca

SEQ ID NO: 114872 - RNA, 19 nt, Artificial Sequence
  Description of Artificial Sequence: Synthetic oligonucleotide
caccacgacagaguuaaug

SEQ ID NO: 114873 - RNA, 19 nt, Artificial Sequence
  Description of Artificial Sequence: Synthetic oligonucleotide
cuggggaaucaccucgaag

SEQ ID NO: 114874 - RNA, 19 nt, Artificial Sequence
  Description of Artificial Sequence: Synthetic oligonucleotide
cucaugguuagguaagugu

SEQ ID NO: 114875 - RNA, 19 nt, Artificial Sequence
  Description of Artificial Sequence: Synthetic oligonucleotide
gacuggggagcaaucuugc

SEQ ID NO: 114876 - RNA, 19 nt, Artificial Sequence
  Description of Artificial Sequence: Synthetic oligonucleotide
acugggucguuuuggugga

SEQ ID NO: 114877 - RNA, 19 nt, Artificial Sequence
  Description of Artificial Sequence: Synthetic oligonucleotide
guuagguaagugucccauc

SEQ ID NO: 114878 - RNA, 19 nt, Artificial Sequence
  Description of Artificial Sequence: Synthetic oligonucleotide
cugggaaaagagcaaucca

SEQ ID NO: 114879 - RNA, 19 nt, Artificial Sequence
  Description of Artificial Sequence: Synthetic oligonucleotide
cacgacagaguuaaugaua

SEQ ID NO: 114880 - RNA, 19 nt, Artificial Sequence
  Description of Artificial Sequence: Synthetic oligonucleotide
acguaguagucuucuguaa

SEQ ID NO: 114881 - RNA, 19 nt, Artificial Sequence
  Description of Artificial Sequence: Synthetic oligonucleotide
guuacuggcuugcuggacu

SEQ ID NO: 114882 - RNA, 19 nt, Artificial Sequence
  Description of Artificial Sequence: Synthetic oligonucleotide
uggaaguugauuggcgcua

SEQ ID NO: 114883 - RNA, 19 nt, Artificial Sequence
  Description of Artificial Sequence: Synthetic oligonucleotide
acucaugguuagguaagug

SEQ ID NO: 114884 - RNA, 19 nt, Artificial Sequence
  Description of Artificial Sequence: Synthetic oligonucleotide
uggggcggccugaagacau

SEQ ID NO: 114885 - RNA, 19 nt, Artificial Sequence
  Description of Artificial Sequence: Synthetic oligonucleotide
cauguaccaccguugcuca

SEQ ID NO: 114886 - RNA, 19 nt, Artificial Sequence
  Description of Artificial Sequence: Synthetic oligonucleotide
ggcacgagaacaguucacc

SEQ ID NO: 114887 - RNA, 19 nt, Artificial Sequence
  Description of Artificial Sequence: Synthetic oligonucleotide
ucgauucauguaccaccgu

SEQ ID NO: 114888 - RNA, 19 nt, Artificial Sequence
  Description of Artificial Sequence: Synthetic oligonucleotide
gaucugcacaucacucaug

SEQ ID NO: 114889 - RNA, 19 nt, Artificial Sequence
  Description of Artificial Sequence: Synthetic oligonucleotide
aaucucuacugggucguuu

SEQ ID NO: 114890 - RNA, 19 nt, Artificial Sequence
  Description of Artificial Sequence: Synthetic oligonucleotide
ucuggggaaucaccucgaa

SEQ ID NO: 114891 - RNA, 19 nt, Artificial Sequence
  Description of Artificial Sequence: Synthetic oligonucleotide
aguucgguagagacggcca

SEQ ID NO: 114892 - RNA, 19 nt, Artificial Sequence
  Description of Artificial Sequence: Synthetic oligonucleotide
cagaaagagcggugucccc

SEQ ID NO: 114893 - RNA, 19 nt, Artificial Sequence
  Description of Artificial Sequence: Synthetic oligonucleotide
gguucgagagcugguaagc

SEQ ID NO: 114894 - RNA, 19 nt, Artificial Sequence
  Description of Artificial Sequence: Synthetic oligonucleotide
ugcuuugaugaggggaauc

SEQ ID NO: 114895 - RNA, 19 nt, Artificial Sequence
  Description of Artificial Sequence: Synthetic oligonucleotide
acucguaaggaagcugggu

SEQ ID NO: 114896 - RNA, 19 nt, Artificial Sequence
  Description of Artificial Sequence: Synthetic oligonucleotide
ccaggauagagcgucgccg

SEQ ID NO: 114897 - RNA, 19 nt, Artificial Sequence
  Description of Artificial Sequence: Synthetic oligonucleotide
cuauuccuaaggacuggga

SEQ ID NO: 114898 - RNA, 19 nt, Artificial Sequence
  Description of Artificial Sequence: Synthetic oligonucleotide
agcuuccuguccgaggaug

SEQ ID NO: 114899 - RNA, 19 nt, Artificial Sequence
  Description of Artificial Sequence: Synthetic oligonucleotide
uuugugcguacaggguugu

SEQ ID NO: 114900 - RNA, 19 nt, Artificial Sequence
  Description of Artificial Sequence: Synthetic oligonucleotide
auacaccaugacgaugcug

SEQ ID NO: 114901 - RNA, 19 nt, Artificial Sequence
  Description of Artificial Sequence: Synthetic oligonucleotide
cacaucacucaugguuagg

SEQ ID NO: 114902 - RNA, 19 nt, Artificial Sequence
  Description of Artificial Sequence: Synthetic oligonucleotide
ggggcgaggaguugguacc

SEQ ID NO: 114903 - RNA, 19 nt, Artificial Sequence
  Description of Artificial Sequence: Synthetic oligonucleotide
gaggugaacguaguagucu

SEQ ID NO: 114904 - RNA, 19 nt, Artificial Sequence
  Description of Artificial Sequence: Synthetic oligonucleotide
gcgguaauccucugcacac

SEQ ID NO: 114905 - RNA, 19 nt, Artificial Sequence
  Description of Artificial Sequence: Synthetic oligonucleotide
gacguagaaugcagacccc

SEQ ID NO: 114906 - RNA, 19 nt, Artificial Sequence
  Description of Artificial Sequence: Synthetic oligonucleotide
caauccaacuuaccuucca

SEQ ID NO: 114907 - RNA, 19 nt, Artificial Sequence
  Description of Artificial Sequence: Synthetic oligonucleotide
cugcacaucacucaugguu

SEQ ID NO: 114908 - RNA, 19 nt, Artificial Sequence
  Description of Artificial Sequence: Synthetic oligonucleotide
ccuauuccuaaggacuggg

SEQ ID NO: 114909 - RNA, 19 nt, Artificial Sequence
  Description of Artificial Sequence: Synthetic oligonucleotide
cccaaaugagaaccuuagg

SEQ ID NO: 114910 - RNA, 19 nt, Artificial Sequence
  Description of Artificial Sequence: Synthetic oligonucleotide
ggugguaauagucaucauu

SEQ ID NO: 114911 - RNA, 19 nt, Artificial Sequence
  Description of Artificial Sequence: Synthetic oligonucleotide
ggguaaaaugcaagauuug

SEQ ID NO: 114912 - RNA, 19 nt, Artificial Sequence
  Description of Artificial Sequence: Synthetic oligonucleotide
agcgguguccccugaggaa

SEQ ID NO: 114913 - RNA, 19 nt, Artificial Sequence
  Description of Artificial Sequence: Synthetic oligonucleotide
auguaccaccguugcucag

SEQ ID NO: 114914 - RNA, 19 nt, Artificial Sequence
  Description of Artificial Sequence: Synthetic oligonucleotide
gcgaguggcuguuauugac

SEQ ID NO: 114915 - RNA, 19 nt, Artificial Sequence
  Description of Artificial Sequence: Synthetic oligonucleotide
gcacaucacucaugguuag

SEQ ID NO: 114916 - RNA, 19 nt, Artificial Sequence
  Description of Artificial Sequence: Synthetic oligonucleotide
uucuccuuaguggggucaa

SEQ ID NO: 114917 - RNA, 19 nt, Artificial Sequence
  Description of Artificial Sequence: Synthetic oligonucleotide
gucgccguacagaaggcuc

SEQ ID NO: 114918 - RNA, 19 nt, Artificial Sequence
  Description of Artificial Sequence: Synthetic oligonucleotide
guggcuguuauugaccccu

SEQ ID NO: 114919 - RNA, 19 nt, Artificial Sequence
  Description of Artificial Sequence: Synthetic oligonucleotide
guggaugccgcuuggugcu

SEQ ID NO: 114920 - RNA, 19 nt, Artificial Sequence
  Description of Artificial Sequence: Synthetic oligonucleotide
uguugacaauccggucccc

SEQ ID NO: 114921 - RNA, 19 nt, Artificial Sequence
  Description of Artificial Sequence: Synthetic oligonucleotide
aucgagaggcccauuugau

SEQ ID NO: 114922 - RNA, 19 nt, Artificial Sequence
  Description of Artificial Sequence: Synthetic oligonucleotide
gugaacguaguagucuucu

SEQ ID NO: 114923 - RNA, 19 nt, Artificial Sequence
  Description of Artificial Sequence: Synthetic oligonucleotide
cccuaguggccuuagccac

SEQ ID NO: 114924 - RNA, 19 nt, Artificial Sequence
  Description of Artificial Sequence: Synthetic oligonucleotide
ccgaaccacauacacagca

SEQ ID NO: 114925 - RNA, 19 nt, Artificial Sequence
  Description of Artificial Sequence: Synthetic oligonucleotide
cagcgguaauccucugcac

SEQ ID NO: 114926 - RNA, 19 nt, Artificial Sequence
  Description of Artificial Sequence: Synthetic oligonucleotide
gguaagugucccaucgaga

SEQ ID NO: 114927 - RNA, 19 nt, Artificial Sequence
  Description of Artificial Sequence: Synthetic oligonucleotide
cguaaggaagcuggguucg

SEQ ID NO: 114928 - RNA, 19 nt, Artificial Sequence
  Description of Artificial Sequence: Synthetic oligonucleotide
cucguaaggaagcuggguu

SEQ ID NO: 114929 - RNA, 19 nt, Artificial Sequence
  Description of Artificial Sequence: Synthetic oligonucleotide
gguguguuccuagcauaag

SEQ ID NO: 114930 - RNA, 19 nt, Artificial Sequence
  Description of Artificial Sequence: Synthetic oligonucleotide
ggcaagauugagagguuca

SEQ ID NO: 114931 - RNA, 19 nt, Artificial Sequence
  Description of Artificial Sequence: Synthetic oligonucleotide
cggaagccgaaguaguagc

SEQ ID NO: 114932 - RNA, 19 nt, Artificial Sequence
  Description of Artificial Sequence: Synthetic oligonucleotide
caugacgaugcugauuugu

SEQ ID NO: 114933 - RNA, 19 nt, Artificial Sequence
  Description of Artificial Sequence: Synthetic oligonucleotide
uccgcaggguccgaauaau

SEQ ID NO: 114934 - RNA, 19 nt, Artificial Sequence
  Description of Artificial Sequence: Synthetic oligonucleotide
caucacucaugguuaggua

SEQ ID NO: 114935 - RNA, 19 nt, Artificial Sequence
  Description of Artificial Sequence: Synthetic oligonucleotide
ggauagagcgucgccguac

SEQ ID NO: 114936 - RNA, 19 nt, Artificial Sequence
  Description of Artificial Sequence: Synthetic oligonucleotide
ccagcgguaauccucugca

SEQ ID NO: 114937 - RNA, 19 nt, Artificial Sequence
  Description of Artificial Sequence: Synthetic oligonucleotide
caaugaggugaacguagua

SEQ ID NO: 114938 - RNA, 19 nt, Artificial Sequence
  Description of Artificial Sequence: Synthetic oligonucleotide
ugcguacaggguugucaua

SEQ ID NO: 114939 - RNA, 19 nt, Artificial Sequence
  Description of Artificial Sequence: Synthetic oligonucleotide
cggccuuaaucucuacugg

SEQ ID NO: 114940 - RNA, 19 nt, Artificial Sequence
  Description of Artificial Sequence: Synthetic oligonucleotide
cauggccccgaagggcagg

SEQ ID NO: 114941 - RNA, 19 nt, Artificial Sequence
  Description of Artificial Sequence: Synthetic oligonucleotide
gaaucaccucgaagcggac

SEQ ID NO: 114942 - RNA, 19 nt, Artificial Sequence
  Description of Artificial Sequence: Synthetic oligonucleotide
cccacaaaucgauucaugu

SEQ ID NO: 114943 - RNA, 19 nt, Artificial Sequence
  Description of Artificial Sequence: Synthetic oligonucleotide
ccggugguaauagucauca

SEQ ID NO: 114944 - RNA, 19 nt, Artificial Sequence
  Description of Artificial Sequence: Synthetic oligonucleotide
gugcguacaggguugucau

SEQ ID NO: 114945 - RNA, 19 nt, Artificial Sequence
  Description of Artificial Sequence: Synthetic oligonucleotide
gugucccaucgagaggccc

SEQ ID NO: 114946 - RNA, 19 nt, Artificial Sequence
  Description of Artificial Sequence: Synthetic oligonucleotide
agucacugugaggcaagau

SEQ ID NO: 114947 - RNA, 19 nt, Artificial Sequence
  Description of Artificial Sequence: Synthetic oligonucleotide
ucaccucgaagcggacgac

SEQ ID NO: 114948 - RNA, 19 nt, Artificial Sequence
  Description of Artificial Sequence: Synthetic oligonucleotide
cugagacgaggaaauuccu

SEQ ID NO: 114949 - RNA, 19 nt, Artificial Sequence
  Description of Artificial Sequence: Synthetic oligonucleotide
guucaccgcaggucucauc

SEQ ID NO: 114950 - RNA, 19 nt, Artificial Sequence
  Description of Artificial Sequence: Synthetic oligonucleotide
ggcuguuauugaccccuac

SEQ ID NO: 114951 - RNA, 19 nt, Artificial Sequence
  Description of Artificial Sequence: Synthetic oligonucleotide
cccuucagaaagagcggug

SEQ ID NO: 114952 - RNA, 19 nt, Artificial Sequence
  Description of Artificial Sequence: Synthetic oligonucleotide
cccugagacgaggaaauuc

SEQ ID NO: 114953 - RNA, 19 nt, Artificial Sequence
  Description of Artificial Sequence: Synthetic oligonucleotide
gcgacaacaucccaagcau

SEQ ID NO: 114954 - RNA, 19 nt, Artificial Sequence
  Description of Artificial Sequence: Synthetic oligonucleotide
guaaggaagcuggguucga

SEQ ID NO: 114955 - RNA, 19 nt, Artificial Sequence
  Description of Artificial Sequence: Synthetic oligonucleotide
ggaaucugguuugugcgua

SEQ ID NO: 114956 - RNA, 19 nt, Artificial Sequence
  Description of Artificial Sequence: Synthetic oligonucleotide
ggcgaguggcuguuauuga

SEQ ID NO: 114957 - RNA, 19 nt, Artificial Sequence
  Description of Artificial Sequence: Synthetic oligonucleotide
uaccaccguugcucaggga

SEQ ID NO: 114958 - RNA, 19 nt, Artificial Sequence
  Description of Artificial Sequence: Synthetic oligonucleotide
gguuagguaagugucccau

SEQ ID NO: 114959 - RNA, 19 nt, Artificial Sequence
  Description of Artificial Sequence: Synthetic oligonucleotide
gguuacuggcuugcuggac

SEQ ID NO: 114960 - RNA, 19 nt, Artificial Sequence
  Description of Artificial Sequence: Synthetic oligonucleotide
aucaugcagaagaguugaa

SEQ ID NO: 114961 - RNA, 19 nt, Artificial Sequence
  Description of Artificial Sequence: Synthetic oligonucleotide
ccaccguugcucagggauc

SEQ ID NO: 114962 - RNA, 19 nt, Artificial Sequence
  Description of Artificial Sequence: Synthetic oligonucleotide
agccugauucuugguggau

SEQ ID NO: 114963 - RNA, 19 nt, Artificial Sequence
  Description of Artificial Sequence: Synthetic oligonucleotide
aguucaccgcaggucucau

SEQ ID NO: 114964 - RNA, 19 nt, Artificial Sequence
  Description of Artificial Sequence: Synthetic oligonucleotide
uugugcguacaggguuguc

SEQ ID NO: 114965 - RNA, 19 nt, Artificial Sequence
  Description of Artificial Sequence: Synthetic oligonucleotide
gccccgaagggcaggauuc

SEQ ID NO: 114966 - RNA, 19 nt, Artificial Sequence
  Description of Artificial Sequence: Synthetic oligonucleotide
agcggacgacacgguaugu

SEQ ID NO: 114967 - RNA, 19 nt, Artificial Sequence
  Description of Artificial Sequence: Synthetic oligonucleotide
gggcggccugaagacaucc

SEQ ID NO: 114968 - RNA, 19 nt, Artificial Sequence
  Description of Artificial Sequence: Synthetic oligonucleotide
uuggggcgaggaguuggua

SEQ ID NO: 114969 - RNA, 19 nt, Artificial Sequence
  Description of Artificial Sequence: Synthetic oligonucleotide
cccggugguaauagucauc

SEQ ID NO: 114970 - RNA, 19 nt, Artificial Sequence
  Description of Artificial Sequence: Synthetic oligonucleotide
ggaaaccgaagagguaaua

SEQ ID NO: 114971 - RNA, 19 nt, Artificial Sequence
  Description of Artificial Sequence: Synthetic oligonucleotide
gggcgaggaguugguaccc

SEQ ID NO: 114972 - RNA, 19 nt, Artificial Sequence
  Description of Artificial Sequence: Synthetic oligonucleotide
ggguccgaauaauaaucau

SEQ ID NO: 114973 - RNA, 19 nt, Artificial Sequence
  Description of Artificial Sequence: Synthetic oligonucleotide
gcguacaggguugucauau

SEQ ID NO: 114974 - RNA, 19 nt, Artificial Sequence
  Description of Artificial Sequence: Synthetic oligonucleotide
ggacugggaaaagagcaau

SEQ ID NO: 114975 - RNA, 19 nt, Artificial Sequence
  Description of Artificial Sequence: Synthetic oligonucleotide
ggcggccugaagacauccc

SEQ ID NO: 114976 - RNA, 19 nt, Artificial Sequence
  Description of Artificial Sequence: Synthetic oligonucleotide
ggcccauuugaugucacuu

SEQ ID NO: 114977 - RNA, 19 nt, Artificial Sequence
  Description of Artificial Sequence: Synthetic oligonucleotide
ggggauaggucuggcuaaa

SEQ ID NO: 114978 - RNA, 19 nt, Artificial Sequence
  Description of Artificial Sequence: Synthetic oligonucleotide
ggucguuuugguggaaguu

SEQ ID NO: 114979 - RNA, 19 nt, Artificial Sequence
  Description of Artificial Sequence: Synthetic oligonucleotide
ccacgacagaguuaaugau

SEQ ID NO: 114980 - RNA, 19 nt, Artificial Sequence
  Description of Artificial Sequence: Synthetic oligonucleotide
ccggcuggaaggcgacaac

SEQ ID NO: 114981 - RNA, 19 nt, Artificial Sequence
  Description of Artificial Sequence: Synthetic oligonucleotide
gcgucgccguacagaaggc

SEQ ID NO: 114982 - RNA, 19 nt, Artificial Sequence
  Description of Artificial Sequence: Synthetic oligonucleotide
ggcgcuacuccagggacau

SEQ ID NO: 114983 - RNA, 19 nt, Artificial Sequence
  Description of Artificial Sequence: Synthetic oligonucleotide
gggauaggucuggcuaaaa

SEQ ID NO: 114984 - RNA, 19 nt, Artificial Sequence
  Description of Artificial Sequence: Synthetic oligonucleotide
cuacacccaggguggguuu

SEQ ID NO: 114985 - RNA, 19 nt, Artificial Sequence
  Description of Artificial Sequence: Synthetic oligonucleotide
cgauucauguaccaccguu

SEQ ID NO: 114986 - RNA, 19 nt, Artificial Sequence
  Description of Artificial Sequence: Synthetic oligonucleotide
ccaacuuaccuuccaucuu

SEQ ID NO: 114987 - RNA, 19 nt, Artificial Sequence
  Description of Artificial Sequence: Synthetic oligonucleotide
ccgaaguaguagcccaagu

SEQ ID NO: 114988 - RNA, 19 nt, Artificial Sequence
  Description of Artificial Sequence: Synthetic oligonucleotide
ccggggaaucugguuugug

SEQ ID NO: 114989 - RNA, 19 nt, Artificial Sequence
  Description of Artificial Sequence: Synthetic oligonucleotide
ccacccggacuccuccaga

SEQ ID NO: 114990 - RNA, 19 nt, Artificial Sequence
  Description of Artificial Sequence: Synthetic oligonucleotide
ccguacagaaggcuccuuu

SEQ ID NO: 114991 - RNA, 19 nt, Artificial Sequence
  Description of Artificial Sequence: Synthetic oligonucleotide
ggguuggcagaaaggcaau

SEQ ID NO: 114992 - RNA, 19 nt, Artificial Sequence
  Description of Artificial Sequence: Synthetic oligonucleotide
ggggcggccugaagacauc

SEQ ID NO: 114993 - RNA, 19 nt, Artificial Sequence
  Description of Artificial Sequence: Synthetic oligonucleotide
ggcgaggaguugguacccu

SEQ ID NO: 114994 - RNA, 19 nt, Artificial Sequence
  Description of Artificial Sequence: Synthetic oligonucleotide
cagguacauuagccuccuu

SEQ ID NO: 114995 - RNA, 19 nt, Artificial Sequence
  Description of Artificial Sequence: Synthetic oligonucleotide
gccggggaaucugguuugu

SEQ ID NO: 114996 - RNA, 19 nt, Artificial Sequence
  Description of Artificial Sequence: Synthetic oligonucleotide
gccguacagaaggcuccuu

SEQ ID NO: 114997 - RNA, 19 nt, Artificial Sequence
  Description of Artificial Sequence: Synthetic oligonucleotide
cgccguacagaaggcuccu

SEQ ID NO: 114998 - RNA, 19 nt, Artificial Sequence
  Description of Artificial Sequence: Synthetic oligonucleotide
ccccugagacgaggaaauu

SEQ ID NO: 114999 - RNA, 19 nt, Artificial Sequence
  Description of Artificial Sequence: Synthetic oligonucleotide
aaauguauuaaacgcuacc

SEQ ID NO: 115000 - RNA, 19 nt, Artificial Sequence
  Description of Artificial Sequence: Synthetic oligonucleotide
auuaauugcauccacucac

SEQ ID NO: 115001 - RNA, 19 nt, Artificial Sequence
  Description of Artificial Sequence: Synthetic oligonucleotide
aauaauccaugcuuggugg

SEQ ID NO: 115002 - RNA, 19 nt, Artificial Sequence
  Description of Artificial Sequence: Synthetic oligonucleotide
ugaguauuauacaugaacc

SEQ ID NO: 115003 - RNA, 19 nt, Artificial Sequence
  Description of Artificial Sequence: Synthetic oligonucleotide
aauuaggcuaaagagcugc

SEQ ID NO: 115004 - RNA, 19 nt, Artificial Sequence
  Description of Artificial Sequence: Synthetic oligonucleotide
agcgguaucacuuuauccc

SEQ ID NO: 115005 - RNA, 19 nt, Artificial Sequence
  Description of Artificial Sequence: Synthetic oligonucleotide
aagaucacaaaaugcgcgc

SEQ ID NO: 115006 - RNA, 19 nt, Artificial Sequence
  Description of Artificial Sequence: Synthetic oligonucleotide
uugugaaucacaaaugaca

SEQ ID NO: 115007 - RNA, 19 nt, Artificial Sequence
  Description of Artificial Sequence: Synthetic oligonucleotide
aagguugugaaucacaaau

SEQ ID NO: 115008 - RNA, 19 nt, Artificial Sequence
  Description of Artificial Sequence: Synthetic oligonucleotide
gauaauccgagguuugucg

SEQ ID NO: 115009 - RNA, 19 nt, Artificial Sequence
  Description of Artificial Sequence: Synthetic oligonucleotide
uuacauugcaaaaguaucc

SEQ ID NO: 115010 - RNA, 19 nt, Artificial Sequence
  Description of Artificial Sequence: Synthetic oligonucleotide
aaagaucacaaaaugcgcg

SEQ ID NO: 115011 - RNA, 19 nt, Artificial Sequence
  Description of Artificial Sequence: Synthetic oligonucleotide
accuuuagaaagccuaugc

SEQ ID NO: 115012 - RNA, 19 nt, Artificial Sequence
  Description of Artificial Sequence: Synthetic oligonucleotide
aauguauuaaacgcuacca

SEQ ID NO: 115013 - RNA, 19 nt, Artificial Sequence
  Description of Artificial Sequence: Synthetic oligonucleotide
ucgacgauaggauaaaugu

SEQ ID NO: 115014 - RNA, 19 nt, Artificial Sequence
  Description of Artificial Sequence: Synthetic oligonucleotide
ugagcuacuggaaagaaau

SEQ ID NO: 115015 - RNA, 19 nt, Artificial Sequence
  Description of Artificial Sequence: Synthetic oligonucleotide
ucuagaacuacaaaauuua

SEQ ID NO: 115016 - RNA, 19 nt, Artificial Sequence
  Description of Artificial Sequence: Synthetic oligonucleotide
aguaaaccugguuaggcgg

SEQ ID NO: 115017 - RNA, 19 nt, Artificial Sequence
  Description of Artificial Sequence: Synthetic oligonucleotide
cauaacagcucccagaaac

SEQ ID NO: 115018 - RNA, 19 nt, Artificial Sequence
  Description of Artificial Sequence: Synthetic oligonucleotide
aauaucauucucaacucag

SEQ ID NO: 115019 - RNA, 19 nt, Artificial Sequence
  Description of Artificial Sequence: Synthetic oligonucleotide
uccaauucauaacuuuccg

SEQ ID NO: 115020 - RNA, 19 nt, Artificial Sequence
  Description of Artificial Sequence: Synthetic oligonucleotide
uguauaauuagcgguauca

SEQ ID NO: 115021 - RNA, 19 nt, Artificial Sequence
  Description of Artificial Sequence: Synthetic oligonucleotide
cuucaguuaauguaacagg

SEQ ID NO: 115022 - RNA, 19 nt, Artificial Sequence
  Description of Artificial Sequence: Synthetic oligonucleotide
aacccuguauaauuagcgg

SEQ ID NO: 115023 - RNA, 19 nt, Artificial Sequence
  Description of Artificial Sequence: Synthetic oligonucleotide
gaguauuauacaugaaccc

SEQ ID NO: 115024 - RNA, 19 nt, Artificial Sequence
  Description of Artificial Sequence: Synthetic oligonucleotide
gugaugauaaaggaaauag

SEQ ID NO: 115025 - RNA, 19 nt, Artificial Sequence
  Description of Artificial Sequence: Synthetic oligonucleotide
ugaagaaccguuaauggua

SEQ ID NO: 115026 - RNA, 19 nt, Artificial Sequence
  Description of Artificial Sequence: Synthetic oligonucleotide
uguauuaaacgcuaccauc

SEQ ID NO: 115027 - RNA, 19 nt, Artificial Sequence
  Description of Artificial Sequence: Synthetic oligonucleotide
caaguauccaucccaaugc

SEQ ID NO: 115028 - RNA, 19 nt, Artificial Sequence
  Description of Artificial Sequence: Synthetic oligonucleotide
aacuuuccggguuaaagga

SEQ ID NO: 115029 - RNA, 19 nt, Artificial Sequence
  Description of Artificial Sequence: Synthetic oligonucleotide
uccacucacaaacugaccu

SEQ ID NO: 115030 - RNA, 19 nt, Artificial Sequence
  Description of Artificial Sequence: Synthetic oligonucleotide
agggguuuaacacuguuug

SEQ ID NO: 115031 - RNA, 19 nt, Artificial Sequence
  Description of Artificial Sequence: Synthetic oligonucleotide
auuacugcaaguaucagga

SEQ ID NO: 115032 - RNA, 19 nt, Artificial Sequence
  Description of Artificial Sequence: Synthetic oligonucleotide
aacuucgauaauccgaggu

SEQ ID NO: 115033 - RNA, 19 nt, Artificial Sequence
  Description of Artificial Sequence: Synthetic oligonucleotide
aguuguuagacucagcuuu

SEQ ID NO: 115034 - RNA, 19 nt, Artificial Sequence
  Description of Artificial Sequence: Synthetic oligonucleotide
ugcaacuucgauaauccga

SEQ ID NO: 115035 - RNA, 19 nt, Artificial Sequence
  Description of Artificial Sequence: Synthetic oligonucleotide
uauaauuagcgguaucacu

SEQ ID NO: 115036 - RNA, 19 nt, Artificial Sequence
  Description of Artificial Sequence: Synthetic oligonucleotide
aacagauuagcaggccucc

SEQ ID NO: 115037 - RNA, 19 nt, Artificial Sequence
  Description of Artificial Sequence: Synthetic oligonucleotide
augaugcuaagaauuaggc

SEQ ID NO: 115038 - RNA, 19 nt, Artificial Sequence
  Description of Artificial Sequence: Synthetic oligonucleotide
caaagaucacaaaaugcgc

SEQ ID NO: 115039 - RNA, 19 nt, Artificial Sequence
  Description of Artificial Sequence: Synthetic oligonucleotide
acugaguugagcuacugga

SEQ ID NO: 115040 - RNA, 19 nt, Artificial Sequence
  Description of Artificial Sequence: Synthetic oligonucleotide
uagauugccuauuuguucu

SEQ ID NO: 115041 - RNA, 19 nt, Artificial Sequence
  Description of Artificial Sequence: Synthetic oligonucleotide
auuccuauaaaguguccag

SEQ ID NO: 115042 - RNA, 19 nt, Artificial Sequence
  Description of Artificial Sequence: Synthetic oligonucleotide
ucuagaaugccaacuggga

SEQ ID NO: 115043 - RNA, 19 nt, Artificial Sequence
  Description of Artificial Sequence: Synthetic oligonucleotide
uuuugcagaccacuggugu

SEQ ID NO: 115044 - RNA, 19 nt, Artificial Sequence
  Description of Artificial Sequence: Synthetic oligonucleotide
ugggagaccaucaugucac

SEQ ID NO: 115045 - RNA, 19 nt, Artificial Sequence
  Description of Artificial Sequence: Synthetic oligonucleotide
uaugcggcaagagauacgc

SEQ ID NO: 115046 - RNA, 19 nt, Artificial Sequence
  Description of Artificial Sequence: Synthetic oligonucleotide
ggauaaauguaaucugugg

SEQ ID NO: 115047 - RNA, 19 nt, Artificial Sequence
  Description of Artificial Sequence: Synthetic oligonucleotide
uguagacacaaugagauuu

SEQ ID NO: 115048 - RNA, 19 nt, Artificial Sequence
  Description of Artificial Sequence: Synthetic oligonucleotide
gaugggcgaguuuacaaag

SEQ ID NO: 115049 - RNA, 19 nt, Artificial Sequence
  Description of Artificial Sequence: Synthetic oligonucleotide
guuugauggcaucaguucc

SEQ ID NO: 115050 - RNA, 19 nt, Artificial Sequence
  Description of Artificial Sequence: Synthetic oligonucleotide
ucccagaacaauccagggg

SEQ ID NO: 115051 - RNA, 19 nt, Artificial Sequence
  Description of Artificial Sequence: Synthetic oligonucleotide
aaacagauuagcaggccuc

SEQ ID NO: 115052 - RNA, 19 nt, Artificial Sequence
  Description of Artificial Sequence: Synthetic oligonucleotide
cuuucuagaaugccaacug

SEQ ID NO: 115053 - RNA, 19 nt, Artificial Sequence
  Description of Artificial Sequence: Synthetic oligonucleotide
ugagaacauuagcacaugc

SEQ ID NO: 115054 - RNA, 19 nt, Artificial Sequence
  Description of Artificial Sequence: Synthetic oligonucleotide
uuaauugcauccacucaca

SEQ ID NO: 115055 - RNA, 19 nt, Artificial Sequence
  Description of Artificial Sequence: Synthetic oligonucleotide
agggcauuugauuauacaa

SEQ ID NO: 115056 - RNA, 19 nt, Artificial Sequence
  Description of Artificial Sequence: Synthetic oligonucleotide
  modified_base (19)..(19): a, c, u, g, unknown or other
uuaagcgucgccugaaaan

SEQ ID NO: 115057 - RNA, 19 nt, Artificial Sequence
  Description of Artificial Sequence: Synthetic oligonucleotide
uggugaagaaccguuaaug

SEQ ID NO: 115058 - RNA, 19 nt, Artificial Sequence
  Description of Artificial Sequence: Synthetic oligonucleotide
ugguauuacugcaaguauc

SEQ ID NO: 115059 - RNA, 19 nt, Artificial Sequence
  Description of Artificial Sequence: Synthetic oligonucleotide
acgcccauugcauagaggu

SEQ ID NO: 115060 - RNA, 19 nt, Artificial Sequence
  Description of Artificial Sequence: Synthetic oligonucleotide
guuagacucagcuuuacaa

SEQ ID NO: 115061 - RNA, 19 nt, Artificial Sequence
  Description of Artificial Sequence: Synthetic oligonucleotide
ugugacgcccauugcauag

SEQ ID NO: 115062 - RNA, 19 nt, Artificial Sequence
  Description of Artificial Sequence: Synthetic oligonucleotide
acugcaaguaucaggaaag

SEQ ID NO: 115063 - RNA, 19 nt, Artificial Sequence
  Description of Artificial Sequence: Synthetic oligonucleotide
ucacaaaaugcgcgcacag

SEQ ID NO: 115064 - RNA, 19 nt, Artificial Sequence
  Description of Artificial Sequence: Synthetic oligonucleotide
uacugcauuaucuggcaug

SEQ ID NO: 115065 - RNA, 19 nt, Artificial Sequence
  Description of Artificial Sequence: Synthetic oligonucleotide
acuuuaggcaaaacccucc

SEQ ID NO: 115066 - RNA, 19 nt, Artificial Sequence
  Description of Artificial Sequence: Synthetic oligonucleotide
caguaaaccugguuaggcg

SEQ ID NO: 115067 - RNA, 19 nt, Artificial Sequence
  Description of Artificial Sequence: Synthetic oligonucleotide
gacgauaggauaaauguaa

SEQ ID NO: 115068 - RNA, 19 nt, Artificial Sequence
  Description of Artificial Sequence: Synthetic oligonucleotide
agggaauuccauuugccca

SEQ ID NO: 115069 - RNA, 19 nt, Artificial Sequence
  Description of Artificial Sequence: Synthetic oligonucleotide
ugguguguacuuucgagga

SEQ ID NO: 115070 - RNA, 19 nt, Artificial Sequence
  Description of Artificial Sequence: Synthetic oligonucleotide
aagggcauuugauuauaca

SEQ ID NO: 115071 - RNA, 19 nt, Artificial Sequence
  Description of Artificial Sequence: Synthetic oligonucleotide
aaggaaucaugcaacccuc

SEQ ID NO: 115072 - RNA, 19 nt, Artificial Sequence
  Description of Artificial Sequence: Synthetic oligonucleotide
ugcaugagcauugaacgug

SEQ ID NO: 115073 - RNA, 19 nt, Artificial Sequence
  Description of Artificial Sequence: Synthetic oligonucleotide
auaauuagcgguaucacuu

SEQ ID NO: 115074 - RNA, 19 nt, Artificial Sequence
  Description of Artificial Sequence: Synthetic oligonucleotide
aaugcgcgcacagaaaagu

SEQ ID NO: 115075 - RNA, 19 nt, Artificial Sequence
  Description of Artificial Sequence: Synthetic oligonucleotide
aucccaauaauccaugcuu

SEQ ID NO: 115076 - RNA, 19 nt, Artificial Sequence
  Description of Artificial Sequence: Synthetic oligonucleotide
uuagaaagccuaugcggca

SEQ ID NO: 115077 - RNA, 19 nt, Artificial Sequence
  Description of Artificial Sequence: Synthetic oligonucleotide
agagauuccuauaaagugu

SEQ ID NO: 115078 - RNA, 19 nt, Artificial Sequence
  Description of Artificial Sequence: Synthetic oligonucleotide
ugggcgaguuuacaaagug

SEQ ID NO: 115079 - RNA, 19 nt, Artificial Sequence
  Description of Artificial Sequence: Synthetic oligonucleotide
aagccuaugcggcaagaga

SEQ ID NO: 115080 - RNA, 19 nt, Artificial Sequence
  Description of Artificial Sequence: Synthetic oligonucleotide
caguuaauguccuucucug

SEQ ID NO: 115081 - RNA, 19 nt, Artificial Sequence
  Description of Artificial Sequence: Synthetic oligonucleotide
uucgauaauccgagguuug

SEQ ID NO: 115082 - RNA, 19 nt, Artificial Sequence
  Description of Artificial Sequence: Synthetic oligonucleotide
guagauugccuauuuguuc

SEQ ID NO: 115083 - RNA, 19 nt, Artificial Sequence
  Description of Artificial Sequence: Synthetic oligonucleotide
accacugguguguacuuuc

SEQ ID NO: 115084 - RNA, 19 nt, Artificial Sequence
  Description of Artificial Sequence: Synthetic oligonucleotide
ugccuauuuguucuagaac

SEQ ID NO: 115085 - RNA, 19 nt, Artificial Sequence
  Description of Artificial Sequence: Synthetic oligonucleotide
agaaaugcccucgaguugu

SEQ ID NO: 115086 - RNA, 19 nt, Artificial Sequence
  Description of Artificial Sequence: Synthetic oligonucleotide
uguuagacucagcuuuaca

SEQ ID NO: 115087 - RNA, 19 nt, Artificial Sequence
  Description of Artificial Sequence: Synthetic oligonucleotide
uagcgguaucacuuuaucc

SEQ ID NO: 115088 - RNA, 19 nt, Artificial Sequence
  Description of Artificial Sequence: Synthetic oligonucleotide
acccuguauaauuagcggu

SEQ ID NO: 115089 - RNA, 19 nt, Artificial Sequence
  Description of Artificial Sequence: Synthetic oligonucleotide
aggcaauuccuugucacac

SEQ ID NO: 115090 - RNA, 19 nt, Artificial Sequence
  Description of Artificial Sequence: Synthetic oligonucleotide
auguauuaaacgcuaccau

SEQ ID NO: 115091 - RNA, 19 nt, Artificial Sequence
  Description of Artificial Sequence: Synthetic oligonucleotide
accguuaaugguauuacug

SEQ ID NO: 115092 - RNA, 19 nt, Artificial Sequence
  Description of Artificial Sequence: Synthetic oligonucleotide
uuagcgguaucacuuuauc

SEQ ID NO: 115093 - RNA, 19 nt, Artificial Sequence
  Description of Artificial Sequence: Synthetic oligonucleotide
gauuccuauaaagugucca

SEQ ID NO: 115094 - RNA, 19 nt, Artificial Sequence
  Description of Artificial Sequence: Synthetic oligonucleotide
aggccugaaaucacuauac

SEQ ID NO: 115095 - RNA, 19 nt, Artificial Sequence
  Description of Artificial Sequence: Synthetic oligonucleotide
ucccgaguagacaugguuc

SEQ ID NO: 115096 - RNA, 19 nt, Artificial Sequence
  Description of Artificial Sequence: Synthetic oligonucleotide
uugccuauuuguucuagaa

SEQ ID NO: 115097 - RNA, 19 nt, Artificial Sequence
  Description of Artificial Sequence: Synthetic oligonucleotide
auucauaacuuuccggguu

SEQ ID NO: 115098 - RNA, 19 nt, Artificial Sequence
  Description of Artificial Sequence: Synthetic oligonucleotide
uugcguggcuacuugaggu

SEQ ID NO: 115099 - RNA, 19 nt, Artificial Sequence
  Description of Artificial Sequence: Synthetic oligonucleotide
  modified_base (18)..(18): a, c, u, g, unknown or other
uaagcgucgccugaaaana

SEQ ID NO: 115100 - RNA, 19 nt, Artificial Sequence
  Description of Artificial Sequence: Synthetic oligonucleotide
aggaccaacauuauagaga

SEQ ID NO: 115101 - RNA, 19 nt, Artificial Sequence
  Description of Artificial Sequence: Synthetic oligonucleotide
auaauccgagguuugucga

SEQ ID NO: 115102 - RNA, 19 nt, Artificial Sequence
  Description of Artificial Sequence: Synthetic oligonucleotide
ugcggcaagagauacgcau

SEQ ID NO: 115103 - RNA, 19 nt, Artificial Sequence
  Description of Artificial Sequence: Synthetic oligonucleotide
uguguacuuucgaggacca

SEQ ID NO: 115104 - RNA, 19 nt, Artificial Sequence
  Description of Artificial Sequence: Synthetic oligonucleotide
auuagcaggccuccugaug

SEQ ID NO: 115105 - RNA, 19 nt, Artificial Sequence
  Description of Artificial Sequence: Synthetic oligonucleotide
auguaagggucaucgacga

SEQ ID NO: 115106 - RNA, 19 nt, Artificial Sequence
  Description of Artificial Sequence: Synthetic oligonucleotide
aguaugggcguagagacaa

SEQ ID NO: 115107 - RNA, 19 nt, Artificial Sequence
  Description of Artificial Sequence: Synthetic oligonucleotide
auuauuugccaaguaaauu

SEQ ID NO: 115108 - RNA, 19 nt, Artificial Sequence
  Description of Artificial Sequence: Synthetic oligonucleotide
gaucacaaaaugcgcgcac

SEQ ID NO: 115109 - RNA, 19 nt, Artificial Sequence
  Description of Artificial Sequence: Synthetic oligonucleotide
gaagcaccuuuagaaagcc

SEQ ID NO: 115110 - RNA, 19 nt, Artificial Sequence
  Description of Artificial Sequence: Synthetic oligonucleotide
guccaauucauaacuuucc

SEQ ID NO: 115111 - RNA, 19 nt, Artificial Sequence
  Description of Artificial Sequence: Synthetic oligonucleotide
caaucccaauaauccaugc

SEQ ID NO: 115112 - RNA, 19 nt, Artificial Sequence
  Description of Artificial Sequence: Synthetic oligonucleotide
acuucgauaauccgagguu

SEQ ID NO: 115113 - RNA, 19 nt, Artificial Sequence
  Description of Artificial Sequence: Synthetic oligonucleotide
gaaccguuaaugguauuac

SEQ ID NO: 115114 - RNA, 19 nt, Artificial Sequence
  Description of Artificial Sequence: Synthetic oligonucleotide
ugggugaccacuagcuuaa

SEQ ID NO: 115115 - RNA, 19 nt, Artificial Sequence
  Description of Artificial Sequence: Synthetic oligonucleotide
aagagcugcugauuuuaaa

SEQ ID NO: 115116 - RNA, 19 nt, Artificial Sequence
  Description of Artificial Sequence: Synthetic oligonucleotide
guauaauuagcgguaucac

SEQ ID NO: 115117 - RNA, 19 nt, Artificial Sequence
  Description of Artificial Sequence: Synthetic oligonucleotide
gguuugucgaugauucugg

SEQ ID NO: 115118 - RNA, 19 nt, Artificial Sequence
  Description of Artificial Sequence: Synthetic oligonucleotide
guguguacuuucgaggacc

SEQ ID NO: 115119 - RNA, 19 nt, Artificial Sequence
  Description of Artificial Sequence: Synthetic oligonucleotide
agguuugucgaugauucug

SEQ ID NO: 115120 - RNA, 19 nt, Artificial Sequence
  Description of Artificial Sequence: Synthetic oligonucleotide
ggauucacguuuugcgugg

SEQ ID NO: 115121 - RNA, 19 nt, Artificial Sequence
  Description of Artificial Sequence: Synthetic oligonucleotide
ggugcaacuucgauaaucc

SEQ ID NO: 115122 - RNA, 19 nt, Artificial Sequence
  Description of Artificial Sequence: Synthetic oligonucleotide
ccguuaaugguauuacugc

SEQ ID NO: 115123 - RNA, 19 nt, Artificial Sequence
  Description of Artificial Sequence: Synthetic oligonucleotide
uuaggcuaaagagcugcug

SEQ ID NO: 115124 - RNA, 19 nt, Artificial Sequence
  Description of Artificial Sequence: Synthetic oligonucleotide
caugcaacccuccugacua

SEQ ID NO: 115125 - RNA, 19 nt, Artificial Sequence
  Description of Artificial Sequence: Synthetic oligonucleotide
ugacgcccauugcauagag

SEQ ID NO: 115126 - RNA, 19 nt, Artificial Sequence
  Description of Artificial Sequence: Synthetic oligonucleotide
aaacgggccgcggcgcucc

SEQ ID NO: 115127 - RNA, 19 nt, Artificial Sequence
  Description of Artificial Sequence: Synthetic oligonucleotide
aaugccaagccguggcaua

SEQ ID NO: 115128 - RNA, 19 nt, Artificial Sequence
  Description of Artificial Sequence: Synthetic oligonucleotide
uaauuagcgguaucacuuu

SEQ ID NO: 115129 - RNA, 19 nt, Artificial Sequence
  Description of Artificial Sequence: Synthetic oligonucleotide
cuaugcggcaagagauacg

SEQ ID NO: 115130 - RNA, 19 nt, Artificial Sequence
  Description of Artificial Sequence: Synthetic oligonucleotide
aggugugggauucacguuu

SEQ ID NO: 115131 - RNA, 19 nt, Artificial Sequence
  Description of Artificial Sequence: Synthetic oligonucleotide
aucgacgauaggauaaaug

SEQ ID NO: 115132 - RNA, 19 nt, Artificial Sequence
  Description of Artificial Sequence: Synthetic oligonucleotide
ccaaguaaauuagauacug

SEQ ID NO: 115133 - RNA, 19 nt, Artificial Sequence
  Description of Artificial Sequence: Synthetic oligonucleotide
gguuugauggcaucaguuc

SEQ ID NO: 115134 - RNA, 19 nt, Artificial Sequence
  Description of Artificial Sequence: Synthetic oligonucleotide
ugauguuuccggacagguc

SEQ ID NO: 115135 - RNA, 19 nt, Artificial Sequence
  Description of Artificial Sequence: Synthetic oligonucleotide
ggcaaaacccucccaaaug

SEQ ID NO: 115136 - RNA, 19 nt, Artificial Sequence
  Description of Artificial Sequence: Synthetic oligonucleotide
cacucacaaacugaccuag

SEQ ID NO: 115137 - RNA, 19 nt, Artificial Sequence
  Description of Artificial Sequence: Synthetic oligonucleotide
guucuuagagucuuuaauu

SEQ ID NO: 115138 - RNA, 19 nt, Artificial Sequence
  Description of Artificial Sequence: Synthetic oligonucleotide
gccuauuuguucuagaacu

SEQ ID NO: 115139 - RNA, 19 nt, Artificial Sequence
  Description of Artificial Sequence: Synthetic oligonucleotide
aggaaucaugcaacccucc

SEQ ID NO: 115140 - RNA, 19 nt, Artificial Sequence
  Description of Artificial Sequence: Synthetic oligonucleotide
guaaacagauuagcaggcc

SEQ ID NO: 115141 - RNA, 19 nt, Artificial Sequence
  Description of Artificial Sequence: Synthetic oligonucleotide
acaagaggccugaaaucac

SEQ ID NO: 115142 - RNA, 19 nt, Artificial Sequence
  Description of Artificial Sequence: Synthetic oligonucleotide
aucaugcaacccuccugac

SEQ ID NO: 115143 - RNA, 19 nt, Artificial Sequence
  Description of Artificial Sequence: Synthetic oligonucleotide
uuacagagguuccggcuuc

SEQ ID NO: 115144 - RNA, 19 nt, Artificial Sequence
  Description of Artificial Sequence: Synthetic oligonucleotide
agauaacaccuuuguagau

SEQ ID NO: 115145 - RNA, 19 nt, Artificial Sequence
  Description of Artificial Sequence: Synthetic oligonucleotide
gugcaacuucgauaauccg

SEQ ID NO: 115146 - RNA, 19 nt, Artificial Sequence
  Description of Artificial Sequence: Synthetic oligonucleotide
agaaccguuaaugguauua

SEQ ID NO: 115147 - RNA, 19 nt, Artificial Sequence
  Description of Artificial Sequence: Synthetic oligonucleotide
cugccuuaccugaacugag

SEQ ID NO: 115148 - RNA, 19 nt, Artificial Sequence
  Description of Artificial Sequence: Synthetic oligonucleotide
gggauucacguuuugcgug

SEQ ID NO: 115149 - RNA, 19 nt, Artificial Sequence
  Description of Artificial Sequence: Synthetic oligonucleotide
gucuagauuaggagguggc

SEQ ID NO: 115150 - RNA, 19 nt, Artificial Sequence
  Description of Artificial Sequence: Synthetic oligonucleotide
auaucauucucaacucaga

SEQ ID NO: 115151 - RNA, 19 nt, Artificial Sequence
  Description of Artificial Sequence: Synthetic oligonucleotide
auaacagcucccagaaacu

SEQ ID NO: 115152 - RNA, 19 nt, Artificial Sequence
  Description of Artificial Sequence: Synthetic oligonucleotide
caccucguuccucuguugc

SEQ ID NO: 115153 - RNA, 19 nt, Artificial Sequence
  Description of Artificial Sequence: Synthetic oligonucleotide
cuuuggggccuguuagcag

SEQ ID NO: 115154 - RNA, 19 nt, Artificial Sequence
  Description of Artificial Sequence: Synthetic oligonucleotide
gaggccugaaaucacuaua

SEQ ID NO: 115155 - RNA, 19 nt, Artificial Sequence
  Description of Artificial Sequence: Synthetic oligonucleotide
uaauccgagguuugucgau

SEQ ID NO: 115156 - RNA, 19 nt, Artificial Sequence
  Description of Artificial Sequence: Synthetic oligonucleotide
ugcucacgugguaaacaga

SEQ ID NO: 115157 - RNA, 19 nt, Artificial Sequence
  Description of Artificial Sequence: Synthetic oligonucleotide
gaauuaggcuaaagagcug

SEQ ID NO: 115158 - RNA, 19 nt, Artificial Sequence
  Description of Artificial Sequence: Synthetic oligonucleotide
aucacaaaaugcgcgcaca

SEQ ID NO: 115159 - RNA, 19 nt, Artificial Sequence
  Description of Artificial Sequence: Synthetic oligonucleotide
gggguuuaacacuguuugg

SEQ ID NO: 115160 - RNA, 19 nt, Artificial Sequence
  Description of Artificial Sequence: Synthetic oligonucleotide
guaagggucaucgacgaua

SEQ ID NO: 115161 - RNA, 19 nt, Artificial Sequence
  Description of Artificial Sequence: Synthetic oligonucleotide
uaugggcguagagacaaaa

SEQ ID NO: 115162 - RNA, 19 nt, Artificial Sequence
  Description of Artificial Sequence: Synthetic oligonucleotide
ggcgaguuuacaaagugca

SEQ ID NO: 115163 - RNA, 19 nt, Artificial Sequence
  Description of Artificial Sequence: Synthetic oligonucleotide
aacucagaagcugccucga

SEQ ID NO: 115164 - RNA, 19 nt, Artificial Sequence
  Description of Artificial Sequence: Synthetic oligonucleotide
guauuacugcaaguaucag

SEQ ID NO: 115165 - RNA, 19 nt, Artificial Sequence
  Description of Artificial Sequence: Synthetic oligonucleotide
caacuucgauaauccgagg

SEQ ID NO: 115166 - RNA, 19 nt, Artificial Sequence
  Description of Artificial Sequence: Synthetic oligonucleotide
ucgaguuguuagacucagc

SEQ ID NO: 115167 - RNA, 19 nt, Artificial Sequence
  Description of Artificial Sequence: Synthetic oligonucleotide
agccuaugcggcaagagau

SEQ ID NO: 115168 - RNA, 19 nt, Artificial Sequence
  Description of Artificial Sequence: Synthetic oligonucleotide
ucgauaauccgagguuugu

SEQ ID NO: 115169 - RNA, 19 nt, Artificial Sequence
  Description of Artificial Sequence: Synthetic oligonucleotide
agaucacaaaaugcgcgca

SEQ ID NO: 115170 - RNA, 19 nt, Artificial Sequence
  Description of Artificial Sequence: Synthetic oligonucleotide
ggaccaacauuauagagau

SEQ ID NO: 115171 - RNA, 19 nt, Artificial Sequence
  Description of Artificial Sequence: Synthetic oligonucleotide
uucacguuuugcguggcua

SEQ ID NO: 115172 - RNA, 19 nt, Artificial Sequence
  Description of Artificial Sequence: Synthetic oligonucleotide
cauugaacgugugcauaag

SEQ ID NO: 115173 - RNA, 19 nt, Artificial Sequence
  Description of Artificial Sequence: Synthetic oligonucleotide
ugacaccucguuccucugu

SEQ ID NO: 115174 - RNA, 19 nt, Artificial Sequence
  Description of Artificial Sequence: Synthetic oligonucleotide
ucaucgacgauaggauaaa

SEQ ID NO: 115175 - RNA, 19 nt, Artificial Sequence
  Description of Artificial Sequence: Synthetic oligonucleotide
cacuauagaacaucuaauu

SEQ ID NO: 115176 - RNA, 19 nt, Artificial Sequence
  Description of Artificial Sequence: Synthetic oligonucleotide
ggcauaacagcucccagaa

SEQ ID NO: 115177 - RNA, 19 nt, Artificial Sequence
  Description of Artificial Sequence: Synthetic oligonucleotide
uaucccuuucccugucagu

SEQ ID NO: 115178 - RNA, 19 nt, Artificial Sequence
  Description of Artificial Sequence: Synthetic oligonucleotide
gucaucgacgauaggauaa

SEQ ID NO: 115179 - RNA, 19 nt, Artificial Sequence
  Description of Artificial Sequence: Synthetic oligonucleotide
ugggugcaucuucaguuaa

SEQ ID NO: 115180 - RNA, 19 nt, Artificial Sequence
  Description of Artificial Sequence: Synthetic oligonucleotide
aaaacgggccgcggcgcuc

SEQ ID NO: 115181 - RNA, 19 nt, Artificial Sequence
  Description of Artificial Sequence: Synthetic oligonucleotide
cucccuuaagcgucgccug

SEQ ID NO: 115182 - RNA, 19 nt, Artificial Sequence
  Description of Artificial Sequence: Synthetic oligonucleotide
cugaauuauaaaugaguau

SEQ ID NO: 115183 - RNA, 19 nt, Artificial Sequence
  Description of Artificial Sequence: Synthetic oligonucleotide
cuguauaauuagcgguauc

SEQ ID NO: 115184 - RNA, 19 nt, Artificial Sequence
  Description of Artificial Sequence: Synthetic oligonucleotide
gccuucgccguauuugggg

SEQ ID NO: 115185 - RNA, 19 nt, Artificial Sequence
  Description of Artificial Sequence: Synthetic oligonucleotide
cugaccuagggucaccaga

SEQ ID NO: 115186 - RNA, 19 nt, Artificial Sequence
  Description of Artificial Sequence: Synthetic oligonucleotide
cgaguuuacaaagugcagc

SEQ ID NO: 115187 - RNA, 19 nt, Artificial Sequence
  Description of Artificial Sequence: Synthetic oligonucleotide
caaugcaccgggcgcgccg

SEQ ID NO: 115188 - RNA, 19 nt, Artificial Sequence
  Description of Artificial Sequence: Synthetic oligonucleotide
agauacgcaucuaaagauu

SEQ ID NO: 115189 - RNA, 19 nt, Artificial Sequence
  Description of Artificial Sequence: Synthetic oligonucleotide
gauaaggaagccccuguuu

SEQ ID NO: 115190 - RNA, 19 nt, Artificial Sequence
  Description of Artificial Sequence: Synthetic oligonucleotide
augcuaagaauuaggcuaa

SEQ ID NO: 115191 - RNA, 19 nt, Artificial Sequence
  Description of Artificial Sequence: Synthetic oligonucleotide
gcucuagguggacacagug

SEQ ID NO: 115192 - RNA, 19 nt, Artificial Sequence
  Description of Artificial Sequence: Synthetic oligonucleotide
guuuggccacccguuacag

SEQ ID NO: 115193 - RNA, 19 nt, Artificial Sequence
  Description of Artificial Sequence: Synthetic oligonucleotide
uuguuagacucagcuuuac

SEQ ID NO: 115194 - RNA, 19 nt, Artificial Sequence
  Description of Artificial Sequence: Synthetic oligonucleotide
uguaagggucaucgacgau

SEQ ID NO: 115195 - RNA, 19 nt, Artificial Sequence
  Description of Artificial Sequence: Synthetic oligonucleotide
acuguuuggccacccguua

SEQ ID NO: 115196 - RNA, 19 nt, Artificial Sequence
  Description of Artificial Sequence: Synthetic oligonucleotide
cugaguugagcuacuggaa

SEQ ID NO: 115197 - RNA, 19 nt, Artificial Sequence
  Description of Artificial Sequence: Synthetic oligonucleotide
guacuuuaggcaaaacccu

SEQ ID NO: 115198 - RNA, 19 nt, Artificial Sequence
  Description of Artificial Sequence: Synthetic oligonucleotide
caucccaaugccaagccgu

SEQ ID NO: 115199 - RNA, 19 nt, Artificial Sequence
  Description of Artificial Sequence: Synthetic oligonucleotide
auccgagguuugucgauga

SEQ ID NO: 115200 - RNA, 19 nt, Artificial Sequence
  Description of Artificial Sequence: Synthetic oligonucleotide
augcccucgaguuguuaga

SEQ ID NO: 115201 - RNA, 19 nt, Artificial Sequence
  Description of Artificial Sequence: Synthetic oligonucleotide
cuuaagcgucgccugaaaa

SEQ ID NO: 115202 - RNA, 19 nt, Artificial Sequence
  Description of Artificial Sequence: Synthetic oligonucleotide
gacgcccauugcauagagg

SEQ ID NO: 115203 - RNA, 19 nt, Artificial Sequence
  Description of Artificial Sequence: Synthetic oligonucleotide
auacgcaucuaaagauuca

SEQ ID NO: 115204 - RNA, 19 nt, Artificial Sequence
  Description of Artificial Sequence: Synthetic oligonucleotide
acccguuacagagguuccg

SEQ ID NO: 115205 - RNA, 19 nt, Artificial Sequence
  Description of Artificial Sequence: Synthetic oligonucleotide
ucauaacuuuccggguuaa

SEQ ID NO: 115206 - RNA, 19 nt, Artificial Sequence
  Description of Artificial Sequence: Synthetic oligonucleotide
auucacguuuugcguggcu

SEQ ID NO: 115207 - RNA, 19 nt, Artificial Sequence
  Description of Artificial Sequence: Synthetic oligonucleotide
gauucacguuuugcguggc

SEQ ID NO: 115208 - RNA, 19 nt, Artificial Sequence
  Description of Artificial Sequence: Synthetic oligonucleotide
ugcccucgaguuguuagac

SEQ ID NO: 115209 - RNA, 19 nt, Artificial Sequence
  Description of Artificial Sequence: Synthetic oligonucleotide
cuuugcgcccuccgccucc

SEQ ID NO: 115210 - RNA, 19 nt, Artificial Sequence
  Description of Artificial Sequence: Synthetic oligonucleotide
caccuuuagaaagccuaug

SEQ ID NO: 115211 - RNA, 19 nt, Artificial Sequence
  Description of Artificial Sequence: Synthetic oligonucleotide
uguugagccgugccauguu

SEQ ID NO: 115212 - RNA, 19 nt, Artificial Sequence
  Description of Artificial Sequence: Synthetic oligonucleotide
  modified_base (16)..(16): a, c, u, g, unknown or other
agcgucgccugaaaanaaa

SEQ ID NO: 115213 - RNA, 19 nt, Artificial Sequence
  Description of Artificial Sequence: Synthetic oligonucleotide
acgauaggauaaauguaau

SEQ ID NO: 115214 - RNA, 19 nt, Artificial Sequence
  Description of Artificial Sequence: Synthetic oligonucleotide
auuaggcuaaagagcugcu

SEQ ID NO: 115215 - RNA, 19 nt, Artificial Sequence
  Description of Artificial Sequence: Synthetic oligonucleotide
gaccuagggucaccagaug

SEQ ID NO: 115216 - RNA, 19 nt, Artificial Sequence
  Description of Artificial Sequence: Synthetic oligonucleotide
gccguggcauaacagcucc

SEQ ID NO: 115217 - RNA, 19 nt, Artificial Sequence
  Description of Artificial Sequence: Synthetic oligonucleotide
ccuuaccugaacugaguug

SEQ ID NO: 115218 - RNA, 19 nt, Artificial Sequence
  Description of Artificial Sequence: Synthetic oligonucleotide
guuacagagguuccggcuu

SEQ ID NO: 115219 - RNA, 19 nt, Artificial Sequence
  Description of Artificial Sequence: Synthetic oligonucleotide
caacauuauagagauuccu

SEQ ID NO: 115220 - RNA, 19 nt, Artificial Sequence
  Description of Artificial Sequence: Synthetic oligonucleotide
cugguuaggcggaagcucu

SEQ ID NO: 115221 - RNA, 19 nt, Artificial Sequence
  Description of Artificial Sequence: Synthetic oligonucleotide
gcauugaacgugugcauaa

SEQ ID NO: 115222 - RNA, 19 nt, Artificial Sequence
  Description of Artificial Sequence: Synthetic oligonucleotide
caauagcuauuucugucua

SEQ ID NO: 115223 - RNA, 19 nt, Artificial Sequence
  Description of Artificial Sequence: Synthetic oligonucleotide
ggaagcauugugagaaaga

SEQ ID NO: 115224 - RNA, 19 nt, Artificial Sequence
  Description of Artificial Sequence: Synthetic oligonucleotide
ggaugggcgaguuuacaaa

SEQ ID NO: 115225 - RNA, 19 nt, Artificial Sequence
  Description of Artificial Sequence: Synthetic oligonucleotide
augacaccucguuccucug

SEQ ID NO: 115226 - RNA, 19 nt, Artificial Sequence
  Description of Artificial Sequence: Synthetic oligonucleotide
cuuuuauguuugagcugca

SEQ ID NO: 115227 - RNA, 19 nt, Artificial Sequence
  Description of Artificial Sequence: Synthetic oligonucleotide
accugguuaggcggaagcu

SEQ ID NO: 115228 - RNA, 19 nt, Artificial Sequence
  Description of Artificial Sequence: Synthetic oligonucleotide
gguguguacuuucgaggac

SEQ ID NO: 115229 - RNA, 19 nt, Artificial Sequence
  Description of Artificial Sequence: Synthetic oligonucleotide
cgugguaaacagauuagca

SEQ ID NO: 115230 - RNA, 19 nt, Artificial Sequence
  Description of Artificial Sequence: Synthetic oligonucleotide
caaaggaaugacgcaagua

SEQ ID NO: 115231 - RNA, 19 nt, Artificial Sequence
  Description of Artificial Sequence: Synthetic oligonucleotide
guucgguugcccuucucua

SEQ ID NO: 115232 - RNA, 19 nt, Artificial Sequence
  Description of Artificial Sequence: Synthetic oligonucleotide
cucccgaaaacgggccgcg

SEQ ID NO: 115233 - RNA, 19 nt, Artificial Sequence
  Description of Artificial Sequence: Synthetic oligonucleotide
cuaccauccacagaacagu

SEQ ID NO: 115234 - RNA, 19 nt, Artificial Sequence
  Description of Artificial Sequence: Synthetic oligonucleotide
  modified_base (17)..(17): a, c, u, g, unknown or other
aagcgucgccugaaaanaa

SEQ ID NO: 115235 - RNA, 19 nt, Artificial Sequence
  Description of Artificial Sequence: Synthetic oligonucleotide
gaguuguuagacucagcuu

SEQ ID NO: 115236 - RNA, 19 nt, Artificial Sequence
  Description of Artificial Sequence: Synthetic oligonucleotide
uccgagguuugucgaugau

SEQ ID NO: 115237 - RNA, 19 nt, Artificial Sequence
  Description of Artificial Sequence: Synthetic oligonucleotide
gggcgaguuuacaaagugc

SEQ ID NO: 115238 - RNA, 19 nt, Artificial Sequence
  Description of Artificial Sequence: Synthetic oligonucleotide
augggcgaguuuacaaagu

SEQ ID NO: 115239 - RNA, 19 nt, Artificial Sequence
  Description of Artificial Sequence: Synthetic oligonucleotide
ccggguuaaaggacucccg

SEQ ID NO: 115240 - RNA, 19 nt, Artificial Sequence
  Description of Artificial Sequence: Synthetic oligonucleotide
ccacugguguguacuuucg

SEQ ID NO: 115241 - RNA, 19 nt, Artificial Sequence
  Description of Artificial Sequence: Synthetic oligonucleotide
cgcgcacagaaaaguaugg

SEQ ID NO: 115242 - RNA, 19 nt, Artificial Sequence
  Description of Artificial Sequence: Synthetic oligonucleotide
gaggaugggcgaguuuaca

SEQ ID NO: 115243 - RNA, 19 nt, Artificial Sequence
  Description of Artificial Sequence: Synthetic oligonucleotide
uguuuccggacagguccca

SEQ ID NO: 115244 - RNA, 19 nt, Artificial Sequence
  Description of Artificial Sequence: Synthetic oligonucleotide
ccaagccguggcauaacag

SEQ ID NO: 115245 - RNA, 19 nt, Artificial Sequence
  Description of Artificial Sequence: Synthetic oligonucleotide
cguuaaugguauuacugca

SEQ ID NO: 115246 - RNA, 19 nt, Artificial Sequence
  Description of Artificial Sequence: Synthetic oligonucleotide
ucccgaaaacgggccgcgg

SEQ ID NO: 115247 - RNA, 19 nt, Artificial Sequence
  Description of Artificial Sequence: Synthetic oligonucleotide
ccacccguuacagagguuc

SEQ ID NO: 115248 - RNA, 19 nt, Artificial Sequence
  Description of Artificial Sequence: Synthetic oligonucleotide
ggacaggucccaugcauaa

SEQ ID NO: 115249 - RNA, 19 nt, Artificial Sequence
  Description of Artificial Sequence: Synthetic oligonucleotide
guuaggcggaagcucuugu

SEQ ID NO: 115250 - RNA, 19 nt, Artificial Sequence
  Description of Artificial Sequence: Synthetic oligonucleotide
augggcguagagacaaaau

SEQ ID NO: 115251 - RNA, 19 nt, Artificial Sequence
  Description of Artificial Sequence: Synthetic oligonucleotide
acgcaucuaaagauucaaa

SEQ ID NO: 115252 - RNA, 19 nt, Artificial Sequence
  Description of Artificial Sequence: Synthetic oligonucleotide
ugguuaggcggaagcucuu

SEQ ID NO: 115253 - RNA, 19 nt, Artificial Sequence
  Description of Artificial Sequence: Synthetic oligonucleotide
uggcuacuugaggugcaac

SEQ ID NO: 115254 - RNA, 19 nt, Artificial Sequence
  Description of Artificial Sequence: Synthetic oligonucleotide
gcgcgcacagaaaaguaug

SEQ ID NO: 115255 - RNA, 19 nt, Artificial Sequence
  Description of Artificial Sequence: Synthetic oligonucleotide
cccguuacagagguuccgg

SEQ ID NO: 115256 - RNA, 19 nt, Artificial Sequence
  Description of Artificial Sequence: Synthetic oligonucleotide
acgcaaguauccaucccaa

SEQ ID NO: 115257 - RNA, 19 nt, Artificial Sequence
  Description of Artificial Sequence: Synthetic oligonucleotide
cuucgauaauccgagguuu

SEQ ID NO: 115258 - RNA, 19 nt, Artificial Sequence
  Description of Artificial Sequence: Synthetic oligonucleotide
ggacacaaccacgcugcag

SEQ ID NO: 115259 - RNA, 19 nt, Artificial Sequence
  Description of Artificial Sequence: Synthetic oligonucleotide
ugugauccaccggcucgcu

SEQ ID NO: 115260 - RNA, 19 nt, Artificial Sequence
  Description of Artificial Sequence: Synthetic oligonucleotide
gguuaggcggaagcucuug

SEQ ID NO: 115261 - RNA, 19 nt, Artificial Sequence
  Description of Artificial Sequence: Synthetic oligonucleotide
ccguuacagagguuccggc

SEQ ID NO: 115262 - RNA, 19 nt, Artificial Sequence
  Description of Artificial Sequence: Synthetic oligonucleotide
cccgaaaacgggccgcggc

SEQ ID NO: 115263 - RNA, 19 nt, Artificial Sequence
  Description of Artificial Sequence: Synthetic oligonucleotide
cccuguauaauuagcggua

SEQ ID NO: 115264 - RNA, 19 nt, Artificial Sequence
  Description of Artificial Sequence: Synthetic oligonucleotide
ucgaggaaccagugcccuu

SEQ ID NO: 115265 - RNA, 19 nt, Artificial Sequence
  Description of Artificial Sequence: Synthetic oligonucleotide
cgaguuguuagacucagcu

SEQ ID NO: 115266 - RNA, 19 nt, Artificial Sequence
  Description of Artificial Sequence: Synthetic oligonucleotide
gcggguuccugguuuucug

SEQ ID NO: 115267 - RNA, 19 nt, Artificial Sequence
  Description of Artificial Sequence: Synthetic oligonucleotide
guagacacaaugagauuuu

SEQ ID NO: 115268 - RNA, 19 nt, Artificial Sequence
  Description of Artificial Sequence: Synthetic oligonucleotide
acguuuugcguggcuacuu

SEQ ID NO: 115269 - RNA, 19 nt, Artificial Sequence
  Description of Artificial Sequence: Synthetic oligonucleotide
aggcgcucgaggaaccagu

SEQ ID NO: 115270 - RNA, 19 nt, Artificial Sequence
  Description of Artificial Sequence: Synthetic oligonucleotide
caggcgcucgaggaaccag

SEQ ID NO: 115271 - RNA, 19 nt, Artificial Sequence
  Description of Artificial Sequence: Synthetic oligonucleotide
ccugguuaggcggaagcuc

SEQ ID NO: 115272 - RNA, 19 nt, Artificial Sequence
  Description of Artificial Sequence: Synthetic oligonucleotide
cacuuaccaauucugucuu

SEQ ID NO: 115273 - RNA, 19 nt, Artificial Sequence
  Description of Artificial Sequence: Synthetic oligonucleotide
caucggaaggcaauuccuu

SEQ ID NO: 115274 - RNA, 19 nt, Artificial Sequence
  Description of Artificial Sequence: Synthetic oligonucleotide
ugccaagccguggcauaac

SEQ ID NO: 115275 - RNA, 19 nt, Artificial Sequence
  Description of Artificial Sequence: Synthetic oligonucleotide
ccgggcucccuuaagcguc

SEQ ID NO: 115276 - RNA, 19 nt, Artificial Sequence
  Description of Artificial Sequence: Synthetic oligonucleotide
gguugggugcaucuucagu

SEQ ID NO: 115277 - RNA, 19 nt, Artificial Sequence
  Description of Artificial Sequence: Synthetic oligonucleotide
gccaagccguggcauaaca

SEQ ID NO: 115278 - RNA, 19 nt, Artificial Sequence
  Description of Artificial Sequence: Synthetic oligonucleotide
cauaacuuuccggguuaaa

SEQ ID NO: 115279 - RNA, 19 nt, Artificial Sequence
  Description of Artificial Sequence: Synthetic oligonucleotide
ccgcaucuuuaaaacccug

SEQ ID NO: 115280 - RNA, 19 nt, Artificial Sequence
  Description of Artificial Sequence: Synthetic oligonucleotide
gcggcaagagauacgcauc

SEQ ID NO: 115281 - RNA, 19 nt, Artificial Sequence
  Description of Artificial Sequence: Synthetic oligonucleotide
cugugacgcccauugcaua

SEQ ID NO: 115282 - RNA, 19 nt, Artificial Sequence
  Description of Artificial Sequence: Synthetic oligonucleotide
ggccuucgccguauuuggg

SEQ ID NO: 115283 - RNA, 19 nt, Artificial Sequence
  Description of Artificial Sequence: Synthetic oligonucleotide
cauggcccagaaucccgaa

SEQ ID NO: 115284 - RNA, 19 nt, Artificial Sequence
  Description of Artificial Sequence: Synthetic oligonucleotide
gcgcucgaggaaccagugc

SEQ ID NO: 115285 - RNA, 19 nt, Artificial Sequence
  Description of Artificial Sequence: Synthetic oligonucleotide
ggcgcucgaggaaccagug

SEQ ID NO: 115286 - RNA, 19 nt, Artificial Sequence
  Description of Artificial Sequence: Synthetic oligonucleotide
aggacaucuuggggcacuu

SEQ ID NO: 115287 - RNA, 19 nt, Artificial Sequence
  Description of Artificial Sequence: Synthetic oligonucleotide
cgacgauaggauaaaugua

SEQ ID NO: 115288 - RNA, 19 nt, Artificial Sequence
  Description of Artificial Sequence: Synthetic oligonucleotide
gggucaucgacgauaggau

SEQ ID NO: 115289 - RNA, 19 nt, Artificial Sequence
  Description of Artificial Sequence: Synthetic oligonucleotide
augcggcaagagauacgca

SEQ ID NO: 115290 - RNA, 19 nt, Artificial Sequence
  Description of Artificial Sequence: Synthetic oligonucleotide
ggccacccguuacagaggu

SEQ ID NO: 115291 - RNA, 19 nt, Artificial Sequence
  Description of Artificial Sequence: Synthetic oligonucleotide
  modified_base (15)..(15): a, c, u, g, unknown or other
gcgucgccugaaaanaaaa

SEQ ID NO: 115292 - RNA, 19 nt, Artificial Sequence
  Description of Artificial Sequence: Synthetic oligonucleotide
gcauggcccagaaucccga

SEQ ID NO: 115293 - RNA, 19 nt, Artificial Sequence
  Description of Artificial Sequence: Synthetic oligonucleotide
cgcggcgcucccacaaugc

SEQ ID NO: 115294 - RNA, 19 nt, Artificial Sequence
  Description of Artificial Sequence: Synthetic oligonucleotide
gccuuaccugaacugaguu

SEQ ID NO: 115295 - RNA, 19 nt, Artificial Sequence
  Description of Artificial Sequence: Synthetic oligonucleotide
gcggcgcucccacaaugca

SEQ ID NO: 115296 - RNA, 19 nt, Artificial Sequence
  Description of Artificial Sequence: Synthetic oligonucleotide
guaugggcguagagacaaa

SEQ ID NO: 115297 - RNA, 19 nt, Artificial Sequence
  Description of Artificial Sequence: Synthetic oligonucleotide
cgggcucccuuaagcgucg

SEQ ID NO: 115298 - RNA, 19 nt, Artificial Sequence
  Description of Artificial Sequence: Synthetic oligonucleotide
cacguuuugcguggcuacu

SEQ ID NO: 115299 - RNA, 19 nt, Artificial Sequence
  Description of Artificial Sequence: Synthetic oligonucleotide
ccuauuggugaagaaccgu

SEQ ID NO: 115300 - RNA, 19 nt, Artificial Sequence
  Description of Artificial Sequence: Synthetic oligonucleotide
gaccacugguguguacuuu

SEQ ID NO: 115301 - RNA, 19 nt, Artificial Sequence
  Description of Artificial Sequence: Synthetic oligonucleotide
ccuuaagcgucgccugaaa

SEQ ID NO: 115302 - RNA, 19 nt, Artificial Sequence
  Description of Artificial Sequence: Synthetic oligonucleotide
gcaccuuuagaaagccuau

SEQ ID NO: 115303 - RNA, 19 nt, Artificial Sequence
  Description of Artificial Sequence: Synthetic oligonucleotide
ggcaagagauacgcaucua

SEQ ID NO: 115304 - RNA, 19 nt, Artificial Sequence
  Description of Artificial Sequence: Synthetic oligonucleotide
caucgacgauaggauaaau

SEQ ID NO: 115305 - RNA, 19 nt, Artificial Sequence
  Description of Artificial Sequence: Synthetic oligonucleotide
ccuguauaauuagcgguau

SEQ ID NO: 115306 - RNA, 19 nt, Artificial Sequence
  Description of Artificial Sequence: Synthetic oligonucleotide
aggucccaugaaagacuua

SEQ ID NO: 115307 - RNA, 19 nt, Artificial Sequence
  Description of Artificial Sequence: Synthetic oligonucleotide
gccauggauuucauuuuau

SEQ ID NO: 115308 - RNA, 19 nt, Artificial Sequence
  Description of Artificial Sequence: Synthetic oligonucleotide
ggcucgcuuugcgcccucc

SEQ ID NO: 115309 - RNA, 19 nt, Artificial Sequence
  Description of Artificial Sequence: Synthetic oligonucleotide
ggugugggauucacguuuu

SEQ ID NO: 115310 - RNA, 19 nt, Artificial Sequence
  Description of Artificial Sequence: Synthetic oligonucleotide
gaccaacauuauagagauu

SEQ ID NO: 115311 - RNA, 19 nt, Artificial Sequence
  Description of Artificial Sequence: Synthetic oligonucleotide
gugauccaccggcucgcuu

SEQ ID NO: 115312 - RNA, 19 nt, Artificial Sequence
  Description of Artificial Sequence: Synthetic oligonucleotide
cggcaagagauacgcaucu

SEQ ID NO: 115313 - RNA, 19 nt, Artificial Sequence
  Description of Artificial Sequence: Synthetic oligonucleotide
gggugcaucuucaguuaau

SEQ ID NO: 115314 - RNA, 19 nt, Artificial Sequence
  Description of Artificial Sequence: Synthetic oligonucleotide
gguggccuucgccguauuu

SEQ ID NO: 115315 - RNA, 19 nt, Artificial Sequence
  Description of Artificial Sequence: Synthetic oligonucleotide
ccagggguuuaacacuguu

SEQ ID NO: 115316 - RNA, 19 nt, Artificial Sequence
  Description of Artificial Sequence: Synthetic oligonucleotide
gggcucccuuaagcgucgc

SEQ ID NO: 115317 - RNA, 19 nt, Artificial Sequence
  Description of Artificial Sequence: Synthetic oligonucleotide
ccgagguuugucgaugauu

SEQ ID NO: 115318 - RNA, 19 nt, Artificial Sequence
  Description of Artificial Sequence: Synthetic oligonucleotide
gccacccguuacagagguu

SEQ ID NO: 115319 - RNA, 19 nt, Artificial Sequence
  Description of Artificial Sequence: Synthetic oligonucleotide
aguuucaauagguaaaugc

SEQ ID NO: 115320 - RNA, 19 nt, Artificial Sequence
  Description of Artificial Sequence: Synthetic oligonucleotide
uaaaccuuagauaacgugc

SEQ ID NO: 115321 - RNA, 19 nt, Artificial Sequence
  Description of Artificial Sequence: Synthetic oligonucleotide
ugaacggcgacaaagaucu

SEQ ID NO: 115322 - RNA, 19 nt, Artificial Sequence
  Description of Artificial Sequence: Synthetic oligonucleotide
aaacgaauacuaaacaugg

SEQ ID NO: 115323 - RNA, 19 nt, Artificial Sequence
  Description of Artificial Sequence: Synthetic oligonucleotide
uuuauuauguucccaaugu

SEQ ID NO: 115324 - RNA, 19 nt, Artificial Sequence
  Description of Artificial Sequence: Synthetic oligonucleotide
auuacuaagaucccuuuuc

SEQ ID NO: 115325 - RNA, 19 nt, Artificial Sequence
  Description of Artificial Sequence: Synthetic oligonucleotide
uaaacaaauacguggaaug

SEQ ID NO: 115326 - RNA, 19 nt, Artificial Sequence
  Description of Artificial Sequence: Synthetic oligonucleotide
aacguucucgcauagguag

SEQ ID NO: 115327 - RNA, 19 nt, Artificial Sequence
  Description of Artificial Sequence: Synthetic oligonucleotide
uguguuaccuuuauuaugu

SEQ ID NO: 115328 - RNA, 19 nt, Artificial Sequence
  Description of Artificial Sequence: Synthetic oligonucleotide
gagaaugaaagugacaggg

SEQ ID NO: 115329 - RNA, 19 nt, Artificial Sequence
  Description of Artificial Sequence: Synthetic oligonucleotide
gaauauauguagcaccagg

SEQ ID NO: 115330 - RNA, 19 nt, Artificial Sequence
  Description of Artificial Sequence: Synthetic oligonucleotide
cuugugaauuucaauaccg

SEQ ID NO: 115331 - RNA, 19 nt, Artificial Sequence
  Description of Artificial Sequence: Synthetic oligonucleotide
aggaagauaucguugcugc

SEQ ID NO: 115332 - RNA, 19 nt, Artificial Sequence
  Description of Artificial Sequence: Synthetic oligonucleotide
acauaauuuaaggugagac

SEQ ID NO: 115333 - RNA, 19 nt, Artificial Sequence
  Description of Artificial Sequence: Synthetic oligonucleotide
uuuaaauccugguaaaccu

SEQ ID NO: 115334 - RNA, 19 nt, Artificial Sequence
  Description of Artificial Sequence: Synthetic oligonucleotide
ugauuaagaagcccaaacc

SEQ ID NO: 115335 - RNA, 19 nt, Artificial Sequence
  Description of Artificial Sequence: Synthetic oligonucleotide
auaacaauagccugcaaca

SEQ ID NO: 115336 - RNA, 19 nt, Artificial Sequence
  Description of Artificial Sequence: Synthetic oligonucleotide
ucaauauuagacaagcuuu

SEQ ID NO: 115337 - RNA, 19 nt, Artificial Sequence
  Description of Artificial Sequence: Synthetic oligonucleotide
agauaacgugccuuaaugc

SEQ ID NO: 115338 - RNA, 19 nt, Artificial Sequence
  Description of Artificial Sequence: Synthetic oligonucleotide
uauauguagcaccaggaga

SEQ ID NO: 115339 - RNA, 19 nt, Artificial Sequence
  Description of Artificial Sequence: Synthetic oligonucleotide
agcgguacagcacuugucc

SEQ ID NO: 115340 - RNA, 19 nt, Artificial Sequence
  Description of Artificial Sequence: Synthetic oligonucleotide
aacaauagccugcaacaag

SEQ ID NO: 115341 - RNA, 19 nt, Artificial Sequence
  Description of Artificial Sequence: Synthetic oligonucleotide
uagauaacgugccuuaaug

SEQ ID NO: 115342 - RNA, 19 nt, Artificial Sequence
  Description of Artificial Sequence: Synthetic oligonucleotide
uucacuaguugaaacagga

SEQ ID NO: 115343 - RNA, 19 nt, Artificial Sequence
  Description of Artificial Sequence: Synthetic oligonucleotide
aauauuagacaagcuuugg

SEQ ID NO: 115344 - RNA, 19 nt, Artificial Sequence
  Description of Artificial Sequence: Synthetic oligonucleotide
uuaaguguucugauuaaga

SEQ ID NO: 115345 - RNA, 19 nt, Artificial Sequence
  Description of Artificial Sequence: Synthetic oligonucleotide
uauugcuuuuguauguugc

SEQ ID NO: 115346 - RNA, 19 nt, Artificial Sequence
  Description of Artificial Sequence: Synthetic oligonucleotide
agaguuauuggcuaacacu

SEQ ID NO: 115347 - RNA, 19 nt, Artificial Sequence
  Description of Artificial Sequence: Synthetic oligonucleotide
cugguuuguauacauagcc

SEQ ID NO: 115348 - RNA, 19 nt, Artificial Sequence
  Description of Artificial Sequence: Synthetic oligonucleotide
auaacgguucaccucacuc

SEQ ID NO: 115349 - RNA, 19 nt, Artificial Sequence
  Description of Artificial Sequence: Synthetic oligonucleotide
cuccguacgacccugaagc

SEQ ID NO: 115350 - RNA, 19 nt, Artificial Sequence
  Description of Artificial Sequence: Synthetic oligonucleotide
aguuacaucauccuuguua

SEQ ID NO: 115351 - RNA, 19 nt, Artificial Sequence
  Description of Artificial Sequence: Synthetic oligonucleotide
ugcuaacugggccaaaugc

SEQ ID NO: 115352 - RNA, 19 nt, Artificial Sequence
  Description of Artificial Sequence: Synthetic oligonucleotide
aauauauguagcaccagga

SEQ ID NO: 115353 - RNA, 19 nt, Artificial Sequence
  Description of Artificial Sequence: Synthetic oligonucleotide
aucaaugacaaaugagcag

SEQ ID NO: 115354 - RNA, 19 nt, Artificial Sequence
  Description of Artificial Sequence: Synthetic oligonucleotide
aaauacguggaaugcucag

SEQ ID NO: 115355 - RNA, 19 nt, Artificial Sequence
  Description of Artificial Sequence: Synthetic oligonucleotide
ugaauuuugcuuccacagc

SEQ ID NO: 115356 - RNA, 19 nt, Artificial Sequence
  Description of Artificial Sequence: Synthetic oligonucleotide
uucaauaccgccugguacu

SEQ ID NO: 115357 - RNA, 19 nt, Artificial Sequence
  Description of Artificial Sequence: Synthetic oligonucleotide
guuaaucugcaauaucuug

SEQ ID NO: 115358 - RNA, 19 nt, Artificial Sequence
  Description of Artificial Sequence: Synthetic oligonucleotide
uuugaguaagaaaguggcc

SEQ ID NO: 115359 - RNA, 19 nt, Artificial Sequence
  Description of Artificial Sequence: Synthetic oligonucleotide
uccacaagcgaguaagcag

SEQ ID NO: 115360 - RNA, 19 nt, Artificial Sequence
  Description of Artificial Sequence: Synthetic oligonucleotide
ucuuccgaauauauguagc

SEQ ID NO: 115361 - RNA, 19 nt, Artificial Sequence
  Description of Artificial Sequence: Synthetic oligonucleotide
cuuuucacggcagagcugg

SEQ ID NO: 115362 - RNA, 19 nt, Artificial Sequence
  Description of Artificial Sequence: Synthetic oligonucleotide
guaguaagaacguucucgc

SEQ ID NO: 115363 - RNA, 19 nt, Artificial Sequence
  Description of Artificial Sequence: Synthetic oligonucleotide
uuugcgauuacagcaagca

SEQ ID NO: 115364 - RNA, 19 nt, Artificial Sequence
  Description of Artificial Sequence: Synthetic oligonucleotide
acuacuuguaacauugauc

SEQ ID NO: 115365 - RNA, 19 nt, Artificial Sequence
  Description of Artificial Sequence: Synthetic oligonucleotide
uuacuaagaucccuuuuca

SEQ ID NO: 115366 - RNA, 19 nt, Artificial Sequence
  Description of Artificial Sequence: Synthetic oligonucleotide
uugaauaggaacacauauc

SEQ ID NO: 115367 - RNA, 19 nt, Artificial Sequence
  Description of Artificial Sequence: Synthetic oligonucleotide
uuauuugcgauuacagcaa

SEQ ID NO: 115368 - RNA, 19 nt, Artificial Sequence
  Description of Artificial Sequence: Synthetic oligonucleotide
gaaauaagcugggcgaggg

SEQ ID NO: 115369 - RNA, 19 nt, Artificial Sequence
  Description of Artificial Sequence: Synthetic oligonucleotide
gcgacaaagaucuucagcc

SEQ ID NO: 115370 - RNA, 19 nt, Artificial Sequence
  Description of Artificial Sequence: Synthetic oligonucleotide
uucuuccgaauauauguag

SEQ ID NO: 115371 - RNA, 19 nt, Artificial Sequence
  Description of Artificial Sequence: Synthetic oligonucleotide
aaaugauagcucggguggc

SEQ ID NO: 115372 - RNA, 19 nt, Artificial Sequence
  Description of Artificial Sequence: Synthetic oligonucleotide
agaacacugggucuaagca

SEQ ID NO: 115373 - RNA, 19 nt, Artificial Sequence
  Description of Artificial Sequence: Synthetic oligonucleotide
agaguaaucugaucaugag

SEQ ID NO: 115374 - RNA, 19 nt, Artificial Sequence
  Description of Artificial Sequence: Synthetic oligonucleotide
uucggcauuguucugccug

SEQ ID NO: 115375 - RNA, 19 nt, Artificial Sequence
  Description of Artificial Sequence: Synthetic oligonucleotide
gugaacaagucccaauucc

SEQ ID NO: 115376 - RNA, 19 nt, Artificial Sequence
  Description of Artificial Sequence: Synthetic oligonucleotide
guaaaccuuagauaacgug

SEQ ID NO: 115377 - RNA, 19 nt, Artificial Sequence
  Description of Artificial Sequence: Synthetic oligonucleotide
cuuggauuaacacaggcaa

SEQ ID NO: 115378 - RNA, 19 nt, Artificial Sequence
  Description of Artificial Sequence: Synthetic oligonucleotide
uccucuaugcuucucaaua

SEQ ID NO: 115379 - RNA, 19 nt, Artificial Sequence
  Description of Artificial Sequence: Synthetic oligonucleotide
ccuauuaacgcacaggcag

SEQ ID NO: 115380 - RNA, 19 nt, Artificial Sequence
  Description of Artificial Sequence: Synthetic oligonucleotide
uaacgguucaccucacucc

SEQ ID NO: 115381 - RNA, 19 nt, Artificial Sequence
  Description of Artificial Sequence: Synthetic oligonucleotide
cauaguuuuacuggcgucc

SEQ ID NO: 115382 - RNA, 19 nt, Artificial Sequence
  Description of Artificial Sequence: Synthetic oligonucleotide
ugaguaagaaaguggccug

SEQ ID NO: 115383 - RNA, 19 nt, Artificial Sequence
  Description of Artificial Sequence: Synthetic oligonucleotide
uggauuaacacaggcaaga

SEQ ID NO: 115384 - RNA, 19 nt, Artificial Sequence
  Description of Artificial Sequence: Synthetic oligonucleotide
aacggcgacaaagaucuuc

SEQ ID NO: 115385 - RNA, 19 nt, Artificial Sequence
  Description of Artificial Sequence: Synthetic oligonucleotide
ugaguguugaugacauuca

SEQ ID NO: 115386 - RNA, 19 nt, Artificial Sequence
  Description of Artificial Sequence: Synthetic oligonucleotide
aaaguggccugcuagcaau

SEQ ID NO: 115387 - RNA, 19 nt, Artificial Sequence
  Description of Artificial Sequence: Synthetic oligonucleotide
uuggauuaacacaggcaag

SEQ ID NO: 115388 - RNA, 19 nt, Artificial Sequence
  Description of Artificial Sequence: Synthetic oligonucleotide
aguaggccaaaucugauua

SEQ ID NO: 115389 - RNA, 19 nt, Artificial Sequence
  Description of Artificial Sequence: Synthetic oligonucleotide
uaacgugccuuaaugcuca

SEQ ID NO: 115390 - RNA, 19 nt, Artificial Sequence
  Description of Artificial Sequence: Synthetic oligonucleotide
ucuaugcuucucaauauua

SEQ ID NO: 115391 - RNA, 19 nt, Artificial Sequence
  Description of Artificial Sequence: Synthetic oligonucleotide
aaugaacggcgacaaagau

SEQ ID NO: 115392 - RNA, 19 nt, Artificial Sequence
  Description of Artificial Sequence: Synthetic oligonucleotide
uauuugcgauuacagcaag

SEQ ID NO: 115393 - RNA, 19 nt, Artificial Sequence
  Description of Artificial Sequence: Synthetic oligonucleotide
cuauuaacgcacaggcagc

SEQ ID NO: 115394 - RNA, 19 nt, Artificial Sequence
  Description of Artificial Sequence: Synthetic oligonucleotide
caugcuauccgaugagggc

SEQ ID NO: 115395 - RNA, 19 nt, Artificial Sequence
  Description of Artificial Sequence: Synthetic oligonucleotide
uaaucauccugggaguucc

SEQ ID NO: 115396 - RNA, 19 nt, Artificial Sequence
  Description of Artificial Sequence: Synthetic oligonucleotide
aaaugaacggcgacaaaga

SEQ ID NO: 115397 - RNA, 19 nt, Artificial Sequence
  Description of Artificial Sequence: Synthetic oligonucleotide
auugcuuuuguauguugcu

SEQ ID NO: 115398 - RNA, 19 nt, Artificial Sequence
  Description of Artificial Sequence: Synthetic oligonucleotide
gauaacgugccuuaaugcu

SEQ ID NO: 115399 - RNA, 19 nt, Artificial Sequence
  Description of Artificial Sequence: Synthetic oligonucleotide
uuagauaacgugccuuaau

SEQ ID NO: 115400 - RNA, 19 nt, Artificial Sequence
  Description of Artificial Sequence: Synthetic oligonucleotide
agugacagggguacaaagg

SEQ ID NO: 115401 - RNA, 19 nt, Artificial Sequence
  Description of Artificial Sequence: Synthetic oligonucleotide
ugacagggguacaaaggag

SEQ ID NO: 115402 - RNA, 19 nt, Artificial Sequence
  Description of Artificial Sequence: Synthetic oligonucleotide
guauaaggaaucauuucug

SEQ ID NO: 115403 - RNA, 19 nt, Artificial Sequence
  Description of Artificial Sequence: Synthetic oligonucleotide
uuacuaagagccuuagcuu

SEQ ID NO: 115404 - RNA, 19 nt, Artificial Sequence
  Description of Artificial Sequence: Synthetic oligonucleotide
uguucugauuaagaagccc

SEQ ID NO: 115405 - RNA, 19 nt, Artificial Sequence
  Description of Artificial Sequence: Synthetic oligonucleotide
auaacgugccuuaaugcuc

SEQ ID NO: 115406 - RNA, 19 nt, Artificial Sequence
  Description of Artificial Sequence: Synthetic oligonucleotide
auaucguuccaagcgguac

SEQ ID NO: 115407 - RNA, 19 nt, Artificial Sequence
  Description of Artificial Sequence: Synthetic oligonucleotide
uaccaugcccgguuuaugc

SEQ ID NO: 115408 - RNA, 19 nt, Artificial Sequence
  Description of Artificial Sequence: Synthetic oligonucleotide
agagacaugcuauccgaug

SEQ ID NO: 115409 - RNA, 19 nt, Artificial Sequence
  Description of Artificial Sequence: Synthetic oligonucleotide
cuguguuaccuuuauuaug

SEQ ID NO: 115410 - RNA, 19 nt, Artificial Sequence
  Description of Artificial Sequence: Synthetic oligonucleotide
uucacggcagagcugggca

SEQ ID NO: 115411 - RNA, 19 nt, Artificial Sequence
  Description of Artificial Sequence: Synthetic oligonucleotide
aauacguggaaugcucaga

SEQ ID NO: 115412 - RNA, 19 nt, Artificial Sequence
  Description of Artificial Sequence: Synthetic oligonucleotide
gauguacgccaucugacca

SEQ ID NO: 115413 - RNA, 19 nt, Artificial Sequence
  Description of Artificial Sequence: Synthetic oligonucleotide
ucauaucguuccaagcggu

SEQ ID NO: 115414 - RNA, 19 nt, Artificial Sequence
  Description of Artificial Sequence: Synthetic oligonucleotide
uuagccucguaagacauaa

SEQ ID NO: 115415 - RNA, 19 nt, Artificial Sequence
  Description of Artificial Sequence: Synthetic oligonucleotide
cagaacacugggucuaagc

SEQ ID NO: 115416 - RNA, 19 nt, Artificial Sequence
  Description of Artificial Sequence: Synthetic oligonucleotide
guaagacauaauuuaaggu

SEQ ID NO: 115417 - RNA, 19 nt, Artificial Sequence
  Description of Artificial Sequence: Synthetic oligonucleotide
aauaccgccugguacuguu

SEQ ID NO: 115418 - RNA, 19 nt, Artificial Sequence
  Description of Artificial Sequence: Synthetic oligonucleotide
gucuucguaaagcuauuug

SEQ ID NO: 115419 - RNA, 19 nt, Artificial Sequence
  Description of Artificial Sequence: Synthetic oligonucleotide
uguuuacuaagagccuuag

SEQ ID NO: 115420 - RNA, 19 nt, Artificial Sequence
  Description of Artificial Sequence: Synthetic oligonucleotide
ugcccuauuaacgcacagg

SEQ ID NO: 115421 - RNA, 19 nt, Artificial Sequence
  Description of Artificial Sequence: Synthetic oligonucleotide
gugaguguugaugacauuc

SEQ ID NO: 115422 - RNA, 19 nt, Artificial Sequence
  Description of Artificial Sequence: Synthetic oligonucleotide
gauaucguugcugcacugc

SEQ ID NO: 115423 - RNA, 19 nt, Artificial Sequence
  Description of Artificial Sequence: Synthetic oligonucleotide
auacguggaaugcucagaa

SEQ ID NO: 115424 - RNA, 19 nt, Artificial Sequence
  Description of Artificial Sequence: Synthetic oligonucleotide
ucgucauaucguuccaagc

SEQ ID NO: 115425 - RNA, 19 nt, Artificial Sequence
  Description of Artificial Sequence: Synthetic oligonucleotide
uucugauuaagaagcccaa

SEQ ID NO: 115426 - RNA, 19 nt, Artificial Sequence
  Description of Artificial Sequence: Synthetic oligonucleotide
uugguccuuauuaauggua

SEQ ID NO: 115427 - RNA, 19 nt, Artificial Sequence
  Description of Artificial Sequence: Synthetic oligonucleotide
uuaacgcacaggcagcauu

SEQ ID NO: 115428 - RNA, 19 nt, Artificial Sequence
  Description of Artificial Sequence: Synthetic oligonucleotide
augaacggcgacaaagauc

SEQ ID NO: 115429 - RNA, 19 nt, Artificial Sequence
  Description of Artificial Sequence: Synthetic oligonucleotide
auuugcgauuacagcaagc

SEQ ID NO: 115430 - RNA, 19 nt, Artificial Sequence
  Description of Artificial Sequence: Synthetic oligonucleotide
agaaauaagcugggcgagg

SEQ ID NO: 115431 - RNA, 19 nt, Artificial Sequence
  Description of Artificial Sequence: Synthetic oligonucleotide
ggauccacaagcgaguaag

SEQ ID NO: 115432 - RNA, 19 nt, Artificial Sequence
  Description of Artificial Sequence: Synthetic oligonucleotide
guucuaggucacuaacugc

SEQ ID NO: 115433 - RNA, 19 nt, Artificial Sequence
  Description of Artificial Sequence: Synthetic oligonucleotide
gugacagggguacaaagga

SEQ ID NO: 115434 - RNA, 19 nt, Artificial Sequence
  Description of Artificial Sequence: Synthetic oligonucleotide
ccugcuagcaaugaaagac

SEQ ID NO: 115435 - RNA, 19 nt, Artificial Sequence
  Description of Artificial Sequence: Synthetic oligonucleotide
uauuaacgcacaggcagca

SEQ ID NO: 115436 - RNA, 19 nt, Artificial Sequence
  Description of Artificial Sequence: Synthetic oligonucleotide
ucaauagguaaaugcucaa

SEQ ID NO: 115437 - RNA, 19 nt, Artificial Sequence
  Description of Artificial Sequence: Synthetic oligonucleotide
uaauaaggacagaguaauc

SEQ ID NO: 115438 - RNA, 19 nt, Artificial Sequence
  Description of Artificial Sequence: Synthetic oligonucleotide
uguccauaaagcuccuuua

SEQ ID NO: 115439 - RNA, 19 nt, Artificial Sequence
  Description of Artificial Sequence: Synthetic oligonucleotide
ucuaggucacuaacugccu

SEQ ID NO: 115440 - RNA, 19 nt, Artificial Sequence
  Description of Artificial Sequence: Synthetic oligonucleotide
agccucguaagacauaauu

SEQ ID NO: 115441 - RNA, 19 nt, Artificial Sequence
  Description of Artificial Sequence: Synthetic oligonucleotide
guauguugcuuuucacggc

SEQ ID NO: 115442 - RNA, 19 nt, Artificial Sequence
  Description of Artificial Sequence: Synthetic oligonucleotide
cuauugcuuuuguauguug

SEQ ID NO: 115443 - RNA, 19 nt, Artificial Sequence
  Description of Artificial Sequence: Synthetic oligonucleotide
gcagaaauaagcugggcga

SEQ ID NO: 115444 - RNA, 19 nt, Artificial Sequence
  Description of Artificial Sequence: Synthetic oligonucleotide
ugguaagcuugauuucggc

SEQ ID NO: 115445 - RNA, 19 nt, Artificial Sequence
  Description of Artificial Sequence: Synthetic oligonucleotide
uggggagacaccccaggug

SEQ ID NO: 115446 - RNA, 19 nt, Artificial Sequence
  Description of Artificial Sequence: Synthetic oligonucleotide
cuggccuugcccuauuaac

SEQ ID NO: 115447 - RNA, 19 nt, Artificial Sequence
  Description of Artificial Sequence: Synthetic oligonucleotide
aaugauagcucggguggca

SEQ ID NO: 115448 - RNA, 19 nt, Artificial Sequence
  Description of Artificial Sequence: Synthetic oligonucleotide
guuuacuaagagccuuagc

SEQ ID NO: 115449 - RNA, 19 nt, Artificial Sequence
  Description of Artificial Sequence: Synthetic oligonucleotide
agggugugaauaucuuuug

SEQ ID NO: 115450 - RNA, 19 nt, Artificial Sequence
  Description of Artificial Sequence: Synthetic oligonucleotide
cgucauaucguuccaagcg

SEQ ID NO: 115451 - RNA, 19 nt, Artificial Sequence
  Description of Artificial Sequence: Synthetic oligonucleotide
cuggccauaacgguucacc

SEQ ID NO: 115452 - RNA, 19 nt, Artificial Sequence
  Description of Artificial Sequence: Synthetic oligonucleotide
uuacuggcguccaguucgg

SEQ ID NO: 115453 - RNA, 19 nt, Artificial Sequence
  Description of Artificial Sequence: Synthetic oligonucleotide
uuccgaauauauguagcac

SEQ ID NO: 115454 - RNA, 19 nt, Artificial Sequence
  Description of Artificial Sequence: Synthetic oligonucleotide
uaguaagaacguucucgca

SEQ ID NO: 115455 - RNA, 19 nt, Artificial Sequence
  Description of Artificial Sequence: Synthetic oligonucleotide
acuaagagccuuagcuuuc

SEQ ID NO: 115456 - RNA, 19 nt, Artificial Sequence
  Description of Artificial Sequence: Synthetic oligonucleotide
cauggggagacaccccagg

SEQ ID NO: 115457 - RNA, 19 nt, Artificial Sequence
  Description of Artificial Sequence: Synthetic oligonucleotide
augcuauccgaugagggca

SEQ ID NO: 115458 - RNA, 19 nt, Artificial Sequence
  Description of Artificial Sequence: Synthetic oligonucleotide
cucaauauuagacaagcuu

SEQ ID NO: 115459 - RNA, 19 nt, Artificial Sequence
  Description of Artificial Sequence: Synthetic oligonucleotide
ucaagagccucgacaucca

SEQ ID NO: 115460 - RNA, 19 nt, Artificial Sequence
  Description of Artificial Sequence: Synthetic oligonucleotide
gagagagaguuauuggcua

SEQ ID NO: 115461 - RNA, 19 nt, Artificial Sequence
  Description of Artificial Sequence: Synthetic oligonucleotide
guaggccaaaucugauuag

SEQ ID NO: 115462 - RNA, 19 nt, Artificial Sequence
  Description of Artificial Sequence: Synthetic oligonucleotide
uaacaauagccugcaacaa

SEQ ID NO: 115463 - RNA, 19 nt, Artificial Sequence
  Description of Artificial Sequence: Synthetic oligonucleotide
ugauguuauuugcgauuac

SEQ ID NO: 115464 - RNA, 19 nt, Artificial Sequence
  Description of Artificial Sequence: Synthetic oligonucleotide
ugggucuaagcaucaacua

SEQ ID NO: 115465 - RNA, 19 nt, Artificial Sequence
  Description of Artificial Sequence: Synthetic oligonucleotide
agagagaguuauuggcuaa

SEQ ID NO: 115466 - RNA, 19 nt, Artificial Sequence
  Description of Artificial Sequence: Synthetic oligonucleotide
cugaaaaugaacggcgaca

SEQ ID NO: 115467 - RNA, 19 nt, Artificial Sequence
  Description of Artificial Sequence: Synthetic oligonucleotide
uggccauaacgguucaccu

SEQ ID NO: 115468 - RNA, 19 nt, Artificial Sequence
  Description of Artificial Sequence: Synthetic oligonucleotide
ggcgacaaagaucuucagc

SEQ ID NO: 115469 - RNA, 19 nt, Artificial Sequence
  Description of Artificial Sequence: Synthetic oligonucleotide
gguacaaguaggccaaauc

SEQ ID NO: 115470 - RNA, 19 nt, Artificial Sequence
  Description of Artificial Sequence: Synthetic oligonucleotide
caaauacguggaaugcuca

SEQ ID NO: 115471 - RNA, 19 nt, Artificial Sequence
  Description of Artificial Sequence: Synthetic oligonucleotide
gggucuaagcaucaacuac

SEQ ID NO: 115472 - RNA, 19 nt, Artificial Sequence
  Description of Artificial Sequence: Synthetic oligonucleotide
uccaguucggaggaggcuc

SEQ ID NO: 115473 - RNA, 19 nt, Artificial Sequence
  Description of Artificial Sequence: Synthetic oligonucleotide
aagcgguacagcacuuguc

SEQ ID NO: 115474 - RNA, 19 nt, Artificial Sequence
  Description of Artificial Sequence: Synthetic oligonucleotide
gcacucgucauaucguucc

SEQ ID NO: 115475 - RNA, 19 nt, Artificial Sequence
  Description of Artificial Sequence: Synthetic oligonucleotide
guaaaugcucaaacacagc

SEQ ID NO: 115476 - RNA, 19 nt, Artificial Sequence
  Description of Artificial Sequence: Synthetic oligonucleotide
agauaucguugcugcacug

SEQ ID NO: 115477 - RNA, 19 nt, Artificial Sequence
  Description of Artificial Sequence: Synthetic oligonucleotide
gccauaacgguucaccuca

SEQ ID NO: 115478 - RNA, 19 nt, Artificial Sequence
  Description of Artificial Sequence: Synthetic oligonucleotide
agaccucaauggcacuauc

SEQ ID NO: 115479 - RNA, 19 nt, Artificial Sequence
  Description of Artificial Sequence: Synthetic oligonucleotide
uuuucacggcagagcuggg

SEQ ID NO: 115480 - RNA, 19 nt, Artificial Sequence
  Description of Artificial Sequence: Synthetic oligonucleotide
agccacucauuacuaagau

SEQ ID NO: 115481 - RNA, 19 nt, Artificial Sequence
  Description of Artificial Sequence: Synthetic oligonucleotide
cacuggauagcuuguguga

SEQ ID NO: 115482 - RNA, 19 nt, Artificial Sequence
  Description of Artificial Sequence: Synthetic oligonucleotide
agagaguuauuggcuaaca

SEQ ID NO: 115483 - RNA, 19 nt, Artificial Sequence
  Description of Artificial Sequence: Synthetic oligonucleotide
ucaauaccgccugguacug

SEQ ID NO: 115484 - RNA, 19 nt, Artificial Sequence
  Description of Artificial Sequence: Synthetic oligonucleotide
gagagaguuauuggcuaac

SEQ ID NO: 115485 - RNA, 19 nt, Artificial Sequence
  Description of Artificial Sequence: Synthetic oligonucleotide
ccgguuuaugcuuuaacuc

SEQ ID NO: 115486 - RNA, 19 nt, Artificial Sequence
  Description of Artificial Sequence: Synthetic oligonucleotide
uucucgcauagguagccau

SEQ ID NO: 115487 - RNA, 19 nt, Artificial Sequence
  Description of Artificial Sequence: Synthetic oligonucleotide
uuccucguggcuguacaug

SEQ ID NO: 115488 - RNA, 19 nt, Artificial Sequence
  Description of Artificial Sequence: Synthetic oligonucleotide
aucguuccaagcgguacag

SEQ ID NO: 115489 - RNA, 19 nt, Artificial Sequence
  Description of Artificial Sequence: Synthetic oligonucleotide
ucuugcuguguuaccuuua

SEQ ID NO: 115490 - RNA, 19 nt, Artificial Sequence
  Description of Artificial Sequence: Synthetic oligonucleotide
aagaccucaauggcacuau

SEQ ID NO: 115491 - RNA, 19 nt, Artificial Sequence
  Description of Artificial Sequence: Synthetic oligonucleotide
gaccucaauggcacuauca

SEQ ID NO: 115492 - RNA, 19 nt, Artificial Sequence
  Description of Artificial Sequence: Synthetic oligonucleotide
ugggaguuccggacaagau

SEQ ID NO: 115493 - RNA, 19 nt, Artificial Sequence
  Description of Artificial Sequence: Synthetic oligonucleotide
accaugcccgguuuaugcu

SEQ ID NO: 115494 - RNA, 19 nt, Artificial Sequence
  Description of Artificial Sequence: Synthetic oligonucleotide
cguacgacccugaagcugc

SEQ ID NO: 115495 - RNA, 19 nt, Artificial Sequence
  Description of Artificial Sequence: Synthetic oligonucleotide
gacagaguaaucugaucau

SEQ ID NO: 115496 - RNA, 19 nt, Artificial Sequence
  Description of Artificial Sequence: Synthetic oligonucleotide
agccuguacucgcaauaug

SEQ ID NO: 115497 - RNA, 19 nt, Artificial Sequence
  Description of Artificial Sequence: Synthetic oligonucleotide
ggauuaacacaggcaagag

SEQ ID NO: 115498 - RNA, 19 nt, Artificial Sequence
  Description of Artificial Sequence: Synthetic oligonucleotide
acggcgacaaagaucuuca

SEQ ID NO: 115499 - RNA, 19 nt, Artificial Sequence
  Description of Artificial Sequence: Synthetic oligonucleotide
gcgauuacagcaagcagug

SEQ ID NO: 115500 - RNA, 19 nt, Artificial Sequence
  Description of Artificial Sequence: Synthetic oligonucleotide
guacucgcaauaugccuuc

SEQ ID NO: 115501 - RNA, 19 nt, Artificial Sequence
  Description of Artificial Sequence: Synthetic oligonucleotide
auguacgccaucugaccau

SEQ ID NO: 115502 - RNA, 19 nt, Artificial Sequence
  Description of Artificial Sequence: Synthetic oligonucleotide
agcacucgucauaucguuc

SEQ ID NO: 115503 - RNA, 19 nt, Artificial Sequence
  Description of Artificial Sequence: Synthetic oligonucleotide
gggucauaauucuuaggca

SEQ ID NO: 115504 - RNA, 19 nt, Artificial Sequence
  Description of Artificial Sequence: Synthetic oligonucleotide
acgccaucugaccaugaau

SEQ ID NO: 115505 - RNA, 19 nt, Artificial Sequence
  Description of Artificial Sequence: Synthetic oligonucleotide
gcucggguggcauaaacga

SEQ ID NO: 115506 - RNA, 19 nt, Artificial Sequence
  Description of Artificial Sequence: Synthetic oligonucleotide
uacuaaacauggggagaca

SEQ ID NO: 115507 - RNA, 19 nt, Artificial Sequence
  Description of Artificial Sequence: Synthetic oligonucleotide
agugcuaacugggccaaau

SEQ ID NO: 115508 - RNA, 19 nt, Artificial Sequence
  Description of Artificial Sequence: Synthetic oligonucleotide
agacuugaauaggaacaca

SEQ ID NO: 115509 - RNA, 19 nt, Artificial Sequence
  Description of Artificial Sequence: Synthetic oligonucleotide
aguuccggacaagaucucu

SEQ ID NO: 115510 - RNA, 19 nt, Artificial Sequence
  Description of Artificial Sequence: Synthetic oligonucleotide
uggauccacaagcgaguaa

SEQ ID NO: 115511 - RNA, 19 nt, Artificial Sequence
  Description of Artificial Sequence: Synthetic oligonucleotide
ugagugcuaacugggccaa

SEQ ID NO: 115512 - RNA, 19 nt, Artificial Sequence
  Description of Artificial Sequence: Synthetic oligonucleotide
ccgaauauauguagcacca

SEQ ID NO: 115513 - RNA, 19 nt, Artificial Sequence
  Description of Artificial Sequence: Synthetic oligonucleotide
uacuuguaacauugaucua

SEQ ID NO: 115514 - RNA, 19 nt, Artificial Sequence
  Description of Artificial Sequence: Synthetic oligonucleotide
cucauaguuuuacuggcgu

SEQ ID NO: 115515 - RNA, 19 nt, Artificial Sequence
  Description of Artificial Sequence: Synthetic oligonucleotide
uccggacaagaucucugua

SEQ ID NO: 115516 - RNA, 19 nt, Artificial Sequence
  Description of Artificial Sequence: Synthetic oligonucleotide
gacagccacucauuacuaa

SEQ ID NO: 115517 - RNA, 19 nt, Artificial Sequence
  Description of Artificial Sequence: Synthetic oligonucleotide
gugccuuaaugcucaguca

SEQ ID NO: 115518 - RNA, 19 nt, Artificial Sequence
  Description of Artificial Sequence: Synthetic oligonucleotide
uccguacgacccugaagcu

SEQ ID NO: 115519 - RNA, 19 nt, Artificial Sequence
  Description of Artificial Sequence: Synthetic oligonucleotide
ccacaagcgaguaagcaga

SEQ ID NO: 115520 - RNA, 19 nt, Artificial Sequence
  Description of Artificial Sequence: Synthetic oligonucleotide
acgggugaagucgccguuc

SEQ ID NO: 115521 - RNA, 19 nt, Artificial Sequence
  Description of Artificial Sequence: Synthetic oligonucleotide
cgugccuuaaugcucaguc

SEQ ID NO: 115522 - RNA, 19 nt, Artificial Sequence
  Description of Artificial Sequence: Synthetic oligonucleotide
ggaguuccggacaagaucu

SEQ ID NO: 115523 - RNA, 19 nt, Artificial Sequence
  Description of Artificial Sequence: Synthetic oligonucleotide
gacggucuugagggcacgg

SEQ ID NO: 115524 - RNA, 19 nt, Artificial Sequence
  Description of Artificial Sequence: Synthetic oligonucleotide
gcaacaacugcagaaaggu

SEQ ID NO: 115525 - RNA, 19 nt, Artificial Sequence
  Description of Artificial Sequence: Synthetic oligonucleotide
ugauaccacuggauagcuu

SEQ ID NO: 115526 - RNA, 19 nt, Artificial Sequence
  Description of Artificial Sequence: Synthetic oligonucleotide
ugccugguuuguauacaua

SEQ ID NO: 115527 - RNA, 19 nt, Artificial Sequence
  Description of Artificial Sequence: Synthetic oligonucleotide
ugcagauaccaugcccggu

SEQ ID NO: 115528 - RNA, 19 nt, Artificial Sequence
  Description of Artificial Sequence: Synthetic oligonucleotide
gguaagcuugauuucggcu

SEQ ID NO: 115529 - RNA, 19 nt, Artificial Sequence
  Description of Artificial Sequence: Synthetic oligonucleotide
ggucuaagcaucaacuacu

SEQ ID NO: 115530 - RNA, 19 nt, Artificial Sequence
  Description of Artificial Sequence: Synthetic oligonucleotide
auaccaugcccgguuuaug

SEQ ID NO: 115531 - RNA, 19 nt, Artificial Sequence
  Description of Artificial Sequence: Synthetic oligonucleotide
ccuugcccuauuaacgcac

SEQ ID NO: 115532 - RNA, 19 nt, Artificial Sequence
  Description of Artificial Sequence: Synthetic oligonucleotide
gucauaauucuuaggcagu

SEQ ID NO: 115533 - RNA, 19 nt, Artificial Sequence
  Description of Artificial Sequence: Synthetic oligonucleotide
ggauagcuugugugaagac

SEQ ID NO: 115534 - RNA, 19 nt, Artificial Sequence
  Description of Artificial Sequence: Synthetic oligonucleotide
cguaaagcuauuugguaca

SEQ ID NO: 115535 - RNA, 19 nt, Artificial Sequence
  Description of Artificial Sequence: Synthetic oligonucleotide
uuucggcauuguucugccu

SEQ ID NO: 115536 - RNA, 19 nt, Artificial Sequence
  Description of Artificial Sequence: Synthetic oligonucleotide
uccuccguacgacccugaa

SEQ ID NO: 115537 - RNA, 19 nt, Artificial Sequence
  Description of Artificial Sequence: Synthetic oligonucleotide
ggaagauaucguugcugca

SEQ ID NO: 115538 - RNA, 19 nt, Artificial Sequence
  Description of Artificial Sequence: Synthetic oligonucleotide
cuuagauaacgugccuuaa

SEQ ID NO: 115539 - RNA, 19 nt, Artificial Sequence
  Description of Artificial Sequence: Synthetic oligonucleotide
ggccauaacgguucaccuc

SEQ ID NO: 115540 - RNA, 19 nt, Artificial Sequence
  Description of Artificial Sequence: Synthetic oligonucleotide
agucuucguaaagcuauuu

SEQ ID NO: 115541 - RNA, 19 nt, Artificial Sequence
  Description of Artificial Sequence: Synthetic oligonucleotide
cauaucguuccaagcggua

SEQ ID NO: 115542 - RNA, 19 nt, Artificial Sequence
  Description of Artificial Sequence: Synthetic oligonucleotide
ccguccauacuugagcuug

SEQ ID NO: 115543 - RNA, 19 nt, Artificial Sequence
  Description of Artificial Sequence: Synthetic oligonucleotide
ggagagagaguuauuggcu

SEQ ID NO: 115544 - RNA, 19 nt, Artificial Sequence
  Description of Artificial Sequence: Synthetic oligonucleotide
cuuccuccguacgacccug

SEQ ID NO: 115545 - RNA, 19 nt, Artificial Sequence
  Description of Artificial Sequence: Synthetic oligonucleotide
uccaagcgguacagcacuu

SEQ ID NO: 115546 - RNA, 19 nt, Artificial Sequence
  Description of Artificial Sequence: Synthetic oligonucleotide
auuaacgcacaggcagcau

SEQ ID NO: 115547 - RNA, 19 nt, Artificial Sequence
  Description of Artificial Sequence: Synthetic oligonucleotide
uuccuccguacgacccuga

SEQ ID NO: 115548 - RNA, 19 nt, Artificial Sequence
  Description of Artificial Sequence: Synthetic oligonucleotide
cauuacuaagaucccuuuu

SEQ ID NO: 115549 - RNA, 19 nt, Artificial Sequence
  Description of Artificial Sequence: Synthetic oligonucleotide
caagcgguacagcacuugu

SEQ ID NO: 115550 - RNA, 19 nt, Artificial Sequence
  Description of Artificial Sequence: Synthetic oligonucleotide
uagccucguaagacauaau

SEQ ID NO: 115551 - RNA, 19 nt, Artificial Sequence
  Description of Artificial Sequence: Synthetic oligonucleotide
uacucgcaauaugccuucu

SEQ ID NO: 115552 - RNA, 19 nt, Artificial Sequence
  Description of Artificial Sequence: Synthetic oligonucleotide
ccugcaacaaguacacugu

SEQ ID NO: 115553 - RNA, 19 nt, Artificial Sequence
  Description of Artificial Sequence: Synthetic oligonucleotide
caaguaggccaaaucugau

SEQ ID NO: 115554 - RNA, 19 nt, Artificial Sequence
  Description of Artificial Sequence: Synthetic oligonucleotide
cgugaacaagucccaauuc

SEQ ID NO: 115555 - RNA, 19 nt, Artificial Sequence
  Description of Artificial Sequence: Synthetic oligonucleotide
cccgguuuaugcuuuaacu

SEQ ID NO: 115556 - RNA, 19 nt, Artificial Sequence
  Description of Artificial Sequence: Synthetic oligonucleotide
guucucgcauagguagcca

SEQ ID NO: 115557 - RNA, 19 nt, Artificial Sequence
  Description of Artificial Sequence: Synthetic oligonucleotide
ccuccguacgacccugaag

SEQ ID NO: 115558 - RNA, 19 nt, Artificial Sequence
  Description of Artificial Sequence: Synthetic oligonucleotide
cacucgucauaucguucca

SEQ ID NO: 115559 - RNA, 19 nt, Artificial Sequence
  Description of Artificial Sequence: Synthetic oligonucleotide
gcccgguuuaugcuuuaac

SEQ ID NO: 115560 - RNA, 19 nt, Artificial Sequence
  Description of Artificial Sequence: Synthetic oligonucleotide
gaguuccggacaagaucuc

SEQ ID NO: 115561 - RNA, 19 nt, Artificial Sequence
  Description of Artificial Sequence: Synthetic oligonucleotide
cgaauauauguagcaccag

SEQ ID NO: 115562 - RNA, 19 nt, Artificial Sequence
  Description of Artificial Sequence: Synthetic oligonucleotide
cuaagagccuuagcuuucu

SEQ ID NO: 115563 - RNA, 19 nt, Artificial Sequence
  Description of Artificial Sequence: Synthetic oligonucleotide
ccuuaaugcucagucaucu

SEQ ID NO: 115564 - RNA, 19 nt, Artificial Sequence
  Description of Artificial Sequence: Synthetic oligonucleotide
cauaacgguucaccucacu

SEQ ID NO: 115565 - RNA, 19 nt, Artificial Sequence
  Description of Artificial Sequence: Synthetic oligonucleotide
caccaucugagugcuaacu

SEQ ID NO: 115566 - RNA, 19 nt, Artificial Sequence
  Description of Artificial Sequence: Synthetic oligonucleotide
gucuaagcaucaacuacuu

SEQ ID NO: 115567 - RNA, 19 nt, Artificial Sequence
  Description of Artificial Sequence: Synthetic oligonucleotide
gcuggccuugcccuauuaa

SEQ ID NO: 115568 - RNA, 19 nt, Artificial Sequence
  Description of Artificial Sequence: Synthetic oligonucleotide
ggcgagggugugaauaucu

SEQ ID NO: 115569 - RNA, 19 nt, Artificial Sequence
  Description of Artificial Sequence: Synthetic oligonucleotide
ccguacgacccugaagcug

SEQ ID NO: 115570 - RNA, 19 nt, Artificial Sequence
  Description of Artificial Sequence: Synthetic oligonucleotide
ccauaacgguucaccucac

SEQ ID NO: 115571 - RNA, 19 nt, Artificial Sequence
  Description of Artificial Sequence: Synthetic oligonucleotide
caugcccgguuuaugcuuu

SEQ ID NO: 115572 - RNA, 19 nt, Artificial Sequence
  Description of Artificial Sequence: Synthetic oligonucleotide
augcccgguuuaugcuuua

SEQ ID NO: 115573 - RNA, 19 nt, Artificial Sequence
  Description of Artificial Sequence: Synthetic oligonucleotide
gcuauccgaugagggcaag

SEQ ID NO: 115574 - RNA, 19 nt, Artificial Sequence
  Description of Artificial Sequence: Synthetic oligonucleotide
ccacuuuuagagacaugcu

SEQ ID NO: 115575 - RNA, 19 nt, Artificial Sequence
  Description of Artificial Sequence: Synthetic oligonucleotide
caauugcuuugugcugcaa

SEQ ID NO: 115576 - RNA, 19 nt, Artificial Sequence
  Description of Artificial Sequence: Synthetic oligonucleotide
guacgacccugaagcugca

SEQ ID NO: 115577 - RNA, 19 nt, Artificial Sequence
  Description of Artificial Sequence: Synthetic oligonucleotide
cgauuacagcaagcagugc

SEQ ID NO: 115578 - RNA, 19 nt, Artificial Sequence
  Description of Artificial Sequence: Synthetic oligonucleotide
gagugcuaacugggccaaa

SEQ ID NO: 115579 - RNA, 19 nt, Artificial Sequence
  Description of Artificial Sequence: Synthetic oligonucleotide
caauaccgccugguacugu

SEQ ID NO: 115580 - RNA, 19 nt, Artificial Sequence
  Description of Artificial Sequence: Synthetic oligonucleotide
cacgggugaagucgccguu

SEQ ID NO: 115581 - RNA, 19 nt, Artificial Sequence
  Description of Artificial Sequence: Synthetic oligonucleotide
cgagggugugaauaucuuu

SEQ ID NO: 115582 - RNA, 19 nt, Artificial Sequence
  Description of Artificial Sequence: Synthetic oligonucleotide
caguuacaucauccuuguu

SEQ ID NO: 115583 - RNA, 19 nt, Artificial Sequence
  Description of Artificial Sequence: Synthetic oligonucleotide
ccucguggcuguacauggu

SEQ ID NO: 115584 - RNA, 19 nt, Artificial Sequence
  Description of Artificial Sequence: Synthetic oligonucleotide
gcgagggugugaauaucuu

SEQ ID NO: 115585 - RNA, 19 nt, Artificial Sequence
  Description of Artificial Sequence: Synthetic oligonucleotide
gaacggcgacaaagaucuu

SEQ ID NO: 115586 - RNA, 19 nt, Artificial Sequence
  Description of Artificial Sequence: Synthetic oligonucleotide
cgggugaagucgccguucu

SEQ ID NO: 115587 - RNA, 19 nt, Artificial Sequence
  Description of Artificial Sequence: Synthetic oligonucleotide
aaucgugugaacuugucac

SEQ ID NO: 115588 - RNA, 19 nt, Artificial Sequence
  Description of Artificial Sequence: Synthetic oligonucleotide
aaauuagagguuuauaaaa

SEQ ID NO: 115589 - RNA, 19 nt, Artificial Sequence
  Description of Artificial Sequence: Synthetic oligonucleotide
caugcgaucaaucucaugc

SEQ ID NO: 115590 - RNA, 19 nt, Artificial Sequence
  Description of Artificial Sequence: Synthetic oligonucleotide
aguaguaucccuguguugc

SEQ ID NO: 115591 - RNA, 19 nt, Artificial Sequence
  Description of Artificial Sequence: Synthetic oligonucleotide
aaaucgucaaagaaacgcc

SEQ ID NO: 115592 - RNA, 19 nt, Artificial Sequence
  Description of Artificial Sequence: Synthetic oligonucleotide
augcauaugacaugcacac

SEQ ID NO: 115593 - RNA, 19 nt, Artificial Sequence
  Description of Artificial Sequence: Synthetic oligonucleotide
uaugacaugcacacgauga

SEQ ID NO: 115594 - RNA, 19 nt, Artificial Sequence
  Description of Artificial Sequence: Synthetic oligonucleotide
gaacacauccccuuggagg

SEQ ID NO: 115595 - RNA, 19 nt, Artificial Sequence
  Description of Artificial Sequence: Synthetic oligonucleotide
guuuauaaaaggcgggugg

SEQ ID NO: 115596 - RNA, 19 nt, Artificial Sequence
  Description of Artificial Sequence: Synthetic oligonucleotide
aaugucaugcgaucaaucu

SEQ ID NO: 115597 - RNA, 19 nt, Artificial Sequence
  Description of Artificial Sequence: Synthetic oligonucleotide
gaugaugcgaugcacacug

SEQ ID NO: 115598 - RNA, 19 nt, Artificial Sequence
  Description of Artificial Sequence: Synthetic oligonucleotide
aauuagagguuuauaaaag

SEQ ID NO: 115599 - RNA, 19 nt, Artificial Sequence
  Description of Artificial Sequence: Synthetic oligonucleotide
gaagaggggacuuguaugg

SEQ ID NO: 115600 - RNA, 19 nt, Artificial Sequence
  Description of Artificial Sequence: Synthetic oligonucleotide
gaaaguucaaguaguaucc

SEQ ID NO: 115601 - RNA, 19 nt, Artificial Sequence
  Description of Artificial Sequence: Synthetic oligonucleotide
aacuugaagagcaugcaac

SEQ ID NO: 115602 - RNA, 19 nt, Artificial Sequence
  Description of Artificial Sequence: Synthetic oligonucleotide
aggaaaucacaauaauuac

SEQ ID NO: 115603 - RNA, 19 nt, Artificial Sequence
  Description of Artificial Sequence: Synthetic oligonucleotide
acaauugccuuuucugugc

SEQ ID NO: 115604 - RNA, 19 nt, Artificial Sequence
  Description of Artificial Sequence: Synthetic oligonucleotide
uuugcgggaaaacaaauaa

SEQ ID NO: 115605 - RNA, 19 nt, Artificial Sequence
  Description of Artificial Sequence: Synthetic oligonucleotide
ugucaugcgaucaaucuca

SEQ ID NO: 115606 - RNA, 19 nt, Artificial Sequence
  Description of Artificial Sequence: Synthetic oligonucleotide
ucgacuucggaccacacgc

SEQ ID NO: 115607 - RNA, 19 nt, Artificial Sequence
  Description of Artificial Sequence: Synthetic oligonucleotide
gauguugagcucuacauuc

SEQ ID NO: 115608 - RNA, 19 nt, Artificial Sequence
  Description of Artificial Sequence: Synthetic oligonucleotide
aaucgucaaagaaacgccc

SEQ ID NO: 115609 - RNA, 19 nt, Artificial Sequence
  Description of Artificial Sequence: Synthetic oligonucleotide
aaaacgguugugcaugugu

SEQ ID NO: 115610 - RNA, 19 nt, Artificial Sequence
  Description of Artificial Sequence: Synthetic oligonucleotide
aaaucuccucaauguaugg

SEQ ID NO: 115611 - RNA, 19 nt, Artificial Sequence
  Description of Artificial Sequence: Synthetic oligonucleotide
aauaaaaccuuuuccgcuu

SEQ ID NO: 115612 - RNA, 19 nt, Artificial Sequence
  Description of Artificial Sequence: Synthetic oligonucleotide
gauuaucucagcugcguag

SEQ ID NO: 115613 - RNA, 19 nt, Artificial Sequence
  Description of Artificial Sequence: Synthetic oligonucleotide
uagacuacaaaacgguugu

SEQ ID NO: 115614 - RNA, 19 nt, Artificial Sequence
  Description of Artificial Sequence: Synthetic oligonucleotide
agagguuuauaaaaggcgg

SEQ ID NO: 115615 - RNA, 19 nt, Artificial Sequence
  Description of Artificial Sequence: Synthetic oligonucleotide
ugcgggaaaacaaauaaua

SEQ ID NO: 115616 - RNA, 19 nt, Artificial Sequence
  Description of Artificial Sequence: Synthetic oligonucleotide
gaagggauugcccaucuug

SEQ ID NO: 115617 - RNA, 19 nt, Artificial Sequence
  Description of Artificial Sequence: Synthetic oligonucleotide
cuucccuacaggaagacac

SEQ ID NO: 115618 - RNA, 19 nt, Artificial Sequence
  Description of Artificial Sequence: Synthetic oligonucleotide
uuagacaauggcuggguug

SEQ ID NO: 115619 - RNA, 19 nt, Artificial Sequence
  Description of Artificial Sequence: Synthetic oligonucleotide
uguccaguaacuugauucc

SEQ ID NO: 115620 - RNA, 19 nt, Artificial Sequence
  Description of Artificial Sequence: Synthetic oligonucleotide
cuugauuccuuuugugucc

SEQ ID NO: 115621 - RNA, 19 nt, Artificial Sequence
  Description of Artificial Sequence: Synthetic oligonucleotide
ugugguaggaaaguucaag

SEQ ID NO: 115622 - RNA, 19 nt, Artificial Sequence
  Description of Artificial Sequence: Synthetic oligonucleotide
acauuugcgcucuuugauc

SEQ ID NO: 115623 - RNA, 19 nt, Artificial Sequence
  Description of Artificial Sequence: Synthetic oligonucleotide
cucacgauaggcaucgcgc

SEQ ID NO: 115624 - RNA, 19 nt, Artificial Sequence
  Description of Artificial Sequence: Synthetic oligonucleotide
agaagaggggacuuguaug

SEQ ID NO: 115625 - RNA, 19 nt, Artificial Sequence
  Description of Artificial Sequence: Synthetic oligonucleotide
aacgguugugcauguguuc

SEQ ID NO: 115626 - RNA, 19 nt, Artificial Sequence
  Description of Artificial Sequence: Synthetic oligonucleotide
aaguucaaguaguaucccu

SEQ ID NO: 115627 - RNA, 19 nt, Artificial Sequence
  Description of Artificial Sequence: Synthetic oligonucleotide
ggugcgacaccacacaugg

SEQ ID NO: 115628 - RNA, 19 nt, Artificial Sequence
  Description of Artificial Sequence: Synthetic oligonucleotide
gagagggaaauuucgguac

SEQ ID NO: 115629 - RNA, 19 nt, Artificial Sequence
  Description of Artificial Sequence: Synthetic oligonucleotide
aagggauugcccaucuugg

SEQ ID NO: 115630 - RNA, 19 nt, Artificial Sequence
  Description of Artificial Sequence: Synthetic oligonucleotide
ucuuucgugccuccagccg

SEQ ID NO: 115631 - RNA, 19 nt, Artificial Sequence
  Description of Artificial Sequence: Synthetic oligonucleotide
uguucaagccccaggauua

SEQ ID NO: 115632 - RNA, 19 nt, Artificial Sequence
  Description of Artificial Sequence: Synthetic oligonucleotide
gagguuuauaaaaggcggg

SEQ ID NO: 115633 - RNA, 19 nt, Artificial Sequence
  Description of Artificial Sequence: Synthetic oligonucleotide
uuucuuucgugccuccagc

SEQ ID NO: 115634 - RNA, 19 nt, Artificial Sequence
  Description of Artificial Sequence: Synthetic oligonucleotide
cucaauguauggcuggaag

SEQ ID NO: 115635 - RNA, 19 nt, Artificial Sequence
  Description of Artificial Sequence: Synthetic oligonucleotide
aagucguucauggucaggu

SEQ ID NO: 115636 - RNA, 19 nt, Artificial Sequence
  Description of Artificial Sequence: Synthetic oligonucleotide
ucaucgaaggagccaaugu

SEQ ID NO: 115637 - RNA, 19 nt, Artificial Sequence
  Description of Artificial Sequence: Synthetic oligonucleotide
ugcaacagaccuuccagca

SEQ ID NO: 115638 - RNA, 19 nt, Artificial Sequence
  Description of Artificial Sequence: Synthetic oligonucleotide
ugggagugaguagacaggg

SEQ ID NO: 115639 - RNA, 19 nt, Artificial Sequence
  Description of Artificial Sequence: Synthetic oligonucleotide
guagacuacaaaacgguug

SEQ ID NO: 115640 - RNA, 19 nt, Artificial Sequence
  Description of Artificial Sequence: Synthetic oligonucleotide
ugcgcgacuggcacaaggg

SEQ ID NO: 115641 - RNA, 19 nt, Artificial Sequence
  Description of Artificial Sequence: Synthetic oligonucleotide
agaccuuccagcagggacc

SEQ ID NO: 115642 - RNA, 19 nt, Artificial Sequence
  Description of Artificial Sequence: Synthetic oligonucleotide
acuacaccucaccgaagcc

SEQ ID NO: 115643 - RNA, 19 nt, Artificial Sequence
  Description of Artificial Sequence: Synthetic oligonucleotide
aggaucacuaucacacugc

SEQ ID NO: 115644 - RNA, 19 nt, Artificial Sequence
  Description of Artificial Sequence: Synthetic oligonucleotide
uucaggcuaggccagugug

SEQ ID NO: 115645 - RNA, 19 nt, Artificial Sequence
  Description of Artificial Sequence: Synthetic oligonucleotide
cuaggagccagucacugug

SEQ ID NO: 115646 - RNA, 19 nt, Artificial Sequence
  Description of Artificial Sequence: Synthetic oligonucleotide
uuccauugcaccagcucag

SEQ ID NO: 115647 - RNA, 19 nt, Artificial Sequence
  Description of Artificial Sequence: Synthetic oligonucleotide
ccuguagacuacaaaacgg

SEQ ID NO: 115648 - RNA, 19 nt, Artificial Sequence
  Description of Artificial Sequence: Synthetic oligonucleotide
ugagagggaaauuucggua

SEQ ID NO: 115649 - RNA, 19 nt, Artificial Sequence
  Description of Artificial Sequence: Synthetic oligonucleotide
aaguaguaucccuguguug

SEQ ID NO: 115650 - RNA, 19 nt, Artificial Sequence
  Description of Artificial Sequence: Synthetic oligonucleotide
cacuacaccucaccgaagc

SEQ ID NO: 115651 - RNA, 19 nt, Artificial Sequence
  Description of Artificial Sequence: Synthetic oligonucleotide
aauugccuuuucugugcuc

SEQ ID NO: 115652 - RNA, 19 nt, Artificial Sequence
  Description of Artificial Sequence: Synthetic oligonucleotide
uagccuccgauugacaucc

SEQ ID NO: 115653 - RNA, 19 nt, Artificial Sequence
  Description of Artificial Sequence: Synthetic oligonucleotide
uccggcacccacuacaccu

SEQ ID NO: 115654 - RNA, 19 nt, Artificial Sequence
  Description of Artificial Sequence: Synthetic oligonucleotide
uucaaguaguaucccugug

SEQ ID NO: 115655 - RNA, 19 nt, Artificial Sequence
  Description of Artificial Sequence: Synthetic oligonucleotide
ucgguuggggaagagguag

SEQ ID NO: 115656 - RNA, 19 nt, Artificial Sequence
  Description of Artificial Sequence: Synthetic oligonucleotide
caccccgccacucaagucg

SEQ ID NO: 115657 - RNA, 19 nt, Artificial Sequence
  Description of Artificial Sequence: Synthetic oligonucleotide
ucgucaaagaaacgcccug

SEQ ID NO: 115658 - RNA, 19 nt, Artificial Sequence
  Description of Artificial Sequence: Synthetic oligonucleotide
ugugaacuugucacucuca

SEQ ID NO: 115659 - RNA, 19 nt, Artificial Sequence
  Description of Artificial Sequence: Synthetic oligonucleotide
gaugcgaugcacacugaag

SEQ ID NO: 115660 - RNA, 19 nt, Artificial Sequence
  Description of Artificial Sequence: Synthetic oligonucleotide
aguucaaguaguaucccug

SEQ ID NO: 115661 - RNA, 19 nt, Artificial Sequence
  Description of Artificial Sequence: Synthetic oligonucleotide
ucggccuccgagaagacuc

SEQ ID NO: 115662 - RNA, 19 nt, Artificial Sequence
  Description of Artificial Sequence: Synthetic oligonucleotide
uguguggaaugcauaugac

SEQ ID NO: 115663 - RNA, 19 nt, Artificial Sequence
  Description of Artificial Sequence: Synthetic oligonucleotide
uccgagauucucacguggc

SEQ ID NO: 115664 - RNA, 19 nt, Artificial Sequence
  Description of Artificial Sequence: Synthetic oligonucleotide
ugagggucgcuccucuucc

SEQ ID NO: 115665 - RNA, 19 nt, Artificial Sequence
  Description of Artificial Sequence: Synthetic oligonucleotide
aaacgcauauucucauuuu

SEQ ID NO: 115666 - RNA, 19 nt, Artificial Sequence
  Description of Artificial Sequence: Synthetic oligonucleotide
uuucaugauauaggaguca

SEQ ID NO: 115667 - RNA, 19 nt, Artificial Sequence
  Description of Artificial Sequence: Synthetic oligonucleotide
aggccguuggcacugccac

SEQ ID NO: 115668 - RNA, 19 nt, Artificial Sequence
  Description of Artificial Sequence: Synthetic oligonucleotide
agaggggacuuguauggag

SEQ ID NO: 115669 - RNA, 19 nt, Artificial Sequence
  Description of Artificial Sequence: Synthetic oligonucleotide
aagucgguuggggaagagg

SEQ ID NO: 115670 - RNA, 19 nt, Artificial Sequence
  Description of Artificial Sequence: Synthetic oligonucleotide
caucgaaggagccaauguc

SEQ ID NO: 115671 - RNA, 19 nt, Artificial Sequence
  Description of Artificial Sequence: Synthetic oligonucleotide
cugggagugaguagacagg

SEQ ID NO: 115672 - RNA, 19 nt, Artificial Sequence
  Description of Artificial Sequence: Synthetic oligonucleotide
agcgcugcugucauaggcc

SEQ ID NO: 115673 - RNA, 19 nt, Artificial Sequence
  Description of Artificial Sequence: Synthetic oligonucleotide
uucuuucgugccuccagcc

SEQ ID NO: 115674 - RNA, 19 nt, Artificial Sequence
  Description of Artificial Sequence: Synthetic oligonucleotide
cauucaccuccccacgugg

SEQ ID NO: 115675 - RNA, 19 nt, Artificial Sequence
  Description of Artificial Sequence: Synthetic oligonucleotide
uguccccgcaacaacuuga

SEQ ID NO: 115676 - RNA, 19 nt, Artificial Sequence
  Description of Artificial Sequence: Synthetic oligonucleotide
guagccgugcauaaugcag

SEQ ID NO: 115677 - RNA, 19 nt, Artificial Sequence
  Description of Artificial Sequence: Synthetic oligonucleotide
cuccgagauggugagaggg

SEQ ID NO: 115678 - RNA, 19 nt, Artificial Sequence
  Description of Artificial Sequence: Synthetic oligonucleotide
guugugcauguguucaagc

SEQ ID NO: 115679 - RNA, 19 nt, Artificial Sequence
  Description of Artificial Sequence: Synthetic oligonucleotide
uacuuccugagccccacga

SEQ ID NO: 115680 - RNA, 19 nt, Artificial Sequence
  Description of Artificial Sequence: Synthetic oligonucleotide
guagaaguaccgccgcugc

SEQ ID NO: 115681 - RNA, 19 nt, Artificial Sequence
  Description of Artificial Sequence: Synthetic oligonucleotide
agacauuugcgcucuuuga

SEQ ID NO: 115682 - RNA, 19 nt, Artificial Sequence
  Description of Artificial Sequence: Synthetic oligonucleotide
ugguguguggaaugcauau

SEQ ID NO: 115683 - RNA, 19 nt, Artificial Sequence
  Description of Artificial Sequence: Synthetic oligonucleotide
guccgagauucucacgugg

SEQ ID NO: 115684 - RNA, 19 nt, Artificial Sequence
  Description of Artificial Sequence: Synthetic oligonucleotide
cauguaaccgugcgugccc

SEQ ID NO: 115685 - RNA, 19 nt, Artificial Sequence
  Description of Artificial Sequence: Synthetic oligonucleotide
ucgaaggagccaaugucaa

SEQ ID NO: 115686 - RNA, 19 nt, Artificial Sequence
  Description of Artificial Sequence: Synthetic oligonucleotide
ugaugcgaugcacacugaa

SEQ ID NO: 115687 - RNA, 19 nt, Artificial Sequence
  Description of Artificial Sequence: Synthetic oligonucleotide
ucucucaccaguggcaaga

SEQ ID NO: 115688 - RNA, 19 nt, Artificial Sequence
  Description of Artificial Sequence: Synthetic oligonucleotide
cuuguauggaggccagcag

SEQ ID NO: 115689 - RNA, 19 nt, Artificial Sequence
  Description of Artificial Sequence: Synthetic oligonucleotide
aguggcaagaggacagaac

SEQ ID NO: 115690 - RNA, 19 nt, Artificial Sequence
  Description of Artificial Sequence: Synthetic oligonucleotide
uugcgggaaaacaaauaau

SEQ ID NO: 115691 - RNA, 19 nt, Artificial Sequence
  Description of Artificial Sequence: Synthetic oligonucleotide
gaagagaucuggaggcacc

SEQ ID NO: 115692 - RNA, 19 nt, Artificial Sequence
  Description of Artificial Sequence: Synthetic oligonucleotide
guguggaaugcauaugaca

SEQ ID NO: 115693 - RNA, 19 nt, Artificial Sequence
  Description of Artificial Sequence: Synthetic oligonucleotide
uguuagacaauggcugggu

SEQ ID NO: 115694 - RNA, 19 nt, Artificial Sequence
  Description of Artificial Sequence: Synthetic oligonucleotide
acuucggaccacacgcucc

SEQ ID NO: 115695 - RNA, 19 nt, Artificial Sequence
  Description of Artificial Sequence: Synthetic oligonucleotide
ucgugucuugcuuuccggc

SEQ ID NO: 115696 - RNA, 19 nt, Artificial Sequence
  Description of Artificial Sequence: Synthetic oligonucleotide
uuuccggcacccacuacac

SEQ ID NO: 115697 - RNA, 19 nt, Artificial Sequence
  Description of Artificial Sequence: Synthetic oligonucleotide
gacaaaucuccucaaugua

SEQ ID NO: 115698 - RNA, 19 nt, Artificial Sequence
  Description of Artificial Sequence: Synthetic oligonucleotide
aucgaaggagccaauguca

SEQ ID NO: 115699 - RNA, 19 nt, Artificial Sequence
  Description of Artificial Sequence: Synthetic oligonucleotide
ugcauaugacaugcacacg

SEQ ID NO: 115700 - RNA, 19 nt, Artificial Sequence
  Description of Artificial Sequence: Synthetic oligonucleotide
acucaagucgguuggggaa

SEQ ID NO: 115701 - RNA, 19 nt, Artificial Sequence
  Description of Artificial Sequence: Synthetic oligonucleotide
uguugcaccuuccuuccua

SEQ ID NO: 115702 - RNA, 19 nt, Artificial Sequence
  Description of Artificial Sequence: Synthetic oligonucleotide
guggaaugcauaugacaug

SEQ ID NO: 115703 - RNA, 19 nt, Artificial Sequence
  Description of Artificial Sequence: Synthetic oligonucleotide
ugauccucucguucagagc

SEQ ID NO: 115704 - RNA, 19 nt, Artificial Sequence
  Description of Artificial Sequence: Synthetic oligonucleotide
cucgacuucggaccacacg

SEQ ID NO: 115705 - RNA, 19 nt, Artificial Sequence
  Description of Artificial Sequence: Synthetic oligonucleotide
cugagauaggugguagugc

SEQ ID NO: 115706 - RNA, 19 nt, Artificial Sequence
  Description of Artificial Sequence: Synthetic oligonucleotide
agucgguuggggaagaggu

SEQ ID NO: 115707 - RNA, 19 nt, Artificial Sequence
  Description of Artificial Sequence: Synthetic oligonucleotide
aagaaacgcccugggagug

SEQ ID NO: 115708 - RNA, 19 nt, Artificial Sequence
  Description of Artificial Sequence: Synthetic oligonucleotide
cccuguagacuacaaaacg

SEQ ID NO: 115709 - RNA, 19 nt, Artificial Sequence
  Description of Artificial Sequence: Synthetic oligonucleotide
caggauuaucucagcugcg

SEQ ID NO: 115710 - RNA, 19 nt, Artificial Sequence
  Description of Artificial Sequence: Synthetic oligonucleotide
gauucucacguggccaugc

SEQ ID NO: 115711 - RNA, 19 nt, Artificial Sequence
  Description of Artificial Sequence: Synthetic oligonucleotide
cuuuccggcacccacuaca

SEQ ID NO: 115712 - RNA, 19 nt, Artificial Sequence
  Description of Artificial Sequence: Synthetic oligonucleotide
ucaugauauaggagucaaa

SEQ ID NO: 115713 - RNA, 19 nt, Artificial Sequence
  Description of Artificial Sequence: Synthetic oligonucleotide
agaaguaccgccgcugcca

SEQ ID NO: 115714 - RNA, 19 nt, Artificial Sequence
  Description of Artificial Sequence: Synthetic oligonucleotide
agagggugcgacaccacac

SEQ ID NO: 115715 - RNA, 19 nt, Artificial Sequence
  Description of Artificial Sequence: Synthetic oligonucleotide
ggguguuagacaauggcug

SEQ ID NO: 115716 - RNA, 19 nt, Artificial Sequence
  Description of Artificial Sequence: Synthetic oligonucleotide
aagagaucuggaggcaccu

SEQ ID NO: 115717 - RNA, 19 nt, Artificial Sequence
  Description of Artificial Sequence: Synthetic oligonucleotide
ugccaccgcuccgagaugg

SEQ ID NO: 115718 - RNA, 19 nt, Artificial Sequence
  Description of Artificial Sequence: Synthetic oligonucleotide
uccgauugacaucccucug

SEQ ID NO: 115719 - RNA, 19 nt, Artificial Sequence
  Description of Artificial Sequence: Synthetic oligonucleotide
cucgccuucaccccgccac

SEQ ID NO: 115720 - RNA, 19 nt, Artificial Sequence
  Description of Artificial Sequence: Synthetic oligonucleotide
uuugcgcucuuugaucugu

SEQ ID NO: 115721 - RNA, 19 nt, Artificial Sequence
  Description of Artificial Sequence: Synthetic oligonucleotide
uuuacuuccugagccccac

SEQ ID NO: 115722 - RNA, 19 nt, Artificial Sequence
  Description of Artificial Sequence: Synthetic oligonucleotide
augacaugcacacgaugaa

SEQ ID NO: 115723 - RNA, 19 nt, Artificial Sequence
  Description of Artificial Sequence: Synthetic oligonucleotide
gccaccgcggauuuuaagc

SEQ ID NO: 115724 - RNA, 19 nt, Artificial Sequence
  Description of Artificial Sequence: Synthetic oligonucleotide
guguuagacaauggcuggg

SEQ ID NO: 115725 - RNA, 19 nt, Artificial Sequence
  Description of Artificial Sequence: Synthetic oligonucleotide
agccucaaguggcacacca

SEQ ID NO: 115726 - RNA, 19 nt, Artificial Sequence
  Description of Artificial Sequence: Synthetic oligonucleotide
ucaaugucaugcgaucaau

SEQ ID NO: 115727 - RNA, 19 nt, Artificial Sequence
  Description of Artificial Sequence: Synthetic oligonucleotide
uggcggcacugacaggacg

SEQ ID NO: 115728 - RNA, 19 nt, Artificial Sequence
  Description of Artificial Sequence: Synthetic oligonucleotide
ugccacgcuggaucagugg

SEQ ID NO: 115729 - RNA, 19 nt, Artificial Sequence
  Description of Artificial Sequence: Synthetic oligonucleotide
acgcccgaugaugcgaugc

SEQ ID NO: 115730 - RNA, 19 nt, Artificial Sequence
  Description of Artificial Sequence: Synthetic oligonucleotide
gacacuucauggcauacau

SEQ ID NO: 115731 - RNA, 19 nt, Artificial Sequence
  Description of Artificial Sequence: Synthetic oligonucleotide
aggauuaucucagcugcgu

SEQ ID NO: 115732 - RNA, 19 nt, Artificial Sequence
  Description of Artificial Sequence: Synthetic oligonucleotide
uccccuuggagguucugac

SEQ ID NO: 115733 - RNA, 19 nt, Artificial Sequence
  Description of Artificial Sequence: Synthetic oligonucleotide
ggucuugugcugccgaaag

SEQ ID NO: 115734 - RNA, 19 nt, Artificial Sequence
  Description of Artificial Sequence: Synthetic oligonucleotide
ugccaguccagugaacgga

SEQ ID NO: 115735 - RNA, 19 nt, Artificial Sequence
  Description of Artificial Sequence: Synthetic oligonucleotide
cugacgagggaaagcauga

SEQ ID NO: 115736 - RNA, 19 nt, Artificial Sequence
  Description of Artificial Sequence: Synthetic oligonucleotide
gacauuugcgcucuuugau

SEQ ID NO: 115737 - RNA, 19 nt, Artificial Sequence
  Description of Artificial Sequence: Synthetic oligonucleotide
gguuuauaaaaggcgggug

SEQ ID NO: 115738 - RNA, 19 nt, Artificial Sequence
  Description of Artificial Sequence: Synthetic oligonucleotide
uugcuuuccggcacccacu

SEQ ID NO: 115739 - RNA, 19 nt, Artificial Sequence
  Description of Artificial Sequence: Synthetic oligonucleotide
uagaagcgcaugucggccu

SEQ ID NO: 115740 - RNA, 19 nt, Artificial Sequence
  Description of Artificial Sequence: Synthetic oligonucleotide
acgguugugcauguguuca

SEQ ID NO: 115741 - RNA, 19 nt, Artificial Sequence
  Description of Artificial Sequence: Synthetic oligonucleotide
ugccgaaaggggcuguguc

SEQ ID NO: 115742 - RNA, 19 nt, Artificial Sequence
  Description of Artificial Sequence: Synthetic oligonucleotide
accgcggauuuuaagcagg

SEQ ID NO: 115743 - RNA, 19 nt, Artificial Sequence
  Description of Artificial Sequence: Synthetic oligonucleotide
uaaccgugcgugcccacac

SEQ ID NO: 115744 - RNA, 19 nt, Artificial Sequence
  Description of Artificial Sequence: Synthetic oligonucleotide
gaagucguucauggucagg

SEQ ID NO: 115745 - RNA, 19 nt, Artificial Sequence
  Description of Artificial Sequence: Synthetic oligonucleotide
cucaagucgguuggggaag

SEQ ID NO: 115746 - RNA, 19 nt, Artificial Sequence
  Description of Artificial Sequence: Synthetic oligonucleotide
cuguagacuacaaaacggu

SEQ ID NO: 115747 - RNA, 19 nt, Artificial Sequence
  Description of Artificial Sequence: Synthetic oligonucleotide
accgcuccgagauggugag

SEQ ID NO: 115748 - RNA, 19 nt, Artificial Sequence
  Description of Artificial Sequence: Synthetic oligonucleotide
aaacgguugugcauguguu

SEQ ID NO: 115749 - RNA, 19 nt, Artificial Sequence
  Description of Artificial Sequence: Synthetic oligonucleotide
cuagccuccgauugacauc

SEQ ID NO: 115750 - RNA, 19 nt, Artificial Sequence
  Description of Artificial Sequence: Synthetic oligonucleotide
uggacauguagccgugcau

SEQ ID NO: 115751 - RNA, 19 nt, Artificial Sequence
  Description of Artificial Sequence: Synthetic oligonucleotide
gcaaaaucgugugaacuug

SEQ ID NO: 115752 - RNA, 19 nt, Artificial Sequence
  Description of Artificial Sequence: Synthetic oligonucleotide
gcguuucuuguccagacac

SEQ ID NO: 115753 - RNA, 19 nt, Artificial Sequence
  Description of Artificial Sequence: Synthetic oligonucleotide
augcucguccaggagaaug

SEQ ID NO: 115754 - RNA, 19 nt, Artificial Sequence
  Description of Artificial Sequence: Synthetic oligonucleotide
ucaugcgaucaaucucaug

SEQ ID NO: 115755 - RNA, 19 nt, Artificial Sequence
  Description of Artificial Sequence: Synthetic oligonucleotide
cagggaccgcaguucaggg

SEQ ID NO: 115756 - RNA, 19 nt, Artificial Sequence
  Description of Artificial Sequence: Synthetic oligonucleotide
gaaguaccgccgcugccac

SEQ ID NO: 115757 - RNA, 19 nt, Artificial Sequence
  Description of Artificial Sequence: Synthetic oligonucleotide
ccucaaguggcacaccacc

SEQ ID NO: 115758 - RNA, 19 nt, Artificial Sequence
  Description of Artificial Sequence: Synthetic oligonucleotide
acccacuacaccucaccga

SEQ ID NO: 115759 - RNA, 19 nt, Artificial Sequence
  Description of Artificial Sequence: Synthetic oligonucleotide
ugggucagaggccguuggc

SEQ ID NO: 115760 - RNA, 19 nt, Artificial Sequence
  Description of Artificial Sequence: Synthetic oligonucleotide
cagggguguuagacaaugg

SEQ ID NO: 115761 - RNA, 19 nt, Artificial Sequence
  Description of Artificial Sequence: Synthetic oligonucleotide
cauuugcgcucuuugaucu

SEQ ID NO: 115762 - RNA, 19 nt, Artificial Sequence
  Description of Artificial Sequence: Synthetic oligonucleotide
cuuucgugccuccagccga

SEQ ID NO: 115763 - RNA, 19 nt, Artificial Sequence
  Description of Artificial Sequence: Synthetic oligonucleotide
gaugcguuucuuguccaga

SEQ ID NO: 115764 - RNA, 19 nt, Artificial Sequence
  Description of Artificial Sequence: Synthetic oligonucleotide
auuugcgcucuuugaucug

SEQ ID NO: 115765 - RNA, 19 nt, Artificial Sequence
  Description of Artificial Sequence: Synthetic oligonucleotide
gucaaugucaugcgaucaa

SEQ ID NO: 115766 - RNA, 19 nt, Artificial Sequence
  Description of Artificial Sequence: Synthetic oligonucleotide
aucgucaaagaaacgcccu

SEQ ID NO: 115767 - RNA, 19 nt, Artificial Sequence
  Description of Artificial Sequence: Synthetic oligonucleotide
aacgcccugggagugagua

SEQ ID NO: 115768 - RNA, 19 nt, Artificial Sequence
  Description of Artificial Sequence: Synthetic oligonucleotide
uugcaccuuccuuccuagg

SEQ ID NO: 115769 - RNA, 19 nt, Artificial Sequence
  Description of Artificial Sequence: Synthetic oligonucleotide
uucucacguggccaugcuc

SEQ ID NO: 115770 - RNA, 19 nt, Artificial Sequence
  Description of Artificial Sequence: Synthetic oligonucleotide
gguagugcagguccccacc

SEQ ID NO: 115771 - RNA, 19 nt, Artificial Sequence
  Description of Artificial Sequence: Synthetic oligonucleotide
gacaugcucgguagcauuc

SEQ ID NO: 115772 - RNA, 19 nt, Artificial Sequence
  Description of Artificial Sequence: Synthetic oligonucleotide
agggauugcccaucuugga

SEQ ID NO: 115773 - RNA, 19 nt, Artificial Sequence
  Description of Artificial Sequence: Synthetic oligonucleotide
cugcgcgacuggcacaagg

SEQ ID NO: 115774 - RNA, 19 nt, Artificial Sequence
  Description of Artificial Sequence: Synthetic oligonucleotide
cuuugcgggaaaacaaaua

SEQ ID NO: 115775 - RNA, 19 nt, Artificial Sequence
  Description of Artificial Sequence: Synthetic oligonucleotide
uugccagacuucugaggca

SEQ ID NO: 115776 - RNA, 19 nt, Artificial Sequence
  Description of Artificial Sequence: Synthetic oligonucleotide
agaggccguuggcacugcc

SEQ ID NO: 115777 - RNA, 19 nt, Artificial Sequence
  Description of Artificial Sequence: Synthetic oligonucleotide
ggccauguaaccgugcgug

SEQ ID NO: 115778 - RNA, 19 nt, Artificial Sequence
  Description of Artificial Sequence: Synthetic oligonucleotide
caccgcggauuuuaagcag

SEQ ID NO: 115779 - RNA, 19 nt, Artificial Sequence
  Description of Artificial Sequence: Synthetic oligonucleotide
cccaccguucaugagaucc

SEQ ID NO: 115780 - RNA, 19 nt, Artificial Sequence
  Description of Artificial Sequence: Synthetic oligonucleotide
gcugagauaggugguagug

SEQ ID NO: 115781 - RNA, 19 nt, Artificial Sequence
  Description of Artificial Sequence: Synthetic oligonucleotide
accgugcgugcccacacug

SEQ ID NO: 115782 - RNA, 19 nt, Artificial Sequence
  Description of Artificial Sequence: Synthetic oligonucleotide
guauggcuggaagagaucu

SEQ ID NO: 115783 - RNA, 19 nt, Artificial Sequence
  Description of Artificial Sequence: Synthetic oligonucleotide
gugcugacgagggaaagca

SEQ ID NO: 115784 - RNA, 19 nt, Artificial Sequence
  Description of Artificial Sequence: Synthetic oligonucleotide
gcauggggcuucuucuugg

SEQ ID NO: 115785 - RNA, 19 nt, Artificial Sequence
  Description of Artificial Sequence: Synthetic oligonucleotide
gugagagggaaauuucggu

SEQ ID NO: 115786 - RNA, 19 nt, Artificial Sequence
  Description of Artificial Sequence: Synthetic oligonucleotide
gcugugguaggaaaguuca

SEQ ID NO: 115787 - RNA, 19 nt, Artificial Sequence
  Description of Artificial Sequence: Synthetic oligonucleotide
ggcccaauccacaauugcc

SEQ ID NO: 115788 - RNA, 19 nt, Artificial Sequence
  Description of Artificial Sequence: Synthetic oligonucleotide
ggccucacgauaggcaucg

SEQ ID NO: 115789 - RNA, 19 nt, Artificial Sequence
  Description of Artificial Sequence: Synthetic oligonucleotide
acgacccagacagccuagc

SEQ ID NO: 115790 - RNA, 19 nt, Artificial Sequence
  Description of Artificial Sequence: Synthetic oligonucleotide
gcaacagaccuuccagcag

SEQ ID NO: 115791 - RNA, 19 nt, Artificial Sequence
  Description of Artificial Sequence: Synthetic oligonucleotide
cagaggcuuucccugaaca

SEQ ID NO: 115792 - RNA, 19 nt, Artificial Sequence
  Description of Artificial Sequence: Synthetic oligonucleotide
uuucgugccuccagccgau

SEQ ID NO: 115793 - RNA, 19 nt, Artificial Sequence
  Description of Artificial Sequence: Synthetic oligonucleotide
uccucucguucagagccag

SEQ ID NO: 115794 - RNA, 19 nt, Artificial Sequence
  Description of Artificial Sequence: Synthetic oligonucleotide
ugccaccgcggauuuuaag

SEQ ID NO: 115795 - RNA, 19 nt, Artificial Sequence
  Description of Artificial Sequence: Synthetic oligonucleotide
ugcgcucuuugaucugugu

SEQ ID NO: 115796 - RNA, 19 nt, Artificial Sequence
  Description of Artificial Sequence: Synthetic oligonucleotide
aaccgugcgugcccacacu

SEQ ID NO: 115797 - RNA, 19 nt, Artificial Sequence
  Description of Artificial Sequence: Synthetic oligonucleotide
agguccccaccguucauga

SEQ ID NO: 115798 - RNA, 19 nt, Artificial Sequence
  Description of Artificial Sequence: Synthetic oligonucleotide
ggaucacuaucacacugca

SEQ ID NO: 115799 - RNA, 19 nt, Artificial Sequence
  Description of Artificial Sequence: Synthetic oligonucleotide
ugagcguggcuuguucuuc

SEQ ID NO: 115800 - RNA, 19 nt, Artificial Sequence
  Description of Artificial Sequence: Synthetic oligonucleotide
cuaucacacugcaggacaa

SEQ ID NO: 115801 - RNA, 19 nt, Artificial Sequence
  Description of Artificial Sequence: Synthetic oligonucleotide
ucaagucgguuggggaaga

SEQ ID NO: 115802 - RNA, 19 nt, Artificial Sequence
  Description of Artificial Sequence: Synthetic oligonucleotide
uagugcagguccccaccgu

SEQ ID NO: 115803 - RNA, 19 nt, Artificial Sequence
  Description of Artificial Sequence: Synthetic oligonucleotide
gguugugcauguguucaag

SEQ ID NO: 115804 - RNA, 19 nt, Artificial Sequence
  Description of Artificial Sequence: Synthetic oligonucleotide
cacgcuggaucaguggcac

SEQ ID NO: 115805 - RNA, 19 nt, Artificial Sequence
  Description of Artificial Sequence: Synthetic oligonucleotide
ggcggcacugacaggacgg

SEQ ID NO: 115806 - RNA, 19 nt, Artificial Sequence
  Description of Artificial Sequence: Synthetic oligonucleotide
gccgaaaggggcugugucc

SEQ ID NO: 115807 - RNA, 19 nt, Artificial Sequence
  Description of Artificial Sequence: Synthetic oligonucleotide
ccucacgauaggcaucgcg

SEQ ID NO: 115808 - RNA, 19 nt, Artificial Sequence
  Description of Artificial Sequence: Synthetic oligonucleotide
uuccggcacccacuacacc

SEQ ID NO: 115809 - RNA, 19 nt, Artificial Sequence
  Description of Artificial Sequence: Synthetic oligonucleotide
gagauucucacguggccau

SEQ ID NO: 115810 - RNA, 19 nt, Artificial Sequence
  Description of Artificial Sequence: Synthetic oligonucleotide
ggucaggaggcucugcgga

SEQ ID NO: 115811 - RNA, 19 nt, Artificial Sequence
  Description of Artificial Sequence: Synthetic oligonucleotide
gggacuuguauggaggcca

SEQ ID NO: 115812 - RNA, 19 nt, Artificial Sequence
  Description of Artificial Sequence: Synthetic oligonucleotide
caaaaucgugugaacuugu

SEQ ID NO: 115813 - RNA, 19 nt, Artificial Sequence
  Description of Artificial Sequence: Synthetic oligonucleotide
gauugacaucccucugcaa

SEQ ID NO: 115814 - RNA, 19 nt, Artificial Sequence
  Description of Artificial Sequence: Synthetic oligonucleotide
agccgggacaaggaggacu

SEQ ID NO: 115815 - RNA, 19 nt, Artificial Sequence
  Description of Artificial Sequence: Synthetic oligonucleotide
gcagggguguuagacaaug

SEQ ID NO: 115816 - RNA, 19 nt, Artificial Sequence
  Description of Artificial Sequence: Synthetic oligonucleotide
caccguucaugagauccag

SEQ ID NO: 115817 - RNA, 19 nt, Artificial Sequence
  Description of Artificial Sequence: Synthetic oligonucleotide
agacuacaaaacgguugug

SEQ ID NO: 115818 - RNA, 19 nt, Artificial Sequence
  Description of Artificial Sequence: Synthetic oligonucleotide
gcaggagacauuugcgcuc

SEQ ID NO: 115819 - RNA, 19 nt, Artificial Sequence
  Description of Artificial Sequence: Synthetic oligonucleotide
ugccucgugucuugcuuuc

SEQ ID NO: 115820 - RNA, 19 nt, Artificial Sequence
  Description of Artificial Sequence: Synthetic oligonucleotide
cguagaagcgcaugucggc

SEQ ID NO: 115821 - RNA, 19 nt, Artificial Sequence
  Description of Artificial Sequence: Synthetic oligonucleotide
gauugcccaucuuggacau

SEQ ID NO: 115822 - RNA, 19 nt, Artificial Sequence
  Description of Artificial Sequence: Synthetic oligonucleotide
agacagccuagccuccgau

SEQ ID NO: 115823 - RNA, 19 nt, Artificial Sequence
  Description of Artificial Sequence: Synthetic oligonucleotide
uccaccgacuggaucucuu

SEQ ID NO: 115824 - RNA, 19 nt, Artificial Sequence
  Description of Artificial Sequence: Synthetic oligonucleotide
guguccccgcaacaacuug

SEQ ID NO: 115825 - RNA, 19 nt, Artificial Sequence
  Description of Artificial Sequence: Synthetic oligonucleotide
caaguaguaucccuguguu

SEQ ID NO: 115826 - RNA, 19 nt, Artificial Sequence
  Description of Artificial Sequence: Synthetic oligonucleotide
uggacaugcucgguagcau

SEQ ID NO: 115827 - RNA, 19 nt, Artificial Sequence
  Description of Artificial Sequence: Synthetic oligonucleotide
caccgcuccgagaugguga

SEQ ID NO: 115828 - RNA, 19 nt, Artificial Sequence
  Description of Artificial Sequence: Synthetic oligonucleotide
ccgaugaugcgaugcacac

SEQ ID NO: 115829 - RNA, 19 nt, Artificial Sequence
  Description of Artificial Sequence: Synthetic oligonucleotide
guguucaagccccaggauu

SEQ ID NO: 115830 - RNA, 19 nt, Artificial Sequence
  Description of Artificial Sequence: Synthetic oligonucleotide
uguaaccgugcgugcccac

SEQ ID NO: 115831 - RNA, 19 nt, Artificial Sequence
  Description of Artificial Sequence: Synthetic oligonucleotide
agggugcgacaccacacau

SEQ ID NO: 115832 - RNA, 19 nt, Artificial Sequence
  Description of Artificial Sequence: Synthetic oligonucleotide
agcugcguagaagcgcaug

SEQ ID NO: 115833 - RNA, 19 nt, Artificial Sequence
  Description of Artificial Sequence: Synthetic oligonucleotide
cuccgauugacaucccucu

SEQ ID NO: 115834 - RNA, 19 nt, Artificial Sequence
  Description of Artificial Sequence: Synthetic oligonucleotide
cacgacccagacagccuag

SEQ ID NO: 115835 - RNA, 19 nt, Artificial Sequence
  Description of Artificial Sequence: Synthetic oligonucleotide
ccgagaagacuccaugcug

SEQ ID NO: 115836 - RNA, 19 nt, Artificial Sequence
  Description of Artificial Sequence: Synthetic oligonucleotide
gguguguggaaugcauaug

SEQ ID NO: 115837 - RNA, 19 nt, Artificial Sequence
  Description of Artificial Sequence: Synthetic oligonucleotide
cuggacaugcucgguagca

SEQ ID NO: 115838 - RNA, 19 nt, Artificial Sequence
  Description of Artificial Sequence: Synthetic oligonucleotide
aaggagucaggcagcucaa

SEQ ID NO: 115839 - RNA, 19 nt, Artificial Sequence
  Description of Artificial Sequence: Synthetic oligonucleotide
gcgcaugucggccuccgag

SEQ ID NO: 115840 - RNA, 19 nt, Artificial Sequence
  Description of Artificial Sequence: Synthetic oligonucleotide
gggcggguacuucuguaag

SEQ ID NO: 115841 - RNA, 19 nt, Artificial Sequence
  Description of Artificial Sequence: Synthetic oligonucleotide
gacuuguauggaggccagc

SEQ ID NO: 115842 - RNA, 19 nt, Artificial Sequence
  Description of Artificial Sequence: Synthetic oligonucleotide
uggucuugugcugccgaaa

SEQ ID NO: 115843 - RNA, 19 nt, Artificial Sequence
  Description of Artificial Sequence: Synthetic oligonucleotide
agagaucuggaggcaccug

SEQ ID NO: 115844 - RNA, 19 nt, Artificial Sequence
  Description of Artificial Sequence: Synthetic oligonucleotide
caagggccuucucucacca

SEQ ID NO: 115845 - RNA, 19 nt, Artificial Sequence
  Description of Artificial Sequence: Synthetic oligonucleotide
caguccagugaacggaaaa

SEQ ID NO: 115846 - RNA, 19 nt, Artificial Sequence
  Description of Artificial Sequence: Synthetic oligonucleotide
gcauucaccuccccacgug

SEQ ID NO: 115847 - RNA, 19 nt, Artificial Sequence
  Description of Artificial Sequence: Synthetic oligonucleotide
caguguggcccaauccaca

SEQ ID NO: 115848 - RNA, 19 nt, Artificial Sequence
  Description of Artificial Sequence: Synthetic oligonucleotide
accacacauggcugcgcga

SEQ ID NO: 115849 - RNA, 19 nt, Artificial Sequence
  Description of Artificial Sequence: Synthetic oligonucleotide
cucuucccuacaggaagac

SEQ ID NO: 115850 - RNA, 19 nt, Artificial Sequence
  Description of Artificial Sequence: Synthetic oligonucleotide
ccuccgauugacaucccuc

SEQ ID NO: 115851 - RNA, 19 nt, Artificial Sequence
  Description of Artificial Sequence: Synthetic oligonucleotide
agccgaucugucucagcau

SEQ ID NO: 115852 - RNA, 19 nt, Artificial Sequence
  Description of Artificial Sequence: Synthetic oligonucleotide
gcgcgacuggcacaagggg

SEQ ID NO: 115853 - RNA, 19 nt, Artificial Sequence
  Description of Artificial Sequence: Synthetic oligonucleotide
auguaaccgugcgugccca

SEQ ID NO: 115854 - RNA, 19 nt, Artificial Sequence
  Description of Artificial Sequence: Synthetic oligonucleotide
gguccgagauucucacgug

SEQ ID NO: 115855 - RNA, 19 nt, Artificial Sequence
  Description of Artificial Sequence: Synthetic oligonucleotide
agauucucacguggccaug

SEQ ID NO: 115856 - RNA, 19 nt, Artificial Sequence
  Description of Artificial Sequence: Synthetic oligonucleotide
ccgaaaggggcuguguccc

SEQ ID NO: 115857 - RNA, 19 nt, Artificial Sequence
  Description of Artificial Sequence: Synthetic oligonucleotide
ccauguaaccgugcgugcc

SEQ ID NO: 115858 - RNA, 19 nt, Artificial Sequence
  Description of Artificial Sequence: Synthetic oligonucleotide
uucaagccccaggauuauc

SEQ ID NO: 115859 - RNA, 19 nt, Artificial Sequence
  Description of Artificial Sequence: Synthetic oligonucleotide
ugacgagggaaagcaugau

SEQ ID NO: 115860 - RNA, 19 nt, Artificial Sequence
  Description of Artificial Sequence: Synthetic oligonucleotide
cucaaguggcacaccaccu

SEQ ID NO: 115861 - RNA, 19 nt, Artificial Sequence
  Description of Artificial Sequence: Synthetic oligonucleotide
cacauccccuuggagguuc

SEQ ID NO: 115862 - RNA, 19 nt, Artificial Sequence
  Description of Artificial Sequence: Synthetic oligonucleotide
ucaccccgccacucaaguc

SEQ ID NO: 115863 - RNA, 19 nt, Artificial Sequence
  Description of Artificial Sequence: Synthetic oligonucleotide
agaaacgcccugggaguga

SEQ ID NO: 115864 - RNA, 19 nt, Artificial Sequence
  Description of Artificial Sequence: Synthetic oligonucleotide
cuucucucaccaguggcaa

SEQ ID NO: 115865 - RNA, 19 nt, Artificial Sequence
  Description of Artificial Sequence: Synthetic oligonucleotide
uugccaccgcggauuuuaa

SEQ ID NO: 115866 - RNA, 19 nt, Artificial Sequence
  Description of Artificial Sequence: Synthetic oligonucleotide
cugcguagaagcgcauguc

SEQ ID NO: 115867 - RNA, 19 nt, Artificial Sequence
  Description of Artificial Sequence: Synthetic oligonucleotide
cuguguccccgcaacaacu

SEQ ID NO: 115868 - RNA, 19 nt, Artificial Sequence
  Description of Artificial Sequence: Synthetic oligonucleotide
gggcagggguguuagacaa

SEQ ID NO: 115869 - RNA, 19 nt, Artificial Sequence
  Description of Artificial Sequence: Synthetic oligonucleotide
gccauguaaccgugcgugc

SEQ ID NO: 115870 - RNA, 19 nt, Artificial Sequence
  Description of Artificial Sequence: Synthetic oligonucleotide
gcgcucuuugaucuguguc

SEQ ID NO: 115871 - RNA, 19 nt, Artificial Sequence
  Description of Artificial Sequence: Synthetic oligonucleotide
agcuaggcccagguccgag

SEQ ID NO: 115872 - RNA, 19 nt, Artificial Sequence
  Description of Artificial Sequence: Synthetic oligonucleotide
gaggccguuggcacugcca

SEQ ID NO: 115873 - RNA, 19 nt, Artificial Sequence
  Description of Artificial Sequence: Synthetic oligonucleotide
guaaccgugcgugcccaca

SEQ ID NO: 115874 - RNA, 19 nt, Artificial Sequence
  Description of Artificial Sequence: Synthetic oligonucleotide
ggauuaucucagcugcgua

SEQ ID NO: 115875 - RNA, 19 nt, Artificial Sequence
  Description of Artificial Sequence: Synthetic oligonucleotide
ggacuuguauggaggccag

SEQ ID NO: 115876 - RNA, 19 nt, Artificial Sequence
  Description of Artificial Sequence: Synthetic oligonucleotide
gggaaagcaugauccucuc

SEQ ID NO: 115877 - RNA, 19 nt, Artificial Sequence
  Description of Artificial Sequence: Synthetic oligonucleotide
gcuccgagauggugagagg

SEQ ID NO: 115878 - RNA, 19 nt, Artificial Sequence
  Description of Artificial Sequence: Synthetic oligonucleotide
gccgggacaaggaggacug

SEQ ID NO: 115879 - RNA, 19 nt, Artificial Sequence
  Description of Artificial Sequence: Synthetic oligonucleotide
ggcggguacuucuguaaga

SEQ ID NO: 115880 - RNA, 19 nt, Artificial Sequence
  Description of Artificial Sequence: Synthetic oligonucleotide
gucuugcuuuccggcaccc

SEQ ID NO: 115881 - RNA, 19 nt, Artificial Sequence
  Description of Artificial Sequence: Synthetic oligonucleotide
gggguguuagacaauggcu

SEQ ID NO: 115882 - RNA, 19 nt, Artificial Sequence
  Description of Artificial Sequence: Synthetic oligonucleotide
caagucgguuggggaagag

SEQ ID NO: 115883 - RNA, 19 nt, Artificial Sequence
  Description of Artificial Sequence: Synthetic oligonucleotide
cccacuacaccucaccgaa

SEQ ID NO: 115884 - RNA, 19 nt, Artificial Sequence
  Description of Artificial Sequence: Synthetic oligonucleotide
ccaccgcggauuuuaagca

SEQ ID NO: 115885 - RNA, 19 nt, Artificial Sequence
  Description of Artificial Sequence: Synthetic oligonucleotide
ccacacauggcugcgcgac

SEQ ID NO: 115886 - RNA, 19 nt, Artificial Sequence
  Description of Artificial Sequence: Synthetic oligonucleotide
cugugguaggaaaguucaa

SEQ ID NO: 115887 - RNA, 19 nt, Artificial Sequence
  Description of Artificial Sequence: Synthetic oligonucleotide
ggccguuggcacugccacg

SEQ ID NO: 115888 - RNA, 19 nt, Artificial Sequence
  Description of Artificial Sequence: Synthetic oligonucleotide
gcugcguagaagcgcaugu

SEQ ID NO: 115889 - RNA, 19 nt, Artificial Sequence
  Description of Artificial Sequence: Synthetic oligonucleotide
cuucggaccacacgcuccu

SEQ ID NO: 115890 - RNA, 19 nt, Artificial Sequence
  Description of Artificial Sequence: Synthetic oligonucleotide
cgcuccgagauggugagag

SEQ ID NO: 115891 - RNA, 19 nt, Artificial Sequence
  Description of Artificial Sequence: Synthetic oligonucleotide
caauugccuuuucugugcu

SEQ ID NO: 115892 - RNA, 19 nt, Artificial Sequence
  Description of Artificial Sequence: Synthetic oligonucleotide
gcgacaccacacauggcug

SEQ ID NO: 115893 - RNA, 19 nt, Artificial Sequence
  Description of Artificial Sequence: Synthetic oligonucleotide
ggagaaccagucagcgcug

SEQ ID NO: 115894 - RNA, 19 nt, Artificial Sequence
  Description of Artificial Sequence: Synthetic oligonucleotide
gcggguacuucuguaagaa

SEQ ID NO: 115895 - RNA, 19 nt, Artificial Sequence
  Description of Artificial Sequence: Synthetic oligonucleotide
gggucagaggccguuggca

SEQ ID NO: 115896 - RNA, 19 nt, Artificial Sequence
  Description of Artificial Sequence: Synthetic oligonucleotide
gggugcgacaccacacaug

SEQ ID NO: 115897 - RNA, 19 nt, Artificial Sequence
  Description of Artificial Sequence: Synthetic oligonucleotide
gcacaccaccucauggggc

SEQ ID NO: 115898 - RNA, 19 nt, Artificial Sequence
  Description of Artificial Sequence: Synthetic oligonucleotide
ggugagcguggcuuguucu

SEQ ID NO: 115899 - RNA, 19 nt, Artificial Sequence
  Description of Artificial Sequence: Synthetic oligonucleotide
ccgccacucaagucgguug

SEQ ID NO: 115900 - RNA, 19 nt, Artificial Sequence
  Description of Artificial Sequence: Synthetic oligonucleotide
gagccucaaguggcacacc

SEQ ID NO: 115901 - RNA, 19 nt, Artificial Sequence
  Description of Artificial Sequence: Synthetic oligonucleotide
ccgugcauaaugcaguccu

SEQ ID NO: 115902 - RNA, 19 nt, Artificial Sequence
  Description of Artificial Sequence: Synthetic oligonucleotide
ggggcggguacuucuguaa

SEQ ID NO: 115903 - RNA, 19 nt, Artificial Sequence
  Description of Artificial Sequence: Synthetic oligonucleotide
ggaaugcauaugacaugca

SEQ ID NO: 115904 - RNA, 19 nt, Artificial Sequence
  Description of Artificial Sequence: Synthetic oligonucleotide
augaugcgaugcacacuga

SEQ ID NO: 115905 - RNA, 19 nt, Artificial Sequence
  Description of Artificial Sequence: Synthetic oligonucleotide
gcacacgaugaaggggcag

SEQ ID NO: 115906 - RNA, 19 nt, Artificial Sequence
  Description of Artificial Sequence: Synthetic oligonucleotide
guccccgcaacaacuugaa

SEQ ID NO: 115907 - RNA, 19 nt, Artificial Sequence
  Description of Artificial Sequence: Synthetic oligonucleotide
cacugaagucguucauggu

SEQ ID NO: 115908 - RNA, 19 nt, Artificial Sequence
  Description of Artificial Sequence: Synthetic oligonucleotide
caggagacauuugcgcucu

SEQ ID NO: 115909 - RNA, 19 nt, Artificial Sequence
  Description of Artificial Sequence: Synthetic oligonucleotide
ccgcuuugcgggaaaacaa

SEQ ID NO: 115910 - RNA, 19 nt, Artificial Sequence
  Description of Artificial Sequence: Synthetic oligonucleotide
gcggcacugacaggacggg

SEQ ID NO: 115911 - RNA, 19 nt, Artificial Sequence
  Description of Artificial Sequence: Synthetic oligonucleotide
gugagcguggcuuguucuu

SEQ ID NO: 115912 - RNA, 19 nt, Artificial Sequence
  Description of Artificial Sequence: Synthetic oligonucleotide
cacgcccgaugaugcgaug

SEQ ID NO: 115913 - RNA, 19 nt, Artificial Sequence
  Description of Artificial Sequence: Synthetic oligonucleotide
aaacgcccugggagugagu

SEQ ID NO: 115914 - RNA, 19 nt, Artificial Sequence
  Description of Artificial Sequence: Synthetic oligonucleotide
gcuaggcccagguccgaga

SEQ ID NO: 115915 - RNA, 19 nt, Artificial Sequence
  Description of Artificial Sequence: Synthetic oligonucleotide
agccuccgauugacauccc

SEQ ID NO: 115916 - RNA, 19 nt, Artificial Sequence
  Description of Artificial Sequence: Synthetic oligonucleotide
caguagugacacagaggcu

SEQ ID NO: 115917 - RNA, 19 nt, Artificial Sequence
  Description of Artificial Sequence: Synthetic oligonucleotide
gccgugcauaaugcagucc

SEQ ID NO: 115918 - RNA, 19 nt, Artificial Sequence
  Description of Artificial Sequence: Synthetic oligonucleotide
ccucucguucagagccagg

SEQ ID NO: 115919 - RNA, 19 nt, Artificial Sequence
  Description of Artificial Sequence: Synthetic oligonucleotide
ccaccguucaugagaucca

SEQ ID NO: 115920 - RNA, 19 nt, Artificial Sequence
  Description of Artificial Sequence: Synthetic oligonucleotide
gugcgugcccacacuggca

SEQ ID NO: 115921 - RNA, 19 nt, Artificial Sequence
  Description of Artificial Sequence: Synthetic oligonucleotide
cuuuuccgcuuugcgggaa

SEQ ID NO: 115922 - RNA, 19 nt, Artificial Sequence
  Description of Artificial Sequence: Synthetic oligonucleotide
ccuagccuccgauugacau

SEQ ID NO: 115923 - RNA, 19 nt, Artificial Sequence
  Description of Artificial Sequence: Synthetic oligonucleotide
cgagauucucacguggcca

SEQ ID NO: 115924 - RNA, 19 nt, Artificial Sequence
  Description of Artificial Sequence: Synthetic oligonucleotide
ccgcaacaacuugaagagc

SEQ ID NO: 115925 - RNA, 19 nt, Artificial Sequence
  Description of Artificial Sequence: Synthetic oligonucleotide
guggcggcacugacaggac

SEQ ID NO: 115926 - RNA, 19 nt, Artificial Sequence
  Description of Artificial Sequence: Synthetic oligonucleotide
ggacaugcucgguagcauu

SEQ ID NO: 115927 - RNA, 19 nt, Artificial Sequence
  Description of Artificial Sequence: Synthetic oligonucleotide
gcguggcuuguucuucauc

SEQ ID NO: 115928 - RNA, 19 nt, Artificial Sequence
  Description of Artificial Sequence: Synthetic oligonucleotide
cucacguggccaugcucgu
